United States Patent Application Publication US 2011/0296543 A1 - sequence listing, part 19

SEQ ID NO: 80572 - protein, 307 aa, Unknown
  Obtained from environmental sample
  DOMAIN (1)...(37): Rho termination factor, N-terminal domain
  misc_feature (1)..(307): Xaa is any amino acid
MTDLYALAESQGVGESRSLRRQELVFKILQSQATQNGQMFAEGVLEIMPDGFGFLRSPSNSYLSGPDDIYVSPSQIKRFYLKTGDTVSGQVRPPKDSERYFALLRVEMINYEDPEECKRKINFDDLTPLFPDKKFDLEYNPKETATRIINLMAPIGKGQRGLIVAPPRTGKTVLLKNLANAILANHKEVHLIVLLIDERPEEVTDMQRSVNAEIISSTFDEPADRHVVVAEMAIERAKRLVEHNRDVVILLDSITRLGRAHHTGGAPLRAASSPGAWTRRRSTTPSAFFGRGGTKTTGGSLHIFAPG

SEQ ID NO: 80573 - protein, 60 aa, Unknown
  Obtained from environmental sample
  misc_feature (1)..(60): Xaa is any amino acid
SFKERDRAKAVLLVSFELEEFMGLCDRIAAVPKGQVVGIVDAEGADERQIGAMMGGIGHG

SEQ ID NO: 80574 - protein, 137 aa, Unknown
  Obtained from environmental sample
  misc_feature (1)..(137): Xaa is any amino acid
MTEQLIEIGGRLRGLRSIMGISTEKMAEDMKLGIDEYLAFERGEHDFSFSFLFNAANILGVDIVDIISGETPKLTTCSLVRKGEGFDITRRKAYDYKHLAFTFKNKKAEPFIVTVEPNSDEEVDLHTHEGQELTHLA

SEQ ID NO: 80575 - protein, 318 aa, Unknown
  Obtained from environmental sample
  misc_feature (1)..(318): Xaa is any amino acid
LFRKLGGSDVKLTHGFDLTVRKLEQEPQWFIDKTIQFLDGLVSHYVLDQGKLVVSHAGLCEKYQGRSSGRVRGFCLYGDTTGETDEFGLPVRLNWAEEYRGKALVVYGHIPSAETRSLNNTICIDTGCVFGGKLTAYRYPEGELIEVSAKREYYAPVKPLNYSASITANGCNEPDIADILGKRRVSTRIYREVAISEEASSLTLEIMSRFSANPRWLIYLPPTMSPSGTSKLDSFLEHPLEAFNYYKKHGVSKIICEEKHMGSRAVIVLCRNSETAKTRFGIDDDSLSQNIPGIIYTRTGRHFSRTLKKTAASAINRG

SEQ ID NO: 80576 - protein, 102 aa, Unknown
  Obtained from environmental sample
  misc_feature (1)..(102): Xaa is any amino acid
MKELQYDAVVIGAGAAGMAAALELDKQGFSTALVDREDHLGGILMQCIHNGFGLHEFNEELTGARICGSVYRTARFFGRHGVPGYYRNIPQIWARRGQGAFL

SEQ ID NO: 80577 - protein, 265 aa, Unknown
  Obtained from environmental sample
  DOMAIN (19)...(165): Thiamine pyrophosphate enzyme, C-terminal TPP binding domain
  misc_feature (1)..(265): Xaa is any amino acid
SRLGKNSQRTKPNRRSWHAAQRANVEKLKGILKKLSSPTAKKLLALADYLVHKSVWIMGGDGWAYDIGYGGLDHVLASGENVNILVLDTEVYSNTGGQASKSTNLAAVAQFAASGKRAPKKDLGLIAMSYKNVYVGKVAMGANDVHTIKVFREAEAHNGPSLILAYSPCISHGIKDMRYMLHQQKMAVDSGYWPLLRYIPANIDEGKNPFVLDSKAPSLPVKDYIYTENRYKMLTASNPAAAEELANKLQAFVDARWKQYEDLAK

SEQ ID NO: 80578 - protein, 310 aa, Unknown
  Obtained from environmental sample
  DOMAIN (36)...(307): Glycosyl hydrolases family 18
  misc_feature (1)..(310): Xaa is any amino acid
MVKKISGIALFLISFPMFWVSACAGMGGGNRAAIEPKISCYIRTWPVPQAAREGKSPYWNAGMIKGEYLTDLIISFALLEKDDVSKPYIPELKPLPDSPMFSNIWDEIAALKEKHPRLKVNISAGGYGADGFSDMANDPKLRAAFIVNVCKWLEDHNLDGMDVDWEYPVGPEWGQEIKSRPQDKQNYITLLQELRNAMDQLGEKTGKRYGLSTAVPASNWFPKANDVKAAAKIVDSLKLMAYDYYGGWSKTTGHHANLSNNPHDPAWGGWSTKQALDEYLWAGVPPGKITLGIGFYGRAGVGDMSWGAHT

SEQ ID NO: 80579 - protein, 309 aa, Unknown
  Obtained from environmental sample
  misc_feature (1)..(309): Xaa is any amino acid
GDFEIRSAQFALLNFTGKTGFSLLIIFITVIEILFLQVLKNTIFQRENGPIIRRRYSRLLPPPKIVKETAAVNKTEQRNTAVVPYAPVSDYVAEKEITETVPEIIEETNEEELKEVDALTAEEDFKPNNDDTVIRALEEAEHAAAVHSEQVRKKNAKHGGASYKKYKIPIDILNEYPDGEYWIIDQATRDAAMALKETLEEFKIQAEVTGIRKGPVITMFEILPAPGVKLSRIVGLQDNIALRLAASSVRIVAPIPGKHAVGIEVPNAKRNIVSFRELIEGELQSGKNMEIPLVWEKIFSAILSCRGQG

SEQ ID NO: 80580 - protein, 119 aa, Unknown
  Obtained from environmental sample
  misc_feature (1)..(119): Xaa is any amino acid
MVGIQIAFKDFRMGDTILSARWIGLANFRRFFRYYYFRQLIWNTLSITIYQLLAGFPIPIIFALALNTTYRTGMKKTVQYITYMPYFISTVVMVGLMMQLLNPRIGIINPAIPLFGNSE

SEQ ID NO: 80581 - protein, 147 aa, Unknown
  Obtained from environmental sample
  misc_feature (1)..(147): Xaa is any amino acid
MDTLEQIKKAIKHAMKSAFYKEYYAGINVDDIKSMDDFKKLPFTNKDNLQQAYPLGLQAVPDEKIVRIHSSSGTTGTPVIIPYTKKDVEDWAVMFKRCYETAGCTSLDRIQITPGYGLWTAGIGFQAGAELWARGSCRSLHAGGQRR

SEQ ID NO: 80582 - protein, 66 aa, Unknown
  Obtained from environmental sample
  misc_feature (1)..(66): Xaa is any amino acid
MMAEAQQVDLVITYTEPAVKGDTGGKVLKAAKVDTGLEVQVPLYCNIGDKIKVDTDTGEFVSRSNA

SEQ ID NO: 80583 - protein, 293 aa, Unknown
  Obtained from environmental sample
  misc_feature (1)..(293): Xaa is any amino acid
MDKNRVPKTRPFAGKNNINSLACIALFPCLPVFSLSSYFIEIFPYAGMLALLFICNYYANQYNSFSFNISNLAAYVYTAVKLPVLILDETGGIVLCNTASESFFKNNIDQLKRLKLSDLFYFGNTSLSLQRQKKDAVVFNCDAVCLVEKQECQISLNYVYDKFDEMICTVVIVTDITEKEDLIRQLNESHAKIERFNKELKSEVDRQTESIRNLQTAIVYSMSDLIEKKDGYTGVHTRRVSEYVVILLRELARRGHQFTESDIQRIAESSLLHDMGKIAVPDSILLKNWKIRR

SEQ ID NO: 80584 - protein, 114 aa, Unknown
  Obtained from environmental sample
  DOMAIN (3)...(108): CheB methylesterase
  misc_feature (1)..(114): Xaa is any amino acid
MRVVIPGNTLCFRHNNNPPENGCRPSVDVLFRSAAQAYPADSLVGVILTGMGNDGTPSLPHLKNKNAYLIAQDEESSVVFGMPRAAAATGLLDKVATLTRIPEAILERVNLGRK

SEQ ID NO: 80585 - protein, 141 aa, Unknown
  Obtained from environmental sample
  DOMAIN (11)...(106): Aspartate carbamoyltransferase regulatory chain, allosteric domain
  misc_feature (1)..(141): Xaa is any amino acid
MYAWLYWLRFWGRKMLNIDEIKNGIVIDHIKAGLGIRIYNWLNLDKVPYNVAFVANANSQRCGKKDIIKIDNTISINFDILGLIDPNITVSIIENEHVTKKNKLQLPQKVENVLVCKKSRCINSTEKYLPHIFYLENREQR

SEQ ID NO: 80586 - protein, 293 aa, Unknown
  Obtained from environmental sample
  misc_feature (1)..(293): Xaa is any amino acid
NGGRSQKRPKYRLLPRAMPVGALLDKTPNPQQIVSETTDSETGAIRWKLGNGAEIILKDTKNKNSEISLYAQARGGTMSASDDTAISAYLAAEMLNASGLGPYSRAELTRALLDKQVSFSFWTQNYLRGFQGGAAVKDLQTLFEMLYISFTEPRFDPEAIKAMLDQYRSSMAFQENDPNAVFQREISRTINRNPRFHPLEKEDLEKADNNAALAFIKKCLNPGDYTFVFTGNLDIPLLRSLTETYVASIPASTPFNAWADIDAGRPSDTTREIKKGREDRSTVTELMSHNREK

SEQ ID NO: 80587 - protein, 97 aa, Unknown
  Obtained from environmental sample
  DOMAIN (6)...(96): Diacylglycerol kinase catalytic domain (presumed)
  misc_feature (1)..(97): Xaa is any amino acid
MANFTKLWIILNPTAGKGKAAKQYPKIERFLRENGHNFEILVTKGVGDALKMARDLPIGADDVTVAAGGDGTCNEVVNGLLTRPTQALRFWNLPSGD

SEQ ID NO: 80588 - protein, 134 aa, Unknown
  Obtained from environmental sample
  DOMAIN (11)...(132): Phosphomethylpyrimidine kinase
  misc_feature (1)..(134): Xaa is any amino acid
MKTALSIAGSDCSGGAGIQADLKTFSAHGVFGMTAVTSVVAENTFRVIEYQDIRPDIIDKQIDAVFEDIPPDAVKVGMLSCSQTMLAVAGKLREYRPRNVIIDPVMYAKNGAALWKWPLSARLGRSAIIPGEKP

SEQ ID NO: 80589 - protein, 80 aa, Unknown
  Obtained from environmental sample
  DOMAIN (25)...(57): Ankyrin repeat
  misc_feature (1)..(80): Xaa is any amino acid
IFQKGFRWLTPLDYGFDPNAKTERTGYTPLHNAVAANNIEAARLLLKYGANKNIKAMDGLTPIDKARREEKRALVMLLYR

SEQ ID NO: 80590 - protein, 224 aa, Unknown
  Obtained from environmental sample
  DOMAIN (1)...(176): Nucleotidyl transferase
  misc_feature (1)..(224): Xaa is any amino acid
MTDWTSCVLIQVQESPRGLADAFVLGADFIGADSSALVLGDNVFYGRGFSQTLQNTAKQVNEKGGGAIFGYYVKDPASYGVVEFDAQGKALSIEEKPAKPKSHYAVPGLYFYDNEVVQTAKNIKPSARGEIEITEVNNAYLKKGRLSVEVLGRGMAWLDTGTYDGLLEAANFIETIQKRQGMYVSCIEEIAYNNGWLSKEDLLKLAGEYKTEYGNYLKYIAEDE

SEQ ID NO: 80591 - protein, 75 aa, Unknown
  Obtained from environmental sample
  misc_feature (1)..(75): Xaa is any amino acid
MNEPNNEIDDKEAEANYTEALGIYRKLMETGSDVYLPDVAMVLNNLANRQSINGRFKEAEGNYAEALEIRRKLAE

SEQ ID NO: 80592 - protein, 168 aa, Unknown
  Obtained from environmental sample
  misc_feature (1)..(168): Xaa is any amino acid
MECNLVDANGKIDIPVRSKKCMDVVLLGIHPNTPMGQGISAYTNMLIAAIEKNPCVDIITHPNDPSYPVDYKRLAQAAKANGVALELNNSKILYARAEAQSAVDLVTVCRDEGCLMAVNSDTHAIHELGLDDSVRPILKSAGFPEGLIINRDEKSTMEFIDSRRKNKV

SEQ ID NO: 80593 - protein, 295 aa, Unknown
  Obtained from environmental sample
  misc_feature (1)..(295): Xaa is any amino acid
MLLAEGCTVPFIARYRKEKTGGLDEVQVRNIEHKIASARNLETRRIEIIRGIFEQGKLTQALFDNIRRAATLAELEDIYLPYKRKKKTRGMMALERGLEPLAAAMRELQAAPLLAKAAEFVRQDAENPDLSVLTVEDALQGAMDIIAEAISQDPENRARVKAFYVKDGFIIVKGSGKAGKGDEEARKTSVYQMYWDYKEAISLIKTHRILAINRGEREGALDVTIDVDENTAARMLQQQYTLHNDYHKTAIEDGLKRLLSPAVIREIRGDQSDAADEHGISVFSENLKNLLLQQP

SEQ ID NO: 80594 - protein, 312 aa, Unknown
  Obtained from environmental sample
  DOMAIN (1)...(191): CO dehydrogenase/acetyl-CoA synthase complex beta subunit
  misc_feature (1)..(312): Xaa is any amino acid
AAYEIDETGPNQPLVKGECLDPVKGIWSGINDYVFTNSHKSIDSFCAYSIMDRPMTSCGCFEVICAYVPECNGVMAVNREYLGDTPVGMTFSTLAGSVGGGQQTPGFFGCGKVFLTSRKFLFAEGGYARVVWMPKELKELLRNDLLKRFEEQKLPGFFDQIADETTAVTAEDVRKFMEKINHPALKMEDLSRFAQSEQIRETAAKTDDFKKDAPLGESQSVKKEETGNISASIDIAVITEKIKADVTKEVVTGIIDILSERFLGKAPSAARAEVKTESANIANKRKISAQERISSIKSFALPADKAVNSTYS

SEQ ID NO: 80595 - protein, 312 aa, Unknown
  Obtained from environmental sample
  DOMAIN (1)...(169): Caspase domain
  misc_feature (1)..(312): Xaa is any amino acid
LAPRQIAELTHAYSFFFYAGHGVQSAGMNYLIPIGANIPTENSLRERAFPVQWLMDELNETESLLNIVVLDACRDNQFSWKRGGTRGMAVVGEPPVESIIVYATAANSTASDGDTGRNGLFTTHLLNNLKAPGLEVTEVFRRTMGDVIRASGGQQRPAVYNQFSGLAYLGSQSTPNTPVQPVSPPVQPTPNNMVRIEGGTFQMGRDNLGLISGDSDEKPVHTVTLSGFYMGKYEVTQKEYQAIMGTNPSNFKGDTRPVEKVSWYDALVFCNKLSMAEGLSPAYSINNSTNPSNWGTVPASSNSTWDAVVIVS

SEQ ID NO: 80596 - protein, 135 aa, Unknown
  Obtained from environmental sample
  misc_feature (1)..(135): Xaa is any amino acid
AKQGDDYSSDFIYPERETYVFITGYIGTRSDVTIPALIKGKPVIDFGETFKINRNITSVIIPNSVEFLGTTAFAYCYSLTSVMFEGKIPSSRFRANAFYGDLRDKFYETDASDGTPGTYTTTAPVSDSSVWTKQP

SEQ ID NO: 80597 - protein, 199 aa, Unknown
  Obtained from environmental sample
  DOMAIN (1)...(196): Carbon starvation protein CstA
  misc_feature (1)..(199): Xaa is any amino acid
MNGLLLLLISVITLSLAYLLYGRFLARKWGIDPSRKTPACEMEDGQEYVPTSKAVVFGHEFASIAGAGPINGPIIAAMFGWVPVLLWLLFGSVFFGAMHDFAALYTSVKNKGKSIGYVIECYVGKAGKRLFLIFVWLFSILIARGFCGYCSRNFPGFYALGIRNSINPSVASSSSFFCNRRPSALGSFIRKTKGFGPFQ

SEQ ID NO: 80598 - protein, 326 aa, Unknown
  Obtained from environmental sample
  misc_feature (1)..(326): Xaa is any amino acid
VICHYKNGSGARNFFGAELDSHSADAGVIQGSRPSWTLSTGTAPKKSELEAERFDNGWKFVYDPAAALPEDQLRLDNLKSGEKVRIRGNKRVKVLLSNMGAISTEYMGAAVRSFGINAEALPVATGKTIQIARSHASGKECVPSHLVLGSALQFFWSEKYRKDELYLLFVPITTGPCRTGQYYIFYENLFRDLRLENVVVFILSADNSYNELGPGFAREMWKGLVLSDYLKDIQNALLTVAEDPVSAAVVFEKSWRKVMHTVEHKPKDLWKELENVARDVKKIPLKKKVADCPKVLVVGEIYVRRDDFAVGELPNSRPSSGGEKPR

SEQ ID NO: 80599 - protein, 262 aa, Unknown
  Obtained from environmental sample
  DOMAIN (104)...(174): Sigma-70 factor, region 1.1
  misc_feature (1)..(262): Xaa is any amino acid
MSDNRKLPLGAKSKTVPPGKNKKPETAAKAGQVKKNAPKKTAPEKNTPEKKTEQPRASTENSGEGLVVKAAAMLAAPSAALPAAMPGAETAGNGGAAGTVTISGSAILDPAVLKLVEYAKERKTLSFEEISDYLPEHISDTEKIEPVLALLEANNVQITVDDNSGEDDVDPESGKSSPPGKKRAANSDKEASLVDDPIRMYLREIGRENLLTAEQEIELSRQMEEGENIIKNVIKKSGMVIPEFNRIVEGGVFKKDLRELNL

SEQ ID NO: 80600 - protein, 275 aa, Unknown
  Obtained from environmental sample
  DOMAIN (47)...(275): ABC transporter transmembrane region
  misc_feature (1)..(275): Xaa is any amino acid
MKLKKQTEQQTAKERNRYDVDEYLDEKVSLFNVKRCLGYIAKAQGHLKLALLLSVIENVVGLSGPLFIKHALDVAVPAGDFRLLLLMAACLGGSIVISIGLGTVRNVMVARAGAGIIHDIRYDLFSHLQKLAFSFYDSRPHGKIFVRVVPYVNNVSDALSNGIINFVIEVLNIIFIIFFMFKVSPQLAVIALLGLPPLFIFMFTIKPEQRRAWQRVSNKNSNLNAYIQESIDGIRITQAFDRQKKNLGVMNQLTDERNHEWMRAIHISNTRVVFR

SEQ ID NO: 80601 - protein, 136 aa, Unknown
  Obtained from environmental sample
  misc_feature (1)..(136): Xaa is any amino acid
VVGEDGLLLPNSQIDDLAMDIALTHHENWDGTGYPGWIDPLSGEIQKADDEGNPLGKKGEEIPLGGRIVAVADVFDALSSRRVYKDPWTEDDVLKEMRKLSGTKFDPELVEIFFEILPNIRQTQNHFPDLPEMPEA

SEQ ID NO: 80602 - protein, 309 aa, Unknown
  Obtained from environmental sample
  DOMAIN (8)...(309): Aldehyde dehydrogenase family
  misc_feature (1)..(309): Xaa is any amino acid
MVTDLKSWKKALARIREAQKVFSTFTQAQVDKIFFAAARAASKERIPLAKIAASETGMGVVEDKVIKNHYASEYIYNAYKDEKTCGIIEDDPVSGITRIAEPIGLVAAVIPTTNPTSTAIFKALICLKTRNGIIISPHPRAKYCTCAAAKIVLDAAVEAGAPEGIIGWIDEPSLEMTNMVMKEADIILATGGPGMVKSAYSSGKPAIGVGSGNVPAIIDDSADILLAVNSIIHSKTFDNGMICASEQSVIALQSVYDQVKAEFKRRGCYFLTPEETEKVRNTIIVNGSLNSKIVGQKAASRHHLGGESR

SEQ ID NO: 80603 - protein, 134 aa, Unknown
  Obtained from environmental sample
  misc_feature (1)..(134): Xaa is any amino acid
IGEYAGAIHPETAAAMLKEVNASLWVISIGSGGEVPIDYVDPYTRMRRTGLIDSRYDRDALARISASGGGTWIQAPSADAFAAAFARVDDQEMLVRRSSAVMRKRPFHQPFILAAIALVAVSRFLRRFFLGAWL

SEQ ID NO: 80604 - protein, 188 aa, Unknown
  Obtained from environmental sample
  misc_feature (1)..(188): Xaa is any amino acid
MAMNKGFVFDNPWILSGMVIIIPLALSDLLSPLRKRIRGKLPKPIRIKLFSSRLFFYLFLAFLITALAGPRWGVGQARSEYRRAVDVVIAVDVSKSMLARDGGGGITEGITRLKQGLLIVKEAVAELGGMRFAVAVSRNRGILAVPLTWDDGAVLAFLETIDGFSLTGRGTNLESLIEAGGKGIPPFP

SEQ ID NO: 80605 - protein, 129 aa, Unknown
  Obtained from environmental sample
  misc_feature (1)..(129): Xaa is any amino acid
MGINLYKLFNPIKHYEWGSMNLIPKFTGIENKDMRPCAEMWMGTHLSQSHIQQDGKMISLTQAIGKELPFLFKVLAVEKPLSIHAHPNKTQAQEGFDLENKAGIPIEAPGRNYKDTNHKPEIICALSPF

SEQ ID NO: 80606 - protein, 142 aa, Unknown
  Obtained from environmental sample
  misc_feature (1)..(142): Xaa is any amino acid
PRASDQIGRVGFKELYEIAKSKQNPRKISPLIEAGAVSAAILTENGNVYTGVCIDTASSLGMCAERNAIANMITNGESKIIKLVACIEDKVGMPCGACREYLMQLDKNSGEMEILINIETMETKKLKEFLPMWWANEYFNMV

SEQ ID NO: 80607 - protein, 144 aa, Unknown
  Obtained from environmental sample
  DOMAIN (6)...(78): ATP synthase alpha/beta family, beta-barrel domain
  misc_feature (1)..(144): Xaa is any amino acid
MNEGKIIQVIGPVIDVAFPEWQLPKILNALLVTNPAINDQPDNLILEVAQHLGDNVVRAIAMDISDGLVRGMPVKDTGAPISMPVGKEVLGRVLNVVGHPVDGKGPVNASKFYPIHRPAPDFKSQDTSVRVRKPHQVSAITREK

SEQ ID NO: 80608 - protein, 229 aa, Unknown
  Obtained from environmental sample
  misc_feature (1)..(229): Xaa is any amino acid
MPSNAVTVRAVFETVSTPTYAVTVSSAGTGATGGGSYAVGTTVSINAGTAPSGQTFKNWTTSSSGVTFANANSATTSFTMPSNAVTVRAVFETVSTPTYAVTVSSAGTGATGSGSYAQGATVGISAGTAPSGKKFKNWTSSSNGVTFVDSNSATTTFTMPGNAVSVTAVFETLSYLVTVSSEGTGATGNGNYEVGATVSITAGTAPSGQKFKNGRQQAAVSAESVSGET

SEQ ID NO: 80609 - protein, 63 aa, Unknown
  Obtained from environmental sample
  DOMAIN (2)...(45): Ribosomal protein L19
  misc_feature (1)..(63): Xaa is any amino acid
MAEVFPLHSPRIVKVDVVRPGKVRRAKLYYIREKIGKGAKIKELIVKKGAKGVHVPATAAEQE

SEQ ID NO: 80610 - protein, 50 aa, Unknown
  Obtained from environmental sample
  misc_feature (1)..(50): Xaa is any amino acid
KSLSEIAMKRLRTISDFTELGSGFKIAMKDMEIRGAGNLLEKNSRATFTR

SEQ ID NO: 80611 - protein, 304 aa, Unknown
  Obtained from environmental sample
  DOMAIN (1)...(297): Beta-galactosidase
  misc_feature (1)..(304): Xaa is any amino acid
MKICLATGTAAHPAWMARKYPEVLRVNTDGSKRKFGDRQNSCPNSPIYRLYSTRLARKLAERYGKLDNLIAWHISNEYGGYCYCGNCEKAFRKWLERKYGTIAALNEAWNTAFWGHTYYEWDDIAVPGYLGGEWPVNRSSCQIQSIDFRRFNSDSLLECCLAEAAVLREITPNVLITTNMMGTFWDLDYFKWGKSMDIISWDNYPSPGTPYTRTAMNHALMRGCGGGKPFWLMEQTPSVTNWQPYNSLKRPGRYALVELSGACPRLGHGDVFSNAPSPGCCKKFQGRLLITAAMKHPRIPGNAP

SEQ ID NO: 80612 - protein, 140 aa, Unknown
  Obtained from environmental sample
  misc_feature (1)..(140): Xaa is any amino acid
DDASNPNCEKYGRWYDWNTAKTACPSGWHLPSREEWGALAIAAVGGGNNPGYVWKSASGWDDIGFDGSGIDGKGFSALPGGNRYYDGNFYGVGKSGYWWTATESTSDLAYSWSIYADGDGVGWGDDNKSNGFSVRCVKDN

SEQ ID NO: 80613 - protein, 270 aa, Unknown
  Obtained from environmental sample
  DOMAIN (57)...(264): Domain of unknown function (DUF323)
  misc_feature (1)..(270): Xaa is any amino acid
LTHNPAGAAWLADTLSKDSLNVLISSAWYQNQIAAFAEVTAGESLAASPGEQSDPELPASQIRVGGVLFTGVGGGILVQGEPFPHRVPVSAFMICATEIPAPAYADFLDAVPAWRTDQKETLEQQGLVTNEYLADFEDTVPVGRSWINAGVNSVSWHAAKAYCEWLSGKLPASFAGWEIRLPTEAEWEYAVKSAQKWGGRGIFAPDGGVWEWCADPYSPLPFFAAPPEAIAAAGSPERSLRGGSSFNNTGSSNPGNQSLSALGSLFVFVS

SEQ ID NO: 80614 - protein, 65 aa, Unknown
  Obtained from environmental sample
  DOMAIN (1)...(65): HRDC domain
  misc_feature (1)..(65): Xaa is any amino acid
LRKEIAARERVPAYIVFSDASLRDMCRKKPASLVQFSMVNGVGPAKLEKYGEMFVEAMNKITNNS

SEQ ID NO: 80615 - protein, 72 aa, Unknown
  Obtained from environmental sample
  DOMAIN (20)...(71): Ribosomal protein L17
  misc_feature (1)..(72): Xaa is any amino acid
MKHRSGFNPLERMAAHRTALHRSMVTSLFRHERIRTTKAKALEVRRTAEKMITRAKVDSVHNRRDCFGSPLR

SEQ ID NO: 80616 - protein, 66 aa, Unknown
  Obtained from environmental sample
  DOMAIN (1)...(60): Ribosomal protein L17
  misc_feature (1)..(66): Xaa is any amino acid
LIRFITGGIVSARLYDEGIVAKLFTTIAPRMKERNGGYTRILKLGERLGERASVVIMEFGELQTGY

SEQ ID NO: 80617 - protein, 285 aa, Unknown
  Obtained from environmental sample
  misc_feature (1)..(285): Xaa is any amino acid
MNDFEDAFTCYNDSQKKSFNEIQEIIRNMLKNDRELATLIKDYHQAEEDVEILRDKQNEDDDEAKVMDLQALNTEFDTIRQSVKMTVGRQGNHFPILTSEYFRCGPNDVAFRENIISMLTRIESIDKEAFCRIYKNKINRIVPYVVLLPCYGDTGICWEPFNKHNRATSRGRIFIPMYPKNLYIAVLSAVADLRWQVAKEKASFYWMEEGLTGNYYQWFVAQKLKGDVKDFFIQDYILWMTKEAEGIQKLEKEIRGTFWRHMPFAQEVKEKLKTRRRAECCPSAA

SEQ ID NO: 80618 - protein, 86 aa, Unknown
  Obtained from environmental sample
  misc_feature (1)..(86): Xaa is any amino acid
MSQSTNEPFLSIRSVSNAYVSRPWGIFGKKEKKPVLNNVSFEIAQGEIFGLVGESGCGKTTLAKCILGLIDYKGEILSRPNLSMRN

SEQ ID NO: 80619 - protein, 78 aa, Unknown
  Obtained from environmental sample
  misc_feature (1)..(78): Xaa is any amino acid
MAEHQPQYDGLKSTLPFPRLGRLQLTRVFRGATYNITVKNPNKVSKGVTKLVVDGAETAGNVVPPFDGGIHEVEVVLG

SEQ ID NO: 80620 - protein, 327 aa, Unknown
  Obtained from environmental sample
  DOMAIN (64)...(238): Protein of unknown function DUF115
  misc_feature (1)..(327): Xaa is any amino acid
SAGFLEREVPETDAANIKVIEWRPSMNYYRQAYLNLFSFVVDFIKRMDAGKRTTAAFGKKWVGNFFRNLGNTQKILLYKSMDMPVIITGSGPGLEKVMPAIQKAQEECLVIAASSSVTALSFYGIKADIVISTDGGNWALRHIYPFFRKSDFDTQYGVYNGIENTASFAVNLCAALPSQCAGFPMLIMNDGSFWQSIILHELSLPSVIIPQRGTVTACAVELALALTSGNIYLAGMDLSVKDIRSHARPYAFDHLLFDNASRFMPVYSQSFIRSSQIHEGGSLDIYAAWFKKQLASWPKRIFSMGGSNELLKTRLRLVPLCQSVMAK

SEQ ID NO: 80621 - protein, 123 aa, Unknown
  Obtained from environmental sample
  misc_feature (1)..(123): Xaa is any amino acid
FEVPYPVKTEAAQDAFNSVLARAGAFPRDTTDARIVQEVQTGTASGSGTFGNGKGIIDSPDAVGGYPTYNSLPAPVDTDGDGIPDEWETANGLDPENHLDGALKNLSRAYTNLEVYLYDLTGK

SEQ ID NO: 80622 - protein, 336 aa, Unknown
  Obtained from environmental sample
  DOMAIN (68)...(216): Insulinase (Peptidase family M16)
  misc_feature (1)..(336): Xaa is any amino acid
GAPLTDSAENWAIRFIQAVVAVILMAVFLYVFAALPDSAVWGGLGKPSDPVPVMENLRTGVLPSGLRYFIIENSMPENRAYLTLAVKAGSVLEEDDERGLAHFVEHMAFNGTERFPESKLVSYLRSLGMRFGPEVNAYTYYDQTVYGIEVPVEIDEQKTRRIPETALAVIDDWTRAVTFAPADVDEERPVIMEEYRMRLGAWERLRQKWLPVLFKGSPYANRSPIGLPEIIENAPAERLEGFYKKWYKADNMALILVGDFDGAALEASLTDHFKIDKPAAPTNRPLFDLPPPQKGNVEVLTLTDPELTRALINLYYKRSPQERRNDFRITGANHRL

SEQ ID NO: 80623 - protein, 309 aa, Unknown
  Obtained from environmental sample
  DOMAIN (234)...(307): FliG C-terminal domain
  misc_feature (1)..(309): Xaa is any amino acid
MGKTLLMPGTTTPAGKKKGAKEYTGRQKAAIFLVTIGADISAEIFKYLREDEIETLTFEIARLETIDAEQKDAILQEFQELMMANQFISTGGIDYARELLEKSLGSQKAIDIINRLTSSLQVRPFDFIRRTDPAHLLNFIQQEHPQTIALILAYLEPNKASIILQNLPHEVQSDVARRIATMDRTSPEVLREVERVLEKKLSSLSSEDYTAAGGVESIVEILNLVDRASEKQIIEALEDEDPELAEEIKKRMFVFEDIVMLDDRAIQKVMREVDSQELAKALKSVDSEVQDKISRICPSASADLIIVGK

SEQ ID NO: 80624 - protein, 209 aa, Unknown
  Obtained from environmental sample
  DOMAIN (37)...(195): Glycosyltransferase family 28 C-terminal domain
  misc_feature (1)..(209): Xaa is any amino acid
LPVSKRVMTGLPVRAELFGGDAATGRELCGFEESKPVIMVIGGSLGASAVNEAVRGGLDKLLADFNVCHICGKGNRAPGSRAGYCQFEYVGDELPDLFAMADVVISRAGATTLFELLALCKPALLIPLGTAASRGDQILNAESFEKLGYCKVLSQEGLTGAILAESVKRFFDEDKDKCIDAMKRAVSVKAVDKVLDVIKHSANLISGKP

SEQ ID NO: 80625 - protein, 105 aa, Unknown
  Obtained from environmental sample
  misc_feature (1)..(105): Xaa is any amino acid
MGDTPQNRYMNGQAPSWCPGCSYFTVLSALTEYFEERGFAEDGVCVVSGIGCSSRLPLFLNTHGMHTLHGRPLPAAIGARLARPDIPVIVATGDGDLSANLINGE

SEQ ID NO: 80626 - protein, 147 aa, Unknown
  Obtained from environmental sample
  DOMAIN (1)...(90): Response regulator receiver domain
  misc_feature (1)..(147): Xaa is any amino acid
MCDIAISGEKALQLVDQNGGYHIYFIDWKMPVMDGIQLSREIKARVTENSIVIMISAVEWSAVADEAKAAGVDKFLSKPLFPSTIAEVINECLGVDKKDKEKSLSAEVAGIFAGKRILLVEDVEINREIVQTCLNLKTVVDLSWEPS

SEQ ID NO: 80627 - protein, 111 aa, Unknown
  Obtained from environmental sample
  misc_feature (1)..(111): Xaa is any amino acid
MLLPKIKNVSLTQKTTETDERKETNERKEKKEEGKKEDGGKTQAEKTAVTEQPEKKPQAEKPAAPEQKEPEKKPQAEKPATPAQPSTAPAPASTPPVKPAETSANLIIGGT

SEQ ID NO: 80628 - protein, 336 aa, Unknown
  Obtained from environmental sample
  DOMAIN (147)...(336): Transposase IS66 family
  misc_feature (1)..(336): Xaa is any amino acid
CSPIDQIGTSITAVSTYTNELETYKQRYRQLETINQELQKKVIEIETNHKQLYNEHLILQDKYDLLVYKRFARSAEQLLADEKQPLLFTEEAGQPQAKEETPPELETVTFTRKKGGGRKPLSANLERRPRIIDIAESEKTCACGAVLTRIGEETSEKLVITPPEIYVEQTVRPKYACRQCEGTEDEGNPVVRIAPVEPAVIPKSIASPVLLAVIFTQKFEMRLPYYRQEKQFEQIGAVISRQDMANWQQQAYAFLKLLFDLLKAMIKTGPVLRMDETPVQVIGEEGRTDTQNSCMWLALGGPADKKVAWYEYHPTRAGYNAREISPGVFGLSANGR

SEQ ID NO: 80629 - protein, 73 aa, Unknown
  Obtained from environmental sample
  misc_feature (1)..(73): Xaa is any amino acid
MTEFLNMMTLFLQTSVQMGTHILFAVLGGILCEKIGNLNLGIEGMMLLGASVGFSAALATANPLRPSLGHHRK

SEQ ID NO: 80630 - protein, 278 aa, Unknown
  Obtained from environmental sample
  misc_feature (1)..(278): Xaa is any amino acid
MKYSNTEIIKKQLERIRRDVGAFKGLINKWDVINEVVIMPIFDKYDNAVTRICKELGRVRMVKEVFAAAKEANPGASLLINDFDLSTSYEILIDGCLQAGIPIDTIGLQTHQHQGYMGLERLDVILDRYSHFGLPLHFTENTIVSGHLMPPDIVDLNDYQIPEWPSTPEGEERQARELVEMYERLFSHPFVEAITNWDAKDGYWLGAPSGLLRKDNSPQPRYHALMAKIKGEWWTTKTLKTDEKGKGVFESFRENYKLLLKGQTFPLPFPKKRNRKNL

SEQ ID NO: 80631 - protein, 97 aa, Unknown
  Obtained from environmental sample
  misc_feature (1)..(97): Xaa is any amino acid
MAFVQFSKVSLAFGDRDILKDVSLHLTAGSRACLAGANGSGKSTLMKVLAGELPADSGDRAVQRGTRISYLPQSGIVHRGEKPEGTSGKRRSRTFMN

SEQ ID NO: 80632 - protein, 132 aa, Unknown
  Obtained from environmental sample
  DOMAIN (2)...(129): Triosephosphate isomerase
  misc_feature (1)..(132): Xaa is any amino acid
MMAGSIVCVGETLSERKGGQMDAVIDRQTRGAFAGIGAGDAAKCTIAYEPVWAIGTGETATPQQANEAHIFIRNILTQLYGKDAADGMRIQYGGSMKPDNAKDLLAQSDVDGGLIGGAALKAADFAGIVQPK

SEQ ID NO: 80633 - protein, 285 aa, Unknown
  Obtained from environmental sample
  DOMAIN (115)...(198): Cache domain
  misc_feature (1)..(285): Xaa is any amino acid
MTADIAGSFYTASQGWGPKPLPRIMAGEVPPPRPYLYIPPGVDFSRVRAEAELAGNISEILRQITVVDRGIATTTIAGESGYVIAMDAYTWPWTDYDPKLFQWYKGAKDTGGLYWTDLYEDHRGRGPVITCAVPFYDRSKGNRIFKGVARSTVLLSDFSRIIDSTEAGRSGRLFILNREGIMLYSSEGAAITIGEGGAVTGENFLESRNPRQRSLGRSMILGAAGLTELEMDGIPVYVAYAPIQTLGWSLGVPISMQEVSARAMFIENQIWKITDNPQTGNGQVY

SEQ ID NO: 80634 - protein, 255 aa, Unknown
  Obtained from environmental sample
  misc_feature (1)..(255): Xaa is any amino acid
MTKPPFLPQIHSPDDIKKLTLRELNALAQEIRDYIVSTVSSNGGHLSSNLGIVELTIALHRVFNSPADKIVWDVGHQCYAHKLITGRYDFFSSLRKKGGIAGFPKRSENPHDSFNTGHASTSISAALGLLAADRIQGGNSRAIAVIGDGALTGGMAYEALSHCGHLGLPLIVILNDNKMSISRNVGGLSKYLSRLSMKKKYQTFRRYFDETAKKIPLIGNAFFNLIVRLKRAVKPFFISITFCARPIFHAGENER

SEQ ID NO: 80635 - protein, 273 aa, Unknown
  Obtained from environmental sample
  DOMAIN (2)...(270): Aminotransferase class-V
  misc_feature (1)..(273): Xaa is any amino acid
MSVMEMSHRAKEFDDIIKKAESLFHAVLGIPDTYKVLFLQGGATQQFAMVPMNLLAKKGKADYILTGNFSTAAYKEALLFGKQISVAGSTKEENFKRIPESGELKLDPEADYVHICENNTIFGSKWKYLPDTGNVPLVSDMSSCILSEPIDVTKYGIIYAGAQKNIAPASLTVVIIRKDLIGTPLPGTPTMLNYKVQADNDSMKNTPPCWAIYISKLVLELIQKLGGLGEMKRRNEEKAKLLYDYLDSTDFYKTHIIPKDRFMMNVTFRTGND

SEQ ID NO: 80636 - protein, 142 aa, Unknown
  Obtained from environmental sample
  DOMAIN (2)...(123): Glycosyl transferases group 1
  misc_feature (1)..(142): Xaa is any amino acid
GKLVIAGSGAIKKEFKKYEKSGLVRYIGKVSNEEVIGLFSRAKALLFPGIEDFGIIPVEANAAGCPVIAYRDGGALETVKENVTGVFFNEQTPESLIGAIYNFEKIEVTFNNREVFNNHVQQFSKKTFTETLYKLLEEKKRR

SEQ ID NO: 80637 - protein, 291 aa, Unknown
  Obtained from environmental sample
  DOMAIN (1)...(291): tRNA methyl transferase
  misc_feature (1)..(291): Xaa is any amino acid
MSGGVDSSAAVILMQKAGFECIGATMKLIANGGSKCCSLEDINDAREAAWKLGIPHYVLNYTEDFTNRVIEPFIKSYENGETPNPCIECNRYLKFSLLIRRALELEAEKLVTGHYARIEKSGERLLLKKGVDAHKDQSYVLYMMSQKALSLTHFPLGELTKAQAREIAAEKGLSNADKEESQDICFVDHGNYAGFIENYTGKTYPEGDITDAEGNVLGRHHGLIRYTLGQRRGTGVAVNYPVYVAAQNTAHNTLVIGDDSSLYSSSFNVRPINLIACENLFQSQRLAVKVR

SEQ ID NO: 80638 - protein, 91 aa, Unknown
  Obtained from environmental sample
  misc_feature (1)..(91): Xaa is any amino acid
MKFQDIKSLSQEELRQFLLDNGHKPYRAEQIRTWVFKQKMQTYEGLNVPAELCHLLENSFSIKSLREELKMQSADGTIKWLTKHQTITRSA

SEQ ID NO: 80639 - protein, 299 aa, Unknown
  Obtained from environmental sample
  misc_feature (1)..(299): Xaa is any amino acid
MDYEDEFAGAIAEADICSSDTYLSLHWGWPHDIAEPGGKSHKRTPNKNILEGLCFDFERFTARSGKSKPFVLSEINADGDVNGPYEQAEQLVEFYRLVPKKAPDITGITFYQFRDRGRLGLEIEDSNNPDVGIAQPVLKDYKKIMTNEYFSPKMERGKKVVFPAKLRWGSSEDSDGITIPIDFKDNPVFCEVMFTNPDDAEKLNAMMEINGKWFYKKPGVKSIDLSPAFFKNKLNGKQRLEFKLFAPPASGTNDPGQEEDWRINYYHTLNAAPEFRIRYEPVIKIDLSYFSCLHSPQHS

SEQ ID NO: 80640 - protein, 322 aa, Unknown
  Obtained from environmental sample
  DOMAIN (3)...(320): CO dehydrogenase/acetyl-CoA synthase delta subunit
  misc_feature (1)..(322): Xaa is any amino acid
FRQGQIGREIFCFKPLYGVSVNAENVDAKLNDIKKIDYERINERMYIEAINVEYTGDAGVFLDAVRKVLAAKRTLILDVKDAGAAQGALEIAKDSKPLLNAANESNYREMNELAVKYGVTLGVSGGTLDSLHDTVAALEAAGNKNLVIDIGSTGAAGAVSVKDAFARAVQIRRAALKDGDRTFGYPSLVNIAKIAPNNHEMQTALASLFTVKYGSIIIMDGINYAQALPLFGLRQNIYTDPHRPMRIEPGVYPLNKADENSVCATTVDFALTYFIVSGELERSGVPVNLPDSDAGGYSVLTAWAAGTIFRFFHRESHKRKQY

SEQ ID NO: 80641 - protein, 279 aa, Unknown
  Obtained from environmental sample
  DOMAIN (1)...(102): Quinolinate phosphoribosyl transferase, N-terminal domain
  misc_feature (1)..(279): Xaa is any amino acid
EGDITTSAIFDADDTGEALIRCKQKGVLSGITLVAPLFGLVDKYMTSHISSVSGAAPATAVETFCSDGDPVELGKAVCRVKGSVRSILAGERTILNLIQRLSGIATLTAAMVRELSNSGAKTRLLDTRKTTPGMRALEKAAVRHGGGVNHRAGLYDMILIKDTHVRRAGGVTAALAKALAWRGDSAVPKIEVEVQSIEEFVQALRLKPDRIMLDNMSPKEIDICVDERDASGLKIELEASGNITLGILSAIAATNVDYISCGAITHSAPALDFHLAMLS

SEQ ID NO: 80642 - protein, 296 aa, Unknown
  Obtained from environmental sample
  DOMAIN (15)...(295): RNA polymerase Rpb1, domain 5
  misc_feature (1)..(296): Xaa is any amino acid
LGGRQMESISLLQEGLTVLEYFTSTHGARKGLADTALKTADSGYLTRKLVDVAQDVIINEDDCNTMDYIEVAAIVNSDGTIRARLRDRIMGRVVAEDVMDPYSKKTIAAMGTLITEELAFTIETSGIQSVKIRSVLTCESKRGVCAKCYGLNLSTGRLVDLGEAVGTVAAQSIGEPGTQLTMRTFHVGGAASRASEKNLHEAQVKGVVKLDGISSVKNRDGSLVALSRKGNILVLDHDGNERERYKIAPGATIKVKDGEQVEPKTPLAEWDPYNDCQINEQAGVAYFEDLWRASAT

SEQ ID NO: 80643 - protein, 293 aa, Unknown
  Obtained from environmental sample
  DOMAIN (162)...(280): Response regulator receiver domain
  misc_feature (1)..(293): Xaa is any amino acid
LIAERHEVDDAIPNTLVADDQRLSQVIANLLSNAVKFTPEDGSITLTASFIGEENGVCTIQVAVSDTGIGISEEQQKKLFTSFQQAESNTTRKYGGTGLGLAISKSIVEMMGGKIEIKSELGKGSVFTFTIQAQKGSYIEDTPDANAEDKGKADITGIFAGSRILLVEDVELNREIVKSLLEPTQISIDCAENGAEAVRIFSETPDKYALIFMDVQMPEMDGYEATRRIRAMDIPKAQTIPIIAMTANVFREDIEKCEAAGMDSHLGKPLDFEELLNNCAGICLKFDVQPPYL

SEQ ID NO: 80644 - protein, 206 aa, Unknown
  Obtained from environmental sample
  misc_feature (1)..(206): Xaa is any amino acid
MATGKYLRVWFSHNRLIGSHVVCVTDNEIRLLKESGVKVANTPLCEMKIADGIAPIPEMARRGVTVGLGTDGPLWNNSSDIFREMKAMALLHTISKGIRSLSKKDILNMATTGGAAIFGKEKEFGMIKEGMKADMILIDPEKPRMQPLLLGKNENVTSAVVFNATGADVTDVFVNGKRLVKDGKITGVDVQTIIEKVKLAAEKIRN

SEQ ID NO: 80645 - protein, 308 aa, Unknown
  Obtained from environmental sample
  misc_feature (1)..(308): Xaa is any amino acid
MTDRPSLIKLSIQFALALQDFSAKNKATKLTWDSLYIDAQLLSIPTRSVRLDELRIHGLHSQLILQNESKELSAIAQFATDAFLKRMNVPLYIERFIIQNGSFEALDKRGEKEKRFGIAPISFSLEKFSTKYSAESGNNYNLQFTSLTGGFFRWNGNLQWDPFLSQGELEIRDLDIIQLRDFYQELLPFNLQSGKLDLRTNYRIVEEPEIGFVLENAKLSLNRPSLTVDSSQFDMRAASVHTDSLQISTLNRTLFAGNVIIDSANVRFAFDSLPEQPNPELFKVARLNKNAEDSVDANASVFKVFSQK

SEQ ID NO: 80646 - protein, 89 aa, Unknown
  Obtained from environmental sample
  misc_feature (1)..(89): Xaa is any amino acid
METIEKLRKNGISLEYKDIILLCKKYHINELSIFGSSIRDDFNQNSDVDILVSFGNKAEISLFDIMDLENEFHNYEKRRDILAITRGES

SEQ ID NO: 80647 - protein, 152 aa, Unknown
  Obtained from environmental sample
  misc_feature (1)..(152): Xaa is any amino acid
KISPGISRLAHEHRFNEYGLGIDVIAVKLQNVTPPSGVQEAFEDVNKAMQDLERLINEGQQVYNEEIPKARGEAEKTIQVAQGYATERVNRANGDVARFNSVYEEYRRAPEVTRQRLYYEMIEEVFKNEKDMTIIDRNLKNFLPLMNMGGNR

SEQ ID NO: 80648 - protein, 304 aa, Unknown
  Obtained from environmental sample
  DOMAIN (181)...(252): HAMP domain
  misc_feature (1)..(304): Xaa is any amino acid
IFPGFAVADEFCLDNGPDAGRQKVDHPTPFKVNGKDTFIVRMGVPITKASSNEVVGHLAILVDISPMQTAVEKTLNSYKEISQMSIYSGNGCIMGNLNADRVGKMLIEVERLYGVYQKDANQAVLDGKPFSCSSYSNSLKSNVRIELMPFQIGDSDNTWSVMIASTESFIMKEVNSMRNFIIILAAVSLIGSVVIIYFALNTITKPIVRVADTLKDISEGEGDLTRTIAVSSKDEIGDLALYFNKTLKKIKDLVLNIKKEAGILSEIGNDLSSNMTETAAAVNEMASNIQNIQNPRYKPERQRY

SEQ ID NO: 80649 - protein, 313 aa, Unknown
  Obtained from environmental sample
  DOMAIN (25)...(53): SecD/SecF GG Motif
  misc_feature (1)..(313): Xaa is any amino acid
IDFVGQRYKAYACPVLFLLGAVIAMLVGGGPRMGIDFVGGVIVQVQFQRPVQDEALKNSLDVKHLPGLSTQRFGEGGRDYLLRFSMTETPAQELREGVLEVLKTAFPDNAAEVARLEMVGPKVGADLAQKAMEALYYAVLLIAVYISGRFEQRWLAAAIMTAALWGGVYVVSLFGVGTGGLVLAALGITLAVSWRLKLNFAFGAVVGLLHDVFITLGILSVLGKEIDLNVVAALLTLVGYSLNDTIIVYDRIRENLRKDSPLDLGDVINTSVNQTLSRTLLTGGTTFVAVLALFLLGGGVIHVSADLSCGGPS

SEQ ID NO: 80650 - protein, 323 aa, Unknown
  Obtained from environmental sample
  DOMAIN (9)...(37): The GLUG motif
  misc_feature (1)..(323): Xaa is any amino acid
GFPPGYRRRGTAIGGIAGTNSGSGIYIKNCYNTGTITATAAANTRAGGIAGDNLTSAVVEYCYNTGNVTGPASVGGIAGTNDTGCTVQYCVSLGARVTGTGTSSIGISRVSGTYGSGSTLINNKARADMKIGLSGAEATATGASNNGNGADVNLGTAQNSVFSSFFTTTIWTLGSTLTVGGNLPILQMNTQSPAPTLPAAYSAPGAPDGTASNPFLVANEADLRKVGTETTTGGWTVSAHYRQTADISMTDGNFTRIGNSTNKFTGTYDGQNHTITGLSMIMSNAVLSIFGNIGETGIVKNMTVYRHGNPKPEMKNTRRLCGD

SEQ ID NO: 80651 - protein, 322 aa, Unknown
  Obtained from environmental sample
  misc_feature (1)..(322): Xaa is any amino acid
LYLELHRGRYTTQGAFKRYSRKLEFALRTREFLSSLAYWEKGTPYPHERLLSNWKLLLTNQFHDIIPGSSIGRVYDEAKETYKSIEADLADLSKATLQELSGSKDAAVSGGIRLYNDLGWEREDPVSFPAELIKEASALKVCGDNSETIYPVQCYINLDGKETAVSCPRIPPLGWITLSAAELKHDSPTFTFKGNSLKTPFYKAGFDEAGRIKSLFDILRDRELVAPGGVLNGFISAQDVPILWEAWDIDSDWTRYITGETRLLSTEVAASGPVCFRIRRKYKIGEASLLSQDTVFYATHPRIDFETPGRLAGKATATQSTI

SEQ ID NO: 80652 - protein, 233 aa, Unknown
  Obtained from environmental sample
  DOMAIN (1)...(187): Phosphoenolpyruvate carboxykinase
  misc_feature (1)..(233): Xaa is any amino acid
LVNQSKDWIHGVFMGSITGSEITAAALDLKAGDVRRDPFAMLPFCGYHMGDYFSHWLKLGKNAKDKGDGDKLPKIFFVNWFRKNAEGKFMWPGYGENSRVLAWIFDRCDGIDNYIETPIGNLPKPGSIEPPAGVSPEAMAELIKIDVEGWKKEISDVRGKHYAKFGDKLPKDLLTQLDIMEKGVNGLFYTTNHTNCVPSVRSRTFSTYLGRCRGWSWLGRGKIFFTKPCHIMN

SEQ ID NO: 80653 - protein, 223 aa, Unknown
  Obtained from environmental sample
  misc_feature (1)..(223): Xaa is any amino acid
MYAPWYGYMAGGAEEENWNYTNDRIDELTKKGYFGQHLTEDDYWKGNLEAAELGLYDAARIFLVTQYDNFIVNKARFNNRFAYGLGEGPNHWSIRTADVKPDAEGQFKGQKVLRVVQYSARGSLFMNAWDPVGTEGFNDVYASGIMAACCDPSTFEAPNSGAPTPFSSKYDASSLRTAPQINENGEMSGTIPVPANGVKWSPSNHKWESGGNALPAASTGTGK

SEQ ID NO: 80654 - protein, 334 aa, Unknown
  Obtained from environmental sample
  DOMAIN (179)...(333): RNB-like protein
  misc_feature (1)..(334): Xaa is any amino acid
WFAKYRFGTRNWELLLADDASCDGAVSLKEFAELAFGEYSPASAWASYGLLLDGLYFTGTITAIRPRKQSEVEADKKKREEKIAANNEKELFFERMRKRSPAQEDRRFIQDIEALALGKSAKSRTMKEIGLGETPEEAHALLLECGFWNEQNNPHPARFGVVLQPAEHKPEAPPPEERCDLTRLAAYAIDSPWSSDPDDAISIELEEGRQSLYVHVADPGSSIRMDSPVEKEARDRGATLYIPEGIIRMLADDSLPLFALGLAETSPALTFKMTLNNTGEIEKTEIFPSTVKVKRLTYKEADEYLNNTHNETSEAADLRSLYALAERTPSGALR

SEQ ID NO: 80655 - protein, 136 aa, Unknown
  Obtained from environmental sample
  DOMAIN (34)...(136): Imidazoleglycerol-phosphate dehydratase
  misc_feature (1)..(136): Xaa is any amino acid
MDRIAEIERKTKETEIFIKLNIDGRGVIKFDYPLGFMSHMLNTFARHGLFDIEIKAKGDLEVDQHHLVEDTGIVLGQCFTKALGDKCGIVRSGSCLFPMDECLARAAVDLGGRPFLYFDGQLSGSPSFRWKMVGNI

SEQ ID NO: 80656 - protein, 246 aa, Unknown
  Obtained from environmental sample
  DOMAIN (2)...(135): 3'-5' exonuclease
  misc_feature (1)..(246): Xaa is any amino acid
VPVAPHGIGDVLSEFNNPEKVRSLLSPLFADNGMTIAAHNAKFDYKVSRGWGIDRWKCKIWDTMTAAWVVDPERNAYSLDSLVAYTFDCTPLKYMDIVPKGMTFNVVSLETATRYSGEDADFCIRLKHHLEPILKKTESLALFENLEMPLLPILAEMEGEGIKIEPKALTSYGKELAIDLEKIQSDTWKIVGHEFNLASTKQLQEVLYVERKLTPGKKTQTGYSTDAAALEELARERSVPALILRH

SEQ ID NO: 80657 - protein, 92 aa, Unknown
  Obtained from environmental sample
  misc_feature (1)..(92): Xaa is any amino acid
VPNDAAVLLFSTRQKAGYVNQIQYGDVEAVAGSNKPRGLVRGVYVEAARYPARLVGDYADGFAVDPNEASDDIQSVMVRYFSAESVMGKKKK

SEQ ID NO: 80658 - protein, 206 aa, Unknown
  Obtained from environmental sample
  misc_feature (1)..(206): Xaa is any amino acid
MYLFTIAFVFGPLVYMAALSFMQRRGVWDVEAIFTLRNYRLIFEPVYLETFRQSVKLALVSTLTVTLTGYPFGYFMARLSPLWRGRVMLLLIIPFWTSALMRLYGWIIVFRSNGVLDGLLMRLGLRHEPLRLLYSYPAVVTGMIYALLPFMIYSVYASAEKMDRSLVEAARILGAGRFRAFLTITLPLTMPGFSPALYISVDIGDK

SEQ ID NO: 80659 - protein, 323 aa, Unknown
  Obtained from environmental sample
  DOMAIN (1)...(250): Aldehyde oxidase and xanthine dehydrogenase, molybdopterin binding domain
  misc_feature (1)..(323): Xaa is any amino acid
SQVPGAKKRAAANSTATVKRGVGVPVGVYGCGLDGPDSAEVWVELNPDGGVTVGTCWEDHGQAADAGVLGTAHESLRPLNIPMDKIRLVMNDTSKAPNAGPAGGSRSQVVVGNAIRVGCETLMEAMRKPGGGFYDYKGLKDAGREPRQKGVWTAPAAACDDKGKGTPFCCYMYGLFMAEVAVELATGKTTVEKMTMVADIGKINNRVIVDGQIYGGLAQGVGLALSEDYEDIKKHSTITGAGIPHIEDIPDEMELIYVETPRPDGPHGASGVGEIPLCAPHPAIINAIAAACGARIRHLPAYPDKVRRLEEEHPKLAIIRGPT

SEQ ID NO: 80660 - protein, 322 aa, Unknown
  Obtained from environmental sample
  DOMAIN (84)...(153): HAMP domain
  misc_feature (1)..(322): Xaa is any amino acid
IRGYRDGRAIPNGDLSASLSTDRMSDVSGEDWYKTVSSGNGFAWLNIDSRQYYAGYKNENGNTVVALVPEHDYHRERNLLLRDSIMFLLITVVIITFVIYLVVGGLLRRVNNLVKGIGKIAGGNLDARIEGHYNDEFDIIKDAVNSMAADIKTHMEEKLQTERKLAESRISIMLSQIQPHFLYNALAVISRLCDKDPAKAKKATINFSTYLRANMNLLERTEPIPFENELNHTISFLNLEKAMFGEALNIIYDVQEKYFRLPALTMQPIVENAVQHGIGKQEGGGTVTISTREEEKYYLVIVQMTARGLNRGKLQMMDSSIS

SEQ ID NO: 80661 - protein, 340 aa, Unknown
  Obtained from environmental sample
  DOMAIN (193)...(340): S-adenosyl-L-homocysteine hydrolase, NAD binding domain
  misc_feature (1)..(340): Xaa is any amino acid
MAIRDEFAGKQPLKGAKIAGSLHMTIQTAVLIETLVALGAQVRWASCNIFSTQDHAAAAIAQDGVPVFAFKGESLEEYWGFTHKIFDFDGGANMILDDGGDATLLLHLGAKAEKDIHVLDNPGSEEATVLYASIKNRLKSDPSWYSRQLSGIKGITEETTTGVHRLYEMNKNGELKVPAINVNDSVTKSKFDNLYGCRESLVDGIKRATDVMVAGKIAVVCGYGDVGKGCAQALSSLCAQVWVTEIDPICALQAAMEGYRVVTMEEAAPLADIFVTATGKLHVILFEHMKEMKQQAIVCNIGHFDSEIDVASPRKHCQVEEIKPQLTTWSSPDAAHHPAG

SEQ ID NO: 80662 - protein, 297 aa, Unknown
  Obtained from environmental sample
  DOMAIN (197)...(268): HAMP domain
  misc_feature (1)..(297): Xaa is any amino acid
VVREPAGFAGWQDQLKRVTAQGLISTTGREPAFQELADVFWADVAGRGKVPIVAVIYTFTNSKGQIVGLVGINFISTVQQIVDDLKKEVYDGAGIAAVYSDNATAIAHWDKDRVAVNLKNNNKDKTLFGDDINRLADVILHGKIEILDKYSQVMKTEVYYIFQPILVSGFETTPWSLQLGIPESEIKKPIHALISYSIIFAVILLVVAAVITLLVAAGIVKPIIRVTATLKDISEGEGDLTRTVAISSKDEVRDLATYFNKTLEKIKVWFFILKAGARVVRYRQRSVQQHDQRPRCD

SEQ ID NO: 80663 - protein, 297 aa, Unknown
  Obtained from environmental sample
  DOMAIN (1)...(149): MatE
  misc_feature (1)..(297): Xaa is any amino acid
MTDAFVVGRWLEINGLAAVGATYSIIGCVLSFIYGLTDGFAVITAQRVGAGDAEGIRRSVAAGLTLCFFISIIITALLLPFSRTLLLLTRTPADVIDDAYGYILITFSGSFIGIFSNMLAGIVRAGGDSLSSTIFFVVGIISNIFLDILFVTVFHWGVPGAAAASVFSQFISCVLILFFMFRHFGRFLPQRQDWLAGRRDFGVHLSLGMAMGLQQSIVEAGNVLVQAAINGFGALTVAAVSAAQRVRGLNMMPCFALSRAMTTYTAQNYGAGKMDRVSKGFPGLPISWASRPICHDC

SEQ ID NO: 80664 - protein, 314 aa, Unknown
  Obtained from environmental sample
  DOMAIN (1)...(314): tRNA synthetases class II (A)
  misc_feature (1)..(314): Xaa is any amino acid
VDTQKCIRTGDIDSVGDTSHLTFFEMLGNWSLGDYFKDGAIRMSFEFLTSPEWLGIPMEKIGVTVFAGDENAPRDDESAEVWRSLGFPENRISYRPKEDNWWGPAGTTGPCGPDSEMFYDIGKEPCGPECGPGCSCGKWLEIWNDVFMQYNKNSEGQYIPLSRKCVDTGMGIERTVTILNGKSSVYDTEIFAPIIAAVEAATGYKYGTDGEKDRSLRIICDHTRASTFVLGDPKAVSPSNVGAGYVLRRLIRRAVRHGRKLAEKEIIPLLSPIAAVIIEKFKGPYPELMENKGRITEELDNEEKKSSRDMPGEN

SEQ ID NO: 80665 - protein, 284 aa, Unknown
  Obtained from environmental sample
  misc_feature (1)..(284): Xaa is any amino acid
MRKIFPGPSAILCRETHINAIKEGQRLGAPYTYACPLGFIFWTSAIFFNGRFAGSFLGGGLPKEESQRIKALTELMFICAQSISIGNDGINKDAKRRILHYSLLSEKIEEIKTQYSQSNLHPEYPMDKERMFLDALSGGDNESAKQILNEILALLIFANPNQFKYIQYRALELAVLISRIGSNFSFTMNAMLENGNLYTKLIQETKNAEELAGAMYRIVDDMAEQIHGLQGIQHVSVLKKAEDFILENLSRKISLKEISKAAGFSSPYFSTLLRKRLGRSDHGP

SEQ ID NO: 80666 - protein, 88 aa, Unknown
  Obtained from environmental sample
  misc_feature (1)..(88): Xaa is any amino acid
MAATNDENQAQDAGGQNLKHDESYKSVLSNAVNFLHFLKKYIAAPWTADISADDLATVNKSFVTPEYSEIDSDLIYRRRELGQSVLVN

SEQ ID NO: 80667 - protein, 295 aa, Unknown
  Obtained from environmental sample
  misc_feature (1)..(295): Xaa is any amino acid
MGTINLTKDWQRLNIPAHVRDILSSNRGLLFPANRAQLLELAMGGTGNKTYDVCYDVPGKGSVVEATVVKCKNGLSVNYSEPYMRRRDPDCTVVGDSKPSDKERFSERFGRDFDKVRGDTFDWLKNQELTALAFTLGESNHGALMIAPRNAGFFVGGLADLQGMLNPLEVPENFQVACVMYVAPPFRHTHFDGKQVVVHNRLDEVHEIFSYNLYPGPSAKKGVYGALLTIGEQEKWLTLHARTVQVVTPYDNITTIMHEGASGSGKSEMLELVHREWDGPLLLGRPRRQAQDDHF

SEQ ID NO: 80668 - protein, 232 aa, Unknown
  Obtained from environmental sample
  DOMAIN (1)...(140): SPFH domain / Band 7 family
  misc_feature (1)..(232): Xaa is any amino acid
MSFPVSQYASQTSESTMLTGDLNIVDVEWIIQYLVSDPKAWTFNVNDRVRTIRDVSRSVINMLVGDRAIMDIMGLERSAIEAEGIAIMNETFRGYNLGINVIAVKLQNVTPPSGVQQAFEDVNKAMQDKERLINEGQQVYNEEIPKTKGEAERLIQVAQGYATERVNRANGDVARFNAVYREYIRSPEVTRQRLYYEMIEEVFKDERSTALIDRGLRNFLPMMNLNTRTEAD

SEQ ID NO: 80669 - protein, 241 aa, Unknown
  Obtained from environmental sample
  DOMAIN (9)...(240): Chorismate synthase
  misc_feature (1)..(241): Xaa is any amino acid
MSSTFGNYLRVTTFGESHGRSVGAVVDGLPADLPLTEDCVQTQLDRRRPGQSAITTQRGEVDAVRILSGVEDGRTLGTPIALVVANSDRRPGDYDSIKGIPRPSHADYAYKAKYGVCASSGGGRASARETVGRVAAGAVAELFLRERFGVEIVAFVSSVGTVNASTQIDLNTLTRDMVDAYPVRCPVPESAKAMEAAILNAMEDGDSIGGTVTCVCRNVPAGWGEPVFKNWRQCLPWPCFS

SEQ ID NO: 80670 - protein, 84 aa, Unknown
  Obtained from environmental sample
  misc_feature (1)..(84): Xaa is any amino acid
MKKVVVTGMGLVSPIGKSVEEFCESLKAGKSGIGPITAFDTTGFDVTIAGEVKDFDPSVGWTKKKPAKWPAYPMAARPICHALT

SEQ ID NO: 80671 - protein, 168 aa, Unknown
  Obtained from environmental sample
  misc_feature (1)..(168): Xaa is any amino acid
VRRLLKLGKASTAGANFTTAKTGITLVDDYAHNPAKIAASIRSCQDFAKGKVFAWFQPHGFGPTKFLKDDLVKEISEVLRASDEMWFSSIYYAGGTADRSFDSDILSNALKEKGCNANFISNREECLKKIISKAKSGDVILLMGARDPSLSEFSKGVHQRIRSGIAQL

SEQ ID NO: 80672 - protein, 242 aa, Unknown
  Obtained from environmental sample
  DOMAIN (16)...(147): Integral membrane protein DUF6
  misc_feature (1)..(242): Xaa is any amino acid
MSERRKALAAIIACVLFWGFSFISIKITVAVFPPMSLGMLRFAIALIFLYFIKRKLAPHEKLRVKDIPLLVGASSSGVTFYFFCENNGVALVTASEASIAIGSIPVLTMLADWLSAKITRNSGFPRLGIRQWTGAFISIAGVWLVAGVSFALSGSILGYIYMAGSALCWVAYSLFTRPLFTRCSRIYIVFWQSLAGFIGFIPFSILEFGSWGRPDAPVILHLIFLGPVLFRAGSRDQSGGEI

SEQ ID NO: 80673 - protein, 51 aa, Unknown
  Obtained from environmental sample
  misc_feature (1)..(51): Xaa is any amino acid
VGYEWGDISEAMPRYDVNKLATGWNTGADGENFFFVPNPALGLWALRDTFN

SEQ ID NO: 80674 - protein, 183 aa, Unknown
  Obtained from environmental sample
  misc_feature (1)..(183): Xaa is any amino acid
IFPGIATSIWAFSRASGKAESKKIYRDVFADAPELTELTETIRKKYLQENGSLVKEMGKHLLKAHELCTAIGVRFEDYVDRVLRIPRTAANMAIKMFSYDLNPQTGADNMRFLAGIRDAGERKAAETALLKNKSPDTVKTAIRQKTKNEDPTLMLEREKNRLERTIETLSKRLEEVKKELGQK

SEQ ID NO: 80675 - protein, 203 aa, Unknown
  Obtained from environmental sample
  DOMAIN (19)...(73): KH domain
  misc_feature (1)..(203): Xaa is any amino acid
KKGLWRGLAELAIIRHPQRITITIHTARPGVIIGIKGANIEKITSELQKHVSKKVQIKIKEVRNADNNAQIIAQNVARQLLARSSFRRTMKQAITNAIKKGNAQGVKIRLSGRLGGAEMSRTEEAKEGRIPLHTLRADIDFGFAEAHTTFGSIGVKVWVYNGMKYGREQKEDAGALLRKRRERVPAHRNEGQRTDGSRTEGRF

SEQ ID NO: 80676 - protein, 263 aa, Unknown
  Obtained from environmental sample
  misc_feature (1)..(263): Xaa is any amino acid
MYEQMERDLIALLSVNEVRRIGDSLEKVEKYSKDRFYNRAYAALQELYYRVPKASLNNSASAALEAVGKLKDYPEAEYWIGEVYRVEGELPLALSQFRKAYTMRDLFENPGFGIELQYKIAGILLTRQEYLEMIKVLDSVIGEYDALWINAQQGDALITQNVSSENKTTIPYAQASASFASQAMSRTMETEGIDRFLEMYRYNNSLVEPAHRRLGFFYAVTGRPSAQQHLLFAFLIQNTGIIEEIMRHKFDFTLDDDSGRSAP

SEQ ID NO: 80677 - protein, 356 aa, Unknown
  Obtained from environmental sample
  DOMAIN (199)...(303): Methyltransferase domain
  misc_feature (1)..(356): Xaa is any amino acid
VFRKCPFQDVGKKAGFGRFRPDFSATLFMLPCRGRYLYAGKSFCAAWYRGEWESGLLDDRFPEWGDSCYVNLTISGKIRLQDLLRHIYVLIPVFDHRKHYWMNDEEVDKLLAHGSGWLENHPEKNFITRRYFTRLGHFTKQALERLNRLDNGEGGAESPAMEGELETESPVSVKIPRLNDQRLSAVLNELKASGAKTVLDMGCGEGHLLRLLMKEKDFTAIAGTDVSAVILNRTADNLKLDRMAEEGKKRVTLFQSSLCYRDKRFKNYDAAAIVEVIEHLDENRLPALEAVVFADAVPATVIITTPNFDYNVNYEGIMANHFRHSDHRFEWNRVQFRAGPIPCRPPRPILTMGGGG

SEQ ID NO: 80678 - protein, 140 aa, Unknown
  Obtained from environmental sample
  DOMAIN (4)...(127): NusA N-terminal domain
  misc_feature (1)..(140): Xaa is any amino acid
VATDMSEAIRQLMQDSHMSEELILQTIQETLKAAYKRRFGNADNAIVQFNDDNTEVTIKAKKRIVDSENFYDPVSEIELDEAKKLDPDAEINDELLIEVDPKDFDRGSVQSAKQTAHQSIREIKKDSLYAEFRDKSGEIS

SEQ ID NO: 80679 - protein, 310 aa, Unknown
  Obtained from environmental sample
  misc_feature (1)..(310): Xaa is any amino acid
SSAEKANRRPAKEPPKTAPEHGERRKVIVVKKKLSTATPPPAQGAPSVPVKRVLPKAVPARSQEGDDFEASSAFAGANAVTKGKTESKEGRAHTKEKTTTPGNEAGKEGTVSDSPAFTIAQRPVAAAGRVGGKYVGPRPAHEENVRGTNQGQRPSGGTGRPGTRPAGRSPGENRSGGLGQNRPYTARPQGSRPQGGTHQGGFGQQRPSGGPQRGLTRPGGTRPGGFTPSQGTPPPATEGPSKKAFKAKKPVYTRKEKELEMEEKLLQTKKKITQVANPVPKTIEIMEVISVSELARKMNLRLSADLSWGT

SEQ ID NO: 80680 - protein, 67 aa, Unknown
  Obtained from environmental sample
  misc_feature (1)..(67): Xaa is any amino acid
DPFAAYICAGLVGVYSFHFLINVGMTMGIMPITGIPLLFMSYGGSSLLSAMTGIGLALSIYVRRYSH

SEQ ID NO: 80681 - protein, 191 aa, Unknown
  Obtained from environmental sample
  misc_feature (1)..(191): Xaa is any amino acid
MKQSGGVIKNFFNKIKTNFKPSVFADNAVVLIFVIITLTAIPISKIPIPEIIQEILSRIGRNCFLVFSLLLPIMAGMGINFGMVLGAMAGQIGLIFAVDWNIVGVPGLIFASLIGVPIAACLGWLAGQVLNRARGREMVTGYVLGFFMDGFYQFIVLYLMGRPSIWAGNIAGKWAALIQSIARPNLSLGGP

SEQ ID NO: 80682 - protein, 310 aa, Unknown
  Obtained from environmental sample
  DOMAIN (75)...(309): RmuC family
  misc_feature (1)..(310): Xaa is any amino acid
MSLFTVIVFVAFALLFLLVILILIKLYSEKTADLSPQLIDLKNELNELKTKQLESQQSALAQQQQLFINSQNQLGSQLSQMMNRMDQNYNVSQSNIVKQLDNSNRVINDIHTKLGSLEQTARNIQDIGNNISTLTDLLQPPKLRGNLGEYLLEDLLRQIFPAANYKTKYSFSNGTQVDAVIKLADGIVPVDSKFPLESFQRLIEADNDEDKKRFKREFISTVKKRIDEIQTKYINPAENTFDFALMYIPAENVFYEIIINDSLTNKEYELLNTRWKNTLYLFRPQFLRLSHGSGFGFAGASIEQEAKSYA

SEQ ID NO: 80683 - protein, 288 aa, Unknown
  Obtained from environmental sample
  DOMAIN (7)...(288): Beta-lactamase
  misc_feature (1)..(288): Xaa is any amino acid
MSIDTELTGYLNAAIRRQAFPGCALAWVSGGESSIIALGRRTYDDGDFPISENTLYDCASITKAIPVSNLALWLIDRGKLRIDDRLIDFVPEYTGSFRDAVLIRHLLTHTLDFDFRLSGCKDLPPDELLRTILNVKMKCAPGEKFCYSNASSILLGLAVERASGKQLHTLAQEVFFDPLGMVDTTFFIDDEKRSRCVPTEIDPWRGRAVCGEVHDESAYTLHKIMTPGSAGLFSTAGDLLKYIKMLIDGWEPFFSKDTIISMPNNQIPHINGRVYRFGGWEFESKSTL

SEQ ID NO: 80684 - protein, 229 aa, Unknown
  Obtained from environmental sample
  DOMAIN (21)...(228): Isochorismatase family
  misc_feature (1)..(229): Xaa is any amino acid
LCFQDRTAFGTSFCPAYAQRPNGTVGAGGALAVPDGCAVVKPLNALAAAVAGRGGFVAATQDWHPEGHISFASSHPGKKVGDIINITAQAGQAGLAQGLWPDHCVQGGRGADFHAELDLKPAQLIVRKGFRKGLDSYSAFFENDRKTPTGLEGWIRKLGIETVIIGGLATDYCVFFSAMDSKKLGFDTIIVEDAVRGVGLPAGSVEKATEEMKAAGIAFAMSKDLLEKF

SEQ ID NO: 80685 - protein, 108 aa, Unknown
  Obtained from environmental sample
  misc_feature (1)..(108): Xaa is any amino acid
MDKKGQTALFTDYYALTMSQGYWKKNPDRQAVFEMSFRRQPFGGGYTIFAGLGTLLENLASFSFSDDDIEYIRSLGGFEDGFLDYLKNFRFSASVWAVDEGTVVFPAE

SEQ ID NO: 80686 - protein, 315 aa, Unknown
  Obtained from environmental sample
  DOMAIN (98)...(247): Poly A polymerase family
  misc_feature (1)..(315): Xaa is any amino acid
AGRLVKGLSLYHDEHGISIDDVDREAISIVQRLKEAGYDSYIVGGAIRDLLLKKKPKDFDIVSDATPARIKKIFRNSRIIGRRFKLVHVYFGPRIFEVSTFRSLKNGLTSNTFGSINEDVLRRDFTMNALFYDPLQQTIVDYVGGIKDIRAKLVRPIIPLSKIFTDDPVRMIRAVKYGAGTGFTLPFTLKWKIKKQSHLLSTISPSRLTEEIFKIIQSPQAARIVEALDTMGLYAYLQPQAAKLMREPGSFRGRYLRSFAAAGKPGFKNLPGEALGALITTILRTLLIGTAALLKLQGKLQRGKKFVLPNDPPPL

SEQ ID NO: 80687 - protein, 331 aa, Unknown
  Obtained from environmental sample
  DOMAIN (141)...(325): Integrase core domain
  misc_feature (1)..(331): Xaa is any amino acid
MGINPITGGLNYDQLSGDSPAQQSGILKNDIAKAWGCSRNTVAHVIKLAEAKGIAWEAASGLTNSELAERLFPETESKPAYKIPDWEYIHREMAKSGVTLSLLWAEYCEQCRESGETPYKTTQFYFYYSEHVQKTKATMRISHKPGEIMEVDWAGQTAYIQNTDKGGTIKAYVFVAVLPYSGYTYVEAFLSQDQQSWIQAHVNAYGYFGGVTRILVPDNLKTGITKHTRYETVVNKAYQEMAEHYRTAVLPARVRSPKDKATVEGNVGVISTWITAALRSQQFLSLWELNTAIRSKLADFNAKPFQKKDGSRATCSIGTPMHSLDKGGGKK

SEQ ID NO: 80688 - protein, 137 aa, Unknown
  Obtained from environmental sample
  misc_feature (1)..(137): Xaa is any amino acid
DYIKFEIERLCRDYPVSSEKKRRRIETEVSALKRDLGKLKRKERRDVLRQSLYGDDLPVPCLFNCGCAIGKKGLDAIELSSEDIALVYWFTRGQSRGFVKRGNYETEKLAGTGYRRAVLNRERLDYILARIKLLGAQ

SEQ ID NO: 80689 - protein, 170 aa, Unknown
  Obtained from environmental sample
  misc_feature (1)..(170): Xaa is any amino acid
MSKKKAACLLALPPILAAAFSFILPYAASFIPAIRGLAGGKITVLQNSALLHITLFTFKQAFFSVLISLALGLPGAWFIGNSRSRFTPLLKTLTAIPFAMPSILVVLGFVLFFGNSGWINRLYGTLPFSGEEPIRILYKPACRYSGSRIFLLSACDTSCGRRKCESKAAY

SEQ ID NO: 80690 - protein, 336 aa, Unknown
  Obtained from environmental sample
  misc_feature (1)..(336): Xaa is any amino acid
LCGGAVPLGEHPSSVYATRKVTLNEFGAFHLKVAPPSDETAPTGTYDVSLYKSVKGEGEKFIARTDFLVDAYRIPRFEVKVNGADRVPNDRPALVRATATYYAGGRLVERDVAWKVTSYPYDHRPRGFANYILSSDTRYGASQEPARQSVFEENGKTDGNGNAIVTLNPQAATAGNPTKYVVEATITDADMQTVSGRHTVIALPPFILGVRANRHITSGSTISARIAAIGVNDSLVAGQKVNVELKRVSWTSYLTDSDFSSGKPKYITNESAELVEARDVVTSANPTAVEFKNQQPGVYILALSSRDRLGRLQTVKIDLYLAGGRQQQAWKKVEQS

SEQ ID NO: 80691 - protein, 159 aa, Unknown
  Obtained from environmental sample
  DOMAIN (66)...(153): Glycosyltransferase family 36
  misc_feature (1)..(159): Xaa is any amino acid
MQYGYFDDDAREYVITRPDTPYPWINYLGSEDFYGLFSNTSGGYCFYRDARLLRLTRYRYNNVPTDSGGRYFYIRDSGDIWTPSWMPMKSALDRYECRHGMGYSRISSARNGLAFSQTSFVPLKDNCENHKIVLTNESRADKDVDFSPLSNSVCGTPMT

SEQ ID NO: 80692 - protein, 341 aa, Unknown
  Obtained from environmental sample
  DOMAIN (126)...(309): Trypsin
  misc_feature (1)..(341): Xaa is any amino acid
KAIKEERWEDAVSFSAPLPSIGVTVSITGLEPDLFLADAKKKLADGNNLSAFLAAVKTHEIKPLDSVSALLFLERAVKVKQRRAAAFFLAAALNAGSKNISADLLAYARGRDAVSDMINGVATVLVDRGIKVERGMGVPDRVLGSAFFVDSTGLLITNYHVIASEVDPKYKGYSRMFIRLGDSTSSRYPARVIGWDKALDLALIKTEYEPQYVFSLVDRVIPKVGDTVWAIGSPVGLEKTVTSGIVSALSRRFMQIGDVYQIDAAVNGGNSGGPLVDGEGRLVGIVFAGIAYHQGLNFAIPAETLAAALPAMIKGGKAQRPWLGLTLCETYRGDCPICHGN

SEQ ID NO: 80693 - protein, 318 aa, Unknown
  Obtained from environmental sample
  DOMAIN (1)...(316): Inorganic H+ pyrophosphatase
  misc_feature (1)..(318): Xaa is any amino acid
MLMAAVGTVASIIGTFFVRCGEKADQKSLLGALRKGTYISSAIIVIASYPVIRIALPNNQGVYFAILSGLIAGVLIGFFTEYYTSDHYNPTKNLASASLTGPATIIIGGISLGMLSTLLPVIIVGASVLTSFFVSGGGTNFSHGLYGVGISAVGMLSTLGITLATDAYGPVADNAGGIAEMSHLPHEVRERTDALDSLGNTTAATGKGFAIGSAALTALALIVAYLDEIQIHAPNFKLDLTLTNPPVLIGLFVGVMLPLPFLIHDHERGRPGRAKYRKRGTQTVQGNQRPDGWHRESGLCHLRGYLYPRGAKEMILPP

SEQ ID NO: 80694 - protein, 79 aa, Unknown
  Obtained from environmental sample
  misc_feature (1)..(79): Xaa is any amino acid
LEAAVKAKGKKLNWRVSIVDLMTALDLDNSLAARKELAKELNYTGTDPDGSAEKNIWLHKALMKTLAENGGKIPKELLQ

SEQ ID NO: 80695 - protein, 154 aa, Unknown
  Obtained from environmental sample
  DOMAIN (40)...(154): Respiratory-chain NADH dehydrogenase 51 Kd subunit
  misc_feature (1)..(154): Xaa is any amino acid
LLQGKKIEGTGIVMQKLEFRMLTDSLLSDPFSIEEYIKIGGFSALKKAAAMSSEDVISEISKAKLLGRGGAAYPVGKKWEHLLHIEETPKYIVCNADEGEPGTFKDRFIMEKMPFKLLEGIIIAGFVFRAKAGYIYIRGEYGKSGNASLGNKSI

SEQ ID NO: 80696 - protein, 339 aa, Unknown
  Obtained from environmental sample
  DOMAIN (152)...(319): Phage integrase family
  misc_feature (1)..(339): Xaa is any amino acid
RQRHFERRKMLANGIDPSAAKKAPKAAKRGMAENSFEALAREWFENWKLDKVEIYSRKLMMQLEKDVLPYIGRIPVAELRAPDVLSVCRRVEARGAVTAAHKINVSVSLIMRYAIATGRAERDPCPDLRGALKPSPSKPFASLTDPAKVAGLLKAIDGYRGTHVVRCALAFAPLVFVRPNELRHAKWEDIDLERREWVFVYSKQKTSAPVKRKLVVPLSNQALAILRDIQPLTGDGKYVFPSLRHGQPLSQPALNAALQTLGYDTGSEMTLHGFRAMARTILAERLHFDPQWIERQLSHKTRENLGEAYDRTQFLEQRKAMMQAWADYWTNLGRSDHWE

SEQ ID NO: 80697 - protein, 278 aa, Unknown
  Obtained from environmental sample
  DOMAIN (7)...(108): Hpt domain
  misc_feature (1)..(278): Xaa is any amino acid
MAVDKSKYINQFAEEGLENISTVQKLLFEIKEGSSVQDDLVTLMRALHTLKGSARMLEFKNIEAVSHSLETAFASIKEERIGLNDKAVKLILAGLDEVKAGIEKVKAGGKDEIRAPLFQKELSSLAANEEYAIPAAETGGDTGEKPQQKPKTDDAKHKSDDTSIRIPLERIDKVIHDMAALQSLEIIARNIARDTEAVNIANRNFAKLLSSSLPWNSPIIQEFRPIELLTGKLGSIVRNYSLDVGNHIRGAYDSIISLRMLPLSRVLLGQSDTCRGNG

SEQ ID NO: 80698 - protein, 339 aa, Unknown
  Obtained from environmental sample
  DOMAIN (7)...(338): Histidinol dehydrogenase
  misc_feature (1)..(339): Xaa is any amino acid
ENSPPNSTNLPAAAEVSFSEAQCALKQLRVDDAALTGALKLAARHIKRFAEKQREQFANFEFEMEPGLVTGQRVIPVERAAIYVPGGRFPLFSSVLMCMIPAFCAGVEEVIFSSPPMHDGLPDKKILAAAAIAAKIANNNNVRIFAIGGAQAIAALALGTESVPRVDVITGPGNKFVAAAKRQLFGEVGIDFIAGPTDVLVIADGQTVDGGIEKAADLVVADMLGQAEHDPDARSRALVPNRELAEKILIAIERRIKLLPTEKTARASLDAGGLIIVYETPEEAIRIANIIAPEHLELQTADADNWIPRLKNYGSLFIGSLCAEVLGDYSAGINPRAEF

SEQ ID NO: 80699 - protein, 94 aa, Unknown
  Obtained from environmental sample
  DOMAIN (11)...(93): Phosphoribosyl-ATP pyrophosphohydrolase
  misc_feature (1)..(94): Xaa is any amino acid
VSGVARSGIYVAIFAEIIRERFRNPAPGSYTATLDDALVREKVMEEAQELCEAKTHEEIIWEAADLLYFSTVLMTRAGVTIQEILDELDRRHKK

SEQ ID NO: 80700 - protein, 333 aa, Unknown
  Obtained from environmental sample
  DOMAIN (24)...(262): FGGY family of carbohydrate kinases, N-terminal domain
  misc_feature (1)..(333): Xaa is any amino acid
WFAKDRFGRGGNYGPKQAISETRTYLGIELGSTRIKAVLIDDSYEPIAAGIHDWENRLENGVWTYHLDDVWTGLQDCFSKLALDVKNRYGMTLSSVGAIGISAMMHGYLVFDKEDNQIVPFRTWRNTITEKAAASLTEKFKFNIPQRWSIAHLYQAILNGESHVKDINYITTLAGYVHWKLTGKKVLGIGDASGMFPVDGDSYNPLMLKQFEALIAPCNYGWKIANILPAVLSAGEDAGTLTAQGAKLLDPSGCLWDHIPFCPPEGDAGTGMVATNSVAQRTGNIAAGTSIFAMIVMEKNCQGIPEIDIVTTPAGKLWPWFNAITAPSNMTHG

SEQ ID NO: 80701 - protein, 296 aa, Unknown
  Obtained from environmental sample
  misc_feature (1)..(296): Xaa is any amino acid
EKAFWDVEEKTTEGNERMILKKNASRQDLDRYWNILDASGRNDVRINAVIDIKAVPETIRSDKWEGELMSALRDEDKPLVEAAYSYEDFIGGYLLVEEDETALDAILTAMIRSGFAGAVRHVNQLLDAKVVGVINSPAPLPNSNTAYIPLDVLQDEAGMMLEGAVTELVIREKNSPDSRLPGKSESAAAISAALERGLAANGQTMPAELVVHTWEEYMRNYLGFEALENSMPQMVAALLLLLSFLGISNTILLAILERTRETGMMRAMGMTDRQMILVYMRKRASGFGDLSWGGFG

SEQ ID NO: 80702 - protein, 274 aa, Unknown
  Obtained from environmental sample
  misc_feature (1)..(274): Xaa is any amino acid
SAVSVISAGAPSGTDWENTIRRADSGARIAVGMNLEELLYSWSGSRFAVYGLEGRPSPVIAVEIRDEKKRKEVFDKAFRSIFLNENINLTLNGSRIPQIETPAFLASLLALMNINIPSPYYTVYNNYLFISESAETLLEAITSVRRNEVLPKQELWRALSEDNSGPSSFTLYYSLEHSIPFFLKGQGMVPAILRSYRHGLAQLRFENNTLNVSLFTISGTGKGLTPIPGYPLNLPRLSANERTGKLLYAVSSGKDTRLLLTRGNAVLAVNPVNP

SEQ ID NO: 80703 - protein, 180 aa, Unknown
  Obtained from environmental sample
  DOMAIN (2)...(162): GGDEF domain
  misc_feature (1)..(180): Xaa is any amino acid
MLRYDLKVDSLTGMGNRNDFYKFINKFYLDGRAFKQKNKNEYAFIKININKLGEINDIHGHLEGDNAVRDIATIIKTYFRHTDFAVRYGGDEFILITTAKNDIHRIIERINNAVDNQNKKNIRPYKLYISYSYDTYKINSGVQIQNFLSQLDSKNKINPKNKDGQKCSKINRKNTDALRF

SEQ ID NO: 80704 - protein, 331 aa, Unknown
  Obtained from environmental sample
  DOMAIN (13)...(241): Amino acid kinase family
  misc_feature (1)..(331): Xaa is any amino acid
LAEFSLSTRFEGSTLVFKIDCPVTEDPGFPGLVKDLALLAKTGFKVIIVPGAKENIDAVLRQYNIESNYTSIDNFPVRITTKQTIPFVEMAAFDVASKFMTFLTASKVEAIIGNFVRARGLGVQNGVDTEHAGLVDKIFKDSLERVLNLGMVPILPCIGWSPSGKPYNVPSAEIALAAASALKAEKLFFLSVHDRPQVKNLNMEDLETRPDGSLLRLTPQQAEKLIASGTNSSSVPAPFLRELNLALSASRAGVNRVHLLDAREESAVLKELFSTSAWELWFIMTSTTLSGSFIQGLARYSAVDGAVMQKASLSGGIPSNSGKKADYAVLR

SEQ ID NO: 80705 - protein, 303 aa, Unknown
  Obtained from environmental sample
  misc_feature (1)..(303): Xaa is any amino acid
MASLNEYPVFAEFSDDKFLNDLRIAYPSPPFSTNAVNSLFTTSGYGLMEYVTPDKKFNAELGLRVDHYYLLGDGFSCQTKPALNPRLNADFNAFKNKWIFESLDISAGTGLFSTLDDTVFMAEKEHNLSEIKPGRSWTSVLGARITFPEGMTLNIEGYYKYIFDRMYIPVRITPEDISIRPQFDGEGRVWGIDMMLQKLQSRYWDGWLSYSYSWAKYRDPSGGNANMGISGGTRGNDWYFPGFHRFHNLNLVVNIKPSPQFNLYTRFGLASGTQISRRTTDRPTTYPVLLYDDSVDSGETKSY

SEQ ID NO: 80706 - protein, 307 aa, Unknown
  Obtained from environmental sample
  DOMAIN (168)...(290): Protein of unknown function DUF115
  misc_feature (1)..(307): Xaa is any amino acid
LNPVRRKRTRDYYHYGIALPLHSVIDPIREARRFVSTVGKTDFVIFLGLGGGFAPQAALELTNSNIVVIDFDKDGIAELFANGDYSKLLNNNKVSILIDLSEEEIKSFVIENFAPALCGGIKTFPLRTRIEQDKLKFEKASAAIQQAIDVVSGDYSVQSHFGLRWFSNIIRNIKNTQTESFFAEKKETPILKAAIVAAGPSLDTQLSSLAEFKSHNGFIICADTALGVLLHNNIEADAVVSIDCQHISYYHFMGVNLHGKKIPLILDIASPPLLCGLSSFTPVFFSGGHPLTRYISAHGNFPRAKPE

SEQ ID NO: 80707 - protein, 95 aa, Unknown
  Obtained from environmental sample
  DOMAIN (4)...(79): Uncharacterised protein family UPF0102
  misc_feature (1)..(95): Xaa is any amino acid
MQYSKNIRSKTGEIDIVALDGETVVFVEVKAWSTYGMEDLQYGINIKKQRKIIKTAKYFLSENRKYSNMAIRFDVVFIDKNSVTHLASAFTERVL

SEQ ID NO: 80708 - protein, 70 aa, Unknown
  Obtained from environmental sample
  misc_feature (1)..(70): Xaa is any amino acid
LREYLELLWAFIVIGATTFGGGYAIVPALERELIRKRGWISMNEVLDFYTIAQITPGVIAVTSRKKGGKQ

SEQ ID NO: 80709 - protein, 177 aa, Unknown
  Obtained from environmental sample
  misc_feature (1)..(177): Xaa is any amino acid
MFRRGALLRHRPGSLLGPIARVSGSAKVSSPTRIITSESLNGAVIKVEVPTHVAGTLEFARGAVGTIITSFDVYSHTLPCIEIYGTEGTLRVPDPNTFGGPVYLRRFHDEEWSQIPLINNYTEDSRGLGVTEMAAAIEQGRPHRASAELAYHVLDIMHGIHEAAAEGKYYKTVSSEQ

SEQ ID NO: 80710 - protein, 290 aa, Unknown
  Obtained from environmental sample
  misc_feature (1)..(290): Xaa is any amino acid
LCLNKTDTGNFFPLDFETFETAETYNSPPENVAWEKIAVPYGYGKPWHCSWFRASFISPAQSRYPLYIRAIPNADSLVFIDGKPAGAFNPAHKKVMVKADGQNHTLHIESYAGHYYPGCHPFQGRQVILTLGRHIDDYPNTFVGGALVERIEPVYALYYDVLCLFNLAKTLDDNSLRKARIISGLYDALMDIHFSSTGTVLEEEAIAARKKILPLLEAKNGSTVPEIYLIGHAHIDHAWLWHIGETERKIARTYINMAKLAEEYPEFIFIQTQSAQLEIVKREYPEIFRP

SEQ ID NO: 80711 - protein, 302 aa, Unknown
  Obtained from environmental sample
  DOMAIN (11)...(181): Radical SAM superfamily
  misc_feature (1)..(302): Xaa is any amino acid
MIRSAEIPGFRKIQDGCDHSCAYCRVSLARGKSRSLGASEVLKQLKTLEQRGIAEAVLTGVNICQYRNSGMGLPELLEFLLKGTETIRLRLSSIEPEPALFREVFLRVLEDKRIRPHFHLSLQSGSAAILAKMGRPYSPDEIEKIVGLLRRLRHDPFFACDIIAAFPGETECEFRKTYALMEKLSFAWIHAFPYSRRPGTAAFDFPANVSGKDAARRVELLTNLARKGHREYIQRWKGREVEAVVEAGENLPEGMVHALTENYLKVRVNYRDEKAPAPGSLIRCRIAEIADARKYDALAEYV

SEQ ID NO: 80712 - protein, 310 aa, Unknown
  Obtained from environmental sample
  DOMAIN (156)...(309): L-fucose isomerase, second N-terminal domain
  misc_feature (1)..(310): Xaa is any amino acid
VWWAGYCRFWRNLNWRSGRALLEKNLHYSNGEPVQVVIADTTIGRVAEAAACAAKFRREGVDITLTVTPCWCYGSETMDMDLSTIKGVWGFNGTERPGAVYLASVLAGHAQKGLPAFGIYGRNVQDLSDTEIPADVREKLLRFGRAALAVATMRGKSYLQIGSICMGIAGSIINPEFFEEYLGMRVESVDEVEIIRRMEKGIYDEKEFQKALAWTKQYCKEGFDKNPPELQRSRAEQDKAWEFVVKMMCIIKDLFSGNPNLPAGCEEERLGHNAIAGGFQGQRQWTDFYPHCDFPEIAMCSSFAWEGARG

SEQ ID NO: 80713 - protein, 308 aa, Unknown
  Obtained from environmental sample
  DOMAIN (1)...(119): GTPase of unknown function
  misc_feature (1)..(308): Xaa is any amino acid
LFNRLLHKRRAITDPTPGVTRDPIEMDGFIAGKPIRLIDTGGFKLERSVGRGTSLQSAAAENNDIIDDLVVTKTLAAIKKASLIVLLLEAGEINSEDEEFIALLRPYQQRLIIAVNKTEGGRREADSWNLLSYGFEKVFMISAEHGDNVGDLEQEIVSRLDFSAIQEAVAPSVEERQPIRIALLGKPNTGKSTLSNRLTSSNASIVSDIPGTTRDVIEGSFCWKSRDRRSHDCKSHDFVILDTAGIRRKSKVTENIEYYSVNRAIKTINEADIVILMIDAQEGLTEQDKKIAALAHDKGRLGRSDHCG

SEQ ID NO: 80714 - protein, 318 aa, Unknown
  Obtained from environmental sample
  DOMAIN (242)...(297): Helicase conserved C-terminal domain
  misc_feature (1)..(318): Xaa is any amino acid
ALSVLYGDAARPTRMHRLLHGDVGSGKTVTALLAALPALNSGRQAAWMAPTEVLAKQTKATVEKYLEGVGIGVGYLGAGDTPEKRRTLAELASGALRFVVGTHALFMPSVKFSNLGMVIIDEQHKFGAAQRLRLHEKGPASDVLLLSATPIPRTLAKTLYGDLDVVEIAARPGRAPVSTHIVPEGKRADMEGFILERIGAGGRAFYVVPRIDQQDDDSEDDGEAGVSESVKTVDSVAAALKRGPLSSVPIYKLHGRMPADERDEAIRAFKEGPPGVLVSTTIVEVGVDVAERGGHGHREALSSAVWPRRSKGGGGQPR

SEQ ID NO: 80715 - protein, 261 aa, Unknown
  Obtained from environmental sample
  DOMAIN (33)...(261): Bacterial extracellular solute-binding protein, family 7
  misc_feature (1)..(261): Xaa is any amino acid
MKISLWKAMCTGLLCAAVLLTACKRDQKVVIKVGDTWSPTHPIARSIDEVFKPQVEQKSKGVITVEAYHSQVLGNEHALWDSVRNGSIEMAVVGSGMNGEYSPMLISDWPFLYRDITHAKNVWTGGFFDDFKKDFEKAFPTTRMLSVGPNSSRTFTSNKRLTGISDFQGQKFRMPSNPIHVGIATDLGASVQIIPLNELYNALKAGIVDGQDNGMVTVLSEKLNEVQKYLYETNHIMAIMGVIVNAPFFDKIARNIKRLSE

SEQ ID NO: 80716 - protein, 228 aa, Unknown
  Obtained from environmental sample
  DOMAIN (87)...(225): PEP-utilising enzyme, TIM barrel domain
  misc_feature (1)..(228): Xaa is any amino acid
MPSDTLTMDKSRVKGIVLDEGSGTCHTAILARAFNIPAVLGLSVISREIKNGEMIALNGSTGMVTVNPDRQTLKLQENEKKIQNKQIDELSALRDLPAETLDGYRVALKANIGLPEEAEGTLHYGAEGIGLYRSEFLFIAPGRHAGEETQFLAYSQVLKTMGKLPVTIRTVDLGGDKVIPEFHTAGEKNPLLGWRAIRLSLAHPELFKSNCGPYCGPALAAMCELCSP

SEQ ID NO: 80717 - protein, 213 aa, Unknown
  Obtained from environmental sample
  DOMAIN (6)...(133): GTPase of unknown function
  misc_feature (1)..(213): Xaa is any amino acid
MLREMRNIGIMAHIDAGKTTTTERILFYTGKSHRIGEVDNGEAIMDWMEQEQQRGITIQSAATTTYWKKHQINIIDTPGHVDFTAEVERSLRALDGAIAIFDAVHGVEPQTETVWRQAQRYQVPCVGYINKMDRLGADFYFVLEDVRNKLGTNPVALQIPIVTESAFEGVIDLIDMREIRWDGSEGETMTFSPVAEGRKKPQRNGVKNLSTRF

SEQ ID NO: 80718 - protein, 312 aa, Unknown
  Obtained from environmental sample
  DOMAIN (2)...(144): Uncharacterized BCR, COG1636
  misc_feature (1)..(312): Xaa is any amino acid
KKGYRESAKLPLIMVDEYGLDLFLRNVGPETGMPGRCGICYRLRLEKTAAYAAEHGFDAFSTSLLISPYQQHETIHSLGEELAARYGITFLYRDFRPLFRKGQTAARALGLYMQKYCGCIFSEKERYEKSQNPEPRTPNPEPLYFQRLALLIGSDALEKLRQTNVLIFGAGGVGSWCAEALVRSGIGRIGIADYDTVNASNINRQVQATSSTIGLSKVEVLKQRLLEINPDCEVTVWSKIFSGETAAEFGIEKADYAIDAIDTFPHKLDLIEFFHNAGIKFFSSMGMACKIDPTRIKPAVYGNQKLRAGQAC

SEQ ID NO: 80719 - protein, 142 aa, Unknown
  Obtained from environmental sample
  DOMAIN (3)...(137): Thiamine pyrophosphate enzyme, N-terminal TPP binding domain
  misc_feature (1)..(142): Xaa is any amino acid
MQYSGARILIESLIEQGVDTVFGYPGGAVLFIYDELYKHRDKIRHILVSHEQHAAHAADGYARSTGKTGVCIATSGPGATNLITGIATAYMDSTPLVAITGNVPTGILGKDSFQESGYHWHLHAGSETQRISANLSGGGGKK

SEQ ID NO: 80720 - protein, 270 aa, Unknown
  Obtained from environmental sample
  DOMAIN (173)...(270): Response regulator receiver domain
  misc_feature (1)..(270): Xaa is any amino acid
MGGDITVQSEYEKGSSFTVVIPQEVYHEAPFVTVEEPDKKRALVFEARDCYAESLEWSLENLKVPHVIVRNQDAFAEEIFRREWFFVFVSYSLYEKIKPLMDRPAGDFPGSKKPPLALMVEWGMEDYIPGARFMSLSVQSLSIANILNGKADNRGYFDNTVNPNAVQFTLPGARLLVVDDISTNLKVAEGLLAPYRATVETCMGGLEAIDLVKQKASQKLDYDLVFMDHMMPDVDGIQAVARDREWEESLRGHGIARNAVPNIALTATAY

SEQ ID NO: 80721 - protein, 275 aa, Unknown
  Obtained from environmental sample
  DOMAIN (23)...(224): PP-loop family
  misc_feature (1)..(275): Xaa is any amino acid
MRRFETNVLNQIRRRGDGVEGCPVLVACSGGGDSVALLVCLVGLRESLGIDIKAAHVDHGLRPESKEEAHYVEELCKKLGLGLTACSLDVATHASSTDQGLEMAARELRWAWLKEQATEIGAPWIATGHTIEDHTETVFLRLARGSGLGCLSGLPAVQSPRWSPLIECHREDLRHYLQAQGVEWREDYTNDQGFTPRNRWRKHLADFRNEAPSIDRHLWETHRQAADLLELTDAVVSSWRGSRWDILEKGCVWLDVGWNARELAWALEAAFASWG

SEQ ID NO: 80722 - protein, 102 aa, Unknown
  Obtained from environmental sample
  misc_feature (1)..(102): Xaa is any amino acid
DGIRGKLVESNSGNEDLTTYLSQNGKKKTLLVVNKNPYTAFNGTIKIPGCAGKAKVEVLATPKGQAAGKVIKVDPPKASTQEIKEGSAITFPAHSVTLITVE

SEQ ID NO: 80723 - protein, 116 aa, Unknown
  Obtained from environmental sample
  DOMAIN (5)...(113): Ribosomal protein S8
  misc_feature (1)..(116): Xaa is any amino acid
MSVTDPVADMLTKIRNAGMSKHEKVDIPTSRLKLEIVKIMKTEGYIKNFKKVNQDGVNVIRVFLKYDDTTAPIIHGIEKVSKPGRRVYMGYKNMPRILTATEPSADSVHGGGAPKG

SEQ ID NO: 80724 - protein, 351 aa, Unknown
  Obtained from environmental sample
  misc_feature (1)..(351): Xaa is any amino acid
LTYRRDYADLGGRTLILHVKRTYINKAGRVLFNRSRNIITAKGKVEYIKEKGDTTEIFRGENITVNIDDWDSVFLDGDSEKTLSSENTSYRFEGTVISRSYDDVMILNNARISNANNEEALWSIGATKLWLLPGSDFAIFNMILKVGEIPVLYFPFFYYSADDLIFHPVVGYRTREGGFVQTSTYILGRPKADTTEKSSITRIMGNSADMEKEHNGIFLRSTGKKITNPDDTTLKLMADYYVNLGAYAGIDFSIPRVGILNAFDFSAGTGFSRTLSMVSGDYTPYAPKYDGSVEWNNSNLFSKTVPFRYRMKTQSSLRGKYGGLSWAIPFIRTPHRQDLGGICPWGGGVFK

SEQ ID NO: 80725 - protein, 329 aa, Unknown
  Obtained from environmental sample
  misc_feature (1)..(329): Xaa is any amino acid
VENTEYTSPEGKRLHFKGLKNFQVDNTYRDLYLKEAEGIISGKGGLLADDGRPVTRHAYGATLIAAAVTEDYWFGIQIGDGKLTAFYPDGSYEQVVPWDDKCYLNVTTSICDDDAAERTRVYVKKRNGFAAAVDAIGAIKRLEDNRPMPSAVFLNSDGVDDSFPIEENMDHMAKKFYYSVLRMFIENEADPAKGWEAAVKELADYLPDLSKRGSGDDISVAGIVDMEAVKAEPFRAALQKAKEEAEERRAREKEEREKAVKAAEAAREEESNRKAVEEETAKTADAAEAADQENVTKSDEIFQLNIRKNTEEDDIDIPSSDALKEQPPE

SEQ ID NO: 80726 - protein, 125 aa, Unknown
  Obtained from environmental sample
  misc_feature (1)..(125): Xaa is any amino acid
VFHGPVQPGVVLGGYPDVHDPAIPIRFKVKGTKEGFGVQGSGFRGEVYFLAWTTTPWTLPSNLALVLGPEIDYVLLEDLAVPNLEPRTPKALNPDTTSWPKRASPLTTNPPPNIKSSGAKKEANC

SEQ ID NO: 80727 - protein, 139 aa, Unknown
  Obtained from environmental sample
  misc_feature (1)..(139): Xaa is any amino acid
MTANMRTTKNEMPVQDPNVRNSNFLEVALGYREEQAIDEAKRCLNCKNKPCVEHCPVNIDIPDFITCIAQGEFEKAYHIITEHNSLPAICGRVCPQETQCEGKCTRGFKGESVAIGRLERFAADYHNAHSPATEAAQIA

SEQ ID NO: 80728 - protein, 267 aa, Unknown
  Obtained from environmental sample
  DOMAIN (44)...(231): Methyltransferase small domain
  misc_feature (1)..(267): Xaa is any amino acid
KERIYLDGSICISANDIERINTIVERRKSGEPLQYIFGKAYFYDREFIVNSNVLIPRPDTETLVDTVINSEKKRPAAFIDIGTGSGILAAVLTAHRPDWTAVAIDISFKALQTASLNLWKNVKKHSVNQPINKSVNNNIYLICGDMLNAIKPEKRFDFIVGNPPYISSPQMKTLDKSVADYEPALALHGGEDGLDYYRTISNSAGMYLKDTGRIYLEIGFDQGESVPNILYNDGWKDVAVIKDLAGRDRVAVAEWSIFDRQTRFSTL

SEQ ID NO: 80729 - protein, 319 aa, Unknown
  Obtained from environmental sample
  DOMAIN (63)...(317): Pyridoxal-phosphate dependent enzyme
  misc_feature (1)..(319): Xaa is any amino acid
FGQAAISDLPPDGGLFVPQEIPRYDRAALSSLGTMCYADIAFETIKPYVQGEIPDSTLEDIVRSAYTFDAPLVGVGDRFVLELFHGPTAAFKDFGARFMARAFAFLRRGEDKPLRILVATSGDTGGAVADGFFEVPGIYVTVLYPKGRITPLQERQIAGLGGNISALAVEGSFDDCQRLVKAALADEGLKKKMELSSANSINISRLIPQAAYYTAAAGCAAAAGRAPAAGRAGVGITLCVPSGNFGNLTAGLYAMKMGAPIKAFIAATNINKTFPDYLTTGEYRTMVSQATISNAMDVGAPSNLSGWRRTRPSKPGCQS

SEQ ID NO: 80730 - protein, 82 aa, Unknown
  Obtained from environmental sample
  misc_feature (1)..(82): Xaa is any amino acid
MLCPKILDVEALDNYKVKLKYETGETKIFNVLPYISGKWYEELYNNSYFKTVHLISGGKGIEWEHGQDIAPHELYDLSVIAN

SEQ ID NO: 80731 - protein, 343 aa, Unknown
  Obtained from environmental sample
  DOMAIN (1)...(210): Initiation factor 2 subunit family
  misc_feature (1)..(343): Xaa is any amino acid
LTYKKIALGRNGEPVRVLTHCNAGWLAFVDYGTALSPVYAAFDEGIKVHVWVDETRPRNQGAFLTAWELGQHGVSHDLIPDNAGGHLMQHGLIDIVITGADRVTRQGDAANKIGTYLKALAAKENNVPFYAALPSSTFDFAMRDGLKEIPIEERDASEVRYIAGKTAEGKIETVQICPDSTTARNWGFDVTPARYISGLITERGICRADEKEILALYPEYAGGPQTNMAAAQLSGEGYVKYTTIHTRAPAIEVSHWAELNNARTVLFNLGLLGVNPQGVRFGNVSIRYKGDEFIISGTATRAAPELTSAEYCLVYSFDLAQTRIVSMGAVQASSEAMTHGAVY

SEQ ID NO: 80732 - protein, 150 aa, Unknown
  Obtained from environmental sample
  DOMAIN (50)...(134): GHMP kinases C terminal
  misc_feature (1)..(150): Xaa is any amino acid
MKLKHRWFYTIQAFQGKSANIINEQIKHTQKGDAKSIESMHEMKRQSLIMKEALLKGDFNSFSGCLLNGWLAKKNAAASITNSFLDEMYQYALDNGAESAKISGAGGGGFMMIYCNPCKRIALIRALKEKQGMVLTPSFTETGTQAWCLY

SEQ ID NO: 80733 - protein, 100 aa, Unknown
  Obtained from environmental sample
  DOMAIN (2)...(99): PemK-like protein
  misc_feature (1)..(100): Xaa is any amino acid
LVKGEIWWANLPSPRGSEPAKRRPVLIVQNDIFNRSEINTVICAVITSNLHLANAPFNILLEKSVSKLEKSSVINISQIITLDKAYSNGFVSMLQNSRPI

SEQ ID NO: 80734 - protein, 88 aa, Unknown
  Obtained from environmental sample
  misc_feature (1)..(88): Xaa is any amino acid
MIIPSVKAVFANKGDTQFTAVPKLGLLWNVTDSFALKNNYFRSFKFPDFEELYWSEGGGSAGHPDLKPEDGWGGDIGFSWRFKDLFKF

SEQ ID NO: 80735 - protein, 52 aa, Unknown
  Obtained from environmental sample
  misc_feature (1)..(52): Xaa is any amino acid
MMDKPAYTVNNGEFVIENYNNAQAFASFLPAIAGLWGKPLWVYYVNRGAGGG

SEQ ID NO: 80736 - protein, 265 aa, Unknown
  Obtained from environmental sample
  misc_feature (1)..(265): Xaa is any amino acid
VPLEDGEVLVTVLSGLFDGGPVEKQFVAYRNLLEVDSPIYVTFIDYNEASRSYERIWSAQTAATRPGTISLSTQDLIGDKSLCVMLGGMNAQDQHTLTVFRKTPIGQASAQNTSGNELFRKIAELSIEGTITVKEAERNTAYQSGQGTGASFTISAYGRDYGSSNILDQVEVTYTYNGNSGVYEQTRSVRIPGSQAEQRRVREILGSRLAFEEFITGLWYFITPQGKIDKNQYIYFSPSSQEIIFYGDDILQVFNWTNQSPLGTV

SEQ ID NO: 80737 - protein, 262 aa, Unknown
  Obtained from environmental sample
  misc_feature (1)..(262): Xaa is any amino acid
MSGALWESYTHSLMQVNVLFANAMVKLGFPDTEEKLRHYQSLFQSFIQMKRRILVLDDFHCIEDPSVIHFVEVCILQNMPPGTSIFLISRSTPRVNIAGLVYRDQIFNMSENDLRFTDNELAQYFRQLSVPFQANTLREIMQDTEGWAFAINLIARSYQKAPGYGGYVRNAMKTNIFRFMETEIWDEISEGLQNFLVRLSLIDHLSIDLITQLAGDEKGLIDDMEKQSAYVRRDSYTNAYLIHPLFLEFLRQKQDSAILTLL

SEQ ID NO: 80738 - protein, 234 aa, Unknown
  Obtained from environmental sample
  DOMAIN (1)...(234): Phosphorylase family 2
  misc_feature (1)..(234): Xaa is any amino acid
MIGIIGGSGLDNPEIFHESRDENISTVYGEPSSALRHGLIDGIKIVLLARHGREHTIPPSQVNYRANISALKKAGCSHIIATTAVGSLKEEIHRGDLVIIDQFIDFTKQRKMTFHESFEPGNPVHTPMADPYDSRLRKILIDECKALNYQFHEKGTVITIEGPRFSTRAESFMFRSWGADIINMSIATETVLANEAGIPYAAVAMSTDYDCWKTGEESVTWGSYRKSLCGLSPQ

SEQ ID NO: 80739 - protein, 155 aa, Unknown
  Obtained from environmental sample
  DOMAIN (5)...(114): 1-deoxy-D-xylulose 5-phosphate reductoisomerase
  misc_feature (1)..(155): Xaa is any amino acid
MKKRIAVLGATGSIGKSSLDVISRNKDIFEVVLLSANTKGEELEKLKNLWPSAVCVLSGGQGGKEKLLSAIGEVKADITINGITGAGGLEPSLAAIESGSDLALANKETLVMAAPLVFRLAKEKNVKIIPVDSEHSAIFRLIQARPILYIGGGEK

SEQ ID NO: 80740 - protein, 194 aa, Unknown
  Obtained from environmental sample
  misc_feature (1)..(194): Xaa is any amino acid
MMAEMPRSQPPLLATRPMITPKWRIYQSRYCNTTAGLCSKGALAQVTSSVIHHGEEQQLVFQGEKARVSAPWRVSANIAQPNGFPAGQNEELISKLNNFYEALPKLTLTLHVGQINDVLTALETGRKPLIDGEDGRRTIELISAIYKAGTEQRTVELPMQKDDPFYTVKGIMETVPHFYEKTASVNDQGGQITF

SEQ ID NO: 80741 - protein, 163 aa, Unknown
  Obtained from environmental sample
  DOMAIN (12)...(161): Peptidase family M50
  misc_feature (1)..(163): Xaa is any amino acid
MNIIYWIFQIILGLLGLSLLVFIHELGHFLAAKFCGVRVLTFSIGFGKKLLKINRDGTTYCISAIPFGGYVAMAGENPEQVREGKPDDFYIQPIWKRALIAFAGPVFNVIFAYFLLTGIYMLGYPEPISDKLVVGVVERDSAAEEAGMQAATRFTLAISKGEF

SEQ ID NO: 80742 - protein, 134 aa, Unknown
  Obtained from environmental sample
  DOMAIN (28)...(107): MazG nucleotide pyrophosphohydrolase domain
  misc_feature (1)..(134): Xaa is any amino acid
MTMRTPATLRAIMDHLRAPNGCPWDKEQTHQSLAEAFREEASEVLDAIAALNSDRPNKPSLYRHLCEELGNLWLQVAFHACLADEAGHFDMHDVERMIVEKRCEKAIPTYFGDLVAEDSSQVLGRICPWGGGFW

SEQ ID NO: 80743 - protein, 81 aa, Unknown
  Obtained from environmental sample
  misc_feature (1)..(81): Xaa is any amino acid
MARKKFRSTTIIAVRKDGKIAMAGDGQVTFGETVMKKYAPQVRRLMDGKCYAVFAVLRRMSLPFLTARGEPQEYSGDLTAP

SEQ ID NO: 80744 - protein, 286 aa, Unknown
  Obtained from environmental sample
  DOMAIN (59)...(187): ATPase family associated with various cellular activities (AAA)
  misc_feature (1)..(286): Xaa is any amino acid
MNDIQVKIGDVNQLTPKEIVAELDKYIVGQKKAKRAVAVALRNRMRRLKLDPELRDDVAPKNILMIGPTGVGKTEIARRLAKLAGSPFIKVEATKYTEVGYVGRDVESMVRDLMASGFQMVKQEMQEAFVAEAEKRTEEILLDLLLPGTGKKSKPKKTAPAPVVRPMGSFTFGPENGQGAGLIGTAIQVGIPSFSNQGEEKAEADEADKQEEPQPADGAGDPAASRTREKFRIQLREGKLEDRTVELMVNQNPQFPPFEMMGVSMEDVESSMSGLPISRDKPGGKM

SEQ ID NO: 80745 - protein, 216 aa, Unknown
  Obtained from environmental sample
  misc_feature (1)..(216): Xaa is any amino acid
MVVQYAIFWHITLKSKSGGMMTLFALIGLLPMCVIAPFAGVWADRYSRKHIINISDASVALFSLVAAVMLTLGIDSYAMLFVCALVRALGTGVQNPAVNAFIPQIVPKEHLTRINGIQGGIQSFVALATPMIAAALMAAAPLQTLFLLDVATAIVGISIVLFFVKIPEWGQTASVRKDTGYLHEFREGIKYIRRPRLFAKNDRHLRHLHVPCRPRP

SEQ ID NO: 80746 - protein, 333 aa, Unknown
  Obtained from environmental sample
  misc_feature (1)..(333): Xaa is any amino acid
AKLLSRKVTEVTHNHREGLKGAEATAVCIFLARTGSNILEIRDHVNTDYYPMNFTLDGIRDSYKFDVSCQGTVPQAIMAFLESMSFEDAVRNAVSIGGDSDTLAAITGGIAEAYYGVPAAIRKHALTFLDERLLKILTAFENVYRPSLEKTVKQATVKIARKNKKIKTGDRAETMQMSFDMIDEDFAETLTVHEETSSEQLFRHLFEACNILRGPINQDEYKSYVTPLLFFKRLSDVYDEETAKALEESGGDEEYAAFPENHRFSIPNGCHWNDVRACHENVGTAITDAMTGIERVNPDTLFGVFSSFDDAVWTDKSKLTDTRLKDLGNICQK

SEQ ID NO: 80747 - protein, 94 aa, Unknown
  Obtained from environmental sample
  DOMAIN (21)...(90): Cupin domain
  misc_feature (1)..(94): Xaa is any amino acid
GFSPGYREALGRQGGRHMEPFIVDIEPDAEQEKSTHEGEEFIYVLSGNLAVDYGSMFTVIHEGDSVYYDSIVPHRVVSADSKPVKILAVIYTPT

SEQ ID NO: 80748 - protein, 258 aa, Unknown
  Obtained from environmental sample
  DOMAIN (2)...(115): Response regulator receiver domain
  misc_feature (1)..(258): Xaa is any amino acid
MKRILVVDDNLSILKQISAHLSGEYEVSLAKSGLLALQICTKEKPDLILLDVEMPDMDGFDVISRLKQNPYLNRIPVIFLTASHSHEVEIKALELGARDFIMKPAEKSILLHRIELHLRFASYQVQTEEKVTALSDNIAISFAEMIECRDENTGGHVIRTSKYVDILGKELISKGVFPDELNESELQMMVRAAPLHDIGKIAISDRVLLKAGRLDDIEFSIIKRHAEIGAQIGKGCTSVCPPSGSLGRFCPWGGGGKR

SEQ ID NO: 80749 - protein, 327 aa, Unknown
  Obtained from environmental sample
  misc_feature (1)..(327): Xaa is any amino acid
MGDSAFNDEGKEVFIFFPESLSDYGEYGELLENSSHVKTISASNTDNLKSDTFFYTNSRSEIKEAALYIRALNENHGVNWDSIAVCIPNSENYEPYVLREFTNRNIPFVKRTSKLLSDYQAGGFFRSILECVSHDFSFSSLVSLIMNKTLPWKNSLPIEKLVQFGIDNNCLYSWTEEIDGEKKYINIWEDAFKKPIRYYDKEIPDFFNELKKRLNSFRRCESFNELRRQYFIFREKFFDMDNCGEESDLVLARCISELMELVEIEKSFPDVKAPDPFLFFSEYLDEIPYLPQQKFSGVAILPYKTAAAGPIDCQSSRPIWPGGGGPR

SEQ ID NO: 80750 - protein, 80 aa, Unknown
  Obtained from environmental sample
  DOMAIN (10)...(33): 4Fe-4S binding domain
  misc_feature (1)..(80): Xaa is any amino acid
MAITTLTPVIRIDEEKCINCYACIVSCPVKYCMNGSSEKLQINHDICIGCGNCINTCTHKARTLIDDTGRFMEDFEQIRK

SEQ ID NO: 80751 - protein, 266 aa, Unknown
  Obtained from environmental sample
  misc_feature (1)..(266): Xaa is any amino acid
VLSVTFDVDENTAVEMLCKKYAIHNDYHRTAIEDGLKRLLSPAVIRELRGDQSEAADDHGISVFGQNLKNLLMQQPIKGTRVMGVDPGIRTGTKCAFLNDTGKYLGSVVIHNHRVEEAKKLILEGVKKYDIQLIAVGNGTGSREVQEIVSAVIAENSLEVLYTVVDEDGASVYSASDIAREEFPELDLTIRGAISIGRRLQDPLAELVKIDPKSIGVGLYQHDVNQKKLSETLDEVVSSVVNNVGNEPQHRQYFAPKVRFRNQQLS

SEQ ID NO: 80752 - protein, 130 aa, Unknown
  Obtained from environmental sample
  misc_feature (1)..(130): Xaa is any amino acid
MRSRYSAYVEHEIDYIINTCVHKGKDDIDYKSTRDWSEQSTWLGLKIISVEKGGVNDTEGTVEFEASYMRDGLKDVHHERAKFKKDNAERSQWLYDEGHITPLTVVRATPQTRRHDPWPCGSGKIQNCCL

SEQ ID NO: 80753 - protein, 185 aa, Unknown
  Obtained from environmental sample
  misc_feature (1)..(185): Xaa is any amino acid
GGAGIGVSKGSIAADTTYNTIGAANLYDDKDKAVEDDVDENDNTGETDKAADKEDRAGADKAPGELSPEERSVVNELRNRDREVRAHEQAHVSAGGAYIRGGASYQYQRGPDNKSYAVGGEVGIDAAPERDDPGATITKMQAVRSAALAPNDPSAQDRAVASAAARQESLSRADLAAEARNADES

SEQ ID NO: 80754 - protein, 334 aa, Unknown
  Obtained from environmental sample
  misc_feature (1)..(334): Xaa is any amino acid
MRGGDPSGAFPGRFAGTVQSHQHKAGKSQIKRSAVIEAQSRAALFAPYNRIYDFSIEFWLNPLNMENGEQILQWIAARPLNTNKTSYTSQRILCVSSKNRLQWSFTNFFASPDGKESIEINIGGVSALVPKTWSHHLIRFDSFTGVVEYQVNGKTESIEYAASGGHEGGEVYTPITGEGGCFILGNGFSGLIDEFRIHGVNAPTPVVRKYPLQGGRIETRAVDLGEGSNGILKLEASGGRIAVQNTKLNNEFKRNGRFRFSDDSEMQFFIRSSDNPYRWDSPWLAITPGADFSGIVQGRYVQLAVDFIRQKTGESSPYLEEVRSRRSSRGGAPR

SEQ ID NO: 80755 - protein, 242 aa, Unknown
  Obtained from environmental sample
  DOMAIN (18)...(220): ABC-2 type transporter
  misc_feature (1)..(242): Xaa is any amino acid
MSSVALTRSRSRLFVEANTVVTVMAREITVYFKSPGTAIMSLAMPIIMMGMIGGNLMQNMAGGLGFNFGQFMLIGMLINMMFMITSMGLASLVDDHEIDFNQEMLVSPVSRYSLIIGKILGSAFAAVVSLAGTLIVGFAMGIALPLGKLLLILALSPLMCLAAGAFTMIVIGLIKDKKAANLAVMLITMPQMFLSGAIIPINDTNGVLLVLNRIMPHDLLSRPRPRGRLRPRRNLSKGGGPP

SEQ ID NO: 80756 - protein, 292 aa, Unknown
  Obtained from environmental sample
  DOMAIN (152)...(292): GGDEF domain
  misc_feature (1)..(292): Xaa is any amino acid
MVKLEETQIKYFITGEYEEFYGAKTGTPLNLLWLVDLVVNQTVEELLAEDETYYDDIKRYSLFRADTEKAYQDRIPVGSVTDYEYGKLIYGWAPFYSVEGTYVGMLGVDLYIEQYENEVKRIKAILSSVFAAPTIILTVAYIILYIRNKKHIYSKVYTDSLTSIKNRRFIEEYFPSIVRDHCKKRMPLSVIMIDVDCFKLYNDHYGHQQGDEALKKITDAIQSVLREKIDFICRYGGEEILVILINTNLSEAEMVAKRISTAINAPAIVHEHSVCSTMATVSQGIYSAVPSN

SEQ ID NO: 80757 - protein, 349 aa, Unknown
  Obtained from environmental sample
  DOMAIN (98)...(314): Reverse transcriptase (RNA-dependent DNA polymerase)
  misc_feature (1)..(349): Xaa is any amino acid
GGSPAALRKIGWNPKKPQGAQSAGIRKAENGDSANGGEPERNLLEAILSLNNVWEAQGRVIANRGSAGIDGMAVEELNDYLINHYLELRESIRGGWYKPKPVKRVEIPKPDGGKRLLGVPTVIDRMVQQATVQVLQPIFEQTFSDSSFGFRPGRNAHQAMQRAKRYYEEGYKYVVDLDLEKYFDTVNHDLLIKMVREAIKDEAVIGLIRKFLKSGVMVEGLVSQTEQGTPQGGNLSPLLSNVYLTKFDRMLEERGHKFVRYADDCNIYVKSPRAAERVMAGCIKFLEGKLKLKVNRKKSTTGSPTKLKFLGFSLYEWKGKIGIRAHEKPLNGSKNGLRPYLGGICPLAS

SEQ ID NO: 80758 - protein, 327 aa, Unknown
  Obtained from environmental sample
  DOMAIN (2)...(120): ABC transporter
  misc_feature (1)..(327): Xaa is any amino acid
MGKLHLVSGRKRRLLFSSGLSKKTVEKRASQWHIYLALDSPAESLTVGQRQKATILALLLRNVNWFIFDEPTAVLSAEETESLFQLFRRLCGEGRGIIFITHKLKEALEIANRVTVIRHSIALETHETSGLSAEELRREIFGTDMTDNSTGQKKSSKQNANESPILIIDGLHLEPPGLPAIKNVNLHLTTGMIMGITGNRDGGYETLEHAITGFIKIGYKSVNHSSGSIALNGHEITGMGIHAFRDAGGAYLGADRLGSNLARELPLFESLIIHAYRRERFGIFLNMAYLKALVRENHESLRRYALDVGQADFFSRRHARPNLSLAS

SEQ ID NO: 80759 - protein, 282 aa, Unknown
  Obtained from environmental sample
  DOMAIN (1)...(175): TraB family
  misc_feature (1)..(282): Xaa is any amino acid
EPEHVKVFKEGKGFLLWPNLCLSGFQRRMGAELGVKPGEEMKAALDIASELGIPYALCDREVQTTLRRAWSGCGLWSKSKLLSALLASAFTTEKLSAEEIENLKNRSELDGMMEELASYLPEVKETLINERDQYLAAKIWAAAPAEAKRIVAVVGAGHMQGIKAWMEKIAAGEKDVDVSSLNKMPPRGFLSKALPFIIPLAILALFVSGFIRGGAGVSLSMLRTYILWNGSLAALGAIIALGHPLAILAAFLFAPITTFTPFIGVGLFSGVIQVSLKKAPGN

SEQ ID NO: 80760 - protein, 310 aa, Unknown
  Obtained from environmental sample
  DOMAIN (4)...(308): Protein of unknown function (DUF1015)
  misc_feature (1)..(310): Xaa is any amino acid
MRGEITVPGYRFTLENPEDLGLHCAPPYDMLDDAMVDALYAKHPNNVVRVTQNKRVPEDAANKDRHVRAGDFLNKWIGDSIMTRDDAESIYIYRQQFSSPDEHGKPVDRERIGVCSLVKLVGLDEGIVLPHEYTLSGPKQDRYELMETTLANTGQIFGLAADDDGKLYELIRLIMSSSPLVGFFTDENGVTHSLYRCYDAGLIDQAKELMKTRSILIADGHHRYETALRFYRDRGDEAFSHVMMTNVSMADPGLIIRPFHRLVRKTDQGRSVGSMLDELAKYFDAVPLGKASADGVYKALSEHGKAEMVY

SEQ ID NO: 80761 - protein, 123 aa, Unknown
  Obtained from environmental sample
  misc_feature (1)..(123): Xaa is any amino acid
MKEFMDDNFLLSNRIAEKLYHEAAAGEPIFDYHCHLMPKEIAENRRFPDLASVWLGGDHYKWRQMRANGINERLITGDAAPYDKFLAWADTVPRLVGNPLYHWTHLNWGYSHNSSESVMGGNT

SEQ ID NO: 80762 - protein, 321 aa, Unknown
  Obtained from environmental sample
  DOMAIN (85)...(314): Methyl-accepting chemotaxis protein (MCP) signaling domain
  misc_feature (1)..(321): Xaa is any amino acid
LKIPTEEELKKVYQSLKKLREKDIYNCTSCGYGNCETMAKAIFNNLNKPENCAHYNMALLMEQMKTEELNRLLKEHIGRATALIENISQTVNELNASIDMQAQSVKESSQKTEQMLKSLSSTSEVSKNKQGDIHELLENAAHGQTSMKETIQSVQSISESVDGISSAIKIITAIAANTNLLSMNAAIEAAHAGDAGKGFAVVADEIRRLSESTRENSRNIAKTLKTIIDNISLTSKRSGDTDARITEMSKEIKGFAETMTNLINTLNELSAQSYDITTSLNSLRDQSAAVRTSYTGMLEMTEKLRNAMQELSASADLIIRF

SEQ ID NO: 80763 - protein, 230 aa, Unknown
  Obtained from environmental sample
  misc_feature (1)..(230): Xaa is any amino acid
ASILSGDPLEKPELYQSMLLIPEDNRENLPEDYIADILDVLPEKQKARFRDGLWVKAEGVIYDKFDESMIAKAADLPESFDRYAAGQDFGLNITFVKIGWLGDAVFVLGDYGAYNMTTQSFNEEVTARGLLDCPDSMGMPVYCDPAGGERIQEITGGVKANNSVDSGIDFICAKIERRQFFVSEKCTGVLSEIWDYCRDEAGQIVKVNDHFLDALRYAVFSDVQHGVILS

SEQ ID NO: 80764 - protein, 140 aa, Unknown
  Obtained from environmental sample
  DOMAIN (3)...(140): NLPA lipoprotein
  misc_feature (1)..(140): Xaa is any amino acid
PSIPPQDDGQIVHGGALASAPVKGLITLKTGNKLTATPRDIGDNPKNFRFQELEAAQLPRSLQDVDAATINGNYALEAKLNPVKDALIIEGADSPYVNIVVVQKGKQNDPGIIALKNALLSQKVKNYIDSHYGGGVVAVF

SEQ ID NO: 80765 - protein, 172 aa, Unknown
  Obtained from environmental sample
  DOMAIN (3)...(172): Pyridoxal-phosphate dependent enzyme
  misc_feature (1)..(172): Xaa is any amino acid
MNILELVGNTPVIELKKIFNMANGVSLFAKAEYFNPSGSVKDRAAKAMILSGINSGQLTKDKIILDSTSGNTGIAYAMFGAALGYRVKLFMPANASEERKKLIRAYGAEIIETDPLESSDGAYRIVMELAEKEPEKYFFPNQYDNFENPRVPYENNRGKTCITNVKPVIFVQ

SEQ ID NO: 80766 - protein, 62 aa, Unknown
  Obtained from environmental sample
  misc_feature (1)..(62): Xaa is any amino acid
IFSVIKGFNETGTTVLLVKQNANKALDLGSGAYILKPGEIVKSGLTVDLMKMKAVKAAYLGG

SEQ ID NO: 80767 - protein, 108 aa, Unknown
  Obtained from environmental sample
  misc_feature (1)..(108): Xaa is any amino acid
VNINECLLDDGNDYTVGTSTVGAMIASSGKEHLWEERSGGVGTIDTVVVHYMSAVAAVPDDPYNLGQLLKIFCDYGVSSHYLITRDGEIYNLVPEEKKHGTPGPASCL

SEQ ID NO: 80768 - protein, 141 aa, Unknown
  Obtained from environmental sample
  misc_feature (1)..(141): Xaa is any amino acid
MYVVEHALLNLGKNKSRNILLGVIIFAIITATVVALAIYNTTELVIEETRTALQCAVRVVPQRQMAGNGGAISPGGGGQEAAVSLEQYISFAESEYLDGADIKESNRGADGVDAVYYLKRPECWRRLKRNCGNKVYLPHYM

SEQ ID NO: 80769 - protein, 298 aa, Unknown
  Obtained from environmental sample
  DOMAIN (64)...(151): Biotin/lipoate A/B protein ligase family
  misc_feature (1)..(298): Xaa is any amino acid
MYSLEVGLPKLQTADNRRWPARVRRYGRVLYGAGLRMQGALAECVQGGGPDQLLLLEHNPVYTLGRNATRADIHVPDAFLAESGIEVHQIDRGGQVTYHGPGQIVAYPICNLRGQSVSNLVNDLEQAMIETAKGFGVHAERLEGHPGVWVETARGWEKLGAIGLHLKKWVSTHGLAFNLAPEMEHYRWITPCGIADKGVCSLRTLLGDGCPSWVEASASLERHLLEVLGLEPLPTAEPSRSVSITVWRRGANGLEILMLPRHPEDDQWQSGVTDMVEPGETFAAAAKGIVEETGLHGR

SEQ ID NO: 80770 - protein, 260 aa, Unknown
  Obtained from environmental sample
  DOMAIN (2)...(260): tRNA synthetases class II (D, K and N)
  misc_feature (1)..(260): Xaa is any amino acid
LSYEDAMTQYGTDKPDLRFEMLLQDFSPYVEAGGFQAFKDALSQNTGAVKALVAKGQAGYSRKQIEELEAHAKIYKAKGMAWMKVTANNALEGGVSKFFTGNSSQIINGLGAAEGDLILIVADTQRRIANTALGAVRSRLGKDLNLCDPKVFKFVWIVDFPLFEFNEEENKWEAAHHLFSWPQEKYHATLESDPGSVKGDLYDLVLNGYELASGSIRIHDPVLQQRIFSIAGFDPAEAEKRFGFLTGAFKYGAPPHGGIA

SEQ ID NO: 80771 - protein, 169 aa, Unknown
  Obtained from environmental sample
  misc_feature (1)..(169): Xaa is any amino acid
RTKSFRRFHDNEGLKSTSIDKFPLELTVQVYNINHGHIPEMLKKCESLYGYSFFINKIREYQTQGLTLEELITPVIEYCIKNNILKEYLEAHASEVINMIFGEYDREMDIAVNRREAREEGRLEGREEGREEGRKEKLIIAKNLLSKGSTPEFVHEITGLSLEKIREID

SEQ ID NO: 80772 - protein, 316 aa, Unknown
  Obtained from environmental sample
  DOMAIN (162)...(276): GTPase of unknown function
  misc_feature (1)..(316): Xaa is any amino acid
LRGKFADEATIEVSSGNGGNGCVAFRREKYIPKGGPSGGDGGRGGDIVFTVRRNLRTLAHLRYKHTFKAENGHDGENWGRYGANGSDMVIPLPPGSLIREEETGELIRDFSKDKEDFVFLKGGNGGWGNIHFKSSVNQAPRKALPGKQGQTVKLKVELQIIADIGLVGFPNAGKSSLLDRFTNARPKIAAYPFTTKIPNLGVLTVGEKDIIIADIPGLIEGASEGAGLGIQFLKHISRTSALAFLIDLSDENYLAAFDILLKELGSFSSDLPRKIGCWWEQKPTCPETEGRLCGACVKIPDGGNYRNIGFFQRPDK

SEQ ID NO: 80773 - protein, 294 aa, Unknown
  Obtained from environmental sample
  DOMAIN (1)...(294): Aconitase family (aconitate hydratase)
  misc_feature (1)..(294): Xaa is any amino acid
MPYVLTNCHNSLCAVGGTINQDDHVFALSAAQKYGGIYVPPHLAVIHSYNREMMAGCGRMILGSDSHTRYGALGTMAVGEGGGELAKQLVGRTYDMPSPPVIGIYLEGEASKGVGPQDVALAIIGAVFKNGYVKNKALEFIGDGVDKMPIDFRNGIDVMTTETACWSSIWKTDDKVKTYLKERGREGDYKELKPAATAYYDGFIQIDLSKIEPCIALPFHPSNVYTIKGLQNNAKDIFANIEEENRESGLNLKSGVKCHGRGVWADQAVIAGCSRRIFSKHMAGGRHHKKILHG

SEQ ID NO: 80774 - protein, 172 aa, Unknown
  Obtained from environmental sample
  misc_feature (1)..(172): Xaa is any amino acid
TYLHSNKVYPTHWDYSSATKGFRDILNKVSVIFLSQNEEKVEDTMAAGVRLMADMSEIDRLILCRNHIATNSLLASEVYRWDRASGGSTELAVALIGVPYAQLIPDWEELLSDGKHINSPSRLMSENAAKTLLSFGVLTAAVIPIHINNAFWGFALLGDTKNERYFEDDIIK

SEQ ID NO: 80775 - protein, 116 aa, Unknown
  Obtained from environmental sample
  DOMAIN (7)...(37): Flagella basal body rod protein
  misc_feature (1)..(116): Xaa is any amino acid
MGIYNSINVAATGLTANRVRLDVIANNMANVNTTRTTEGGPFRRSRVVMRPMTEGPFWRSPFLPDSLDDGLGRGVRVLEVQKDLKTEPRYVYDPTHPDAILSGPREGISADSDPGG

SEQ ID NO: 80776 - protein, 297 aa, Unknown
  Obtained from environmental sample
  DOMAIN (33)...(138): ATPase family associated with various cellular activities (AAA)
  misc_feature (1)..(297): Xaa is any amino acid
LSRGEKGERAVAVALRNRIRRLKLAPEIREDIAPKNILMIGPTGVGKTEIARRLAKLAGSPFLKVEATKYTEVGYVGRDVESMVRDLMAAGFQMVKQEMQENVKQEAEKRAEEALLDLLLPVNSKKQKEKKSRPAPIMRPMGTFSINPENSNGSIIATTLQLGFPAMKKNKDTQDEENTVDASSEPQEEIKDGEDEKFKDTREKLRTMLHEGKLNDRTVELMVGQSPTFPAFEMMGGSMEDLEASISGIAGMLGGGQKKKVVTVPRAMEILRAEEAEKLVDRDRVSDEARQRVEETG

SEQ ID NO: 80777 - protein, 306 aa, Unknown
  Obtained from environmental sample
  DOMAIN (78)...(247): Protein of unknown function DUF115
  misc_feature (1)..(306): Xaa is any amino acid
ALLGDPRFTLLVDPDTELIQKTILDLYNPALCGGIRVLPLRARVEQDKEKFAMAAEAVQRTIEKVSADYSVQAHFGIRWFSNIIRNLGIAQSLNSDASQIAAFSDAAICAAGPSLDAQIPFLRERQRESLFVIAADTALSALLVGGVKPDAIVSIDCQHISYCHFIGNGSACADIPLFLDIASPPLLSGFSRSPIYFAGGHPLAAYIRLKWMPLPSLDTSGGNVTYACLSLAEQLGARRITVYGADFSYPLGNAYARGTYFYPLFERRQNRLSPLESGGPHSLPQPFLLRKQRNTLPICHGGANTR

SEQ ID NO: 80778 - protein, 287 aa, Unknown
  Obtained from environmental sample
  misc_feature (1)..(287): Xaa is any amino acid
MPSTAEEHRSLVLSLVRKLIKPVFLAALTTMAGFISFCFTPIVPMREFGFCAAFGVISAFLVAVLFIPAMFLLRGPRVLKERHKKQTSGTFNNNVAGIFTGIAEKKVLVLVIAALAVVISLYGLSKVIIDNAVVEFFQKETDISRSDRFIREYFGGSKDLNLVVVADTTEELLHPGVLQAVDNLSAYLTSHVPAVGKVVGFTDIIKRINQVFNVGESPEGLPKTVSYNTAEYFGFNDDSDFGSFGFGDFGSGNTQYIETPKQENSFYITQYNTADILPFSDSAAGKS

SEQ ID NO: 80779 - protein, 54 aa, Unknown
  Obtained from environmental sample
  misc_feature (1)..(54): Xaa is any amino acid
MAIADVYDALTSVRPYKKAFSHKEAVRIITEGSGTQFDPQLVEAFISAAEQFKN

SEQ ID NO: 80780 - protein, 153 aa, Unknown
  Obtained from environmental sample
  DOMAIN (102)...(148): LysM domain
  misc_feature (1)..(153): Xaa is any amino acid
CRPSLLGGSDVFSTASAAPSASTGSAAGAYESSAQPPARQETQPVQELQPLPPLPPPEPEPVVIKAPETLAKPKAAVKRARPPAPVKSYKVPAVIPKNGVVYQIQWGDTLWDISGAFYRNPWLYPRIAKDNKIRNPDFILAGRNLRIYPKDRK

SEQ ID NO: 80781 - protein, 303 aa, Unknown
  Obtained from environmental sample
  DOMAIN (3)...(162): Secretory protein of YscJ/FliF family
  misc_feature (1)..(303): Xaa is any amino acid
GEDRGRGHKTLVSSNGLVQVADENTARRMRAILIREDLVPRGTSPWAIFDTERWTATDFERNVNFRRAQTQMITNHIKALDDVDNANVTIVVPDRVLLGEQNPVSASVVITPRPGSDITTNIKKVEGIQKLLKYAVEGLKDENIVIVDQNGNVLNDFSGRAALDRLNLIEREQKQIQQLEAKYRADILRGLQATFTAERVRDLNIKIDMDMSKKAVETKQFLPTVIKERTPNLAYDDSVIVESITRSSSVSTTKWRGTGMNPEGPAGVEGQAPPVFKDMSNLYGEMTQETDVNNTLPNMWRWG

SEQ ID NO: 80782 - protein, 56 aa, Unknown
  Obtained from environmental sample
  misc_feature (1)..(56): Xaa is any amino acid
MVAQCLGQRRIPGLMSLNAELAAWHTRRNQSQKGVDWQFTAPDARIKLKKLYPLIM

SEQ ID NO: 80783 - protein, 293 aa, Unknown
  Obtained from environmental sample
  misc_feature (1)..(293): Xaa is any amino acid
MIKFVPDALKTKELCLLALSLNDDLVFMFSKEGMECPLAWVPREFITKEICLDAVAAYSESLKFLPDIFKIPEVYLAAVTKQGWALVHVPEEFKTYELCLAAVNNHGPALKYVPEKHKTTELLDAALKNDGTALEFVPEEYKSREICLEAIKNNWQGLAIKYVPAPLLTKEFYTEAFELNTKIFEHIPKEFITRQMYKKAVKKNEYSLKYVPAEFRSDKIITEAIKQNGFALDHLDDRQKTERLCLLAVKSHGEALQYVPYPLRTAEICLEAVKHYSSTLKHVPEALKTRDLC

SEQ ID NO: 80784 - protein, 301 aa, Unknown
  Obtained from environmental sample
  misc_feature (1)..(301): Xaa is any amino acid
LPSRAGGFTIKQRWKKHLSQLTEYAGKAAKNPAGKICGPSETARYLGDSGAEYGLLFTKAPGHAKQITDALIDEASKASGSGGKRPLHLIIAAGGDGTSLEVMTSLSRLGEKQRDDFAVLRLPMGTANDGADSFDLGESLNLIVEPPALQKQRAVRLRTASGKGPFLAFNILSVGLDAFVTHMTNKMKDKLPGDSYKLWVDVAALLYDKIYKVGVMDVHSFDGQGNENKTLEEKLLPDAVGESGRRCYGSQQWILPDDRNVCAIKQMPLYKKLAPLRLFISGNTQIGTKAILWMRPRRVQK

SEQ ID NO: 80785 - protein, 137 aa, Unknown
  Obtained from environmental sample
  DOMAIN (11)...(137): Phosphoglucomutase/phosphomannomutase, alpha/beta/alpha domain I
  misc_feature (1)..(137): Xaa is any amino acid
MDPKLVKALDKMILTASGWRSVFSGDGDGESRCKDISPEYKTIAAVAAKAFADSISDIDGVVIVGRDTRPTGEAVADAVIRSLLAEAREIKYAGIVAAPDIMAFTRKTLSAGFVYIFASHTPIGHNGIKFGLSDGGV

SEQ ID NO: 80786 - protein, 179 aa, Unknown
  Obtained from environmental sample
  misc_feature (1)..(179): Xaa is any amino acid
MNLLFLEKPSQKPDYQFIVDSDKLIAECAARLNDLNTIFREPHIVITRGSYSMSEYKITLLGTNNGEAKIRITITDTDGRNDVLFGNYYKIGDNFGRKSKDKNLMGFQIVEIYDDKKDPFVLFSNKQKLTLTDPKVFSGAPTAGDEPITIKEAQTNYPVFNIIERALKLNSADLISGKP

SEQ ID NO: 80787 - protein, 59 aa, Unknown
  Obtained from environmental sample
  misc_feature (1)..(59): Xaa is any amino acid
IRLVCQAMERDEMPAKLALSESMIGKHITSILDKTGFDSIQKFAIYAVGEGLIVPEPAV

SEQ ID NO: 80788 - protein, 168 aa, Unknown
  Obtained from environmental sample
  DOMAIN (1)...(147): Glycosyl transferases group 1
  misc_feature (1)..(168): Xaa is any amino acid
DYYLFFVQLTSYKRADIAIEACIKSGRKLIIAGAGAKKKDINRYKKNDLITFKGRVSDEEQAKLFAEAKALLFPGIEDLGLVPIEANACGCPVIAYRSGGALDTVKEGVTGIFFDEQTPDSLIKAMDHFEANQERFNNRESFNAQVQQFSRSAFKERIQRIIAEKKRV

SEQ ID NO: 80789 - protein, 238 aa, Unknown
  Obtained from environmental sample
  misc_feature (1)..(238): Xaa is any amino acid
LNELYRYAYAETMARTETSLYGTQHPSYDIQINGSGDLVLTDVKQTSAGIVIDEKITGRLTIRDDQDRLIVEINKIARVLELGLEPGIYSITLQQGGDLFRAEVTLVQEQRTLVSMKDFNRIGTAPARRRGGDEKDDAAGTNLYTFFFNIVYEPFPLPLIGFVNIAIGNHKYFQASFVNWNTENFSGFQTGFINTVGGNFNGLQSGVCYTVRGEYIRLHAGFCKYYIGETKGMPGGIC

SEQ ID NO: 80790 - protein, 316 aa, Unknown
  Obtained from environmental sample
  DOMAIN (9)...(314): Delta-aminolevulinic acid dehydratase
  misc_feature (1)..(316): Xaa is any amino acid
FFPGLWRDDPQTQTARHEPIRRIVRETRISADALIYPIFVKDGKGVEEGLPSLPGQTRYSPDTVSKGVDAALNAGARSFLLFGVPEPKTKDETGSGAYDENGAVQQSLRNIKKRFGGDACLITDVCLCEYTTHGHCGLVNNGAVDNDSTLPLLSQTALSHVRSGSDMVAPSAMMDGTVAAIRNALDADGFTEIPIMSYAAKYASAFYGPFREAAGSAPRFGDRKSYQMDYHNSNEALKRIDIDIDEGADIVIVKPALPCLDIISLAASRRIKAPIAGYSVSGEYAMIKAAAASGFIDEYKVMCESAVSVFRAGAGY

SEQ ID NO: 80791 - protein, 94 aa, Unknown
  Obtained from environmental sample
  misc_feature (1)..(94): Xaa is any amino acid
MQYFDTHAHLGLIVDDPIEQLIVIQEARQASVNRIVSICNSLHDFSKVYENLKSTANVYHAVGVSPSEVQNPGKNWLQTHRADSADLSCWGQEK

SEQ ID NO: 80792 - protein, 174 aa, Unknown
  Obtained from environmental sample
  misc_feature (1)..(174): Xaa is any amino acid
ANQPGEGSEEINLCRFWDYAPYLYRSAAFQSGNKLPAHLTDLISPRDADDILSAGKNLAQRFARSPLGNIARESKKLKSEFPFRSLFYTGEKELFINGIIDLLFEDAETVYVVDLKTDSQELPWEHIPQMACYYKAASDLFAIPANKKCRAWLYYLRTGHAVDVTMKAKEFEFR

SEQ ID NO: 80793 - protein, 322 aa, Unknown
  Obtained from environmental sample
  DOMAIN (28)...(230): Adenylate and Guanylate cyclase catalytic domain
  misc_feature (1)..(322): Xaa is any amino acid
ERGRKFWQSTFKQYLSPELIDIMYKEHQQPELAGEAGVRTAYFTDIEGCSTFSEKLGSPARLVELLNEYLSVMTAILIEKHYGTLDKYEGDAIIAFFGAPMPMPDHAEQACRAAIEMQEKLSELRKTWRENKEGKNWPPIVCEMRMRIGINTGEIITGNMGSKVRKNYTMMGDAVNLAARLESAAKYYGVYTMISHHTHALVSDLFEMRKLDVITVVGKSEPITVYELICEKGKLKDLAADAEMKPEMANMPELLDIYNKGVDVYYNERDFSKALEYFEKAAELEPNKKINPAKPTPSGRFIEKCKMYIENPPGSADLIHGQ

SEQ ID NO: 80794 - protein, 275 aa, Unknown
  Obtained from environmental sample
  misc_feature (1)..(275): Xaa is any amino acid
MTDRPSFYLTPKTGYTLQGVAANFFTVAGARTVGNDANSGVVTAEFPATTPSGASVINKAAIEGVTVPATGGTPVTAVTGNDQYTGTVSWNGSPAVFAASTVYTATITITPKTGYTLQGVAANFFTVAGATKVSNSANSGVVTAEFPATPPHAASVINKAAIEGVTVPATGGTPVTVITGNDQYTGTVSWNGSPAVFAASTVYTATITITPKTGYTLQGVAANFFTVAGAKTASNSANSGVVTAEFPQTSPPAITVINKPAIEGVTVSGEPEGLR

SEQ ID NO: 80795 - protein, 313 aa, Unknown
  Obtained from environmental sample
  DOMAIN (190)...(278): PPIC-type PPIASE domain
  misc_feature (1)..(313): Xaa is any amino acid
GISPPDDGRELWLFDKVPISWVPGNILSQYYERTFNNFRAQGYDPNDRWISYYVWKQAYDRAVIHTAILNMMKKSGYTVSEKAVNKAVLQLPQFQDNGRFSLILYNRMTDSARTALWNQTQEEIAMNTFFSDYFSLLTPESEAKFVASMASPTRNFDFVSFNVDNYPESEYLAFAEENSKLFDSIQLSRITISSSEREARKILSSIKDGTITFEDAAKAQSKDNYADRGGDMGVKFCYELDNEISNQADREKIYSLGRGELSDIISHNDSWVFFRVEEALIKADFDDSSVLDRIREYVRNMKEGAWRTGLLTR

SEQ ID NO: 80796 - protein, 331 aa, Unknown
  Obtained from environmental sample
  DOMAIN (22)...(331): Borrelia P83/100 protein
  misc_feature (1)..(331): Xaa is any amino acid
FGSPRIRFAERIAGISHAQVDRGELQRNLAPITFYNNEGPQARIETREQIRQIGAVLGQQIRARQARAGAANRYFVIHSVTAPDGDKLDADIYGLGSNAGVDHIRNLRTIIQGYLQEAYGYTTNDAALLAEYITIYNAVYRGTWTYFSGRFKKPVTDNLNRDSAGLSVRYQEWPGKTLMLIPLNAGGLSSINTSAISDSRVVEKMRAEADKGVPQRQGMVDLKEREAAQARQEAADKKEAARIEEGAIARDKQSLDEEQRQNARDRQQLEQDKASGTITNEEAARRETALSQRETRRDKKSNELNQRESDLAAQRQECARQEQLAQQKQDE

SEQ ID NO: 80797 - protein, 90 aa, Unknown
  Obtained from environmental sample
  misc_feature (1)..(90): Xaa is any amino acid
VFISLPLLKPTIFSGITLSIIGSLKYFDLIYVMTGGGPGVATELMATYMYKMSFISFDMGYGAAVAGGMFILITVVAMVVVNTLNRNAEV

SEQ ID NO: 80798 - protein, 255 aa, Unknown
  Obtained from environmental sample
  misc_feature (1)..(255): Xaa is any amino acid
LIANDSYKQKLAVALASGRAPDCFFSWGGGPMQEFIKNNQIADLTPYMNTGNYKAKFLDAAVNQMTYQGKIWGVPVNNVAVGTIFYNKEIFTKYKLGVPSTIKELELVCDTLKKNNVFPFALANKTQWTGSMYYMCLATRRGGTQPFQKAVDGTGTFTDPAFIYAGEKIQEWVKKGYFITGFNGLDWDAGQARATIYRGEAAMVLMGSWFNMQALNENPVFHAKMGFFKFPRDEQGTGDPHTAFGTVGGYFYHVS

SEQ ID NO: 80799 - protein, 309 aa, Unknown
  Obtained from environmental sample
  DOMAIN (1)...(309): Prismane/CO dehydrogenase family
  misc_feature (1)..(309): Xaa is any amino acid
VLEADMVNIVVHGHDPAFSEMVVFASEARELVDYAKTKGAKGINIVGLCCTANEVTMRHGVRIAGNFLQQENAILTGAVEMMCVDVQCIFPALSSLSECFHTKFVTSSPIARIPGSMYVEFKQDTAFQQAKDLVKTAIDNFTNRDKSKVFIPQVKQNAVVGYTCEQIIGHLDGVTNSRADNFGSYKPAIDAIKAGVLRGAVAIVGCNNPRIRPDFAHFEIMKELLSNDILIVATGCAAHVAAKAGLMNREAKKFCGDGLRRVCELVNIPPVLHMGACVDISRMMLLATGIAKDWGVDTTQIPVVGCAPE

SEQ ID NO: 80800 - protein, 223 aa, Unknown
  Obtained from environmental sample
  DOMAIN (1)...(188): Phosphomannose isomerase type I
  misc_feature (1)..(223): Xaa is any amino acid
LQALEMPNSTTALRNFFEILFTISQELREALTEFILSAHGTENCEWELMQNFAQLYPGDPAVIAPLYLNVFRLEPGEAFFLKAGVLHAYIHGFGVELMANSDNVLRGGLTSKHIDIPELMKVLDFNPLKPQIIKPETDFFCFTYPAPCEEFSLTVMHGTGGVINMPLALAQSASIGIVTEGEVSVSGMVLKQGESAFFPPANSGESPLALQGHFTFYIASVPL

SEQ ID NO: 80801 - protein, 293 aa, Unknown
  Obtained from environmental sample
  DOMAIN (6)...(282): Elongation factor Tu GTP binding domain
  misc_feature (1)..(293): Xaa is any amino acid
MAYNTETMRNIGISAHIDSGKTTLTERILFYSNKIHAIHEVKGKDGVGATMDSMELERERGITIASAATNVTWRNHDINVIDTPGHVDFTIEVERALRVLDGAILVLCSVGGVQSQSITVDRQLKRYSVPRLAFVNKCDRSGANPYRVAQQLREKLGHNAVMIQIPIGLEDKLEGVIDLVTMKAVYFDGKNGETVRDAEIPADLLEEAKKKRDEMLDAVSMYSDELAESYLEGTETVEQIMAAIRKGTLSLELTPVLMGSAYKNKGIQKLLDAVVDYLPQSKRIEKQALDLDN

SEQ ID NO: 80802 - protein, 251 aa, Unknown
  Obtained from environmental sample
  misc_feature (1)..(251): Xaa is any amino acid
DISFEHSAESVADEQGISENDFERKIVMMAHVRVRVENLDETDSLITALMKKYNAYASSTNIEENSRHYSIRVPSPVYKAAMDEINGMGRLLGRSENAEDVTLRYYDLEGRLATKKELLKTFQSYLGKAKNIEEILSVEKRIAELQYEIEGTGKELRNLANRVDYATIELSVFGPIASSPYRGLTLADRLKELFGSFGNFLSLMVTMIIGIVIFGIPILLLLIFFFWLLFGKIGLLKKIWRKAAGEKQKPV

SEQ ID NO: 80803 - protein, 319 aa, Unknown
  Obtained from environmental sample
  misc_feature (1)..(319): Xaa is any amino acid
ESSAKTECPSTTPSHIWPPRHRLHCGGGLQTLRQGAFSERFGCDFDKVRSDTFEWLKVQELTALAFMLGESSHGAVMIAPRNAGFFVGGLADLQGMLNPLEIPENFHIACIMYVAPPFRHTHFNGKQVVVHNRLDQLHEIFSYNLYPGPSAKKGVYGALLTIGEQEKWLTLHAATVQVVTPYDNITTIMHEGASGSGKSEMLELVHREWDGRLLLGRNTKTGSRRIISMNQTCSLYPVTDDMSMCPHEVQDKSGYVHACDAEQAWFVRLNHITRYGTDPQLENITVHASEPLIFLNMQGVPDATVLIGSTSSADLIIVP

SEQ ID NO: 80804 - protein, 269 aa, Unknown
  Obtained from environmental sample
  DOMAIN (1)...(134): Trypsin
  misc_feature (1)..(269): Xaa is any amino acid
MYIRMGDSSSPRYPARVIGYDKALDLALIKTEYKSEFVFSIVDRVVPQVGDTVIAIGSPVGLQKTVTSGIVSSISRRLLQIGDVYQIDAAVNHGNSGGPLVDTSGRLVGIVFASADQFQGLNFAIPAQRLAAALPAMIKGGKAQRPWLGITLSESSGSAEIIYTAPNTPASHHRVTESGKIVTLNGRKITAPQSMLIPAMQDAIFQSPPGELVALETHDSNGTIKKHLVMTVPRPELPLFDAAKLDTRERIAAPLLDDLHPPAITRGNP

SEQ ID NO: 80805 - protein, 275 aa, Unknown
  Obtained from environmental sample
  misc_feature (1)..(275): Xaa is any amino acid
LLAASPRKGRFALDSELKKTPFKPIAIPEGYQGVPAELLEGLEGKLKAAKKELEEIENEKSRLRDESQAMLYRLGSILLMGIAAEDIKSRLISTSSVYLLSGWIPADMINQTAGDLSKITHGRTAIRIYVPDEVPEVLDGSEKVPVSMRHGKFVKGFEGVIFSYGAPLYGTIDPTPVVAIFFTLLFGIMFGDSGQGAVLLLLGLLTGKYSRLAKFKNYSTPLISVGIASIVMGFFTGEIFTREDLLVAPTRAITQAITGRPMTSADLYLPGEKKG

SEQ ID NO: 80806 - protein, 323 aa, Unknown
  Obtained from environmental sample
  misc_feature (1)..(323): Xaa is any amino acid
MKFTRVDITVPPTLVAFAAGTTPARSIRSGALTGKTGSFIILLTQAESYPAKRANPALNEWDIFKANMDALASLGAIDCGAASCGAASCVLSAYPVVSGGIATSLALMAFGNNVGVETKSGAFTPGLSYQGSVLVEIDGMAFRENQKIAEILGASGCWEIAAVTIEEPVFRVTKEVENELQVAEVPLDVLRRAYEYPLARVYPQHGKLGECRHTEWAKTPHQPRPGEHGQRQKGKEGTGPHPKKTRGEKARAPKRDRTRPKPPKETKKRKENPPPPAAGNKNPGPEPPPRKGREGPPQRPRPPPKARATGTETPKNRGEREKP

SEQ ID NO: 80807 - protein, 155 aa, Unknown
  Obtained from environmental sample
  misc_feature (1)..(155): Xaa is any amino acid
LIANWVSLNLARFSYAALLTRALLGFVGALPWLLAAFGFNSPAVRGIFQGLCHQEPGRSLFLFGSQMVVCSRCAGIYAGMAIGALTPPLGFMVRRGRTVVWAAFSMAAFDVAATYFSLYPLNHAVRIATGTFAGWAACAFVLGTIAEGSAADTNQ

SEQ ID NO: 80808 - protein, 308 aa, Unknown
  Obtained from environmental sample
  misc_feature (1)..(308): Xaa is any amino acid
GFTINRPTFVIGTSNSYSADREHWNIYKEILADGWEDRDFIINTQEICKSFSEERSKNTTNAFFPNAARDLLAAVIAAFIREGKKDPAIKKEFFYNVKLKEFLDLSNPQMIMDLLADSPDANAVMSYISGDNAQSQGVLSEMYSIVREIFIGVFAEKGAFSMREFVRGKGNKTLFIEYDLSIGSMLTPVYRLMFDLALKEALGRNKPQGNVYLICDEFKLLPHLRHIDDGVNFGRSLGVKVFAGIQSIEQLYEIYGQSRGRNIAAGFSSVYAFRSNDTATRDFISGLFGKNIVLEKSKALAINLGGKA

SEQ ID NO: 80809 - protein, 293 aa, Unknown
  Obtained from environmental sample
  misc_feature (1)..(293): Xaa is any amino acid
MYWRLWGPDSEAAYFTAESIRRNLNRKVWTIETGQGGDTFLTNQLIHPYAGGLYFASARSNNINFYWSFLFSTFGTITWEALGETDSPALSDSINTAFGGIVIGEMLHRLFIELDKGGIGGRIGASFVSPTDRLTAAIRGYGPEEGPSKIFGSELAFGFSWINAKFFDDDEEVTSWNTPAGFLNYDLVYGDPYTAHSKTPFEQFDFNISLTVTVPFIHNLIFSANGYLASWLLADNDINQASNGITLHFDDYITDKGILDLNNGRENLSFNAHSLDIRKMRVSADLSCGGEKK

SEQ ID NO: 80810 - protein, 198 aa, Unknown
  Obtained from environmental sample
  DOMAIN (43)...(66): 4Fe-4S binding domain
  misc_feature (1)..(198): Xaa is any amino acid
MALNLIYPEYEMIRDYDRCICCRACERQCANEAHEYLDDAGKMICDDAKCVNCHRCISLCPTRALKIVKSGNTYKQNMNWNGKTISEIYKQADSSGVLLSSMGNPEDYPVYFDKILLNASHVTNPSIDPLREPMETRISLGAKPENVQRDKNGRLVKHLPPQLHLSMPGMVSRMSYGSISYNAHENLARAAQGLGILY

SEQ ID NO: 80811 - protein, 295 aa, Unknown
  Obtained from environmental sample
  misc_feature (1)..(295): Xaa is any amino acid
VVQARLQGKPDPKSKANVTIQQAANFTPPTVTIQSPANFSATNTATANLSVNITSQSQPVKNIKIIVNGRLIGKDELTAVKGANLQSERASLTVTGNQKTVNLSLPLNLDPGPNRIEVVAFNGYSESRRYIDVTRNAPAGEKPALPNLWILAVGVNTYDNAGPRLQGLGNLNFCVADAKGLVDSLKAQEGKRYGKVNSLLIADGEAHTPTAANIKQGLKFLEGAAPRDVVVLFLAGHGISAQESKFFFLPKDAAFSGNQVVEPAAPSPATRYVRTGRAGKPAGVHRRLSVQRRKQ

SEQ ID NO: 80812 - protein, 95 aa, Unknown
  Obtained from environmental sample
  misc_feature (1)..(95): Xaa is any amino acid
VRRTEKKTGFGHISRYTKTMLAHNEGYAYFIDGAVPLCREDLSALKRQSKRILGNAFNDPLENIWKEGDSYYREQCEKNYSGLCKNCDEYYTFNF

SEQ ID NO: 80813 - protein, 89 aa, Unknown
  Obtained from environmental sample
  misc_feature (1)..(89): Xaa is any amino acid
FPPVIARGSLPQREDINLFQGGVDEPIYSGFQTKFYIKVNGSTLIRVIKQHAKYSDEGPDIVWKDQVYLSWSAQDGYIVGDGYTAGAKP

SEQ ID NO: 80814 - protein, 263 aa, Unknown
  Obtained from environmental sample
  DOMAIN (2)...(263): Phosphoglycerate kinase
  misc_feature (1)..(263): Xaa is any amino acid
MALKKKTVKDIDFKGKRVVMRVDFNVPMDKGVIQDDTRIQAALPTIKYVLENGAKSLVLMSHLGDPKKDMAKAKEKAEKAGKPFDEAQYLAYKHKMAPLAAHLSKLLGKDVALAPDCVSDETKAMAAKLDGGAILMLENTRFHKEETSKEAADREKMAKALSELGDVYVNDAFGTAHRAHASTETIAHYLPAVAGFLMEKELLFLQDKVVDAPVKPFVAIIGGAKVSSKIAVLETCFQGRQHDHRRGAWPTPFQKRWGRASAS

SEQ ID NO: 80815 - protein, 169 aa, Unknown
  Obtained from environmental sample
  misc_feature (1)..(169): Xaa is any amino acid
LNIILLLSPGFLLFQSCATGSFAVVDNELESNSHTGGANYVASIKTLEKNRNILYKNGDKILYYLDKGMLQHYAQQYSESSKLLQEGERAIEEAFTKSISQEISTYLVNDNVRDYGGEDYEDIYINVFNALNYYHRGDSERGMVEIPRDEHKLRYLTVQYDAALTRPSE

SEQ ID NO: 80816 - protein, 318 aa, Unknown
  Obtained from environmental sample
  DOMAIN (190)...(269): Toprim domain
  misc_feature (1)..(318): Xaa is any amino acid
MMAELSHQNLARKFGIEIVYEKSAEGEDNKEEDEYSRREQLFELYRRTAVSFQHFLLKKAEGKPALDYLLSRKISAPMIERFNLGYAPANRDWLYQFLQSKGYSEEFLNGSGLFSDNYKGMAFFSDRLMFPIADRRGRIVAFGGRALPGTIQSDGKEPPKYINSRETAAYKKSQILFGLDLALPEIRRSKTVYLAEGYMDVIALHQGGVTNAVASCGTAFTDEQARLLRNWADTAILVFDADEAGQKAASKAIITCRKNGLGCSLALSGLDGGAQKDPAEILQNFGEDYLKRCMNSVIMDLDYLIAKAKALFDVTTPK

SEQ ID NO: 80817 - protein, 167 aa, Unknown
  Obtained from environmental sample
  misc_feature (1)..(167): Xaa is any amino acid
DGFSRGGSRFHLRHAQGIVDLAANGPAVRLALSLTTADEDVRRRLMPITASQPLHKVKEALHCFQERGGGRVTLEAVLLGGVNTRPEDARSIAGFAKGLDVVVNLIPWNPVKGLEFEGKALRPPSNAEAETYTQELEKLGLNVTRRFRRGRGVMGACGQLGKLGIRN

SEQ ID NO: 80818 - protein, 319 aa, Unknown
  Obtained from environmental sample
  DOMAIN (7)...(222): Caspase domain
  misc_feature (1)..(319): Xaa is any amino acid
EVWLWHGNYSGISRLANPTNDANDMAAALQSLGFTVDKVLNGDLEQMETAVTNLKKKLGGSPDTYGFFFYAGHGVQANGQNYLIPLPATNIQNETHLRERAVSLQFVLDSLSEAGNKLNMIVLDACRDNPFGWSRSGARGLTVVSYAPSGSIVMYAAASGQKADDGSGRNGLFTGHLLNNLKTAGLSVYEIFDRTMGDVKNTTGGRQDPELSIRFSGANSVYLGSRPTPYGSVTVTSDIAGEIMIDGKTTGRRIKAGGTETVSNVSTGSTEVAVRGDDGKITKAPQDVMVRQGQTVAAAVKAPAARAPVQPTPARPLRY

SEQ ID NO: 80819 - protein, 118 aa, Unknown
  Obtained from environmental sample
  misc_feature (1)..(118): Xaa is any amino acid
MGWFTKKSKEPAGKKQHQHDEIWIRCQSCSAHIFKQDFLNNISVCPKCGWHGKLNAYERIGITLDSGTFREMFETVRPCDPLRFVDGKGPYSEKAESAPRQDQALTSRGDRYGKITGL

SEQ ID NO: 80820 - protein, 156 aa, Unknown
  Obtained from environmental sample
  misc_feature (1)..(156): Xaa is any amino acid
MLVCTGLYAQEERQEQEEQQERDEKKSGREYKPREQKLYIDIPLTFAEVMTINLIGNGYWRLWGPDSEAAYFTAESIRRNLNPKVWTFEIGQGGDTFFTNQFIHPYAGGMYFASARSNNINFYWSILSPAFGSATWEALGETDLPHQAFSPSPGKN

SEQ ID NO: 80821 - protein, 293 aa, Unknown
  Obtained from environmental sample
  misc_feature (1)..(293): Xaa is any amino acid
GPKARSRAIRSSVAAGKAYLFQAVGGRTVDSAVFGAEEKVTGWSGRSFRVADFSSFTTPGDYRVKFGAAESYPFTIGTKVLQAKTGPGQLAFFKTFRSKDEGDKNLPIFGSSRTQNIYGGWFDATGDMGKHISHLSYANYFNPQQIPLVAWALLHARDCQPEAFGATALEEAAWGADFLLRALSSDGYFYMSVFDNWGDGYRWTEPAAGSKAPREICAWSGSDGNRSAAYQCAMREGGGMSIAALARAAKAEISGDSTATQYLAGAVRAYAHLKANPRRIRGRQRSVIILGNP

SEQ ID NO: 80822 - protein, 97 aa, Unknown
  Obtained from environmental sample
  misc_feature (1)..(97): Xaa is any amino acid
MYKSARVPGIRYRHCSAKLYKGSVSSAGASSPYSLYSASIASFTTGELYNHADAMGFIRLYGLPTLVRALMQNDAKSKKPVKKIQEKSDSKSKGISG

SEQ ID NO: 80823 - protein, 133 aa, Unknown
  Obtained from environmental sample
  misc_feature (1)..(133): Xaa is any amino acid
MKNNAKQVLWAGRLEEKPEAEAFAFQASISVDRRLVQEDIAGSRAHAAMLAKQGIIPAETAQALDRELERIAEEISSGKLIIEQNAEDIHSFIERVLTERLGDAGRMVHAGRSRNDHVALDFKLYLKKAVPGL

SEQ ID NO: 80824 - protein, 127 aa, Unknown
  Obtained from environmental sample
  misc_feature (1)..(127): Xaa is any amino acid
MIKQAVIVAAGLGSRLKEKTVSKPKGFLELGGIAIVEWSVQKMLACGIEKIIIGTGYHAEAYNELAKKYPAIQTAFSADYETTSSMATLSVCAPFVTGDFLLLESDLIYDSIGLTVLEHTRHKRGKK

SEQ ID NO: 80825 - protein, 323 aa, Unknown
  Obtained from environmental sample
  misc_feature (1)..(323): Xaa is any amino acid
GSSWAYNAAARPFLGVKRSLTLFRVLISSITGVLEIYNGYGGIYDAPMTFQNAFSLYQLEMNYKNYFHIDFGTGVIWPKRFELGYLFPLLDNFINQNLVGKTDNTSANINLKGRYPGLGSIWFSFFADEMEISSMTKAFELDRHMFAFQAGLQGMIPLLPFASFTLSYTKVEPYTYTHLRHYLPWYDRTNGPMEKAYVNNGVSLGYYLAPNSDEIKLRVESPLFYKKSVHLQYQLIRHGADFGPHQVDGSSLISEPDIDRDIKKSLTKNFLNDGAYQWLHIAKVGGEYKFGSLPLTIFGEAGVSYSYFTDISNENSANLTMGA

SEQ ID NO: 80826 - protein, 303 aa, Unknown
  Obtained from environmental sample
  misc_feature (1)..(303): Xaa is any amino acid
LCRYMQETFNIPKKTTLAAIKQGEKALEEFNSVLTDNGKKIIADVEEKGKFAVVIAGRHYQYDEHINHNLSHYFTSMGIPVLTLDSLPSHGKIPLAKSRIEITNNNHARLLGGAIAAAEHPSLEYVDVFSFGCGHDAVYSDEIIRVMDEISSKAPLILKMDESEIAGPLRIRVRSFIETVMIRRKREAHNTKPLGDPYPVKYTKKEPKKVLLVPNVSRAFCMIMSGALANEGFLVEPLPMGGIEAIAMGKKYVHNDMCLPAQLVVGEAILALKAGNTTRIRFWSLPGKCYAMPLSADLIIGGP

SEQ ID NO: 80827 - protein, 96 aa, Unknown
  Obtained from environmental sample
  misc_feature (1)..(96): Xaa is any amino acid
VRDIATIIKTYFRHTDCAVRYGGDEFILITTAKNDVQRIIERINNAVDNQNKKNIRPYKLCISYSYDVYKVNSGIQIQDFLAQLDVKNKSTEVKTE

SEQ ID NO: 80828 - protein, 295 aa, Unknown
  Obtained from environmental sample
  DOMAIN (129)...(251): HD domain
  misc_feature (1)..(295): Xaa is any amino acid
SGFILYPHECENGNGLFKKREGDFPWGAALIAAADSIDVAYQIQHIQDTDLETLRGKISANLGAYSTKAATGILLDVLDAGMLEKLRDGNISSTMDESMPRWEVDLSDPSIIKIAGFISRIIDYKSRFTRKHTSQIANRAWLMARYYGYSKEDKAMLFLASSLHDIGKIAVPVEVLEKNGPLNDDEFQIIKNHVRFTNDWLRNIPDFEVISSWASNHHEKLNGSGYTFGKPGEELDFNSRLIACIDIYQAVSEERPYHCARSHEETMPVLYSMAAKELIDTQISKTWRSTWGENP

SEQ ID NO: 80829 - protein, 292 aa, Unknown
  Obtained from environmental sample
  misc_feature (1)..(292): Xaa is any amino acid
MKEILGSKTVSFNTNGGGYIPSQNLIMDEIVKRPPDPSKEGFVFSDWYTDNYTFELPWDFDTAPYGYMTLHAKWDMSVPAVNTFTVTFDSGGGSGVSPIIVESGRTIAKPADPTKTGYDAAFTGWYEQNQTDTFDFNAPITANITLYAKWRPYELGERGPGDGIIIYLSEEGFIITYDNSTAHYLEVTPFDIGRPVWASPDYIHTDIPGTAKELGSGRENTRLIIVQLGSNAPAAHECFVYTRNGKSDWFLPSIDELEQLEKNRGLIGNLNGNYWSSTQYDAMRCCDNRGKP

SEQ ID NO: 80830 - protein, 176 aa, Unknown
  Obtained from environmental sample
  DOMAIN (3)...(175): Glutamine amidotransferase class-I
  misc_feature (1)..(176): Xaa is any amino acid
MVLLIDNYDSFSYNLYQVIGAIESDIKVVRNDEISVDEIKRLAPSRLVISPGPGKPSDAGICIEAIKRLYSSMPILGICLGHQAIYEAFGGTVSYASRLMHGKSSQVKLDAENVLFKGLPPVISAARYHSLAGIESTLPDALRITARTDDGEIMAVCHREYPVYGCSSSSESERVR

SEQ ID NO: 80831 - protein, 330 aa, Unknown
  Obtained from environmental sample
  DOMAIN (52)...(328): Pyridoxal-phosphate dependent enzyme
  misc_feature (1)..(330): Xaa is any amino acid
GFPHAQIRPRIGDYGGQYIPETLMNEIINLEQAYNHYKDDPAFKAELDALLKNYAGRPSLLYYAEKMTRDLGGAKIYLKREDLNHTGSHKINNVLGQTLLAKKMGKTRIIAETGAGQHGVAAATAAALLGMECEIYMGKEDTERQALNVYRMELLGAKVHPVTSGTMTLKDAVNETMREWVSRVHDTHYVLGSVMGPHPFPVIVRDFQAVISREAREQILAAEGKLPAAVLACVGGGSNAMGIFYNFINDREVKLIGCEAAGSGINTEKHAASIAKGQVGIFHGMKSYFCQNEERKSLPCTQYRRDWITPVSGLNTHGSMTQNAHSTRQS

SEQ ID NO: 80832 - protein, 273 aa, Unknown
  Obtained from environmental sample
  misc_feature (1)..(273): Xaa is any amino acid
MAIFLTALGAALAAILITILSRIFTEKNKADERMRLMFDSMPLGANLHNRNYKYFDCNASAVNMFGLSGKQEYFEKFFQLSPEYQPDGELSSNKMAVVTDKVFAEGYHRFEWMHQNLNGEPIPCEVTLVRVEHNHESMVAAYMRDLREIKEADERARIMFDATPLGANFWSQDYRVIDCNQESLRLFDISSKQEYIDRFFDLSPEYQPDGGTTLEKGIGFVKKAFEEGYQRFEWTHRKLKRDPIPCEITLIRVNIKTAILLWDTRAIYANKKQ

SEQ ID NO: 80833 - protein, 292 aa, Unknown
  Obtained from environmental sample
  misc_feature (1)..(292): Xaa is any amino acid
MVQSSIALDSHLDVFEKGIAKKVDFSFSGPQSGRLAQMIRGGKVELGSIHTYLELFGRYFLDLTPRVALVAAEAADKNGNLYTGFNTEDTPVIIEATKFKQGIVVVQVNKIMDTLPRVDIPGDWVDFVIQSPRPFYVEPLFTRDPALITNAHILRAMIAIKGIYAEYGVRRLNHGIGFDTAAIELLLPTYGKELGLKGKVASHFILNPHPTLIPAIEDGWVENVFCFGGEFGMEEYIKARSECFLYRGGRDPFPRTTRWAQVAGHYPKKIVIGGGLEIKRRGRRATGTSSRV

SEQ ID NO: 80834 - protein, 312 aa, Unknown
  Obtained from environmental sample
  DOMAIN (230)...(310): SecA Wing and Scaffold domain
  misc_feature (1)..(312): Xaa is any amino acid
GVIQVSDRPSGRATNLPVNRNDEDDVIYLSEKEKYNALCDEIEEAHKKGQPILVGTVSIEKSEIMDTLLTRRGIRHEVLNAKNHAREAVIIAEAGAKGSVTIATNMAGRGTDIKLGGNPEHRARKRAGTESAQSDSEEAAKKYAAIYKEEYEKWKKDYEDVKAAGGLYVIGTERHESRRIDNQLRGRSGRQGDPGRSKFFISLDDDLMRLFGGENIKGFMSKVGMSDGEPIYHPWLNKSIEKAQTKVEERNFEIRKHLLEYDDVLNQQRKFIYEQRDAILEDANLTERVNTATDDMVNFYLDTYRETSRKDQ

SEQ ID NO: 80835 - protein, 174 aa, Unknown
  Obtained from environmental sample
  DOMAIN (1)...(174): tRNA synthetases class II (D, K and N)
  misc_feature (1)..(174): Xaa is any amino acid
MDLEMLRERARIIRQVRSFFDAKNYLEVDTPLLSPDLIPESCLEVFETKRVTPGSGVTPYWLIPSPEIWMKKIIAKYYTNVYQICKCFRNGESVGFLHSPEFTMLEYYTMNADYMDSLALTEELFRNFAASESSPNTDSPFCLPFERVTVADVFSRYAGFDLFAAAENARRAGS

SEQ ID NO: 80836 - protein, 320 aa, Unknown
  Obtained from environmental sample
  DOMAIN (218)...(319): SIS domain
  misc_feature (1)..(320): Xaa is any amino acid
MDLDSAEKDGYPHFMLKENMEQPKVIRETVNAAINNYKSIIDNLDVTSFTKIVITACGSAYNAGVVAKYVFEKLCGCPSIEVELASEFRYRDTVINKKTLVILISQSGETADTIAAMREAKAKGSVTLAIVNVVGSTIAKEADFCLLTAAGPEIAVATTKAFSAQLVLLYILAVWFAVKLGRLSREAEQELLSQVAALSGKTADILKQIDSIQKYASTCVGYKSIFFIGRNIDYAIALEGSLKLKEISYIHSEAYAGGELKHGTISLIEEDTLVVAISNCPPLYGKIMSNVEQVKSRGAKVLLIGNCPNVELGHLINGEP

SEQ ID NO: 80837 - protein, 316 aa, Unknown
  Obtained from environmental sample
  DOMAIN (1)...(316): AMP-binding enzyme
  misc_feature (1)..(316): Xaa is any amino acid
MAERPRMRNLVVIDGFRDHDYLQTLHKILPEIRSQQRGELNSPTLPHLRRVIFLGMEKHRGMYSIPEVKSMAVMISDAEYEARKALVSPHDVVNMQYTSGTTGFPKGVMLTHVNIVNNGYWIGYHQAFSPKDRVCLPVPLFHCFGCVLGVMACINHGAAMIILESFNPVHVMTSVEEEKCTALYGVPTMFIAVLEHRIFDRIDFSSLRTGIMAGSVCPEPLMRRVIEKMNMTELTICYGLTEGSPVMTQTHVDEEFIYKVSTVGRSMPGIEVIVADPATRQELPRGSQGEVMCRGLHVMKGYYNMPEETAATVTPE

SEQ ID NO: 80838 - protein, 83 aa, Unknown
  Obtained from environmental sample
  misc_feature (1)..(83): Xaa is any amino acid
MNQKFHDHLAKETSTLREQGLYKTERVITTPQRPRMTANGKNVVCLCANNYLGLANHPELIAAAKAAMTPTASACSADSDQGL

SEQ ID NO: 80839 - protein, 280 aa, Unknown
  Obtained from environmental sample
  misc_feature (1)..(280): Xaa is any amino acid
MRLRLASTVTANSALVLKMADTPVIRQHFMNPDDPYLRAMAYTELELYKEHFENHTVFWVSDIDRIFYTAGNEPYIVNPDDPASYWYNLTLYETEKFNFNINYNPNLDQINLWVNVPVFADAHDVKSPIGMLGIGINLTNFSNFVASSYSEFDKNITPYMFNKYNEITSAADYNLVENKVRLDDLLGNTGKELIRVSHELSEGESRSFVYDKKIYLVNSIPEMEWYLAVSYPMPGFWALNRAMNTVFFSMLFLILFLFIVINVFIAHSENEIAKQNLQLN

SEQ ID NO: 80840 - protein, 248 aa, Unknown
  Obtained from environmental sample
  DOMAIN (12)...(247): Uncharacterized protein family UPF0007
  misc_feature (1)..(248): Xaa is any amino acid
FFAEILWIRVKIAVVICAAGASSRMKTEGLPVRKKEYQKLSNGNTVLGTVVSTFARVPSVRVIVISIPENDENAAHAALPENLLTSETPKILFVTGGSTRRHSVFNALRLLTDFAPDYALIHDGARPWVSTSLIENIITAVKKHNAVIPLLPLTDTPKECESSWETQTDNDASAVFIKNHLKRKNTGIAQTPQAFKFPEILEAHKKAANVETEEFTDDAEIWGRFCGQVAVIRGEPENRKITFPEDLI

SEQ ID NO: 80841 - protein, 71 aa, Unknown
  Obtained from environmental sample
  DOMAIN (10)...(56): Bacterial regulatory helix-turn-helix proteins, AraC family
  misc_feature (1)..(71): Xaa is any amino acid
MYKLNDVLEDVLDEIENNLKDDINADALADDFSMSSIHLQRLFKQAFKKPIGTYIRQRKLTASIMDLLYSG

SEQ ID NO: 80842 - protein, 74 aa, Unknown
  Obtained from environmental sample
  misc_feature (1)..(74): Xaa is any amino acid
MSVLDLVGNTPVIELKNIFKSANGVSLFAKAEYLNPSGSVKDRAAKAMILHGINSGQLTKDKILLDSTSGNTGI

SEQ ID NO: 80843 - protein, 121 aa, Unknown
  Obtained from environmental sample
  misc_feature (1)..(121): Xaa is any amino acid
MAEFFNSLTLFLQTSVQMGTHILFAVLGGICCEKIGNLNLGIEGMMLLGASVGFSAGISTGNPAAAVLAAGAAGSLGALIYGIITITFRGNQVVTGLILTIFGTGVSGFLGRDLSGKALPE

SEQ ID NO: 80844 - protein, 138 aa, Unknown
  Obtained from environmental sample
  DOMAIN (22)...(130): Aspartate/ornithine carbamoyltransferase, carbamoyl-P binding domain
  misc_feature (1)..(138): Xaa is any amino acid
MAYINQYTSRLDTLNFKDMFGGDFFLTWEKSFDEILTTFTVADALRWLRENNISTRIFDSGLGVSLFRDNSTRTRFSFASACNLLGLAVQDLDEGKSQIAHGETVRETANMISFMADVIGIRDDMTFRPICHAGAHAR

SEQ ID NO: 80845 - protein, 133 aa, Unknown
  Obtained from environmental sample
  DOMAIN (4)...(132): Cys/Met metabolism PLP-dependent enzyme
  misc_feature (1)..(133): Xaa is any amino acid
MDISTICVHGCEKKFDETGSVAVPIFASATFAHPKVGKSTGFDYSRSLNPTNVHLEETVAALEGGNYAVAFSSGMAAVSALMELFSPGDHIIASDDLYGGTFRLFRHISEKNGRKIVLCLSVKALDNPGKNPG

SEQ ID NO: 80846 - protein, 175 aa, Unknown
  Obtained from environmental sample
  DOMAIN (52)...(170): Response regulator receiver domain
  misc_feature (1)..(175): Xaa is any amino acid
KKQNRRAVDKFLSQPSVPRQPLPKVINECLGVDKQQPEKAQSADMPGIYEGRRILLAEDVEINREIVQTLLEPTHLEINCAVNGEEAVKMFKAAPNKYDMIFMDIQMPEMDGYEATRRIRAMNDSRAKTIPIIAMTANVFREDVEKCLMTGMNDHIGKPINFDEILNCLNSYMAA

SEQ ID NO: 80847 - protein, 217 aa, Unknown
  Obtained from environmental sample
  DOMAIN (1)...(213): TatD related DNase
  misc_feature (1)..(217): Xaa is any amino acid
MSPAFDRDREEVIARAQALGVKALIITGSSIESSSGAAAFVRENARLNCKSTAGVHPHNAKDWNDKSLARLEELVALFGSDIRAVGECGLDYNRNFSPQDAQRKCFEDQLKLAIKIGKPVFLHERDAFGDFFSILKQYRTGLPGAVVHCFTGGMRELEAYLSIDCYIGITGWVCDERRGGHLVPLLPAIPADRLLLETDAPYLLPRSLPHSGSRSVK

SEQ ID NO: 80848 - protein, 284 aa, Unknown
  Obtained from environmental sample
  misc_feature (1)..(284): Xaa is any amino acid
VATTEQINIDFSNFLAHLYQRDGTLYNEDGSRTLLDGETAIEAFDVYTKFFTHYKTPIVYNFLNRFRTGEMPLAFADYTNFNTLEVFAPELRGLWGFARMPGLRKADGGIDRSVPTGTLASMIFSNAKKPELAWEFLKWWVSADTQLRFGRELESVMGAAARYPTANFDAFTRLSWGSDQMAVLREQRSWTVGTPEVPGGYYVSRHITNAVRRILNEGEDTRETLLDYSITINDELLKKRKDSVWIKGGPKGPPRSSMSLARYSEKKKAAFSYLLREIAKSRVC

SEQ ID NO: 80849 - protein, 255 aa, Unknown
  Obtained from environmental sample
  DOMAIN (28)...(254): Glutamine cyclotransferase
  misc_feature (1)..(255): Xaa is any amino acid
MRTGSAADLMLGLSVFLRRGGYRGGGRRCFALPAVALLFAAALPAAAQWLHALPGGVKEAVPTVAPEIVRVVRHDPTAFTQGLLFHDALLYESTGLVGFSGLRRVDPRSGTVRYSAALGGDYFAEGIALFGGEIVQLTWKNGTALRYEFPSLRRGKLPPFRYAGEGWGLTNDDKRFIMSNGSDTLYFRDRKFEVARAVPVTLNGKPLIHLNELEYVKGFVYANVWYKNFIVEISAESGVVKKVIDCSELERVENP

SEQ ID NO: 80850 - protein, 331 aa, Unknown
  Obtained from environmental sample
  DOMAIN (6)...(326): PEP-utilising enzyme, TIM barrel domain
  misc_feature (1)..(331): Xaa is any amino acid
DEIRDQSVRGKFKGFQVWTNADQPEDAKRAFDFGAQGIGLCRTEHMFFDKDKLKHFRAMIVSDTDEERRKRLKEILPLQQKDFYGIFKAMEGRPVIIRLLDPPLHEFVPHTKTEVEELAADLHVSPESLQPKIDRLVEANPMLGHRGCRLAITYPDIYDMQVEAIARAAVECVKQKIPVNPEIMIPIVITARELKFLRPNAEKVIKKVFEETKTSFHYKIGTMIEVPRAAIRAGHIAEYADFFSFGTNDLTQMTFGFSRDDVASFLPVYLEKNVLEVDPFKSIDEEGVGCLMEVAIHLGRSAKPDMTIGICGEHGGDPTTMTCRDNGGGTP

SEQ ID NO: 80851 - protein, 186 aa, Unknown
  Obtained from environmental sample
  misc_feature (1)..(186): Xaa is any amino acid
MLNNKKDPVFIVKVCMLMLVGAFVFSSVSAAFNARAQAQTVASSEELPSFRNMGGIIPNSRNIPRIDFLSFLTNIGRTTGIYAFITNITNTETPAGLPITVYGWQELIMVLVGFLVIYLGAAKGFEPLLLVPIGFGVVFANIPNAGMGSPGVWNEAEHIFEHPGVPQRYYNAGSELGQYVIGGPSG

SEQ ID NO: 80852 - protein, 295 aa, Unknown
  Obtained from environmental sample
  DOMAIN (233)...(295): FKBP-type peptidyl-prolyl cis-trans isomerase
  misc_feature (1)..(295): Xaa is any amino acid
MAGFLITCIAGTVSAAPNDASYGNGMFARINTDKGDIVVLLEFQKTPLTVCNFVALAEGKMNVTGGKRFYDGLVFHRVIDDFMIQGGDPQGNGRGGPGYEFPDEIVPSLKHDGPGILSMANAGPGTNGSQFFITHVATPWLDGKHTVFGRVVEGQDVVNAIRQGDKIRSITIIRNGPLANQFKADQAAFDALLQKSAGSGNAKRDADIALINTKYPSAVQSPSGVKYIIQKKGAGNKPAPGKTVQVNYRGSFLSGQVFDTSDTRGRPLEFPAGVGAVIKGWDEISADLIHGGPNG

SEQ ID NO: 80853 - protein, 114 aa, Unknown
  Obtained from environmental sample
  DOMAIN (3)...(111): GTPase of unknown function
  misc_feature (1)..(114): Xaa is any amino acid
MALNCGIVGLPNVGKSTIFSALSSAPAEAANYPFCTINPNIGIADVPDERLVKLTEIFNPQRTIPASVEFVDIAGLVKGASKGEGLGNQFLSHIREVGVIAHVARCFENPEYVH

SEQ ID NO: 80854 - protein, 123 aa, Unknown
  Obtained from environmental sample
  misc_feature (1)..(123): Xaa is any amino acid
MNQKNFPLDKSALEKIAQKYPTPFYIYDEKAIIENVRRIKSAFSVFPSYKNHFAVKALPNPYILKILAAEGFGADCSSYPELLLADIAGMKGEDIMFTSNETPASEYEAAKKLGLGRSDHWGP

SEQ ID NO: 80855 - protein, 319 aa, Unknown
  Obtained from environmental sample
  misc_feature (1)..(319): Xaa is any amino acid
DQEELLEKISKNCEETKKVPEDFLTEEFCLAAVQEDSSALKYIPDAKKTEAVWLAAVQQDGSALKFVPEALMTEALCLAAVQRYGHALKYVPDSRKTQVLCLAAVQEDWNALKFVPEALKTEAICLAAVQKDNSLLKYVPDALKTEAVCLAVVQQNPQALGDIPKKLRTEAVCLAAVQEGGYGNALKYVPEVQKTEALCLAAVRQNGRTLEYVPEAQKTEALCLAAVQQDGSALEYVPDAKKTEAFYLAAVKQNGSALKFVPDAMNPEPFEAMIGSVISSGSGGSEYGIELIKKWKLSKEQKEWLKKIQTRDHLGGKPG

SEQ ID NO: 80856 - protein, 126 aa, Unknown
  Obtained from environmental sample
  misc_feature (1)..(126): Xaa is any amino acid
RAPFGEYNQEICDGALSAGYIHVGWRQGGSWRVNLDSNDWVANESSPAYKTPQEVFDKIVHIASTPGGLNGGIILMHLGTERTQRSQQVYTILGKLIDNLRSMGYQPVTVSTLLYRSGVDIDLVRF

SEQ ID NO: 80857 - protein, 296 aa, Unknown
  Obtained from environmental sample
  DOMAIN (17)...(243): haloacid dehalogenase-like hydrolase
  misc_feature (1)..(296): Xaa is any amino acid
NGILLKGGEALETAHKIQTIVFDKTGTITEGKPAVTDVVAAPGVYEGYLLKTAASAERGSEHPLGRAIVNGAIELGHHLSDADNFSAITGMGIEATVGGSAVLAGNRKLMDERGIALAELEAAAEKLMAEGKTPMYVAFDGKAAGIIAVADVLKKSSKTAIERLHKMGIEVAMITGDNQKTANAIAKQTGIDRVLAEVMPGDKAAEVKKLQEGGRKVAMVGDGINDAPALAQADVGIAIGSGTDVAMESADIVLMRSDLIDVPTAINLSKQTIRNIKQNLFWASDIMCWISRSVTP

SEQ ID NO: 80858 - protein, 170 aa, Unknown
  Obtained from environmental sample
  misc_feature (1)..(170): Xaa is any amino acid
MSNHERSDLIPLEILDTSLRDGAQGEGITFSVQDKLDVVRALDDLGISWIEAGNPGSNPKDMEFFRLAGDLNLKHAKLCAFGPTRKKGIKTNEDSGLLSLLDAQTHAVVIFGKSWDFHVSEVLRVSSEENLAMIAETITFLKERESRFSTMPNIFLTAGRQIRIRPLHFK

SEQ ID NO: 80859 - protein, 329 aa, Unknown
  Obtained from environmental sample
  DOMAIN (63)...(237): von Willebrand factor type A domain
  misc_feature (1)..(329): Xaa is any amino acid
LGFPTDQIGRDNYFDYDYAPPNDGKPFAVHTEVGTAPWNNKHLLARIAIKGKEFPVGERPPVNLVFLLDVSGSMDAPNRLPLVKSSMKMLVNELKGTDKIAICVYAGAAGTVLQPTSCDNKEKIIAALNGLKADGSTAGGEGILLAYNLAEQNYNPLAVNRVILCTDGDFNVGVTNRGELTDLITEKAKTGVYLTVLGFGMDNFNDGMLKQLSTKGNGNYGYIDTIEESKKILVEQLSGTLVTIANDVKIQIDFNPATVGAYRLIGYENRVMRNEEFNDDKVDAGDIGAGHTVTAFYELIPPGDEVDALPSKDPSNYGPPPGRLGILPA

SEQ ID NO: 80860 - protein, 304 aa, Unknown
  Obtained from environmental sample
  DOMAIN (197)...(297): LeuA allosteric (dimerisation) domain
  misc_feature (1)..(304): Xaa is any amino acid
GFPPGYREAAAEFGGAEEIGDDRRVGIHAHNDMGLALANSIAAVQAGCVHAQGTLVGFGERCGNTALAALIPSMELKMGRRCLPSGNLSRISELTRRVAEIANVSINDDMPYVGAHAFSHKAGMHADGIIKNRQTFEHIDPSMVGNDRHFLMSEVGGRSAIAEKAKKIEPSVTRDHPVTAALADKIKSLEARGWAFEGADASFEILVRRELGIYKPLFNIEAYRVMSEHPSSEALACSHAWVKVLVEGQYEIAAAEGDGPVNALDGALRRALLRFFPNLAKVRLEDYKVRVIDGKEQPPPASVF

SEQ ID NO: 80861 - protein, 165 aa, Unknown
  Obtained from environmental sample
  DOMAIN (122)...(161): Pentapeptide repeats (8 copies)
  misc_feature (1)..(165): Xaa is any amino acid
MPRTKTPNQDLQGPAKGIGAEPSATAVVHDAPDAATDAPQMGLSPDDLRAAIQDNTFHRDQARPEWLVNMLVDHRLWCQTDGREGRQAELTSLLEGQTFEGADLYEVVLSRAWLEGAKMSGVNLHSSALFEAKLKDAVLANAKLYGAHMASAELAGADLRMQTCA

SEQ ID NO: 80862 - protein, 170 aa, Unknown
  Obtained from environmental sample
  DOMAIN (33)...(115): ATP synthase, Delta/Epsilon chain, beta-sandwich domain
  misc_feature (1)..(170): Xaa is any amino acid
MILDGECDSIAEQDFFMAGGIDDVLKGRNNAGSVKFRGAYPLPSFFSDKAEAIILTVMDGEIGVYAHHAAFTAPVVTCKLQIKTESGEWRTAFIADGILEVKDHKNVLMVDTAEWPEEIDKERALADKKQAEEDLENAHLKFEVDRVKARLRRADYRLMVWGMRKEGEGN

SEQ ID NO: 80863 - protein, 286 aa, Unknown
  Obtained from environmental sample
  misc_feature (1)..(286): Xaa is any amino acid
VELCAEEGRYTFDQSSEPSIFYGGLAKGIVDIFKNIGERFKYGGQPGKEQRIYYFNTKEIMGNKYGTPSPIPYLIVDPNINLRLTISLRANGEYSYHIMNPIAFYTNVCGNVEELYTRDKIDSQLKSEIVTVLGPSLAKLGAGLEYHMISAQTDKLAELLNEALTAKWREGRGIEIVNFGITCTATEEDETRLKQLQTAAVMRDPTMAAASLVNAQSDAMRTAAGNTSGAMAGFMGMGMANMAGGMNSQNLFAMGAAQQANAQQAAAQQAAPVAAVPPSRRRPPHN

SEQ ID NO: 80864 - protein, 319 aa, Unknown
  Obtained from environmental sample
  DOMAIN (1)...(319): EPSP synthase (3-phosphoshikimate 1-carboxyvinyltransferase)
  misc_feature (1)..(319): Xaa is any amino acid
MGNSGTGLNLFCSAAALGERERRFDGDASLRVRPVRPLLSALEQLGAVVNVDGPERDLPFVIRGPLKGGRATVDGISSQFVSSLLFAAPLMPKDTHITAHNLHEQPYIEMTLWWLAGQEIEIEYSKELTSYKVRGGQRYKPVDTVIPADFSSAIFAATAAAIGGAPIELCGLDFSDTQGDKEVFRHLEAMGATVERGSDTVIVTGGGLSGTIIDLNRTPDALPALAVAAAVAEGETVFTNVAQARIKETDRIAVMAEELGKMGISAKELPDGMVVRGGKLKGARVNSHKDHRVAMGLAIAGMNADGETEIDAAEAAEVT

SEQ ID NO: 80865 - protein, 288 aa, Unknown
  Obtained from environmental sample
  DOMAIN (1)...(244): UvrD/REP helicase
  misc_feature (1)..(288): Xaa is any amino acid
VGDDDQSIYGWRGAKIENILTFEKEFPGTKIFKLEENYRSTSAILNFANAAVRPNLQRARKELWTSVAEGAPVLINRFRDDRQEAEHVASECGGLLRRMAGTDVAVLFRNNSQSRVFEESFRRRRIPYVLVGGTSFYERAEVKDCMAYLRLLVNPKDGVSFERIANVPARGLGDKAIEALSALAKERGVSLLQAVLSGEAETLNARYRKGFADLRELYALLSEMLDADTPPAEVLRDMLKESGYMDMLTERAAASEEEAARVENVNELMNAMAAGGGQRGALDLPGEQ

SEQ ID NO: 80866 - protein, 308 aa, Unknown
  Obtained from environmental sample
  DOMAIN (1)...(210): Methyl-accepting chemotaxis protein (MCP) signaling domain
  misc_feature (1)..(308): Xaa is any amino acid
LEEMSSITKQNADNSGQAMILASEASAAAKDGDITIKRMANAINLIKQSADNTAKIVKSIDEIAFQTNLLALNAAVEAARAGEVGKGFAVVAEEVRNLAMRSAEAAQNTADLIDESVKSAGEGVKITEEVAVSLGKIVNRTGKVGDLIAEIAAASKEQAQGIEQVNIAVAQLNHVTQNNAANSEESASAAEELSSQAAELANMVSEFRLGADGNPPRPIRMDYDDRRRTPRPAGADRRATPRPRQRPIVAHTPHAHHDGKNEKHNAAENPAHQTKPLIKPVKSEDIIPLDDDEMMDFEWARPILTLGG

SEQ ID NO: 80867 - protein, 321 aa, Unknown
  Obtained from environmental sample
  DOMAIN (23)...(321): Protein of unknown function (DUF1015)
  misc_feature (1)..(321): Xaa is any amino acid
KGSKTNGRDQTVSRLPFSMNKPEDLGSYCAPPYDMLDDAMVDALYGKHQNNVVRVTQNKRVPADTANKDRHVRAGKFLSDWIGASIMTRDGADSIYIYRQQFNSPDENGKPVARERIGFCSLVKLVSLDEGIVLPHEYTLSGPKQDRYELMETTLANTGQIFGLAADDDGKLYELIRLIMSSSPLVGYFTDENEVTHSLYRCYDAGLIDQAKELMKTRSILIADGHHRYETALRFYRDTGDEAFSHVMMTNVSMADPGLIIRPFHRLVRKTDQGRSVDSMLDELAKYFDVVRIGKASADGVYKSRRRRETSADLIHGGGGF

SEQ ID NO: 80868 - protein, 126 aa, Unknown
  Obtained from environmental sample
  misc_feature (1)..(126): Xaa is any amino acid
MKILLPILTIFTCLGFAGHGVSYKEAIEGNKKNGKPILLEFYADWCIPCIEMEKTVFKDPAVLKELKNNFNFRRLNTEKENRIFCEGETLPILDCVELWETFKHTAFAVLDKDGKLKHITTGTFEK

SEQ ID NO: 80869 - protein, 302 aa, Unknown
  Obtained from environmental sample
  misc_feature (1)..(302): Xaa is any amino acid
GTEVLLYGTFRKNPNESAYVGGKKHWADVIKNSGSSDLLIWRQPEEDFNTNSTLIVMPGEEAIFIKGGVIEQTFDNGTYKLSTENYPFISRLRNAFTGGISTFNCVVYFVRKTHSMEILWGTTSPIQVRDKLLGIATKLRARGAYKIHVGNPQKFLTKLVGNNINSIDQQALLDEYFANEFQGKIKASITRALNETQTELLGIEARIEEFAEMVEPFLGEVFDDYGLKMIKFSIAALDIDDNELRRRYDEIGMDAIAQMRNAQADRGVMDVLGNDSGKQQAANILGTLAANPGSGGIAFAGA

SEQ ID NO: 80870 - protein, 325 aa, Unknown
  Obtained from environmental sample
  misc_feature (1)..(325): Xaa is any amino acid
MMASTGRFPTSDVLHHEFVHAFVFGMIYGGSIIRVAGAQVPLWFNEGLAELLSSGWDSGADMFMLDRLLNSTVPPPGPTLDGYLAYKGGQSFLYYLYSIGGDSLFNRMLVEFKITRSAEAAIEHVYMKNLDDLGKNWLRELRRIYWPEAGRRANPEAQAALFAAKERSRMNVRPRVSPNGSRVAFFSDRYDYARIIIADTAGKEVRRIGGEHSLGSSFESFRPMNGALAWSPGGRQIAFIAKKGGRDEIRLVDAATGKHIRPRRPPLSSSTGLMVKRRKLLAFPAHPTGSRICTYTTYTPDSSRLLVDTRESQEVAEVQARTPTR

SEQ ID NO: 80871 - protein, 51 aa, Unknown
  Obtained from environmental sample
  misc_feature (1)..(51): Xaa is any amino acid
MASIAFTGGGTGGHIYPGLAIVSYLKKLLPHRIFWIGAAGGMDKAIVKVPG

SEQ ID NO: 80872 - protein, 91 aa, Unknown
  Obtained from environmental sample
  misc_feature (1)..(91): Xaa is any amino acid
PRLPPVIDTSAGFFARKKVITVFDCDGDKTPEVFFTGEGNALYAYTQNFRSLEGFPLPAWGKPHFVPAQGNKKAEIYGIGMDRRLYRWQFR

SEQ ID NO: 80873 - protein, 134 aa, Unknown
  Obtained from environmental sample
  DOMAIN (11)...(132): HEPN domain
  misc_feature (1)..(134): Xaa is any amino acid
PPSPPHDRIGTRVFFADNDLALAELAIDNLQFTGQVAFLCQQAIEKYLKAFLFENKVQIKKIHDLEKLYSEVRKIKDFGINENLLQILRNLYVESRYPADIAFLENGVLPTKEDAQSYLDFAKEIASIIKKEIK

SEQ ID NO: 80874 - protein, 85 aa, Unknown
  Obtained from environmental sample
  misc_feature (1)..(85): Xaa is any amino acid
MGKKETKGELVLYQPDGTLKLDVYLEDETVWLTQAQMGQLFEKSRTTITEHIQHISKEGELQEKSGMSGISDIPLSTVPLPKNAK

SEQ ID NO: 80875 - protein, 101 aa, Unknown
  Obtained from environmental sample
  misc_feature (1)..(101): Xaa is any amino acid
AEIIKNGFLQQNSFDEVDMYCVPMKQIRLLELIMEFYDRANTCIKLGAPLLKITSLSIREGLSRLKSGVKNDEPGGFTEFEQGMRADLETLERSYRSRETL

SEQ ID NO: 80876 - protein, 284 aa, Unknown
  Obtained from environmental sample
  DOMAIN (120)...(238): Elongation factor G, domain IV
  misc_feature (1)..(284): Xaa is any amino acid
MHADSMEDISEGAPGDIVALFGIDCASGDTFCGGGLNYAMSSMYVPEPVISLAVTPKDKKSSDQLAKALGRFTKEDPTFRSYVDQESNQCIIQGMGELHLEVYIERMRREYNAEVEVGKPQVAYRETITQRADYSYTHKKQTGGAGQFGKVAGYMEPFASGDYEFVDNIKGGTIPTEFVPSCDKGFKEAVKKGSLIGFPVVNIRCVINDGQSHPVDSSDIAFQQAAIGAFREAYMKARPCILEPIMKVAVESPTEFQGNIFASINQSGALFPLQPRKRFLKVEP

SEQ ID NO: 80877 - protein, 126 aa, Unknown
  Obtained from environmental sample
  misc_feature (1)..(126): Xaa is any amino acid
MTGIQNKYNIGAGKPKAAELVCALPWAYCVPIKEEISDTLTIEHCVVVHKDGCVQQTYGFRGHDLESFSAVYINSVTAYFNESVKRLGDGWMVSVEAHRYITSDYPESDFEIEAGILSNRKRRRVL

SEQ ID NO: 80878 - protein, 72 aa, Unknown
  Obtained from environmental sample
  misc_feature (1)..(72): Xaa is any amino acid
MANKLAQIQNMIYEIRGQKVMFDSDLAALYQVETKYLNRTVKRNLARFPADFMFQLTKRRNYKLEVPIFVPI

SEQ ID NO: 80879 - protein, 136 aa, Unknown
  Obtained from environmental sample
  misc_feature (1)..(136): Xaa is any amino acid
MDFTIGPDERRYLLAVARETIAAELEDRKPQYPTDEAAKSPVLKQLCGAFVTLHKNTPSKAAGGDLGGASGERSLRGCIGRMTANLPLEETVRIMAHEAAFGDPRFFSLRPGRLEQCHIEISGLFAMSVCPDPRQG

SEQ ID NO: 80880 - protein, 130 aa, Unknown
  Obtained from environmental sample
  misc_feature (1)..(130): Xaa is any amino acid
GVSPGYGGLGILNRACAGMGENLGGAEAMGRINREKAGLIYDYLESSKMFYSPVDKQYRSLMNIPFIPAEKDEAKKAEIEKRFVKEAAEQRLVNLAGHRLVGGMRASVYNAMPIDGVKALISFMKKFENQ

SEQ ID NO: 80881 - protein, 337 aa, Unknown
  Obtained from environmental sample
  misc_feature (1)..(337): Xaa is any amino acid
DFPPVDREACGRAVWDRLFEQSAVYSGDLVRIARLSGATLNIDNNSIELGENTLIRIQKDEGPLQIEFSYGNISVTSGNDRGTILLSIGDQVVQVLPGAEINAFSGNDGLVLRVTEGAAQVIRDGQVTDVPAGGIVVRDAEGNEVRQPMAAVIHPRPNAVLLKTEAGPLIVEFKWARINLQPQDLLRLEIAEDKYFRKIIQTADNLDSSAVTSLNTGLWHWRLLHENNTLASGRMSVIEAAAPTLLAPMAGGLTQVPVRYAGQEVQFRWAEVPDASYYMLNVSRSPEFIAPEISVQVQTTSYINSDIDAGTWYWRVQPAFFSSYERETHFSQVSSFQ

SEQ ID NO: 80882 - protein, 119 aa, Unknown
  Obtained from environmental sample
  DOMAIN (1)...(118): FliP family
  misc_feature (1)..(119): Xaa is any amino acid
MWPTFETIYNNSIKPLAAGELSVQNAYRAAETPLKIFMYSQMGGRNNNRNLTVGQKNIKLFMAMRNLDEPSTLEDVPTYILIPAFILSELTIAFKIGNNAFYPFIVIDMVVASALCLWA

SEQ ID NO: 80883 - protein, 184 aa, Unknown
  Obtained from environmental sample
  misc_feature (1)..(184): Xaa is any amino acid
YIGQFRAFAWKFGLPVNGFIAAMNANNPFGDFIRGREFKPRPVVATNSPALDVSVPSNFARFSSFYDEAPAVMRNIVFPASINDSATLKAMEFAWKKYGMLLDPHGAVALAAARDFFNPDKNSVEHIIVLATGHPAREAAIVEAATGQKVSLPERLALLEKEEEPVAVIDPHLGALEGLLTGCL

SEQ ID NO: 80884 - protein, 260 aa, Unknown
  Obtained from environmental sample
  DOMAIN (51)...(140): Cyclic nucleotide-binding domain
  misc_feature (1)..(260): Xaa is any amino acid
LSQKQYSQATYAYGQYVKHCPNGEKAAAASEKFSKLSAHIKLAEFNANDVNRTYRKNTMLFAEGEPGDELFIIQKGAIKITKIVDNKEVLLAMLKAGDILGEMALLEGKPRAASAVAFENSDVMVVNKENFELMIKTQPQIIARITILLSDRIWLIYKQLSNILIDNLIGRMYDALLIQLEKNRVSLDNKTQYTFAFGRPELFNMVGIPEKKGNMLLSQMMEEQELHDIDEKIHTTSTEEIHKQSEYFPQMDKNSKAQKK

SEQ ID NO: 80885 - protein, 130 aa, Unknown
  Obtained from environmental sample
  misc_feature (1)..(130): Xaa is any amino acid
MGIYVFNAKAMDDGLENELTDFGKEVIPQAINNLKVNAYLFDGYWEDIGTIRNFYETNLELTALRPKFDFYDEDRPIYTHRRNLPPSKINFGNMNQSIAAEGCIITNGSITDSMSVSAPSRAGDHRGGKQ

SEQ ID NO: 80886 - protein, 279 aa, Unknown
  Obtained from environmental sample
  misc_feature (1)..(279): Xaa is any amino acid
VGGGALWAVPGQIRGNMDKWVSFDRNLLALSAHNPALCSQLSVAETTRGCYKFLESHSGELIPAIVDRSGAAHALHSTVDPVREAERLVSILSKDRNGLIAEGFVVFLGLGAGFAPLAALNSGVSHVLVIDYDINGIAELLCSRDYITLLGDPRCTLLVDPPPDLIENIILELYRPVLCGGIRALPLRARTELDKQNFGAAADAIQRTIEKISADYSVQAHFGIRWFANIIRNLGTAQRQNRSAPPIREAAICAAGPSLDDQIPLLAPRPNLSMGKKMG

SEQ ID NO: 80887 - protein, 103 aa, Unknown
  Obtained from environmental sample
  DOMAIN (17)...(75): Hemerythrin HHE cation binding domain
  misc_feature (1)..(103): Xaa is any amino acid
MNMYSNLITWSPSYAVGIKIIDDQHKELFKLVNEMYKHIAGNEEAERVYFKNNIKRIIEYIRVNFATEEKILQAAKFPELLEHKSAHESFILTLIANMRNAET

SEQ ID NO: 80888 - protein, 336 aa, Unknown
  Obtained from environmental sample
  DOMAIN (125)...(336): AICARFT/IMPCHase bienzyme
  misc_feature (1)..(336): Xaa is any amino acid
GFPRDQIGRVARALADCGAEIVSTGGTHKLLSESGVPVVAVEAYTGHPEIMDGRVKTLHPKVHGGILAVRDNPTHVKEMEECGIVGIDMVVVNLYPFEKTVAGGAGIEECVENIDIGGPAMVRSAAKNHAFVAVVVDPADYGLIEAELSANGGAVTLDTRRRLAVKAFRHTSAYDAAINAHLSKIYLDEDVLQLYYGGGEVLRYGENPHQSAVFYRAPDADGAAIASADALGGKELSYNNIVDGDAALEAVRELSGVPAAAVVKHNNPCGYATGSTLERALEAAWSGDTVSAYGSVIAVTQKVGIAAAQVLAGRFVEVLIAPRFRRRRVGLLKQKS

SEQ ID NO: 80889 - protein, 106 aa, Unknown
  Obtained from environmental sample
  misc_feature (1)..(106): Xaa is any amino acid
GRHGRRSAQQGRLAKEIAATKAEENIRADYEKRGESIPNGILPEFGRLVMVSEAFFPFADSVDAANALGLRYIVQPGGSKRDGEVIAACDKYGIAMAFTGMRHFRH

SEQ ID NO: 80890 - protein, 254 aa, Unknown
  Obtained from environmental sample
  DOMAIN (35)...(250): tRNA synthetases class I (E and Q), catalytic domain
  misc_feature (1)..(254): Xaa is any amino acid
MAASPAEAAVPDSGTGSDFISEFIKEDLVSGRFTYVHTRFPPEPNGWVHIGHCKAFFIDFSMAERFGGKCNIRFDDTNPEKEDISYVEAIKRDVKWMGYDWEDREYYASEYYEYLYELAVKIIKKGKAYVDDLSDVEMSEYRGTAVQDKNNITVTPPGRNSPYRDRSVEANLDLFARMRAGEFPDGARTLRAKIDMAHPNLLMRDPVMYRIRRETHYRTGNSWCIYPHVRFPAPLWDGKRLYPCSAESVPGGPP

SEQ ID NO: 80891 - protein, 173 aa, Unknown
  Obtained from environmental sample
  DOMAIN (3)...(109): Histidine kinase-, DNA gyrase B-, and HSP90-like ATPase
  misc_feature (1)..(173): Xaa is any amino acid
VHFTLADLVTDITQNGCESGASLVELEIAEDAHKKEFRFLVRDNGKGMTKEELARAIDPFVTDGVKHPHRKVGLGLPFLIQTAEQSGGGWDIQSEKGKGTTATAWFDTGNVDMPPVGDLPGMFRTVLMFNGPEEIVIRRSGRQEGKEPLEYEFRTSELAEALGGFDGPRAMVM

SEQ ID NO: 80892 - protein, 316 aa, Unknown
  Obtained from environmental sample
  misc_feature (1)..(316): Xaa is any amino acid
VHKCGMSKYDPYSEFCYQNRTIMSKCGGEEYDPSTQECYNGVVKSDTYILTVEITPEEGGTVLRVPDLPNYARGTYVVVTATAKRGYTFIGWYSDEFWWSDAYWSTSATITITMDDDITLTAIFEEEEPDLPTYTVSFNANGATGNVPATIQRDSGYVITLPNPTGLVKVGHTFAGWCAADDGCEKIYEASNEYTVTQNVTLFAQWTAATYTLTTNVSPQNSGTVSRDPDKNTYAYGDYVTVTAEPTGNYTFYGWSGVSSSTSNTITIIMDNDKTLTAGFGEPNADVFRVYFDGNGMTGGYAPETSCRSANLSWGT

SEQ ID NO: 80893 - protein, 256 aa, Unknown
  Obtained from environmental sample
  misc_feature (1)..(256): Xaa is any amino acid
MKKLPLLFIATLFAAIPAAHAQVKYVAVVETEIDAQSGADAKLTRAEVRQITTELRREAINNLLPREKYNIMTTETVIAQGGAVLEECAEENCVIALGNKIGADYIVRGTISKFQTRLTLSVEMYETENGTLVASSDPVRSENIVELLEKTGPTCAAMYKTFAAAHNAITKKSVKYTITASTNPPNGGTVTRNPDETNYTFGTIVSVSAVPASGYTFTGWSGASKSAKATLTAPNDRDLTLTANFRYIGKTYTLTT

SEQ ID NO: 80894 - protein, 75 aa, Unknown
  Obtained from environmental sample
  DOMAIN (2)...(52): DnaJ C terminal region
  misc_feature (1)..(75): Xaa is any amino acid
MDQIGRGIGAALEGKGLPYLGQNRYGDLLVEVIVQTPTRLNSRQEELIRELDQLLQEEESPLDKVKNAAKKIFRK

SEQ ID NO: 80895 - protein, 90 aa, Unknown
  Obtained from environmental sample
  misc_feature (1)..(90): Xaa is any amino acid
CPHDRLAEELPVARALWKPYPNLSDAAEAWIISGGTHHSVYSSALTAEYFRDFAEMSGIEFVLIDRDTKPARLQDELRRNEAYWSHQFVM

SEQ ID NO: 80896 - protein, 237 aa, Unknown
  Obtained from environmental sample
  DOMAIN (9)...(214): Class II Aldolase and Adducin N-terminal domain
  misc_feature (1)..(237): Xaa is any amino acid
MDAYKTLREESYEANLEIKRQGLAIYTWGNVSAFDPDKGVFAIKPSGVEYDELTPKKIVLVDLEGKVIDSKLKPSSDTKTHLVLYREFKGICGVTHTHSPYAIAWAQTGKSIPVFGTTHADHCAFEIPCTSFINQQDVKNDYELETGNLIVNTFKNGNLDCSQITMTLVAGHGPFTWGNSAAPSVYHSVILEEISKMALFTVTIDQTQNLCPKHISVNTGDAHMGRTLITGSKYLSY

SEQ ID NO: 80897 - protein, 314 aa, Unknown
  Obtained from environmental sample
  DOMAIN (157)...(296): Thiamine pyrophosphate enzyme, C-terminal TPP binding domain
  misc_feature (1)..(314): Xaa is any amino acid
KTPPPGSELAEHLATGKVPCVYLQNSGIGNIANPVASLTSPLVYGIPVFYIVGWRGQPDIADEPQHAFQGIVTEVQLEELGITIFKLTERTIDGELIQAMNNFKHLLAEGKSMALLVSKGALSNGVSQNYSSNWTLSRETAITRIAEMAQDAIIVSSTGKISRELFETRKRLNLKHDHDFLTVGSMGHDSMIALSIALQQPHRHVWSVQGDGAFLMHMGAVAMIGSVAPPNLRHVVLNNAAHESVGGMPTAGAAVDFCGIAKSCGYKHIFRIETMGELDSIILKMPAVNGLCFLEIRCAIGSRQNLARPMGSPA

SEQ ID NO: 80898 - protein, 96 aa, Unknown
  Obtained from environmental sample
  misc_feature (1)..(96): Xaa is any amino acid
LAEVRGATGSKSVGDLNGLTQQVKSSSEEMFCGSQEVMKESQNLEKVTQEITGGMNEMANGADQINIAVHNVNEMTQKNRDAIDVLIKEVSRFKVE

SEQ ID NO: 80899 - protein, 141 aa, Unknown
  Obtained from environmental sample
  misc_feature (1)..(141): Xaa is any amino acid
MKTIYAAFSRAYPHSSHPLCLCGAYGKGSLYVLTIPDAFADLYNLPAETLALLRGELKLPITLECAGRVSLFPYNNDTFILQSFLDRPERARVRVNRPDAKLTPLMKPRMRPFDIAPHSGENESVFDIYIMPGHYMAFKVE

SEQ ID NO: 80900 - protein, 165 aa, Unknown
  Obtained from environmental sample
  DOMAIN (30)...(164): Ribosome recycling factor
  misc_feature (1)..(165): Xaa is any amino acid
LNVYFGGAMATTVDSIIEDTKKKMKQSIETLRKELATVRTGRANPSILDGVQVEYYGSSMPLNQLAGVSVPEPSCLLIQPFDKASVKAIETAILKSSLGLNPANDGNVIRLPIPALTEERRKELSKVVGRMGEEIKTAIRNVRRDHNENIKKLEKDKHSGLSEDA

SEQ ID NO: 80901 - protein, 308 aa, Unknown
  Obtained from environmental sample
  misc_feature (1)..(308): Xaa is any amino acid
LIIVTNIAGSLLLLLAISASLWLIELKAKGADNKTGSETIQNLLPWIREQDSLRFLDAYFSAEKSEKLKNFISSNRSIQIIQDFSAGSNATTMLAMNDTGTFYRKYAFGNDAEKLYTQFKWLCEYTDILPLPIIVNHQYDDNFCIYDMEYNAMATDLFNYIHYTSSERSWPILEKALDCLRNNLHTRNVRPADLEQVSQYIREKVYANIKRIETAKELRGLLEYDTLVINGEQYHNLKYLKRWLNSDFLTHIFLNDIYTDIHGDFTIENLIYQETDRDYPFILLTRIGVVYIMLSHWTMLNYYNPCTA

SEQ ID NO: 80902 - protein, 328 aa, Unknown
  Obtained from environmental sample
  DOMAIN (207)...(318): Peptidase family M23
  misc_feature (1)..(328): Xaa is any amino acid
KNYDPSRDSGKLMRDGTLVTIISGWLVDEDNNPFYNADGKKIGAKEIETGLLNILFGGTSGKAYSSYTDEQVLFAQQLMSEAGMKHTAKDENKFRTYLWDNNKKLPLDMQTIMENVGSTVAAQVFARYYEGNAIASIAMTLGKNIDSLKINYITNDALSRFTDKLVPDVLNFYISMQSFLDASANFVITGKHGAIDPKYVYKNYEKNAHFGTDFANGKEGDSIYLGISGKVVLTAAEEKPKEGNGNWMVAEYGYKFDGSFIGTGIFGEYMHMEKKPGFANDSYLNSNQKIGTVGNTGNSSGAHLHYSIYTLSEKPFSADSVLVGGKRK

SEQ ID NO: 80903 - protein, 331 aa, Unknown
  Obtained from environmental sample
  DOMAIN (80)...(330): Flagellar hook-associated protein 2 C-terminus
  misc_feature (1)..(331): Xaa is any amino acid
NFPPIIARAEEQAVLRPITDSGEFIPREFNLSEYAAGKTITALNIDNANTHREISVRGAVVYDPKAIGGGLRPLNPVSIAQDAIIDMEGIKMQRPSNTIADIIPGVTLTAKGVSDRPVRLGVSTDREGIKNAIINLVGNYNRLMAELNVLTRTDERVIDELTYLEKDEAAEMKKRLGIFAADSTLNQFRASLLRTATAPYPTDEQRELAMLAQIGISTNFPGSSSGYNPGGLRGYLQIDEGKLDTALEQHLPAIKQLFGSDTTGDLIIDSGVAFNLDSISRPFVETGGIISLKTGTLDSRIARTRDESPPWTASLPQKSRIKTQYSRMEAH

SEQ ID NO: 80904 - protein, 319 aa, Unknown
  Obtained from environmental sample
  DOMAIN (162)...(276): Response regulator receiver domain
  misc_feature (1)..(319): Xaa is any amino acid
MAAFRCARRQQKFSVYIDGSIPRMLIGDDQRIAQIITNLLGNAIKFTPEKGSITLAVRLAGKGNDICTLQVSVSDTGIGISREQQEKIFNSFEQAESSTTRKYGGTGLGLAISKSIVEMMGGSIWLQSEPGKGSVFTFTIQLQRGTEEKHTLLSADINLRNIRIMTVDDDSDILTYFLEVMQSFDIMCDVAISGEKALQLIDQNGGYHLYFIDWKMPVMDGIQLAREIKSRVTEHTIVIMISAAEWSAIADEAKAAGVDKFLSKPLFPSTIAEVINECLGVDKRQAEKSQAAEIAGIFAGRRILLAEDVEITVKCTDPF

SEQ ID NO: 80905 - protein, 307 aa, Unknown
  Obtained from environmental sample
  DOMAIN (97)...(307): Cytosol aminopeptidase family, catalytic domain
  misc_feature (1)..(307): Xaa is any amino acid
LIREPGPTGGAAAAAVKMALNLGGRRLDLILPRLKSPSPGDILELAALGGLLALYQPDRLKTSPRPKPTLTGLRLWGWEVKDEPERVRLAEATAEAVILARSLGDEPGNLLYPESFARRAVSLARARDLKTQVLDEKGLAREKLNLLLAVGGGSRRPPRLVTLTYQGDRAAPLVALVGKGLTYDSGGLSLKPAASLAAMHTDMVGAAAVLAVILAAAELKWPLNLAAILPLAENMPGGGAYRVGDVHLSRSGRSVEITNTDAEGRLALAEALTWAGEMKPAQIIDVATLTGACSITLGGNCARAPHQ

SEQ ID NO: 80906 - protein, 75 aa, Unknown
  Obtained from environmental sample
  misc_feature (1)..(75): Xaa is any amino acid
SRHVKDTTISGTGDVIEPAENALAIGSGGNYAYAAALAFLDASNYSAAQIAEKSLKIAGNICIYTNLQITLEELN

SEQ ID NO: 80907 - protein, 175 aa, Unknown
  Obtained from environmental sample
  DOMAIN (7)...(175): Aldo/keto reductase family
  misc_feature (1)..(175): Xaa is any amino acid
MQQTLFGKTELTVGRTGFGCIPIQRIPYEESTALLQHAYENGVNLYDTANGYTTSEDRIGTALHHVRDKIVLCTKSGAQTPDSLMEHIENSLKMLRTDYIDVFQLHNPSFVPRPEGDDGLYAAALKAKEQGKIRHIGITAHSKDNAKTAILSGLYDTLQYPLSTLVPICHGGGNG

SEQ ID NO: 80908 - protein, 335 aa, Unknown
  Obtained from environmental sample
  DOMAIN (1)...(335): Formate--tetrahydrofolate ligase
  misc_feature (1)..(335): Xaa is any amino acid
AGSDIEIAQSVYPEHALHIKEVAKKTEFPEDFIEYYGKYKAKVDLNYLAEMQNREDGKLILVTAITPTPAGEGKTTTTVGVADGLCKIGKKTLVALREPSLGPVFGVKGGAAGGGWAQVIPMEDINLHFTGDFHAITAANNLLAAMIDNHIYQGNKLNIDPRKIIWRRCMDMNDRQLRFINDGLGGKANGFPREDGFDITVASEIMAILCLASGIDDLKERLGRIIIGYTYGKQTDGEQPVTAAQLNAQGAMAALLRDALKPNLVQTLEGNPVFIHGGPFANIAHGCNSIMATRLALKCADYVVTEAGFGADLGAEKFWILNAVLGQSDHVGGNS

SEQ ID NO: 80909 - protein, 309 aa, Unknown
  Obtained from environmental sample
  DOMAIN (246)...(273): Phospholipase D Active site motif
  misc_feature (1)..(309): Xaa is any amino acid
MKKTKWVQVVFKRRVLVILLLSVQAALIALAIAGTAIFFKYTYLFVNYLSIIVCIHVFTEHDKAAYKLTWIFLILLFAFFGGIMYIFFYSQSNPKKLKRLLGRNIRDSREALRLPGNRLPDLIWAHPEFGTQAYYLQEFAGYPVYSNTRQEYFDSGEAFFHKVMEELEKAQRYIFLEFFILREGVMLNPIISILEKKATQGLDVRVMYDDLGCFMTLPADFRETLESKGIKCFLFNPFRPIISSLQNNRDHRKIISIDGKVAFTGGLNLADEYINAVERFGHWKDAAIMLEGEGAWSLTLIFCRWTSPQ

SEQ ID NO: 80910 - protein, 190 aa, Unknown
  Obtained from environmental sample
  DOMAIN (20)...(181): Metallo-beta-lactamase superfamily
  misc_feature (1)..(190): Xaa is any amino acid
MNLETFILGCGGMMPLPNRHLTSVLLRREGELFLFDCGEGTQVSLRRLNLRWKKISVIFISHTHADHVTGIPGLLMLSSQVDRDDPLYIIGPPKIAEYIETNRRVLDMYINYEIIVQEITAPGIVYKGDGFHVRCFPLKHTKPCYGYTMEEEMRPGEFHPEKAEALNIPMGKLWGKLQKGETIVPRPQAL

SEQ ID NO: 80911 - protein, 136 aa, Unknown
  Obtained from environmental sample
  DOMAIN (2)...(136): YgbB family
  misc_feature (1)..(136): Xaa is any amino acid
GKLKSLLPKGSWGTRTGDALAHAVCDALLGAAALGDIGELSPPSDPMYKNADSMELVRYAFEKVKNAGWHLTNLDCVIICEEPKILPFRSVIRKSLAAALEVSDDCIFLKGKTAEKLGQVGKGKAVEVYAVCLLEK

SEQ ID NO: 80912 - protein, 309 aa, Unknown
  Obtained from environmental sample
  DOMAIN (34)...(61): NHL repeat
  misc_feature (1)..(309): Xaa is any amino acid
MMAERIRGSRVSILNGNGDWQAYIGSRGLGDGQFVGPQHLTVDEDGYLYVVDYGNSRISKFDPDGVFILSFGKKSAIFPGLLSPTGIAAYNSKIYIAESAAKAIYMFDPNGNYLGRLAAEGLKAPESLRFLSDGTMLVADGNRIVQINPDSAIVRELGLAGGERVRITCAEMDSNGSILAADFNASEVSIMTRFDDLASGLFVQIRNIDAKQFPKVIVDLTVEDRLRRPIMGLDNNNFLLTENGISAADQILYTPGYRYRGADISLLVERSDATARMRDDLGAASRDISRAVQGMSYTKIVFRYFRRRA

SEQ ID NO: 80913 - protein, 313 aa, Unknown
  Obtained from environmental sample
  DOMAIN (45)...(239): ATPase family associated with various cellular activities (AAA)
  misc_feature (1)..(313): Xaa is any amino acid
MYDRKTSIDFAADALERVKGEIAKVFIGQKELVEHAFITLLAGGHLLVEGVPGLGKTLLVRALAKALGGDSRRIQFTPDLMPSDITGNIMFDVQAGKFITRKGPIFTNILIADEINRSPAKTQAALFEAMQEFQVSLDGTEYPLPKPFMVLATENPFEHEGTYPLPDAQKDRFLMKLLIDYPAMEEEKEMVSRVLEGGTGAELSLEGVQTVLSPEEFVVIRDTASCVRIAPEVIDYAVRLVSATREGGAIETGAGPRGSLALIRCARGRALLERRDFVIPDDVKALAVPVLIHRIALSSESERKGERRQLCRF

SEQ ID NO: 80914 - protein, 261 aa, Unknown
  Obtained from environmental sample
  misc_feature (1)..(261): Xaa is any amino acid
MNFKWIWFVAARYIFRKRKKSPAPVLSILGIAVGVLALIVILAVMNGFQLGFIESILEISSYHLRIGPINENIDEARKAVLALPGIKAVVPFREFHGLVQGRRGGQQAAIIRGLPSGAAEMDSGLAGRLSFEPQPSPWGVEPEVRGSPLEEGSFGFNKKSDALMGAELARRLGLKAGDEITLFSVPSLFNTSANGSDADDEGLQFFTITGIFRTGFYEYDTSWIFIDIDSAAAFSESGPVLGIKLKNRFHDQHALELAPKN

SEQ ID NO: 80915 - protein, 133 aa, Unknown
  Obtained from environmental sample
  misc_feature (1)..(133): Xaa is any amino acid
NSEQGEDFAVKDAFGQWTYMFAVVVDDFEENIDLIMRGEDLKDSIDKQITLAKVFGRKEMPQFFHHSLIYDSSGKKLSKRDGSEGIFKEREAGISAKKIISGLCKTAMPNAEIPNEISWAEAVDIWNTYFILP

SEQ ID NO: 80916 - protein, 300 aa, Unknown
  Obtained from environmental sample
  misc_feature (1)..(300): Xaa is any amino acid
MELVLERLPFLLPTDPELAWIAAPFINDIEKARSLLADYLDGSSKPNPASLVPALNLGLLDDIDAVEELFAAGNPTGNAAAVCVVDKDILVNVWKLLRSEGGRNHLARKLQVFSGVITEDEDHDGYAESRSVYKQGTIEEYHFDADQDRIEDVTIIFNSGNPQWARMPALPAVVYWESYPAVQRTVLESGLYLPAPGGFRFAPIGFTEICASDTTPGLLYPRREPLQQNITRRMLVSFAVSVQQPSMEFPGGLEHIYLENGIPINSEVILRNKTVSFTEFENGSPVLSWLDLDLDGRMET

SEQ ID NO: 80917 - protein, 231 aa, Unknown
  Obtained from environmental sample
  DOMAIN (2)...(180): Predicted permease
  misc_feature (1)..(231): Xaa is any amino acid
MIWPLYSNLDSGFSVYTWKDLMRSQYSSYESTRQLLLLIMALIVIVAAVNVSSATSMLVIERQRDIAVLKVTGASAKGIKDIFLWGSFLTGLCGAIIGIAAGLLLGNFINPVIRSLEKFFSFLSGLGGGSEVKILDPGFYLETIPIIIDWQTVFLIGCFTVLCSVIASWLPAARAGKMKPMELLRKIRKKRKDLPGREFGVSRMTPRKEERLSLLTFFLVTNLCDYNIITK

SEQ ID NO: 80918 - protein, 259 aa, Unknown
  Obtained from environmental sample
  misc_feature (1)..(259): Xaa is any amino acid
LNTISKKELVAVREMEGKEYLLYRTPKIDIAFIKGTSVDPYGNISFEKEYLTVDALAMAQAAKRNGGKVIVQVERVSHIFSRPRNVIIPGVLVDAVVVCETPAEIGEYNPALSGDIHVPATHMDYFVNKISTTKTRTKAHDDDTADIIGERAARELRSGQIVNIGIGIPEMVGIYASRLGILKEIINTVEAGGVGGLPAPGVAFGATIGADMISDMATQFDFYDGGGLDICFLGGLEADAQGNGTPTDGCTRHNLGENP

SEQ ID NO: 80919 - protein, 168 aa, Unknown
  Obtained from environmental sample
  misc_feature (1)..(168): Xaa is any amino acid
IHPRVRSARWFRKALANPGTPTETMLGYLKGAAPWLRLVGIWGLIVPGLVVLMGFSMVPIVSVVNRAWAEMPGFESLNGVFGVTFSGFSMVMFIGAGLLLFFPSLYIFRFGEKIRSYLSTGADRDLELAFQNNKSLWKFVGIFCIIQLAFIPLLIIGGIITALVAVFA

SEQ ID NO: 80920 - protein, 145 aa, Unknown
  Obtained from environmental sample
  misc_feature (1)..(145): Xaa is any amino acid
DFTRGLWPSPFHNIPCEGGERALVLTADKLDIRRIEKANLRVLNEGTLTVGLDTEITRELSMEGDIRDLIRGIQNARKEMGLSVTDRIELCLHGTDSLKEAWDNYNETVAAETLAVKTQWAKTDGQIPIEAGDDVWQVKIVVREQ

SEQ ID NO: 80921 - protein, 299 aa, Unknown
  Obtained from environmental sample
  DOMAIN (50)...(298): Glycosyl hydrolases family 8
  misc_feature (1)..(299): Xaa is any amino acid
MSDYSHINVSESMGYGMLMMAYMSGSEKKLGLKKNDWIFGCTSLKEYYDAMLRTVLEYPSVIAPNLFTWQLHGYTDRGTKYSEFIGDWESEHDGYTGFAINKNGLKTAPFTRDPEDGDSATDGDMDIIYSLIIADKQWGSNGRYNYLEIARSMLADFWQYCVHPVYKTLLLGDWASKGGDKGDPTLAAIQMNATRPSDFIISHLKAYKAVDSAHNWQEVIDATYGVIKDVYADVKAKHGTSRGLLPDFVIRNDADTAWVVPDGHVLEGDTDGSYAYNSCRIPWRLGTDYLLYGGYTTLP

SEQ ID NO: 80922 - protein, 281 aa, Unknown
  Obtained from environmental sample
  misc_feature (1)..(281): Xaa is any amino acid
MPVGASPFTWSYPTGTALSGTVNDGSTNTYTIPAFAQWDDGRHTITITAYDIAGRSTPVTYTFIKDTEAPEVTFSNIKDVRIGKDGWNNGSPADLVLQEYNKKGTIADTNVILRGSFYDKYSPVGNDLLKQTPTLTSGPYYFEYRIYPSGGLATWIAEDDDTLAAATGTSPKAWTKVNIEDADPGQNVIWSIPLTGGNMGNSFSGGNGNSNEGTLGIPDGTYWLDIRVADRTGTIASVNNVVFTVDRKPPELTATFVSNYAGAKENNKDSNGNSVMSYGNI

SEQ ID NO: 80923 - protein, 77 aa, Unknown
  Obtained from environmental sample
  misc_feature (1)..(77): Xaa is any amino acid
MPLNNKQITFIASIKEKIRLAQYEALKEMNTQLIKLYWEIGKDISERQGESWGESIVSVLSKELQQEFPGISGFRTN

SEQ ID NO: 80924 - protein, 107 aa, Unknown
  Obtained from environmental sample
  DOMAIN (38)...(71): Tetratricopeptide repeat
  misc_feature (1)..(107): Xaa is any amino acid
METAATLNNSAVALTEANKPFEAIPLFREALILEPENPLLWLNLGIAQQKTGEYSQAIESFMHSITIDNDISDAWNSMGLIYYELNEFALRKIVPPRPESVNGGGKR

SEQ ID NO: 80925 - protein, 177 aa, Unknown
  Obtained from environmental sample
  misc_feature (1)..(177): Xaa is any amino acid
MSKKYLILVGDGMADFPNPSLNGKTPVESASTPNMDKIAAAGRIGLLSTIPDGFLPGSDIGNMSLLGYDPRRYFCGRAPIEAASMGIPIGPDDVVFRCNLVTIENEVMKDYSAGHISTEAANTVISALHKSLGIDGELKFHPGSSYRHLLTVKKIGAKLKCVPPHDITGSENQYILA

SEQ ID NO: 80926 - protein, 307 aa, Unknown
  Obtained from environmental sample
  DOMAIN (134)...(288): Bacterial sugar transferase
  misc_feature (1)..(307): Xaa is any amino acid
VRNVLFVGATATGSGSLGYQSFPQFVNKVVGFIDDNGNRRGSLCAGLPVMGTYSDIPAVAAKERVGGLIIGHVSESPNEITKILDYCGELRIDICMVPSLMDVISGHFKTNQIFGVPLMVLLQDHMPPWEAQVKRIMDVVVSLCVIVFGSPVLIGVALLVKLTSPGPAIYSQERVGRNGKNYVIYKFRSMYIDAESRGGPQWASKNDPRITPVGRFIRKTRLDELPQFFNVLKGEMSLVGPRPERPFFVEKLKQEIPWYVRRIKMKPGITGWAQVNTSMILLLRMSSRKFFMIILLGRVCTCGGEME

SEQ ID NO: 80927 - protein, 256 aa, Unknown
  Obtained from environmental sample
  misc_feature (1)..(256): Xaa is any amino acid
KSNRGELTPACEKNCTKHCGVCNEELAVNREQGTGNREQIIESGTQATSVSQAAACTENTGKKPDPVIWRLLFGFSKEGSAVFHGHLSLIEIFSMALCRAGLDVQYTQGFNPLAKLEIVSPLSVGISAGGEIAAVEFLHAIQPREFLEKMNATLPEGLKITKAECYCIPSGSKKHSLSSLLWGFGYAGIDGETVYIPAACEKAHREKHLSSGQTLFSLRRSCVLARNLIDDSQTSSQPWAAYFDVYGRLYQITGNR

SEQ ID NO: 80928 - protein, 184 aa, Unknown
  Obtained from environmental sample
  DOMAIN (18)...(184): Ribosome recycling factor
  misc_feature (1)..(184): Xaa is any amino acid
MQAVIDATEEKMKKIAANLKDSFAALRTGRASAALFDKLRVDYYGEKSPLNQVANISIPEARLIVIQPWDKKLIGEIEKAIRTSELSLNPSNDGKVIRVAVPPLTEDRRKELAKLAKNQAEQSRVSIRNTRRDGIDDLKKLLKKSEITEDNESQGAGRSAKTFRRLYRESEPNPPGKKKRKHWS

SEQ ID NO: 80929 - protein, 121 aa, Unknown
  Obtained from environmental sample
  misc_feature (1)..(121): Xaa is any amino acid
MTETKKSIPEERALKVHYRSQKTINAVSLTATYVVLIILALMWLYPILWIVLNAFRVEYNDQGDLIGIVVSHYFPKSMGFENFKRLFINTSFGKWVRNTLIVAIFSTTLSCGICTWERKKK

SEQ ID NO: 80930 - protein, 269 aa, Unknown
  Obtained from environmental sample
  DOMAIN (205)...(269): DnaJ C terminal region
  misc_feature (1)..(269): Xaa is any amino acid
PLRFPPPARTVFGTSLQDPQKRAQYDKFGHAAFDGPQGGGGAGYGGFGGGNFDLSDALRAFMNDFGGDSIFGDLFGFGSRTRRGGGHGGTRGNDLQVKLGLTLEEIGAGVKKTIKVRRLDRCSECGGSGSKTGKRVTCVKCGGSGRVRHVTTSFFGQMVQEADCPVCRGDGQTVSDPCAACGGSGLRQSESTVSVDIPAGVEEGNYIRVPGRGDAGRGGGESGDLIVVLHEKPHETFTRHGIDLSCKLDITFSEAALGCSKTSKRWRIR

SEQ ID NO: 80931 - protein, 188 aa, Unknown
  Obtained from environmental sample
  misc_feature (1)..(188): Xaa is any amino acid
LGSPWVRIARGCRSGAGLSATQASEGAAKTLRKIASYVDVLVGNEEDLQKGLGLKGQDVETKGQLDPSAFFGMMESVTKDFPNIKAVATTLREVHSTNRHSWSAVLWLDGKTYQAPAAELDVYDRVGGGDGFAAGLFYGLLSGKSPEESLRLGWAHGALVTTAPGDTSMFNLEQVEAFAKGGSARIQR

SEQ ID NO: 80932 - protein, 293 aa, Unknown
  Obtained from environmental sample
  DOMAIN (59)...(292): Queuine tRNA-ribosyltransferase
  misc_feature (1)..(293): Xaa is any amino acid
MDVMAAAGGLHRFMAWDRNLLTDSGGFQVFSLATLRKVLPEGVWFQSHIDGSRQFLSPEKAVEIQYILGSDIQMQLDVCSGWGASRKDSEKALDITSGWLERAKSAWEDRQGQGYKGSLFSIVQGNFFPDLRKRSAEACVASGTPGIAIGGLSVGEPAEVFAEMLALSSSMLPDEKPRYVMGIGTPDYILEAIGNGIDMFDCVTPTREGRNGRVYTRQGPLSLKKIENQQDFAPIDKECGCKVCRQYSRAYLRHLFKSREILCSMLASYHNLFFLNQLVIDAPKGIEEGRFSV

SEQ ID NO: 80933 - protein, 53 aa, Unknown
  Obtained from environmental sample
  misc_feature (1)..(53): Xaa is any amino acid
LIAGGADSHQMEVIKEICHDVAVMDKGTIVEYGTVASVFESPKEDATKELIRG

SEQ ID NO: 80934 - protein, 64 aa, Unknown
  Obtained from environmental sample
  misc_feature (1)..(64): Xaa is any amino acid
FEKHPEVKKQYGGGEFWTDGHFVSTVSKHGNEEVIANYVKSQGTAEHYKQLHRIRNNEQPTLFD

SEQ ID NO: 80935 - protein, 103 aa, Unknown
  Obtained from environmental sample
  misc_feature (1)..(103): Xaa is any amino acid
FSPVIAEIAHLNLSRNTLDLSAVPVLKELTHLPVIIDPSHAVGVSRYVKPMALAAVASGADGLIIEVHNDPPNAACDGAQSLTPEQFADLAVRIQRVREAIAS

SEQ ID NO: 80936 - protein, 91 aa, Unknown
  Obtained from environmental sample
  misc_feature (1)..(91): Xaa is any amino acid
WSPTDQIGRGRCTREENRRIIRQNGIVVFRERDISLLSVKGRPVSQRDGIEALAAARLPLYRSWSDFTAQGQNIEQTAADIQKMFESANYS

SEQ ID NO: 80937 - protein, 231 aa, Unknown
  Obtained from environmental sample
  misc_feature (1)..(231): Xaa is any amino acid
REVRKIQTDILADYRDDFSKHITVTNIPKVKMIWNSIPRHLSKEKKKFVYKELKSGARAYAYEDAMNWLFNTRLVYKIARTEENKLPLASFADESIFKLYMLDIGLLGAKSELDINTVLEPNNELFSIFNGTMTEQYVMQELKVAGFTPYYWGREKGAAEIDFVVQWRNEIVPVEVKAGLRKKSKSLEVYRNLYHPSHTVRTTLKNFGVTDDVYSVPLYMIANLSDFLTYR

SEQ ID NO: 80938 - protein, 122 aa, Unknown
  Obtained from environmental sample
  DOMAIN (10)...(46): Flagella basal body rod protein
  misc_feature (1)..(122): Xaa is any amino acid
MAMVGLFTGLNISATGLRAQRVRQNVIASNIANVETTRTPNGGPYKRQHVILEADPLEFDQFLVKEQNKIRGTKTQEGHINIPQPEWPVSRGHIGSGVKVQENRPDEGPDKLVYNPDIPMRM

SEQ ID NO: 80939 - protein, 92 aa, Unknown
  Obtained from environmental sample
  DOMAIN (4)...(84): Single-strand binding protein family
  misc_feature (1)..(92): Xaa is any amino acid
MNNLNSVLIEGNMVRDPLVRSTPKGTQVCHFSIASNRFYRQDSNLEKETGFFDVEAWGKLVNPCVSLGRKGRGVRVVAGKTALPICHGGKKG

SEQ ID NO: 80940 - protein, 262 aa, Unknown
  Obtained from environmental sample
  DOMAIN (61)...(128): Bacterial Ig-like domain (group 3)
  misc_feature (1)..(262): Xaa is any amino acid
MNVLNSAVSSAQAVYDNEEASQAAVDTAEAALLAATKTFNGQKKAGSKTGAPDLTGITISAPPSKTEYYIGDTLDLAGLTVTAAYSDDSSKVIPAGELTVSGFDSSTAGSKTVTLTYNGKSASFTVTVYPAAPVFTSIAAFEAWLSAQPENTAAAAYRARLNVSDLGGYSSTAGSLGSVLRANDAKYVSLDLSGSTFTSIGYIAFQACTTLTGITIPNSVTSIEGGGFCLLHRPYQRYYTEQRYQHWGGTFLRLHWAYRSKR

SEQ ID NO: 80941 - protein, 281 aa, Unknown
  Obtained from environmental sample
  DOMAIN (80)...(180): 5'-3' exonuclease, C-terminal SAM fold
  misc_feature (1)..(281): Xaa is any amino acid
MNIPCFKVDGFEADDIIATLALKCRAEGRHCYILSSDKDLLQLVGGGTWELRPIKGTSPSEGGLPYELVGPGEVKGEWGVSPDKVLDLLSLTGDSSDNVPGVKGVGEKTAVKLMSRYGSLDEIYKNIAGIEGAIGKKIADGKESAYFSRSLIKLDSAVPLAIKEIDELSIEKIDRAAGARVLLREGIRQSAKQLDPGIGAKEKKNTEGKADDTETLKTPAEEEPARILTLPCLEKVLQNHLDIKDLQALLGKSKKTKASLPWILRPIPLDAWNARTIGVLF

SEQ ID NO: 80942 - protein, 317 aa, Unknown
  Obtained from environmental sample
  misc_feature (1)..(317): Xaa is any amino acid
FFRIIDRCRVRPADINVYAQWNDLAKVTFNPGTGGSVIPTSAYANVNGLLEGSLPNPTRAGYAFDGWFTAATGGTEVTLDKVYTGNATIYAHWTLITYTIAFDLNGDTGTIAPAVTGTGGKLASLPTPAARTGYTFGGWYTEPAGGVKVATSTAFSENATIYARWTLVNYAITYNLGGGTVTPANPTTYNIETDVTLNNPTRTAYEFAGWTGANGTVKELYVTIPQGSSGAKSYTANWTAIIYDISFDVNGGNDLASATAKTVAGGRLSSLPAPTRENYAFDGWFTQATGGTKVTTGTVFDDDATIYAQWSFIYKVT

SEQ ID NO: 80943 - protein, 294 aa, Unknown
  Obtained from environmental sample
  DOMAIN (83)...(294): Branched-chain amino acid transport system / permease component
  misc_feature (1)..(294): Xaa is any amino acid
FSPDYRQAYTSLLQVQKAGGPPEIQRQDRLTSALYSGLASQAGIIVIALIALLVLVALACVLSKTPGRTLFFFFIGPFRNVYSFGNMLNSAIPLIFGGLGVSIAMQAGSLNLGGEGQIYSGAFVATITALPLAFLGLPGGLISILAGAFFAGILAALSGFFKARWNTNELITSFLLSNAMILIVNYLVTGPFHDPDTNLQSTRKIAASLRLPLLLPPSNLNMSLVIALASTAAVYLFLKKARLGYEFRIAGANEIFARYGGINTKLNTVLAMFLSGALYGLAGRLCVFGSYTRR

SEQ ID NO: 80944 - protein, 136 aa, Unknown
  Obtained from environmental sample
  misc_feature (1)..(136): Xaa is any amino acid
LSIDAKTGKIQSGGKCTKKTGYMYGKMLSAVGFTSASKAARCRDSYANFPIAGKVNQLPLLGTPWMFGLTMKSPGNWADGFIVNPEDGNMYKLSLIYHPADGKKFQHETLEVRGQLLFFSGSQYWRRATREEASSL

SEQ ID NO: 80945 - protein, 103 aa, Unknown
  Obtained from environmental sample
  misc_feature (1)..(103): Xaa is any amino acid
LKSRYGITPWGKWFIEVLDSYEMGERLDRGRSYANTGKVHSLDFKDGQAAAKVKGHYRPFYNVKIAFPPLKKAEQVYRMIEEDPMLLARIAAGELPESFLQKL

SEQ ID NO: 80946 - protein, 80 aa, Unknown
  Obtained from environmental sample
  misc_feature (1)..(80): Xaa is any amino acid
VAYGQEEEPIFLGKEIARHKDYSEETARRIDKAVKEILDIARGEAERIIHEQKAGLEALADALLSRETLVDEEVRQILGI

SEQ ID NO: 80947 - protein, 311 aa, Unknown
  Obtained from environmental sample
  DOMAIN (88)...(177): GAD domain
  misc_feature (1)..(311): Xaa is any amino acid
ADRSPGEFYQLDFEMAFAGQEDVFNVAENVMYGVFKSFSNKTVSPLPFARIPYAESMIKYGTDKPDLRNPLVITDITAFFADVDFQPFKNIPVRGIVTPGAALQSKSFFEKMLAFATEIGMKGLGYISVLADGSLKGPIVKFLSEEKQDTLRKDLGLKINDTLFFIADAPGKVNNLAGQIRTELGDQLNLINRDRFEFCFIVDFPMYGINEETGAVEFTHNPFSMPQGGLEALETKSPLDILAWQYDIVCNGVELSSGAVRNHLPEVMIKAFELAGYPHADLEKKFPSLYNAFHYGAPPHAGMAPGIDPRR

SEQ ID NO: 80948 - protein, 61 aa, Unknown
  Obtained from environmental sample
  misc_feature (1)..(61): Xaa is any amino acid
MAETLAFGWIISFPKDMEEVTGYRWESWHYRYVGKELAKFINDYFEGVQQYALQFLKEWQE

SEQ ID NO: 80949 - protein, 113 aa, Unknown
  Obtained from environmental sample
  misc_feature (1)..(113): Xaa is any amino acid
VDELGHDYLRPQENGTRCDVNWLEIRSSGGKKIRIQNADDVGAAGLLFSAWHYSQENLSRAAHIHDLRREALTVLNLDSAMCGVGGDLPGIASLHEAYRLKADRTYTMKALIK

SEQ ID NO: 80950 - protein, 268 aa, Unknown
  Obtained from environmental sample
  DOMAIN (131)...(252): Integral membrane protein DUF6
  misc_feature (1)..(268): Xaa is any amino acid
DKGECLASHGIAGFEELSCGNFSDCRTLYYADTHNRAKREVPFWAGSLVFAACMISFITANKLTTSANVIMLQYSAPVWAALLGWALVREKPRWEQWGALVLVCSGFFLFFRDGLSFGSHAGDALSVLSGMLLGGSSVFFRMIKKGNPQDAMLMGQLIVAVICTPFFFLFPPSFDATVIASISFLGIFQAGLASLTFSYGIKRISAVQAMLIATAEPILNPIWVFILIGEKPSLTALAGGIIIIIAVVSSSLIGKYHEDMDVKSLSND

SEQ ID NO: 80951 - protein, 107 aa, Unknown
  Obtained from environmental sample
  DOMAIN (65)...(103): Domain of unknown function (DUF1078)
  misc_feature (1)..(107): Xaa is any amino acid
AKKNTTGSDPVLRDILRVVNFDIDRYLKKQGSSLYYDTETSGPAIVKDIMDEDRPKVIQGFVEAANVEPVREMVQMIEVNRAYEANQKVIQTHDTMLGVLINQLAKI

SEQ ID NO: 80952 - protein, 257 aa, Unknown
  Obtained from environmental sample
  DOMAIN (22)...(257): Amidase
  misc_feature (1)..(257): Xaa is any amino acid
MFELSALEISALIKTKKLSVAETVSAYIDTIEKNDKGYNAFLSVSKDKSLARAKEVQSQIDAANAAGEALSPLAGVPIAIKDNISTEGIETTCASKMLEGYTPVFNAAVIEKLEKGGMIVVGKLNMDEYAMGGSSETGAFGAVHNPWDTVRVAGGSSGGSAAAVASREIPIALGSDTGGSIRQPCAFCGVTGNKPTYGSVSRYGLLAYASSLDQIGSIGQKHHDCAALLSSFRDGLKGQHMRHRKTFDSANKIKVGR

SEQ ID NO: 80953 - protein, 329 aa, Unknown
  Obtained from environmental sample
  misc_feature (1)..(329): Xaa is any amino acid
TPFLCVHRNDKSIWQAEGIYIAQFKGADDSEGMKHAFRFKVIFAVAMAMVALLQSRSFTSPLIAMMTTANASQNEIVSVGSRYLKLISWTFLPTAISSSIGTSFRETARPKIPLIISIFATAVNTTGNWILIYGNLGAPRLEVEGAAYATIIARLFELCVFVIYSAWDRAPFFVVRIFNIHKKLIKEILLKSSMIFVSELSWISSETIMIAMYNRRGGAEVVAGMAAGWTIANLFFILFGGVWTASAILVGGTLGSGQLDEARRRSKWLKSGSVVAGIIIALPGAVISALLIPLVFSNLSPEARANCFGLVLVILSTSTLGDNRGGKTR

SEQ ID NO: 80954 - protein, 329 aa, Unknown
  Obtained from environmental sample
  DOMAIN (218)...(251): Tetratricopeptide repeat
  misc_feature (1)..(329): Xaa is any amino acid
MIDEAILHLHAYGRWVAEARDASIPGGHLGFALVSYDSGDSEPEGGTEELPHEQTFALKEGCVCQSWLDFISVDSNPGAVEAEYLKWSGNVEISAESRLRLAESFAALDRFDAAYDQILKAWKQRENVARSVTATFSEMRSRVELIFAARMAYMTGQYHVAEECINESLALGEDGPEGLEALAEKAKILSSLERHGELATFLPAYIKRLETEADDGLPSLYALYGFACWNLKKYKTAAEAWDKAFKLNGLNGLYAAHAANACEALGRPKEALRRRLARGKRFLEQNDHNELGALYTQMLAAGKNNREVHALIEIWANNTSNPYPHESAG

SEQ ID NO: 80955 - protein, 87 aa, Unknown
  Obtained from environmental sample
  DOMAIN (47)...(85): Domain of unknown function (DUF1078)
  misc_feature (1)..(87): Xaa is any amino acid
ASFPTRAGLEKAGDNTFRVSNNSGLANIGLSGIAGKGKIVAGTLEMSNVDMADQFVDMIVTQRGFQANSKTIQTADQLLQELLTLKR

SEQ ID NO: 80956 - protein, 110 aa, Unknown
  Obtained from environmental sample
  DOMAIN (1)...(105): Response regulator receiver domain
  misc_feature (1)..(110): Xaa is any amino acid
VVIALFEPTQLEIDCAENGAEAVRKFSEAPDKYDLIFMDVQMPEMDGYEATRHIRVMDIPKAKTIPIIAMTANVFREDIEKCIEAGMNSHVGKPLDFDEVLGKLRFFLSL

SEQ ID NO: 80957 - protein, 260 aa, Unknown
  Obtained from environmental sample
  misc_feature (1)..(260): Xaa is any amino acid
MAEEQLDVIRLETVRNIKDLFPSNMLSVLAGEGVYLFPVYVFAFFLGMGLSYDKSYSKPIISITDSLSRIFFHISSFFIEILGFIMIVLSAYWMVRFKGVLQAGIFLDLVCLLGVIAVVLGFGILPLFLYIIKPKMNPWTTLYGSLGPAIAAFFSGDINFTLPVLIRHTKENFGVRRRSNAVSVALFSSLCRAGSAMVAAVAFIVIFKSYSSLGISFSQVMSISVRAFMISFLLARHPGERAYTAITVLWLGYRQGFEAS

SEQ ID NO: 80958 - protein, 79 aa, Unknown
  Obtained from environmental sample
  DOMAIN (1)...(79): Hsp20/alpha crystallin family
  misc_feature (1)..(79): Xaa is any amino acid
LTVQALSIASKQEEATNKEADNGTWLLRERHVSSFSRSFKLPENANPEEVNAEFKNGILKMEIGKRPEAQKRAIRINVK

SEQ ID NO: 80959 - protein, 161 aa, Unknown
  Obtained from environmental sample
  DOMAIN (1)...(161): Protein of unknown function (DUF1121)
  misc_feature (1)..(161): Xaa is any amino acid
MGDPRHWGIWRNRASALEGIRVIERDRPTDRQERFELMRQALLCDTFFTGCNAISEDGQLVNIDGFGNRVAAMTFGPRQVIVVAGMNKIAKTVDDALVRARTIAAPANTQRFPDSKTPCNETGSCADCKSPDSICSFFVTTRLCKPAGRIKVILVGQDLGL

SEQ ID NO: 80960 - protein, 294 aa, Unknown
  Obtained from environmental sample
  DOMAIN (1)...(294): DegT/DnrJ/EryC1/StrS aminotransferase family
  misc_feature (1)..(294): Xaa is any amino acid
MAVNSATSGLHLALEAVGIGNGDLVLIPSMTFTSTAEVVRYLGAEVVFIDVTKGGYHMDPAALERTLGKLEKGETPFGNLKAKAVVPVHYGGLPCDMDAIIPIARKHGLKIIEDAAHSFPSFVESIGDKINPAKGRWAGLSGDAGVFSFYATKTITTGEGGMVVTRDKAIADRVKIMRSHGIDRSVWDRYTDIKASWYYQVVEPGYKYNIPDILSALGRAQLRRAYDLLSMREKIASVYDEAFRGDRRFLTPPTGSGDARHLYPLRLCLENLSVTRNAFTEKLQEKALGFLCIL

SEQ ID NO: 80961 - protein, 293 aa, Unknown
  Obtained from environmental sample
  misc_feature (1)..(293): Xaa is any amino acid
LLPNEYNNINTIRVVSSSDLVNWTEHREIKAAGIQGAAKQATNSWAPAAICKNIDGTDYFFLYFADNANGIFVLRAEDPLGPYINPRTNGSALINRSTPNCGNVTWLFDPAVFTDDDGKAYIYFGGGVPSGRESLPATDRVVQLGDDMISIVGTPQALNAPFIYEDSGINKIGSTYYYSYCANFQVHNYLNRPEEFPAAITLGESGVIAYMTSDNPMGPFTLQKKILRHPDQMFNQHGAGGNNHHAMFNFRGKYYMLYHSRLLEMAMGVPGTVPREGYRSSHMISTSRDHPGK

SEQ ID NO: 80962 - protein, 301 aa, Unknown
  Obtained from environmental sample
  misc_feature (1)..(301): Xaa is any amino acid
VTEEAELTEGWTGIRMTSESSELIGNVSRLARVGEDRRVEEKTYFSFVSGNLIHSVRAGGPSYYEIPGVIIQKSAPNGLMPLIRKSENDGTDEAWSGSIGYESSKPLGDLKDKVKNVGQSNGSLNLNISAGGNQGTNRGESWMYQAVQSVSGSGIADILQTVGNSIKVISGSRDGFTDEYTIEGVKDISRNGNYGDMKGGNIGAGGAVKKNHSASGRLIGTSISAGGGGSLSTGSTWQTAGFIDVNGDGLPDYVNGGKVALMNLGRDKWELKPELSGLDQIELNRGSSQTIGVFRSISAGK

SEQ ID NO: 80963 - protein, 112 aa, Unknown
  Obtained from environmental sample
  DOMAIN (4)...(108): CheB methylesterase
  misc_feature (1)..(112): Xaa is any amino acid
TWCSKGRALRYLVELKDGPLVFHQRPAVEVLFNSVAQYAGANAVGMILTGMGKDEPKGLLAMKEAGAYTIVQDEASSVVWGMPGEAFKLGAATVVLPLKKIAAEAIKRAESE

SEQ ID NO: 80964 - protein, 297 aa, Unknown
  Obtained from environmental sample
  DOMAIN (109)...(297): Hsp90 protein
  misc_feature (1)..(297): Xaa is any amino acid
VSDNGIGMNEADLIDSLGTIARSGTRAFLEKLAEDAKKDSNLIGQFGVGFYSAFMVADKIEVISRKAAEDSAWKWSSDGKEGFEIERANEGRDTQGSTIILHLTDEGTEYANRWTIEDVIKRYSNHVAFPIYLTYDEKEWDDKGNEKGSKIKTDRINSGTALWRRAKSELKDEDYNEFYKQLGHDSDAPLHYIHTRAEGSLEYTTLFYIPKKAPFDLYNVDYKPGVKLYVTRVFITDDDQELMPTYLRFVRGVIDSERLPLNVSRENLQQNKNLLKYKNASVKKLLFEISTNGGKRT

SEQ ID NO: 80965 - protein, 186 aa, Unknown
  Obtained from environmental sample
  misc_feature (1)..(186): Xaa is any amino acid
MMAENRLDKKNGEMPALLGEFGLAFDLNNRRGFKKGDYSVHEQALSMYYDAVDANLLHSTIWDYSASNTNKYGDRWNDEDLSIFSENSERAIAGWKRPYPMATAGKPLFFSWNKKRKKIVFYFTAESGIKAPTIIFLPEYLFASEPKIEIVTPTGETLKWEHNREEQKLFIYNGDHNGEALIKILS

SEQ ID NO: 80966 - protein, 178 aa, Unknown
  Obtained from environmental sample
  DOMAIN (2)...(171): Predicted permease
  misc_feature (1)..(178): Xaa is any amino acid
VPIWGFTQGNPFSVPQYSSYESTRQLLLLSWALIVLVASVNGSSATSMLVIERQRDIAVLKASGAGPSFTSAVFLWGAFLTGLAGSVLGIAAGLAIGCSVNSLIRALERALTFFSGIFHGGPVLILDSGYYLETIPIIVNWKMVFTIALLTISATVLASWLPARRAGKLKPIEILRKY

SEQ ID NO: 80967 - protein, 95 aa, Unknown
  Obtained from environmental sample
  misc_feature (1)..(95): Xaa is any amino acid
LKSGSVKIRPAFFIAFRYLLGRAHEGGRYLRGAAAGIALSLIPIIVTLIVADGMIRGITDRYLELGTGHLQIYNYLYASQPEAALPFHEDVPGIK

SEQ ID NO: 80968 - protein, 312 aa, Unknown
  Obtained from environmental sample
  DOMAIN (107)...(312): BadF/BadG/BcrA/BcrD ATPase family
  misc_feature (1)..(312): Xaa is any amino acid
DFRLLEKVPNRRIIATGGVTHNSVIMDMLKARVRELYIREFADCFEAAGAAFYALTNKTPLGLDRERIFVDGGTSFSQLPPIEMGKPLVRFEDIEIQSANAGDELILGLDVGSTTTKAVALRTGDDAIVASVYLRTNGNPVQASRECYSALLKQISVPVNIIGLGTTGSGRQIAGLHGGTDGVINEIIAHAAAAARFDKGVDTIFEIGGQDAKYTYLTNAVASDYAMNEACSAGTGSFLEESAGETLGINYKDIESIAIKSKHPPNFNDQCAAFISSDIRTASHEGVAKEDIVAGLCTPVSADLIHGGGNSR

SEQ ID NO: 80969 - protein, 180 aa, Unknown
  Obtained from environmental sample
  misc_feature (1)..(180): Xaa is any amino acid
MLVLKFGGSSVGSHDGIKQVIGIIKNSEHSGKVPVVVVSAFSSVTDALIKMSRSACIGEPYVQSLNTLSERHIDCADKFLKGNEKKEAVKVIKKNIEELSQVLDGISLLGELSPRSMDLAMSFGERLSASLIAIIFSANGIKAGFLDSRGLCKTNDDYGKGAILKKRTEENIRSFFQKSK

SEQ ID NO: 80970 - protein, 172 aa, Unknown
  Obtained from environmental sample
  misc_feature (1)..(172): Xaa is any amino acid
VERSQAGRKEEGLTPENRILKGSLPGPVTIREGTAKLSVDLLKGQKTGFFLDQREHRLALGRISSGKRVLNAFGYTGGASIHAGLCGALEVTTLDISAAALDVCENDWAANGLDPARHTRLQGDAFDLMRQLPVKHYDCVVVDPPAFASSARTCQTHSRPTKTYSVLAPAHR

SEQ ID NO: 80971 - protein, 321 aa, Unknown
  Obtained from environmental sample
  misc_feature (1)..(321): Xaa is any amino acid
VFLILWNIIKTKTVYLIYSVPAACILAAITIIGYHNYINKIPAISEESNLYRYKLSTEDNMLAKLDEESNLKLVDNLPVLDGATALYPVYASFAQAVYHENLYATARTQVICTTTIGAYDNLLKGEADIIFCAAPSDSQMKQFYDNGINLKLVPIGREAFVFFVNKNNTIDNLTIENIQDIYSGKIKNWKELNGTNQRIMAFQRPENSGSQTMLKKVMADIPIMRPRRENVSSGMGDIINQVAVYRNFSNAIGYSFLFYSTEMVKNDQIKLLSIEGIYPSEGTVQNGTYPFSDDFYAIFIDSDNKNENIEPLSRPICHRGP

SEQ ID NO: 80972 - protein, 157 aa, Unknown
  Obtained from environmental sample
  DOMAIN (8)...(157): Tryptophan synthase alpha chain
  misc_feature (1)..(157): Xaa is any amino acid
MNRYEEAFKKAKARREAALIPFAVAGDPGPEAFLDVIKAYVNGGADVLEIGYPFSDPVADGPVNQRASQRAISAGLNHSLFFSLVKEIRSFTDIPIGLLTYANTINHLGADTFCRKAAQAGIDSILTADMPPEESVDLDVQMRKHGIGRDTSTRHKR

SEQ ID NO: 80973 - protein, 172 aa, Unknown
  Obtained from environmental sample
  DOMAIN (3)...(157): Colicin V production protein
  misc_feature (1)..(172): Xaa is any amino acid
MAVVDVVFLVIIAISAFRCAARGFVSELLSMAALIFGLLAAICFFRWGGLLIRGWFMPEVKIVPEVIAFAALFLIVFITIKTIEMTLKSIIERIQLGGVDRMLRLLFGFVEGVIIVCPALFLINILPPIVSGPVLEQSFFREILLPFIFGNKKKIRDSIVLLPPPGKVFIRV

SEQ ID NO: 80974 - protein, 314 aa, Unknown
  Obtained from environmental sample
  DOMAIN (19)...(312): Aconitase family (aconitate hydratase)
  misc_feature (1)..(314): Xaa is any amino acid
MTDWPKNQKAKRSKTWGKTITEKIFDKHKIDEPFPGTAVLSLDVVMCHEITTPIAISDLEWRGKDRVFDASKIKAVIDHVTPSKDSKSAAQAKILRDWARRHGIKDFFDVGHNGVCHAIFPEKGFIRPGYTVIMGDSHTCTHGAFGAFAAGVGTTDLEVGILKGVCAFRPPESIRVDITGKLPKGVYAKDVILEVIRRLTVNGATDRVIEFRGEAVDAMSMEERMTLCNMAIEAGGTSGLCMPDKVTVEYLWPFISSDYNNDKDAAVKEFAKWHSDAHASYAKTLTVDVSTLEPVATVGYKPDQVKPVKEFGRR

SEQ ID NO: 80975 - protein, 122 aa, Unknown
  Obtained from environmental sample
  misc_feature (1)..(122): Xaa is any amino acid
VAALNSGAVALIGGGTGSPFFTTDTAAAVRSAEIGADAILKATKVDGVYDSDPMKNPDAKRFDTITHAEALSRKLKVMDTTAFSFCMEQEIPIIVFKLLEDGNLAKCLMGEPVGTTVTPSCE

SEQ ID NO: 80976 - protein, 322 aa, Unknown
  Obtained from environmental sample
  DOMAIN (198)...(264): His Kinase A (phosphoacceptor) domain
  misc_feature (1)..(322): Xaa is any amino acid
LVALMYADVGGLFIFTSVIGVTMTFLILGLGVHILPQPSDFRDEVSNYVGMIVIYALVFLFGRYTISAMNRFRLAGQTFDIALKTSPNLIVIVDDKARVEYISKTFVEVLGIEKQEYAIKLPFIDLFPTAELKLFFGELLHRKGRITEIFEMEIGGSRHHFILHSEALRGGGVARTFDCLEITPILEAQRAAEAASKSKSNFLATMSHEIRTPMNAIIGIAQIQLQRDDLPEEYAAALQKIYSSANNQLGIINDILDMSKIETGKMELNPIEYEIPSLINDAMQLNAVRIGEKQIEFIVDIDENMPSRLTAGALGRICQWGD

SEQ ID NO: 80977 - protein, 55 aa, Unknown
  Obtained from environmental sample
  misc_feature (1)..(55): Xaa is any amino acid
MNCKVYSKEGNELRTIELADEVFGLPENDALIWYAINNELANKRQGLGRICQWLE

SEQ ID NO: 80978 - protein, 229 aa, Unknown
  Obtained from environmental sample
  misc_feature (1)..(229): Xaa is any amino acid
MQFHCLRPESGEKFNFGLKGENGEIIKVTDCPVAVPGIRELLRKKETFQLPPEKDRFTVFSKDAVLLSEGGRQRGKISLLEKDILLDAGVFFQSNCSVLEKLILELQKIAEGVPKNLPMADLYCGVGLFAVFLGGMFPKIILAEENKSAVSLARENLRGADAEFFALRDTDWPRALLRRKDSLRFAVVDPPRTGLAPKAAAALAQDAPAVLAYVSCDPAAPARDFKALT

SEQ ID NO: 80979 - protein, 315 aa, Unknown
  Obtained from environmental sample
  misc_feature (1)..(315): Xaa is any amino acid
PQFPPPADGREKKFFTAHRRSLVHREDFEEALTCAKAELDEDSDKNLPVAERVLKIELNDTNRPDLWGTAGCARQLKVYHDGKIPEYPFFSRSDSIRKCAHKVKVEKSVQKVRPFLTGFIAGGKTISDPALRDMIQTQEKLAWNFGRKRRSISMGVYRIARINWPIIYKGVDPDSVSFVPLQWDSPLTLREILKQHPKGKEYAFILEREPVHPLLTDSKGEVLSYPPIINSNDLGAVQVGDTDIFVELTGSDMAQVTLAASIVACDLADNGFSIEPVEVEYEYDTPFGRISFTHSISRNPSSALSRESKNFSAKN

SEQ ID NO: 80980 - protein, 295 aa, Unknown
  Obtained from environmental sample
  misc_feature (1)..(295): Xaa is any amino acid
LKKRYAFFIAIRYLWGRAHEGGRYLRGAAAGIAVSLIPIIVTVIVADGMIRGITDRYIELGTGHLQVYDLMGFGEIENNISRIKELDKIKGVWTEQRGMGVLAGKTGRMGVTVRSIESSFWEDPDSVRFLKIIDGGQKPETDRDIVLGETLASGIGVRVGDTVRLMTVRNADNGRLIPKSASFTVRGILSCGYNELDALWCIINTEGGMRVLSPDQVSASLIVKVDDPYNITDTFIWDIYDKLGGGYSIYTWKDLLQSQYSSYESTKQLLLFIMALIVLVAAVNVPRHSESVMGP

SEQ ID NO: 80981 - protein, 170 aa, Unknown
  Obtained from environmental sample
  misc_feature (1)..(170): Xaa is any amino acid
MPKSILVHPEEVRKPDILKLKDIPVNQYKSDFKKESGLYGTQRLVRIWHDMVVIREFESMLNTFKTQGAWNGIEYHHKGPAHLSMGQEASSVGQCVNLDTDDYIFGSHRSHGEILAKCFSAIWQFSQNAEGEKRLEAIMKNFLTAKHWACRKDPTTAASADLIHGGGDGG

SEQ ID NO: 80982 - protein, 63 aa, Unknown
  Obtained from environmental sample
  misc_feature (1)..(63): Xaa is any amino acid
DLVYVMTGGGPGVATELMATYMYKMSFIRFNMGYGAAVAAGMFILITLAALIVVNTLNRKAEV

SEQ ID NO: 80983 - protein, 312 aa, Unknown
  Obtained from environmental sample
  DOMAIN (1)...(205): D-alanyl-D-alanine carboxypeptidase
  misc_feature (1)..(312): Xaa is any amino acid
MHLVLKEIASGRASLDEIITPTRESWAVNQLPGSSVMYLAQGQTLSLRELMLGMAVVSGNDAATAAALRFAPTVDDFIRMMNMEAVAMGLNKTRFVDASGYSEENMTTARELAELCRLYLQAHPDSLRDFHSVREFAYPRVDNVPPERQGNPGTRLRRNNNNLLGKVEGVDGLKTGYIPESGYNIALTAERNGTRFIAVILGAPSEWGGDRKRDEDGEKLLEWAFGRFKTIPIRPSIGAFPPVRIWKGKDNYLSFVPEEPLNFTAPVERGSQLSWETELDEPLIAPFYTGQKVGSLVLTTVLGHLIMRGGNG

SEQ ID NO: 80984 - protein, 300 aa, Unknown
  Obtained from environmental sample
  misc_feature (1)..(300): Xaa is any amino acid
TAATAAYASDAAYAASFTAAYADAYAAANASDAAYAAANAADAAAYAAATAAYASDAAYAAYAAATAGYAADAAYAANAGYINRFDWEGILFNDIEAIKKNKLDECNHDINIYGGLWDRFQEDLKALGCDYWAQFYENLFYNGFNIEKEQLERHLDVPEEIKADGAAAVGHYLEGLVEISAPEDLKKNESPSLPDKEPSNTITIKSDKDFADFLENIDNLDYLESHPIEELSDTIIELKLEGENFESSLPGSLIIGLAKYQEKIYSIYLTSKYGIGTRRKITPEEAKLLEIKVIVNRGLQ

SEQ ID NO: 80985 - protein, 76 aa, Unknown
  Obtained from environmental sample
  misc_feature (1)..(76): Xaa is any amino acid
VIIERKLSFEIFTSLIREKKYHAILKNPSRKGQNIFIIPYQDYTYVVPFVIDNSQNIVLKTIFPSRKYHKIYGGKK

SEQ ID NO: 80986 - protein, 191 aa, Unknown
  Obtained from environmental sample
  DOMAIN (98)...(131): Tetratricopeptide repeat
  misc_feature (1)..(191): Xaa is any amino acid
MSRLAAASIIALFFLASCSEGKLLLLQANYLNVLGRYDEALIPYLKAIDHEDSAPYAEYGLGLAFYQLDEGKAALKRYGDSHKLLEKYSSNEHRELRYRNHYNSGVIFFEEGDYHSAAESFKEALRTDPKRLDAKRNLELSLMSISMETNAESREGNREESREILFEYLKQDEQQKWKSREWEPEENLRHP

SEQ ID NO: 80987 - protein, 302 aa, Unknown
  Obtained from environmental sample
  DOMAIN (1)...(223): Elongation factor Tu GTP binding domain
  misc_feature (1)..(302): Xaa is any amino acid
LTDSAERHEMAHVDWNGKKINIFDTPGSSDFTGDVILAIRASEFALLTVEGQTGVQIETIKLWRNLEGRNKPRGVFITRLDGERADFNKALADIKEKLKTEPVPVTIPIGSGAGFKGVIDVLSGKAWFAQGEAPEKEGPIPEEMQQAVDAAREKLIEAAAEGDDTLMEQYIEKGSLTAEEMQKGLVLALAGNKFLPAFAGTAFKNSGLIPFLDFVVNIGPNPGTAKDVSLDKEGKETVVPIDSSRPLSALVIKTSYDQFSGKLSWVKIISGKLTAGSEILTLRRIKREGGKIYTSRERTWRG

SEQ ID NO: 80988 - protein, 292 aa, Unknown
  Obtained from environmental sample
  DOMAIN (200)...(266): His Kinase A (phosphoacceptor) domain
  misc_feature (1)..(292): Xaa is any amino acid
KLEGGLYLGIVTPEKEYFRELRMIRFILMVLGTALAAVLSAILIRIVKGKQKADAEKQKADAMLKEAEGLIENIHVMQRILNSLDAIIYITNPQTGEIIFINDNSKKYYNVDDSCIGKLCHEVFQQGLDSRCGFCPCFQLDKNPDKVIEWLEFSAVTKRHYRNKACYITWLGGELAHLRYSVDITELYKAKEQAETANHVKSDFLARMSHEIRSPMNAILGITEMQLEKEELPPDTAEALDKVNNSGHLLLNIINDILDLSKIESGKIELTPANYDVSSVINDTVQLTSRPI

SEQ ID NO: 80989 - protein, 249 aa, Unknown
  Obtained from environmental sample
  misc_feature (1)..(249): Xaa is any amino acid
MALKKKRRFTLVVAGCMAERLGEKLKKDYAVDYVIGTSARSLFPLILESVEKGSVFVDENKATEKPVFSFSSFYHDPSSPFRSYVPIMHGCNNFCSYCIVPYVRGRELSRSPQSILEEIRLLGSRGVKEITLLGQNVNSYFWKEESFDSWRGFHTPPLWGGHKVWNPRPIPYENNIPRCFAAGYVDFPGLLRLIATNLAGERGVKWVRFLSSHPKDLSDELIRVLAENPVFCAISTFASSTAQTASSPP

SEQ ID NO: 80990 - protein, 311 aa, Unknown
  Obtained from environmental sample
  DOMAIN (129)...(251): Response regulator receiver domain
  misc_feature (1)..(311): Xaa is any amino acid
EVPHTVTTNFDDFKEALYRKEWFYVFSRYGLYERIKPLMEPQPSPQGVEPEVRGSPLVQSDSVFCGGKKPHLALMVEWGTEAYIPNARFVSIPIQSLSIANTLNGKADRRDCFEDSVSSGVIRHTFPNARLLIVDDIATNLKVAEGLLAPYNAKIDTCLSGAEAIELVKRHKYDLIFMDHMMPEMDGIEATAAIRKLEMKKEISGNNGKQIPIVALTANAVVGMREMFIQNGFNDFLSKPVDVSKMDEIIDRWIPRDAQESTLRALRPFDKLRAQEPKGGALPEPVEGSSLPPIPNVDTSADLIHGGGDWG

SEQ ID NO: 80991 - protein, 301 aa, Unknown
  Obtained from environmental sample
  misc_feature (1)..(301): Xaa is any amino acid
KRAKELSVDVIVTDHHEPQDELPDALAVIDPKLKDAAYPFKDLSGCAVAWKLVSALRFAQNSGLYGQPMCLLNTRPLNEAWIVEAVKMRNLVVIATLSETIIPGMLHIGDTRLPAFLEGQQILVWDAPLQKRVTVKLFGNGVEIGMLDVAPEIGREIPSVAGKSLIRIKELSAVAKYSDKEIGELDVFASLFRSYARKKENQESAEAIYETQLAALGTIGDIMPLLDENRIIVRSGVRSLMPSAGGRTSGTGPKPGISELLDKLELSGSHFDVKDIAWKLCPAINAGRRMGIPKSARDHPG

SEQ ID NO: 80992 - protein, 216 aa, Unknown
  Obtained from environmental sample
  DOMAIN (1)...(188): Transposase IS66 family
  misc_feature (1)..(216): Xaa is any amino acid
VEQTVRPKYACRQCEGTEDEDKPTVRIADIGPAIIPKSIASPSLLAVIFTQKFEMHLPYYRQEKQFAQIGADISRQDMANWQQQVFAFLKPIFDLLKAMIKTGPVMRMDETPVQVISDIKPEEEGQKGRQTSYMWLALGGPPDKKVAWYEYHPTHAAYNAREFLQGYSGYLQTDGYEAYDCAVKDLPGNIHAGCFAHVRRKFFELQDKQKTQSARE

SEQ ID NO: 80993 - protein, 268 aa, Unknown
  Obtained from environmental sample
  DOMAIN (1)...(51): His Kinase A (phosphoacceptor) domain
  misc_feature (1)..(268): Xaa is any amino acid
MNSIIGFSELALDDQSISVKTKDYLDKIKSASEGLLGIINDILDISKIEAGKVVLENIPFDLHEVFKICQNIITPKATAKGINLFCYSEPTLGKKLVGDPVRLRQVILNLLTNAVKFTNYGMVKVLASVVNQTEENATIHFEVKDSGIGMNDEQLAKVFEPFTQADNSTTRKYGGTGLGLTITKNFVELMGGDLKVESVIGIGSKFHFDVTFPTCDESTKTESFGDGTGGGAVDMEKPYFNAEILVCEDNEMNQIVITDHLGRVGIKR

SEQ ID NO: 80994 - protein, 214 aa, Unknown
  Obtained from environmental sample
  misc_feature (1)..(214): Xaa is any amino acid
MLYISFTGPRFDPEAVKAMLDQRRSSMAFQENDPNAVFQREIIRTINGNPRLHPLEKEDLQKVNNDQALAFIKRCLNPGDYTFVITGSVDIPLLRSLTETYLASIPASAPFDAWADIDTGRPSDTVKEIKKGKEARSTVYLSWFNPLPYTEEKSAAVSVLNEYLDIVLNDETRETLGGGYSVSSWVLFPLSQGRAFRRPYFICDPKGLKELVPP

SEQ ID NO: 80995 - protein, 165 aa, Unknown
  Obtained from environmental sample
  DOMAIN (6)...(165): Peptidase C26
  misc_feature (1)..(165): Xaa is any amino acid
MNVKQPIIGVIPLWDEKKDSIWMLPGYMQGLEEAGAVSVVLNLTVSETVLKQTACFFDGFLFTGGHDVNPKLYGQEKSCYCGEICDIRDQMEAYIFREAVLNQNKPALGICRGIQLFNVLLGGSLYQDIPAEFPGKIDHIKGPPYDVPAHNVRLLPELGQSDKGP

SEQ ID NO: 80996 - protein, 84 aa, Unknown
  Obtained from environmental sample
  misc_feature (1)..(84): Xaa is any amino acid
MAGISIKIPGLPVHFDCVLARIAETEKLEANDSICYIGGGRFGIVHYNNPPETKGFTIKKIFEWEVKDAVSEWRRPISEYFSIT

SEQ ID NO: 80997 - protein, 206 aa, Unknown
  Obtained from environmental sample
  misc_feature (1)..(206): Xaa is any amino acid
MIAYVLSRQEFVLRKPFTFVLILSMYINAGLIPTYFLIRSLGMVNSFWVYIVPGIVNAFNFVVMRTYMRTIPESIIESARMDGYGDFYIFIRIILPLCLPVLATIGLFVAVGSWNAWFDTMIYNSGRVNLHTLQYKLMEYLQSSQNQGRSAADAGSMALAAAGGARSGMVTPMSIRASITVVAAAPILLVYPFMQRYFVVGLNVRG

SEQ ID NO: 80998 - protein, 267 aa, Unknown
  Obtained from environmental sample
  misc_feature (1)..(267): Xaa is any amino acid
MTGGPDRHGIEWVYVPVTGGSMVRPGCPILKNANDWEKVISFPDVDKWDWEASKEANKDFIKHDLFIIFSILTGFFERLISFMDFENAAIALIDEDQKTAVHGLFQELVKLYNKMIDKYVYAYRANLVSLHDDWGSQRSPFFSLQTVMEMIVPYIKQVVDHCHEVGIFYSQHSCGKNEPLVPAYIATGADDWGSQLINDMESVYNSYGDKIILSMPSGLRLKEDGWTVLSGPEEAAQCAKAFVAKYAPLYRQKPVLCSVFAAPRESR

SEQ ID NO: 80999 - protein, 310 aa, Unknown
  Obtained from environmental sample
  DOMAIN (1)...(260): Serine hydroxymethyltransferase
  misc_feature (1)..(310): Xaa is any amino acid
VIASRLRYIFRQAVRCFTYSVSKETGLLDYDVIEKQARELRPLVLLTGYSAYPRKIDFKRMRQIADSVGAVFMVDMAHFAGLVAGKVFADEYDPVPHAHVVTTTTHKTLRGPRAGLILSTREFAEALDKGCPLTMGGPLPHVIAAKAVALKEASKPKFRDYAKKIVDNCQALAAACINNGLTVLTGGTDNHLFLVNVHVLGLTGRQSESALHECAVTLNRNSIPFDPNGPWYTSGLRIGTAAVSSLGMGKAEMDELGSIIALVLKNTSQALDSKDASKKSKAKYIINEHAQAESFGSGEEAIRPFSGVPG

SEQ ID NO: 81000 - protein, 182 aa, Unknown
  Obtained from environmental sample
  misc_feature (1)..(182): Xaa is any amino acid
MGVVEDKVIKNHYASEYIYNAYKDEKTCGVIEDDPVSGITRIAEPIGLVAAVIPTTNPTSTAIFKALICLKTRNGIIISPHPRAKNSTCAAAKIVLDAAVAAGAPGGIIGWIDEPSLEMSNMVMKEADIILATGGPGMVKSAYSSGKPAIGVGSGNVPAIIDDSADILLAGTRSRPILTQGG

SEQ ID NO: 81001 - protein, 58 aa, Unknown
  Obtained from environmental sample
  misc_feature (1)..(58): Xaa is any amino acid
KTRVAVIEERGKPEDETEEETAEAEEYECPECGAKITVDMTTCPSCGIGLSFEYEEEE

SEQ ID NO: 81002 - protein, 255 aa, Unknown
  Obtained from environmental sample
  misc_feature (1)..(255): Xaa is any amino acid
MSDISGLKEKGHYGLSIVLGSADLTMLELASLYAALVNGGVKKELRFLSARDNFYTSGVSEKVASKSDASKPPSQGEKILTPAAAAITLRMLERNPAPDDFRVMKRRSVPIAYKTGTSIGFKDAWAIAVFDRYVLCVWLGNFSGEGNSAFIGRLSAAPLGFSIIDAILAEIPNDKLLSRRPLPPEVKAVQVCAVSGDIPSDDCPRLIDTLFIPGVSPINRCRIHRKIYIDTRTGYRTNETEGKYIRRKSARRQPG

SEQ ID NO: 81003 - protein, 151 aa, Unknown
  Obtained from environmental sample
  DOMAIN (50)...(151): ATP phosphoribosyltransferase
  misc_feature (1)..(151): Xaa is any amino acid
MADKLRLLVPKGRIFEKIAGLLTEAGFPIALTERTYRPSLGADWIDAKIMKPQNVGELLELGSHDAGFTGIDWIRESGADVAEVMDLGFDKVKIVAAVPQGSGEDYLKSKKLVVATEYVNLAEAWLGNQVISTGFCETTGLRRFSRRMTPT

SEQ ID NO: 81004 - protein, 199 aa, Unknown
  Obtained from environmental sample
  DOMAIN (6)...(159): Cobalt transport protein
  misc_feature (1)..(199): Xaa is any amino acid
ETRDDICFSPEQGVKSINQKRYLEGAGRFTLTAEQLFYEFNIFLKYITILPPAILLIITTHPSEFAASLNRIGVPYTAAYSVSLTLRYIPDIQRDFEAISQSQQARGLELSRKASWIKRLKRTVPLLLPLIFSSLDRIDVISCAMELRGFGKHKKRSWYSGRPFKRADKITLIAGIVLFAAGIWFTFRNGNRFFNPFLY

SEQ ID NO: 81005 - protein, 148 aa, Unknown
  Obtained from environmental sample
  DOMAIN (30)...(144): Response regulator receiver domain
  misc_feature (1)..(148): Xaa is any amino acid
RGIEQRKQQELEDLKRESQKFKVESGDEKKKIIIVDDEQTVLTLTKAILDQDYDVTTCDSGQKALNMFFQGYTPNLVLLDLTMPEMGGWDTYIRIRDITKLHKCPIAIYSTSESPEDKAKAKEMGAVDFIHKPANKADLLAKAARLVK

SEQ ID NO: 81006 - protein, 169 aa, Unknown
  Obtained from environmental sample
  misc_feature (1)..(169): Xaa is any amino acid
MNYGKISSYQTGVVIPLFSLLSKESVGIGEFLDLIPFGHWAKKCGLDLIQLLPVNDTGEEPSPYSARSAFALNPVYIRLQEVEGAKEILGEEPEKHNKKFMKHPRIPYIDVVRYKRHALREIFNKRRHEILGNEHFTKWMDQNEWVNSYAVFWPQSQNHKPLAISRGIR

SEQ ID NO: 81007 - protein, 155 aa, Unknown
  Obtained from environmental sample
  misc_feature (1)..(155): Xaa is any amino acid
MRLIHIYLFVSVLVLTLIAIPRAEDTITIPSPAVFFLHEKQSVKSIDSLSARFNRSGDDSLSAKSKNQIFNNDDDQSNLSITGYKSFGVSIGELGEVNLEQGLEASIEGEIRPGTTLRAQLSDQGSRIEGSTREISEIDMMFFELAHKKITVTAG

SEQ ID NO: 81008 - protein, 324 aa, Unknown
  Obtained from environmental sample
  DOMAIN (212)...(320): MutS domain V
  misc_feature (1)..(324): Xaa is any amino acid
MTEWPRLYFGQIEEELCPLNESPNGGSFCFESPEAQLLTDELKKLNALKELLDRTIADDPSILLNEGNLIRDGFNAELDRLRELKNSGRELLENYLEEERRETGISGLKIKYNRLIGYFFEVTNVNLSKVPSRFIRRMGTAGGERFTTDRLAALESEINGASDKIVELERKLFLEIRDGAKQLLRELTAAGKRIAEIDVAQSLAREATIRGWVRPVMESRNRTAIVEGRHPIVEAHLARGEFIANDVFLDASETDNGAIFALITGPNMAGKSTYLRQAALITIMAQSRSLFPQPKGISALWIAYIACFGSQEYLAEGRIHFFLL

SEQ ID NO: 81009 - protein, 312 aa, Unknown
  Obtained from environmental sample
  misc_feature (1)..(312): Xaa is any amino acid
MVQKQSGKNSVQPAKDLRVRLEKIASELPPDIKINEMFTPTDIIEHSLNQVTSTAISGAVLAIIILFIVLRSAKPTLIIGISIPVSIIITMMLMYFAHLTLNLMTMAGLVLGIGMLVDNSIVILENIYHYREKGAKLKTASVIGSSEMIVAITASTITTICVFAPLVMFQGLLEMAGELFAGLAFTVVISLGISLFTAIFLVPILASHYLPLVTRKQKPLTGALAGIDKKMENFFIWLEEKYRNAVRKVLNHKLIVIIFLLVLFAVSMLLVPVIGWEFMPQQDDDNVSITATLPMGTPYRNRLGHSVMGGGW

SEQ ID NO: 81010 - protein, 255 aa, Unknown
  Obtained from environmental sample
  misc_feature (1)..(255): Xaa is any amino acid
MAPEKIETLSCPGISGELLAKAICRMRRSEVSISPGYDGEYGVIRTLAPGEAKESGTGLFEDNIVNDINTKKKPREAKQKIVSPVNNKKPSPQIRGFSLDEDQLAAVSSDLRRGAIIAGPGTGKTAVLAAKIARVASEGVNPTSILALSFTIKAAAELRDRVLRLTQKPKVEKPETEKPMIVTFHSLCASILREQYASSGLPVDFKILSETERDELLAKICAADGNKALSPRRLGEYIEKRNDSSSCPERNQKVS

SEQ ID NO: 81011 - protein, 80 aa, Unknown
  Obtained from environmental sample
  misc_feature (1)..(80): Xaa is any amino acid
VEMQNWYRKIADAMGFKTFLITHDVREALLLSDTVYILKGKPGTITNVFKILPPRPRTSEFVVSQDFSSQKREILEAISS

SEQ ID NO: 81012 - protein, 318 aa, Unknown
  Obtained from environmental sample
  DOMAIN (28)...(276): Glutamine synthetase, catalytic domain
  misc_feature (1)..(318): Xaa is any amino acid
MAEAFCSYSGEALDKKTPLLRSMEAIDKQAIRILRLFGDTTAKRVLTTVGPEQEYFIIDKEVFRKRPDLIYTGRTLFGARPPKGQELEDHYFGAIKPRVSAFMRELDEELWKLGVCAKTKHNEVAPAQHELAPIFSTTNIATDHNQLTMELMKSIANKHGLACLLHEKPFAGVNGSGKHNNWSISTNTGVNLLEPGDTPNDNAQFLLFLVAVIKAVDEYQDLLRVSVASAANDHRLGANEAPPAIVSIFLGEELTDIIEAIETGKAYKNKEKLDMQIGVSVLPHFPKDTTDPQPDISFSRLQATSLSSVCSARHSHSE

SEQ ID NO: 81013 - protein, 164 aa, Unknown
  Obtained from environmental sample
  misc_feature (1)..(164): Xaa is any amino acid
VSYLYETHLHTSIASACAKSKGSEYIRHYRELGYSGIIVTDHFYQGNTAIARCTSAGTRLPWKEWVKQFCKGYEEARNEGERQGFDVFFGWEETFDSCDDYLIYGLSREWLLEHPEVKDWTRGEQYRAVRESGGCVVQAHPFRQHSYIRKVVLSTRCVDAVEAP

SEQ ID NO: 81014 - protein, 312 aa, Unknown
  Obtained from environmental sample
  DOMAIN (1)...(307): AMP-binding enzyme
  misc_feature (1)..(312): Xaa is any amino acid
FTDLRAEIEKAGDKFQRVTTKTDDPMLIYFSSGTSGMPKMVLHNHSLPLGHIVTAKYWQCVEEDKVHLTQTDSGWAKFAWGKIYGQWICGAAIGAYDTEKFTPKGMLDALQRLQPATFCAPATVFRYLIKEDLSGYDFSFIRHTSVAGEPLSPEVYHKLKELTGLEIREGFGQSETSVMAATFKWLPVKPGSMGKPAPLFALTLLDENGGPCDDGMVGNMSITAAGKNMYELAGAGGKASPGGVVPVIGPSDFPGLFRGYWKDEDITKTAWNGGTYKTGDMAWRDGEGYLWFVGRNDDGSNVRRNHRGGGRG

SEQ ID NO: 81015 - protein, 298 aa, Unknown
  Obtained from environmental sample
  misc_feature (1)..(298): Xaa is any amino acid
GQNGKYKPAGGKEVLISPGSALAKKKCDWIVCHEIVETSRVFARTVAAIKPEWLEELAADFCKRTFEAPFFDAESGCVRAVERVMLFGLPLAVKKNSLYSKAEPEAATEIFIRDGLVEENLVCHHKFYDHNKKLKQKILSYEAKLRSRNYYKGDGAIFDFYKKQLRVAASIHDLNKAIRAAGNDKFLYLREEDIIEESIPKEAHAYPDHVNIGNQNFALKYAFNPGAEDDGVTLALPQKVLPFIAKETIGWLLPALWPAQIKSLLQQLPRSQRKIFVPMGEAAKKLAETSSLAIIKVN

SEQ ID NO: 81016 - protein, 163 aa, Unknown
  Obtained from environmental sample
  DOMAIN (41)...(77): Sigma-70 factor, region 1.2
  misc_feature (1)..(163): Xaa is any amino acid
MTDAFMEFDTENYDHELIETIRPVRSSAAKNSKKAKTSKESDPLALYFRQISNFPLLTVQEEQNIGEKIISLRSKQKELEAERKTKSKTEDDYHREKAALDSTLLFYKNKMINSNLRLVVSIAKNYQHRGLSLLDLIDEGNIGLIERSSVLIIPGDAVSHLRH

SEQ ID NO: 81017 - protein, 85 aa, Unknown
  Obtained from environmental sample
  DOMAIN (13)...(77): Heavy-metal-associated domain
  misc_feature (1)..(85): Xaa is any amino acid
METIKKQGIQKLSFHVSGMYCKNCQNIIEKELKKTTGIQRAAVNYRSGRAVVTFDAGVIGFNKIQEVIENLGYQAWKKAVKSRPI

SEQ ID NO: 81018 - protein, 322 aa, Unknown
  Obtained from environmental sample
  DOMAIN (1)...(271): Ammonium Transporter Family
  misc_feature (1)..(322): Xaa is any amino acid
GLPDLGHWIWAAAAFRTGFHDFAGSTAVHMFGGVASLIGAAIVGPRIGKYSEKGESRAIPGHSLTLGALGVFILWFCWFGFNGGSTVAMTSQDDVVSASSIFVTTNLAAATAAVLTMFITWIRYKKPDVSMTLNGALAGLVAITAGCDAVSPFGAFCIGIIAAFVIVFGIEFVDKVLKIDDPVGAIGVHGLSGAVGTILTGVFALDGGLVYGGGLKMLGVQVLGVVVVAAWVAITMCIIFTIIKKTIGLRVSAAEEIAGLDITEHNIESSYADFMVSATIESDKDAVVPLNVAVPVVNNSKPDAKMTKITSADLIHGGGNGG

SEQ ID NO: 81019 - protein, 284 aa, Unknown
  Obtained from environmental sample
  DOMAIN (211)...(282): Bacterial flagellin C-terminus
  misc_feature (1)..(284): Xaa is any amino acid
MATLKTLSAFFRDVNDALRAYEAAEKGEFKTKEGAIHTVTYTFRENIVKSDLVSVAGISGTTGIGSLDRIINQLSKANTLQASAGLEDTAAHKQANAALMASLGSIFSSNASAQMQEDLKAVLGIDADKLPVNGLRDVIVAWQKDITDLKDAYKIYSEADIATGSAASEVLHVGPNYSSGLGGATSNQIRVNYVSVDVKGLGLEAQVIDTREGAQRAIDNIQENIKVMSSNRAAIGTYINRLDYTVNNISSMEYNIQDAESRIRDTDFCTQTTSFTENQLCAGF

SEQ ID NO: 81020 - protein, 297 aa, Unknown
  Obtained from environmental sample
  DOMAIN (1)...(215): Penicillin binding protein transpeptidase domain
  misc_feature (1)..(297): Xaa is any amino acid
MKPFLYALAMERGPYTPESLVEDVPTGFKGFSPQNSDKSFSGVVPFKEALVRSLNVPAVKILSEYGVEDFHFWLRNAGLNGLSRPSESYGLSLILGGGEASLQELVPLYSMLMNEGKRTELKWLEDSIPEKNEQLLQNITAYHIKEILTSVKRPDFEQYHLQFNNHIPIAWKTGTSYGSRDAWAIGVNEQWTIGVWVGNFAGGSVANLSGSATAAPLLFSLFNNLSDHKRKMWSEFPKDADFEEVEICSLSGYKAKDFCPHKKNILLPINRMQSRACSFHKEIIFKKHLGRICHWLT

SEQ ID NO: 81021 - protein, 317 aa, Unknown
  Obtained from environmental sample
  DOMAIN (1)...(316): Aldehyde oxidase and xanthine dehydrogenase, molybdopterin binding domain
  misc_feature (1)..(317): Xaa is any amino acid
MAGGRCVYQPYIGGGFGNKQDSLYEPLNAFMCTKVGGRLVKLELSREEVFAATRVRHSEKIYLKSWVRPNGRIVARSYTAYSNQGAYGSHGHGIAAKGTNAFRQLYNDEKARKVDIYTVYTNTAAAGAMRGYGTPQAVFAIESHIEDIAKSLKLDPLEFRFLNVMPVGFVDNFTKNINRFDSLGQCVEAGKKRIKWDEKRERYAKQSGPLRRGVGMSLFWYNTAVWPISIEISSCRMVMNQDGSVQIQLGETEIGQGADTVFSQMVAKTLGIPWQMVHVISTQEHDITPFWIGAYGSRQTYAGGAGVHKGRLLLKEK

SEQ ID NO: 81022 - protein, 63 aa, Unknown
  Obtained from environmental sample
  misc_feature (1)..(63): Xaa is any amino acid
MSALEIKHLLGLRGVSANDIRAILDNAAEFRKVLERKVKTLPTLPRHTVVNLFFESSPAPALA

SEQ ID NO: 81023 - protein, 162 aa, Unknown
  Obtained from environmental sample
  DOMAIN (86)...(157): Bacterial flagellin C-terminus
  misc_feature (1)..(162): Xaa is any amino acid
MYIQMKVSALVDEVDRIASHAQFNGMNLLTGRFSRPIGENVVTASMWFHIGANMDQREQVYIGTMTSKGLGIRNVGDDTFITLSSMDGANRAIGTLDRALKIVNKQRADLGAYQNRLEHAVRGLDVGAENLQAAESRIRDTHMANETVNSSANLIHGGGVGG

SEQ ID NO: 81024 - protein, 318 aa, Unknown
  Obtained from environmental sample
  DOMAIN (239)...(318): PAS fold
  misc_feature (1)..(318): Xaa is any amino acid
MMAEKRTVEYLAACRCLSRRIFLNNTVWGFALLEDRHNERFFIGDTIDMLRSAAFLCANTVIHADMEREIIDANEFKSAILDALPLSITIFDENARIIDCNDTLVESLKTTKKYYIEHFGEFSPKYQSDGNLSIDKAIESVRRALNGEKLVFEWEHCTSSGEPVHYEVTLARAMYKGKYVALGYQYDLHERKTREIELARAKELNELQLAKLNLVVQGTKIGLWDMEVVKDDPVNPNNTFVWSDEFRHMLGYNDENDFPNILSSWSDLLHPEDKERTLTAFANHMLDRTGKTPYDVEYRPSAQTGEYAYYRASGESIG

SEQ ID NO: 81025 - protein, 287 aa, Unknown
  Obtained from environmental sample
  DOMAIN (6)...(87): Histidine kinase-, DNA gyrase B-, and HSP90-like ATPase
  misc_feature (1)..(287): Xaa is any amino acid
ARCIEGKNNFYTVQISVIDTGIGISKEQQKYLFNSFQQAEAGTTRKYGGTGLGLAISKSIVEMMDGKIWVKSEPDKGSTFAFSVKMRRGETKEKNSLLSHDVNWGNIRIMAIDDDTDILKYFIDITHGFGLSCCDTAISGEEALKLVDKNGPYHIYFVDWKMPGMDGIQLTRELKARASENSVVIMISATEWSVIAEEAKKAKVDKFVSKPLFPSTIIDVIKECIGMEEENRKEEQIDINGIFAGRRILLAEDMEINREVVLALLESTKLEIDCAENGKEAACVCSA

SEQ ID NO: 81026 - protein, 292 aa, Unknown
  Obtained from environmental sample
  DOMAIN (1)...(259): 4-alpha-glucanotransferase
  misc_feature (1)..(292): Xaa is any amino acid
VFQQWMQWVAEEQFLKAVGELNKLGVRLKGDIPILINEDSADVWHSPQFFSLENRAGAPPDMFCYSGQNWAFPTYRWDNLEKENFGWWRDRVKHAAKFYHAYRIDHVLGFFRIWVVPEVEHTGILGHFVPSVPIYMDEILQAGIPRETVHYLTTPNFGEEQLGHWFSFDTESVKQKYFEHLRDDRYILRSEYRSERAIISLQEEQHIKDALLNVYWDRIFVPSSTEETLWPYWYWYNAPVLLTLPEHERNTIRDIIQNHEIKQEDLWGKNVIGFLAFLPKKLICSCAQRIWV

SEQ ID NO: 81027 - protein, 323 aa, Unknown
  Obtained from environmental sample
  DOMAIN (1)...(113): Glutamine amidotransferases class-II
  misc_feature (1)..(323): Xaa is any amino acid
AQPLVVMHIKGSMAIAHNGNITNAAELREKLEMDGALFHTTSDTEIILHIITKKRIQSPSIETAIEQAMYEIQGAYSLVIMSPSKLIALRDPCGFRPLSMGSLGNDIVFASESCAFDSIGAKFIRDIEPGEIVIVDNDGPRSIKTHCGKPGGMCVFEFIYFARPDSIIEGASVHTARQRAGSFLALEHPVQADVVFGVPDSGLDAALGYSRQSGIPYGVGFIKNRYIGRTFIQPSQEERDRSVRIKLNTIEATIKDKRVVLIDDSIVRGTTMRRIVNLVRESGAKEVHLRISSPPFINPCTLARIRQPRKSISADLINGGGFA

SEQ ID NO: 81028 - protein, 216 aa, Unknown
  Obtained from environmental sample
  DOMAIN (17)...(177): DEAD/DEAH box helicase
  misc_feature (1)..(216): Xaa is any amino acid
LIGYSIRDMNYLDLPVYKHKDIILNALEKTQALVVESPTGSGKTTQLPVILYQAGYAKNGTIGVTQPRRIAALSVSEFIARQIGCAMPGLVGYKMRFEDKTVPDTQIKIMTDGILLQEMKLDPWLSKYNCLVVDEAHERSLNIDFILGLLKRVLEGRREFKVIVSSATINAEVFSEYFGECPIVKIDAQTFPVTLIYDPPAGKAYPRPICLGEEME

SEQ ID NO: 81029 - protein, 287 aa, Unknown
  Obtained from environmental sample
  DOMAIN (40)...(73): Tetratricopeptide repeat
  misc_feature (1)..(287): Xaa is any amino acid
MKQDNFEVNFNLGSLELERKNYDKAVQLLQLARAENPDNPAVLRCLGHSFFRMKKPKEAMSFIRKAIELAPDDKESLYTLAECYYEANQVDQAIKIFSHLRADPVMGPSACLISGNIHNEVRRADLAIQDYEMGLRHENIRPDILAELRYYLAVSYIKQNEISKALPLLHSLQADNASYKDVNVLIGKYQELNANKNLQIFLMAASADFVALCRKIVMTYFAKAKVKILNISVHKNEWADILAEINTPKWSDVVMFRFIRTQGSIGELIVRDFHPSSSAGHNRGKSR

SEQ ID NO: 81030 - protein, 248 aa, Unknown
  Obtained from environmental sample
  DOMAIN (66)...(242): Calcineurin-like phosphoesterase
  misc_feature (1)..(248): Xaa is any amino acid
LLPLFDLLRLGLFLFRRNVLTPRFTAAGIGAMLCLCAVIIVCGALHARSIRTVQYALRLAGQGNSLRIALISDLHIGSSVGQKHIAKVVNVVNKAEPDIVCIAGDIFDGHLETVRNLPGIAAEFRRIRTPLGIYACLGNHDVDRMFPSGGGTERIEAFLREAGVTLLQDEVAAIGGNMYIAGRRDARPIGMKAGRKTAAELCAAPSDAATRALIVLDHQPTQFTEIEAAGADLVLCGHTHRGQLFPAN

SEQ ID NO: 81031 - protein, 76 aa, Unknown
  Obtained from environmental sample
  misc_feature (1)..(76): Xaa is any amino acid
MDFIISNGNIVTPEGTYCADLFIKNGVIAEIGTGLTASGVQTVDAKGKYILPGGIDVHTHLAMPLADLGRSDHGVP

SEQ ID NO: 81032 - protein, 88 aa, Unknown
  Obtained from environmental sample
  DOMAIN (29)...(87): MazG nucleotide pyrophosphohydrolase domain
  misc_feature (1)..(88): Xaa is any amino acid
MSVSDAFKSLYDIVVCLRGPDGCPWDREQTPQSLRGDLIEETYECIEAIDEKESAHIQEELGDIFLWVTMFSICMSREGVFSFGRRFK

SEQ ID NO: 81033 - protein, 307 aa, Unknown
  Obtained from environmental sample
  DOMAIN (43)...(225): ABC transporter
  misc_feature (1)..(307): Xaa is any amino acid
KFPPRFIAACRENMKVITANQITKIYPNGKKALNCVDLNIEEGEIFGFLGPNGAGKTTAVKLLNGMLQITEGSCSVFGIEPAKSPEKIHALSGVVTEHAQMYNNLTGLQNLMFFGEVFDIGADETKRRALEILERLELSDAKDRKLSEYSTGMRQRLSLARALLHQPKILFLDEPTSGLDPESAQNVNNLIKSLARDKGTTIFLCTHQLRYAEEICTKYGLISEGSMLAAGTLDELHSLVFSGMTVKLKSDKYPAALKTRQDGEYMLADVNSQDENPACGKTKLSIQAGNGYPGVGPKTFPWKKINF

SEQ ID NO: 81034 - protein, 317 aa, Unknown
  Obtained from environmental sample
  misc_feature (1)..(317): Xaa is any amino acid
GITHGTEFGTSDAEQYRNMIPNYMLKIQGEHAKRRSDPSLYAIYDRSSGATDPSSVAKIKLNMIGGQNWRVAGQWIEWEFYVPEDGMYRFTVKGRQNYNRGFVSNRTAMIDGQIPCVELSAVPFTYSNKWKLTTFRDRQEDMVFPLEEGMHTFRLQAAMGGMGEMLSVMEESVFRLNAIYRKILVLTGTEPDIYRDYRVDVVYPEIIKAMALESKILYKLVDDLTAYSGERSAQAAATLTLARQLELFVRRPDKIPRTLVNFKFNISALGDSLLALSQSQLDVDYIVVSASNAKLQPVRQKLFVALPTRYGLSLSRS

SEQ ID NO: 81035 - protein, 305 aa, Unknown
  Obtained from environmental sample
  misc_feature (1)..(305): Xaa is any amino acid
GYHDRLAELLFCLAFSQNSLYKPFASFRVIETEHFDIIFPKESEQSARLLAFFADSVYDKVSSLLDIEVSGRIPVTFSPHTDLFNGYYNQFFNHIVLYDTPLDIEKMGYNNNLEKLFLHELTHAVSLNTRSPAYKLRHRIFGSLASPSFFNAPYFMVEGVTVSFESLDGTGRANDPRVKQYLRQAVHENKFLTPLQASGVFDRPIRPNGYWYEYGGLFSAWLQQIYGMEKYSLLWKEMGKDSPLSFFVYKSDYYRIFKKVYGVEFTDEWKKFSATFALDGIENNEDELSFRKYRLFCWKENILSP

SEQ ID NO: 81036 - protein, 94 aa, Unknown
  Obtained from environmental sample
  DOMAIN (4)...(44): UBA/TS-N domain
  misc_feature (1)..(94): Xaa is any amino acid
MADISASDVKTLREKTGSGIMDCKNALVETGGDFAKAEKLLKRRVLRRLKNDPGGVTQERKDLCQNKRLRGSRLDGNTGRNGFRRRTLVQRNRE

SEQ ID NO: 81037 - protein, 143 aa, Unknown
  Obtained from environmental sample
  misc_feature (1)..(143): Xaa is any amino acid
AQRLDGPRQGVPTRTVHYVFSQKPPLDSAQGPLETYIAATAERLQRGEFDGKLVYRKHVRKELDAYTSSIPPHVQAAKLLDSPVRVVKYYITKNGPQPVEKLSAPIDYQHYMDSQLRPIADSILVWMGSDFDRAVSGQLELFA

SEQ ID NO: 81038 - protein, 191 aa, Unknown
  Obtained from environmental sample
  misc_feature (1)..(191): Xaa is any amino acid
MSGKSANSGLFWRAKKALLRPANYPASAPGAGFTRIEKDGVNWIVVNLQGREFISAIDCPFLCFDKMSNTQTGAAKRIIIVDFHAESSREKEAFGYYADGRASLIAGTHTHVQTADERILPKGSAYITDIGMTGITDSVIGMDIKICQERFRRQVQYQMKPASSAKQGQLQGVVAEIDLDTGMAVGVKRIA

SEQ ID NO: 81039 - protein, 227 aa, Unknown
  Obtained from environmental sample
  DOMAIN (43)...(157): Response regulator receiver domain
  misc_feature (1)..(227): Xaa is any amino acid
MGGSIWIESELGKGAVFSFTIKLKRVTNEKQKTLSADINIKNVRILAVDDDADVLAYFNEIAQNLGLICDTAASGEEALKLIEQKGGYNIYFIDWKMPGMDGIQLAREIKTNVTKNSIVTMITAAEWGDIAEEANMAGVDKFLPKPLFPSAIAEMVNKCLRADRQPGEKSQVQDIAGIFAGRRILLAEECENNRENVKTLLESTKLGKKLRRKTEKEAGAYVSAKPP

SEQ ID NO: 81040 - protein, 127 aa, Unknown
  Obtained from environmental sample
  misc_feature (1)..(127): Xaa is any amino acid
MNILELVGNTPVIELKKILNMTNGVSLFAQAEYFNPSGSVKDRAAQAMILHGVNSGQLTKDKNILDSPQRKYGIAYAMFGAALGYRVKLLMPATPREERKKYTRLWPRIIKTNRLEGPMGPTPCKWI

SEQ ID NO: 81041 - protein, 233 aa, Unknown
  Obtained from environmental sample
  DOMAIN (81)...(175): Helicase conserved C-terminal domain
  misc_feature (1)..(233): Xaa is any amino acid
VVKIEAQRFPVTLIYDPPYCGEPPLAADNARPNADTAAEAFLLKIEKIVTRFIGEKREGDILVFLSGEKAIKDCMNRLALSRVGSKLHLLPLYGRLGKEEQERVFDAAPKGRTKVVLSTNIAETSVTIEGITAVIDSGLSKLNWYNPNTYTSSLVEAPISIASANQRKGRAGRTCEGSCYRLYTRLDFEKRQLFTTEEIFRTDLSEVILRMADLGITDFENFDFISTPGMDGL

SEQ ID NO: 81042 - protein, 78 aa, Unknown
  Obtained from environmental sample
  misc_feature (1)..(78): Xaa is any amino acid
MDSNITTFIAALFLSQLGSGPIRGFAVSLSIGVFSSVFTALFVSRLIFDFDTDVMRRKGLSISWRTRIQEKAKGGKAY

SEQ ID NO: 81043 - protein, 239 aa, Unknown
  Obtained from environmental sample
  DOMAIN (32)...(97): His Kinase A (phosphoacceptor) domain
  misc_feature (1)..(239): Xaa is any amino acid
MTASTIAGVIMRDIYTIKLEDALHKATEASRAKSEFLSNMSHEMRTPLNAITGMTTIGKNAQDVERKDYALDKIQDASTHLLGVINDVLDMSKIEANMLELSPVEFNFEKMLQKVVTVVNFRVDEKKQKLIVHIDKKIPSTLIADDQRLAQVITNLLSNAVKFTPEEGSIILNADSKAEENGLCTIQISVSDTGNWHKSPTAKAPVQFFSAGEKQHHAQIRRYGAGTRDFQKYSRDDGR

SEQ ID NO: 81044 - protein, 77 aa, Unknown
  Obtained from environmental sample
  misc_feature (1)..(77): Xaa is any amino acid
MVNMTPAVDLLFDAVASKGHVCVGLDTSPDYVPQTERQKAPNAAQAVLAYNTGVIDATFDVAACYKGQNCLLPKNGE

SEQ ID NO: 81045 - protein, 158 aa, Unknown
  Obtained from environmental sample
  DOMAIN (72)...(155): Transglycosylase SLT domain
  misc_feature (1)..(158): Xaa is any amino acid
MIFSRHLLESLLDSLKISPQDSVFLARLSNKRGVTYDVPVVWNDRVKRALLFYLRTRKGIFDRWLYRAGYYLPPMKQMFADSGLPRDLAHLPIIESGFNPHAYSRAHAAGIWQFIPSTGKIYGLRQNYWIDERRDPIKSTGAAIRYLSKYLGQSDHGG

SEQ ID NO: 81046 - protein, 252 aa, Unknown
  Obtained from environmental sample
  DOMAIN (1)...(252): Amidase
  misc_feature (1)..(252): Xaa is any amino acid
VFNAAVIEKLEKAGMVVIGKANMDEYAMGGSSETGALGPVHNPWDLARVAGGSSGGSAAAVIAGEAPIALGSDTGGSIRQPCAFCGVTGVKPTYGSVSRYGLVAYASSLDQIGPIGQNIDDCAALLSIISGPDARDSTCVIEKPFEFGEAKTKLEGVKIGLPRNYYGSGIDDEVKNAVFAVVKELEAAGAIIEEFEMPLMDYMIPAYYIIGCAEASSNFRRTTVWSTATAALTRGLFPKCTGFSETKVSGWK

SEQ ID NO: 81047 - protein, 266 aa, Unknown
  Obtained from environmental sample
  DOMAIN (2)...(221): Bacterial extracellular solute-binding proteins, family 3
  misc_feature (1)..(266): Xaa is any amino acid
VVLFASEHDNTPISFYYKYEDKWQGISLDILRELESLTGLNFKIANDKNAEWPELLSSLESGETPMVTELLFSEDRIGAFLWPRSVIMTDNYALISKSDYPNVSINDILRLKVGLIKNTAYASLFNTWFPDHKNNVLYDNTDAAFDALESGEVDIVMANLSQLLMLTNYYERTGYKANFVFDFTSESTFGFNLNETILCSIVDKALRLIDTRGISGQWMRKTYDYSAKLARSQRPWLISAAALFFCILVLLFILFKETLGRFCPWG

SEQ ID NO: 81048 - protein, 154 aa, Unknown
  Obtained from environmental sample
  misc_feature (1)..(154): Xaa is any amino acid
MTLEEKVGQMTQAECGQVLKGDIEKYFIGSVLSGGGSTPRDNTPQGWIKMVNGFVEESLKTRLRIPVVYGIDAVHGHNNAKGATILPHNIALGAIAAGDPQRGAQTAYIAGKITAQEMLATGLRWTFAPVLGVAQDARWGRTYESYSEKRDICT

SEQ ID NO: 81049 - protein, 163 aa, Unknown
  Obtained from environmental sample
  misc_feature (1)..(163): Xaa is any amino acid
MKKGIIAVILILGAVFCAFGQNSDTIDLVLLLDTSSSMGSSFEKVNDYITGRFLSEFLRVGDTFHLISFSSSPRLDIARKISAKGDIETIIGRMLIQYPVETGNNVTAAVNYAEAYIATLPPRPKKIVVVSAAGPETSGIINSAKQRFSQRTRRCSANLIKGG

SEQ ID NO: 81050 - protein, 85 aa, Unknown
  Obtained from environmental sample
  DOMAIN (13)...(82): Prokaryotic transcription elongation factor, GreA/GreB, C-terminal domain
  misc_feature (1)..(85): Xaa is any amino acid
LIPIQSARAKYPQAQRSFLLNESSGQREEYTILGPWESNPENNIISYLSPFGGAILNKTEGEKFEFVSSNERNFYIVEKITAAVI

SEQ ID NO: 81051 - protein, 228 aa, Unknown
  Obtained from environmental sample
  DOMAIN (1)...(174): Polysaccharide biosynthesis protein
  misc_feature (1)..(228): Xaa is any amino acid
VITHGVKRFVHITTDKAVDPVSVYGASKLICERLVTEAAAVSSNFMVVRFGNVLGSRGSIVPLFQKQIEKGGPVTITHPDMHRWFMTIPEACSLVLKAGGVGENGKLYLLDMGEPVRIRDLAEQMIRFYGFEPEADIKIEYTGLRPGERLDERLWSENEIPRETEYSRILRLDKKTSGGIDLARLMEELKPICRFDPAQPEKYRDGSLLRAALENAIPGMKAKGQLAV

SEQ ID NO: 81052 - protein, 93 aa, Unknown
  Obtained from environmental sample
  misc_feature (1)..(93): Xaa is any amino acid
MNTLYIVSTPIGNLEDITFRAVRILKEASLILAEDTRHSRILLEHYGIPTKMESYHEFNKEQVTPKYIEYLKSTGDIAPCKRCRNPRNCKPLI

SEQ ID NO: 81053 - protein, 152 aa, Unknown
  Obtained from environmental sample
  DOMAIN (1)...(152): 6-phosphogluconate dehydrogenase, C-terminal domain
  misc_feature (1)..(152): Xaa is any amino acid
MVHNGIEYGDMQLICETYDIMKNVLGLSCDEMGDVFDEWNRGSLSSYLIEITRDILRYKDTDGRPLVEKILDTAGQKGTGQWTGIAALDYGVPLTLIGEAVFSRCLSQSKTSARGLQSFFKAKTAPSLTVLFCQRLEKRYRIQGVSTPRANL

SEQ ID NO: 81054 - protein, 289 aa, Unknown
  Obtained from environmental sample
  DOMAIN (2)...(234): Alpha-2-macroglobulin family N-terminal region
  misc_feature (1)..(289): Xaa is any amino acid
MIARASDFSTSTDSGGRARIPNFDNTYKNERSPTVYTVLSGEDMSFMAYNTNGRNLDYSAFDVGGIYGASDPKTLRAFLFSDRGLYRPGDEVRIGLVIKNDSWAGNLGGTPLEYRITDPRGAEISNKRIKLSSEGVEEIRFSTQDWSPTGTYTASVYVIREWWEQRTRDDYTFLGSQPVKVEEFLPDTLNVSAVFDPVPADGWITPRELKRGSRYATFLHCGLGNEFKHRSICRGGISTSASTGTTILKYPYFPEKQFFGKFLGEKNPPISEGTGPKKNRNPWPNFEKN

SEQ ID NO: 81055 - protein, 103 aa, Unknown
  Obtained from environmental sample
  misc_feature (1)..(103): Xaa is any amino acid
LFAGGFVSGIYRIADKIIQSEDDSFGLSDKDIEDRFQEAGIEAEIDFEAKMDYVEDLLHSGALSHGDLIETVKSQQLEISKLKKENNFIKLKLSKAFAKGFEP

SEQ ID NO: 81056 - protein, 229 aa, Unknown
  Obtained from environmental sample
  misc_feature (1)..(229): Xaa is any amino acid
MKVIRRHERIKDTLNKVSVIFLSRNEEKVEDTMAAGVHLIADMAEIDRLILCRNRIAVDNLYVSEVYRWDRSFGGSTELTATLIDIPYARLIPDWEGLLSDGKHINSPSRLMSENAANTLQSFGVLTAAVIPIHINGIFWGFALFADTKNERYFEKDIIEMMRSAAFLFANVFIRDEVDYDALTGIYNRRFFDNNIKRIISFISRSESSLSMMMIDMTLKRSRPIYQGG

SEQ ID NO: 81057 - protein, 107 aa, Unknown
  Obtained from environmental sample
  misc_feature (1)..(107): Xaa is any amino acid
VPRKGGIEFDPEKTVTVNIPTKELRYDTKNIGGNIFFLTKIFVKDEISLCYTHSDRVVFGGAFPANKKLRLEGGRDSEAKFSLTGGNWELYVFVGRVPSPLTGPNIK

SEQ ID NO: 81058 - protein, 217 aa, Unknown
  Obtained from environmental sample
  misc_feature (1)..(217): Xaa is any amino acid
LDAGVSFATIAPRFCGEFQKGIDYKGDIAHFDREIKAHAVIARHLGYKLSIHSGSDKFSVFPSIGRETRGIFHVKTAGTNWLEAMRVVAMADPSLYREVHACALTAFAEAQKYYHVTTDLSKIPAVDGLPDTELPALFENNDARQLIHITYGLILSRKNPDGSFTFRDRLYRLWRDHEGEYRRAPVKPIGKHLELLGVSIVTINGGNNDQKFYGLKI

SEQ ID NO: 81059 - protein, 297 aa, Unknown
  Obtained from environmental sample
  misc_feature (1)..(297): Xaa is any amino acid
MRGCGKLLDPTDLKEPKCSACGSSPTLQKTNHLYINLPGIKDKLEDWIKKASIDGFWAHNAIQMTQAWMRDGLKERAITRDLKWGIPVPKPGYENKVFYVWFDAPIGYISITGTLGEEKGNWRDFVNYWWKSPNDVELFQFIGKDNIPFHTVIFPSSLLGSGEKWTMLHHMSSTEYLNYENGKFSKSRGIGVFGTDAKETGIPADVWRFYVYYNRPEKSDAMFTWSDFQEKVNGELIGNLGNLVNRTLSFVTRYYDGVIPEGKSDGAFWAEAVKREKSITEKLTEPNKRPRPNLTLG

SEQ ID NO: 81060 - protein, 174 aa, Unknown
  Obtained from environmental sample
  misc_feature (1)..(174): Xaa is any amino acid
MLKYRSIMNEKKEYLTRQLITYIGNKRALLDFIGEGIQKVQKKLNKNKLKIFDVFSGSGIVARYCKQFSELLIANDIERYSTVTNQCYLSNENEINITRLRDYYHDIIQQANDKPVKGIIAELYAPLDDNNIQQNERVFYTARNAMYIDTVRQLIEKIPQGARAARADSDQWGG

SEQ ID NO: 81061 - protein, 90 aa, Unknown
  Obtained from environmental sample
  misc_feature (1)..(90): Xaa is any amino acid
MKAYLDIVEKILSQGFRKPNRTGVDALTIAGAMFEHDMADGFPLLTTKKIPFRLIASELEFFIRGITDKEWLKGKKHHIWDEWCFRQPVP

SEQ ID NO: 81062 - protein, 250 aa, Unknown
  Obtained from environmental sample
  DOMAIN (1)...(220): Glycosyl hydrolase family 65 central catalytic domain
  misc_feature (1)..(250): Xaa is any amino acid
MMVNHNCYTNFMAKKTFEYTIKTLNEMKKHTPEKYSALCKKTGFTEAEREKINNCADKMIILYDEKTKLFEQHEGYFSLPHIDISKIPVTDFPLYNNWSYDRIYRTDMIKQPDVLMFLFLHNQEFSEEIKRINYEFYEPRTSHESSLSPSIHSILASEIGKPADAFRFFAFATRMDLDNYNRNTAEGLHTTSIAAAWMNIVYGFGGLRSDSVYGGEGGELIINPSLPSQWTEYEFRISTAVALGHKPVLG

SEQ ID NO: 81063 - protein, 122 aa, Unknown
  Obtained from environmental sample
  DOMAIN (3)...(94): ABC transporter
  misc_feature (1)..(122): Xaa is any amino acid
RKRRQIGEGPFGEELGYMLSGGERRRVEIARTLAIKPDFILLDEPFAGVDPIAVEDIQGIVHQLKGKGYGVLITDHNVRETLRITDRAYIMSEGQILISGTAQELADSPEARRIYLGQNFKL

SEQ ID NO: 81064 - protein, 186 aa, Unknown
  Obtained from environmental sample
  DOMAIN (3)...(51): Sigma-54 factor, Activator interacting domain (AID)
  misc_feature (1)..(186): Xaa is any amino acid
VNLGLDISLRLQQKMSFNMIQSLKLLQVNTLQLEQMLQTELEQNPLLEVDEEMAADAEIDVDERTAEADGTGEGGDNGTDDVADDYLEELTGSGDDDGGIDWEEYLEDGFDPVGSYREEADPNEERYEPTAVYEETLEERLIEQLSGKKIGKRAQQLGQFLIGCLDDHGYLRIDTEENAPRTERRH

SEQ ID NO: 81065 - protein, 237 aa, Unknown
  Obtained from environmental sample
  DOMAIN (125)...(218): Ribosomal Proteins L2, C-terminal domain
  misc_feature (1)..(237): Xaa is any amino acid
MAIKTYRPITPGMRQWTSLDYSDLTPGVKPEKSLTKGKPANAGRDSNGRISVRHQGGGHKRRYRVIDFKRDKTGIPGKVASIEYDPNRNANIALIFYKDGEKRYIIAPKGLVVGNTVISGPNAPIETGNALPLENIPLGFTICNIELTLGKGAQMARSAGAGALIVAQEGDYVTIKLPFGGSPHGIQKSVCDNRNHRPRGSHEHFPGESGNETLAGRAPHRKGNVHEPRGSPPTRAA

SEQ ID NO: 81066 - protein, 151 aa, Unknown
  Obtained from environmental sample
  misc_feature (1)..(151): Xaa is any amino acid
LFSALTAGAETTGITPVVSGTNSARELPPLFPAAFFTEYLSALDATDAGRPYWVPTEVETQITPPSHWESILLNSDILAFYGHPSSQNMGILGRFSKEELNEKLCALADEYQAAGGRTVRRAFYIIYGTVGPGRDIGIIGESLLSDTSILP

SEQ ID NO: 81067 - protein, 287 aa, Unknown
  Obtained from environmental sample
  DOMAIN (3)...(232): DNA topoisomerase
  misc_feature (1)..(287): Xaa is any amino acid
GFPRIIAGLRHSPRASRKSLEYSSGKKAQDAHEAIRPTYVSYTPDSVAEYLNRDQLRLYTIIWERFVSSQMTSAKTRTVSVEIKAVSGSGAVNGGEEGLFRVSGTKLVEKGFYKVIKLLSSKEEKGNPYPPLKAGDKVTIEKFHPEQHFTQGPPRYTEASIIDILREKEIGRPSTYAPIISVLLDRYYVTRSNKQLVPTLLGKKICEMLVEYFPDYVDVDFTASMETKLDKVEESQLKWPDMLKEFWGPFKAKVDEVGKSLESFTGSLDEPTDYKCEKCGRPIVKKL

SEQ ID NO: 81068 - protein, 129 aa, Unknown
  Obtained from environmental sample
  misc_feature (1)..(129): Xaa is any amino acid
MSDIQVKIEDVNRLTPKEIVAELDKYIVGQKKAKRAVAVALRNRMRRLKLDPELRDDVAPKNILMIGPTGVGKTEIARRLAKLAGSPFIKVEATKYTEVGYVGRDVESMVRDLMASGSKWYSANLSWET

SEQ ID NO: 81069 - protein, 287 aa, Unknown
  Obtained from environmental sample
  DOMAIN (197)...(285): Response regulator receiver domain
  misc_feature (1)..(287): Xaa is any amino acid
MGPPFSKNIVKWMGGKIGIQSEPGKRLTLTFTFQPKRGVAGRAGLLADDNVNLSNIRILAVDDDPEVLAYTRDIAHSFGVTCDTTTSGEEALALVEKNGPYHIYFVDWKMPGMDGIKLSRELKSRTSAESESVVIMISAAEWSSVAEEAKRAGVDKFLSKPLFPSAIAEIISECLGIDKKQAEKAQAADIANIFAKRRILLAEDVEINREIVLALLEPTQLDIDCAENGAEAVRKFTEAPDKYDMIFMDVQMPEMDGYEATRRIRALNVPRALTVPMWPSRPNLTML

SEQ ID NO: 81070 - protein, 125 aa, Unknown
  Obtained from environmental sample
  misc_feature (1)..(125): Xaa is any amino acid
MWHNNLFTELEKNKNAEQATKMADYMQNKFAFLGIPKPKLKEIIKPYIKESKKYELDWKFINICWKKDYREAQYVAIEYLDCFMKVLTDKDLPNLRKLIITKSWWGNVDSIDAMVGYIILKKQQL

SEQ ID NO: 81071 - protein, 164 aa, Unknown
  Obtained from environmental sample
  misc_feature (1)..(164): Xaa is any amino acid
MMAEVIALSIKLDKTLAEAISNIGFPDTREKMHHYKSLVKETAVMEKRVLVIDDYHCIEDRSVLRFIEEGFLRNMLQGSTVVVISRSISHLNVAGMTYRDQIFNISEDDLRFTENELTQYFRRMGISFQTDSLREIMQDTEGWAFAINLIARSANSARLQRLCA

SEQ ID NO: 81072 - protein, 309 aa, Unknown
  Obtained from environmental sample
  DOMAIN (3)...(309): 4-alpha-glucanotransferase
  misc_feature (1)..(309): Xaa is any amino acid
MGSEFGTSYKRRHEILGHEHFTKWMEQNEWVNSYAVFCALKAENHEASWKHWEKKEKPKASDVMFQKWMQWVAEEQFLKAVSELNKLGIRLKGDIPILINEDSADAWHYPQFFSLDNRAGAPPDMFCYSGQNWAFPTYKWDNLEKENFSWWRDRIKHAAKFYHAYRIDHVLGFFRIWVVPEQEYTGILGHFVPSIPIYMNELAQAGIPRETVHYLTNPNFGDEQLQSRFGSDTETAKQKYFEPLQGSYGRYILKKEYHSERSIMALEEEQSIKDALLNVYWDRVFTPSSTDEELHPYWYGYNSSVVLTL

SEQ ID NO: 81073 - protein, 162 aa, Unknown
  Obtained from environmental sample
  misc_feature (1)..(162): Xaa is any amino acid
MAVLSAREALKLWKNAGWQELAAKAHKMRVDIHGKKNVSYTVFKIINYTNVCKIACSFCSFKNTKPYTLSAKEITSDALAAQKQGADAIFFPGGVNPAIPLDYYIGILGILNKNLKIKVRGFSPVELFHIAKNTKMLYQNFCKIKKSKSILCPWRGSGDNDQ

SEQ ID NO: 81074 - protein, 96 aa, Unknown
  Obtained from environmental sample
  misc_feature (1)..(96): Xaa is any amino acid
MVTPDDKVFYQSIYSVMNNAKDDLLFTASYKYIKKEAGENDGMVSESSARWGNNITKVEGGISHGQIIDIIGQDRFGMKIPNIYLRIVNDLGQKGF

SEQ ID NO: 81075 - protein, 126 aa, Unknown
  Obtained from environmental sample
  misc_feature (1)..(126): Xaa is any amino acid
MIAGVGGQGTVLASKLIAAAAIKKGFDVRTTETIGMAQRGGSVFGHVRVGDHVGDHVGENIFSPIIPLGRADALIGFEPAETVRQLPFLRNDGSVNVYNSGNRDMISFLKETYNRYCYRSAALLRA

SEQ ID NO: 81076 - protein, 211 aa, Unknown
  Obtained from environmental sample
  misc_feature (1)..(211): Xaa is any amino acid
VPQVSTQVQSINEFFRTATPASKEEVSHPTTAMLLGKEINQIRLIVPVLNGKRTEVVGVVGAQVNLDIIQPRIETTMKDFDEISAMSIYSSNGYVMANYRPERIGKMMPDVEVQFGDYVNEAFDAVKRAEEFACYSWAPTMKTYLQIAVVPVTLGQSNTTWSIMAGTEEWYIMKDINPMIMFAIYIAAVAIVISANIIFIVLDRTTSQSLW

SEQ ID NO: 81077 - protein, 209 aa, Unknown
  Obtained from environmental sample
  DOMAIN (1)...(129): B3/4 domain
  misc_feature (1)..(209): Xaa is any amino acid
MLAMGQPTHAFDSDNIEGHITVRRAKESEKLLLLNGKELSLSANDLVIADDEASVGLAGVMGGSKDSVLPKTTKVILEIANFDSKGIRHTAMRYEVRTEAAIRYEKGIDPERCDIALSLAMQMFTDFFSGISITGFRDSYPKHLKGKEIDVSLDWLEKRLGKHIPNDDIACKLERLGFKVSFDKNNSARHCTNISFHRRIPLGQSDKAG

SEQ ID NO: 81078 - protein, 302 aa, Unknown
  Obtained from environmental sample
  DOMAIN (83)...(199): Histidine kinase-, DNA gyrase B-, and HSP90-like ATPase
  misc_feature (1)..(302): Xaa is any amino acid
LTPLARITGFTKIEDAGNHLLGVINDILDMSKIEANKFELTPAEFNLEKVLRRVVNVVNFRIDEKQQKFSVHVDRSIPRNLIGDDQRIAQVITNLLWNAIKFTPEKGSVTLAVRLVEKVNNTCTLQFSISDTGIGISPEQQRKIFQSFEQAESSTTRKYGGTGLGLAISKNIVEMMGGSIWVLSESGKGSVFTFTIKVQRGTEEKHALLSPDINLDNVRLITVDDDPDILKYFLEIAHGFGVMCDVAISGEKALQLIDHNGGYHIYFIDWKNAVMDGIQLAREIKTRVSENAIVIMISALEW

SEQ ID NO: 81079 - protein, 125 aa, Unknown
  Obtained from environmental sample
  misc_feature (1)..(125): Xaa is any amino acid
MERYSDEELVVMLHDLESDCIERKESFVGDTPKRARGAICAFANDLPNHKQAGVLFIGATDDGKPQRLKITDSLLLTLSDMKTDGNILAFSGITVEKRTFEALKWRLEPNTSEFNPEKRWGDFDS

SEQ ID NO: 81080 - protein, 66 aa, Unknown
  Obtained from environmental sample
  misc_feature (1)..(66): Xaa is any amino acid
MIAQAGNQVEAGFDPEIARVLANRGHEISVSLQTSSFGRGQCIVRLDNGVLVGATEGRTDGSIACV

SEQ ID NO: 81081 - protein, 213 aa, Unknown
  Obtained from environmental sample
  misc_feature (1)..(213): Xaa is any amino acid
WQTVSIYPKPQKIPDEVIYAFMFMGVSSFLLKELLPHPNEEVLLMNNAFTTFFIAGLYMLFWDMLVDGIKNKSAIRIAGSLLLCLVPFLTSIPAYLALNMVGEESISFTGMAIIRATNLIPNMLFVEGGATAVIIGVLFYIFRKWRWAQIAVLVVFSTIAFFDKYQHFQWMMVFAAIPMLLYNGEKGRGMKNFFYIFYPAHLYLLYIIAALMH

SEQ ID NO: 81082 - protein, 263 aa, Unknown
  Obtained from environmental sample
  misc_feature (1)..(263): Xaa is any amino acid
MTQDLDRLRHTVAWVSYQLIGAIALFAATFIFYLFLNWKLALCLVGITPFILFISSRFVKKIRPRFMLLRQKLTDLGTAVTENIDGNRVVKAFAREEYEKERVEKQNAEFRDISCENALIAAKYQPFLETASQLLMVIMLVAGGFFLIKEWMTPGEYMAFSSLTWALSMPMWMLGPLLADLERYTSAGQMIREVVETPKGISDMSGAIEMKQRPKGKIEFRDIKLTIDGNTILEDINFTAEAGSTIGILEVRDRELGQSDHGG

SEQ ID NO: 81083 - protein, 276 aa, Unknown
  Obtained from environmental sample
  misc_feature (1)..(276): Xaa is any amino acid
DPIFTFYSFYGNLQSETPANTEQNRDVSDNLENIPPDSTATNIQDTLEEKEPAGGRLSPEERQRAELEIKSSTMPELAVWCRLLGLSESGTKEELAKRIRDHFGMPEPKNNNENRKIINIESAQSTEYFTVDVIDEDYARLKGDVRLVLHDKEDIHKIKADEVLFNRTRNIITAKGKVEYIKEKGDTTEIFRGENITVNIDDWDSVFLDGDSEKTLSSENTAYRFEGTVISRSYDDVMILNNARISNANNDEALWSISATKLWLLPGSDFAIFNMC

SEQ ID NO: 81084 - protein, 295 aa, Unknown
  Obtained from environmental sample
  DOMAIN (1)...(260): RecF/RecN/SMC N terminal domain
  misc_feature (1)..(295): Xaa is any amino acid
DAFKWVLGDQGPNPCEGKHGGPLSHGHGTRKALMLPEVTLTLVNETDLLPLDMPEVEIKRRLYRSGESEYFINSQSVRLKELRELFWDTGVGKTAYSVMEQGKIDQVLSSKPDERRYLFEEAAGITRFKVRGAEVERNLAKTSENMHQVELVLNEVKRSYDTLKVQSEKTLKYRALRDEIFNCELDIQLLRLKHFKYERDERNETLRRRTADRDRIRQQMEEESKALDAHMDEVNYMEARLVDMQRNIYGLALEKNAKENEARLLGERANTKVKAQDRTERSKGKTDKTRPICLG

SEQ ID NO: 81085 - protein, 98 aa, Unknown
  Obtained from environmental sample
  misc_feature (1)..(98): Xaa is any amino acid
MDQIGRDISAGGAYIRGGASYQYQRGPDNKSYAVGGEVGIDAAPERDNPGATITKMQTVRAAALAPNDPSAQDRAVAAAAARHESAARSDLAEENKTI

SEQ ID NO: 81086 - protein, 237 aa, Unknown
  Obtained from environmental sample
  DOMAIN (106)...(175): HAMP domain
  misc_feature (1)..(237): Xaa is any amino acid
LDRLTKEFEDSAQSFAKSIVSPDAKPKFNEAMKQYHEIINPGAYKLVEEGEKNTPNAEMIELLAAIKNSSDVVTNTMVEVSDLKVDNLKQSSGDCTNQSKNSATMMVIILVVSVVIAVIFGVYISTMISKPLGVTVNMINEMSKGHLDMRLHLDRQDEIGVMAKTMDSFADDLQNNVVGNMKKISEGDLEMKIDLKDSKDEVSAALKNTVEALHALYRRRRQLVPLGRSDTWGKKMG

SEQ ID NO: 81087 - protein, 312 aa, Unknown
  Obtained from environmental sample
  DOMAIN (195)...(300): Response regulator receiver domain
  misc_feature (1)..(312): Xaa is any amino acid
LAVPRLDGEKNRAVEGTGLGLAITSNLCGMMGGEICVDSEYGRGSTFTVRLPQGVADEAPLTRLDSPAECATLVFELRPKHLESIESTLRGLGAPFDAVSTLSAFKDGLSGGGYRFAILPKHLYDEAPGVLAAAAAGGAEVFVLLEFSETVPAKGVGTLSMPVSCISVANAFNHAGSAGEPELAGGPGHFTAPGARVLVVDDIPTNLRVMEGLLAPYGLRVDTCASGEEAIELARAGVYDMVFMDQMMPGMDGIEAAGHIKAPRRPGGLRAHNSADGQRGARSPGDAAVARLQRLRLRTHRPLEAGRRAGGL

SEQ ID NO: 81088 - protein, 261 aa, Unknown
  Obtained from environmental sample
  misc_feature (1)..(261): Xaa is any amino acid
MSLGVGLLSRYPISEAKSHSANIDGDIAPRPMLEVRINTAAAASGDESGAGNSSLALFVCHWKSKLGNEDATERTRRASARIILRRLRELKETDPDLPVIIMGDLNENYDEFYRRNGTTISALLPDDPRAAEFANLYGLDGDNPDTAALIGELQKDFIILSKSKPPETRYFPAGVLTLYSPWTVELQDGSYYYKNDWETIDYFLLSPQLFDGTGWDFENCEVVNSPPFASAKGFPVSYNPRTASGMSDHLPLPVSLKMHGQ

SEQ ID NO: 81089 - protein, 231 aa, Unknown
  Obtained from environmental sample
  DOMAIN (73)...(139): His Kinase A (phosphoacceptor) domain
  misc_feature (1)..(231): Xaa is any amino acid
MDGICDFCPCYQLDKEPDSTVVWELYNPVTNRIYRNTARYIEWSDGRIVLIQHSVDVTDFIEAKEQAEQSNRYKSQFLSRMSHEVRTPMNAILGITEIQLQDKALSPGMREALDRIYSSGYLLLGIINDILDLSKIEAGKLELAPVNYDVPNFINDTVHLNIMRFDNKPIEFSLQVDEFVPMTLFGDELRITQILNNLLSNAFNIRMKAKFRCRLPSRCAAGRRASWRRAA

SEQ ID NO: 81090 - protein, 202 aa, Unknown
  Obtained from environmental sample
  DOMAIN (32)...(65): Tetratricopeptide repeat
  misc_feature (1)..(202): Xaa is any amino acid
MGAIADCQVKSGNTAGAVLALEQVTLMNPSATAEYKMLGDLYVQQRKPAEAVKAYKKFLEKGSDNAAARLVGEEAFKAKNWSEAVKYLGMVKGEERNPAFLEMVGKAAFENKDNSRAVDVYKTLSAMNPQNADYVKMLYDLAGKMGARDDAVTHLKKYVSIKPQDAEMQKTLGDLLYDRKDRPGRWPPQSSCRSDHWGGFWG

SEQ ID NO: 81091 - protein, 66 aa, Unknown
  Obtained from environmental sample
  DOMAIN (4)...(63): Double-stranded RNA binding motif
  misc_feature (1)..(66): Xaa is any amino acid
VQEYASTITALTPNTALIKRSGPDHERVYWMEVSVGGVVYGPGTGRNKKSAEQEAARMAYQAIANT

SEQ ID NO: 81092 - protein, 269 aa, Unknown
  Obtained from environmental sample
  misc_feature (1)..(269): Xaa is any amino acid
MPGIFESYSFYGTYRPGSENPFEDLVEHCCQTISDLLRKTSDGGWVFVYNEEGDNPEFNLRLGKAILVYAETAQNNLWAGIGRSLILSAISTAEKNDESLSTELTSAKLYRILCPLDTYPRALEIDSSSGGIWAWTAAQAVSGSQQGDILDISVTFPVGETHYMIIRGIRTFSRVQLYGIDYRSDSQFERYDSSGWTYNSQEQTLLGKMKHPHPQEHIRIIYRESAQTRRCAALRVSKKTPVTKTPPARPGKTDWAWCFQRRGDPGLRH

SEQ ID NO: 81093 - protein, 300 aa, Unknown
  Obtained from environmental sample
  DOMAIN (1)...(297): Formate--tetrahydrofolate ligase
  misc_feature (1)..(300): Xaa is any amino acid
MAILCLASDINDLKNRLGRIIIGYTYGKVSDGSEQPVTAAQLKAQGAMAALLKDALKPNLAQTLEGNPALIHGGPFANIAHGCNSIMATRLALKCADYVVTEAGFGADLGAEKFLDIKCRFAGFKPSAVIIVATIRALKSHGGAVKTELDKENLDLLEKGLPNLLQHVENITQVYKLPAIVAINAFPKDTKAELELVEKKCRELGVNAAISEVWAKGGEGGVKLAEEVVRLCEQPNNFEFAYDVHLSIEEKIRAVAKKSTMPMMSFYSVTRTNASSRLKNSVLIKSLSAWQRHSTVFQTT

SEQ ID NO: 81094 - protein, 98 aa, Unknown
  Obtained from environmental sample
  misc_feature (1)..(98): Xaa is any amino acid
MVTVISLGGSIVAPVGADAQFLKEFAELVRGLLEEDKERRFIFVVGGGGPARVWQNAYRTVCGDSVSNDEADWIGIMATRLNAQLVLGRFCTWGGGIQ

SEQ ID NO: 81095 - protein, 313 aa, Unknown
  Obtained from environmental sample
  misc_feature (1)..(313): Xaa is any amino acid
MARTNEEPLWKGHRPRRRTALGSPDYEFDTYATAARIIHNVPQNGDLISGDFEISGLAYTDIGVKGVLWRILTPENPWDKPDVTRAKSVNVPFHRIETIQTYMLNLTLADVADGENILELYAEDVYGIAGRMVSIEFGVSTAPPVTEVTEPSKDIWNKGAMTVRGTAFDSNGINEVRISLDNGISYQRADIIADNQDRPSVWAISLNTEAYMDGQYSMLVRTSDGYNVQSFTNAIINIDNTPPVVDLVSPKNGSPAGRTLEVNGQVYDNLKVKVISILVSDTNNPDSFLVVEPPIEAVIQQTLDIRSTGTGIL

SEQ ID NO: 81096 - protein, 324 aa, Unknown
  Obtained from environmental sample
  DOMAIN (127)...(196): HAMP domain
  misc_feature (1)..(324): Xaa is any amino acid
SGGGLFFSHGFSRLKEKIKLAIQEQSSHQQLIEIDDFANKVNTISNGNLGAMAPVWEKIKTTAKFVLDESPKFVKNYDLPLPVFKEKEKKTRHYVAYTKLKIANAVVITSIEYNKIFEGIAATTRRNIYLTIAVLSLSIIFIWFFSKTISNPIKSLASAARQIEYGKFDIKLYSKTNDELGVLTKSFGKMSSALNIFGKFTNKDIAVKAMRGEIKPGGLPKHGTIFFSDIREFTAKSENFTKFFGAEASDKIVFWLNQYFTQMVDCVEKTNGCVDKFIGDAVMAHWGTASSAGSPRKDAFNCVKAALMMLRLLFMLGRSDHCVT

SEQ ID NO: 81097 - protein, 97 aa, Unknown
  Obtained from environmental sample
  DOMAIN (40)...(62): MORN repeat
  misc_feature (1)..(97): Xaa is any amino acid
MAEIRLRKITLKDGSVYEGELLKGIPHGKGKLTYRDGSVYEGDMVNGKPHGKGILTYIYGGVYEGDWADGEQNGKGKMTYPDGKVDQGRFANSEFAG

SEQ ID NO: 81098 - protein, 179 aa, Unknown
  Obtained from environmental sample
  misc_feature (1)..(179): Xaa is any amino acid
LSKINIEEQLNEPQTLAVHTVEGPVLIIAGAGSGKTRVITYRIAYMLEKGIPQSAILALTFTNKAAREMETRIKQLTGKKLQSLSISTFHAFGLKIIRDEAEFLGYRKNFSVYDETDKISLIKESLRECRMHSAKVDLYALSQFFSKIKTGLVQWNENADMKPVYDRIPASADLIHELS

SEQ ID NO: 81099 - protein, 313 aa, Unknown
  Obtained from environmental sample
  misc_feature (1)..(313): Xaa is any amino acid
GFWARGLKRLRELPTGAESSSTTCLYSRALLEMVDIETFFGHKNKAEAYMADHAVMKKHLNERAWDGDWYVSYYNADGSPLGSNSNSDGKIYLYTQAWPVLADIATDEHGRTALDSARKMLNTKKGLKLSTPGFNGYDQSKGGITTYPPGAKENGGIFLHTNPWMMIAEALMGDGDRAYEYYNQINPATKNDIIDEYECEPYVYPQNILGDEHPLFGLARNSWLSGTSSWTYQAASRYIMGLRPQMDGLLVDPCVPSDWKRFSVERNFRGCRYVINVENPGRVCKGVKSISVDGKTLDKPGRPRLYRRENARS

SEQ ID NO: 81100 - protein, 269 aa, Unknown
  Obtained from environmental sample
  misc_feature (1)..(269): Xaa is any amino acid
VLSENAKSAERLAGDCLAILGDDNNIALFPSRDAVPYNMKSPFGPTVEARLGLLSDLLAGRRRLIIAPAAALLQRTPSRRELFNAVIRLETGAETSMNALADWLAAGGFRRESRTDDLGAFSIRGGILDLYPFLSDNPYRIEFWGDTIESIRSFDVFTQKSVGQHKSLEIVPMREFCISDGHIDSAVDKMSASLKNGSLSADEAAVRKLEHQWKTVGDLDGAEWFWHWFGMDSASILDYLPTDAVVLWDDIVPVRRRLGERSTLRPHLS

SEQ ID NO: 81101 - protein, 248 aa, Unknown
  Obtained from environmental sample
  DOMAIN (1)...(152): DEAD/DEAH box helicase
  misc_feature (1)..(248): Xaa is any amino acid
VLPGVQLSLGDTEAPQGPRLLVCAPTLELCSQIKDEIDFLLENESGVNVSLLIGSINLSRQIDGLKKSKPQVVVGNPGRLLLLAKMGKLKLRNLRFLVLDEADRLTMPECLEETSALAQLAARELKSRTSDSKTGLVIAACSATVSAKTRELLRPLLDGAELLETDEQEILRERISHWAIFSEARRKSQTLVSFLAAVKPRKALVFTGRSNDAGKTASILNARKSPPPLVQRQIKKCKVGDLSWGEMP

SEQ ID NO: 81102 - protein, 83 aa, Unknown
  Obtained from environmental sample
  misc_feature (1)..(83): Xaa is any amino acid
LLCCDREETLVIPEKPFSIRDKIPFLKEAGFRRFIIDLGGPSLKKKAYKDLMRSAENGVPLPDISRFNWKDGFFTNEGMGSRE

SEQ ID NO: 81103 - protein, 310 aa, Unknown
  Obtained from environmental sample
  DOMAIN (56)...(127): HAMP domain
  misc_feature (1)..(310): Xaa is any amino acid
GSPPDYREICGSGDWGWLVSIYAPIKNSAGRVVGIAACDFDGAYLHKTIIANEKRQAVIGGVSLLLGLALVLFFLRQIFLPLDKINVILKEISMGEGDLTGRIETDNKNEIGELAGYFNMTLDKIRNLIVVIKGEASNLHDVGGNLAAHMRRTAGAIHQITANIGAVKEKVTGQSASVSQTNATMKQVTANIDKLGRNVETQTESVSRSSSAIEEMLVNIENVTKTLGRNAESVQELIRVSDDGRGSLQKVTQDINEIARESEGLLENHSVMENISSETSLLSMNAAIEAAHAGETGKGFPVLAGEIRKL

SEQ ID NO: 81104 - protein, 101 aa, Unknown
  Obtained from environmental sample
  DOMAIN (1)...(100): Ribosomal protein L15 amino terminal region
  misc_feature (1)..(101): Xaa is any amino acid
MHDFNLHAPAGANKKKRIIGRGQGSGRGTTSGKGNKGQQARSGGKTYVGFEGGQMPLYRRLAHRGFFNYSFRKECETVHLGEIEAWYEAGETVDQVPYKEG

SEQ ID NO: 81105 - protein, 49 aa, Unknown
  Obtained from environmental sample
  misc_feature (1)..(49): Xaa is any amino acid
VARLVGIDLPNKHVNIALTYIYGIGRTSGLEICKKSEDRASTAINDSAI

SEQ ID NO: 81106 - protein, 298 aa, Unknown
  Obtained from environmental sample
  DOMAIN (12)...(178): RNA polymerase Rpb1, domain 3
  misc_feature (1)..(298): Xaa is any amino acid
MECGTLMLSARNLFNPANGKTIVFPSMDMILGINFLTRVKPHAKRTGSERKETKHITPRYSSVEEVLMAVEAKALDWEALIKVKAPKYPIWEKVGVESKVGPGELIETTAGRLAFNEELPPEIPYINYELKDKELRALIEMIFNKKGSWITVKMLDAIKSTGYKYATVFGATIGVDDIVVPKEKSEMIERANKQVEGIQRQWRQGQITQEERYNRVVEVWTKTNEDLTNIMMKTLETDKEGFNSLYMMSNSGARGSRNQIRQLAGMRGLMAKPTGEIIELPIRSNSKRAQLAIIRGKI

SEQ ID NO: 81107 - protein, 298 aa, Unknown
  Obtained from environmental sample
  DOMAIN (1)...(298): Amino acid permease
  misc_feature (1)..(298): Xaa is any amino acid
LISRSLGPEFGGAIALTIFLSQSLSIPFYLIGFAEATVLTFPYLDIYFDLIAYAIFAATAMLSLRGAAVVVKAQYLVLTILALSIAAFLIGAAIHFDPQTFADNANPLEGSKYNFWMLFAIYFPAVTGILSGVNMSGDLKNPARAIPRGTLIAIGVAFVVYAAEMILCGGAIKRSDLTDRPYESILHLWDPVTSFIVVPGVMAATLSSALGIILGAPRVLQSLAQDKILKPVNMFAQVTPDGEPRRALFVTIAISFAVIYIACRKRSGGGALNMVASVVSMVFLWTYGIIHLGRFVEI

SEQ ID NO: 81108 - protein, 289 aa, Unknown
  Obtained from environmental sample
  DOMAIN (142)...(177): UvrB/uvrC motif
  misc_feature (1)..(289): Xaa is any amino acid
MFIDEIHSMIGAGGAEATLDASNMLKPGLSRGEIRCIGATTLSEYRKYLKKDAALERRFQPVTVEEPSYDETVEILFGIQKKLEEHHLVKYSDSAVTLAAKLAQRYIMGRFMPDKAIDILDEAGALRKLESRDEPPEITGLEAEIAKLCDEKSAFVSMQDYEHAAEVRDKVRELRVRLAQAQIAWESSSVNHRPEVTDEDVRRVVTEATGIPVMNAEEHESRRMLLIENELRKTIIGQDEAIKRVASAIRRSRAGVSSPRRPLGSFIFLGPTGVGKTYLGQKTRAVPFL

SEQ ID NO: 81109 - protein, 294 aa, Unknown
  Obtained from environmental sample
  misc_feature (1)..(294): Xaa is any amino acid
MRLDAQSVRDQLAQTVSNATGKPLVMQELPQISLMPLGVKFGAAYWGVTPDGKTDPAGGISVAVKSGQISVQLLPLLTGKVLVDEVRLDSPDVRIHPEKSAPAAKAPPPKAANSRTADSRTTGTTATPSSPIPAQVEVNKLRLTNAALLLETSPGQAVRLSRLDMELDNLKLGAEMRLDLSANLAVSGPALEGALTLKAKARLLAQRYELRDVALRFTPGKGVVPATAGAVDLTMQATYELAGGKFNLALLSLAVQGSKVDVSGDMDVRTQASTATSKGQSPRSSSDLSCRGDA

SEQ ID NO: 81110 - protein, 281 aa, Unknown
  Obtained from environmental sample
  misc_feature (1)..(281): Xaa is any amino acid
MLNTDNNNLYALRAAAVVFRYTSTSSFYALRLRWNYSNAYQVFFAKNELYQSDSKGTNETELNSISGTVNDTITLRIELLDDTINVYRGTTRIGHVIDATNPSGQVGYAHSDQYQSGAVYYGSSWKDKTPPPTTVPTGYMVWNAGTSGLPGFTAGSGTWADNSWADTDASKRVAWIAGRNALFTGATGTYTITVGTAAPSVGDIRFSASTYTISGGTLNRGTGSKAVIVDSGKVATISSALIGAALAKEGKGQLTLSGTNDYTGGTTISARALVAASGRAM

SEQ ID NO: 81111 - protein, 66 aa, Unknown
  Obtained from environmental sample
  misc_feature (1)..(66): Xaa is any amino acid
MREKAETYIEKLSDPKIFGTAHPFPSLALSEKDFDETGKGFRRIVFPLSTFMVIKRLERYQRWGLA

SEQ ID NO: 81112 - protein, 327 aa, Unknown
  Obtained from environmental sample
  DOMAIN (4)...(185): RNA polymerase Rpb1, domain 1
  misc_feature (1)..(327): Xaa is any amino acid
GPTFSEEEYYEAQERYGGGFTAGMGAEAIKVLLETLDLDQKAIELRARMIEKGAKSDKKLLKQIDIVENFRNSNNKPQWMILDVIPVIPPELRPMVQLDGGRCATSDLNDLYRRVINRNNRLKRLQGLNAPDIIIRNEKRMLQEAVDALFDNSKKKKVVKGSSNRPLKSISDMLKGKQGRFRQNLLGKRVDYSGRSVITVGPDLKMWQCGIPTKMALELFKPFIMKKLVDKDVVFNIKKAKMLVEQETPEVYAILDEVVKEHPVLLNRAPTLHRLGIQAFEPVLVEGKSIKLHPLVCHAFNADLTRPNGGPCSASAGLGHHPGGKKP

SEQ ID NO: 81113 - protein, 108 aa, Unknown
  Obtained from environmental sample
  DOMAIN (1)...(104): Dihydrodipicolinate reductase, C-terminus
  misc_feature (1)..(108): Xaa is any amino acid
KADSPSGTAKTLVDLVLSQMTRKKRAVYQTLEKKPEADELHFTSLRVGSVPGTHSLIFDSNADSIEITHTARNRDGFAAGAVLAAEWLTAEKRSGIFTMDDVLKELLK

SEQ ID NO: 81114 - protein, 98 aa, Unknown
  Obtained from environmental sample
  DOMAIN (1)...(86): ABC transporter
  misc_feature (1)..(98): Xaa is any amino acid
MMAEASGGPRKSGGQQQRVAIARALVKNPALILADEPTANLDSTIGREILELMLALNKSEGTTFIFSTHDQMVMDFARRLVRIRDGQIESDEVKGNAA

SEQ ID NO: 81115 - protein, 63 aa, Unknown
  Obtained from environmental sample
  misc_feature (1)..(63): Xaa is any amino acid
FGGGDVCARGLFYGLLNDKSPEEALRLGWAHGALLTTTPGDTSMVSLDQVEAFAKGGSARIQR

SEQ ID NO: 81116 - protein, 325 aa, Unknown
  Obtained from environmental sample
  misc_feature (1)..(325): Xaa is any amino acid
ALSILRWASQKGFHSSLQLSPTAVSEQIAKRGLPLSCIAIFFKELGYTRAQANEGINRAIGILQARMKEDGAIGVWTSRSHDDPLITTYAAHFLTEARNANYYVSSAMMEKLLNACRNIASSSGTSHYNFTTRAYAIYILTRNEIVTTQLVESLKRDMNRFDESQTGIAGLYLAGTYALLQKTNDAALLLGKIKRAMAKDSSFRYIDELMYHSIYLNILSRHFPNRLRDISESLLVDMAGQMERQSYTTISANHALMAIDAYLKAVPSAETGRYTIQEVSKDNQRKELKAAGTTLFSAAFSANAAKIALKTKTTLTVSAAYRGKR

SEQ ID NO: 81117 - protein, 295 aa, Unknown
  Obtained from environmental sample
  misc_feature (1)..(295): Xaa is any amino acid
GIFPRYRGDLSGRAGLYLFQHIDFHRGTPLVFNTEKLEQLCGKRDKLAPEEHALISCTVPRGSGDSLAQAILELGVGVPVVFYGNGAGLRDKLGLMRITIPVEKEIIWFIVPRSDAELVEKTLIPRARLDVPGNGFLYRCFVHAPVVNLRIRHGRRFHAATMEQVIAALDAVQGSSDWRRFGSRKQEHKGGDKKSGSVKGLFFIGEEEEVDTFRKAAIENGARGATFNPLEMRSYSTTHGQAMESHSRQLCDIITSPDIEKKIRHSDTLAGLLGKGKSCILKTFDVEMPSVIHRS

SEQ ID NO: 81118 - protein, 164 aa, Unknown
  Obtained from environmental sample
  misc_feature (1)..(164): Xaa is any amino acid
MNKYLIEGGYPINGTIKASGNKNAALPCIAAALLTHEPVILRNIPDIEDVQVMLAVYRSLGGKTESLGPNSWQLSTGSITSSEIPAEYAGKIRASILFAGPLLARTGKVVLPPPGGDVIRRRRLDTHFLALTELGAKVEIKDPFIFKTTGPKGADIFLDEAFCN

SEQ ID NO: 81119 - protein, 144 aa, Unknown
  Obtained from environmental sample
  DOMAIN (30)...(143): Respiratory-chain NADH dehydrogenase 51 Kd subunit
  misc_feature (1)..(144): Xaa is any amino acid
MANDQKQIRVVLRNCGVIDPESIDEYIARDGYVGLEKVLFDWTSEQIIEEMKVSGLRGRGGAGFPTWLKWDLARKAAGDEKYVICNADESDPRAYMDRSTIEGDPHSVKERMITARLGDWLASGNCFISRPNIPLPIERLKKTD

SEQ ID NO: 81120 - protein, 193 aa, Unknown
  Obtained from environmental sample
  misc_feature (1)..(193): Xaa is any amino acid
MQRHLAQIADTVQINPLEWRKSHYNPFMVLPSGINPKSHISVDKLVSAVTNTSDYNRKWASYELLKQSRREKTLAYEKGENLRGIGLTVGFQGNGLLYHGEDKGIYSLEVTLTKDGFLEIKTSITSSEEDYVRIWAKIALDVLSIEKGKMRLIIEKSPDGGPSCASRNITALTKLVEKCCQARADSVMRGDPK

SEQ ID NO: 81121 - protein, 298 aa, Unknown
  Obtained from environmental sample
  DOMAIN (34)...(272): PET112 family, N terminal region
  misc_feature (1)..(298): Xaa is any amino acid
LETLSWETKLIGGGTGFSSPYRFPPKKTYGAKAESGKRSSGFEVHAEASTKSKIFCDCTTAYGGEPNTHVCPVCAGMPGVLPKLNRSVVEYALRLGIALDFNITKHCKFDRKNYFYPDLPKAYQVSQLYAPICLDGHLDIETDGKKKTINIREIHMEEDAGKLVHDAKGAGTFMDFNRCGVPLLEIVSQPDFRSAAEVIAYLEKLRETLLYLDVCDCKMQEGSIRADVNLSVRLEGAELGTRTETKNMNSFKAIARAIEYETARQIEILEDGGQVVQETRRWDDEKLISRPFCHGGGM

SEQ ID NO: 81122 - protein, 309 aa, Unknown
  Obtained from environmental sample
  misc_feature (1)..(309): Xaa is any amino acid
MADSDLSARWIPPDVRLVRSAGGDLVVMSRKGEIVIRDDNNLPREKHELIYGAHLKLKSLKSEVAGLLPAEGILSDDELPRYAEELKKGAAQILKAMKDKDALARLRGELAPVHRRLAAWGAARGFMTPEGQLTEEGEAAPQMAELAAVWPAVSEAVGQAGQVLDEYDLKSEQDTRRLAADYQLAVDRPGEFVEWDPFTVPILTEVSGYVSFEDMEEGKTMIERVDQVTGKSSKVIIESKQADVRPRIKVLDAAGKPHLTSKGIPAVYPLPVNAILMVEERTRGHAGEALAQIPRETHKTQDITGGLPR

SEQ ID NO: 81123 - protein, 283 aa, Unknown
  Obtained from environmental sample
  misc_feature (1)..(283): Xaa is any amino acid
MQHVLLSVNTLVVSAIFLIIAASIDAIDILSSYLFNSSVLLMVLFSLGCWVFLQYKWIKSASLKRDRSQAKTILIGCLIALVSLSGDLAGSRSHYLFNWMELIPFMWLLTLVFILNNYANQYNNFSFNVANLATYVYTAVKLPVLILDDTGDIMLCNTASESFFKQNIEQLNRLKLFDLFDFGNIPLSLQRQKKDASVFNCDAVCRVEGHKCQISLNYVYDKFDEMICTVVIVTDITEKEELIRQLNESNAKIERFNKELQSEVDRQTESISCRFCPWGGKKR

SEQ ID NO: 81124 - protein, 86 aa, Unknown
  Obtained from environmental sample
  misc_feature (1)..(86): Xaa is any amino acid
PIFSPQVSDRHEAEIAIEEALSETQECFVCGTAAGATPITSLTYNKKKVTFNKGKVGDFTAEIRDTIKGIQYGLIPDTKGWLKKVI

SEQ ID NO: 81125 - protein, 190 aa, Unknown
  Obtained from environmental sample
  misc_feature (1)..(190): Xaa is any amino acid
MKKNICLATIALILVVSCSSNPKVTRVDPKAQTDLSGYWNDTDVRIVCESLISDCLKSPRVAQEIQSKRGKLPVVLVGRFANESSEHIDTSIISDIMEITIFNSGKMDFVAGGATRDAIRAERQDQQSNASEETAAALSKETGADFMLFGTVRTIVDKAGNQTARTYLVRAELTYIETNERLWNGAEHRN

SEQ ID NO: 81126 - protein, 161 aa, Unknown
  Obtained from environmental sample
  misc_feature (1)..(161): Xaa is any amino acid
MPLKYPIVLVHGIIAHDRPSFNKFWGRIPEVIRETGAKVYFGNTDAWGEIKSNAIILKTSIDKILDETKSEKINIIAHSKGGLDSRYFIWKYGYGDRIASLTTISTPHHGAELSDFIYRQRILHSRITKKGVKTLWKIIRRQKSRPISCRSCRSDPWGDPG

SEQ ID NO: 81127 - protein, 273 aa, Unknown
  Obtained from environmental sample
  DOMAIN (1)...(50): His Kinase A (phosphoacceptor) domain
  misc_feature (1)..(273): Xaa is any amino acid
MNAITGMAELALRENLPDAVREHILTIKQASLNLLSIINSILDFSKIESGKLEIVPVDYLFSSLINDVINIIKTRVIDSNVQFTVNVDCDIPNALLGDEVRVRQIFLNILSNAVKYTSRGFVSLSVTGEIDEDIVTLYIEVSDSGKGIKPEDIGKLFGDFVQLNLTKNRGIEGTGLGLAITRSLVRAMGGDITVNSEYGKGSVFTVTLPQKIHGPEKLASVEKAEEKSVLVYEPQEIYSHSVLRSLENLGVKCALAADESEFAKRLGRSVMSG

SEQ ID NO: 81128 - protein, 165 aa, Unknown
  Obtained from environmental sample
  DOMAIN (2)...(98): GTPase of unknown function
  misc_feature (1)..(165): Xaa is any amino acid
MLLKEERSIVTEVPGTTRDWIEAWVSIEGIPVRLTDTAGLRDSSDQVEKIGVERSRDLLEAADLVLYLIDGEAGITDEDTALTEKLTIPRLVVWNKTDITPAPEGLLAVSAKTGRGIAELTAAIAAAIQLQLKAKTMMLRVSASLGTIPAKNLWGNAHGGSSPRR

SEQ ID NO: 81129 - protein, 273 aa, Unknown
  Obtained from environmental sample
  DOMAIN (2)...(258): Polyprenyl synthetase
  misc_feature (1)..(273): Xaa is any amino acid
MVLSAECVAGESGGEAALSLTPLVEFPHNASLIHDDIEDNSDERRGKPAVHIAYGTDAAINTGAFMYFLPLACLSAWNGDPQIKEQIWAVWARHMRALHLGQAMDIAWHRDFTSMPSLDEYDRMCRLKTGCLARLAAVLGVIVAGLKAAGAASPKEIAILADAFGDAAEQLGVGFQILDNVKNFKHRESWAKNAADGIVEGQKKPFLSGFTLTREPREKGILAFSLLLRAARDFPGGNASRRGLMGVVFSRSWEGGGGKFMGTEGSARKGALG

SEQ ID NO: 81130 - protein, 112 aa, Unknown
  Obtained from environmental sample
  misc_feature (1)..(112): Xaa is any amino acid
MNFNNLDKTSAYRQLAEKAAAGKEFNFKGLLTPDRVKQCEVPLAEGLVFNWAAKAVDEKILDALQALADEQELILKYRALLEGETMNTGQGRKVLHQLLRNPERKTPNVKNR

SEQ ID NO: 81131 - protein, 248 aa, Unknown
  Obtained from environmental sample
  DOMAIN (49)...(239): Protein export membrane protein
  misc_feature (1)..(248): Xaa is any amino acid
MAGRVPLSSFVHYEQGTGPLTINRENQSRVIHVTAGAKPGVKTNLIQELVEDIVRSEIPIEDDVIIQYEGANAQMIKLFGRFVLICIVAVFLVFGVMASLFESFRDPLIIVLTIPLSMIGIVAIYLITHTIFNVLTAVGLLVLVGVIVNNGIVLVDYTNLLRKRGYALIDACIEAAGNRLRPILMTTLTTVLGLLPMAFFPGEGTELVAPIGKTVLGGLSFGTLMTLFLMPVIYAIITRAILSWGGEW

SEQ ID NO: 81132 - protein, 121 aa, Unknown
  Obtained from environmental sample
  misc_feature (1)..(121): Xaa is any amino acid
VELFIPIGGFGRFSELFSDPALLTEKLDSLYEQLMQKREGVYSSAGLRKCVLGPELAGMLAHEAIGHTVEADLVLGGSIAGNYMGKQIASELYQWWILRTPLLASHALCLVPLGHSVMGPR

SEQ ID NO: 81133 - protein, 119 aa, Unknown
  Obtained from environmental sample
  misc_feature (1)..(119): Xaa is any amino acid
LKAKEPDLSVTIAGVKLRNPVIAASGTFGYGQEYEGLLDIAGLGSICTKGLHWIPAGKPGNEDYQTPSGSGTPLGWKTRGFPPFLETEAAGLKKNPPRGILGNFWGSRVFEIFPGAPPF

SEQ ID NO: 81134 - protein, 157 aa, Unknown
  Obtained from environmental sample
  DOMAIN (60)...(156): D-isomer specific 2-hydroxyacid dehydrogenase, NAD binding domain
  misc_feature (1)..(157): Xaa is any amino acid
VFTNKTPLTAEVFNACPSIKFVGVLATGYNVVDVNAARAKGIPVCNIPTYGTAAVGQFAIALLLEICHRIGHHDKAVHEGRWENNIDWCFWDFPLIELAGKTIGIIGFGRIGQTTGAIAKALGMKVIAFDSVASESGKQIAEYVSLENSCRSDPWAS

SEQ ID NO: 81135 - protein, 150 aa, Unknown
  Obtained from environmental sample
  misc_feature (1)..(150): Xaa is any amino acid
MTYKIIFRTVSFSATAAFLMCAGCADFGTGGGSADPDCGVNAYLSTFNPVLRVQASPSNGGRVSVSPPPPNSDGTYRYGDVVTVRAVPNSGYAFEEWSGASMDAVESIRIVMDGNKELTANFIINSKSLKPNHFKTKPSALRENMPAPTS

SEQ ID NO: 81136 - protein, 209 aa, Unknown
  Obtained from environmental sample
  DOMAIN (25)...(50): The GLUG motif
  misc_feature (1)..(209): Xaa is any amino acid
LGGIVGGNTTTGTVIKGRSSTTVRGKNQVGGIAGWNYGKFENSYNTGTVTGNTQMGGITGLNNGEIENNYNTGAVSGSQQIGGIAGTNSNTGKYIKNCYNTGDITATAAANTRAGGIAGDNLTSATVEYCYNTGNVSGANLAGGIVGYNDTGCNVRYCVSLSARVGSGSTTISRVVGTNSGNLTNNKARADMKVGVSDRSCRSDHGGAQ

SEQ ID NO: 81137 - protein, 145 aa, Unknown
  Obtained from environmental sample
  misc_feature (1)..(145): Xaa is any amino acid
MLIPTFPEFTPLTFELKDEMHPKLYQTVDGVSEFTFAGLYMFRKRYGYRVSRLEDKTLILSGIQPPHADGEVEKRFFSTPLAAPGRGVLEELFKTHDFWKNIPESIIIPERERLEEWGIEIDEDRDNFDYLYLRSDLAELPLVPI

SEQ ID NO: 81138 - protein, 225 aa, Unknown
  Obtained from environmental sample
  DOMAIN (23)...(187): MatE
  misc_feature (1)..(225): Xaa is any amino acid
MIQLKQRFGPWSFYREVLAVALPVMTQQFIMSMVSLIDNFMVAGLGDVSMAAVNVTNHLFFIYIVLINVTCQAGGIYIAQFKGAGDSEGMKHAFRFKVIFAAAIAALAFTVGRSLTSPLIAMMTTANISQQEIVSVGSRYLKLISWTFLPMAISSAIGTSFRDTARPKIPLIISIFATLINTAGKLDINLRQPGRPSPGSRRRSECDNYSTPFRAMRLCDLCNMG

SEQ ID NO: 81139 - protein, 254 aa, Unknown
  Obtained from environmental sample
  misc_feature (1)..(254): Xaa is any amino acid
MHKAILMAAGRGTRISRTIGGSCKCTLDVDGIPLIRHTASMLLKHGIETHVVVGYQKELVFKALDGLPVTFHENIFYSVTNSMASLWWAKEELCGESVILGNADVFWEDNILSVLLNETRDCVMLCDSTRVEQGDYLFNVQDGKVIAFGKGIDCHKANCEYVGLAKIQGSFIAECKQHLKVMAANQRHGDWWEQILYDMVKTRPIWAVDIAGQLWAEVDFIEDYNRLLDYIKQKRLTIEQRHKDQRRDAHASFG

SEQ ID NO: 81140 - protein, 168 aa, Unknown
  Obtained from environmental sample
  misc_feature (1)..(168): Xaa is any amino acid
VQLMAFEETGGLEVGNRVIARGSRLEVPVSTKLLGRVLDALGNPVDGKGEIESPVMYPALANPPDPLKRRRVTERIVTGVRAIDGLLAVGRGQRLGIFAGSGVGKSTLLGMIARNTHADVNGVALNGERGPEVNELFDNHLGTEGLAPNWVNPTSFPFAPLRAVWRGA

SEQ ID NO: 81141 - protein, 289 aa, Unknown
  Obtained from environmental sample
  misc_feature (1)..(289): Xaa is any amino acid
MRSTDRSSELCAQYAKSDNRIVLCYEDGTGISAARNRGLVEAKGEFVTFIDADDYILPGMFGTMYERALGQNLDILCCGAKKGLGGQDAGHMDDYTKFDDELFVVAPHSQRDYMYKLALNGRAILLWSKLYRRGFLEEKQLRFHPEAYAEDTVFNFNCYSSATRVATISGQYYIWYDRQGSRTYSSAISDVERSAEIIWALYLGYDGQATQDVWAFAATKIVSSTLFFNLKLKPLPIEQICEVTWGMIQKLGLPPHLLRACDRAKFDEYAKAVRMSDSADLIHGWGGWG

SEQ ID NO: 81142 - protein, 204 aa, Unknown
  Obtained from environmental sample
  DOMAIN (4)...(142): Thiamine pyrophosphate enzyme, N-terminal TPP binding domain
  misc_feature (1)..(204): Xaa is any amino acid
MATMKASGAIIRILEIEGITAAFGIPGAGINGLYKFLGQSKVIKHFCHRHEEAAVHAAGGYFRASGKIAAAICTSGPGATNFVTGVLSCNIDSIPVIAITGQAVCAQLGKNAFQCGDIPENLASCGQKNPPDLPTQKSLGKPFTKTFFPLQGKGKPGTPRDQDFPREGEKSPNKKIHTPPPKKNANPFISAGSGFRPPKILKAI

SEQ ID NO: 81143 - protein, 104 aa, Unknown
  Obtained from environmental sample
  misc_feature (1)..(104): Xaa is any amino acid
MEGYNETQTCLCSPEEISRYWRKFGGALLDRIEIRAPVIPPSVDEIGKPSGNEERSADIAMRVRAAVELQQLRYKGMEIRRNALIPAGKIENFATGSTGSCRGR

SEQ ID NO: 81144 - protein, 245 aa, Unknown
  Obtained from environmental sample
  misc_feature (1)..(245): Xaa is any amino acid
LRERSLCARHNRRDVTVGKKGDPEANVWLNPQSWAVISGYADEKRGKQILDLVYKKLNTKYGARLMSPPYRKHAFDGALALLFNPGTKENGGIFLQTQGWIILAEALLGHGNRAVEYYLESCPAAQNEIADTRLMEPYVYSQFTGSVDSPFEGRSPVHWLKGTASTGMVGSVEGILGLRPENEGWVCPRQSHMGKTFTRENRSGAKKLIKSEKPRRTRKGFEKTYRVRKKRLRGITFPPLYRERQ

SEQ ID NO: 81145 - protein, 178 aa, Unknown
  Obtained from environmental sample
  DOMAIN (35)...(176): Metallo-beta-lactamase superfamily
  misc_feature (1)..(178): Xaa is any amino acid
MHCIKKITDDLVWVGANDRRLALFEGVYSVPTGVSYNSYLLTDEKTVLFDTVDKAVRQRFLENVKEALKGRKLDYLVVQHVEPDHSAVIPDLIRQHPELKIVCSARVLEFIKQFYDFDIDSHVRLIEENETLSTGKHTLQFIMAPMVHWPEVMFTYDSAAKILFPQTHSARPNLSLNF

SEQ ID NO: 81146 - protein, 234 aa, Unknown
  Obtained from environmental sample
  DOMAIN (8)...(233): Amidase
  misc_feature (1)..(234): Xaa is any amino acid
MKASSPVGVVEEVLKKLKEPRDLNAYISTCKDRALKVAAATDERHRNGKSLSVLDGIPIAVKDNMCIEGIKTTCASRILENFVSPYTATAVAKLEAAGAVVVGKTNMDEFAMGSSNETSYFGKVINPLAKERVPGGSSGGSAVAVASETVALALGSDTGGSIRQPAACTGTVGMKPTYGRVSRYGLVAYASSLDQIGAFSNSVKDLVPVLDLWRSRANDNTTLGRSDTWGGECG

SEQ ID NO: 81147 - protein, 172 aa, Unknown
  Obtained from environmental sample
  misc_feature (1)..(172): Xaa is any amino acid
MDQLCQRYQTEAALDSDPISIPGRYPDAIDKELASWVAAHLAYGRVAPMLRAIRRVLEPLGDNPTQWVRVNDESAIKGSMQRYLKGWVWRFHTLEDMIEWIIVWKRLDGSTENKGLKLLLLPADGLAAEQRLSKLKTGLPKPAQDSRAPIQFARTPERRGGQKGENVFARKG

SEQ ID NO: 81148 - protein, 270 aa, Unknown
  Obtained from environmental sample
  DOMAIN (2)...(176): Peptidase C26
  misc_feature (1)..(270): Xaa is any amino acid
MSDSRKPELALVLDFGGQYKELIARAVRGLSVYSEIRPGNMPAEEIRRLAPICIIMTGGPSSVYQSGSPMCDPAIFDLGISVLGICYGMHLMCHVLGGEVTAGGAGEYGCVSVTPEKPISALFQGTHDKPFAALMSHRDVVSRLPDGFRKTASTAVCVAACENAGKKLYAVQFHPETKHTDGGREIFHRFLYDVCGAADDYKLDDYIDTQVRLIRDKVGGGNVLLVLSGGVDSSVCARLLSRAVPNQLVCIFVTTAFCGKTRATRSRASS

SEQ ID NO: 81149 - protein, 315 aa, Unknown
  Obtained from environmental sample
  misc_feature (1)..(315): Xaa is any amino acid
MHWLGTVVGLLALPLAGVLKWMLRALRRKFKKDVTYSREYILDNIRNINKRFSEDELTKSLVSSIQEAFRPQVYYCLRVVDGRAMLPVVQKKMHLGDECGKGASVRNAYELILPPKLLRHAKDSRELVYDLGNDESDWISAQSKELRTHLDTMGVQLMVLLLADDQPHSILLLGGKYAELGYHREDRELLRDVAIAAGIVIESAIMHRQVLDKTRLDQELLAAQKIQQSLITSAPPVVPGFQIASRLVPAAETGGDLLWIKQRTAGRWISVVGDVSGKGLAAALYMSQSVALIEHASQDPDAPRTRPFCHGGGMG

SEQ ID NO: 81150 - protein, 112 aa, Unknown
  Obtained from environmental sample
  misc_feature (1)..(112): Xaa is any amino acid
MMAELGTLPAGLGKLKSEFPFRSLLLTGEKELFINGTIDLLFEDAETVYVIDFKTDSQELPWEHIAQMACYYKAASDLFAVPANKKCRIWLYYLRTGHAVDVTMKAKSFDFR

SEQ ID NO: 81151 - protein, 97 aa, Unknown
  Obtained from environmental sample
  misc_feature (1)..(97): Xaa is any amino acid
LTSTDGVIWTAVKDNTLGLNDIYAIAYGNSKFVVGDRNGDAATSTDGTTWTAAGNKILGYYTYNDWKTGYIINAIAYGHGTFVAVGDSGKMAYSSGN

SEQ ID NO: 81152 - protein, 120 aa, Unknown
  Obtained from environmental sample
  misc_feature (1)..(120): Xaa is any amino acid
MIRSAELVRRADGSCDAVMVGRAAVRYPWIFAQARELESVNSGSAKPYTVPNIEETGLRFLELLVRYQPPDFHFSRAMRFFGFFCDNLKWGNYLKTQLNRQKDLSGIEMVWKGYFKENEN

SEQ ID NO: 81153 - protein, 308 aa, Unknown
  Obtained from environmental sample
  misc_feature (1)..(308): Xaa is any amino acid
MGTGSQVKMPLISRNYDAIKEPADEILRIFERYLPEIENPVVNIDEGPPQLIVNIDRDRAAALGVSLSSIASEIRTAMDGSTAATISMGDRILNVRVSLRDEDRMGIPNLDAISVVSRNGSRISLSNVAEIVESRAPSSIRREKQERVVRVTGALPAGIAVTDMQKRLEATVKEYLIPHEGVTLRFMGEAAEIQSYYGRYILMVVTAVFLVFSVMASQFESFVDPFIIFFTIPMLFIGVIWIYKFSGEAMSMFSIVGVIALVGVVVNNGIILVDYTNTLRSRGLTVREACLEAGRSRSADLIHGGGNG

SEQ ID NO: 81154 - protein, 217 aa, Unknown
  Obtained from environmental sample
  misc_feature (1)..(217): Xaa is any amino acid
MLHTGILPNHPKWINFFSHLSYVVIDEAHAYRGVMGSHVANVIRRLRRIAAFYGANPKFILCSATIGNPGELAQALIGRSIELVDRNGAPRGEKRIILYNPPLVDKVQGIRRSVVTESRRWMTALLKAGIKTILFAHSRVKTEVAASYVNEDLANIFTDNSRIRVEAYRGGFLPNERREIEKGLREGTIQGVVSTNALELGIDIGGLTLLCDNPKNI

SEQ ID NO: 81155 - protein, 266 aa, Unknown
  Obtained from environmental sample
  DOMAIN (97)...(126): Helix-hairpin-helix motif
  misc_feature (1)..(266): Xaa is any amino acid
MEIAEFKKIVLSNYQQQGRKFPWHFADPWGVMVSEFMLQQTRTERVIPYWENWMKLWPQPKALADASMENALRAWSGLGYNRRCRYLKESAAIIANDYDNKVPETPQALLSLPGVGPYMSSAIACFAYNYPTVFIETNIRSAVIHCFFPERNDVKDSEIIPILEAALNRSEPRTWHYALMDYGAFLKKTTANPSRRSAHYTRQSPFNGSLTQARGKVIKALVFMGQCRAEELNWPAGWKSKTVRCSGKAERRSICRRRRGCFTGFR

SEQ ID NO: 81156 - protein, 261 aa, Unknown
  Obtained from environmental sample
  DOMAIN (111)...(212): HD domain
  misc_feature (1)..(261): Xaa is any amino acid
LQKLRDRRYETDLDLNAVQSHTGNSRIIMDAALLLARYGLSAETPAASFEQNLPPGPETQRAFLCCLLLSARPELALELLKESGFLKEFWPELASLDDVDHSKEFHPEGNVWNHTLETFRYRKAATSGAFDLRLSLALLLHDAGKPISASFANHRFEGHAELGALAAARFLERLEFEPSLIQDIFYLVKNHMLPAALKRLPITKTAEIMASPLFPTLMELYRCDESSSFKGLDGYYENSATYQTYLKNDEKPLSIQRRKKD

SEQ ID NO: 81157 - protein, 126 aa, Unknown
  Obtained from environmental sample
  DOMAIN (2)...(112): IMP dehydrogenase / GMP reductase domain
  misc_feature (1)..(126): Xaa is any amino acid
VENCFAEFRESPGSEIILEGGIYKEYRGMGSMGAIADGSADRYQISKDEEPVPEGIEGRVPYKGELRTYMNQLIAGLRKGMGYCGCRNITELKQYKKFVKITASGIRESHPHDVTITQEAPNYSRL

SEQ ID NO: 81158 - protein, 85 aa, Unknown
  Obtained from environmental sample
  misc_feature (1)..(85): Xaa is any amino acid
MFSEGLSYDDVLLQPGYSEILPKDCNIQTVLCKGINLNVPVISAAMDTVTEEKLAIAIALEGGAGVVHRTLAPTNRRSRLRMLNV

SEQ ID NO: 81159 - protein, 213 aa, Unknown
  Obtained from environmental sample
  misc_feature (1)..(213): Xaa is any amino acid
VNRKNAPDYRPFLRLLIVILLVFLGFSMLPAAEAGIDFSIRYFDKRIYYLESDPIYIQVTVTNNSPSTYRFKLADERAFSVDFDVRTNSNRIVDAADILVRKRSQSQQVYFREVAIEAGESFSFVEDLKNYAALTHSGTYVVQAKIYPELYHTVRSENAGVWSLGSSGIRAREIILAAGYILESNRLMLNIRSALIRGRDRIPLELHAETTRS

SEQ ID NO: 81160 - protein, 268 aa, Unknown
  Obtained from environmental sample
  misc_feature (1)..(268): Xaa is any amino acid
VRKTLTNLQICNDTETMKAKMTLHREFSIGEIDKRLYGSFIEHLGRAVYTGIYEPGHPEADSFGFRNDVAQLVKELDVPVIRYPGGNFVSGYNWEDGVGPAESRPVRLDLAWNTKETNRFGTNEFAEWVKKVNSEIMMAINLGTRGAQDARNFVEYCNFPGGTYWSDLRKSHGVNEPHKINLWCLGNEMDGPWQICHRTAEEYGRAALEAAKVMKWTDPSIELVACGSSFSGMPTFGSWENTVLDHLYDHVDYISLLGRSDHWGGGWG

SEQ ID NO: 81161 - protein, 97 aa, Unknown
  Obtained from environmental sample
  misc_feature (1)..(97): Xaa is any amino acid
MYDIEEIYEAESPSHAVELLQRYPDAKIIAGGSDVLIEIREGRLAGRTLMSIQKLDCLRGVSIDSGGAVRIGALTSFSTSRATPSYRKTYPCLRKRC

SEQ ID NO: 81162 - protein, 78 aa, Unknown
  Obtained from environmental sample
  DOMAIN (1)...(77): RyR domain
  misc_feature (1)..(78): Xaa is any amino acid
VYVPNPIDTTKITLDRDVLALGELLAVNTHDVWAAVSIAERWTYGETRDNAKKRTRASSPTRASESEKSTTGSPPSKL

SEQ ID NO: 81163 - protein, 289 aa, Unknown
  Obtained from environmental sample
  misc_feature (1)..(289): Xaa is any amino acid
LFAVKEVWAIQSNHPRRVVLRRTGPYEKGEFDKAKINFYKALSHPVYGGAAYYYLGVILGQEGNKAEAVKYLRAALGTRSTDFDRNEAARLIELYSGQKVPASMIEVPQSATQSTAAAKSDSVEVPAVSPEKYAPIEIRIDSMLSMMTVDTLTDAGQKLLKAIRAFTAGRYDDAIREFKSVLAENPSGPVAAQCLYNAGICYYRLRLYKDAENQFQLFLDRFANHKFAPRAVFFKACTYQERSDYAVSEKLFRKFIQDNRTHEWVGRAYERLATATPTSSSSADLSCRT

SEQ ID NO: 81164 - protein, 280 aa, Unknown
  Obtained from environmental sample
  DOMAIN (1)...(280): UvrD/REP helicase
  misc_feature (1)..(280): Xaa is any amino acid
LDADQLAVVSSDLRKGIIIAGPGTGKTAVLAAKIVHVINEGSNPASVLALSFTVKAAAELRDRVLRLMQKPQLEKPETGKPVIVTFHSLCASILREQCAPALFPADFKILSETERDDLLAKICAAANSKTVSPKRLGEYIEGRKRYLLLPGEKPKDISRILPASLVSFIPDDNSGDNDSAAALDNAYAEYRKRLHSLGAVDYDGLIAGTVRLLAIREDILKNYGQKFRFIFVDEYQDINFAQYALIRLLVGNEVVAPSRVGYRRSQPGSANLVMRFWVWG

SEQ ID NO: 81165 - protein, 102 aa, Unknown
  Obtained from environmental sample
  misc_feature (1)..(102): Xaa is any amino acid
MNLKKYEYWFIVGSQDLYGDETLKQVADHARIMTEGFNKDPLLSGTVVLKPTAITPNAIRSLFEEANASNNCAGIVTWMHTFSPSKMGFRDYVNLAIARENP

SEQ ID NO: 81166 - protein, 73 aa, Unknown
  Obtained from environmental sample
  misc_feature (1)..(73): Xaa is any amino acid
MTDWPRPGLLSRFVGMLTDSRSFLSYPRHEYFRRILCNILGTWAENGEIPNDFDLLGNMVKDISFRNAKNYFK

SEQ ID NO: 81167 - protein, 231 aa, Unknown
  Obtained from environmental sample
  DOMAIN (15)...(84): Histidine kinase-, DNA gyrase B-, and HSP90-like ATPase
  misc_feature (1)..(231): Xaa is any amino acid
LVRKENAFVPYKWTLRPPGLGSARTAIPPVFLFEQAESSTSRKFGGTGLGLAISKHIVELMGGEIWLDSKPGVGSIFSFTVLLKRGKTEENAESRPHKAASGQQVSFKGRRILLAEDVEINREIVLALLEPTGIEIDCAVNGKEAVKMFSHKPKGYDLIFMDMQMPEMDGLEATHQIRSIEGHKNIVPIIAMTANVFKEDIEKCLAVGMNDHIGKPLDFNEVMAKLQFYLK

SEQ ID NO: 81168 - protein, 293 aa, Unknown
  Obtained from environmental sample
  DOMAIN (47)...(129): Cache domain
  misc_feature (1)..(293): Xaa is any amino acid
LTGFSGYFNVFGGALLDGQDRAPPENYNPLERPWYKEAVEAGGNIAFIQPHFSVMSAKPTTIIAYGRAMLDDDGNLLGVVALNMNFERVKAYIIQANLGKVWFGILLDENFNFIFHRDHGLEGTNFADVTSDTARLVELLKSGNNSVSEYSMINYQGIPSITFIRKLENDWYLGIVTPKDEYFTEVKRVRLILILLGAALSAIFSFILAHIITEKRKADAKINEAEKAIMANRVKSDFLAKMSHEIRSPMNVILGITEMQLEKKDLPPETLTALGKCEFRPFSADLSCGGECR

SEQ ID NO: 81169 - protein, 69 aa, Unknown
  Obtained from environmental sample
  misc_feature (1)..(69): Xaa is any amino acid
GFPPGYRERTSSRARFDFRWEDQFALSLDPELAEAYHNESASGNGKYCSMCGPNFCAMRISQGITDTCK

SEQ ID NO: 81170 - protein, 300 aa, Unknown
  Obtained from environmental sample
  DOMAIN (34)...(231): ABC transporter
  misc_feature (1)..(300): Xaa is any amino acid
MDKLIEVKNLKLYYHTSNGVVRALDDVSFDVYKGETLGLVGESGCGKTTTGAGLLKMPSPPGRIEEGSSILINGRDILPLSDREIRKTVRWTEVAMVFQGAMNCLTPVYTIGKQMMETLKVHTEIEKEEAQALIKEYLGHVGLPPEVTERYPHELSGGMKQRVVIATALFLKPKLIILDEPTTALDVIVQAQIINLLKTLKKSFDLSFIFITHDLALEAEVSDRICVMYAGKIAELGTNEQIYGKKGLLHPYTEQLLSATLLLRTKSIRFRTFPERPLILSILRKDAAFTRAVMWAKSAA

SEQ ID NO: 81171 - protein, 292 aa, Unknown
  Obtained from environmental sample
  misc_feature (1)..(292): Xaa is any amino acid
LIISGNGTLNITGNFKHGIRSQDTLTVKSGVVNVKAVGDALRGRDAVIIEDGTFSLTADGDGVQSNNDTNAERGYIIINGGTFTINSGDDGIQAETAVTINNGSLTITAKDDGITTSGSVLITGGTINITDSYEGIEGLNVTIKGGDINIFSRDDGINAREHRVVTNTRGRFMMGRPTNENIYVHVTGGNIHVYALGDGIDSNNNVFLEGGTLRISGPSRGMEGAIDVDGSVFINGGQLITAGSVISVSAQSKQPTVLVTYTQQVSAGTLIKKGEPAAILSWTIPLKTPSYV

SEQ ID NO: 81172 - protein, 307 aa, Unknown
  Obtained from environmental sample
  DOMAIN (1)...(307): Aconitase family (aconitate hydratase)
  misc_feature (1)..(307): Xaa is any amino acid
VFDASKIKAVIDHVTPSKDSKSAAQAKILRDWARRHGIKDFFDVGHNGVCHAIFPEKGFIRPGYTVIMGDSHTCTHGAFGAFAAGVGTTDLEVGILKGVCAFRPPESIKVDITGKLPKGVYAKDVILDVILQLTVNGATDHVIEFRGETVDAMSMEERMTLCNMAIEAGGTSGLCMPDKVTVDYIWPFISSEYNNDKESAAEDFAKWRSDPDAEYAKVLTVDVSTLEPVATIGYKPDQVKPVKELSDVKIDQVYIGSCTNGRISDLRIAANVVKSALTKGKNWRTAYAASLAPRPPRSNRQPWKKAL

SEQ ID NO: 81173 - protein, 313 aa, Unknown
  Obtained from environmental sample
  DOMAIN (126)...(312): Methyl-accepting chemotaxis protein (MCP) signaling domain
  misc_feature (1)..(313): Xaa is any amino acid
VGYFTKPIVKVPETLKDISEGEGDLTRIIPVKGNDEISDMSRYFNLTLEKIKKLIISIKGKTSILSDTGNELADNMMQTASAMNQITANIQNIKGQMTNQNTSISETGANMEQITNNIDRLNGHVEKQTANVSQSSSAIEEMLANIQSVTQTLVKNGERVNELTTASDLGHACLKEAASDIQEIARESEGLLKINSVIKDIASQTNLLSMNAAIQAAHAGEAGKGFAVVAGEIRNLAESSSEQSKIISTTLKKIKSSIDKVSESTVNTLARFEVINNDVKTVSEQEEVIRNAMEEQNEGSKSILSRPSSGGET

SEQ ID NO: 81174 - protein, 301 aa, Unknown
  Obtained from environmental sample
  misc_feature (1)..(301): Xaa is any amino acid
DKGQEKFFSPIFHRRFLKTLTLSPWSLAPNPTSGHIGPAAYAPGESTISAYFSNDNGVSNSFNKQATSIVHIYKDITFPSGSQQYTLTFDWKGYGGSFYTDSLTVFLVETSVTPVAGTKLSETRLGAYNSQSTWQKTTINIPTTNNGTTKRLVFTWKNVSTDVYTGYDYHQIAVDNIMIGVSGNVPFANVSTGTGGTTATYTPAATVAKSGYAYRCIITDNDGQSTASNYATLTVNKANPAALTWPTAAAITYGAALSTSTLSGGSNTGTFAWTDPATKPTVTNSGYSEPHPTTLSIMGFG

SEQ ID NO: 81175 - protein, 284 aa, Unknown
  Obtained from environmental sample
  misc_feature (1)..(284): Xaa is any amino acid
MPKQIYLRDLAYVIDGYRDETSTVYVNGRSAVMLMVQKQSGKNSIQTAKDLRIRLKKIISELPPDINITEMFNTTDIIENSLNQVTSTAVSGAVLAIIILFIFLRAAKPTIIIGISIPISIIITMMLMYFAHLTLNLMTMAGLVLGIGMLVDNSIVILENIYHYREKGAKLKTAAVIGSSEMIVAITASTITTICVFAPLVMFQGLLEMAGELFAGLAFTVVISLGISLFTAIFLVPILASHYLPLVTRKQKPLTGILVWIDQVMGKLFYLAGRKIPQRGAQSS

SEQ ID NO: 81176 - protein, 252 aa, Unknown
  Obtained from environmental sample
  DOMAIN (72)...(195): Pyridine nucleotide-disulphide oxidoreductase
  misc_feature (1)..(252): Xaa is any amino acid
MEALTKRAVSEYGLKLKTKTEMDIKALNKLKADAIVFAMGTRDAKLPLPGIENTVQAVDLFMNPGLLGDAKKVVVIGGGAVGCEVAYWLRYEKNCEVTVVEMDKYIMNHTCTANRGYLIYYLKKGGVKLLNCTRLTGIGKDGAEVMRNVSKTVPDPYITWHPILPENVENPLAPKLKVDEKSETIPADLVVMAVGGAPNDSLYFEALADNSAPELYNIGDSSSAGKVLEAVRAAYRLGHRYRRSAANELNRR

SEQ ID NO: 81177 - protein, 76 aa, Unknown
  Obtained from environmental sample
  misc_feature (1)..(76): Xaa is any amino acid
IAEGLSTEGLTFDNRPFNPHITLGREIKHNSPIIIPKQEIKYPVNRISLMKSERISGILTYTEIFGRRLGDWEEKQ

SEQ ID NO: 81178 - protein, 313 aa, Unknown
  Obtained from environmental sample
  DOMAIN (1)...(70): HAMP domain
  misc_feature (1)..(313): Xaa is any amino acid
MAETLSIVLFLAVILAIIIAKRVSKPIEEITQSATMLANGNYDTRFTGKGFYEIVALSDTLNTAAVELSRVESLRRELLANVSHDLRTPLTLIYSYAEMMHDFPGEVTPEQTQTIMDETRRLTTLVNDILDISKLENEVGKLNVVRYNLTQSISETAKITEKLLKIEGFKIAFSHSGDAYVDADKAKIDRAFYNLLINAINYSGGSRDILVEQTIAENRVRISVIDHGEGIAEADLPFIWDRYYKSGEAHKRAVTGSGLGLSIVKKIIDTHGGKYGVVSETGKGSTFWFELGMPLIMPHCKFTIKTTKYYIRH

SEQ ID NO: 81179 - protein, 299 aa, Unknown
  Obtained from environmental sample
  misc_feature (1)..(299): Xaa is any amino acid
MMDTAERFVPGIRRRTQKIEGVHTIYPYLKELKELLNSDVKLPLLIDCLNCEKGCIGGPGTGNAEKPQAVLENPVRTRIDKLEEIVDPKKGENYQKYHKMLNKYWKKGLYDRSYKDLSANNTIKHPNNDELTEIYHSLKKFKKEDLYNCTCCGYGKCESMATAIYNKLNKPENCAHYILALLKEEKSVEELNRQLKEHIARASELIRGITALVNKLNNAISSQAETIANSSVATEKMIGSIKETSEMSRKKQESIKGLIDDADKSQESMRGTIQSVEDISKSMDGIAHSADLVMHFGNR

SEQ ID NO: 81180 - protein, 317 aa, Unknown
  Obtained from environmental sample
  DOMAIN (2)...(313): Histidinol dehydrogenase
  misc_feature (1)..(317): Xaa is any amino acid
DKGIQFSDLEYEMETGLVPDQRVFPVIRAAVYVPAGRFPLFSTALMGLIPAFCAGVEEVLLVSPPLEDGLPDRKILAAAGVAFKIGIRADFEPKLRVLAVGGAQAIAALALGTETIPRADVIAGPGNKYVAAAKRLLFGEVGIDFIAGPTDVLIIADGTVPNPAELAAADMIAQAEHDPDACARALVSVQTLADQLTAALERQLALLPEPATARASLDRNGLIIVYHNEKEAVRIANAIAPEHLELQIDNSEALIPLLKNYGSLFVGGLSAEALGDYAAGINHTLPTSASARFTGGLSVRHFLKTVHSAAGHNPGGG

SEQ ID NO: 81181 - protein, 75 aa, Unknown
  Obtained from environmental sample
  misc_feature (1)..(75): Xaa is any amino acid
MIVAEVLSNSIIIEQVFAIPRIGRLLIAGISSRDYPLIQALVVYIASVVIIANTLVDIAIMAVDPRIKLEGDARK

SEQ ID NO: 81182 - protein, 165 aa, Unknown
  Obtained from environmental sample
  DOMAIN (1)...(138): Thiamine monophosphate synthase/TENI
  misc_feature (1)..(165): Xaa is any amino acid
ETAVRVRKITADCGVPLIINDRADIALAVNADGVHVGQDDLPLEAARRIMGEDAIIGVSAHNLTEALAAAAMGADYLGVGAMFATATKKDADSTTMDELRRIRAEIKIPIVAIGGINQNNVPLFAGTGIDGIAVVSAIVCQKDASGAARELKALFHSVMGKNERV

SEQ ID NO: 81183 - protein, 72 aa, Unknown
  Obtained from environmental sample
  misc_feature (1)..(72): Xaa is any amino acid
MMAETLIEILKKLNHTKLIATHDVTFAANVCDRVVILKKGQIAADGMRDLLYNKEIMTQCELEAIEERMIYE

SEQ ID NO: 81184 - protein, 245 aa, Unknown
  Obtained from environmental sample
  DOMAIN (119)...(244): AIR carboxylase
  misc_feature (1)..(245): Xaa is any amino acid
MNKKETLILLKKIQEGAVTPEEALSRFCTEPFEDLGYAKLDHHRELRKGVCEVIYGESKTPEQITGIITAMQNKGQRLIMITRLSAEAAETVNKKIPLRYFQTARIGIIGETPKPDGIGKIVVATGGTSDIPIAEEAAITAEALGNEVIRLYDVGVAGLHRLLSRLEAIMDAQVIISIAGMEGALTSVIGGLVDCPVIGVPTSIGYGASFNGLSALLSCLILRLQRKRSKHRQRFRCRVSGQYVK

SEQ ID NO: 81185 - protein, 100 aa, Unknown
  Obtained from environmental sample
  misc_feature (1)..(100): Xaa is any amino acid
GSPKTDWHENPFHLGHFFIAIDISAFVELDNFKKTTGDILRELRSSAKAPGQERIFTAGEKEYLAWISRKETGVPLNDSLKKTIKALKEEYRLDSYEFNF

SEQ ID NO: 81186 - protein, 208 aa, Unknown
  Obtained from environmental sample
  DOMAIN (43)...(192): Malic enzyme, N-terminal domain
  misc_feature (1)..(208): Xaa is any amino acid
MDIDIQIKNLDSLFPVGFSEEQKAQAKTLFLKNLSMEAHRFYGGKIQVLPKCGIYGFNWLNVWYTPGVSKISTAIRDDNDASFALSNRGNMVAVVSDSTRVLGDGDCTPSGGLGVMEGKAMLMKYLGGVDAVALCVDSQGPDGRNDPQRLIDFVKMVQHSFRAINLEDISQPNCYRVLDELREACEIPVWHDDARGTAVLPLLPSSMP

SEQ ID NO: 81187 - protein, 291 aa, Unknown
  Obtained from environmental sample
  misc_feature (1)..(291): Xaa is any amino acid
MHSLISTVDSITGIWTAWFPNTIDNRDAQLGQYQTYFHRMNGPVVREPAGYEGWQGHLARVTVKGLTSTTGAEPAFQELADPYWANVAGKGNVPIVSAIFTFKNDAGRIVGLIGINFISAVQTVVDDLVKEVYNGAGMAAIYSDNGTIVAHWDKDRVKDNIKTNAKEKKLFGNDISRLANAILHGGENGGNAVTLEKYSPDLKSNVYFIFEPIPVSGFETTPWSMQLGVPTSEIKKPVNAMISYSVIFAVILLVLAAVITLFVATRIVNRYRRTNLKNIQGSAICHGLGMG

SEQ ID NO: 81188 - protein, 170 aa, Unknown
  Obtained from environmental sample
  DOMAIN (14)...(129): MGS-like domain
  misc_feature (1)..(170): Xaa is any amino acid
MKRRALISVYNKDGILDLAAFLVEAGWEILSTGGTSKYLKENKIPVADLSSVTGFPECLDGRVKTLHPAVHAGILARRDEASHMDTLKSLSIETIDLVCVNLYPFFEKVQDVRLSQDETIEFIDIGGPSMLRSAAKNFRDVIVLTDPARYAGVMDGLKAGSVSPEAESSW

SEQ ID NO: 81189 - protein, 281 aa, Unknown
  Obtained from environmental sample
  DOMAIN (40)...(238): ABC transporter
  misc_feature (1)..(281): Xaa is any amino acid
MPLLTVSGLQKRFNLEAGFFARFGRFVNAINDVSFTIEKNEAYGLVGESGCGKTTTARLLVRMYEPDSGHIYYHHGDERTDIGGLRKEPLRQYRQKARYVFQDPARSLNPRMSVYDVLVSGFRWGGTPDSKLEKKQLREKAAAALEEVGLNAEDLEKRPSEFSGGQRQRISIARGLLPQPELLICDEVVSALDVSIQCQILNLLLDIRERRIVNKLAMSFLFITHDLKVACYFCDRIGRDVFRRTCLKKPPPLVYGAKGSIHNRRCSLPLRLVPANNPKKG

SEQ ID NO: 81190 - protein, 110 aa, Unknown
  Obtained from environmental sample
  misc_feature (1)..(110): Xaa is any amino acid
REIRRSDGREYIGYHFGIEEKIMIRTNYPYFAKHKLEHNDFIRGVYSNVDEFESGKIFVPLQFVYSLRTWVLQHIAVSDKKLGNYLQSMKRNSHLQNLRMTQLVPISFIF

SEQ ID NO: 81191 - protein, 147 aa, Unknown
  Obtained from environmental sample
  misc_feature (1)..(147): Xaa is any amino acid
KGKIRSDQIRHELILLAKYTNSSYISLRTALAFHGIIPETTNNITSVSSLKTSTFKNSLGTFSYKKIKPSLMFGYNAVEKNGFTFFMASPEKAILDLLYLCPSYNFKKEIRNLHLDWNKLTTFAKMFEKQVILEKIDLLKNIYLEDI

SEQ ID NO: 81192 - protein, 178 aa, Unknown
  Obtained from environmental sample
  misc_feature (1)..(178): Xaa is any amino acid
MLEEQDISRVIFRTLDLMNAQAVKEFRLPPDTYIGAGAISCIGEALAARGIRTVFIVIDSLVADLGLAEGMYRSLTQSGIRHREYFQPVGEPHSALVEEEVGRFVESGCEGMIALGGGSAIDAAKAIVALAAHPGLAVSDLLDPAQIPHRRLPADRGAHNGRHRIRSDRHHGHHRHPH

SEQ ID NO: 81193 - protein, 300 aa, Unknown
  Obtained from environmental sample
  misc_feature (1)..(300): Xaa is any amino acid
MLDSSTQPLSDKNPSPQSLIPSPYIMINENALAVYKNKPALVKEISNDKITIAIYGGEKIKVREKDIEIIHPGPVKNFNEIKESGNANLQETWELLLADDGAISLKELAELAFGEYSPASVWAAYCLLLDGLYFTGTIAVIRPRKQGEVEADKKKREEKSAAINERELFLERMRKRSPQQEDRRFIQDIEALALGKSAKSRTMKEIGLGETPEEAHALLLECGFWDAQKHPHPRRFGVSLQPAECKPEPPPHEERLNLTLLAPHAIDSPWNNDPEYPVSIELEEGRAFFPKGGKTLLCSM

SEQ ID NO: 81194 - protein, 205 aa, Unknown
  Obtained from environmental sample
  misc_feature (1)..(205): Xaa is any amino acid
MNEKYEIIIYKSADGLVKIDVRMEGETLWLTQEQMAKLFGRERSVITKHIRNIFSEGELDKKSNVQNMHNANSDKPIKLYNLDVIIAVGYRVKSPHGTQFRQWATRVLHEYLQKGFAINDDQLKNMGGGLYWKELLDRIRDIRASEQVMYRQVLDLYATSLDYNAAMPETVEFFKIVQNKLHYAVSGHTASEIVFDCAHAELPLM

SEQ ID NO: 81195 - protein, 270 aa, Unknown
  Obtained from environmental sample
  misc_feature (1)..(270): Xaa is any amino acid
MIVSVSRRCDIPRYRFKWFMESLDAGFCDVANPFNRNQIKRVSLLPGDTADNVEAFVFWTREPKNILAKTEELEKRGFRFYVMVTITGYPAELEPDAPDTSKVLANMKKLSQNIGQDRVIWRYDPVILTSVTDEDFHLRNFDFLARELADCVRRVIISIYDEYPAANKRLELKEKLGFLPMLDINDSLPRLLAGFANSAQDAGMEIQSCAEQERFSSYGIKGGACIDAAFINKLWGNETGGKDKKQRPPCLCCKSANIRAYRTCGAHCRI

SEQ ID NO: 81196 - protein, 264 aa, Unknown
  Obtained from environmental sample
  DOMAIN (175)...(264): Response regulator receiver domain
  misc_feature (1)..(264): Xaa is any amino acid
MAELNRERITFIFTVQVERGTEIKQKRLLDVNLKNVRILAVDDDNDILTYFRNITLGFGLMCDTATSGKKAIELLEKNGGYHIYFIDWKMPNMDGIELAREIKARSPENSIVIMISAIEWSAIANEAKTAGVDKFLSKPLFPSAIAEVINECLGVENNKVEKSQIPDITGIFEGQRVLLVDDVEINREIVMTLLEPTQLGIYCAENGAQAVKMFKAAPHKYDLILMDIQMPEMDGYEATQRIREMDIPAAQSIPIIAMTANVFP

SEQ ID NO: 81197 - protein, 161 aa, Unknown
  Obtained from environmental sample
  DOMAIN (6)...(161): Elongation factor TS
  misc_feature (1)..(161): Xaa is any amino acid
GFSPRLIARTIRPLGNAGEYLTSYIHGDGAIGVVVKFSADKEGAFSSEEVKAFAFTIALHVAAFNPYALDQTKIDQGWLKEQEEIFRKQTEQDEKMQGKPANVIETILKGKVSKFLKEICLMDQGYVKDEKMTVAQALADAGKRFGFKLSVADYVYFKVGD

SEQ ID NO: 81198 - protein, 116 aa, Unknown
  Obtained from environmental sample
  misc_feature (1)..(116): Xaa is any amino acid
MDIGAIPSHAFPSMGFVISKATDGRMSLPVSPGQLIYSHFKHVSGTPAPEGTQGVHISRLKILDTMIEQLSKMKNQPHADFGNLERIDEQRINAPIDQYQKQITAMPIIGVYAPYA

SEQ ID NO: 81199 - protein, 50 aa, Unknown
  Obtained from environmental sample
  misc_feature (1)..(50): Xaa is any amino acid
MLTAVVGINWGDERKGRMVDLLSGKYDVICRYQGGHHAGHTVVNEQGKFI

SEQ ID NO: 81200 - protein, 257 aa, Unknown
  Obtained from environmental sample
  misc_feature (1)..(257): Xaa is any amino acid
MMREKCCSSPNLTVRSGVANSSLRGSPLDAGERAYAYAKACGIIGKSFVGKRMSALGKLNALTEFGRLVFPEASNELPGRELLVDLERRLLQRTIRHILAVINSYSNPPELLVRQLRSCEYADLKTCLHHITADKPIPNALCDIGKYGTVRFNAYPDLKAMVSGTEFEFILSKDLKAADFDLTSLEAELDLQYYTLLMKSLQCLPVEDRLLAQRILAEEISLRNCVWALRLRTYFEQTTEETRKYLMNLEIPQSPSP

SEQ ID NO: 81201 - protein, 299 aa, Unknown
  Obtained from environmental sample
  DOMAIN (79)...(273): Pectate lyase
  misc_feature (1)..(299): Xaa is any amino acid
LPHDRSGFAFSPASPNKTASGAYNDNGTLKAGAQILYLTAANAKTVELAVKESDKKTTTCVGIGDILAKRQKGYDSTPLAIRIIGLITSADMSGQLNSLSLLDVKGNKKGNIANITVEGVGSDAVCYGWGIHIRSYYNVEVRNLGFMMFPDDGVSLEVDNQNIWVHNNDFFYGKNGGGDKNKGDGSLDSKTSGYSTMSYNHFWDSGKANLLGNGVEPMEYLTYHHNWYDHSDSRHPRVRFHSVHVYNNYYDGVSKYGIGATRNSSIFAEGDYFRNSKNPMLISMQGTDTNKVRTRKTEL

SEQ ID NO: 81202 - protein, 326 aa, Unknown
  Obtained from environmental sample
  DOMAIN (43)...(303): Phage capsid family
  misc_feature (1)..(326): Xaa is any amino acid
FFSGLSARAHWDNPKDVVWGEKGWTASKAALGEPMGNMSPNNEQYLINPIFETEIMSDVAKKSVMMSLVRHRPMIGPSIFLPTRDRGGVQLNWLTAYGQKIEGSKPKGAERVELKAYTLAGYIPWFDEFEEDVYVDLGAMFIDEFIETYGQEFDRQCLLADNDPFTGAMTCADVTEVTIAGDTINDLTWKDFRDAVYKVPAEERKDCSWFINETILNHIANIEDITGRPIWRRPTEAMPGRLDLYPYHEVSILPQITDIGKNEIFAIFMNPKRIQHGNRRGIELKKFDGTTESLEYGEIVLRFRSGTVFWVHVLKGIWVSSRQNQR

SEQ ID NO: 81203 - protein, 101 aa, Unknown
  Obtained from environmental sample
  DOMAIN (19)...(71): Oligopeptide/dipeptide transporter, C-terminal region
  misc_feature (1)..(101): Xaa is any amino acid
GFFRISQTIASCFHKGVLVELAETEKLFANPLHPYTRALLTAVPLPNPTKEKKKTLTVYDPSCHDYSIDNPFWNEIESGHFVYGNKKEMEEYRNLLNSFTP

SEQ ID NO: 81204 - protein, 317 aa, Unknown
  Obtained from environmental sample
  misc_feature (1)..(317): Xaa is any amino acid
VLDVTIDVDADTAARMLQQKYEIHNDYHKTAIEDGLKRLLSPALIREIRGDQSDAADDHGIGVFSENLKNLLLQQPIKGTRVLGIDPGIRTGTKCAFLDDTGKYLASIVIYNHKVEEAKKMLLEGIRLYDIQLIAVGNGTGSREVQEIVTALIADNNLEALYTVVDEDGASVYSASDIAREEFPELDLTIRGAISIGRRLQDPLAELVKIDPKSIGVGLYQHDVNQKKLSDTLDEVVSSVVNNVGVNLNTASASLLEYVSGNHSSLARKMSNTPMKKAYRQQGGTYLRSPHGGPRVLSRGPRFLKNPGKREAFGQHR

SEQ ID NO: 81205 - protein, 271 aa, Unknown
  Obtained from environmental sample
  DOMAIN (13)...(228): Xylose isomerase-like TIM barrel
  misc_feature (1)..(271): Xaa is any amino acid
LRTFWLNISPLPFKLALPKAFIKRFPGAGGDHSPVTPAGIKNIFKERGISIAVLGCYINPVHPDPAIREKHLRRCEEHLCYARDFGCSVVGTETGSCNGDCSFHPDTEKDETLDLLCRSLERLIKTAEKCGSIAAIEAVADQHTVSSIEKMQTVIRRLASPCLKVIYDPVNLIPNAGLGESGIFQTQKDFFEKAFAAFGDEIAAIHAKDFRMGANGKIGTLPAGTGELDYPALLSLLAEHKPGIDILLENSSPDTGKQAIAFLRQLLPHNT

SEQ ID NO: 81206 - protein, 316 aa, Unknown
  Obtained from environmental sample
  misc_feature (1)..(316): Xaa is any amino acid
VRDNVTVTATAASCYTFIGWSGAATGTTNPLTIAVDGNKELIANFQQNQYTLVINTNGGSVTRNPNKETYVCGEQVTLTATPTTSGNSFVGWSGALTSTNPSVTITMDGNKELTANFQADKYTLTTNVSPSGGGSISRSPNQIYYNYGDIVTVTATAASCYMFTGWSSGSTNASVMVTMDGNKELTAYFQQNQYTLTTSVSPSSSYGSVSRSPNQTSYACGTSVTVTATPASAYYVFDGWIGAPSGVSVSSATITFAVNSNVTLTAKFRAQVSKSETLIRDTTFTFNKGSPATVKAYVFGPGEAGAGGSKNYGNLK

SEQ ID NO: 81207 - protein, 294 aa, Unknown
  Obtained from environmental sample
  misc_feature (1)..(294): Xaa is any amino acid
GFPPDYRGGREEDFSAINNIFSLLGHSFEGIHWVRFIDSSGKRLYFSSYSPDIINNEYQSPAYNSYNEPDLPYELIAVENGGAPKHTFDNKSGSILFSFPLYDSFDIYCGTALFSLSIDAILEKLFSEGRIISSHEIILIQKPPGMVFGTMTADEWVMPGQISSVWETTGLKTARVLSNDSGVPYILVSTKTSQDLFIGSLIKEELYLFPWNMKLLLLVSFFITVYLTIFLLFSIKQEPVTIIHNRLKRLQVSLLGQFYETKDEEDWNPLGKGTETSQGRNKRSAKTGYSDPLP

SEQ ID NO: 81208 - protein, 82 aa, Unknown
  Obtained from environmental sample
  misc_feature (1)..(82): Xaa is any amino acid
MHQIRRHLAMIGNAVLGDDKYGDCKLNKKLRKTGVKRLLLHSSRLIIKDEINLNLSAPLPDYFQPFLNNKNNTGGSVIVSVD

SEQ ID NO: 81209 - protein, 284 aa, Unknown
  Obtained from environmental sample
  misc_feature (1)..(284): Xaa is any amino acid
MGAYFLREAKERRIKPIIGAGLANKKEKIKNKKEEGVIYCFVENRAGFGRLCEILTMRNKDKEKCDPLPLLCEQSGGLVLASSDEKVLESLSGRVKRLYAAITPTDIRAVNTGKRLNIPLAFIDNSVFLEHEDYTVHEVLRAISLLKTVGNLEEGDTAERGRIFCNSKEIHRKLIMWPQALKGTEEIASLCGFDNLFDGWIFPAYKTASLSETTAQSVIAQLPQTALPSAADELRRRVYAGNAERYGELGDREIGRIDYELSVIEKMGFLPTFDLGHLIMGGGW

SEQ ID NO: 81210 - protein, 318 aa, Unknown
  Obtained from environmental sample
  misc_feature (1)..(318): Xaa is any amino acid
GAGQRVDHPFDAEPHGGRFFRGFQRGYEKMLGWVLRHRFIVVCVTLALFVASILAMAKVGGESWADSDRGMGTISIKLPVGTNVEETNRLVKTIEDRILAIPETRIVCAMIGRLSDEGAAGMDGDVNEATVFFKLKKFEERSRSTKEVVNEIRTSIPELYDVVIDFASGGMMGASSTPIELKFFGSDLNALKAYADSAKAAMDKMPGLNDVIVSMREGKPELRIIPDRDKTAMMGLTMAEIGNGIKYANLGQVVTRYREAGEEYDVRIRLDEADRSTRDKVTAIPVVSRSGVSRRWELGTSSGTRPLGRSDQCRGEMG

SEQ ID NO: 81211 - protein, 300 aa, Unknown
  Obtained from environmental sample
  misc_feature (1)..(300): Xaa is any amino acid
RGHNAYGEGCRRFQNVRRGYGSGKHNNWSISTDTGINLLEPGDTPNDNAQFLLFLVAVIKAVDEYQDLLRVSVASAANDHRLGANEAPPAIVSMFLGEELTEIIEAIESGKAYKNKEKLDMQIGVSVLPHFPKDTTDRNRTSPFAFTGNKFEFRMLGSSFSIAGPNIVLNTIVAETLREFADSLEKSKNFKGDLAALIKKTISEHKRIVFNGNNYAEEWVVEAQKRGLSNLKTTVDALPEFISKKSVELFTKHHVFTEVELHSRYEILMEAYCKTIHIEALAMVDMVKADIFPGQRKLPK

SEQ ID NO: 81212 - protein, 231 aa, Unknown
  Obtained from environmental sample
  DOMAIN (120)...(230): GGDEF domain
  misc_feature (1)..(231): Xaa is any amino acid
MQPNVYEIISIATERAMEYIKEGFILVDINNNFLLSNPAATEILPGIFLLMKGEPIFSTLGWPDELKNLGKDNVEFSMGGENTRYFRASIGPVYARNKAQVARIILLAEITDSVNLMKELENAAYIDGLTGLYNRKHFFELANADVERAQRLSQTIYTAMLDLDFFKKVNDTYGHSAGDMVLKTTAGVIRQTIRAYDLLCRYGGEEFALSDLDIEAIEALNLVKRIRRILN

SEQ ID NO: 81213 - protein, 299 aa, Unknown
  Obtained from environmental sample
  DOMAIN (153)...(293): DNA gyrase B
  misc_feature (1)..(299): Xaa is any amino acid
MGAGKRIDIEIKDHSAKIRDGGRGIPLGKVVECVSKMNTGGKYDSEAFQKSVGLNGVGTKAVNALSSYFCVVSHRDGKCKKAEFKYGNLIKQYPEKPSSEKNGTEVYFEPDKDIFKNFRFLPAYMEERIWNYAYLNTGLSLNFNGKIYESKNGLFDLLSSQAKDSMRYPIIHCKGKDIEIAFTHGELYGEHYFSFVNGQHTTQGGTHQAAFREGVVKGVRDFFKKDFDGSDIRNYMLAAVSVRIQEPVFESQTKTKLGSTTIAPGGAALRNWMVDFIAKEVDNHLHKTLGRSVIGGGMR

SEQ ID NO: 81214 - protein, 73 aa, Unknown
  Obtained from environmental sample
  misc_feature (1)..(73): Xaa is any amino acid
VRQGILIPVYRHGKTACPLAERLAAYALPIIMVDDGNDAETKALLTECAAKTPGVSLVSLEKNSGKGGAVIGG

SEQ ID NO: 81215 - protein, 217 aa, Unknown
  Obtained from environmental sample
  misc_feature (1)..(217): Xaa is any amino acid
MERNSLEEWFADAAPSKREVPKDVPPELIPEEWKAESKPEAKPEAKPVSKPEAKPKPEPKTEKKPEPKPEPKPEPRPEPRPEPRPEPERALPEIHLLLPGQRERLDGLTAMRQQTVFSWECTGNIIRARFVLSRNPNPLQGDAALEIQNPGYTIRLDRLDEGVWYWNVEAHTPDVFIISAPAAYQLQVMPVLLLAPPENVSPRARQRYGLAEIRDIT

SEQ ID NO: 81216 - protein, 119 aa, Unknown
  Obtained from environmental sample
  DOMAIN (33)...(102): ACT domain
  misc_feature (1)..(119): Xaa is any amino acid
MAERTLFAGLGKQKPQLFRQGGSGEDSKKPMNAIITVVGTDKVGIIAKVSAFLAERNINIEDISQTVLSGNFVMMMMVSLGSCSKALEEIKKELASLGDTLNVSISLMHEKVFSAMHRI

SEQ ID NO: 81217 - protein, 307 aa, Unknown
  Obtained from environmental sample
  DOMAIN (1)...(305): Nitrogenase component 1 type Oxidoreductase
  misc_feature (1)..(307): Xaa is any amino acid
FSPDLRETDVVFGGEKKLAAAIDELMEKASPTPRLIFVFATCIVGVIGDDVDAVCKAAEERHGIRVIPVKAPGFSGTKMHGYRLACDAIMTLVRPHAAAPRRFGVNILGDYNLAGEMWIIKNYMEEIGIPVVSTITGDSSYETLIKAPSASLNIVQCAGSSAYLAERMEAEFGIPYIKVSFFGVEDTSASLRRAADALGKPEISDNARAFAERRTAEVMPIIEKYRPRLEGKRAAIFVGGGFKAISLIRQFDELGMKTVVVGTQTGKKDEYELIGELVGGDAVILDDANPAEWSASCENSADLSWGP

SEQ ID NO: 81218 - protein, 160 aa, Unknown
  Obtained from environmental sample
  DOMAIN (6)...(158): ABC transporter
  misc_feature (1)..(160): Xaa is any amino acid
LQFDAGKVYTIVGKSGAGKSTLLSLLSGLDVATTGRINYGGENLAEMNRNRYRAQKAGIVFQGLNLLTNVTAIDNIVLSMNISGVKGVDKKARAFELLKKVGISPEKANRKILKLSGGEQQRIGIARALAHDPVLIVADEPTGNLDKDLVPLGRSVIGEP

SEQ ID NO: 81219 - protein, 136 aa, Unknown
  Obtained from environmental sample
  misc_feature (1)..(136): Xaa is any amino acid
IQTPGLSASIFWTGPVRVFDKWPTPETLMMGALSGAILETYVIGEILKSYLHSGREPAMWLYRDSNQKEVDVVLEENGTLYPIEIKKTSNPGAESYQGFKELAKLQKKVGLGAILCLKPERIPLSREVVSIPVWEI

SEQ ID NO: 81220 - protein, 282 aa, Unknown
  Obtained from environmental sample
  DOMAIN (236)...(280): Bacterial regulatory helix-turn-helix proteins, AraC family
  misc_feature (1)..(282): Xaa is any amino acid
GYLERYAVGCAINLGDRHREKSSGSGIQKTCREAEELINDVFFYREKKYLSLQDIQDKNSAIGANGSAADWDYDEEVKKICSFIQVIDNKMIQSFFNELKNIFYYSGKTPFTIRQECLELMIDIRSEMIKKFPALKEKLGTGRETLDAIMRERYLGVIIDTMTETCLYISGCLPLLSADSSFQRIISYVKNNYNEDLRLETLGQLFYYNCAYLGKRFKEYTGMNFHTYLDILRIDAAKKMLQDTDMKVYEISASVGYANTDYFYSKFKKHTGESPLVFRRKE

SEQ ID NO: 81221 - protein, 69 aa, Unknown
  Obtained from environmental sample
  misc_feature (1)..(69): Xaa is any amino acid
MKKLFDEVDDFIEDKYGDSYSLHPVRPARGETTNPEADGLFNIGAIFTPGYGSELGRGTSYAAISQKKT

SEQ ID NO: 81222 - protein, 312 aa, Unknown
  Obtained from environmental sample
  DOMAIN (22)...(312): Beta-galactosidase
  misc_feature (1)..(312): Xaa is any amino acid
MKKALRIPPIAAKFPCFLHGGDYNPEQWLKWKDTVWKEDMRLAKLAGVNTLSVGIFAWAALEPSEGEYRFDWLDEIMDMLAENNMAAVLATPSGARPAWMAQKYPEVLRVNAYRQKNLYGERHNHCMSSPVYREKTALINTRLAERYKEHPALAVWHISNEYSGECHCPLCQENFRSYLKKRFGGLDALNEAWWNSFWSHTYTDWSQVESPGPLGEVNVHGLNLEWRRFCTEQIVDFYLNETVPLKKFTPNVPCTTNLMTGVSGVDNFRLARALDVDSWDSYPQWTGTEKDIETGARFRLPRHLGNLYMGEP

SEQ ID NO: 81223 - protein, 87 aa, Unknown
  Obtained from environmental sample
  misc_feature (1)..(87): Xaa is any amino acid
MEITIGHLYPDLLNLYGDRGNIMALARRLEWRSIGADLREYRLHDDIDFSALDIVFLGGGSDREQMLVCSRLRDIPSAFADYVETTA

SEQ ID NO: 81224 - protein, 316 aa, Unknown
  Obtained from environmental sample
  misc_feature (1)..(316): Xaa is any amino acid
SEKRCPKTGNPFGLFYGFAFFNIELLQAAGFDRPPKTRDEFLACVKTISAANKGILADAAGSAMALSPLNKQALSRDIFSWIWAAGGDFWPNGDSAPVINTRQMINDFNFLRSLYREEALSPELSSVPQNQALSPNGFEMTGEQALEGFAQGKIAMLIASTRAIPALREKIDDDVFGITTIPGAGTAGKYSVSLSGIFAGINKNCVYPGAARVFLGFLATKSPLFCAQLKAVPGYVPDLLSGDHKSYIKEDLFYAKAWDIFESSVVVRGFLGIPCAQEYENAVREEIQLFFESNSTAQETVSVIQRRGIDLPITRG

SEQ ID NO: 81225 - protein, 114 aa, Unknown
  Obtained from environmental sample
  DOMAIN (17)...(114): Uncharacterized BCR, COG1699
  misc_feature (1)..(114): Xaa is any amino acid
VKVLTKAYGTVEVNERQKITFPSGLFGFESLKDYVLLDAEQQPFYWLQSLDEDKIAFVLIDPFLFTPDYEMDIDNEELSPDGITDPEEAVIFSIVTLPPGYSPMTAKLQGPLGI

SEQ ID NO: 81226 - protein, 236 aa, Unknown
  Obtained from environmental sample
  misc_feature (1)..(236): Xaa is any amino acid
MTLLAVGSIAFDDLETPAGVRSDLLGGSATYFSLCASNFCPVRLVAVVGEDFGEEQEATYRGRPIDLGGVIRQKGRSFHWKGRYGHDLNEAQTLKTELNVFADFAPKLPDNYKSSPFLFLGNIAPSLQLEVVGQMSPRPKWVALDTMNFWIDGSRGELEKVLKATDILLINEAEAKSLAGEANAVKAADIITSMGPRIVVVKRGEYGALLVAPGLRVPVPAMPMTPHRPAITGGKR

SEQ ID NO: 81227 - protein, 193 aa, Unknown
  Obtained from environmental sample
  misc_feature (1)..(193): Xaa is any amino acid
MTKAVYSPEELILIDERVMINPPADFSANNEAVSNNEEEAETDRQPEEVYTGPTAEDLRREAEEFKAEWEIEKKAMIEAARAEANEIVQLADMAVAKEKQEKTAEAEAALTQAKEEAERLVSEARQLAEKLEADMRATLDDEKNAALNQAREDGRNDGYAEGKAEVDRLIERPMLSLNGRTTSAGRSLYRPKR

SEQ ID NO: 81228 - protein, 330 aa, Unknown
  Obtained from environmental sample
  misc_feature (1)..(330): Xaa is any amino acid
FYKLSSPFPIQSTIVGLYKDGIIDAHCNDVYMDMSGIWELAAEIPDFVITGGYVTGNVDIRGPILDPELFGTARGTSFRFQVPKYIGHDIKPVPFNAVLEGSEIIFGPVAAAVGSGGGTASGWLRFEKWVPENVSIDVTVPRNTPVPYKFNIMGFNAKGDASGRVNILHENRTLEISGSVLANNTELGINFDELMQSRYENEKFAPELPTTVNLTVTTGPVVEFIWPNTSSPILRANPEIGTVMTVYADTLAGQYTINSDISIRSGEMYYFDRNFYIRHGVLVFRENEQQFNPRITARAEIRERTDSGPVTVSMIIDNDSLYSAAVHKPG

SEQ ID NO: 81229 - protein, 337 aa, Unknown
  Obtained from environmental sample
  misc_feature (1)..(337): Xaa is any amino acid
RQAQPRKQEDDFRNPICHAAKSAKDGYKFEGWFDKASAGAKVSSTTKALEKDHTLYAHWSKPKSVSVKVTFEANGGKPSPASKKIDSGSKYDTLPKVAKDGYKFEGWFDKASGGTVVKSTSKAPEKDHTLYARWSKPKSVNVTVTFHRNGKDVTSAAIPKKTAKPNGTVTMPAKPVRPGYTFDSWNTKADGSGKTFNAKTPVKADIEVYAKWKKNVQKTVKVTFDANGGKPSPASRKVNVGSAYGTLPKVTRNVNKFEGWFTAAKSGTEIKVSTKVAEKDHTLYAHWADGRPAPKPIPPKPIPPDAGSNYFFPTKAGVVLTYAHKHPARADLILGGP

SEQ ID NO: 81230 - protein, 179 aa, Unknown
  Obtained from environmental sample
  DOMAIN (19)...(179): FtsJ-like methyltransferase
  misc_feature (1)..(179): Xaa is any amino acid
MADYSKSDHWSQKAQKEGYPARSVYKLKEMDEKFGLLKNARPGFRTLDLGAAPGSWSLYILRKFPFKAEALETGGAEPPTPTPTLVSVDLAPLSRQYDGGLFDRPDFLFLRGDFTSGEIRETVASHGPYNLIVSDAAPFTTGNRSVDTLRSLDLAETALHYAETTLAKGGNLVIKVFQG

SEQ ID NO: 81231 - protein, 324 aa, Unknown
  Obtained from environmental sample
  DOMAIN (196)...(255): KH domain
  misc_feature (1)..(324): Xaa is any amino acid
MVYYPPSAGLTLGWIIRWLYARFQLTASEQFAERIKQDAIKEAEAKKKEILLEAKEQVIRERNQQERETRERRAELQRYERRVVGKEEAIDKKTAQIEKTEQLFAEKEKSFQAREDALSKEEQRYRAELERISGLSSEEAKALIIKDLENDAKHDAQSLINKIEQEANLGAEKKARDILVTTIQRLATEVTGDVTVTTVTLPNDEMKGRIIGREGRNIRTLETLTGADIIIDDTPEAVVISCFDPVRREIANIALERLILDGRIHPARIEEIVVKVSKDISQNILKRANKFLLTWVFTHKAGRCPSAWQALFPHELRAERAFTF

SEQ ID NO: 81232 - protein, 73 aa, Unknown
  Obtained from environmental sample
  misc_feature (1)..(73): Xaa is any amino acid
MIRSAEPARPVVKASIVLARGFSPSDELVRELQNHVKRVTAPYKYPRIVEFLPELPKTISGKIRRNVIRQDKP

SEQ ID NO: 81233 - protein, 66 aa, Unknown
  Obtained from environmental sample
  misc_feature (1)..(66): Xaa is any amino acid
MANLLLKGNDKVTVMVGIFQFTQQRCDTNWGIVTAGTVLAAIPVVILFCASQKYIVDGVMMGALKE

SEQ ID NO: 81234 - protein, 72 aa, Unknown
  Obtained from environmental sample
  misc_feature (1)..(72): Xaa is any amino acid
MRDIQDFDSIMIRLASPEMIKSWSYGEVKKPETINYRTLRPEKEGLFCEKIFGTTKECECSCGKSSRSGTGE

SEQ ID NO: 81235 - protein, 158 aa, Unknown
  Obtained from environmental sample
  misc_feature (1)..(158): Xaa is any amino acid
LILCAQGVMSTIPTTFNRDFPSYTVIGGREVFNSTGLSVVLLNRGGRYARRGLFHDLEKTGFDTVVSVEPEPAHYDLDELSARFPFVRFVIPHTRISLGEQINLAVSELDSPLFFVLWNDLQMITGRSAHRMPERLTLLIERNGNGNGKSKFMRACTV

SEQ ID NO: 81236 - protein, 297 aa, Unknown
  Obtained from environmental sample
  DOMAIN (91)...(207): Histidine kinase-, DNA gyrase B-, and HSP90-like ATPase
  misc_feature (1)..(297): Xaa is any amino acid
MTAIAKNSNELERKNYCLEKVESASNHLLGVINDILDMSKIEEDKFELSYTEFELSAMIQKVVNIFEFRLEEKKQKFTVNLDPALPKKIKSDDLRLSQVITNLLGNAVKFTPEGGDITLSVRRLNQEQDFCTLEIIINDTGIGISKEQQDKLFDSFVQVDSGIARKFGGTGLGLAISKKIVELMHGDIKMESEIGKGASFIITILVEIVNDETQKAEVPGAPAEDAHEDENEGAQDDEQEPDYNGKRILLVEDVEINREIVITVLEPLGLEITEAEDGQKAYDLFAPIPILASRYPG

SEQ ID NO: 81237 - protein, 102 aa, Unknown
  Obtained from environmental sample
  misc_feature (1)..(102): Xaa is any amino acid
MKLERVQRVISAALGELPIQEKGATFKPAGTKRETKAGEVPENTGYTESQTFAELKLKLNATGTLGIEELSKLGEDTLTIFTTGRQAVHDATRSAESVIAGP

SEQ ID NO: 81238 - protein, 85 aa, Unknown
  Obtained from environmental sample
  misc_feature (1)..(85): Xaa is any amino acid
MYVRMFDALKRLEGDNPTVGIILCAEKDEIIAKYSVLSEGKRLFAAKYKTILPTEQELSAYLAEKNRPSAGDRKRARPSSGGENP

SEQ ID NO: 81239 - protein, 206 aa, Unknown
  Obtained from environmental sample
  DOMAIN (6)...(205): Beta-ketoacyl synthase, N-terminal domain
  misc_feature (1)..(206): Xaa is any amino acid
VSNDKKRVVITGGSIVSALGSEWPDILAKLKAGKNCVRRMDEWDRYTRMNTRLAVPVDFTMPDYPRKKIRGLGRVAQLALVSADRALAHAGINADDPELRNGRHGVAYGSSIGSMDSLMDFYSMLVKDDVSKMSATTYIKAMPQTCAANIGVFFGLTGRIITTNTACTSSSQAIGFAYETIREGIQDIILAGGADEYSCRSDPWGD

SEQ ID NO: 81240 - protein, 71 aa, Unknown
  Obtained from environmental sample
  misc_feature (1)..(71): Xaa is any amino acid
MPQNELTDINEQIQAAAGIIRRGGVVAFPTETVYGLGANALTPRLWRVSLRLSGGPILIPRADLIMGGGNG

SEQ ID NO: 81241 - protein, 313 aa, Unknown
  Obtained from environmental sample
  misc_feature (1)..(313): Xaa is any amino acid
MSRLINLLVEGAPAEETAALAGKILNKTIPIPKGYERRTGEDMEAEQSSFPYIFMHTFLPMLARFMAIAIVVFCVGYLSWQYIYNPIKAEKIYKLGIERIEAGEYTRANERFSEAYRIHPKKPWFYTYARAFRDSRQYTLAEEKYKELLYFTASKNKRGIPEKAAVLEYADMETNYIGDYQTAENIIWRNILDYFPNDKEGLLALGDNNLIWGEYEKERLEDAREAYARLIELYGRTDPLLERMLKYFIRTDDLGQVLSLQNYFMASEKRKISSATLARMGGYFLDKRLGKVRGVPNEYLDYIGGIREILLKA

SEQ ID NO: 81242 - protein, 301 aa, Unknown
  Obtained from environmental sample
  DOMAIN (1)...(215): Lyase
  misc_feature (1)..(301): Xaa is any amino acid
MTGRPAGSLGAPALTFWTTGLSYRMAGVTREVVLPLLKKLELLLCDFTEREAETPQVGRTHGQHAVPITLGFAIAEYVSRLGKSILEIEQRSKELKGKLAGAVGAYNATSMIVQNPEELERLYLAELGLEPSEHSTQLVEPEYLLRLLLEFNTAFGIIANLADDLRNLQRSEIGEVREGFAADQVGSSTMPQKRNPWNSEHVKSLWKAFMPRVNTFFMDQISEHQRDLSNSASQRFIADYIAGFCLAISRMMGVIHGLGANRERLLSICAAAVSLPVAAAAAYWRNPRIYCWPKAACLTLT

SEQ ID NO: 81243 - protein, 320 aa, Unknown
  Obtained from environmental sample
  misc_feature (1)..(320): Xaa is any amino acid
MDRILCPLKPGRGPVRGHSRFLIWNNRNDIDLHVLTPRGEEIYYARKQDSTGGMLDVDMNVRGETTKPVENVFWGPDRAPQGRYQVVVQNYKFHESDKAPTPFRVEVKNGKNYSYFDGIVSGEGKSSNVELTSFEYKGASALKQEKALIYELAESYRQMGITTTTIGVGVGFDLEFMRTLAEEGGGSSRFISDREEMKKLFDTEFERMVALVATDLDMSLEFAGGIEILETWGYQNQIEGNRISFKLPGLHLGDYETILVRYRMQGDTQGQAGGEKELARFRVSAKDLLGRPLPPVERTVGVVLSESSSDGISPHSSITG

SEQ ID NO: 81244 - protein, 75 aa, Unknown
  Obtained from environmental sample
  misc_feature (1)..(75): Xaa is any amino acid
MKFTDGYWGITKGVEPHFAASAIEAEQKENELTVYAPGRQIHHRTDTLNMQLNTVRYSALCVNVSGLRFPILKEE

SEQ ID NO: 81245 - protein, 155 aa, Unknown
  Obtained from environmental sample
  DOMAIN (95)...(154): Beta-galactosidase C-terminal domain
  misc_feature (1)..(155): Xaa is any amino acid
FSGLWRVTTDFSDGPLAGTWKADLLCDIIHPENAQTIARYADDFYAGTPAVCRNSYGEGYVWYFGARPEAALVDRFTETICGECGIKPVFPRQEGIEAARRIKGAMEFVFVLNHNKSEADIVIPFACRDLLTDKNFSADSHYTLQAAGVLILCKS

SEQ ID NO: 81246 - protein, 320 aa, Unknown
  Obtained from environmental sample
  DOMAIN (113)...(226): Response regulator receiver domain
  misc_feature (1)..(320): Xaa is any amino acid
GGSSDITNGRDDEKIAPYSPLSIPRFNQEVNRSVEGTGLGMNITWRLVRMMNGMISVESQPGKGTKFTVRLPQQRASSNVLGKELTEKLRNFRISSSAQMKRAKITREYMPYGKVLIVDDVYSNLYVAKGLMSPYGLSIDTATSGAEAIGKVKAGELYDIIFMDHMMPKMDGVEATKIIRDLGYKNPIVVLTANAITGQAKYFLENGFDEFISKPIDIRQLNTILNNLIRNKQTPEVIAEANRQKNDLDSEQRSSLSKPDSVLQTVFLLDVKQSLPILEETLERIDVASEGDLRFVTINVHAMKSALANIGEVSAFKRAL

SEQ ID NO: 81247 - protein, 68 aa, Unknown
  Obtained from environmental sample
  misc_feature (1)..(68): Xaa is any amino acid
MMAEGDDVGQFVKKIGIEGKINHKNIIIPGYAASISGDMEEELSGWKVHIGPREAAHLPKFLKEFKKA

SEQ ID NO: 81248 - protein, 238 aa, Unknown
  Obtained from environmental sample
  DOMAIN (12)...(209): Pterin binding enzyme
  misc_feature (1)..(238): Xaa is any amino acid
MAEKYMVTLAENLNVINKGVGAGFKDKDPKPVRAMVENIIKSEPDWVDINLGPARKNGEELMPWVVNIVQEVTDLPVVLDTSNIAAIEAGLKVCKKPALINSIMCRPERYNAMLPLVKKYNADYVALMWGPNGMARDANERAELTTELLMAAQALEIPVERAWIDPIITPVNIQQEQLMQNLHFFEIVPHIVDAPQPGGATKSTNACQHLHGTPSTGGHPEQVYLSCSAQSMSAASGT

SEQ ID NO: 81249 - protein, 47 aa, Unknown
  Obtained from environmental sample
  misc_feature (1)..(47): Xaa is any amino acid
MTDSAEWDIAEAFYRNPWLYPRIARYNNIRNPNLIISGRTIRIPPRN

SEQ ID NO: 81250 - protein, 90 aa, Unknown
  Obtained from environmental sample
  DOMAIN (1)...(89): Na+-transporting methylmalonyl-CoA/oxaloacetate decarboxylase, beta subunit
  misc_feature (1)..(90): Xaa is any amino acid
LLGYRSWLFRSPAAGVLVAKGMNLFLKEKINPLIGSAGVSAVPMAARVSNKVGLEYDPSNFLLMHAMGPNVAGVIGTAIAAGVMIAVYAN

SEQ ID NO: 81251 - protein, 245 aa, Unknown
  Obtained from environmental sample
  DOMAIN (1)...(245): tRNA synthetases class I (E and Q), catalytic domain
  misc_feature (1)..(245): Xaa is any amino acid
MIRDRYAPSPTGLQHVGGIRTALFNYLFARSKGGTFILRLEDTDRTRSDEIYVQNLYDTFSWLGLRWDEGPDIGGPYAPYTQSSRSDLYKKYADELISRGQAYYCFCSAERIEKVRKEREQAHSAGSGEVASGYDRHCRDIPPQEAAARVAAGETHTIRLKIPLGETTRFNDYLLGEIEWKNDDVNPDPVLLKSDGFPTYHLANIVDDHLMEISHVMRAQEVARVHALTRNHIQELPLGNACCLP

SEQ ID NO: 81252 - protein, 321 aa, Unknown
  Obtained from environmental sample
  DOMAIN (40)...(105): His Kinase A (phosphoacceptor) domain
  misc_feature (1)..(321): Xaa is any amino acid
ATIIPIKDAKTGGVTGVILTMHDETGVHEAVLSAERSNKAKTNLLAKISHEIRTPMNAIAGMAELILREHTSGLVREHALSIRQASANLMAIINDILDFSKIESGKLEIVESEYQFASLINDVISIIRMRVIDKQIFFTTNIDCDIPGRLIGDEIRMRQILLNLLSNAFKYCERGFISIHASCDETADGAVTMVFDISDSGVGIKPEDHARLFSDFVQLDKISHKEVEGTGLGLVITKSLCEAMGGSIDVYSVYGEGSTFTVRIPQKFVTYERFAKVEDPSNKNVLIYETRQPYSSSIICSIDNLGVGAPRRNLSVGGENR

SEQ ID NO: 81253 - protein, 68 aa, Unknown
  Obtained from environmental sample
  misc_feature (1)..(68): Xaa is any amino acid
MSDFTCPQCKTTAPAADFERQLWVCGKCGYHSRIGWQDRLRITVDEGSFNEFDSGMISADSVMGKDNG

SEQ ID NO: 81254 - protein, 282 aa, Unknown
  Obtained from environmental sample
  DOMAIN (1)...(102): DnaB-like helicase N terminal domain
  misc_feature (1)..(282): Xaa is any amino acid
MTDNNIGPVLLGAVIANADSGEVLPDGIHKSFFESARDKTIFEAVTDLTRENKPPNLALLKDHLTRTGKLKDAGGVSYLSELTSLPGAYASLIPHYADTLIKQAREKEIHRAILEAAEMVKTAPALLDVNGLINKLAVKETESASFKLTRIGKIKIKPPEWAARHFLEKDSFCSIYGDSGAGKSFLAIELAACIATGTPFYGLPVKQGPVFYIAGEGNAGISRRLLAWSIMRGVSLETAQLYLSSGAVSLIEPVAMGSVNMVIEKLIRRIGNPALVTWTRGA

SEQ ID NO: 81255 - protein, 292 aa, Unknown
  Obtained from environmental sample
  DOMAIN (100)...(292): ATPase family associated with various cellular activities (AAA)
  misc_feature (1)..(292): Xaa is any amino acid
LGLGRWKNRDCKKARETRGVPPFIKVEATKYTEVGYVGRDVESMVRDLMASGFQMVKQEMQEAFIAEADKRAEEILLDLLLPGTGKKSKPKKTAPAPVVRPMGSFTFGPENGQGAGLIGTAIQVGIPSFMNQNAQEDKTEADEADKPEDPQSADGAGDLSMTREKFRAMLRDGKLEDRTVELMVNQNPQFPPFEMMGVSMEDVESSLSGFANFFGGGKKKKVVTIARAREIIKAEELEKLIDRDRVSDEARQRVEETGIIFIDEIDKIAVKGERSGGADVSRERVQRDILPI

SEQ ID NO: 81256 - protein, 122 aa, Unknown
  Obtained from environmental sample
  DOMAIN (58)...(122): KH domain
  misc_feature (1)..(122): Xaa is any amino acid
MIRSAEGDETTLIRRRRFRIAEIIREQAINRLRQELPHSLYVDIADMEFKEEKLWVRAFIIVERESQKGMVVGKGGEMIKAIRLASLKELKKIFDWKIDLDLRVKTGKDWRHNDHTLKKIID

SEQ ID NO: 81257 - protein, 333 aa, Unknown
  Obtained from environmental sample
  DOMAIN (54)...(327): tRNA synthetases class I (C) catalytic domain
  misc_feature (1)..(333): Xaa is any amino acid
EGGADAVLRDAALAEFEPTLIGEIVSGTGEGANGVLTMKRELYLYNTAAAGKELFVPANDPVAIYCCGRTVYNYAHIGNLRTYVFEDVLKRALKWCGYGVRHVVNITDVGHLTSDADDGDDKMESGAAREGKSVWDIAAFYTERFMADIASLNVLQPDLWPKATEHIPQMIALVKSLEEKGFTYRTGDGIYFDTAKFPSYCDFARIDPSSLRAGERVEMGEKRGATDFALWKFSPTGGKRQMEWQSPWGVGFPGWHIECSAMSLAHLPQPLDIHCGGMDHIRVHHTNEIAQTEAATGKKCARYWMHGEFLVLDKGKMAKSGGIVTRNHPGGKP

SEQ ID NO: 81258 - protein, 156 aa, Unknown
  Obtained from environmental sample
  DOMAIN (6)...(128): NusB family
  misc_feature (1)..(156): Xaa is any amino acid
MNPQGLSPRIAALHALLNWKKGGDFVQNNLQKTCENLPAHNRALAYEIALGTCRLLTELDEMLKTLTRELPKEPCRTILEISLYQLLHTRIPPYAVVSSAVNLAKYMRLNGHTAKFVNAVLRSAEKKIMWFLTAKSKTSTQWIRVNKQKMNILKKS

SEQ ID NO: 81259 - protein, 107 aa, Unknown
  Obtained from environmental sample
  DOMAIN (2)...(107): 5-keto 4-deoxyuronate isomerase
  misc_feature (1)..(107): Xaa is any amino acid
NPISRHLAGYDVLEEGSVWNTMPCHTHERRMEVYLYFDIKPGAVVFHMHGQPDETRHIVMNNEQAVISPSWSIHCGAGTAAYTFIWAMAGENQTFDDMDTVQAPDLK

SEQ ID NO: 81260 - protein, 166 aa, Unknown
  Obtained from environmental sample
  DOMAIN (47)...(166): ABC transporter
  misc_feature (1)..(166): Xaa is any amino acid
MMPQNSNQPFLSVRSVSNIYTSRPLGIIGKKEKKPVLNNVSFEIGRGEIFGLVGESGCGKTTLAKCILGLIDYEGEIFINGRKREARPSFAEKRRSAFEVQAVFQNPSSSLNPVKTIGWILKEPLRAQRMGSETERENRVDEILDLVGLDSSYKKRRGLVPILILG

SEQ ID NO: 81261 - protein, 321 aa, Unknown
  Obtained from environmental sample
  misc_feature (1)..(321): Xaa is any amino acid
VQQTGSCVGMCPRPRGRPKPFAFAPVQQDGTALQFVPKAKKTEVVRHAGVQQDGRAPDYVPKAQRSEAVPFASSGAWEHLSDAQKLESKWIIAVENLVALRDVPEAMKTAAVCLAAVQQYGNALEFVPETLKTEALCLAAVQQNGTALQFVPEALKTETFYLTAVKQDGWALQYVPEALKTEVLCLVAVQNGRYDTALRFVPEAQKTESVCLAAVKKNGYALEYVPEAKKTGVLYLTAVQQAGGSLKFVPEAQKTEAICLAAVQQDGWALEYVPEAKKTEVLCFAAVQNGRYDTALRFVPEAQKTEVLCLPRKSSRYPEGA

SEQ ID NO: 81262 - protein, 63 aa, Unknown
  Obtained from environmental sample
  DOMAIN (1)...(63): 3-Oxoacyl-[acyl-carrier-protein (ACP)] synthase III C terminal
  misc_feature (1)..(63): Xaa is any amino acid
AKTLNFPAEKVVITIQKFGNTSSASIPLALEEAWEDGRIKEGSRVLFVGLGGGFTVGSAVCVI

SEQ ID NO: 81263 - protein, 208 aa, Unknown
  Obtained from environmental sample
  misc_feature (1)..(208): Xaa is any amino acid
LRPIFKELLNLGGIYEKATRGNRFFGHRKSYILVKGQNVLIDSDVASIYGVLTREVNQAVKNNPEKFPSGYIVEADRDELVKIFDRFKNLKHSTAQPKAFTEKGLYMLATILRSPQATAATIAVIEAFTKLRELSHTIAKLADANEKPEQQSLMQKSGDIFSELVAADMPVSGTETTLEINFAVMKFRHTVKREKKKETVQGAKKPSK

SEQ ID NO: 81264 - protein, 63 aa, Unknown
  Obtained from environmental sample
  misc_feature (1)..(63): Xaa is any amino acid
KDLVELPDDLSYADGAQVAAGFATVYEAINKIGVCGTDNVLFVGLGPVGLATLMLVKPWALKS

SEQ ID NO: 81265 - protein, 152 aa, Unknown
  Obtained from environmental sample
  DOMAIN (15)...(148): Glucosamine-6-phosphate isomerases/6-phosphogluconolactonase
  misc_feature (1)..(152): Xaa is any amino acid
MRIVIHKTHEEASRWAASYIANRINGYGATADKPFVLGLPTGSSPLLIYKEFIRLNREGKLSFANVHTFNMDEYAGLPSDHPQSYHYFMMENLFKHIDIDPANIHLLDGMAKDPVEKCLLYEEASQKGRHRTVPGSMGSDGHIAFTNRAPLC

SEQ ID NO: 81266 - protein, 294 aa, Unknown
  Obtained from environmental sample
  misc_feature (1)..(294): Xaa is any amino acid
MRKRSEDTSFFTIIPIPVLRDESLNPNAKLLYAEITGLTKQEGYCWAQNQYFAKLFKTSERSIVRWLGELQAGGHISVQYRYFPNSKKIAKRLIYCTFSAKKPAAPLPDGEEKLHIYAENCIPPGPLEDLVVTRVSPLDGLVVTGMSPPSGETGVVDNNINSNRSSSSDPLEIDETEKGLSGEEEGFENLDNYAENRISENPPEESSPLADPLPEVSREKAFDVPSLKRLLRGLDPSFVFSGPFYQNALGFLASNGLDGGYVSWLFEFCVKQRPRSVSNYFYRVFRPAAIIRVY

SEQ ID NO: 81267 - protein, 319 aa, Unknown
  Obtained from environmental sample
  misc_feature (1)..(319): Xaa is any amino acid
VYDTDTDHYQLNRNVRKFFDSHGAWFDPSILFFSLLLVIGVITGVISGYVIRKVPEPPREKDIKKFNLVNLFKDTLAQDDLKHFIFILFLVVLVSGVTRAFVVVYAREVFGHNDGLLSLYSVFGSLGYLMAGISVKFLVDRIGAKPLYLVCVILGLVSIVPVIFFPAAAVENMAGAILFLAFLFFMLNFGFLGSEGIAQTYFLALVPQEKILDLGIIYFFIFGVAGAVGSFLSGIFLDFLVMLGVSTFVSFKVLFIIMFVLVLIALAMQKKMKPLGSLPLKGALEVIFSMRDLRAINLLDKLNKAEDSQQDSADLINGF

SEQ ID NO: 81268 - protein, 320 aa, Unknown
  Obtained from environmental sample
  misc_feature (1)..(320): Xaa is any amino acid
VRVQDNIAKPKTVTDVKLSVNILDSELISPIFHYQVTVEYIIKDLLSKHLIDNIDRIIEQIKDNRIDQGLEELSDSEIIFNKLGKIETVTDDEIDDPKAKRYNVLAKRVFEKIADLRAEIDPESYDALNIRENIKKIIDLENIRNRGFNTAINSLTAILDTSRMGYQYIENLKNGREVALREYEDTDIANLPDERYSIKLRYFDNAQLIEDRKAYDVMIKSFETEIQHLWDVLEVIYQDKKSAFAITDFEDLAKKQSQEFARQLKKNPANPCTKISHRYGTKFPFIKLRKPKLKNPPHLYLGKDRTSHRIILMRQKMKGM

SEQ ID NO: 81269 - protein, 337 aa, Unknown
  Obtained from environmental sample
  misc_feature (1)..(337): Xaa is any amino acid
FFPGLWADGFFSETETPGAVLALDEALAIGLFIERAAELTNWLIKDRGDKEQETRGRRMLLAMIGGEALPGLEPAAAEIFKVIDREGSLRDLPSLRAIKKRISSLEKELKTAVLRYTAQDEYKRMLQSPLPSQRDGRTVLAVKANFRARISGIVHEVSSSGQTVFIEPLDVVEKNNDILLEKRNLDAEVQKILRELTEKINAYAENLKTLHTTVVELECLRARAKYSIVTKGHFAKDGNGEQEALILKKARHPMLKKAVPINIEMKNSTRTLIITGPNTGGKTVALKTLGLLAMMNHSALALPLEERASFLSLTNYTPTSATSSLSISLFLLFPRTS

SEQ ID NO: 81270 - protein, 308 aa, Unknown
  Obtained from environmental sample
  DOMAIN (122)...(224): PAS fold
  misc_feature (1)..(308): Xaa is any amino acid
MEIIAHPEPSVVGRQLRNVRSNIASYEDELIMNGYVYEVITTDYRGIKSIVFLERLENGWYMGVVTPRNKYYKSTRSVALFLTAMGAVLATALIVILLAIFNEINKENEKSMSMAHWYNSILNAIPLPITVTDADTKWTFINTAVEKFLGITFEEAIGKPCNNWGINICNTPDCGIVCAKRGLKQTYFSEGDSSYQVDVAILKDKKDETMGYIEIVQDITNLKLITKKQADAEAANAAKSAFLAKVSHEIRTPMNAILGITEIQLRKGNLPTDIKDALDRIYNSGYMLLGIINDILDCPKRSTSPPQP

SEQ ID NO: 81271 - protein, 302 aa, Unknown
  Obtained from environmental sample
  DOMAIN (2)...(80): Biotin/lipoate A/B protein ligase family
  misc_feature (1)..(302): Xaa is any amino acid
DIHVPDAFLAENGIEVHQIDRGGQVTYHGPGQIVAYPICNVRGQSVSKWVNGLEQAMIETAKGFGVHAERLDGHPGIWVETARGWEKLGAIGLHLKKWVSTHGLAFNLAPRMEHYQWITACGIADKGVCSLRTLLGDACPSWLEASASLERHLLEALALEPLPTTEPPRSVSITIWRRGAKGLEILMLPCHPHDDQWQSGVTDMVEPGETVDAAARETVEETGLHGRLVNLDFSHTRCLGPAPVLGHEPFFNTEACFHLEVLPDAAVRLDKAERVRWCPLEEAMSLMAHEGDRESIRLLMLH

SEQ ID NO: 81272 - protein, 213 aa, Unknown
  Obtained from environmental sample
  DOMAIN (22)...(213): Cellulase (glycosyl hydrolase family 5)
  misc_feature (1)..(213): Xaa is any amino acid
MSGKTAFEYFRDEKLLIGWNIGNSLDAYINGRANETGWGNPRINQELLNGVKKAGFDLVRIPVTWMGYIGPARDHHIDETYLARVAEVAQMAHKAGLKAIINLHHDGSTESVGKENGWLSINKARASKEGYNEVTHKFARVWKQIATYFKNHGDWLIFEIMNEIHDGNWRERSVQGTHTDILNDWNRYFTEVVRGTRGNTRPVCGDPAYATKT

SEQ ID NO: 81273 - protein, 310 aa, Unknown
  Obtained from environmental sample
  DOMAIN (117)...(310): Methyl-accepting chemotaxis protein (MCP) signaling domain
  misc_feature (1)..(310): Xaa is any amino acid
PGYGEISGHPNPIVRVTESLKEISEGEGDLTRRLDFNSKDEIGDLSKYFNNTLGAIGTLIKRIKYKVDALTNTGHELSENMGKTSHSVDEISTNFAGMKIKMSKQEENATEAEKAVEAIKSSIENLNEMIESQSESINTSSSAVEQMTANIHSVSRTLMENSKNVDELTEASENGKTGLQTVAEKIQEIAKDSEGLLEINSVMDNIAAQTNLLSMNAAIEAAHAGESGKGFAVVAGEIRKLAESSSNQSKTTATMLKKIKTSIDSITASSNEVLSRFGVIDEKVKTVSSHEENIRNAMEEQEVGGKQILE

SEQ ID NO: 81274 - protein, 271 aa, Unknown
  Obtained from environmental sample
  DOMAIN (1)...(224): Penicillin binding protein transpeptidase domain
  misc_feature (1)..(271): Xaa is any amino acid
MDNGLSPATVILDQPITLVTPEGEWRPENYDRKFLGPMSIRDALAKSNNLVAIQVFTRIGGQVVVDYAAQMGIKQKLSPVPSLAIGSCEVIPMEIISAYSAFPNRGIRAEPYFINKITDKSGRVLEKTAVKEHQVISPATAFLMTSMLGSVVCCGTAASIPGLGFRRPAGGKTGTTNEYSDAWFVGFTPQITTGVWTGVDERRSMGHGVTGSAAAVPVWVDAMKELHKDLPKARFSRPMGIKALMICSQSFGLPRVRAPTKGRVLQYETMV

SEQ ID NO: 81275 - protein, 300 aa, Unknown
  Obtained from environmental sample
  DOMAIN (28)...(300): AMP-binding enzyme
  misc_feature (1)..(300): Xaa is any amino acid
MLRARANETPDINIQYYKGKDGKFRSVTYRQFYENVCFISAGLLELGVKRGDKIGLIADNRREWMLSDFGVLSIGAIDVPRGCDITTQELIYILGFTGCEAAFAENQKQVEKILSCKAELPVLKTLITFDPVDNQTEAAAKDAGINVLFFANLVAMGEKREKMRSGEVEAEMDKGDSEDIASIIFTSGTTGEPKGVMLRHRNFLYQLPHFILFFEVKPGDIWISMLPVWHVYERLMEYVIFNYSNGIAYSKAISSILMEDFKAIRPHWMVSVPRVWEAIMDGINRNIKQKASADLIMRLS

SEQ ID NO: 81276 - protein, 230 aa, Unknown
  Obtained from environmental sample
  DOMAIN (1)...(230): IPP transferase
  misc_feature (1)..(230): Xaa is any amino acid
MNIGTAKPSAEERERLPHHLIDIRDPCEQFNVGDFVRLADEACVEIASRGKFAVVSGGTGFYLKNFILGLSEAPPSNKSIREQLRRELIEKGAASLMEELASCDNISANRIHVNDEYRLLRALEVFRSCGKSLSSFEVNTAKNRPNFHFLIIGLSRPREELYRRINLRCAEMFQQGLADEVTSLFQSGYTPERSGFAGYRLQKNFLSRLRKTAILTQTNAPSGRFSKDIE

SEQ ID NO: 81277 - protein, 233 aa, Unknown
  Obtained from environmental sample
  DOMAIN (1)...(227): Queuine tRNA-ribosyltransferase
  misc_feature (1)..(233): Xaa is any amino acid
MQLDVCTSWGVSRKEAENGLLTTLLWMERGKKAWELQQASGYMGQFFPIVQGNFYKDLRAESSKRVIEMEPPGIAIGGLSVGESEEIFFEYLAFTASLLPKNLPRYVMGIGTPEYILFAIENGIDMFDCVFPTRNGRNGNVLTHRGSFALKKAENCFDFMPIDEECGCKVCRTYSRAYLRHLFKAREILCSILASYHNLYFINELVINARKAIRERRFLEFKKDFLSKVYPQG

SEQ ID NO: 81278 - protein, 159 aa, Unknown
  Obtained from environmental sample
  misc_feature (1)..(159): Xaa is any amino acid
ILISDDGNFLFENILKNDELAAFIPFPETTRWEEQLHNNTTAFIESIKNFVRGAVKITGMDEYRHEKKSLGKCPLCHSGDVYEGNNNYYCGNYKAEPPCIFVIWKKICQASVTHADVQALLAGKQTKVKKCVSPKTGKEFNAKFELVAGKVEFRFDEKK

SEQ ID NO: 81279 - protein, 102 aa, Unknown
  Obtained from environmental sample
  misc_feature (1)..(102): Xaa is any amino acid
MKNNPKRVKELERVIQKYQKSYYGGEAEISDGEFDLLWDELKALAPNSPVILGIGDSADNVDGFPKAKHLIPMGSQEKAANPQEFTGWARKHPMPKFLTQYK

SEQ ID NO: 81280 - protein, 300 aa, Unknown
  Obtained from environmental sample
  misc_feature (1)..(300): Xaa is any amino acid
MATAELSARQGGTMLGYMGIGIMYADKKEAIPVVQNLANLEYDLTQAIMKVKRASMPKIGILKSQTADFIPPEIGARMNMGDDRTEKRFAPIFENFKRDYDVVTVDLSEGKPIDKEIRTLIIPGGDRYTDRTLFEIDQYFMNGGNLIALANAVNVSFQYGPQGTVRETKLLELLEYYGVRVERNVIMDASCGQVQVPRNLGMFTINELLPYPYFVRITQSGLDRDNPVTSSQSELMLGWASSLTLAPDTSGKHKTTTVTLASSSEQSWEVKENFDLTPKPNYTLPPKEAMARRAMGMYVS

SEQ ID NO: 81281 - protein, 292 aa, Unknown
  Obtained from environmental sample
  DOMAIN (1)...(76): CTP synthase N-terminus
  misc_feature (1)..(292): Xaa is any amino acid
MGISPNVIIARADEPLSGGIKEKISLFGNVKIDCVIENITIQSLYEAPLMLHQNGLDKVVCRELGLDVPEPDLGEWQKMVHKIAERQQEVKISIVGKYIQLHDAYLSIIESLNHAGFEIGARINISWIDSAEVTAETAGELLGGTDGMIIPGGFGDRGIEGKINACRFARENNIPYLGICLGMQIAVIEFARNVCGLERAHSSEFDETSPYRVIDIMPDQTGLLGSGGTMRLGAYPCMIAKGTLLSSLYDTDKISERHRHRFEFNNEYLETLTSRGIVSQELPLLGGICTCP

SEQ ID NO: 81282 - protein, 272 aa, Unknown
  Obtained from environmental sample
  DOMAIN (1)...(241): HMGL-like
  misc_feature (1)..(272): Xaa is any amino acid
VQRVYKALAAAGVDYMEAGYKNSDQLFSREEYGPWKFCDDDLLWKMKEGVENGPKISVMADIGRADMSKIKPRSESPYDMVRVACYARDIDKCIAMVNEFHDLGYETTINIMAASRDNGPELDEALDQAEKEANTEVVYIVDSFGYFYQENIDKLAKRYKKWIKTKKLGFHGHNNQQLAFSNTIQAIINHVDYLDCSIYGMGRGAGNCPTELLLSFLKNPKFDVRPVLDSIANDFMPLQKEQKLEWGYIIPQMITGFHSLQRRNTLGSVMVV

SEQ ID NO: 81283 - protein, 199 aa, Unknown
  Obtained from environmental sample
  DOMAIN (134)...(198): KH domain
  misc_feature (1)..(199): Xaa is any amino acid
APPGFEEDEISALLAPLAERTVIAVNKTDAPGADFKRAQEYIELRFRSVKDRCFEVSANTGQGIDALLNALFTLAPEGDALYGDEYYTDQETGFRITEIIREQAINRLRQELPHSLYVDIADMEFKDEKLWVRAFIVVERESQKGMVVGKGGEMIKAIRLASLKNLKQIFDWKIDLDLRVKTGKDWRHNDNTLKKIISS

SEQ ID NO: 81284 - protein, 57 aa, Unknown
  Obtained from environmental sample
  misc_feature (1)..(57): Xaa is any amino acid
LNADKMAAAKKDMMILHLLPRVNEIDLELDADPRAMYFKQAKYGMYVRMALLSSVLA

SEQ ID NO: 81285 - protein, 217 aa, Unknown
  Obtained from environmental sample
  misc_feature (1)..(217): Xaa is any amino acid
MAALFAAAAPSNKREPLLKELRLRMIMSDILFLLFLGLLIVALAGPRWGLRIVADYRRGLDVVLAFDVSRSMNVRDCPPNEFYKQGNASRLERGIGISRELLGYLEDVRFGTAISKGMGILAVPLTFDSDMVMNFLYVLDSQAVTGRGTNLESLLDAAIGAFQESIPSCKGIILFTDGENLSGSFQRAVNKARKAGISLCAVGLGSDSGGPVPRAEC

SEQ ID NO: 81286 - protein, 146 aa, Unknown
  Obtained from environmental sample
  misc_feature (1)..(146): Xaa is any amino acid
VFPRLIARAETAEGAVAGIHCCGNTEWSILIDAGVDIVNFDAFEYGDTIAIYSDSVKSHLDRGGVLAWGVVPTSEKIREQTVESLEKKLEEGIDRLASKGIDRNLILQQAMITPSCGTGSLAVDAAEKVFSLMLDLTKRMKEKYKF

SEQ ID NO: 81287 - protein, 229 aa, Unknown
  Obtained from environmental sample
  DOMAIN (148)...(221): Ribosomal protein S5, C-terminal domain
  misc_feature (1)..(229): Xaa is any amino acid
RFSPGIIAGIESCSAAVSAGDDVAAEDQTTAGTEGSEIEAAPARRSYGRGGRDGEGRRGRGRDRDRGEPVEKEFIEKLVKLNRTAKVVKGGRRFSFSALTVIGDRKGNVGYGFGKANDVSEAIRKSIDKAKRNMVKLPVIKGTIPHEVTGYFKASQVLLKPARSGTGIIAGGPVRAIMEAGGVTDILSKSIGAASQYNVVKATFDCISRMMDAKTIAKNRGKSLNELWG

SEQ ID NO: 81288 - protein, 307 aa, Unknown
  Obtained from environmental sample
  DOMAIN (57)...(306): Glycosyl hydrolase family 9
  misc_feature (1)..(307): Xaa is any amino acid
VSDKTVVYSGTASEAVSDSASQDTVRIADFSNFTEAGEYTVCSGALHSFPFAIGDNPYADLRAAALEMFHYQKCGVDLECGLWSHPACHITPAVIYGTEKKKDVSGGWHDAGDYGRYIVPAAKTIADLLWAYKLAANPDQRILDIVWFEIEWMLKMQDEESGGVYHKVSCEKFDALDEMPQDEKSGLFLSPISATATADFAASMALASRFYPDKKETLLKAAQYAWNWCLARPDAVGFTNPPGISTGAYGDDDSRDERFWAACALLPRQGMKPSRLYKTCGLYAENAALIFVPLRPGLGYVQPTTGK

SEQ ID NO: 81289 - protein, 309 aa, Unknown
  Obtained from environmental sample
  DOMAIN (8)...(232): Glycosyl hydrolase family 3 N terminal domain
  misc_feature (1)..(309): Xaa is any amino acid
MVNGFTEESLKTRLKIPVVYGLDAVHGHNNAKGATILPHNIALGAIAAGDQMKGAQAAYTAGKITAEEMLATGVRWTFAPVLGVAQDPRWGRTYESYSENVVLVSALGEYFIKGLQENGAAACMKHFLGEGQTVDGHNQGNALLDRTGIEQILPPYRAAIREGAMSLMPSFSSVNGIKMHQNKELLTDLLKGEMGYKGFIVSDWSAFKQLTGGSYRMQIANAINAGVDMYMAADNRDHWMSFITNLTKLVEDGIVPMSRIDDAVIRILRLQQNLKLFDNPMIKQAGEIGTNENRAAARELVSKSLPLCA

SEQ ID NO: 81290 - protein, 234 aa, Unknown
  Obtained from environmental sample
  DOMAIN (65)...(231): Mechanosensitive ion channel
  misc_feature (1)..(234): Xaa is any amino acid
VNLDFNLARFWGDYGKSILEIGQKIIKLLLIVAGGKIAISIFTKLTHKTTTGKLKVDENLASVLRMAFRYGVVIVCLLMILDTLGINTNGLIALLGAAGVAVGFSLRDTLGNIATGIIILFLKPFQRGDFIECGSVSGSVREMGLFATTLETADGIFISAPNSSLWGVPLKNYSRNPIRRIDISVSIAYSDSIDEAFRLLNEIYKEEHRFLKDRPVKLWFSPLEIQHRHHPEGM

SEQ ID NO: 81291 - protein, 110 aa, Unknown
  Obtained from environmental sample
  misc_feature (1)..(110): Xaa is any amino acid
MAAALELDAQGFSCAIIEREDHLGGILMQCIHNGFGLHEFSEELTGPEFAERFIERVTKSKIAVYLDTTVTRFTSAGNFVKELYCVSPLSAMRNHSPRRNSRDGLPRAQQ

SEQ ID NO: 81292 - protein, 315 aa, Unknown
  Obtained from environmental sample
  DOMAIN (89)...(254): Sigma-54 interaction domain
  misc_feature (1)..(315): Xaa is any amino acid
LPLWPRDGSEGISEFIVPRENAGEAAILTQKGARFTAAESLREAVNALFIREEQGLLPESFDALSDESCSSANTGDAFGISPEGDFSEVRGQAVYKRALEIAAAGGHNVLVFGPPGAGKTMLARRLTSIMAPLTPDEAVEVTRLYSLAGPFFNNGDSYAQIFIDRLITNAPFRAPHHSASAEGILGGGRNPRPGEISLAHFGVLFLDEAPEFRINVLQALREPLEDRVISISRAEGPVRLPAEFQMLMAANACPCGRLGIQETDNACCCSPEEINRYWRKFSGALLDRVEIRVAVLPPKVGEMNAALSANLINGK

SEQ ID NO: 81293 - protein, 156 aa, Unknown
  Obtained from environmental sample
  misc_feature (1)..(156): Xaa is any amino acid
MLYRLLQLIKKELQVLLGEKRSTAMLIVPVILQTLVFPFAANMEVRGNTVAILNEDSGSQSIEIAQRISKAAAFIHVMSVHSQKELQDAITKQRALVAVHFPQDFSRTLLSQPNTQKPTQVQIILDGRRSNSGQIGSSYVSQIISGYMAEKSANSP

SEQ ID NO: 81294 - protein, 333 aa, Unknown
  Obtained from environmental sample
  DOMAIN (120)...(263): GAF domain
  misc_feature (1)..(333): Xaa is any amino acid
MGQTKSNYLEHFHECSPEYQSDGRNSEKKAIEVIKRAINGEKQVFDWVHRSSLGELIPFEVTLERMMNNGKYVVIAFQYDLRNIKKMEKNIREQGEQLKIRLEQQVLISELSRGFISSGDSQALVKEAVAKLGRYHKVSLVFVFAIDYERKDTRLAYHWCADGASLRTAIANLYDYLVDIFPGTLPDCATLPIVVCDDTAVNSDAVFQALYAINVMAVIGAPLYVDGRLWGVICVEQNYTARKWTQNEKEFVAMTASTIAGVIMRDIYTIKLKDALHKAMEASKAKSEFLSNMSHEMRTPLNAITGMTTIGKTRRKGTQRLRADSCQFCTWGT

SEQ ID NO: 81295 - protein, 192 aa, Unknown
  Obtained from environmental sample
  DOMAIN (88)...(183): Peptidase family M23
  misc_feature (1)..(192): Xaa is any amino acid
MIRSAEAYLRRLATVADIKEGVSPSQLSAAAAAPAVSRPDLSTAQQGAERADGQVARTGGASEFAASVPNIMPATGWITKLFSTDKAEAHLGVDIAATNGTPIRATAVGVVEDVRNDKYYGMTVEVRHENGYLTRYGHCSQILASIGDRVNRGQTIALVGNTGRSTAPHVHYEIMKYGKNVDPMDFIGAHKQ

SEQ ID NO: 81296 - protein, 112 aa, Unknown
  Obtained from environmental sample
  misc_feature (1)..(112): Xaa is any amino acid
MTSSHEFNELPVTLTEKVSLAKSDKHVLNALLLDYMPFIKKYVASSFFKSQSRADNLTDATLAFAHSVQTYNPEQGAFIQYAATVIRNRLFDSVRKELSARKRFSFCDNREK

SEQ ID NO: 81297 - protein, 314 aa, Unknown
  Obtained from environmental sample
  DOMAIN (111)...(289): Phosphoribulokinase / Uridine kinase family
  misc_feature (1)..(314): Xaa is any amino acid
MDIYIQPLLEFTGQLVSFELMPYQDGFLLRFPGIGKGKEIAPFVDEPDLFQVYSEYKKWGRMVGVRVVGELNSKIADRTFLDYIRISEAHQARELSKIAEKIYSKHDKIKMILIAGPSSSGKTTSAKRLSIELMVLGLNPIAVSLDDYYRGTAATPKDENGEPDYECLEALDVPYLNEQLQAMYRGDEITLPVYDFKSGERKAEGGKKIKLDSRNILIVEGIHGLNDALTYSIDRGTKFKIYISALTQLNLDDHNRIPTSDKQAFAPHGARFPIQANAGGGHHKNVAQSARRRAQVHFPLQDTADGTFYFALDT

SEQ ID NO: 81298 - protein, 162 aa, Unknown
  Obtained from environmental sample
  DOMAIN (1)...(155): YicC-like family, N-terminal region
  misc_feature (1)..(162): Xaa is any amino acid
MKSMTCYAYKKESKDNVTVSVEIKGYNSRFLDLSVNLPFWLSSLEPSIRAYLNSRFSRGKLEVGIRVKEENAPLSVSINETAATNYKNAIDRLAKTLGLQQEAGLSLVLSLEGVLETETDRDAEKYRCFIESVLAAASDQAGAERGREGRHTMEEYLPMSPF

SEQ ID NO: 81299 - protein, 344 aa, Unknown
  Obtained from environmental sample
  misc_feature (1)..(344): Xaa is any amino acid
AEKRKALEASYSSQRDREARLDFLRYAVEEITAAAPGSGELRELENEPQKLSDFEKLAGHVNSAADCLYDGEESVLGLARRARGSLDSAAAIDTSLAALQRRLEDMYYEAEDIAGEFRSYRDGLSYDPRRQETVDERLALLYKLKRKYGETENAHPEDAAHPEDAIIAYRTTAETEIETLSGAEENREKLKAEIAALEKEISARAAALRQKRIAAAADLGQKVSGILKRLGMPNARFSPSVTAKAKEDGTQGFVCGPWGAEDVEFLISANSGEPLKDLSRVASGGELSRVMLAIKSVLSSGDSIETLVFDEIDTGIGGEVALAVGEYRKKSENLGQSVLGGETK

SEQ ID NO: 81300 - protein, 341 aa, Unknown
  Obtained from environmental sample
  DOMAIN (262)...(331): HAMP domain
  misc_feature (1)..(341): Xaa is any amino acid
GENTSSDRRAAEKLRNAVNMRALSGQLMYTMNAMNSQQAASLQAAADFFFAQNPRAAAFTYTLKGAQQTAERNVLVNKDYFLSRDIDRSLAETFFNDNENFLLRASQGETALLNAAPVFSMPVLALFFPYRMAGGQNGAGCVLITSEKLVDSFGSGTNQSFLINDKCDLLIHSDSVLLLNGVNVADFDFIREIQASGERNKQQLINAYFNFEPPLEPNSSKTSPVPRYYSAFTKLAYGGCIVITGIEYDRVFEGINATTRRNIYLTAAVLFISVMFIWFFSKTISIPLKTLALAARNIEGGQFKQQFEIKGRDEIGLLGASFHKMSGALHSRPICHRGGNA

SEQ ID NO: 81301 - protein, 174 aa, Unknown
  Obtained from environmental sample
  DOMAIN (4)...(67): 2Fe-2S iron-sulfur cluster binding domain
  misc_feature (1)..(174): Xaa is any amino acid
MPDVTFSPDNKTVEIPEDTFLLEGARLAGVFIETPCGGKGTCQKCRAKITVDGITSNVLICQTKVGDKPVTVELPKIAGIGIGQFEGFEDPSKYLPETGEAFLKKVKLQIPLPALLDGLSDADRFSKTFIKTVNCKYIDIPLAVLAALTEKLREAGGENTGLYFVEKHICKACG

SEQ ID NO: 81302 - protein, 179 aa, Unknown
  Obtained from environmental sample
  DOMAIN (37)...(155): CobB/CobQ-like glutamine amidotransferase domain
  misc_feature (1)..(179): Xaa is any amino acid
VIGVIDYGAGNLGSVINALKRLSVPARFVAGPQELSPSSSPFEKIIFPGDGHFATAMVSINKSGYSQAIKEWIKADKPFLGICIGLQLLFDSSEEAPGAQGLSIIPGTVRRFPGRKVPQIGWNQTSTRKESKIFRGLTDNSFFYYIHSYYADPSDDSVSAAQTQYYVRYCCAIGRGALA

SEQ ID NO: 81303 - protein, 63 aa, Unknown
  Obtained from environmental sample
  misc_feature (1)..(63): Xaa is any amino acid
VFFGISQTHLEVIKQNPKISAADLSSVVGISKRKVEENLAKLRELGKLQRIGGTRGHWEMPNV

SEQ ID NO: 81304 - protein, 208 aa, Unknown
  Obtained from environmental sample
  DOMAIN (1)...(208): Penicillin binding protein transpeptidase domain
  misc_feature (1)..(208): Xaa is any amino acid
VYFYQLGLRLGDARINKYAKMFSLGSITGIDLPGEKAGYLSGEKAYNERFASRNWRWTQGLVMDLAIGQQQVLTPLQLALMVGGMGNGKAVYKPRLMSEERNKDGILVYQNPPVVRNKVEASQYALDVTREALAAVVRPGGTGWRAGVPGIPVRGKTGSAQNPHSDLSHAMFIAVAPVDDPVIAVAVAIENPPRRRPVAAPVAGALLN

SEQ ID NO: 81305 - protein, 294 aa, Unknown
  Obtained from environmental sample
  misc_feature (1)..(294): Xaa is any amino acid
MTQPSWGISVHMNGAGGSRVLSWDYDKKTFFAGAISEQYREYMRYWHKLYAEGLLDPEMAEPINGDVWTRKLATGNAIATYAYYDQIGGVAAASSISGFKLQMYPPLAGPGGAHHQQKNRTGSGIIFPIGVSKRSDFEQVIRAVDKMFFSNEAALLWCIGVEGETYTMQGNTIKYADSILNAPDGIYKSMQLRYGCGADPTQLVWVNAREMTKYDAHYAEINKQVASMNSAIQAIPPTPRFTDATAEQATSLMGTFVHTFIVWDDAFMTGAKSLDSDWNAYVAEMTFKGINDLL

SEQ ID NO: 81306 - protein, 341 aa, Unknown
  Obtained from environmental sample
  misc_feature (1)..(341): Xaa is any amino acid
MPSAVLCGYYIVEDWFGNGQQGANNLGNNCQTHGNITVDGKTYQVVTCIRPQGSGCVSCNNQAFGQVFSIRQGMANNNDKCGTISIKKHFEEWTKMTTEKSGQSPAKYIYDKTYESKFLAEAAGGTGWFDASYMKFSRTGACSGGVPDGNFTLDITVTGEGTVTADPKSSSYAPNASVKLTATPKNSSWKFDSWGGGATGTTSPVTITITKNTTVTAKFVLIADDTTNLVQDGKFSKGSGSSLSSDWGWKTGKDWGNSDGTAAVSGGKVKLSITTAGSNKWEPQLIQQGINLEKGVKYRLTFHASAGAARTMDVGLQQSVDPWASYLKKRCCIDTADQSLI

SEQ ID NO: 81307 - protein, 324 aa, Unknown
  Obtained from environmental sample
  misc_feature (1)..(324): Xaa is any amino acid
MRRQKTYIIFPHSENNLFTTSAYILTEYNNGGRLKAELGLRIDHFFLYNKEFSLSGDPALNPRLIIDFNILKNFGFLESLDLSGGTGLFSSIDNNIFAAEKKYNIQKIKPSRSWTSVLGIKFQFPESLSLNIEGYYKYIFNRMYIPVTLDINDMDINPRFDGEGIVWGVDIMLQKAQSRFWDGWLSYSFSWAKYRDPEGKINAIGVSGGNFGSEWYFPSYHRFHSLNLIINIKPIKYINIYIRFGLASGMPSSRRVGKNPESYPVLMYDDDPHFIERIYWSSSNYTFSSDASNRTPLAFSLDINFPFLEGRKNERRDMRCILPL

SEQ ID NO: 81308 - protein, 87 aa, Unknown
  Obtained from environmental sample
  misc_feature (1)..(87): Xaa is any amino acid
KKGIMAEAERLVHGLVFDEQLTHDDEATIVVQVNGKIRDKFTAATGTAKAELEKTALALPGALKWTEGHTITKVITVPDKLVNIVIR

SEQ ID NO: 81309 - protein, 228 aa, Unknown
  Obtained from environmental sample
  misc_feature (1)..(228): Xaa is any amino acid
DFTRNNIKLNAKGFPELNSSLESSIPNVYIAGDCKQGAATVVRAIADAKAAAADILQKLKLEADFSTKPSCAVVADISDLYCKKGVISELKPDNTDAYRCLSCNSLCEVCVDVCPNRANVMVELEDSGRHQVIHIDRMCNECGNCAIFCPHAGKPYKDKFTIFCCEEDFAESENSGLLKIGADTFRIRLEDKSTLTYRRGEKTIPKQWIALIDVILSKYEYLLNWELP

SEQ ID NO: 81310 - protein, 108 aa, Unknown
  Obtained from environmental sample
  misc_feature (1)..(108): Xaa is any amino acid
MIRVMVFILISVLFLAFIIVNLENKCDVSFGFTTIKDFPVFLSVLSSFVLGMVVTVPMMLLRKKKPETETEQKPETKPKSSIFGSFKKAEIKSVPDEIKKEDSPYGID

SEQ ID NO: 81311 - protein, 278 aa, Unknown
  Obtained from environmental sample
  misc_feature (1)..(278): Xaa is any amino acid
MEMEFPFDAKSGMTFNFTGDDDVWVFIDNKLVLDIGGIHSEESASFQLSNVLPSSEMGRRHTLRVFYAERHSTGSNILIQTNIVAPPAGVGISTKDNTGTGGMVGTTINKSADTTITLYSVVRNEDGTVRQPNTEYDCNNVTWTVNGTVIGTGCSIQIRDSVARAEGVKIEVTYRDPDAGELKGSTNMNVRALPPVAVHIQRDSLPKPATTPPANRSDNIYFGVGEEEVRIYAVLRDKYGNFAGYADVKNRQSGDNNNWWATEAARWVSVDTAVATVD

SEQ ID NO: 81312 - protein, 53 aa, Unknown
  Obtained from environmental sample
  misc_feature (1)..(53): Xaa is any amino acid
MATPSAEYAQRMEDVLEVYTRPYDETHPVVCLDETNRQLIRKRGSLAHPTGSR

SEQ ID NO: 81313 - protein, 288 aa, Unknown
  Obtained from environmental sample
  misc_feature (1)..(288): Xaa is any amino acid
MAFYYCRSLNSVTFASKIDNIESDAFDGLGDLKAKYFAVNGGIGTYTTTNPGQDAVWTKQGGSGGNASDFTYTEENGAITITGYTGAGGRVTIPAQINGKPVTGIGYTAFSYKTSITSVTIPDSVTSIGQNAFASCTNLASVTIGNIVTTIGSFAFDGCTSLASVTIPNSVTSIGQDAFHRCNSLTSVKFEGTIAADNFGSYTFGDYIIFISPFDGDLRAKYLAGGIGTYTRPNGNSDTWTKQGSSSGGGGGGGEGGTFTLTGIPSQYNGKYAILMASAYSANLYLGD

SEQ ID NO: 81314 - protein, 317 aa, Unknown
  Obtained from environmental sample
  misc_feature (1)..(317): Xaa is any amino acid
MRQHGLKNQPNGLVYAGKVAYIYKGTMPANTSITLLVGTKGISEAAFWSCENLASIAIPNSVTNIGERAFWSCRSLTSITIPNSVTTIGNRAFSACTSLIEINVNTANTAYSSENGILYNKDKTVLISYPAKKSGNSFIIPNSVAKIEDNAFWFCTNLTNVTIGNSVTSIGEWALNSCSNLTSVTIGNNVTSIGSHAFEYCTSLTGVTIPNSVTSIGHFAFDGCTNLVSVKFEGSIASDNFISSSFRGDLRDKYLANGIGTYTTTAPVSFSSVWTKQGSSSGGGDGGFTLTGIPSQYNGKYALFLGDSKTGDLLWEL

SEQ ID NO: 81315 - protein, 117 aa, Unknown
  Obtained from environmental sample
  misc_feature (1)..(117): Xaa is any amino acid
LFPGRWPRSKREVGFPGWVDPLSGEIIKADNEGRPLGRKGEEIPLGGRIVAIADVYDALCSKRVYKEPWGEDDVLKEMRKLSGTKFDPELIEIFFEILPNIKQTQNHFPDLPDTQGS

SEQ ID NO: 81316 - protein, 130 aa, Unknown
  Obtained from environmental sample
  DOMAIN (7)...(126): Protein of unknown function (DUF1667)
  misc_feature (1)..(130): Xaa is any amino acid
LNSALSREVLCGTWTCIVCPIGGSLNVNENSSGNFSVTGNRCLRGELYAKEEIRAPKRTVTATCQIDKDASPVKRIPVKTASPCPREKIPALLDDIYKLKITLPVKAGDVLINDWKGEGINVVATRTLDL

SEQ ID NO: 81317 - protein, 103 aa, Unknown
  Obtained from environmental sample
  DOMAIN (2)...(95): Protein of unknown function, DUF583
  misc_feature (1)..(103): Xaa is any amino acid
MDKSGKGLLNIIGTGSVFEGTINVPHSIRIDGAFKGRIQTAESITVGETGVVESEIRAHNAFVFGKVLGNMYIDERVELHTHCGGRGRLARPRSWSLTRARSI

SEQ ID NO: 81318 - protein, 340 aa, Unknown
  Obtained from environmental sample
  misc_feature (1)..(340): Xaa is any amino acid
NPPPGFDGRGLDIIDGYRAKKDELEAERFDNGWRFISEKRTDGKFDLRIDNVKTGEKVPIVGNKRVKLLLSNMGAISTEYMGAAVRSQGVNGEALPVATAKTIQIARAHASGKECVPSHLVLGSALEFFFSKKYRKDELYLLFVPITTGPCRTGQYYVFYENLFRDLRLENVVVFILSADNSYTELGGSFAREMWKGLVLSDYLKDIQCALKACAVDPKKAQAEFEHSWRRIMHAVEHNPKYLWKELKHVANDVKKIPLKRKVADRPRVLVVGEIYVRRDDFAVGELTDLMSERGIVVKVAGISEWIHYLDFVREYALKKLNKLQKPGKGYFPNSGKTLR

SEQ ID NO: 81319 - protein, 71 aa, Unknown
  Obtained from environmental sample
  DOMAIN (1)...(70): dTDP-4-dehydrorhamnose 3,5-epimerase
  misc_feature (1)..(71): Xaa is any amino acid
MLFIPRGFAHGFCTLEEGTEVVYKVDNVYSPEHDAGIIWNDQTIGVNWPLNGAMPILSDKDKALNQLNQNL

SEQ ID NO: 81320 - protein, 291 aa, Unknown
  Obtained from environmental sample
  misc_feature (1)..(291): Xaa is any amino acid
MSVNTIAPYGQNDGVLWQGRGFNALLKGGVRFEGYGIELTLMPHFAFSQNADFEIMSSHYESEYGYFWGYGEPKSNSGGADAPQRFGNKPFFDWDFGDSEIRYTWKTLTIGFGTQAIWLGPSYLNSMLHSNNAPAYPKFDIGLRRQKIILPWLGWYIGDMEARLWVGQLKESNYFDNDNSNNYTMIHGFSFAYAPSFLSGLTLFVNRICLVPWEWENLKFMFPSGAHTIEDQKVSFGFSWAFPQVGFELYGEMGIDDEVYGDGAYIRHPFHTTVYTGGLKKISISNLKKNI

SEQ ID NO: 81321 - protein, 319 aa, Unknown
  Obtained from environmental sample
  DOMAIN (64)...(178): Response regulator receiver domain
  misc_feature (1)..(319): Xaa is any amino acid
MGGSIGVKSEYEKGSVFTAEIIQGISDDKPIGIGDETAEALRNFRYAPEGKDKIITPVWLGPQVQVLVVDDLPANLLVAQGLLAPYGLKVDTVASGREAVELAKSHSYGLIFMDHMMPEMDGIEAAAAIRKMEGYAHTPIVALTANALRGMRELYLEKGFDDYISKPIGQEALDAIINKWINEQITNNSEQLSESLGQNAKPSDDNPLFIANRSLLIEIDARRLDKLNHYRAAFEMSKTSGGLEIDAEYYRRFAALVGSFDNLPDDLQADKELLIEAGQKEDAQRILKTLPAFCESPGDHAPEGKAEQLVPNSCSLPET

SEQ ID NO: 81322 - protein, 329 aa, Unknown
  Obtained from environmental sample
  DOMAIN (130)...(325): 7TM diverse intracellular signalling
  misc_feature (1)..(329): Xaa is any amino acid
FSPHYRERGMRGGFTIVFVLEMDSTAMAYINGTVSVIPGIYFAGIGEGWEVFFNGKLILSELHLSETGRIRERRTWNDVSFPVDSSFIVSGTNILAVRIMGDPTYRGTGLYYTSAPIYMDNYRNIETSRFDYLYIFLCGFFAFTGIYYLMLFFSVKKKSEIFYLYFGTFSLLICVYIVSLQRLINSLVSNSDISKRLEFGSLMLAIPMFGMFFEALGRGGITKTSRGYAAFSSFLCLTQALFCRQYGEEAIIIWNVMTMVYVTYLLAYEVIYFHFLNKQRNKKQSRESVPIDSILVGMAICYLCGAFDFIHIRFSKTQLPFFVQRVRGL

SEQ ID NO: 81323 - protein, 192 aa, Unknown
  Obtained from environmental sample
  DOMAIN (4)...(190): Uncharacterized protein family UPF0007
  misc_feature (1)..(192): Xaa is any amino acid
MTSIDAVIVGAGAGTRLGLSVPKAFVDLCGKPIVYYSLITFVNHPSVDRTILVVPPVMMDEALSVINTYGDLADKVQIAAGGAERWESVRNGCAVAKGEWVLVHDAARPFVSDMVIDSVLEKRNDFDCVITATPVADTIRTIGEGGRCGATVDRSTLMRVGTPQLFRRERLMPAFELIKEMPSANLSWGENG

SEQ ID NO: 81324 - protein, 85 aa, Unknown
  Obtained from environmental sample
  misc_feature (1)..(85): Xaa is any amino acid
MPEATAAVAERLVPGIAEAMRAGSMAITKRAMLSRAIAAIRKSTLIINLPGSPKAARENLEFILPALRHGLDILSCREGECGEKR

SEQ ID NO: 81325 - protein, 268 aa, Unknown
  Obtained from environmental sample
  misc_feature (1)..(268): Xaa is any amino acid
LPKAGFGKRTPLWITRQRSRRLFDAARGEEGFPVTAEAWRSCLVDLFDMEGFRELLGAINDNTVALSFFYSSIPSPFSRDMVRQETNTLMYEYDERKDIQGSGATLSDKVIQEALGDASLRPVIKLELANSFSARLRREEPGWAPDDELSLYEWVKERIAIPLDEWEILRSSLPGIDFNDRLVMVKRNDAAIPSMVHREWEEAWRQEPLPLLGLWLRYEGPIVLPRIAEVFGLSVAAVEDAVNALARTEEVVCDVRLEGVHPRLFATA

SEQ ID NO: 81326 - protein, 167 aa, Unknown
  Obtained from environmental sample
  misc_feature (1)..(167): Xaa is any amino acid
GITPDIADRAGYQTGGRLLRAKDYLCNERFMLTYGDGVSDVNISELVKNHDNNGKTVTLTAVQPAGRFGSIKIADGGKVESFKEKPVGDGAWINGGFFVMEPGVFDYLADGDATILERKPLEHLAEAGQLYAYKHKGFWRPMDTLRDKNELNDMWIKGTAPWALWLK

SEQ ID NO: 81327 - protein, 292 aa, Unknown
  Obtained from environmental sample
  misc_feature (1)..(292): Xaa is any amino acid
MIWQLGRGIISNASVRLPPEDENDKAIGPYIQHTAQIDPGNSGGPLLVQVRGVPTGYAVAGINTLSLRRRQAANYSIPVTRVRTFLDASLKPPVADQRPILEERVNEFIKGLSANKAVYPHIASFLSNTCVGENAEFALSETLDKASKTTLDSIFVSGDIISIMTSSVAWSIENSLRSRSGAISATLDSIDPGEDGLYNVSLNVNGNKADSVWINEYGIWRIRKFGNIASGEKNRMEKKKQERVEAERLRSSPKLMVSAGLANPFDLGPAFGVDLTVQFGQYVGFGGKGIFR

SEQ ID NO: 81328 - protein, 300 aa, Unknown
  Obtained from environmental sample
  misc_feature (1)..(300): Xaa is any amino acid
VGDEKQSVYLFRGADVSVFRKLKSDLGSSDLPLKTNYRSAPVLIGAFNSIFGGYRFDPEGKAPAALESAPIAKGERSPAVFAPPDGLPPFEASFSPLHASKKNGGKLTLCILDRQDSPENDLSGDLEGEESECLPPVENEARYVAWRIGELLKEKNETGESKYRPGDIAILFRAHSPQQLFEKHLMLLNIPYACEDLNGFFYGGPVDDLMSVLRLAAYPKDSAAYAQMLRSPFAGLSMQGLAFCAGMAAGTVPFSDEPLSLLSEDDRIKYTHGKRIYQKILDIAQKESISPLDSAIKPKK

SEQ ID NO: 81329 - protein, 307 aa, Unknown
  Obtained from environmental sample
  misc_feature (1)..(307): Xaa is any amino acid
MFTPEKMGLNMFRVMILPHNTDIDKTMKDLIANEIYPKYDRSDFYERVKIVNKYGGYVLASPWSPPAEWKSNNSVIGGGSFLKKENYADFANYLRRYCEIMYENGAPIYAVSLQNEFSYQATWDGCFYTPQENRDFWKAPGTGRFTQGVPGYGGGKEIPSVMIMGGESHNEIDVQNLALQDPVSRECIDIVGRHIYGNNRNPSPYPLATNPKFYTDPSDPKYDAKEVWMTENDQHSDASGFENDSTWSYVWEFMNTVDLTVRLNNESGFIWWLIKRFYSMMGEGDYGTTNGVISAAGPRLCQSVLGK

SEQ ID NO: 81330 - protein, 72 aa, Unknown
  Obtained from environmental sample
  misc_feature (1)..(72): Xaa is any amino acid
VPVPVIASGGAGTLEQIADVLLSTANPEAGSDHGAETPGADAALIASLLHFGITTIGEIKKTAETKGVCVRW

SEQ ID NO: 81331 - protein, 303 aa, Unknown
  Obtained from environmental sample
  DOMAIN (2)...(302): DNA gyrase/topoisomerase IV, subunit A
  misc_feature (1)..(303): Xaa is any amino acid
MESIFDHGSSGIAVGMATNMAPHNLVEICDTICAHIDNPEISIEELMRFVQGPDFPTGGVIFGRRGIREAYKTGRGKLLVRGKFNIETTKQGKEKIIFTEIPYNVNKALLLERIGQLTRDKVIDGISNANDESDREGIRIVIELKKGAMVKVVLNQLFSNTQLQNSFSIINLALVGGKPQCLNLKELVHYFIEHRVDVVTRRTRYDLRKAEERAHILEGLVIALANIDEVVAVIKASRDVATARLKLQERFSLSEAQSEAIVEMRLGRLTSLEIEKIQQELERIKVQIAYLKSLVADEKNYGE

SEQ ID NO: 81332 - protein, 186 aa, Unknown
  Obtained from environmental sample
  misc_feature (1)..(186): Xaa is any amino acid
MNNIEVYDSGVYLIGGTQIVKDDGASQPELKGVSKDEGRKGTIAYGILAAHDSEQCEQENLRLKFDSLTSHDITYVGIIQTARASGMEKFPVPLVMTNCHNSLCAVGGTINQDDHVFALSAAKKYGGIYVPPHLAVIHTYNREMMAGCGKMILGSDSHTRYGALGTLAVGEGGGELASSLSVGLMI

SEQ ID NO: 81333 - protein, 82 aa, Unknown
  Obtained from environmental sample
  misc_feature (1)..(82): Xaa is any amino acid
MTEAKKNMDFFNNLSEILDHCRNYREPVIVSNNGEGRFAVMTEETYEELIGKSRNELYYALQMGLDQINNGEFITGKEFFEF

SEQ ID NO: 81334 - protein, 82 aa, Unknown
  Obtained from environmental sample
  misc_feature (1)..(82): Xaa is any amino acid
LIPLGTAASRGDQILNAESFEKSGYCKVLSQDGLTGAILAESVKRFFDEDKDGCIDAMKRAVSVKAVDKVLDVIKQLTDKDV

SEQ ID NO: 81335 - protein, 103 aa, Unknown
  Obtained from environmental sample
  misc_feature (1)..(103): Xaa is any amino acid
MDFTISTEEQKILLGDARESIASKLEGRQPRYSQEAAKSKVLQEPCGAFVTLHKLDKAGDPEGRSLRGCIGRMTASLPLLETVHVMAREAAFGDSCRFCHRKP

SEQ ID NO: 81336 - protein, 308 aa, Unknown
  Obtained from environmental sample
  misc_feature (1)..(308): Xaa is any amino acid
MDGLAHRYEKEDLASKELPYDAIDLPDMEAPPFEQPSRDAAPPDDSGLDLSEGTSADDAADGEGAGDFDFNAFINSVPADTPPPPDEAAGEINFDDILGNTGDQAQESQSTDDFLNSLGGDNSSDGTSADGTGDETSATDDFLNSLGEETPSEETSVADDDDLLNSFGGDTPSADFTSADFQSNESFPADDFLNSQGGETSTGDLPDFPDTETPTPSDIKSEDDFSVPEDLLSGLGEEIESAPSDFPPEETQSTDFTSEEPFDETPSEVFTTDEFPTDGFPSEESDLTSEEESIDLGGGRQDGTLVRK

SEQ ID NO: 81337 - protein, 296 aa, Unknown
  Obtained from environmental sample
  DOMAIN (9)...(198): ABC transporter
  misc_feature (1)..(296): Xaa is any amino acid
NINLSIERGEILAVMGENGSGKTTLCKLFNGIIPGLAEGRFLGNVTIDGENTRKTRTPRLALKVGMVLDDFDAQLFTSTVRDEIAFGPENLLLPPEEIEERISFALNATGLCGFEERSVSTLSGGEKQRLAIACALAMAGKILVLDEPLSRLDPPGAQEVISILRDIREKYQITVIMATHDSKTAASIADRVCVMKEGRIAACDKTENIFANTALLEENGIQAPRESDIEKVFTAGSKPVLTEAVKITNFCFNYDKTGVSIENINLSVADNDFLAIVGKNGCGENNLSRPICHGGP

SEQ ID NO: 81338 - protein, 310 aa, Unknown
  Obtained from environmental sample
  misc_feature (1)..(310): Xaa is any amino acid
GAPRFIASSFHRTGGRLEILRYAVDEITAAALRGGELRDLENEAQILSSFEKLAAHVNNASNSFFDGEGSLVSLARRCRSALDSAAAIDSTLSVLQKRIEDLYYEAEDIAGELRSYRDGLSYDPRRQQAVDERLALLYKLKRKYCEAAHSAATPPDNAVSVEDAMLAYRAAAEAEIEALSNIEENRENLKAAIDTLEKDIACRAASLRQKRTAAAGVLGQRITGILKRLGMPNARFSPSITARTQQGKDGRPIVVCGPWGAEEVEFFISANTGEPLKELSRIASGGELSRVMLAIKSVLSSGCRSYGADS

SEQ ID NO: 81339 - protein, 307 aa, Unknown
  Obtained from environmental sample
  misc_feature (1)..(307): Xaa is any amino acid
FPPPVDRRDSRCPDTKKIDPADFILPQAETVLAFNDAVALWTAANFEIWGKNMPPQGDEDMVIAWCAEALKRGIYQSASSVIPLGFSRSPERTWESAVYQFDRRIGLWEREIRTINTLEREKANLITRQLADKDIGIFTESRIIEYLAIRGNQRLLDDLLSIVNDVNLSAVSLEANAGIMEACVDMGKWYPNMANPFEALTDQIFQLVVNDLYRDENHVFILSSGQVDIKLNLRLGLALREWGEKSGQTVWAALGRSIALSVISLADGNGWVPAFLTVKENTNIPPPSSRLARRKCTACSGGNDICP

SEQ ID NO: 81340 - protein, 105 aa, Unknown
  Obtained from environmental sample
  DOMAIN (27)...(102): Uncharacterised ACR, YggU family COG1872
  misc_feature (1)..(105): Xaa is any amino acid
LGFRFTFQGNVADLHKAGKETGIADITVNSLTLQIKVTRNASKTELIKTETGYKARIQCSPVDGKANDALIALLSKEFGVAKDSIEIIKGKTSRNKTVLMKRDVR

SEQ ID NO: 81341 - protein, 121 aa, Unknown
  Obtained from environmental sample
  misc_feature (1)..(121): Xaa is any amino acid
MATVRMDSLIRSISTALDIVEGELVGASTNHGKRIAVLCAKMGKLLGKNTEEITALAVCALLHDSALTEYILSEKSDGNQELAMKKHCEIGQRNVDALCFNTNVRGFCPDHQNLGQSVHVK

SEQ ID NO: 81342 - protein, 60 aa, Unknown
  Obtained from environmental sample
  misc_feature (1)..(60): Xaa is any amino acid
MAEQSGLQMKGKGAFRAFRGVDNKGLASYLLSLYCSAAILSDDAIAVLEDVEVGNYYDYT

SEQ ID NO: 81343 - protein, 155 aa, Unknown
  Obtained from environmental sample
  DOMAIN (2)...(134): GGDEF domain
  misc_feature (1)..(155): Xaa is any amino acid
GIVPTHLPVIVIDVDKSKNFNDTYGHLAGDQVLEKLAQVIRQGVRNRDVPSRFGGEEFTVMLSHADVVIAKKVAERLRTNVAKMRVLWEETVLPQVTISLGVFAFGPDSNLEPEEILRRADEALYISKDSGRNCSTIWEPGLVENMPAAKKRIIE

SEQ ID NO: 81344 - protein, 313 aa, Unknown
  Obtained from environmental sample
  DOMAIN (1)...(313): Borrelia P83/100 protein
  misc_feature (1)..(313): Xaa is any amino acid
GFPNDRFGRDHYEGPYTRIETRAQIRNIGYSLGEVIKGGATRAGTSGRYFVIHSVSEQDGFKLDADIFGLGSDVGVDHIRNLRWIIQGYLEAAYQYTERDAALLAEYVTIYNAVYRGDMSYFSSRYKNPVMDNLTAEKAGLAIRYDEWPGQTLMVIPLGSGTGLSSIDTTTISDSRVIEQLRQEPDMGLDQRRDMVDLKEREADEASQQAAITRDAINQEEQRIAGEREAAQQQQQQAEAEQRQIAQERQQPGADQQALDARQQDAEQQLQEAIQAQEQLDHDQEAVDAQKAEAHSQGAFARANASEAHEDRP

SEQ ID NO: 81345 - protein, 125 aa, Unknown
  Obtained from environmental sample
  misc_feature (1)..(125): Xaa is any amino acid
MTGTFSACDPARVEGTSALMGPLASELHLDWYAGHPSYMITPLDGLRELYGKDKVAYTDCRDIVSFSTEDGRPLVLAEKTFSVGKQGDVPARFYMEDWGWSARTFTDTQSGLMLEIPYYDPKPGR

SEQ ID NO: 81346 - protein, 183 aa, Unknown
  Obtained from environmental sample
  misc_feature (1)..(183): Xaa is any amino acid
MQPGEIISAALKQDTPSIAYTYSEPLVHIEYILDCMTLARRHGIANVLVTNGCIKAEAAAEILKLTDAANVDLKTFSQETYKKTLNGDLQTVLDFIGLCHKMGVHLEITTLVVPDLNDSGEELGKAVDFIASISKEIPWHLTAYHPDYRWNAPPTDRDFLLRAAKEAGKKLTFVHTGNIHASI

SEQ ID NO: 81347 - protein, 89 aa, Unknown
  Obtained from environmental sample
  DOMAIN (4)...(89): KDPG and KHG aldolase
  misc_feature (1)..(89): Xaa is any amino acid
MYAVLEELGKIGIIPVIKLDDVEKAVPLARALAAGGIPCVELTFRTSQAEEAIRRISQETPEMLTGAGTVLTTEQVDKAVNAGAQLSSA

SEQ ID NO: 81348 - protein, 259 aa, Unknown
  Obtained from environmental sample
  DOMAIN (40)...(129): Cyclic nucleotide-binding domain
  misc_feature (1)..(259): Xaa is any amino acid
AYGQYVKHCPNGEKARGAPEKFAKLSSRIQLAKFTANDVNRTYRKDTMLFAEGEPGDELFIIQKGSIKITKIVDQKEVLLAMLKPGDIFGEMAVLDGKPRAASAVAYEDCDVMAVNKANFEIMIKNQPQLIDKITILLADRIWLIYKQLANTLIKNPMGRMYDALLIQLEKNRITLDGKTSYIFTFGLPELINMVGLPEKEGTAIFSQMMEGKYLQITGNKIRTTSTEEILKQSEYFRKMDKIEKAKQESRLAREQGTG

SEQ ID NO: 81349 - protein, 297 aa, Unknown
  Obtained from environmental sample
  misc_feature (1)..(297): Xaa is any amino acid
LPPRFIDERSDWKGVELSLVTGRPVSFIQRLYPPYRLSRPVVPLAIAGIAESRTYESGYNFGAMAPAAAPMPSAAMRMQSAADSKAMAERDYYEMEMPQSSVTSVAGGAVDTASGRAAGDQFEFTLKNPVTLDRRQSAMLPLVEGSIKAEKILIFSGARALGGATINPAISAELVNTSGMKLPAGPITVYEGGTYAGDALIEFFPENEKRLISYGEDLSVGGSVASSGTRFITAANISGGVMTITRRQSYDKVYTIKNISGQAKKLIIEHPITSGSELVEPKEADDRTASLYRFNMD

SEQ ID NO: 81350 - protein, 300 aa, Unknown
  Obtained from environmental sample
  misc_feature (1)..(300): Xaa is any amino acid
LRRNQAGQQENRTADIWHCFIPGLKERTCYLYRAEGPYVPEKGFRFNSNKALFDPYAKALTDLSNWDLKACVGYDPYAASKDLSYSYTDDIFTQPRCIAIDDDFDWQGDLPLNYPLRFSVLYETHVKGLTKHPSSGVSAPGTYKGVIEKIPYFKDLGITSLEFLPIQEFNENELNSKNPQTGKKLVNYWGYSTLAFFAPKSSYAYDRSPGGQVREFKEMVRELHKAGLEVILDIVFNHTAEGNEWGPTISFRGLDNTIYYMLNENKRYYQNYSGCGNTVNCNHPVVRTFIMDSRPICHGK

SEQ ID NO: 81351 - protein, 278 aa, Unknown
  Obtained from environmental sample
  misc_feature (1)..(278): Xaa is any amino acid
SCSSGGGDDNTSSISGGGSSSPSGGGSSSPSSGGWTAVASSTFGDNDIYAIAYGSGKFVACGGNGKMATSTNGVTWTAVSNSTFDEEGIYSIAYGNNMFVAGGFRGKMATSTDGVTWKAVTSTTFDRNDRVIVAFGNGTFVAGGNRKMATSTDGVTWTASNVLNDNGYVAVYNVKAIAYGNGKFAAGGDNYGKVIAYSSDNGATWKDVTINTLGSTTSEIFTIIYANSKFVAGSNNGYMLTSTDGVTWTAVKDNTLGLNDIYAITYGNSEFVVGDRNR

SEQ ID NO: 81352 - protein, 73 aa, Unknown
  Obtained from environmental sample
  DOMAIN (3)...(69): RbsD / FucU transport protein family
  misc_feature (1)..(73): Xaa is any amino acid
MLIGIDHVISPELLDILFRMGHGDEIVLADAFFPGDSVNSRVIRADGIRIPALLDGILALINLDSYVPYPRPI

SEQ ID NO: 81353 - protein, 291 aa, Unknown
  Obtained from environmental sample
  DOMAIN (177)...(239): PASTA domain
  misc_feature (1)..(291): Xaa is any amino acid
MAEAAGLLSGWIVAVSVFFINVRGAERTMVPDVQGRDLTAALLELQVKELYPRISLRYSQSSTEKGLVLEQSPQPGTIVKAGRRIQLVVSQGVMVNTIENYLGRNIDEVRMDIQTLLSTQSAGGNVQPVTIKDPVMYQFSTEPAGTVLQQKPEAGTAISGPTVLELVVSRGSENVMTKLPNLLGLGLNDALEQIGLAGIDFEFSIRQSRDGEKAGTVVYQKPGGDTLAASSTRVEIIMTIPDNLPQNQVFGLFNYEIAQNPYPLLLTLESILPGGARERLLSVQYPGGRLS

SEQ ID NO: 81354 - protein, 108 aa, Unknown
  Obtained from environmental sample
  misc_feature (1)..(108): Xaa is any amino acid
MSSNTIFIVLIPIAAIAAFIVGFFWRVTFDRKFRREQEEQLSREAERILKEAKNEAELRKKEALLEAKDEWFKAKTEFEKEAAKTPDQITQEQMRVKEADMEVKKQRE

SEQ ID NO: 81355 - protein, 101 aa, Unknown
  Obtained from environmental sample
  misc_feature (1)..(101): Xaa is any amino acid
LGLPKYQIGTRLYGFVYSFSAALLDIDKPWKIIARPRPYIINPREIYELAGDVPNVTFPVASLVDKDTGKVAIYYGCADSVTGLVFGKIDEIVDWVKKNKM

SEQ ID NO: 81356 - protein, 245 aa, Unknown
  Obtained from environmental sample
  DOMAIN (37)...(197): MatE
  misc_feature (1)..(245): Xaa is any amino acid
MFIVFIKISKKRPFEKIKLFIVPKWNDIVWIIKKTLPVGAESFLFTFLVMATTRREAFFGSDAIALSRIGSQIESLTWLVGGAFGTALVSFIGQNYGAKKWDRICATFKTASLVMFFYGAFVTFVLAVLGKYLFGLFLPDPVLIERSVLYLRIMAICQIPMCLEAVSSNSFRGLGNTLPPAIINTICNILRVPFAYIISMEKFGIGLTGIWISITTSACLRSIWSYIWYLITERKRIIARHSPEK

SEQ ID NO: 81357 - protein, 186 aa, Unknown
  Obtained from environmental sample
  misc_feature (1)..(186): Xaa is any amino acid
MTLERPVLAIAAIVIFPLAITLARRLGSPFTASLPLEPPGGAPFKAPYNLRGIIKTLYAMEYLGLFLIFMAAAGPVMQISETVWLNRGADILFVLDVSPSMAAVDMDGSNRFNAARSLLKDFADRRPADGIGLVAVGNDAALLIPPTTDRELLAERLENLRIGEMGNGTALGMGIAIASAESVIGG

SEQ ID NO: 81358 - protein, 298 aa, Unknown
  Obtained from environmental sample
  DOMAIN (2)...(204): Domain of unknown function (DUF323)
  misc_feature (1)..(298): Xaa is any amino acid
MGCTAEQGGDCYPAEKPTRRVTLGGFYISRHEVTQKQWTALMGYNPSVRQGDSLPVENVHWDSVKVFIEKLNATTDTAYWKYRLPTEAEWEYAARGGAASLGDAYSGGGWHDGNSGGQTNPVGGKAPNVLGIYDMSGNVWEMVGDWYGDYDTAAQTDPTGPTYGSYRVIRGGGWSSGVRACRVSHRMKFSQNFSSGDIGFRLAICARKTTAEPPPLSPLALIEPTYVKKRRSEAVADVAVINAAPQREFRLKTRSLRRSDNKMDKGISAGIGGFYVGDYGGGIAWANLVPNSDPMGGP

SEQ ID NO: 81359 - protein, 287 aa, Unknown
  Obtained from environmental sample
  DOMAIN (216)...(280): Histidine kinase-, DNA gyrase B-, and HSP90-like ATPase
  misc_feature (1)..(287): Xaa is any amino acid
MRGLGIDTDTLRGQDVSAIFLQIMPVDWVSELTHDLREVLSNGEGKNIGKFVHNKHGRGYYCQTYIIPIKDPDGSGAVTGAILTMHDETNLHEAVLSAERSNMAKTNFLAKISHEIRTPMNAIAGMAELILREHTTGIVREHALSIRQASGNLMAIINDILDFSKIESGKLEIVESEYQFASLINDVISIIRMRTIEKQIFFTANIDCDIPGRLIGDEIRIRQILLNLLTNAFKYCDRGFISIHVSCENLTDTGATLVIDVSDSGIGIKPGGSRQTLSDFARPSTKK

SEQ ID NO: 81360 - protein, 318 aa, Unknown
  Obtained from environmental sample
  misc_feature (1)..(318): Xaa is any amino acid
AFTPTDTIINSVPGPVSITVNKATPTVTTWPTAAQIRYGAALSTSALTGGASSTAGKFEWTTGTTVPNAGTQSYSVTFTPTNTDYNSVTGTVSVTVAKANPTVTWPTAAKITYGATLSSSTLSGGSSTPAGTFKWTDNTIKPNAGTQSCEVTFTPTDTANYNTRTNTVSITVDKAAASIVTLPTASSITIGQKLDDSKLSGGSGSPAGGKFSWNSPNYSPVVVGSISQRIIYTPSTADQDNYTKTDGTHTVNVTVKPKELKFSHDSGLYSGQFSLTLTGEAGDTIYYTTDGSIPVPNKNGTTKYSSALPEDLGSTRGK

SEQ ID NO: 81361 - protein, 278 aa, Unknown
  Obtained from environmental sample
  misc_feature (1)..(278): Xaa is any amino acid
LSTSALSGAVHTTPGSFAWTNGATVPPFGTNNSYNVTFTPTDTANYNTVTNTVSITVINSPITAANITINAPTNGATPATTATVSASENFTSGTVTWIPPDTAFKGSTAYTATVTLTAKTGYTFTNLTNVKVNGVSATITGTPGSTLALSYTFPATGAKTVSGIAIKTQPAKLTYTHGDTLDLSGLVVTLTYDDTTTEDVAVADFSAQGITAAPINGATLEHTLNNGKPVSITYGGLPSKDTGNLTVNPKSVSGVSVDPILAQTYTGTENKPAGYRKR

SEQ ID NO: 81362 - protein, 284 aa, Unknown
  Obtained from environmental sample
  DOMAIN (7)...(64): Threonyl and Alanyl tRNA synthetase second additional domain
  misc_feature (1)..(284): Xaa is any amino acid
LPESEDISIYENRDAEGKVQWSDLCRGPHVANTREINSAAFKLQSIAGAYWRGDENRPMLTRIYGTAWENPKDLKAHLAFLEEVEKRDHRRLGKEMDLFSIHEEAGAGLIYWHPHGGRMRVALEDFWRQEHYRNGYEILYTPHIGKSWLWEKSGHLGFYKGNMYSPMEIDKQDYFIKPMNCPFHILIYNNKGHSYRDLPLRWAELGTVYRYERSGVLHGLLRVRGFTQDDAHIICTPQQMESEIREVLRFSLMIWKVFGFKEIKAYLATKPRRISRRNRTMGRG

SEQ ID NO: 81363 - protein, 70 aa, Unknown
  Obtained from environmental sample
  misc_feature (1)..(70): Xaa is any amino acid
MANPYAALLNKVRENKPLVHHITNYVTVNDCANITLAVGASPVMADAAGEAADIAAIAKAVFSADLILGK

SEQ ID NO: 81364 - protein, 300 aa, Unknown
  Obtained from environmental sample
  misc_feature (1)..(300): Xaa is any amino acid
VVFVSIWVDELGMPDFEVIGKCYSAVHKGIADGQILAVHTVGRGGISEAVAKMCFGNRIGFRVDEGVNTAGLFKPDYAGLVVELDKSVNTDRNVLGIGENCTILGVTIEERNIVCRNARIDIDELYEKWEGVLEGIFPASVGVGESGDHIYDSFFDGVNVDAENNPPAKKAKIKAAKPRVLIPVFPGINCEYDSARKFAKAGAECEFFVFKNINPGDIDGSVKIISEKILTSQILMLPGGFSAGDEPDGSGKFIAAFFRNPRVKDAVSEFLNNKDGLMLGICNGFQALIKRVVLGHLYSK

SEQ ID NO: 81365 - protein, 162 aa, Unknown
  Obtained from environmental sample
  misc_feature (1)..(162): Xaa is any amino acid
MAVVAMIGVSGSGKSTFAKTHFKPTEVLSSDYFRGLVSDDENNQQVTPQAFDALYYIANKRLELGLLTVIDATNVQREARASVLRLAKEQNCLAVAIVLDMPEKMCRERNEKRPDRKDMAANVVTRQFGNLRRSLNSLQKEGFRYVYVIKDEEDSANLSWGT

SEQ ID NO: 81366 - protein, 311 aa, Unknown
  Obtained from environmental sample
  DOMAIN (86)...(302): Protein of unknown function (DUF1538)
  misc_feature (1)..(311): Xaa is any amino acid
MMAEILALGVGAASLRGDRNSQDDSFGLVALCSVGPIIAVLLLGVFYKTDSAAVYTFDVPEAATSREVARHFIKQFPLYFKEVSIALGAVVLCFIVFQLITRRYHRHHLGRIAVGFVYTLIGLVLFLTGVNAGFFPEGRLLGRVLAASQYKWVLVPLGTLVGYFIVAAEPAVHVLNKQVEEISEGAITQKMMMRGLAIGMAIALTITMLRILLRIPIMYILIPGYVFALGLTFFVPKIFTGIAFDSGGVCSGPMTSTFLLPLAMGTCEGSGGDLMIDAFGIVAMVAMTPLIIIQIMGPDLSLKQKEQAPLK

SEQ ID NO: 81367 - protein, 237 aa, Unknown
  Obtained from environmental sample
  misc_feature (1)..(237): Xaa is any amino acid
VKFNAGGGTVSPDSAKTGIGGRLASLPTPVRGGYAFGGWFTAATGGDSVKLDKVYTATTIIYARWTVVTYTITFNAAGGAVTPASAKTGAGGTLASLPNPAARTGYSFSGWYTAATAGTQVTASTVFVSDTTIYARWSAISYTITYTLSGGTVTPANPTSYTVETPDITLNNPVRSAYMFDGWTGSNGTVKQKSVSIPKGSTGNKSYTANWAAAVYTVKFDVNGGAKLTPGSAKTEG

SEQ ID NO: 81368 - protein, 288 aa, Unknown
  Obtained from environmental sample
  misc_feature (1)..(288): Xaa is any amino acid
MLREQKSNLWFIRSSKAICENGFFARLKGYETQVYLDIYEVEDDNNGRWARLNNDLQGKGVSDPLASIKDIFLGELYYRFTEIFAPELINNLCEFSFKKSVVETLNELVEKFIETAAHFITGADGAYDAWTPDTVAENGEKDVSCKFTAVGNDVVLKEFGSLVDRLAKIMDEMKKPTFPLSAFTNCKEKRQLLCSVILGYGVISLLRSVLGKEANGRHAASLAFTHWDIGRKLRDIFRRFGASENEVWKITDIARAVLIKTEHEPFWEKETKFYAADLLISANLSCLN

SEQ ID NO: 81369 - protein, 302 aa, Unknown
  Obtained from environmental sample
  misc_feature (1)..(302): Xaa is any amino acid
GFSGYRDISFKQDPAHPERFIKAGHLYAMGLIDEILHYVIALYREQVQPDAFETALSRLENNLGNSKTSGLLTAFAGQFPPRKVYTGEKIINEYLNSKEEGESCRSIEIEETLMLSLANLNPAFNPFKFLFDDKDLSQNTVYPNAIEELKAHFKELPPFGPDGMNLWDLLRSPALASPDSLLGQLEYIRKHWGMLLSKFMARLLMSLDVINEESKPSFFGPGPTEVLTFAGLDEYEKFSPDQEWMPRTVLIAKSTLVWLFQLSQKYERQITRLDEIPDEEIDELARRGFTGLWLYWSLGAKS

SEQ ID NO: 81370 - protein, 124 aa, Unknown
  Obtained from environmental sample
  misc_feature (1)..(124): Xaa is any amino acid
MSDRVIHTSDTKTLIKNNIRNYSMFIMLALIMIIFAPLTKGNNWNPRNFTNIFFQNSYVLILAIGMVQVIIVQGIDLSVGSVCAFVGALSAMVYNTRRWNAHCAAGCACHGRGIGASRNNPGVK

SEQ ID NO: 81371 - protein, 68 aa, Unknown
  Obtained from environmental sample
  misc_feature (1)..(68): Xaa is any amino acid
MLLAIPFPSWLKPEVIPGLPFRWYGVMYVVAFATAFLLYRRQVRERDFPMTEDELSGLLPRPSCRKKK

SEQ ID NO: 81372 - protein, 286 aa, Unknown
  Obtained from environmental sample
  DOMAIN (164)...(197): Tetratricopeptide repeat
  misc_feature (1)..(286): Xaa is any amino acid
MLPESYYHLARYYNYFENSTDERLTLEVAVRACESAKEESPKRIGYHINALRRYAEVLINGKEFFPAEENLIKGINVYQDGLSRRLLTRSPEYGRLYADLGDLEFFVKDGDMQTALDYYNYSEQNGWAPPEIQYRMGAAHYQLRQWGPALESFFAAFREMPFNRRILYALGNVSYMRGNYFAAQGYYDRLLEILEDDRSRLPPIAPTDDEDQLDLVERLMVAQNNMGVVLEALTERTGNISYRSRAQGMYSDSERAWDILTRNPTTMIRMRPPLSCRSDHRGRKCG

SEQ ID NO: 81373 - protein, 303 aa, Unknown
  Obtained from environmental sample
  DOMAIN (118)...(302): Phosphomannose isomerase type I
  misc_feature (1)..(303): Xaa is any amino acid
MAKSDLNIEILGTNLTISAEETPEYLNMLLDKYRRTIENVQQTTGLKDPLKTAVLTGFLLCDDLEKAGSAANAVKIEDEEQWEAERLTQGMISRLNEIIPKAQERDAYSEALAENPPVFKLKNAIKNYDWGSADWIPALLGQKNISRVPQAELWMGVNPSAPSRTEFPGGKNGPLLSELIDSEKEAFLGKEIAQKYGTLPFLLKILAAEKPLSIQAHPNLRQAQDGFEKENLKGIPLDAPNRNYRDPGDKPEIICALQHFRALCGFRDVREVCFLVETLSMESEGILKQGFEKLSLNLKRRDG

SEQ ID NO: 81374 - protein, 300 aa, Unknown
  Obtained from environmental sample
  DOMAIN (187)...(292): Response regulator receiver domain
  misc_feature (1)..(300): Xaa is any amino acid
MIRSAEMGGRIWIESEIGKGSTFIFTIQLGRGKEEKQELLPDVNLKDVRILAVDDDPVILSFFTEVTQRFGISCDTAVSGKKALELLEQNGGYHIYFIDWKMPDIDGIELVREIKARRSGNSVVTMISAAEWGAIAKEAKAAGVDKFLSKPLFPSIIVEVINECLGVNKQQIEEAQAADINGIFAGKRILLAEDVEINREIVQTLLEPTKLEIDCAEHGVEAVRIFSRAPAQYDLIFMDVQMPEMDGYEATRRIRALDNPKAKTVPIIAMTANVFREDIENASLPAWHIMWENRWISGKV

SEQ ID NO: 81375 - protein, 126 aa, Unknown
  Obtained from environmental sample
  misc_feature (1)..(126): Xaa is any amino acid
MKTVKALRARRILTLADARPAARRNDLLAPLSILDNAVVLSKNGLILAVEPYARCKRRTDCLIEDAGEVTLLPGLINAHSHLELAGLKGKTRLGQGFAVWVQSVIALRRSQGGKERAMADAAKEMS

SEQ ID NO: 81376 - protein, 165 aa, Unknown
  Obtained from environmental sample
  DOMAIN (27)...(163): ABC transporter
  misc_feature (1)..(165): Xaa is any amino acid
MIICEHLTKLFDANSGIKDINLQFSPGIIYGIIGYNGSGKTTLLNCIEGLYIPTSGFVSHNNIKTTDNIGFLPYRRKIAFLPSDDYLYPQLTCMENIELSTILRTGVNKLSHETEELIRYFEIDSFLHKRFMDCSTGNEKKVQIVVSLTGEIDTIILERPDDGLD

SEQ ID NO: 81377 - protein, 303 aa, Unknown
  Obtained from environmental sample
  DOMAIN (71)...(230): short chain dehydrogenase
  misc_feature (1)..(303): Xaa is any amino acid
MPDAGRDYLKQVYDNLKKIGFHQIRILPGISQIIDGDAHFIQTRSIDLQDLLGRNPVAIKLKQSLAYLRGKRVLVTGAGGSIGSELCRQLLSGGASRLYLFGHGENSIYQIDRELRLLQEEGVGEKAALVPIIGDLRDKDYVDYILGNLKADAIFHTAAYKHVPLMEENPVAAVENNVFGTENLITAAIKHATKRFVHITTDKAVEPVSIYGASKYICEQMVLEAAASSGGPNFMVVRFGNVLGSRGSIVPLFQQQIQKAGLLPLPTRHTPLVYDYKRSVLSCTQRQRRRGKRRAVPFGNGRA

SEQ ID NO: 81378 - protein, 60 aa, Unknown
  Obtained from environmental sample
  misc_feature (1)..(60): Xaa is any amino acid
ACLWLSRERRALVFGVLTTDTVEQAIERAGTKMGNKGWEAAQSLIEMVDLHRALHTKKGK

SEQ ID NO: 81379 - protein, 312 aa, Unknown
  Obtained from environmental sample
  DOMAIN (182)...(312): Glutamine amidotransferase class-I
  misc_feature (1)..(312): Xaa is any amino acid
FQISRGFSRGSQGTGAEVLITEIGGTTGDIESQPFLEAIRQISLENPRPNCLFIHVTLVPYLKGSGEHKSKPTQHSVKELRSMGISPDVIITRADEPLSRGIKDKIALFCNVKPDCVIENITLSTLYEAPLMLHRNGLDNVVCRGLSLDVPEPDLAEWQSMADRIGSRERTVNIAIVGKYIKLRDAYLSIIESLNHAGFETSANVHIHWIDSENLIGQNAAAALGGLGIDGMIIPGGFGDRGIEGKIAACRYARENDIPYLGICLGMQVAVIEYARNVCGLEGANSNEFDELSPHPVIDFMSGQTGKGGKPR

SEQ ID NO: 81380 - protein, 54 aa, Unknown
  Obtained from environmental sample
  misc_feature (1)..(54): Xaa is any amino acid
AEAQHFVLDGLAAWIDNARAEKRCFHAVGDGRFIADGERINHRRIMLAKLPAGV

SEQ ID NO: 81381 - protein, 192 aa, Unknown
  Obtained from environmental sample
  DOMAIN (5)...(164): Integral membrane protein DUF95
  misc_feature (1)..(192): Xaa is any amino acid
LGEDTIQGLEEMYDPASLHYLEPRDVSSDADMFGFYIYNNISIAFRTFAGGILGGIGSIVLLCFNGAFLGAAAAHIINTGFGKTFFSFIIGHGSFELTAVCLSAQAGLLMGYRFFVTGGLSRSASVKLAGKTALPIIAGAACMLVVAACIEAFWSSRFAMPEYLRYGAGAAGWVLLAFYFILVDVKMNPVHT

SEQ ID NO: 81382 - protein, 307 aa, Unknown
  Obtained from environmental sample
  DOMAIN (31)...(253): ATP synthase alpha/beta family, nucleotide-binding domain
  misc_feature (1)..(307): Xaa is any amino acid
MGVEIPIAQWWPVRQPRPIMERFAPDEPLVTGRRVIDVFFPLSKGGAAAIPGGFGTGKTMTQHAVAKWCDANVIIYIGCGERGNEMTDVLTEFPELQDPRTGRSLMERTLLIANTSNMPVAAREVSIYTGVTLAEFYRDMGYHVAIMADSTSRWAEALRELSGRMEEMPAEEGFPAYLPTRLAEFYERAGRVRALCGEQGSISIIGAVSPPGGDFSEPVTQHTKRFIRCFWALDRDLAHARHYPRISWIDSYSEYAEEVQSWWEKVSPYLSEVRRKSMDLLKQEQRLAEIVRLIGGDALPDETKLFL

SEQ ID NO: 81383 - protein, 92 aa, Unknown
  Obtained from environmental sample
  misc_feature (1)..(92): Xaa is any amino acid
MTNSREQLLEKYSAKIYKNRKEHVLQLAEGEKNVAIARNTRAIPGVMTARGCCYAGCKGCVVCPLKDVLAITHGSIGCRFYSWGTGGTKANP

SEQ ID NO: 81384 - protein, 66 aa, Unknown
  Obtained from environmental sample
  misc_feature (1)..(66): Xaa is any amino acid
MKTAGPTMLEPDNPNGSDFAIEGLCSPDGRILGKMGHSERRGEYVHINIPGDKQQNIFKAGVRYFS

SEQ ID NO: 81385 - protein, 229 aa, Unknown
  Obtained from environmental sample
  DOMAIN (80)...(115): UvrB/uvrC motif
  misc_feature (1)..(229): Xaa is any amino acid
MVDPPSVNETVQILAGLRHNYEEHHKVTYSEKAIAMAVKLSDRYISDRFLPDKAIDVIDEAGARKRLSSMEIPTEIREIEKQIAEVLREKETAVENQDFESAARLRDMQEKLNGALLEAKALWRRAKAEERLLVDESTITEVIATMTGHPLARLARKERRKCCTFETNCAKGSYRQTKRSAPSRGASGVPRARLQKQPVAPIASFKFLGGQRALVKTELVKGGSPKAFF

SEQ ID NO: 81386 - protein, 115 aa, Unknown
  Obtained from environmental sample
  DOMAIN (25)...(90): ATP synthase alpha/beta family, beta-barrel domain
  misc_feature (1)..(115): Xaa is any amino acid
VETAIFEKYIDTAERTDPIKCTGKIVNVKGLLIESHGPQAIIGEICRIIAPRGKGRIMAEVVGLKDEIVQLMAFEETDGLEVGGRVIALGSRLEVPVSNKLLGRFWLSDLLGGGS

SEQ ID NO: 81387 - protein, 60 aa, Unknown
  Obtained from environmental sample
  misc_feature (1)..(60): Xaa is any amino acid
MTDRPREWLWGGEFWTRGYYVGTVGEHGDEETISRYVRNQGRKPEEYEKIYKNNQLELFS

SEQ ID NO: 81388 - protein, 112 aa, Unknown
  Obtained from environmental sample
  misc_feature (1)..(112): Xaa is any amino acid
MHGVKFFSGDNVPLEMHKVRMVQRLYLKPIEERVQCMQGAGFNTFLLKNRDVFLDMLSDSGVNAMSENQYAAMLQADDSYAGSETFYRLEKALQDVFSQNILVRSDHRGGNG

SEQ ID NO: 81389 - protein, 167 aa, Unknown
  Obtained from environmental sample
  DOMAIN (2)...(121): Oxidoreductase family, NAD-binding Rossmann fold
  misc_feature (1)..(167): Xaa is any amino acid
MQRIGIAGIGNISKIYLDNLTGMFGKRVKLTAVCDTIFERAEKAAADYHVKAYKELGEMLNADVDIVLNLSQPQFHYEIALAAVKAGKHVYNEKPLCAKREEAAELLQLAANQNVRVGGAPDTFLGAGPASCPQLIDDRWIRKPVAATAFMMSHGPNTGTPRGISLQ

SEQ ID NO: 81390 - protein, 140 aa, Unknown
  Obtained from environmental sample
  misc_feature (1)..(140): Xaa is any amino acid
MRRIAMEKAKEILRLSLEMGLNQRDVARGTGCSLGMVSMVLSRVKESAVADPLSLSTKELGSIIYPPAKEKEKAEPDFQHIDREMKKKRVTLGLLWEEYKTQHPAGYMYTQFCTKYRRIQEENAVYMRKVYKAGGRNDGR

SEQ ID NO: 81391 - protein, 57 aa, Unknown
  Obtained from environmental sample
  DOMAIN (5)...(54): RNA polymerase Rpb2, domain 7
  misc_feature (1)..(57): Xaa is any amino acid
DCSPFNSDDISGRNKIYDAIVKGENPRAPGTPESFRVVVREFRSLGLDLKVSEAENA

SEQ ID NO: 81392 - protein, 245 aa, Unknown
  Obtained from environmental sample
  DOMAIN (18)...(229): ABC-2 type transporter
  misc_feature (1)..(245): Xaa is any amino acid
MNELALTMGKPRLLRELNTVVTIAAREITVFFKSPGTAIMSLAMPIVMMGMIGGNLMQNMAGGLGFNFGQFMLVGMLVNMLFMTTTMGTASLVDDHHTNFNQEMLVSPVSRYSLVIGKILGSSFGAIAGMAGTLVVGAAMRISLPFGKLLLILLLSPLMCLSAGALAIIAIGLIKNKKAVNIVIMLITMPQMFLSGAIIPIHQSNGVLLVLSRLMPMTYCIDLARAIVCAERRIPRPNLSWGGKW

SEQ ID NO: 81393 - protein, 69 aa, Unknown
  Obtained from environmental sample
  misc_feature (1)..(69): Xaa is any amino acid
NGRIVVPDQGSAQEVITRLKTKLTVLKTHEPSLEDAYVEFLNKTGKASDIYCADNPRPAFGGGHGRHTF

SEQ ID NO: 81394 - protein, 88 aa, Unknown
  Obtained from environmental sample
  misc_feature (1)..(88): Xaa is any amino acid
MPLLPFSNFQIAGHQPSEVSQAKLAVLIDADNTQPGIIEGLLDEVSKYGIASVKRIYGDWTSTNVRSWKERLLEYAIQPIQHLAIIRK

SEQ ID NO: 81395 - protein, 307 aa, Unknown
  Obtained from environmental sample
  DOMAIN (1)...(83): MGS-like domain
  misc_feature (1)..(307): Xaa is any amino acid
VIAVEAYTGHPEIMDGRVKTLHPKVHGGILAVRDNPTHVKEMGKCGIGGIDMVVVNLYPFEKTVAGGAGIEECVENIDIGGPAMVRSAAKNHAFVAVVVDPADYALIEGELSAHGGAVTLDTRRRLAVKAFRHTSAYDAAINAYLSKIYLDEDVLQLYYGSGEVLRYGENPHQAAVFYRGARASGASMASAEALGGKELSYNNIVDGDAALEAVRELSGGAAAAVVKHNNPCGYATGSTLDKALEAAWSGDTVSAYGSVIAVTRNVDMAAAKVLAGRFVEVLIAPEFDGDAFGYLKQKSSAVRLLKV

SEQ ID NO: 81396 - protein, 84 aa, Unknown
  Obtained from environmental sample
  misc_feature (1)..(84): Xaa is any amino acid
MKYQVIYADPPWKYLWGTGKDGGHFAPEKHYETMTTEEICALEVKQLRDKNCALFLWATMPALPDAFRVIEAWGFNTRPALSRG

SEQ ID NO: 81397 - protein, 240 aa, Unknown
  Obtained from environmental sample
  DOMAIN (25)...(129): Methyltransferase domain
  misc_feature (1)..(240): Xaa is any amino acid
DIGDVIKDDLDFYVEYANKTKGPILELQSGTGRVSFYVAEKTGRIFECIELSEQMLERFRDKLKKSGKQQLQENIHIHKGDMSTFNLDQKFEYIIIPWRALQWLPIKEKTIECLNCVYRHLTDNGIFIFDIFKPRTYDEKWLGKEDISYDIIDGDKRIIRSTINHHADTEKKYIQYKNKIRILENGAERVKEDLLTIKYYEYNDIVTVLKELKFKIKEEYGYYDKRAIKDGEEMIFVCTK

SEQ ID NO: 81398 - protein, 308 aa, Unknown
  Obtained from environmental sample
  DOMAIN (250)...(291): Putative Ig domain
  misc_feature (1)..(308): Xaa is any amino acid
WAPPDIAEIRRWDDGVHDGNVSGNHGGTDIWVAKLNAAGGIAWQKCLGGSWDDGAQSIQQTNDGGYIVAGWTESNDGDVSGNHGGGDAWIVKLNAAGGIAWQKCLGGSSNDSASSIQQTSDGGYIVFAHTRSTNGDVSGNHGDYDAWVAKLNASGEIAWQKCLGGSREEYANSSISQTSDGGYILAVRTNSNDGDVSGFHGGNYYDAWVVKLKPGAAGTAPTITTDILPNGAVGTAYNQTLAATGTTPITWDLAGGALPAGFSLSPAGVISGTPTTGSTAHFTVRATNKFSSDPKQLSITVDTATGVT

SEQ ID NO: 81399 - protein, 65 aa, Unknown
  Obtained from environmental sample
  misc_feature (1)..(65): Xaa is any amino acid
MQFIFSDDNKFSTWRKLWIALAESQKELGLDISTDQIDEMKAQQTNINYETAATRPICHAGGEWG

SEQ ID NO: 81400 - protein, 224 aa, Unknown
  Obtained from environmental sample
  misc_feature (1)..(224): Xaa is any amino acid
MEAWGGKCVASPSNETESGRKYLKKDPNMPGSLGIAISEAVEEAVADTSGATKYSLGSVLNHVMLHQTIIGQEAKKQLEKIGIKKPDVVIACAGGGSNFAGLAFPFIHDKINGDNIDIIPVEPTSCPTLTRGIYTYDFGDAAGLTPLLPMHTLGHNFMPAPIHAGGLRYHGMSPLVSQAVKCGLATPMALPQLESYSAALMWARTEGFVLRPSQPRHSRGYREA

SEQ ID NO: 81401 - protein, 121 aa, Unknown
  Obtained from environmental sample
  misc_feature (1)..(121): Xaa is any amino acid
LCFPIDRETAAGEEYNIGGENEWENIKLLNVLIDITAEKAKLNPAKIRDTVTYVKDRPGHDRRYAIDCSKIKRELGWKQTVSFEEGLARTVGWYLANPEWIENIRSGEYQRWVEKNYGNRG

SEQ ID NO: 81402 - protein, 186 aa, Unknown
  Obtained from environmental sample
  DOMAIN (9)...(186): DegT/DnrJ/EryC1/StrS aminotransferase family
  misc_feature (1)..(186): Xaa is any amino acid
MWRVQLHKINYDEREYQAVREVLDSGWLTISQKTYDFEAAFAQFLGHDAQCLAVSNCTAALHMALLVLGIGRGDEVITPSLTFIADQNVTRMVGAENVLADITSMEDWSMDCDDIEARITSKTKAVMIVHYGGYACDMERVAALCEKHGLLLIEDCAHTPGADYGGRPLGTFGDIAAFSFFGNKMS

SEQ ID NO: 81403 - protein, 104 aa, Unknown
  Obtained from environmental sample
  misc_feature (1)..(104): Xaa is any amino acid
MPSFNSAVNDIDPKGLRLDRYIAENLCLLSRSQIKARELEARVNGKLVKISRIVKNGDKIEISWNETPPVNLIPENIPLDIIFENNRGVVINKPQGMVGHPRAR

SEQ ID NO: 81404 - protein, 135 aa, Unknown
  Obtained from environmental sample
  misc_feature (1)..(135): Xaa is any amino acid
MKEKIFKWIDNAASMAVELQGELTKRPAVSPDSGGEGELDKCVFLEGWLKAHGITQLERFDAPDKHAKGWVRPNLVATIKGKGNDADGNLWIISHLDVVPPGEASHWQSDPWTMVEAKDGPLGHRVIGRGVEDTS

SEQ ID NO: 81405 - protein, 202 aa, Unknown
  Obtained from environmental sample
  misc_feature (1)..(202): Xaa is any amino acid
MIELFDTGAYLLRGTQIIREDGNAASTPELKSVSKDEGRKGTIAYGILEAHAASGCEQENLCLKFDSLTSHDITYVGIIQTARASGMEKFPVPLVMTNCHNSLCAVGGTINQDDHVFALSAAKKYGGIYVPPHLAVIHTYNREMMAGCGKNDPRSDSHTRYGALGNPGVGKGRRQMAKQLVGRNYDITRAPDVGCYLTGKPA

SEQ ID NO: 81406 - protein, 131 aa, Unknown
  Obtained from environmental sample
  DOMAIN (17)...(102): Thioesterase superfamily
  misc_feature (1)..(131): Xaa is any amino acid
GFSPAYRERAHLECDSYGHVNNANYLNYLEFARYEYLKDIGFDYVRAVDKGYGLFIARIEIDYKRPAITDDVLTIKTWPIKKGAVSGTMAQKISRGDEIMIEAAVTWAFVNAKTGLPVKIPPEWDLPGLNP

SEQ ID NO: 81407 - protein, 301 aa, Unknown
  Obtained from environmental sample
  DOMAIN (174)...(253): PPIC-type PPIASE domain
  misc_feature (1)..(301): Xaa is any amino acid
VPISWVAGNKLSQYYEQLLRRYRDQIDLNNFQIQMSLWSQAFESAAVSIAVLQEVKRSNYEPPEKVVDREVAKLPQFQDEKGNFSIYLYRQMSESSRLTLWRQVREELAAIQFYNDIFTLLIPAGEKEFFAKMGADMRAFEMVYFPVDDFPDSEYLSYARENPDLFKSIHLSKITVKSGERAAKKILESIKDGTTTFEDAARSQSQDNYADRGGDMGVQYVYDLEKEITDETIRENIFSLGKGELSSVVNLDEQCVFFRVEDEVKQADFDDYAVMDRVRSYMRNYERGRMEDWAIARADEF

SEQ ID NO: 81408 - protein, 308 aa, Unknown
  Obtained from environmental sample
  DOMAIN (226)...(292): His Kinase A (phosphoacceptor) domain
  misc_feature (1)..(308): Xaa is any amino acid
MIARREFGHTTITPNLVVKEAMEHMTGPDSKKVDLVDPTILNLAGKDSLCLRLTVPIINKRLDETVGVVGCRINIDLLQPLVEQTIKNFDEVTSMAIYSNSGFILANYLPQMIGKQLVEVETQYGEDLDEVAEAVKNAREWEVASFDPALKTTMYMSIAPIPLAASPTTWSVMIGSTEAYILKDVRAMTKFTIMLLAIVVLAAMALVSVLIRVDAARTKADVESRHKSAFLANMSHELRTPLNVVIGLTDLILEDKKLDVHTAENLVKISNAGNTLLSIVNDVLDFSQIESGKLTLSPVVYYTSSLLN

SEQ ID NO: 81409 - protein, 86 aa, Unknown
  Obtained from environmental sample
  DOMAIN (1)...(20): SEC-C motif
  misc_feature (1)..(86): Xaa is any amino acid
MKQCPCGSGRSYAECCEPYITGRAKAPTAEALMRSRYSAYAEHEIDFIINSCLASGKNDIDPKSTRDWSEKSTWLGLKIILTEQGG

SEQ ID NO: 81410 - protein, 306 aa, Unknown
  Obtained from environmental sample
  DOMAIN (1)...(201): Cellulase (glycosyl hydrolase family 5)
  misc_feature (1)..(306): Xaa is any amino acid
GFKDDQIGRVVDAAIDRGIYVIIDWHSHTAHQNTAKAKEFFEEMATKYGNKPNILYEVFNEPQNGGMGVTTAAFWTNTVKPYMETVVAAIRAIDPANVIIIGTPTWCQDVDVAAANPVNGANLVYTQHFYSYSHKEPLRAKARAAMNTSNKPVFVSEFGVCKSDGKTPLDTAEATKWLDFLDSNKVSWVNWSVSYKDEGASALKPAVRKFDGNWTADDLTISGAYIRNKLIAAQQREDEEWKTTAALAAERAVPHSQPTGGSAAITPVGAAAGNFSVGPIPASKAGGGVNSFWQAKGVTGGSLLIY

SEQ ID NO: 81411 - protein, 93 aa, Unknown
  Obtained from environmental sample
  DOMAIN (11)...(70): RNA recognition motif. (a.k.a. RRM, RBD, or RNP domain)
  misc_feature (1)..(93): Xaa is any amino acid
GFPNDQIGRGYDQLSELFAEFGEVKSAKVVFDRDSNRSKGFGFVEMDDEAAEKAIQSLNGKNVGNRALRVNESQPREQRPPRQGGGGYGNRRG

SEQ ID NO: 81412 - protein, 140 aa, Unknown
  Obtained from environmental sample
  misc_feature (1)..(140): Xaa is any amino acid
DGGAKAALFEGAVRARDTTIPALSVYDSLEDWLADRPWEKPPPDKSDGTGSLHIGTGIHRFPLLVALDNVRPDGTFSLLSAYGRAMVLAVGSERGWSDREREELEKASFVRLSMGGRAMRTETACVAAAVLALEKTGALR

SEQ ID NO: 81413 - protein, 147 aa, Unknown
  Obtained from environmental sample
  DOMAIN (12)...(128): RNA pseudouridylate synthase
  misc_feature (1)..(147): Xaa is any amino acid
MDSPYILEETDDFAVVFKPPKMHCAPSGAKSQKDGTLLEWYSTQSSCFDIMHRLDFETHGLVLFAKNKKSYDSFKTLQDNGEFIKEYSAICTKTDVTAQLKGFPEYSNGKTQPPFEIESYFPPLWSRQKTCPPCNRRRKKPRESAKT

SEQ ID NO: 81414 - protein, 221 aa, Unknown
  Obtained from environmental sample
  DOMAIN (52)...(189): Thiamine pyrophosphate enzyme, C-terminal TPP binding domain
  misc_feature (1)..(221): Xaa is any amino acid
ITETGSSYALVIRKDTFTPYALKKKEEHDAVMTREEAIEEIVSGRGGIIVSTTGMISRELYELRDKAGAGHARDFLTVGSMGHASSIALSIALQKPELQVTCLDGDGAALMHMGSFAAIGTQKPHNYCHIVLNNAAHDSVGGQPTIAPFIDMPAVARACGYTKVYQAKTKEELKNILAEKHEGLMFIEVKVKKGSRKDLGRPKSTPVENKAAFMKYIRGTE

SEQ ID NO: 81415 - protein, 276 aa, Unknown
  Obtained from environmental sample
  DOMAIN (7)...(141): Conserved carboxylase domain
  misc_feature (1)..(276): Xaa is any amino acid
DYSPLSRAHNFPAIPDLVAGKYGACPAPKNADLVKKALEALKMEKEITHRPADDIPAEYGKLEEEAKKVLGTGTVTTEDVLTYAMFPKVAPNFFKTRADGPVVFKPEDTPAPAAKAVPGQAEKYNVNVNGTDYAVVVSPAGSVAVTAAAPIVAATPGAPASSGGITIPAPVAGTILRYSVAEGAQVQKGATIMIIESMKMELEIKTTETGKVHFMVPAGTQVTAQQPIAQIGGIAGAAPAAPAAPAAPVAPAAPAASGGGSAVPPPVGRNKPSPTL

SEQ ID NO: 81416 - protein, 321 aa, Unknown
  Obtained from environmental sample
  DOMAIN (96)...(314): Methyl-accepting chemotaxis protein (MCP) signaling domain
  misc_feature (1)..(321): Xaa is any amino acid
KTDIATNSGLARDFNFTINKIKGLIHAIKYKINGLAHTSYELSVNTGKTSTAVDQITSNLDNMKNLMVKQESSTNVAGKVVNDIKQNIDSLKEMIAAQTDSVNVSSSAIEQMTANINSVTKTLADNSKNVDALTEASENGKTGVQTVAQKIQEISKDSEGLLEINAVMNNIASQTNLLSMNAAIEAAHAGEAGRGFAVVADEIRKLAESSSGQSKTTATMLKKIKASIDSITKSSDEVLERFGAIDESVKTVSQHEENILNAMEEQEQGGRQILESISRLRDITASVKTGSDQMGESGKALVKETGDLIQNSRKTVEGMND

SEQ ID NO: 81417 - protein, 165 aa, Unknown
  Obtained from environmental sample
  misc_feature (1)..(165): Xaa is any amino acid
MVESLGDKLKTTREEKGLSLDDVGKDTKITIRYLEALEKEDFSGFPGEAYITGFLRNYGAYLDLDVQELLSLYYALKIQEQPIPEQLLTKSPQVLPKIIIGILLGLIIAGAGGIAVYSFIKRPRETRVTVPIINRAPIEYVMDGDSFERRFYKAIQFWFPRGRTS

SEQ ID NO: 81418 - protein, 308 aa, Unknown
  Obtained from environmental sample
  DOMAIN (45)...(247): ABC transporter
  misc_feature (1)..(308): Xaa is any amino acid
MIYFVKNPHYSSVKEATDVIAFEGVSKQYGDTVLFDGATFGINEGHRTALIGPNGAGKTTLLRLIMGVEQPDGGAFKMPGALTVGWLPQEVETLSEATPLETVLEPFKHLLRYEERLGEAAAELSGGDSRALGKIDELEREMHANDGFSLTSRAEMILDGLGVPRESWDRPLRELSGGFRMRAVLGRLLLQNPGFMLLDEPTNHLDMDSLIWLERFLASYKGGMLIVSHDRDFLNRMCTHTADVRNRGVRVYNGNYDKYLVAKAEEAAAAETRTKNLESKIASAERFVERFRAKATSADLILGGGKWG

SEQ ID NO: 81419 - protein, 222 aa, Unknown
  Obtained from environmental sample
  misc_feature (1)..(222): Xaa is any amino acid
MVDKVKEMEDPRVAKFDFWRNRVLLSADDDQQGAREDRTYPAHTSSSELISRIIDNGRPDIGQKKIYLFEYGWDERYHKPAATRAFINEINSGAALVNWFGHGSMNQIADEMLFIRDQVSALENRGRYPLFTMFSCSVGRNDQPGSESLAAMLVKQPMGGGVAAIASAREVFAEKNENLSVSFFSELLGISDNAELSVGRALARAKIGICISTIGTTHCLAT

SEQ ID NO: 81420 - protein, 104 aa, Unknown
  Obtained from environmental sample
  misc_feature (1)..(104): Xaa is any amino acid
MKYILWDFDGTLGYREGIWSGALYSVLLKNGIKDITIDVIKPYLTKGFTWHNSEKSHKELFGNKTWLEYYEDYFSNIFIELGIQKNISKKFLKKYSADLIIGGN

SEQ ID NO: 81421 - protein, 81 aa, Unknown
  Obtained from environmental sample
  DOMAIN (18)...(50): Ankyrin repeat
  misc_feature (1)..(81): Xaa is any amino acid
MVKALIEAGADTNILDKDGQSALIVSVGAGDETIVEMLVKAGANPDLEDSLGVSARKYATLFKNKAMIALFDNYVSSQELK

SEQ ID NO: 81422 - protein, 200 aa, Unknown
  Obtained from environmental sample
  DOMAIN (126)...(149): 4Fe-4S binding domain
  misc_feature (1)..(200): Xaa is any amino acid
VRIARLQFEGKLAEGVHDIPRELAPTGSTPIRCCIYHDREILRHRVIARLGCGLEKYDYEKRLAEYVEEALNREKPTWPMLTVLDLACNACVRSHFMVTNACLACVARPCVVNCGRKAIEIKEGRARIDSEKCVNCGVCLQNCPYHAIIKIPVPCEEACPVGAIPNNETAGSALIITNVSFAGTVCANAFRRDDGQESTG

SEQ ID NO: 81423 - protein, 284 aa, Unknown
  Obtained from environmental sample
  misc_feature (1)..(284): Xaa is any amino acid
MDESLAVRDVIAGTADVYWQAVAPSILQTLSDADKAKLDFYSVPSGSWSLMVNPIPNKAPYTWTANGTTEFNPFAIREVRFALNFLIDRKKLVDEILFGAGEATFTAFTPGQPGTYRYNLLASKFGFTATGNERKAIADIDAAMTAASNLPENRGKLVKRGSFWQYNGKDVSIKFLIRVDDPNGRLPAGRYVADQIEKAGIKVERLEYDRSKASSLAYYSDPAEYEWHLYTEGWGAGATRAWWDVSTPRCTLPGLVIWQAEPKKNTGTILTTASMSLQRKLFRQ

SEQ ID NO: 81424 - protein, 319 aa, Unknown
  Obtained from environmental sample
  misc_feature (1)..(319): Xaa is any amino acid
DRGSWFQPVTALWIFLPFALFAGGGRQIETKTADGIEIWQTEFDVAGRRPGTYNVIINAKDAAGNIGVGGPYNIKVSPTAGLPEAHIVYPRPDMIVRSDIVEIVGTAESRYGIQQIVLSMDGGPYVPLEGLEYWDYRIPAEEIGEGKHTVRVKAVDALGVEGLNSRVDFILDNLPPQIELINHEVGDIITGGIVTIKGKVIEANGLQSLSLSKDGGETYVPLFHTGGRKGDPARYFSFSIPSKKLNDGAMIFYIRAINTTGVSIIRPILFFVNNVAPVIDIMSPSEDEDVYGVTQVTGRVISPIGLTQFYFEWARRRDG

SEQ ID NO: 81425 - protein, 202 aa, Unknown
  Obtained from environmental sample
  misc_feature (1)..(202): Xaa is any amino acid
MNIPPENRVKVRDYAEFNVLPENRDYYYHHFKDNCSTRIRDLIDLAVDGQFKEQYGNAPGRYTFRQHVRRHTWYNPPIDWALNFWMGQVIDTPTTIWEEMFLPSEVGKRIEDFWYTDANGKKQKLITGKETIYKSQGRPAVLDVPRKQWPRELALSLVLAGFIGFFFLLQKKNYRAGKILAGISMSLAGLLSALDSADSDQL

SEQ ID NO: 81426 - protein, 256 aa, Unknown
  Obtained from environmental sample
  misc_feature (1)..(256): Xaa is any amino acid
VNNFWKTVSGSALAALALVCVFGIAAAVSAQDIEDALSAPDAKADTIMTPFGPQIVSGGNAVNPDKPGKGKSGKKTSVLMDELLGESDWTFVDKIAIRFVMNVVFAYILICMIFAKEHRIKEYAFCFFISNILIFMVTSLLAYVKVKTGFAFGLFAILSILRYRTEQINIREMTFLFASIIMGVINSMATDGLMLLAVFLADVVLCASIAICDSRFMAKTDPLLLVYDNTGMLAKDKKKELLEDIKNRFRVRRDQS

SEQ ID NO: 81427 - protein, 101 aa, Unknown
  Obtained from environmental sample
  misc_feature (1)..(101): Xaa is any amino acid
MKVFIVYCHPSNDSLTREVRDSFIAGLESAGHDYILSDLYAMNFSSDMSEGEYERETYYRRELPLPEDVSAEQEKINDGDAIVFIYPVFWNDAPAKLVAGL

SEQ ID NO: 81428 - protein, 318 aa, Unknown
  Obtained from environmental sample
  DOMAIN (2)...(210): BadF/BadG/BcrA/BcrD ATPase family
  misc_feature (1)..(318): Xaa is any amino acid
MGSNSAREGKVPQGIPALVTGNEGRFMFDVSGTLEPLCVEAALRSLGIKADAVVSMGGEDLIVYSLDADGKIINSFSGNKCASGTGEFLKQQLARMDMTLDDIDRVPDTAKVYALSTRCSVFMKSDCTHRLNKREATKDDIVLSLSDVMAVKVIDFLKRAKVTSGRVALTGGITLNRHIIRFIREKAPNIEFIIPDTAPVFEAFGAAVMALQSGSKLPSADNLLRANDVRFGALGALRDWKDKVKVFEKPDGKVKSGRGYILGVDGGSTTTKACLVDIQTDEITASHYGRTHGESVKALKECLAIIQEKISPTRRQKN

SEQ ID NO: 81429 - protein, 315 aa, Unknown
  Obtained from environmental sample
  misc_feature (1)..(315): Xaa is any amino acid
MYQFDRRGNNGFFWLDGKGFGNEWVSQGSANHNFAFTMEMEFQFNAKRGMTFNFSGDDDVWVFIDKKLVLDIGGIHEELSANFSLDNVLPESEMGKTHYLRVFYAERHSTGSNIRIQTNIVAPPTGVGISTVGNTSSSVVSGANGSFDKAADSTRTLYSVVYDENGNPMDTSKYNCKNVTWTINGAVVGTGCSIQVKDSVARAEGVKIEVTYKDPEAGDLKGETKMNVKALTPKTIHIQRTETPKPTTEKNKSDDIYFGPSEDQVTVYAVLRDKYGNFAGYADVKSGDRKHWSASSAADWYSVDQDIATVNPRNG

SEQ ID NO: 81430 - protein, 111 aa, Unknown
  Obtained from environmental sample
  DOMAIN (4)...(107): Response regulator receiver domain
  misc_feature (1)..(111): Xaa is any amino acid
LSAERILIIEDDPEIREMLKFAFIREGWQLNMVSTGEEGLKIIESKETDCIILDIMLPGMDGLKTLKKIRENIKFQTLPVILCTARGEESDIIAGLNGSRYLGQSIHGGGG

SEQ ID NO: 81431 - protein, 141 aa, Unknown
  Obtained from environmental sample
  DOMAIN (4)...(68): Heavy-metal-associated domain
  misc_feature (1)..(141): Xaa is any amino acid
MQTELSIGGMTCAACSARVERALRKLEGVESAVVNLATERATIVYDTKVLRLSAIKEAVTKAGYQALEFSKDSVDEDKLRKEKEIKILKIKFIIAASLGLPLLYIAMAPMIPWVALPFPKSLNPRIPSITVSAICHGGGMG

SEQ ID NO: 81432 - protein, 86 aa, Unknown
  Obtained from environmental sample
  misc_feature (1)..(86): Xaa is any amino acid
MNNEQCGLPPKYPIVLVHGIIAHDRPSVMKYWGKIPETLRKTGVGVFFGNTDSWGDIKSNAKLLKATIDNVLDETKSRKVNIIAHF

SEQ ID NO: 81433 - protein, 325 aa, Unknown
  Obtained from environmental sample
  DOMAIN (25)...(200): DNA gyrase B
  misc_feature (1)..(325): Xaa is any amino acid
VIAENTSATKRLSTPKIHEFKFEGGVKSFVEYLNENKTVLYKDPIFLEGSRDDGEGGSVEVECAIQYNDGFNEIMFSFVNDINTREGGTHLNGFKTALTRTLNEFLKKSKQAKKLDESLSGDDVREGLTAVLSVKVPNPQFEGQTKGKLGNSEVKGIVEGLVNEQLELFFDKHPEVINNILEKSVLAAKARIAARQARDATRRKNAMDSAGLPGKLADCSEKDPAKCELFIVEGDSAGGSAKGGRDRRTQAILPLWGKMLNVEKQRIEKVITNDKLQPIIASIGAGCGNDFDVSKSAITKLSSWPMPTWTAPTSAPCCSHFFTVS

SEQ ID NO: 81434 - protein, 218 aa, Unknown
  Obtained from environmental sample
  misc_feature (1)..(218): Xaa is any amino acid
FRERRKHYPPALLQLLKELPAWKTPTAEEAARYKEMANNRNQNPLRRSPHFFDTLWRINNRSEADQRVKTIRFLGKSVNVHYLIMENLALVEEQILAAAKADPQVQSWINGINTLEGWTWRDIAQTQSRSFHAYGLAIDLLPKSLGGKATYWLWAAEKKPEWWNISYNERYHPPAAVIKAFETYGFIWGGKWLYFDTMHFEYRPEILILGGITPETRR

SEQ ID NO: 81435 - protein, 284 aa, Unknown
  Obtained from environmental sample
  misc_feature (1)..(284): Xaa is any amino acid
MSANPFAPGSKLSKMSAVYNGWRRRDPLAPLNLVYESLSREHGVSVSSVKRYIFWIKVNGYQPKEHKPRPLVAWDAEALAHFKQFYLKVGREAGRCTVRNAYQQTLIAAAENGWKIGSEQSAYVHAREIHSALKLYVKGGSRALDNMFYIARDLSGLRPFQIVVGDQHRFDFWVTDDQGVYFRPECYLWLDMRTRLVYGIAFDRNYNTRTVLRALKQGVIRFGKFESTYNDNGAGEKSAVADYTIEQLQNYGMKFCDEGDLYRTETGAYVVEDADGKMANVAGS

SEQ ID NO: 81436 - protein, 109 aa, Unknown
  Obtained from environmental sample
  misc_feature (1)..(109): Xaa is any amino acid
MSEYILEINELTKEFPGVRALENVSLKVKKGEIHAVCGENGARKSTLMSCISGVYPKGDYIGKVFFKGHETNYQSAKDSEKEGLCIYHHEMALSPYLVIMKIFFWDTWK

SEQ ID NO: 81437 - protein, 306 aa, Unknown
  Obtained from environmental sample
  DOMAIN (87)...(104): Bacterial transferase hexapeptide (three repeats)
  misc_feature (1)..(306): Xaa is any amino acid
FVSDPKYAGQGKACAAAAVIVKRGESFPEKVCLEVDDPYVGYALVAQLFEDTTPLFGEGVHPSAIVDKTAVVDKTVSVGPGTVIGADVRIGTNCRIGANCVIERGVSVGESTRIDSGAVIRYGTQIGARVIIQSGAVLGSDGFGNARGADGVFVRIPCFGKVVVEDDADIGAGTTIDRGNFEPTVIGKGVKLDNLVHIAHNVTIGENTAIAAQTGISGSTKVGKRVIIAGQVGFVGHINIGDDSFVGAKAGVSKDVDPKANVTGYPARDIMTMRRIEASSSRLPDLLKEVKKLREEVEELKVLPFT

SEQ ID NO: 81438 - protein, 159 aa, Unknown
  Obtained from environmental sample
  misc_feature (1)..(159): Xaa is any amino acid
SAEVFRPLAESDIYDAGLSAGKETGGKEPVLDDTTLDMDDFKMDSGINQDDSLAKVIPEAFETGPGAEANIPFDDDLEVFADEDISLDNLDKEESLAAKAERVNEKENGLSSEVKEEVKKVLSYMDHLLESLPEEKIEEFAKSEHFDTYKKLFKELGLV

SEQ ID NO: 81439 - protein, 152 aa, Unknown
  Obtained from environmental sample
  misc_feature (1)..(152): Xaa is any amino acid
MTDSRLKKVNKLCKAEGPVLRASTLRSAGFCGKDTEELIQLGLLQRLRRGYYASPEKLNDMDTYEILAALVPDAVISLFSAAQYHDLSSVIPQQIDVTFPVNKRVPVLPPDIHVKIHKAIPQVYEVGIQTVKKEGVPLKYMIRDVRSVIFSA

SEQ ID NO: 81440 - protein, 81 aa, Unknown
  Obtained from environmental sample
  misc_feature (1)..(81): Xaa is any amino acid
MSENSVMVYIQHNGGKAAEVSLELVCKARELADRLKVEVSAALFGEHVAGEAARLASLGADRVYFTEDPRLKSTLPFPTAN

SEQ ID NO: 81441 - protein, 94 aa, Unknown
  Obtained from environmental sample
  DOMAIN (31)...(53): MORN repeat
  misc_feature (1)..(94): Xaa is any amino acid
TSANGDVYEGDFVDGIPHGKGKKTFVNGDVYEGDFDFGDFLGKGKYTFANGDVYEGGFYGVASPGRMSFKGKGKMTYADGKVEKGEWKDGKFVG

SEQ ID NO: 81442 - protein, 337 aa, Unknown
  Obtained from environmental sample
  DOMAIN (31)...(141): Acyl-CoA dehydrogenase, N-terminal domain
  misc_feature (1)..(337): Xaa is any amino acid
EIFQRVSKYAHAPKDGADARDSTAWVLSIIGEVSGEFVAPAAPAVDEAGPTLANNQVTLNPATQKAWDMLAKADMMGFGIPRQYGGINMPITILSIAAEILSRADGSFLNFGLQQDIAETINKFASEEQKRAYLPKLCSGEWDSSMILTEPDAGSDLQSVNLKAVQGADGTWRLNGVKRFITNGCGTIGLVLARSEEKGKGARGLSFFIYKRDEKMIIRRLEHKLGIHGSPTCELQFNNAPAELLGERQRGLTKYTLWLMNSARLGVAAQAVGIAEAAYREADLYAAKRIQFGVPVRDLPPVFEMLTEMKIALEAGRSLCMRLPGFGTEGASRHKGK

SEQ ID NO: 81443 - protein, 325 aa, Unknown
  Obtained from environmental sample
  DOMAIN (3)...(316): Histidinol dehydrogenase
  misc_feature (1)..(325): Xaa is any amino acid
SSSRFDGRAGEAGIRDVREGGDEALAKYSKRFDGLKPAKLRIPPAEIAARARHASAELKNAIRETVRRLRQYHGCQGLQMFKVSTPDGEMRQAVRALNRVGLYIPGGRTVYPSSVLMNVVPALSAGVKEIAAVTPPQKDGLDAGVAFALNFLGVSEVYQVGGAQAIAALAYGTETIAPVDKIVGPGNAYVAAAKRLVYGKVDIDCVAGPSEVAIVADKSVDPQLVALDLLAQAEHGSGDEIAVCIVESKVTANKIAAALAKEINVSPSKQTFMKLPPHAIAIFVTTSRGESLELCDVIAPEHLQLMNENGQRRRPGLCPTPPRSS

SEQ ID NO: 81444 - protein, 283 aa, Unknown
  Obtained from environmental sample
  DOMAIN (4)...(272): EPSP synthase (3-phosphoshikimate 1-carboxyvinyltransferase)
  misc_feature (1)..(283): Xaa is any amino acid
GSPINKIGREATDIFLDEASVTATENAVMAAVLAAGETILTNAASEPHVQDLCHMLRAMGAGIEGIGSNILTIRGVEKLRGCDFTIGADFMEVGSFIGLAAATKGELFIEGTKPSDLRPAKTAFGKLGIVWEQEGNTIHVPSNQTLEVNCDLGGMIPKIDDAPWPGFPPDLTSIITVVATQVKGTVLIHEKMFESRMFFVDKLIGMGARIVLCDPHRAVVSGPTRLTGSELQSPDVRAGMAMVIAAMTAEGKSQIDNVYQIERGYENIVARLSSLGGRICAVP

SEQ ID NO: 81445 - protein, 296 aa, Unknown
  Obtained from environmental sample
  DOMAIN (149)...(253): Glycosyl hydrolases family 2, immunoglobulin-like beta-sandwich domain
  misc_feature (1)..(296): Xaa is any amino acid
LPGDAKNAYMPDFCDCTWKNVNLPHDWVISQPFNRGEQGGWTPQNMQGFFEWEGVCWYRKEFLLSGIVGKAVYVYFGGAYRNSKVYVNGKEAGGRASGYSSFEIDITEFVKEGKNLLAVRLDNGCEVPDRWYSGSGLYRNVLLKILPVTHIKTWGVQVDVKQNDVIVTATIVSRDKSAKGNVAAQILKPDGSLAAKSTVPFDMNGKNEIAVKQKLNVKNPSFWSSENPNLYRAVINLETGKEGMSTEVKLGFRTVKIEYKKGMTVNGEESKTNRACVCTTTAEIQVRLIMTRRGDA

SEQ ID NO: 81446 - protein, 133 aa, Unknown
  Obtained from environmental sample
  DOMAIN (5)...(128): Aspartate/ornithine carbamoyltransferase, carbamoyl-P binding domain
  misc_feature (1)..(133): Xaa is any amino acid
MLKGRSFVEPEDFSLAELDGLFTLAEKIEKDEKYLRDSCRGKLLATLFFEPSTRTRLSFEAAMLRLGGSCLGFADPGSSSASKGESLADTIRMASSYADTIVMRNPKEGSALLATRYSRFCLLVPICTWGSKS

SEQ ID NO: 81447 - protein, 225 aa, Unknown
  Obtained from environmental sample
  DOMAIN (1)...(223): Uncharacterized protein family UPF0027
  misc_feature (1)..(225): Xaa is any amino acid
PRGCGISPGNFKAQIDEVVATLKAQNREQEIESAIVRLKEEGAGRLPVPEDLAYVEGGLFDDYIHDMKIIQRFASLNRKAMVDIIVTRLGLTKRNEFTTIHNYIDTDEMILRKGAVSAKRGEKLLIPINMRDGSLICIGRGNDDWNQSAPHGAGRIMSRSAAYKNLSLEDYKSEMAGIFTTCISRSTLDEAPMAYKTMDSIVRNIDETAEIISRIKPVYNFKAGE

SEQ ID NO: 81448 - protein, 88 aa, Unknown
  Obtained from environmental sample
  misc_feature (1)..(88): Xaa is any amino acid
MKKYILFAVLLLLLLADAACAKDSKYTEVVPPKYDEVGYFSEGLVTVRLGGKWGHIGATGKEDMFKYDDVYSFSEGFAVVRLARNGVL

SEQ ID NO: 81449 - protein, 332 aa, Unknown
  Obtained from environmental sample
  DOMAIN (232)...(332): Thiamine pyrophosphate enzyme, C-terminal TPP binding domain
  misc_feature (1)..(332): Xaa is any amino acid
GRQGRFNRFAKDISASVCAASFVDSVDLPGYKIPGRAEQGFIEQAAATIKKSKKPLILAGHGAAISGAGRAVKELAEKLGAPVSSTLLGLGTFPASHDLSLGMTGMHGTVAANKAIHECDLLISIGARFDDRITAKLSEFAKQCEVIHIDIDQAEYGKIITPRHFLHGDAKIILEQLLPLVEKLDSAEWLKTISSWKNKYPLHYPKHGGLRVQHIVQTLYEVTNGKAIIVTDVGQHQLWTAQFFKCDYPGQFLTSGGAGTMGYGFPASIGAALGNKTGFPVCAVLGDGGFSMTLCELATAYINKLPIKIFGMDNRFLRMVRQGQDMFWKQRF

SEQ ID NO: 81450 - protein, 207 aa, Unknown
  Obtained from environmental sample
  DOMAIN (26)...(177): Imidazoleglycerol-phosphate dehydratase
  misc_feature (1)..(207): Xaa is any amino acid
RKTKETDITIKLNMTGKGEAKINDPIGFMGHMLNTLPRHGLFDLEIVAKGDLEVDQHHLVEDTGIVLGQCFAKALGEKRGIRRNGSCHYPMDETLARAAVDISGRSFLFFDGKLGAAPLIAADDKDKPSQFQTDTIEDFWQGFTGAAGCNLHLEIIRGRSDHHKIEAMFKAAARALRCACELDERARDAIPSTKGSLPRFDAPGVLV

SEQ ID NO: 81451 - protein, 130 aa, Unknown
  Obtained from environmental sample
  misc_feature (1)..(130): Xaa is any amino acid
AWPIQGRIPFWLWHWVNAGFRLKRAKFFAVGISVITAADVEGKAVAITGQMDLVFEEDDEVVVLDFKTDRLENPEDHYGQLAAYYRAAGDLFGKPVSLWLYYLRSGSAVNVTEEVRGLSLEELAARAMRE

SEQ ID NO: 81452 - protein, 98 aa, Unknown
  Obtained from environmental sample
  misc_feature (1)..(98): Xaa is any amino acid
MALVSFSEVRRFYGRQDVLAGVTLALGPGERVGLVGRNGAGKTTLIRLLLDLESPDSGAVTRAKGLRTGYLPQELPARRGLTLLELVLTLGQSVHGEP

SEQ ID NO: 81453 - protein, 333 aa, Unknown
  Obtained from environmental sample
  DOMAIN (141)...(333): Protein of unknown function (DUF1538)
  misc_feature (1)..(333): Xaa is any amino acid
AFSPRFDGRGKYGLSVILVFFYAATFILAHFAPDTFVPVGFDSGGVTTGPMTVPFILAMGAGIAALRSDKSSQEDSFGLVAMCSIGPILAVLLLGIFFKPGHAELETSEIYDAATSRDVVRYFAVELPIFLKEVFISLSAIVLCFIIFQIITRRFKKYQLGRITVGFFYTFIGLVIFLTGVNVGFFPVGQLLGLQLASSPFKWVLIPLGALIGYFIVKAEPAVHVLNKQVEEISSGAITIKMMNLGLSIGMSLALTITMIRILYGIPLMYILIPGYVFALALTFFVPPIFTGIAFDSRGVCSGPMTSTFLLPLAMGTCNGVSGNLMIDAFRIV

SEQ ID NO: 81454 - protein, 331 aa, Unknown
  Obtained from environmental sample
  misc_feature (1)..(331): Xaa is any amino acid
RLFYRRLSGNFSERHSSYNYQRKVDTSFACPAPLKANLGALEDRCVIFELPVRQPLDEKLQPLINATKVAATKVASNPLMLGVSVSIWNHTATLELLRELEKLWEGQRPVIVLGGPEVSHLPQEAEIFRYADYVIRGEGEDAFRVLCEHILAERHEHSGTTTFINAENADISGIKNGYDFYTDEDVTKKLIYVEASRGCPFNCEFCLSSIKSGEDLKVREFPLEPFLAQMDGLVSRGVKTFKFLDRTFNININRACRIMEFFLEKIAQKNEIVVHFEMVPSLFPSALRETLSRFPPGTLRLEIGIQTLNPDIAARITAPVSYQANRLSLAN

SEQ ID NO: 81455 - protein, 175 aa, Unknown
  Obtained from environmental sample
  misc_feature (1)..(175): Xaa is any amino acid
MNLTNSDLIRCLDRRQQDAYSENIGGNMPNITAEKEAWHSVQNHNILIVWQPSFNLGIPIVDEQHRGIVSTINSLCYAIQNKQGNQILQPVTSMVTEYTRIHFELEEDFLQKCGYPNLEAHRTLHKELTDALSHVSKESIWNRDPHEFLDFLQKWWHHHICKEEPGFHHYLSNKK

SEQ ID NO: 81456 - protein, 244 aa, Unknown
  Obtained from environmental sample
  misc_feature (1)..(244): Xaa is any amino acid
LVSPEGSDSARASHAIDIESVDSYQVYDRLLGLPEPGAPEIVDNLIIFTASSSLRRVGVAFADEGFAKVHWFRQLLVARDPQDIPLKAKPSERVKDSGIIFYVHQIPEGAAEIEYRLIINGLWTTDPANPNSRRDNVGLSRSVISLPQKEIVPSPLKGPPGSLNFVFKGPPGETVSVAGNFNGWDPFMYQLKEGPAGNYSINIPLPPGRYQYVFFHRGQRYLDPYNANRIYAKDGKAASEIVIQ

SEQ ID NO: 81457 - protein, 90 aa, Unknown
  Obtained from environmental sample
  misc_feature (1)..(90): Xaa is any amino acid
MKILYIAEIVGKTGIYALKKCLPELKNTKKPDFIIACADSATGGSGLGRNHAAYIRKLGVQVITTGGMLLLQKGFAPKISGKFHTFKAGN

SEQ ID NO: 81458 - protein, 172 aa, Unknown
  Obtained from environmental sample
  misc_feature (1)..(172): Xaa is any amino acid
GGGGGVIKKKKNKAGGGGGGPPPPPSFFFFFFFLGERGGEKHKKIFLFWGGGGQKEVFFFFFFLKKKKKNNLFFLGPPPKKKIFFLITPPPGGGGGFFFFFKKKRGKTPPGVFFFFSPPKNFFVGAPPPLFFLKGVFFFSFSKNFLWAFFFFFFRDPLPRKFLDFSGGGAGF

SEQ ID NO: 81459 - protein, 247 aa, Unknown
  Obtained from environmental sample
  misc_feature (1)..(247): Xaa is any amino acid
MVNGIVGYSCNVFYGSKAVRFVLGRNCNLKYGARLIHSVLGDNSTVSCCEILNNLVFPVHEQHHNNSFLIASLIQGMSNMAAAATIGSNHNSRANDGEIRAKRGFWPGLAVSLKHSSVFASFVIIAKGEYPSELNIPLPFSLINNNVYKNQLEIMPAYYWIHNLYALERNSWKSENRDRRKIKIQRIETDYLAPDTAEEIIAALSLLDGWLGEAGFSPMDITGIDDGIVRQIDCHHLNTAAKLAITR

SEQ ID NO: 81460 - protein, 220 aa, Unknown
  Obtained from environmental sample
  DOMAIN (1)...(129): Carbamoyl-phosphate synthase L chain, ATP binding domain
  misc_feature (1)..(220): Xaa is any amino acid
MENFDPVGIHTGDSIVIAPCVTLADKEYQMLRSAALNIICALGVEGGCNVQFALHPDNFDYAVIEVNPRVSRSSALASKATGYPIAKVATKIAIGYTLDEIVNAVTGNTFAAFEPTLDYVAVKFPKWPFDKFVYAQKELGTQMKATGEVMAIADTFEEALVKAVRGAEIGLNSLNLPPLSANQTKKIAPFLTRSPTSVGFICTRRSSAESAWTSYFTSPK

SEQ ID NO: 81461 - protein, 175 aa, Unknown
  Obtained from environmental sample
  misc_feature (1)..(175): Xaa is any amino acid
MGNVPCFLGEFGLAFDLNNKDGFKKGDYSLHEEALSMYYDAVDANLLHCTIWNYSASNTNEYGDSWNEEDLSIFSEGKERAILGWKRPYPMATAGEPLSFSWDRKLKTFVFRYRATVKYRAQHIYLPREFSGLNRESKPPAAGKIWRGNFIPKNHAFFVFTDGFYKEVILKVGLN

SEQ ID NO: 81462 - protein, 103 aa, Unknown
  Obtained from environmental sample
  DOMAIN (6)...(102): Protein-L-isoaspartate(D-aspartate) O-methyltransferase (PCMT)
  misc_feature (1)..(103): Xaa is any amino acid
MLDPNLSSELLIGKLRSCGVKDERVLEAFPQVPRHLFVDNPVQAYDDVPLSIGYGQTISQPSPVAQMNELLKLGKDQKILEIGTGVGPPERAYCPSFRGPVSP

SEQ ID NO: 81463 - protein, 305 aa, Unknown
  Obtained from environmental sample
  DOMAIN (5)...(299): Serine hydroxymethyltransferase
  misc_feature (1)..(305): Xaa is any amino acid
FGYGEDEQPLHLTDAQWKELKTSLGNQRLLGLDYYSGGHLTHGYRNNVSGRMFDIHGYSVSEKDGLLDYDQIEKQALELRPLILLTGYSAYPRKINFKRMREIADKAGSVFMVDMAHFAGLVAGKVFTDEFDPVPWAHIVTSTTHKTLRGPRAGFVLSVPEFAEALDKGCPLTMGGPLPHVIAAKAVAFREASSPEFRKYAQNIVDNCQTLAASCVKNGLDVLTGGTDNHLILIDVHKSGITGRQAESALHECRVTLNRNSLPRDPNGPWYTSGIRLGTAAVTSLGMGRAEMTELGGLIADVVQG

SEQ ID NO: 81464 - protein, 261 aa, Unknown
  Obtained from environmental sample
  DOMAIN (33)...(100): Transglutaminase-like superfamily
  misc_feature (1)..(261): Xaa is any amino acid
MIYDRLKFGEYRYSLKPGIAADGDQLKHFLFNTKKGYCSYYAFAFTLMLRSLGIPCRLAAGFFVDPSTEAFGYFPVRADMAHAWAEVWFPGYGWIEYDPTTENIAEGEEFRFSSGTPPELFERLMKEILDNRSRLKAKEGDEPESERGNLASLGRSALSFINKKGPVLLVALLLLLFLSIRFGFFWLYSISRMPRKKALYLWAYVKRRMALAGFRKSNIEGEAEWAKANDNVCGGTYELYLDFAAARFAPDFTFDDEKEMT

SEQ ID NO: 81465 - protein, 91 aa, Unknown
  Obtained from environmental sample
  misc_feature (1)..(91): Xaa is any amino acid
MPKHKAIVMYSGGLDSTIAVHLLKSQGLDVTALHFRMPFNVGVGTYPNEVMEYADALGVPLRVEEEGEEFVDMVRDPKFGYGKNANACSRP

SEQ ID NO: 81466 - protein, 95 aa, Unknown
  Obtained from environmental sample
  misc_feature (1)..(95): Xaa is any amino acid
ITENGTCITECLSKDGRVHDPQRTEFIADHLGQVERAIGEGIPYKGYFYWSLLDNFEWHWGYKYRFGLVYVDFETGERRVKDSGIYFSERISGNL

SEQ ID NO: 81467 - protein, 229 aa, Unknown
  Obtained from environmental sample
  DOMAIN (2)...(229): Glycosyl hydrolase family 1
  misc_feature (1)..(229): Xaa is any amino acid
MPFPKDFVWGAATAAYQVEGAAFEDGKGLGIWDVFCHRPNAIWQGHTGDTACDHYHRYLEDVGIMKELGVNAYRMEIAWPRVVPEGTGAVNPKGIDFYDRLIDALLAAGIDPWVTLYHWNLPQTLQQRGGWMNPESPKWFGDFASVVVDKFSDRVVHWMTINEPHVIINHGMFTGVHAPGYKLTMAEALAAGHNLLLAHGPRRFRYQGESQEAGPLFGSAPVGWLRRPA

SEQ ID NO: 81468 - protein, 83 aa, Unknown
  Obtained from environmental sample
  DOMAIN (28)...(82): Helix-turn-helix
  misc_feature (1)..(83): Xaa is any amino acid
DVDEERITSRDWTGFNEKAAKIRPGESLHALRTLREMKQAELAKKIGVRPQQMFDMKKGRAPIGKKMAMKIGEALNFNYKHFL

SEQ ID NO: 81469 - protein, 218 aa, Unknown
  Obtained from environmental sample
  DOMAIN (55)...(130): Mur ligase family, catalytic domain
  misc_feature (1)..(218): Xaa is any amino acid
MVIIENPWKPSSAFARFIGDLLNGALPKKAGIIELRIGASAPGSFSASAWPAASVITALKYDSRSIKPGDLYFALPGLHTDGHSFIPQAVENGALAVVYQNECPEFRDGIIYIRVKDSRFAMSPIADAFYNFPSGKMGIIGVTGTEGKSTTVYLIYQLLKLLGRKAAFISTVQHGDGLTEKWNTEHQTTPEAVTVHRLLAEMLMNGANSPLGRSVVGN

SEQ ID NO: 81470 - protein, 120 aa, Unknown
  Obtained from environmental sample
  misc_feature (1)..(120): Xaa is any amino acid
MKEENKKEEEKDFSKIMKTAKPFIKWVGGKSQLLEQFEDYLPSELKKGRLEQYVEPFLGSGAMYFSISDKYKIKNAHLSDLNKDLILVYIVVQQKPEYLLYFFEQFPDEYDTTIQEKRDE

SEQ ID NO: 81471 - protein, 91 aa, Unknown
  Obtained from environmental sample
  misc_feature (1)..(91): Xaa is any amino acid
GILTASGIPFAKPGREGEYCLSRPGVQRLFSTGNNIASNQANYNGNYPYNNNAEGTYRKTTTAVGSFPPNPWGLYDMHGNVSEWCWDIFGA

SEQ ID NO: 81472 - protein, 108 aa, Unknown
  Obtained from environmental sample
  DOMAIN (4)...(108): IMP dehydrogenase / GMP reductase domain
  misc_feature (1)..(108): Xaa is any amino acid
MFTEGLSYDDVLLLPGYSGILPKSCSIKTVLCEGINLNVPVISAAMDTVTEEKLAIAIALEGGAGVIHRNLNPEEQGKQTANVKRFLNWINDSPITVPHDAYIKDVKG

SEQ ID NO: 81473 - protein, 338 aa, Unknown
  Obtained from environmental sample
  DOMAIN (163)...(275): Pyridoxal-dependent decarboxylase, C-terminal sheet domain
  misc_feature (1)..(338): Xaa is any amino acid
GVPPWNRIRHESRLARTCFLRYNPGPLKEGNAIIGKPEEAKYGLTREQLIDGYRVLKEKGVKRFALHTMVASNELSAPYHVETARMLFELAVEINKKAEVRLEFINLGGGVGIPYKPEQTAVDYKSLTAVIKKAYDEIIKPAGLDPINIRTEWGRVVTGPYGWLVARAIHKKEIYRKYIGLDACMADLMRPALYGAYHHITIPGKETEALTEVYDVVGSLCENNDKFAIQRSLPKIEVASENGIGDFVVIHDARAHGRAMGFNYNGKLRCGELLLRQDGSVVQIAARKQQTTILPRWILPGSGIFANNQNGEKRAPGKQTITVSEKRERYSKKKAVFS

SEQ ID NO: 81474 - protein, 181 aa, Unknown
  Obtained from environmental sample
  misc_feature (1)..(181): Xaa is any amino acid
MKRTGVDIASRALRVDHSLSRDTVNPGMTVVYTIDFENSAKAGWLNGGRPGVNFSYAHDGTAASAGSHTFQLRAFHDAHEAYIDYGNYRISYFLFDNNYNGLRANGWNVRPDILYVPTEEKSKFKLLHENITPGEDAKYRKWNQRFNIADRRTFLIQNRSQYHWGEQWQPPHPFSYKTKTA

SEQ ID NO: 81475 - protein, 39 aa, Unknown
  Obtained from environmental sample
  misc_feature (1)..(39): Xaa is any amino acid
MEKQINKVLYGGDYNPEQWPRETWLEDMRLLSLAGSTYD

SEQ ID NO: 81476 - protein, 118 aa, Unknown
  Obtained from environmental sample
  misc_feature (1)..(118): Xaa is any amino acid
FPDDGRGTEEGVTAEEVQSNVTDNESALIKSPHGHIQGYNGIAIADSGSQIIVSAEVTGSGPESGSFPKMLDSLEENMKMVSRKKEPLKKALLEGDTGFFSEANLQEAAARGIKVLIV

SEQ ID NO: 81477 - protein, 48 aa, Unknown
  Obtained from environmental sample
  misc_feature (1)..(48): Xaa is any amino acid
MSRGAGFLAFIAGLSTIDPTLYEAGLVDGISNRWQELGYITLPNMKGM

SEQ ID NO: 81478 - protein, 340 aa, Unknown
  Obtained from environmental sample
  DOMAIN (155)...(182): Phospholipase D Active site motif
  misc_feature (1)..(340): Xaa is any amino acid
FISKKLKRALDKNIRDSRDAFFLRGNRLDELIDEHPDFRTHAQYLQNFAGFPVFSNTRQIYLDSGEAFYRKVLEELEKAQRYIFLEFFILKEGVMLNSILDILEKKAKAGLDVRIIYDDLGCFFTLPENYPKKLAQRGIKCFVFNPFRPIVSSLQNNRDHRKIISIDGKVVFTGGLNLADEYINIVERFGHWKDAAIMLEGDGAWAFTLIFLQMWNLKAGDKDDYTSFFPWNDNIIEHTEIGVAEGYEAWGYVQPYADSPIDHEFIGEHVYIKIINQAKKFVYINTPYLIVDDNLLSALTTAAKSGVDVRIITPHRWDKWIVAIASRSYSRLGHQTGEKP

SEQ ID NO: 81479 - protein, 325 aa, Unknown
  Obtained from environmental sample
  misc_feature (1)..(325): Xaa is any amino acid
LAELLVLHQGGGAESSGATAGGITEHFFSQKNACPDCGISIPELQPRLFSFNNPFGACPSCSGLGAKLEFDPDLVIPDRSLSFNEGGIAPYNPDSAWHRSRFESLAKHYKFSLDTPIKSLPKKVQDALLYGSDDEIKIRYENREGTGRFEYQSRFPGVLEDLKRRYLETQSPGIKEWLEKFMSQKPCEDCGGKRLKPEVLGVTVAGKNIWELSRLSVTDSLKFFESVKFNKNEKKISYQILKEITARLGFMQNVGLDYLSLERQASTLSGGEAQRIRLATQIGSSLVGGLYILDEPSIGLHQRDNQRLIDTLLHLRDLGNTLIGV

SEQ ID NO: 81480 - protein, 340 aa, Unknown
  Obtained from environmental sample
  DOMAIN (70)...(153): B12 binding domain
  misc_feature (1)..(340): Xaa is any amino acid
GGLWMAFLNPADLSPWTGSEKNYGKQRKTLSFAGNGNGGNYADRLLEVGSKETSGDKEEDQKKKDEWRNLPIEDRISYALVKGIDRYIAEDTLDLHNSGKSYIEIVEGPLMRGIEEIGLLYGAGGIFLHQMIRSAQVMKKALAALDSCAASGKGITCAGKVVLATVRGDVHDIGKNIVAVILGCNGYEVIDLGVMVSAEKILETARNTDADCIGLSGLISSSLDEMVFVAEEMEKADFSIPLLIGGAAASVAHTALRIALAYSGPVVYLPDAGRTPQALASLLSPVLKSDFLRKLHLEQEEARRSHEAIAGKRLLLTMEEARANRPRIDGTLGHLINGGP

SEQ ID NO: 81481 - protein, 76 aa, Unknown
  Obtained from environmental sample
  misc_feature (1)..(76): Xaa is any amino acid
FGSPNDQIGRDFIIQKNRIENNAELGCKRVCVVTGTHGDELEGQYVCAQLAKILNEDKQKLSGIVDIYPAINPLGD

SEQ ID NO: 81482 - protein, 113 aa, Unknown
  Obtained from environmental sample
  misc_feature (1)..(113): Xaa is any amino acid
MGIRFAEESFSAGYPQDVKAVNCKDSYRGFPLSGKVSEMTVVGTPWMFGLNRDKPGVWSGGHVIDPDSGSMYKCRITYHSKTDTLEMRGEIGLGIGRSQFWRKSSREEASALK

SEQ ID NO: 81483 - protein, 97 aa, Unknown
  Obtained from environmental sample
  misc_feature (1)..(97): Xaa is any amino acid
MGSADSEPGHNENAEPQREVTVSGFYFGKYEVTQKEYQEVMGRNPSWFRGDNLPVEQVSWYDAVEYCNKRSQKDGLAPAYTIDKNKIDPNNTDGFDN

SEQ ID NO: 81484 - protein, 255 aa, Unknown
  Obtained from environmental sample
  DOMAIN (119)...(255): Phosphoribosyl transferase domain
  misc_feature (1)..(255): Xaa is any amino acid
MAYYMMNDENPLSGLIKAADMVRGAFSLVIVCKDDKLIAIRDPNGFCPVCIGKNELGCAVVSESCALDACGFKFVRDVLPGEIVVIESGEIKSEGIKLKNKENDRGLCIFEYVYFARPDSVIDGVSVYKARHNMGKELARESQVDADVVCGVPDSGLIAASGYSEASGIPLVTGFVMNRYIGRSFIYPTQIQRDSAVRLKLNPLAASIQGKRVVLVEDSIVRGTTTGLMLRNLKNAGGQRSPHDGLFAAFPTHLP

SEQ ID NO: 81485 - protein, 105 aa, Unknown
  Obtained from environmental sample
  misc_feature (1)..(105): Xaa is any amino acid
MMVMLFLLGLAVFGLMALAPGDIVDQIMMQQMFNENQGKAGQNWQTMTDDQLAARRVELGLDKPFYQQYFLWLKRVIVEHNLGVSLISRAPFLLLPKIRPICHGN

SEQ ID NO: 81486 - protein, 116 aa, Unknown
  Obtained from environmental sample
  misc_feature (1)..(116): Xaa is any amino acid
KLDRSAESARTVIKREAPASDPPVLPSDASSAAAKAVQESPLEGEIIIDKARWHAIDTLLEGSGPFDRDVVFAYMLKLIILNRQALFQTEKGFSEYKSLYASILEKSGNLSAGDYK

SEQ ID NO: 81487 - protein, 190 aa, Unknown
  Obtained from environmental sample
  DOMAIN (8)...(72): ATP synthase alpha/beta family, beta-barrel domain
  misc_feature (1)..(190): Xaa is any amino acid
MIGTKGTVVAVNGNMVSARFDGAVSMNEVGYVKVADKKLKSEVIRIRGEICQLQVFEITKGIAVGDTVEFTGDMLAVELGPGLLGQVYDGLQNPLPQLAQAAGYFLERGVYMDPLPNDKKWDFTPVAKVGDKVVRADTLGTVMEGAFTHRIMVPFNLYGSYTVSKISGSGSYKIQRRSPSLQTKKARRSR

SEQ ID NO: 81488 - protein, 78 aa, Unknown
  Obtained from environmental sample
  misc_feature (1)..(78): Xaa is any amino acid
MLADITEAAVRTLDKLSAARIDKFVQQLFGTKIEHGQLANSDLSFRELETIKNAFVKVLAGYYHSRIEYPKQKEEAPQ

SEQ ID NO: 81489 - protein, 163 aa, Unknown
  Obtained from environmental sample
  DOMAIN (1)...(144): metallopeptidase family M24
  misc_feature (1)..(163): Xaa is any amino acid
SSETFMIGAVSKEARHLVGVAPKALIIGIDAVKPGAPLRAIGNAIEPYVNAQGCSVVQQYTGHGIGLKFHEFFSVYHHIEPRGEDIIMLPGMTFTIEPMINLGGYEVVTDRADGWTVRTQDGSLSAQFEHTLAVTESGAEVLTLTPSQKAAGVRLIVDGEGYR

SEQ ID NO: 81490 - protein, 73 aa, Unknown
  Obtained from environmental sample
  misc_feature (1)..(73): Xaa is any amino acid
FLSPGLWPRDPAGGLFPVSCLADELNQCERKGYCKTLLVWQGLEKITNQYLDGITIQDIVDDYRDPGAYEYYI

SEQ ID NO: 81491 - protein, 247 aa, Unknown
  Obtained from environmental sample
  DOMAIN (32)...(192): MatE
  misc_feature (1)..(247): Xaa is any amino acid
MPIDDASPAKNEKFKRMTAAPVEKLVLSLAGPSIIIMIISALYNMADTYFVSSLGTSQVAAVGIAFPLMAVIQAMGFFFGQGSGNYISRALGAQDTENASRMAATGFISGFFIMAIIAGIGLVFLKPLVEGLGTTQTIRPFATEYVFFILLASPWMTAATVLNQQLRFQGSAAIAMTGMLSGAILNILLDPLFIFVLGFGVKGAAIATMISQITSFLILLCYGTTRQDSIPIKLKIFSPSYSVTRNV

SEQ ID NO: 81492 - protein, 319 aa, Unknown
  Obtained from environmental sample
  misc_feature (1)..(319): Xaa is any amino acid
NADETADKNINDIVWGGNDIGVISVDYNGSRALVTAKGTGSTVITVSHPRKAIDLKIYISVSDMPAFSKEIILPGIVELIIGENKVVTAAAQGLSDAEIKGITWSIDDSSVAGISGEGAGLTGGKLFIQGKKSGQAWLTARQDSFGYMKKILIVCARAYEELTSTYVIASEESYYRMKVGDSRDIRLIFGSAGFPEDKKQFITWNDEGNKVVKIYDGGDHARIEAAAPGITTVTVNHELVLKPLSIMFEAYNESITGTNYTFNSNTLMMGLTVRKPSDPENDNNTRNLQVSISPQGLSYASITAVTKNPPKIFHVRSLR

SEQ ID NO: 81493 - protein, 206 aa, Unknown
  Obtained from environmental sample
  misc_feature (1)..(206): Xaa is any amino acid
EGKDPGKNFLGKKAGFSPKITTAHCCWLREDDMIIRAAKGATAVHCLISNLKLSAGWARVTRMQAHGINVALSTDGACSNNNLDLFEEIKAAALLQKHLTKDPTALPAYEAIKLATVNGAIGQGRENETGKIAVDYDADLIMLNLDSPHLFPLNEPCSAVAYSARGSDVCLTMVHGKILYEDGEYKTLDLEKIRHEVDNYVIPRLK

SEQ ID NO: 81494 - protein, 234 aa, Unknown
  Obtained from environmental sample
  misc_feature (1)..(234): Xaa is any amino acid
MEKTVKVIMIAIVAAVIVCVTVIGLSLAACNNGTSGGGGGPVIQPVTEPVLTGTVSISGTAEVGQTLTAVTTSLGGSGTISYQWKRGDTNIGTENTYLVAAADVGFTITVTVTRAGYTGSVTSDPTAVVTDPSLPELTGTVSISGNARVGQTLTADITALGGEGPISYQWKRESVMRVTTVIGKNINTYAVVAADVGSTITCTVTRTGNYGSVTSNPTAIVPESNCAPGKRGKS

SEQ ID NO: 81495 - protein, 206 aa, Unknown
  Obtained from environmental sample
  misc_feature (1)..(206): Xaa is any amino acid
MVRGETIIDNEPGADDFRQRYVRLTIACITGKGEPVNVEMAFNPKASEPVRLEYHATKLFVGQDILGQDKRYDDLKETYQIAILAKEKFFPDENFAHSFLYYDPDNHVSLGGRIRIITVELVKTEPVVGKLIEEMTNAELWAVFFQYLTDEEKRGIIIEIINREKGFAMAVETLVNITQDEIEYARMCNLIKSQLDYQRRNGRSQL

SEQ ID NO: 81496 - protein, 142 aa, Unknown
  Obtained from environmental sample
  DOMAIN (1)...(135): Indole-3-glycerol phosphate synthase
  misc_feature (1)..(142): Xaa is any amino acid
LPSTDLRGELLGAHAVLLIAALLDAKALAAYVKTASEVGLSALVEIHSEAEVEQALEAGAKIIGINNRDLKTFKVDTGVTAWLKKRIPAGIITVAESGIKSADDAKAMKEIGVDAVLIGESLMRSADKKQFLAELKAAAGGS

SEQ ID NO: 81497 - protein, 193 aa, Unknown
  Obtained from environmental sample
  DOMAIN (3)...(187): N-(5'phosphoribosyl)anthranilate (PRA) isomerase
  misc_feature (1)..(193): Xaa is any amino acid
LKVKICGLFREEDIEYVNEARPDFIGFVFAESRRKVTPAQAAKLHRCLAEGIMAVGVFVDFSIDGIAGFYRDGIISLVQLHGAEDDAYIARLKETARGVPVIKVIKSAELLSLAEAGKTVAANADYYLIDSRAGSGKTFDWDLLRSGKPCASWLHSSGKQWFLAGGITPEISERQWSLTLSQSTVQAGPKPAV

SEQ ID NO: 81498 - protein, 152 aa, Unknown
  Obtained from environmental sample
  DOMAIN (47)...(148): Methyltransferase domain
  misc_feature (1)..(152): Xaa is any amino acid
MKLTPNIPQYWEMLYEQGKDDWDLGKATPALLEFFEHPNCPKDGDVLVPGAGRGWDAEAWAKRGHNVIAIDFCSSAFDILEKLADKINNLTALNTDIFLLNPSDKKVSGKKFDIIYDYCSFNSIHPGQRDEYIEMLFRMIKDDGLAIGFFFP

SEQ ID NO: 81499 - protein, 178 aa, Unknown
  Obtained from environmental sample
  DOMAIN (11)...(107): Ribosomal protein L10
  misc_feature (1)..(178): Xaa is any amino acid
GDHGLYSEKNTGKQNKSYRRIKESLGKAGDFIFTDYRGLTVEQITALRKQLRTKEVKYKVVKNNFARLAFEQLSMPDVSSYLVGPTAVAITPKDANEVAKILYEFTKEVPALKVKGALVSGSVYDAAQTEAFSKLPGRLELISMLMSVMNAPARNLAAALNDIPSRLVRTIKAIADKK

SEQ ID NO: 81500 - protein, 171 aa, Unknown
  Obtained from environmental sample
  misc_feature (1)..(171): Xaa is any amino acid
MDTKQAIVEGKTYLGIEFGSTRIKAVLIDNSYEPVAAGNHDWENKLEDGVWTYQLADVWAGLRDCFSKLALDVKNRYGLALTAVGAVGISAMMHGYLVFDKNGDQLVPFRTWRNTITEKAVAALTERFRFNIPQRWSAAHLYQAILNKEPPVKDIGFIPPLAGMCIGINRQ

SEQ ID NO: 81501 - protein, 314 aa, Unknown
  Obtained from environmental sample
  DOMAIN (41)...(314): DNA polymerase family A
  misc_feature (1)..(314): Xaa is any amino acid
MRMMRHLEPLLEKNGATPLFENLEMPLLPVLAEMEGVGIMIEPEVLTSYGKELEIELENLQRDSWKTAGHEFNLLSTKQLQEVLFTERKLKPVKKMKTGYSTDAATLEELAREDPLPCLILRHRTLAKLKSTYVDTLAGMADNGKRLHTNFDQCGTATGRLSSREPNLQNIPIRAEEGRRIREAFIAGPGCLLISVDYSQIELVILAHLSQDENLLAAFRDGTDVHARTAALIFGVGEDEIKPEQRRMAKTINFGVMYGMSAFRLSNELGISRTDATNFITAYFNTYSGVRRFIDDLIKKTEDCGYSQQSRPNL

SEQ ID NO: 81502 - protein, 309 aa, Unknown
  Obtained from environmental sample
  misc_feature (1)..(309): Xaa is any amino acid
IGRAAREVRAKKKAAKAKTVDKGDAKKKNVTAEITGTAKVMDKVGVIGKTVIAKAADKFGAEGSAVTAKVMDKVGVTGNAVTAKVADRVGVMRNTVTAKVPDRVGAKGIAVTAKVADRNSGTGKTVTAKIAGKAVAKKPAANAVKKKPAATADKENATAEIVTCVKITDKRAPVSAIAGRINEYVVHLNRREVSAIAINEWLVSEGYIDTINDKGKNRKVTTDKGISIGIITEVRKVGVERVRVNMFDRKAQELVVAKFCGTEGFGEGYAGLADLTETAKELCERFVPEPAVIPESITPPNEIKRLDAM

SEQ ID NO: 81503 - protein, 339 aa, Unknown
  Obtained from environmental sample
  misc_feature (1)..(339): Xaa is any amino acid
DRSLPNSVNLVARETADIPAENAREENMNWVVVSPGKPDSVSSLSQIFLPQSGGGSFKIEDTAEITNSTARRESIFIHNGKEAAGLEIYRRPGSDPLRLSREIKKTLDEANSLFSRDAKIELVTDSSSSLISGVTGLLISAALGVTAVVTVLLLFIRRIKYSLLAALSIPVSAAAGICVLSVMGKSLNGMSLGGLAIGIGLVSDISVIIIDLLHQAFGERETAPIPEEIGNKAASISGSNIASTITTALVFIPIIMLPGPLGGLFGDIAIALVTSVAAGWLYAQFFLPSLYSMFFGDPLKTANKNRLIKINSVFTNGSLKKNIIPSFKFLRNLADLPCW

SEQ ID NO: 81504 - protein, 160 aa, Unknown
  Obtained from environmental sample
  misc_feature (1)..(160): Xaa is any amino acid
MFWGSLAVVAYSYLLYPALLTLFAWLFKRPVRCSDDYLPAVGILVPAYNEEKVIARKVENVLSMDYPPDKISVWVGSDCSDDGTDEIVKSMTDPRVHFWCEPARGGNMGIINVLVPQMDGEIVLLTNSHTMHRIRMPAGYDEGLLLTLMPGRVGGSTLSP

SEQ ID NO: 81505 - protein, 322 aa, Unknown
  Obtained from environmental sample
  DOMAIN (108)...(322): Lyase
  misc_feature (1)..(322): Xaa is any amino acid
VVEVTRDGGEGSEVLVTLRQGDMAGEASLLHANEHTASAQTMTPATIVEIERDALRDALAKNGHAAVAVLTKVATVLNRRLLYTGSRQSGQRQFYDSGAVRSESDLLGAMNVPEDALFGVQTLRALENFPITGIQLSHFPALVRALAMVKQASARANSKLKLLDPMVARAIDQACQEIMDGHWQGHFPVDMVQGGAGTSTNMNANEVIANRALEIMGKKRGDYAACHPNDHVNLSQSTNDVYPTSIRLASMFMLRILLGALEKLKGALHDKGREFAHVIKMGRTQLQDAVPMTLGQEFEAFPFSTGEDIARLRETPNCFWKA

SEQ ID NO: 81506 - protein, 126 aa, Unknown
  Obtained from environmental sample
  misc_feature (1)..(126): Xaa is any amino acid
MAKFAFIGAGSFGFTRTLVRDILTFDAFKDATIALMDIDETRLDYITKAIKKIVKAGNHGAKIISTKNRAEALEGADGVLCTILNGDVDIWRYDIEIPKDTALILTLATQEAPQEFSRPADNPCYA

SEQ ID NO: 81507 - protein, 130 aa, Unknown
  Obtained from environmental sample
  DOMAIN (2)...(106): ATP synthase alpha/beta chain, C terminal domain
  misc_feature (1)..(130): Xaa is any amino acid
MKKVAATLRLDLAQFRELEAFAQFGSDWTKATTAQIERGQRMVELLKQPQFQPMSAEKEVLTLFAGTRGFLDPYPVSAVAEYEREMFEFIEATHPGILKELRELKDISPDLDARIKEALTEFASVFTPGV

SEQ ID NO: 81508 - protein, 326 aa, Unknown
  Obtained from environmental sample
  misc_feature (1)..(326): Xaa is any amino acid
FSNIGLDIQRGSAVSTKGRNIQAGHVHEALGLHAESRFFTVFREQRSNLWYVRSSKDIAERGLFAGLSGYETQVFLDFQEKEDTPDAMTGSWETRWAVLNNELGGRGVKSVDETLLDIFLKEIYSPVREMLSKNRFETLAKIFSEKPKKAIASAPQSPAPVPSPDELVESFREPINQFAAATEKYLDGANGKFKPWENSGKKSTGKTKRKANTNKDVFGDWSLLLGNLLALSKNQTGKENKFARSLKKKIAERPALLLMALGYNTLTLLRSTVNDNSGKEAAALALHWQLDRLLAECWESAGIPSAEARRAAEIAVALLARRVSPT

SEQ ID NO: 81509 - protein, 322 aa, Unknown
  Obtained from environmental sample
  DOMAIN (1)...(314): Glycosyl hydrolases family 31
  misc_feature (1)..(322): Xaa is any amino acid
MLPEWSFGLWLSTSFTTSYDEKTVMSFINGMEEHKIPLSVFHFDCFWMKGFNWCDFTWDKEVFPDPAGMLSRIKAKGIKICVWINPYIAQRSCLFEEGKKGGYFLKQKNGSVYQTDQWQAGMAIVDFSNPGAVKWYLSYLEKLLDMGVDCFKTDFGERIPEDAVFFDGGDPERHHNFYTYLYNKSVFELLEKKRGNGEACLFARSAAAGCQKFPLHWGGDCESTFEAMAETLRGGLSLGLSGFGFWSHDIGGFEGMRTPRFSNAGLLSVFYLPIQGLHGSYFLPASRGNVERRNPVEVCPVFLRKLKSPINARIFLETRRGK

SEQ ID NO: 81510 - protein, 232 aa, Unknown
  Obtained from environmental sample
  DOMAIN (3)...(212): FAD dependent oxidoreductase
  misc_feature (1)..(232): Xaa is any amino acid
MHDILVIGAGIAGLTVALKAAESGKSVLLLTKGASPDGSTNYAQGGIASVTSPEDSFESHIADTLEAGDGLCKKRQVEILTKNAPKAIEQLLKWGVNFTTSKNDEKAFDLHLEGGHSFRRILHTADLTGKEIMRALLAELKHRSQGIDFIEHSTVLELLTQKSRCVGAIWASRAPPSARPPPPPRPRRPRGGAGGPGRPGARGRGRPRGAGRARAAGPGPPRPAGGRPPAPA

SEQ ID NO: 81511 - protein, 260 aa, Unknown
  Obtained from environmental sample
  DOMAIN (184)...(260): MutS domain V
  misc_feature (1)..(260): Xaa is any amino acid
MHFENDENWDIASSGALLEIQNLLDRGLCDEPSILLNEGNLIKSGYSEELDGLKLLKDKGRQFLEEYLEEERETTGIINLKIKYNRLIGYFFEVTNTHLSSVPKHFIRRQGIAGGERYTTDRLAALESDINGASDKLIDLEKKLFIEIREQAKKVLPYLACAAGRIAELDAAQSLAKAASITSWTRPVLNESKNLEIIEGRHPVVEAHLGRGEYIPNDIILHTEKKDGISFIMITGPNMAGKSTYLRSAAPYNHYGSIGE

SEQ ID NO: 81512 - protein, 303 aa, Unknown
  Obtained from environmental sample
  DOMAIN (27)...(105): PDZ domain (Also known as DHR or GLGF)
  misc_feature (1)..(303): Xaa is any amino acid
LVDNAIKGMTQILDPHTSYFEAKEYEDLRTQTEGKFGGLGIIISVRDKVLTVMTPISGTPAFRAGLQSGDQIIRIDGVSTRGYTSDKALTKLRGEPGTEVRLLIRRKGEAQDQEYLIRRDIIQIKSVPFYGVLEGNIGYLTLQQFSQEAGAEVEKAVRDLLKKNIKGLVFDLRHNPGGLLPQAIEVSEKFLPKKSLVVSTRGRVRNQNKEFHSGTNPVFPLDMPLVVLVDRASASASEIVSGAIQDWDRGIILGDTSFRQGSVQSVLQVDAVNHIKLTTAYYYTPAGRCINRPETSFPGATTL

SEQ ID NO: 81513 - protein, 129 aa, Unknown
  Obtained from environmental sample
  misc_feature (1)..(129): Xaa is any amino acid
MTKICYFSGTGNSLWSAQKIAQGIAGDCEFINIGAVAQKDEIPLEADAVVLVFPSYAYGLPIIVSRFLKKAVFKTPYIAAFVTYGTSPGGTLATASRILKRKYKGGIFFGRIPAVENYMPLGRSDHCYQ

SEQ ID NO: 81514 - protein, 326 aa, Unknown
  Obtained from environmental sample
  DOMAIN (61)...(133): Surface antigen variable number repeat
  misc_feature (1)..(326): Xaa is any amino acid
VNKFGDGRCDIAPVQTAKEVVFRETESRGRVGNKDEKNVIAGRCGCFIDFGFGKAAGAEAKILDTVRVEGLLVANPDAVSDAMLLRPGSEFTPADVQESVRRLYKLGHFRKIDFFIDEETDSSVSLKLEVEEFPIVDKIEFFGNKKIKKKELEEKKLLRFYTPLSDAQLHKSKQTILDMYAEKGYLLAEVDAQVIATSVPGNAIIKYDIKEGPRVRVKSIVFHGNHDVKTRWLSRRFKTKENRWWRSGDFNYDLYRSHLDTLIMQYNDRGLLDAAIEHDTVWYSEDKRDIFIDITVNEGRKYFAGDVAFSGNSIIESDTPRPILTL

SEQ ID NO: 81515 - protein, 248 aa, Unknown
  Obtained from environmental sample
  misc_feature (1)..(248): Xaa is any amino acid
MINERLAIQAAERDRITVAESEVNKQVDQLKSQMVQVIGRQPTDAEFATAIRSQTGLDIPSFREKLRRQLIIQKYLMSKKQSTIENIKVPTEADIVNQYNLAKAQLVRPDTVRISMIQATYGQDAASKTKAKELIDRLAREIGTSPSKFDEVFIRGQAPNSGYYAGDEGYLPRSMQTAQVVGQEFINIAFSLKQGEISKVIEGQRGYQIIKVPRLMPKKTWIWTILFSPAPRVLSGNILVTAYCRNGR

SEQ ID NO: 81516 - protein, 66 aa, Unknown
  Obtained from environmental sample
  misc_feature (1)..(66): Xaa is any amino acid
MIRYFMENLQKWKDSGYRKPLVLQGARQVGKTWVMREFGRLHYKNFAYLNFDNNKRAKGILNKILT

SEQ ID NO: 81517 - protein, 134 aa, Unknown
  Obtained from environmental sample
  DOMAIN (62)...(106): Bacterial regulatory helix-turn-helix proteins, AraC family
  misc_feature (1)..(134): Xaa is any amino acid
MLNPYDLFENILLDIENGIKNDINASVLSKKYSFSEVHLRRLFSFAFKQTISAYIRSRILAASLNDLLKTDTNILDIALEYGFEYEQSYIRAFKREFGITPGDLRKKKQIVKIKHRYIFSMNNSWMMAFSLLLI

SEQ ID NO: 81518 - protein, 284 aa, Unknown
  Obtained from environmental sample
  DOMAIN (108)...(264): Putative RNA methylase family UPF0020
  misc_feature (1)..(284): Xaa is any amino acid
VIIPSEPWEYRNRMQFHAIRDCKNTGVLWGLKSEKNADLVLIRDCPIADPGIRRLLCEKEKKTLLAPLEKDRFTVYARGDLFLIEEGTNRGKTRILDQELTLDASLFFQSNGAMLEKLIADLLTIAGEADRSLPMADLFCGVGTFAVFLGKLFPQLALVEENKAAIALARENLARDNIATRGDFFAQRSEDWAKHNNPRGFGFIIADPPRQGLSQSLALRLATEGPPMLAYVSCDPATLARDSKILVAGKYNLKALHFYDFYPQTAHIESLALFVRYGSPRSGE

SEQ ID NO: 81519 - protein, 94 aa, Unknown
  Obtained from environmental sample
  DOMAIN (4)...(84): Thioesterase superfamily
  misc_feature (1)..(94): Xaa is any amino acid
GNAVGGVQGGAIFTLADFAFAVHCNLAMVCGEGTRLTVGQSCSISFLKATKGRRLTAISTCISKGRSISVYRIRIEDDLGVGIAEMLANGFTTM

SEQ ID NO: 81520 - protein, 287 aa, Unknown
  Obtained from environmental sample
  DOMAIN (160)...(285): Anticodon-binding domain
  misc_feature (1)..(287): Xaa is any amino acid
VLDTWFSSWLWPFSTLGWENADCDTNDFKKFYPTTALITAYDIIFFWVSRMIMAGLEFTGKAPFRDIYIHGLVRDKLGRKMSKSLGNGLDPLELVDEYGADALKFTLAFMCAQGQDILVDKESFRMGSKFANKIWNASRYILMNLEGLNLVPNPDLLPADKWIYSRLNAAARKMEEAFLSYRYNDAAQTAYEYFWNDFCDWYVEATKLSTKAGDGAEKDRAVTVLLDILSESLRLLHPLLPFVTEEIYGKLPNIDGLLITAPYPRFNEGRCLSGEGKRICPPPGIWP

SEQ ID NO: 81521 - protein, 134 aa, Unknown
  Obtained from environmental sample
  DOMAIN (12)...(96): Methyltransferase domain
  misc_feature (1)..(134): Xaa is any amino acid
MGQDEKMTKRVLNVGGYSKAIPLPPQYAGFEHLLLGFDEQSSPDILCDARELGSLEASQFDAIYCSHTLEHFYPHDVPKLLSGFLHVLNDDGFAQIIVADIMGAMQTVVHRNMDIEDVLYVSAAGPITLRDMAY

SEQ ID NO: 81522 - protein, 324 aa, Unknown
  Obtained from environmental sample
  DOMAIN (1)...(101): tRNA synthetase class II core domain (G, H, P, S and T)
  misc_feature (1)..(324): Xaa is any amino acid
ASSFRPLCRPAQAELNFPFKRYHIGKVWRGENAQRGRYREFTQCDFDIIGSDSPAADFEILLMIRATLLNLGVGVTIHINHRGLFNRFLAHIGQREKSVDVLRAVDKIAKVGYDETAAALAAITGDANAKKILDFTAAVSGETFEDTLNRITELSGGPSPESERLSLLRRFMSDALSDGDSANGGFMLDPSITRGLDYYTGVVFETFITELPDIGSICSGGRYDNLAGLYSKSNAAISGVGSSIGLDRMIAALESLNKLPATASYTSAAIACIKQEDSGLYQALAQHSPHKVFPARCFLKLPGQPIPPITSSWSNNLFLPRKKA

SEQ ID NO: 81523 - protein, 236 aa, Unknown
  Obtained from environmental sample
  DOMAIN (1)...(156): Acetokinase family
  misc_feature (1)..(236): Xaa is any amino acid
MGTRSGDIDAALPFYVMRKTGMNDVEMEAALNKKSGLLGLTGKFADRRDIQAAAINGDKQALLAQYIEAHRVKKYIGAYWAVLGRVDALVLTAGVGEFAWFMREKILDGLEGIGIVYDPRKNKISCTRNTETLISKPESKIPIYIIPTDEELVMTEDAYALMKGTYDTHTHFTYSFQSKDYVNKGRAESLVHDLEKHPELAEILPSQNERDTLHRESHCRCVCRNRQRPRKKVRDS

SEQ ID NO: 81524 - protein, 220 aa, Unknown
  Obtained from environmental sample
  DOMAIN (1)...(220): Domain of unknown function (DUF323)
  misc_feature (1)..(220): Xaa is any amino acid
MGQTVVRFPKHSVTLTKSFYMGKYRVRQAQYQAVLENNPSEFNGGTGKEPANGEIQVNRPVESISWYDAIVFCNTLSVKEGLDPVYSIKGSTDPAAWGTVPTASDTDWNAAVLDMSKNGYRLPTEAEWEYACRAGTTTVYNTGDTISDDTGWYTTNSGAKTHEVGLKPPNAWGLYDMHGNVWDWCWDRIGTSTSSVSDYYTNSPALILGRSSRLAIIGVI

SEQ ID NO: 81525 - protein, 109 aa, Unknown
  Obtained from environmental sample
  misc_feature (1)..(109): Xaa is any amino acid
SGGALAPRFRKWQGVCGFSQGGEENGATAPYSEEWDGDDRHGFLALPGGYSYRDGDFDDVGDGGSWWSATEKGSEDAYYRGMISGDAKVYRYDHYKANSFSVRLLQDKA

SEQ ID NO: 81526 - protein, 326 aa, Unknown
  Obtained from environmental sample
  DOMAIN (122)...(245): HD domain
  misc_feature (1)..(326): Xaa is any amino acid
DRTYYEDSDVNTGGEPVIDDAPAAVPAAGAENTAAQKQSSPPDGSSILSLSDVQENKGAYRIYTSLIQKMNTVLVGISNNAHITGREQIINEISVPLLLAVKSMRKQLIGFILGGEVKGFEMAKSSVNTAILSALCALEINLPELRIVSIINGALLHDAGMLRLPKEITEKRGGLSEAERQHILSHPALAHKIVIKELHFQDDVGNIVLQHHERWDGTGYPHQMAGDYIDIGARIVSIADAFEAMVSPKPYRNSITGNQAVKNLLSDNSRRFDPTILKAFVLIMGIYPIGSIVRLNNGAVARISEVRAIAPLRPKVQIMSIRLGRF

SEQ ID NO: 81527 - protein, 91 aa, Unknown
  Obtained from environmental sample
  misc_feature (1)..(91): Xaa is any amino acid
MTRSAEPPASRSLLDVDAAAINGNYALEAGFNPMRDSLIIEGADSPYVNIVVVQKGKEYDSRIVALKNALLSQKVKDFIASHYNGGVAPIF

SEQ ID NO: 81528 - protein, 311 aa, Unknown
  Obtained from environmental sample
  DOMAIN (168)...(310): AIR synthase related protein, C-terminal domain
  misc_feature (1)..(311): Xaa is any amino acid
MDMATLGVIALKKRGIVSDLDESPEINACTVKVKAEFSNGTSEPWLLLFKNETHNHPTEIEPFGGAATCLGGAIRDPLSGRAFVHQAMRVTGGGDPSGGLRDTLPGKLPQIKIAREAAAGYSSYGNQIGLATGQVTEFYHPGFIAKRMELGAVIGAVPEAWVRREEPAAGDLVILVGGRTGRDGIGGATGSSKVHTGASVESAGAEVQKGNAVEERKLQRLFRKAEVSRFIKRCNDFGAGGVSVAVGELARGLEINLDAVPKKYAGLDGTELAISESQERMAVLCSACDAEAFIKAAAAELGHSVMGGGNL

SEQ ID NO: 81529 - protein, 258 aa, Unknown
  Obtained from environmental sample
  DOMAIN (60)...(222): Alpha-2-macroglobulin family N-terminal region
  misc_feature (1)..(258): Xaa is any amino acid
MEKTFRPGRRENSGVIPFTPAASGEYQIRFSSKDSLGRSVQTRYSFYVTGSGWALWGRGDSDSITLRPDKGSYAPGETAKLLVQSPLPKGKYLLTLEREGILEEKIIELDGSALAIDIPIKESYIPIVYVAIASYTVRSGPPTHSYYEPDLDKPKGLFGLTSLYVDNENRHYAIEIEASKSVYRPAEQAEVTLKVSQNGKPAAGVELTFMAVDRGVVDLIDYHVPDPLAFFYNPRNFPLGVRGADSRSLSSRPILTMG

SEQ ID NO: 81530 - protein, 78 aa, Unknown
  Obtained from environmental sample
  misc_feature (1)..(78): Xaa is any amino acid
MMAEIRVIAEAVDVNAQIVANGIYEALITTVFGLIIAIIAMSAHSLFTHAVDKFASDVEIACSELIIEIGDSREIDKK

SEQ ID NO: 81531 - protein, 184 aa, Unknown
  Obtained from environmental sample
  DOMAIN (3)...(180): Ketopantoate hydroxymethyltransferase
  misc_feature (1)..(184): Xaa is any amino acid
LFVAGYGTTAGVDDEGGGGFSTAKRLDRMRRRDAFKIEGWGEKAEIIRRLTENNFTVCAHMGYNPQRHNRPQLFGKDTGQASELLDGAIALCDAGAKLVVLEMIPNSLSRKISAKIRVPTIGIGSGNACDGQVLVVNDLLGMSRRLFKHVHRFANQREKMFEAFKDYIDAVKSREFPGDEHSWK

SEQ ID NO: 81532 - protein, 217 aa, Unknown
  Obtained from environmental sample
  misc_feature (1)..(217): Xaa is any amino acid
MDAIKPGSGTNFKDWVYTDKFRFYKITFFTEKLVMRKKLLLSIAIGLTLIAQAFAQFDGITPVGANTAQDLYGPFFAGGGGFATSRGGAMASALNPAAEGEAQRIIFNAGYLALAGLGGESGFSVGSAGLGAIFPTKYGVFGGSFWYINSTFGSFPVGSYLQGNLNAAKELYPGMSFGLGLNIGYHMGGSPAVSGDLGFRYNRELGTVENSRPNLSL

SEQ ID NO: 81533 - protein, 303 aa, Unknown
  Obtained from environmental sample
  DOMAIN (170)...(293): Response regulator receiver domain
  misc_feature (1)..(303): Xaa is any amino acid
LPWCGDISIESEYGKGSVFTALIPQGIETEVPFAAVEEPEKKKVLVYEGRTVYARALGWSLENMGVPYTMVTNHDDFVSALYRGEWFYVFSGYGLYEKIEPVIARDDFRDGKKPPLALMVEWGTEAYIPGVRFVSIPVQSLSIANILNGRADDKGYIKSSGAIRFSFPGARILVVDDISTNLKVVEGLLAPYLVTADTCLNGLQAIQLVKHNEYDIAFMDHMMPEMDGIEVTRVIRLWEKENAQENGVMRNGVPIIALTANAVVGMREMFIENGFNDIHSNSYTFPNWMKCLTAGYPRKKGHR

SEQ ID NO: 81534 - protein, 328 aa, Unknown
  Obtained from environmental sample
  DOMAIN (116)...(277): Protein of unknown function DUF115
  misc_feature (1)..(328): Xaa is any amino acid
VIDFDINSVADFFGSLIYAVLGDPRFTLLVDPDSSLIQKTILDLYTPCLGGGIRALPLRARVERDKEKFVMAGEAVQRAIEKISADYSVQAHFGMRWFSNIIRNIGIAQSLTPDASYINNAAISDAAICAPLVAATNVAICAAGPSLNAQIPLLRERRRTGLFIIAADTSLPALLAGGVKPDAVVSIDCQHISYYHFIGSACADIPLFLDIASPPLLSGFSRSSFFFAGGHPFAAYISQKWMPLPHLDTSGGNVTYACLSLAERLGACRITVYGADFSYPLGNAYARGTYFYPLFERKQNRLSPLEACLSSFLIAAPSAPSAINGGGT

SEQ ID NO: 81535 - protein, 280 aa, Unknown
  Obtained from environmental sample
  misc_feature (1)..(280): Xaa is any amino acid
MAFADNTNGFGPIPADPDYILGYPVASWRNSRYEVFSWDAFPEILIFDTADYAVQDRLFKRLAFFVEKAGFRGRLAADAEIANLHGWNAHDYRAEDLASFFEAARKSNFPLLAEERELESILLSNGILKRNFSMQIVPGKGAIVSISRESDKTDRTLRSRFMVHECFHGLYFIDEDFRNFSRQRWEVFPPVAKKFLLSFFEFQAYDTKDTNLVINEFMAHVLQQPVSQAAWYFGEYQPNRMITTSPWRRASLREKRQSRRMEELLPGIATAFTPRKKLFR

SEQ ID NO: 81536 - protein, 132 aa, Unknown
  Obtained from environmental sample
  misc_feature (1)..(132): Xaa is any amino acid
MNKILILADDLTGANDTAIQFVKQGFASLVVINADSASTDLFDNYDVIAINCDSRRLNAYEAYSTVYRIAKHFETGFFIYKKVDSVLRGNPGQETAAVMKCLDINLGLAAPSFPANRSVIENGVLSNGTDAA

SEQ ID NO: 81537 - protein, 238 aa, Unknown
  Obtained from environmental sample
  DOMAIN (98)...(215): Histidine kinase-, DNA gyrase B-, and HSP90-like ATPase
  misc_feature (1)..(238): Xaa is any amino acid
MNVITGITEIQLQREDNPPDTKDAFEKIYESGSLLLNIINDILDFSKITEGKMEIVPFQYDIPSLINDTVQLNYLFCDSKPIKFIVSVDPYTPLELVGDALRVKQILNNLLSNAFKYTDEGEIELSVFTEASASSAEEVIIIFRVRDTGQGISHEHIGRLFEEYMRFNSDVNRTITGTGLGLNITKRLLDLMNGEISVESELGSGSLFTVRLPQKRCGEAICGAENVRRLRDFDFHNT

SEQ ID NO: 81538 - protein, 233 aa, Unknown
  Obtained from environmental sample
  DOMAIN (48)...(233): Pyridoxal-phosphate dependent enzyme
  misc_feature (1)..(233): Xaa is any amino acid
MGSKGRFGDYGGQYIPETLMNELINLEKAYNHYSKDSAFNAELNDLFKNYAGRPSLLYYAQKMTGDLGGAKIYLKREDMNHTGSHKINNVLGQTLLAKKMGKTRIIAETGAGQHGVAAATAAALLGMECEVFMGKEDTVRQALNVYRMELLGATVHPVTSGTQTLKDAVNETMREWVSRVDDTHYVLGSVMGPHPFPTMVRDFQSVISREAREQILAAENKLPAGSRLSAESD

SEQ ID NO: 81539 - protein, 98 aa, Unknown
  Obtained from environmental sample
  misc_feature (1)..(98): Xaa is any amino acid
MAFKEPGIGLIWEGKGVEEKGKNKTDGKVLVEIDPRYFRPAEVDLLIGDPSKAKAKLGWEPKVKLPELVKMMMEYDIELARREVHLKEGGYKTENYYE

SEQ ID NO: 81540 - protein, 171 aa, Unknown
  Obtained from environmental sample
  DOMAIN (4)...(168): Aldehyde ferredoxin oxidoreductase, N-terminal domain
  misc_feature (1)..(171): Xaa is any amino acid
MNAWTGKLLRINLTTGEIKKESLNMKDANEFVGARGLGTKIYCNEVNPKIDPFSPDNKIIYMTGPLTGTFAACPGRYEVVTKAPLTGTIGAANSGGHFGPELKFAGYDGIIVEGAAKNPVYIYINDDQVEIRTADHLWGKKVPETTDTLNAENFPARAGLPVSGLPVKTSF

SEQ ID NO: 81541 - protein, 321 aa, Unknown
  Obtained from environmental sample
  DOMAIN (118)...(253): SecA preprotein cross-linking domain
  misc_feature (1)..(321): Xaa is any amino acid
MSVAAAYLNAIPGKGIHVVTVNDYLAGRDTDWMRPIFSYLGLTVGTILSNMDNEQRKENYACDITYGTNNEFGFDYLRDNMHRSMESRVQRGHSYCIVDEIDSILIDEARTPLIISGAAEDDTFKYAEVDKLLGSLKEVEKKENGEYPDETQGETVSGDYKINEKNKNISFTNQGLANIEEVLKKRNLIQGAIVDEENFEYIHYFTQALKAHLLFHIDVDYVIEDGQVQIVDEFTGRILHGRRYSDGLHQAIEAKERIKIAQRNTTLATITFSNYFRLYKKISGMTATANTEAVEFKQIYNLDVLVIRQHAGPRMMKMIGL

SEQ ID NO: 81542 - protein, 238 aa, Unknown
  Obtained from environmental sample
  DOMAIN (16)...(59): LysM domain
  misc_feature (1)..(238): Xaa is any amino acid
MGIPISGTLAAEELIHIVGKGDTIFSLSRFYHVTADELMKANGISDPSKLGVGKKLIIPVPADGVSLPGQNPGVTVSVTDNLQVFAIYKVVKGDTLFGIAKNNGITLQKLQEINGFSSDHVIKIGDAIKVPKKNSSFGTQGISPTANTAVIKPSTANKTAPAGIYALRWPVTPKDISYMTGQMGVVVEGEKFESVRSLTQGNVVSAGPWRKFGRVVIVETAGGYYYIVRRCESITVNV

SEQ ID NO: 81543 - protein, 85 aa, Unknown
  Obtained from environmental sample
  DOMAIN (1)...(58): Acetyltransferase (GNAT) family
  misc_feature (1)..(85): Xaa is any amino acid
VVSINIAILQAYTGQGLGGGLFGALEKWARQCGIKRLDLSVMLNNIPAQKLYQRLGFTREGTKRGSMFVDGEYIDEYYMCKWLDD

SEQ ID NO: 81544 - protein, 324 aa, Unknown
  Obtained from environmental sample
  DOMAIN (51)...(282): Glycosyl hydrolase family 3 N terminal domain
  misc_feature (1)..(324): Xaa is any amino acid
MDGKGSLTRDMKIYSSGCPAEGVMLFRYNLDTDTNAIQNLIAESSSLITNGSNVPPLVVVDHEGGNVNRFMPGAADLPAAYSYWETAQNEGRGAAIAQVLTDSFNTGKKLHALGINFNLAPVAESLNDDNAKFLEGRSYGPDPVFTVEAVRAFIVGMEFAGLICAVKHFPGSAGADPHYFPGKLNGGKDVLAGLVSPFAALIRDNQARAIMVSHSAVPAWDTEHIASLSPAIMGEWLRLELGFKGLIISDDFSMGAATASGRTRPEDAAVQSLIAGADIVLVWPPDLRRTHRAIQAALASGRLSRQRLEESADANLCRSDHCRN

SEQ ID NO: 81545 - protein, 337 aa, Unknown
  Obtained from environmental sample
  DOMAIN (107)...(256): Poly A polymerase family
  misc_feature (1)..(337): Xaa is any amino acid
GLFPRLYGREVIGKKRLFTPADEHGINFADVDSEAISIIKRLRGAGFDSYIVGGAVRDLILGKKPKDFDIVSAASPGRIKKIFRNSRIIGRRFRLVHVYFGDRIFEVATFRSLKDGHTSNTFGSIDEDVLRRDFTMNALFYDPEQQIVVDYVNGMKDIKNKQLKNIINLSEIFTDDPVRMIRAVKYAVATGFSIPLNLKMKIVNQSNLLTSISPSRLTEEIFKIINSDKACAIVDLLDKMGLYSYLQPQAAELMRKNANFRKSYLQTMSALKGVENQRGQALSSLFYDYLENVSDWKPGPIENFLRICKTVRIFVMPMNPPRFELEYAVKKFLSRQR

SEQ ID NO: 81546 - protein, 328 aa, Unknown
  Obtained from environmental sample
  misc_feature (1)..(328): Xaa is any amino acid
RSAEGVRHNKLFGGLKSKKGTPEAVKADVPPPPRVLAYEIIVEALMCKSACIPILKSVSFELPAPTDTVINAGTDAGINADADSDINTAANTVVGKNTGIAFPSAPGWQIHYAKSEPIAFSAGTPSSAAPAAGGINADQPELSGLSLNPSSGGINGGINIALSGLPSQPDGYQSGADESQTHQQNDSIGYAASTYSAVLYDYTPLEERREYSLLTAILFALLAGLALNLTPCIFPMLSVRVLSFAESARESRRSAVVKSIVFSLGIVAVFLLLAGLAAFAGFSWGQPFPNPRLMVRIIPIVFPFRVGKGLISYRSSVPAIGLRGERPP

SEQ ID NO: 81547 - protein, 96 aa, Unknown
  Obtained from environmental sample
  misc_feature (1)..(96): Xaa is any amino acid
MSDNNRNGFNPLTDKIIEELRTIVGKGNVVIDKEKLEAYSHDETDAREYGHSPEAVIYPATTEETALVVKLANRERIPITPKGAGSGLSGGAILEY

SEQ ID NO: 81548 - protein, 243 aa, Unknown
  Obtained from environmental sample
  misc_feature (1)..(243): Xaa is any amino acid
MLADLISPHKASFNDYTELRAQVNTTRGVTLLAGNMAANSRNSTGGVSARVYRGGTYGFASAAEYTDESIKKVLAAAGGNAAFMQKHVNKGLGPLPAVAPGRVGLEKEYSADVEQSVLIEFAKALDALIVERYRNLSSRSVHVNCLDIEKLLAVSDGADSHFFQPRSLVYAQMSVEADDGVPVELSLQMGGFGSFGEVFSDPALLAGQLDKTYEQLMQKREGVYSSAGNKKMLLWPGTCRHAP

SEQ ID NO: 81549 - protein, 168 aa, Unknown
  Obtained from environmental sample
  DOMAIN (37)...(159): Transketolase, C-terminal domain
  misc_feature (1)..(168): Xaa is any amino acid
APLSSVLCGKNTAATICGFRVNLFRTCSRKNETFNFGQAKVLKEGKDVCFIALGSLMVNQSLKACEKLAAEGINAGVLDVLTLKPIDRDAVLNQAGKVRAVISAENAQIRGGLGSAVAEIIAEEGCRCKFARIGIRDEFGEVGTQDYLVDHFGLDVGSLVKKAQELLA

SEQ ID NO: 81550 - protein, 93 aa, Unknown
  Obtained from environmental sample
  DOMAIN (10)...(92): DbpA RNA binding domain
  misc_feature (1)..(93): Xaa is any amino acid
LRLLASAVPAGISGKRQGDFTRVYVGQGRQHGLGARDIANLLMRAGGIPGRLVDEIEVKDYCSFATLPADAAKRACAFSRKDQQSLVIRPAKP

SEQ ID NO: 81551 - protein, 147 aa, Unknown
  Obtained from environmental sample
  DOMAIN (1)...(147): TatD related DNase
  misc_feature (1)..(147): Xaa is any amino acid
MSPAFDRDREAVIARAEAAGLKALIITGNDIESSAGAAAYATAFAAKNANLKCKSTAGVHPHNAKDWNEHALARLEELTAPGGDIRAVGECGLDYNRNFSPQDAQRKCFEDQLKLAARIGKPVFLHERDAFADFFSIRKQYRADLPG

SEQ ID NO: 81552 - protein, 318 aa, Unknown
  Obtained from environmental sample
  DOMAIN (120)...(304): Mur ligase middle domain
  misc_feature (1)..(318): Xaa is any amino acid
MAEICMGFKKGSKVYFIGIKGTGMCALAELMHNSGMAVSGSDREEVFYTDDILRELGIPFYERFDASHIGKGEDTPDMVVYSAAYSSEENPEIAEAERCGISVFKYTDALGAYSANFDSAGVTGVHGKTTTTALAGTLLRGAGLPVQVLVGSAVNGFGGRCTLSLGDKYFVAETCEYRRHFLSFHPKTIILTSVESDHQDCYPRYEDIRDAFIEYGRLLPSDGDFIFCADDPGASEVAAVLKKEKPDINLVPYGFSAQNDYRIESYKAANERVVISLKGFPGELKIRIPGRHTALNTAAAIAMWSLLVKKEFGSESNS

SEQ ID NO: 81553 - protein, 63 aa, Unknown
  Obtained from environmental sample
  misc_feature (1)..(63): Xaa is any amino acid
MAERGSVLRDDDKPEAVQKRLEVYRAQTAPLIDYYRGKGLLLDIDAKPMVDQIVVNFKKAMGI

SEQ ID NO: 81554 - protein, 300 aa, Unknown
  Obtained from environmental sample
  DOMAIN (54)...(300): Surface antigen
  misc_feature (1)..(300): Xaa is any amino acid
VPDIQPAGEQDVDLVFAVSEREAGTGQFGAGAAYSQADGLVFTLNLSIPNCCMGDGQSANMNAEYGIDKKSISLGFAEPWLFDTPTKIGTSANYSWWRGSSYGYNHDILRYGGSVYVGRRLTWPDDYFYVQGGVSWQRNEQGENIPGSLVLFTGNEASLDFVIIRDDKNLPIFPTEGSRYVLSISKAFQFEPVGDFSFVQTDLSIKWWFPLYSDKLALGIVNEFGVITGDALQYRTLYQMGGALGYKGLMRGYTFWSIGAYRLGRSYQYFGAELTLSRAPNRFLLLPLFFDAGNVFGERY

SEQ ID NO: 81555 - protein, 129 aa, Unknown
  Obtained from environmental sample
  misc_feature (1)..(129): Xaa is any amino acid
MIAIMTLVVTGVGAVLVQRASKIALESNLRGLRYLAQEQARFWQGRQDGYLKLLRGIADVMGEFETLPAETRRDTYDNMLLATLDNNPDFVRIYSVWKPNAMDGMDARYINRPGSSPTGQYAMTYTREN

SEQ ID NO: 81556 - protein, 316 aa, Unknown
  Obtained from environmental sample
  misc_feature (1)..(316): Xaa is any amino acid
VASLKEFRETSDSAIKLQQNELSTSLKNIKDTSNAAVRQQHDELSAAIKDLKDASDSAIKLQQNELETSLKNIKDTSNAAVRQQHDELSAAIKDLKDASDSAIKLQQDELTSTFNEFKEKTNSTIRLHQSEQEAAVREYREKSDAAITGQKDELNSALNRQIETWKKICSDAEHKIVSDNEKRLDEYSKSHAEAFKQLTNLADDAAKLESELRLSMQEAISRVKSDFAVFEKESAASRDAEAAAFNAQTQSLRKEIEETNKELEGLRKQSHDNLTEKLTAFENEFKVELGKRTSEIGRQITDWQTGLRNAFEAQAN

SEQ ID NO: 81557 - protein, 122 aa, Unknown
  Obtained from environmental sample
  DOMAIN (12)...(122): HPr Serine kinase N terminus
  misc_feature (1)..(122): Xaa is any amino acid
MDDVRFTVLDLIDIDLKDRNSLNLHCIGGRKGLARKISIPDLNRPMGAIMGFYEDFAYQRVQVFGRGEVAYLRRLKNSGEFGTIRDLFNYPVPCCIFTHNLSPPQEIHEIAEAAQCPLLQTN

SEQ ID NO: 81558 - protein, 304 aa, Unknown
  Obtained from environmental sample
  misc_feature (1)..(304): Xaa is any amino acid
MGVPTPDWVKIYLEKGLSALQAQTQYKDKYCIVGEESGVNRQFVISWADAASAQQRLGALLKTNIASRYEAAITAASQSGTESAAKYRQEINNAVNALVNVSYSGAQREADWWSLRRRYDPANKEQYSDEYTAYVLYTVPKAEMNRQIALALETSVAKDSELYDVTIALARDILLQGYDEKELQNAAAIQKTAADYYDPPGTVTAQALEEIYLLDEYNIGRDVAASVLSRYRIWDANPALTKYVNMICQAIVLNSPKPIAYNGYLTAILDSREVNAFASPRRHVFITKGLLDAAKSEDALARRI

SEQ ID NO: 81559 - protein, 158 aa, Unknown
  Obtained from environmental sample
  misc_feature (1)..(158): Xaa is any amino acid
MSAVNLAIVLQARIDSSRLPGKSLLPLGGETVVISRVMEALNKVPAHLRVLACPEDSAAAFAPLADKAGFTLLAGPKDDVLGRYCLALRTFNIQRVIRATGDNPFVFADAAAAINAEALALNADYAGYCGLPLGAGIESVSAAALLRAKRSALSPSAC

SEQ ID NO: 81560 - protein, 135 aa, Unknown
  Obtained from environmental sample
  misc_feature (1)..(135): Xaa is any amino acid
VKLTGWIGGTVTNPVVTLGVSDMASSVAGAVKEQVKGEIDKQINAIMAEAEKQSQNIRNTAKQAADKIRKEANAAADRLEAQAKSPLEKTAAKVAAKKLRDEGNDKAKKTEQEAERQIKNIMDAAKKKADDLRKG

SEQ ID NO: 81561 - protein, 251 aa, Unknown
  Obtained from environmental sample
  misc_feature (1)..(251): Xaa is any amino acid
MDNQILRKLFEVTIRSAEILKTTDNDTELFRSIYKRIPEPVIHSNETIREWNEEYEEAEPGHRHFSNLFALWPAGTITPDETPQLAVAARKTLERRLAHSGGHTGWSRAWLINFMARLRDGQTALENLNALFTEFTLPNLFNNGPPFQIDGNFGALSGITQMLIQSRIRYGGENFTVLLDILPAVPENWSKGQLNGVRVKGNLEVDFNWPDKRLNSLVIRKHGKDTVPRLLRTDREQRGLLLDPGRINFIR

SEQ ID NO: 81562 - protein, 315 aa, Unknown
  Obtained from environmental sample
  DOMAIN (9)...(173): Peptidase C26
  misc_feature (1)..(315): Xaa is any amino acid
MASWSQHSIIGRRIRDLGVYTEIIPGDTPLVSALTKDVKGIILSGSPESVYDAGAVPDKKVYDCGLPLLGICYGLHRMTHDLGGKVEPLPEKEYGRIEVKIKNIKEEIKDSKNGGLSGFLKGFNSTFTAWMSHGDTLTKLAPGFKEYGSSATGYPAVVAHEEKPWFGLQFHPEVTHCEGGDDMLGAFVFDVCGCGKGWSMERYIKELNKTLKERAGVNPVLLLISGGVDSTVAGAALLKTLKSEQVHLMYMDTGLMRKNETAAVRANLEKLGAKNLHIIMCENEFLSALKAKKSRKRAHDIGDCSYDTEREVARL

SEQ ID NO: 81563 - protein, 332 aa, Unknown
  Obtained from environmental sample
  DOMAIN (9)...(269): Peptidase M16C associated
  misc_feature (1)..(332): Xaa is any amino acid
MAELVCWTAKDFLPQQEARLAEELAKTEQGLSDAEKNRITEKSAALEKIQSESDSPEALATIPHLSRGDLSPEPEMIPRSLEDLQGIPALCHDLYTNGITYIDLAFPLDILPPEYYPWLPFFARAAISVGLPGMDYGEVSSLLARTVGGFNAILHTGSAAPGTDSPVIQTLAGEFALAGRDWIIYRIKCLDEKTASALDIIQRLIHEADFSDIRRIRDLVLEMKNDLRSGFAPGGHSYASCRAGRFSSPSAQITETWNGISQLEFAHRLAELDTAEAAAKLQYLREAIASGGFIVNMSGSAAALKSGGALIAQRSTALVRPGRCGHQGKMVP

SEQ ID NO: 81564 - protein, 338 aa, Unknown
  Obtained from environmental sample
  DOMAIN (88)...(121): Tetratricopeptide repeat
  misc_feature (1)..(338): Xaa is any amino acid
LTDTFGAAGFEKGAELNNDLSWRLVHGSCFECLIRAERAVKQYTEVWNAFPDCYPAALGIARVMEGEGKYLEAESFLSDLEGLFPENAQIQRQLALSYYHSGRWVRAQAAVDEILQKNPRDGEFVLMKAHILVEQGQLLQAQAPLDLYAGINPNNRFALFLRARVQAEAYNNREGALNYLRSIIRSSTPADDYYNEATIYAARLLMESNRQQDQTEGRDMLAKLLAVPSDYSPPGFSPHPSLETLSLAVWDAIRRESYRDARLYLGRLLEERRSTQDLLAAYTVEKEQGNFAAALSYARELYQQDRSNDEGILAYISALIEMVARTTRPILSMGGGMR

SEQ ID NO: 81565 - protein, 168 aa, Unknown
  Obtained from environmental sample
  DOMAIN (10)...(164): AMMECR1
  misc_feature (1)..(168): Xaa is any amino acid
MSTNFSLTDREKHALCGLARWGILCGFAGKRPDSPDIPTPPEGVLREQLGSFVTLKRGGHLRGCIGTIIPQEELYKNVARMGYASAFHDQRFPPLLREELDDTEIEISVLGPITPCPDPQRIEVGRHGLLLRRGRQGRGLSAQGSGGTGLGSLGLSGKFMPQGGSARR

SEQ ID NO: 81566 - protein, 68 aa, Unknown
  Obtained from environmental sample
  misc_feature (1)..(68): Xaa is any amino acid
VEDFVKGDIVILSFPFSDLSATKRRPAFVLANCGYGDVILCQITSKPAKNEFSVKIEQNDFETGSLPM

SEQ ID NO: 81567 - protein, 321 aa, Unknown
  Obtained from environmental sample
  DOMAIN (1)...(70): Bacterial Ig-like domain (group 2)
  misc_feature (1)..(321): Xaa is any amino acid
LIGEYLTLWETATLIATVHPSNAANKNVTWNSDETGVATVNNGVVTALAAGNVNITVTTEDGEYTATCTITVQAATVPVTGVSLNHTTLTMTVGGTANLTATVAPSNATNKNVTWSSNETGVATVTSGGVVIAHAAGSAIITVITEDGGKTTECSVDVNDPSLSTLSGTITISPSSGVTVGTEMTAVYTGSETVTYQWEKDGSGVGTNSNKYTPTDVGSYTVTVSLTGYNNKTSAPVVVSSGTLSGTITISPSSGVTVGTEMTAVYGGSETVTYHWEKDGSSVGTNSKQYTPTDVGSYTVTVSLTGYINRQAHPLLCPLVH

SEQ ID NO: 81568 - protein, 121 aa, Unknown
  Obtained from environmental sample
  misc_feature (1)..(121): Xaa is any amino acid
MGSTGSTISNFVAGAQNGQIWTSPDGITWTAIDTDVFVNNSYGTSKGDIRAITYGDGKFVAGGSYGRMATSTDGGTTWKAVANSTFGTGLYGGGSSIYAIAYGNGKFVAGGNDGKIAYSDE

SEQ ID NO: 81569 - protein, 147 aa, Unknown
  Obtained from environmental sample
  DOMAIN (30)...(103): Sigma-70 region 2
  misc_feature (1)..(147): Xaa is any amino acid
MVNAIPEEKTEEARWQEYRKTRDPKIREAFIKQYAPLVKYVAAKVAIGMPNNVEFDDLVGFGVFGLIDAIDKYDTEKNVKFKTYAVTRIRGAIFDELRQIDWVPRSVRQKTREIESTISSLEAQLEGQLPTRKSPGRWNLGQSDHFL

SEQ ID NO: 81570 - protein, 66 aa, Unknown
  Obtained from environmental sample
  DOMAIN (6)...(66): Ribosomal L28 family
  misc_feature (1)..(66): Xaa is any amino acid
MAEYVRTSEICGKRTVTGNKVSHAKNHTRRTWKPNLVKVKTVEGGKASTKKVCARCLKSDLVTKKV

SEQ ID NO: 81571 - protein, 233 aa, Unknown
  Obtained from environmental sample
  DOMAIN (5)...(201): DNA methylase
  misc_feature (1)..(233): Xaa is any amino acid
DERRVSGIFEKLVSEHSEYVKTNLFPYIYAVTGTSSVCVYQVVRDYLIIRYRVVWQREKGRGAKANWINSCEDIWFGTKNDYYYFNVDAVKQKRKIIAPYRENGKPKDWEETEDGKFRLTYPGNFWDDISIPYWSMPENTDHPTQKPEKLIAKLILASCPENGIVLDPFLGSGTTSVVAKKIGRKYVGIEKNEEYCCWAEKRLALAETDKNIQGFSGGVFWERNTLNIQKREK

SEQ ID NO: 81572 - protein, 64 aa, Unknown
  Obtained from environmental sample
  misc_feature (1)..(64): Xaa is any amino acid
MVSYIIKRVLRSFLTLFLIISVTFILLKFMPVEGYFPVNYDRLSALERNTILKNMGLLDPIRFK

SEQ ID NO: 81573 - protein, 271 aa, Unknown
  Obtained from environmental sample
  misc_feature (1)..(271): Xaa is any amino acid
VVIPHNGSLADLRHVLHHEFVHAFVFGIVYGGGIFRAAGAQVPLWFNEGLAELLSSGWERQADMFMLDRMLNSTVPPPSSALDGYLAYKGGQSFLYYLHSTGGDSLFNIMLIEFKLTRSAEAAIERVYAKKMEDLGKDWLKELRRVYWPEAGRRVNPEAQGAPVTKNPRSRANVYPRASPDGKRVAFFSDRHDYTRIIITDTAGKELNRIGGEHSLGSSFESFRPMSGAIAWSPDGERLAFIAKKGGKDEVRIVDAANGRALRAVGPPLSS

SEQ ID NO: 81574 - protein, 133 aa, Unknown
  Obtained from environmental sample
  DOMAIN (54)...(133): Transporter associated domain
  misc_feature (1)..(133): Xaa is any amino acid
MPAIKAFESFKQGHSNSLLSWRIRRTGRPFSITSLVEEIVGELSTPTAKEQPLLRQEDGSFLADGTLNIDDAAKELGLTGFGEEKEFHTLAGLILYLAGELPQVGDSFNYQGYKFKVIDKDGNRIDKILITKL

SEQ ID NO: 81575 - protein, 279 aa, Unknown
  Obtained from environmental sample
  DOMAIN (19)...(129): Histidine kinase-, DNA gyrase B-, and HSP90-like ATPase
  misc_feature (1)..(279): Xaa is any amino acid
LVSPRIIARSSGICRNPLWRRFKAQTGFTNIYENAVKYTEWGYIELKLTSSGFKLIFEVSDTGMGIRKEDIPKLFDSFERFEMKKNRSIEGTGLGLPICKSIVEMMGGMILVDSEYGKGSVFTIIIPAISGNKPEVKSVKALKKERTLFAPNANILIVDDDEINLRVAVGLLELFKISAKTAYSGKEAISMVQKNDFDIVFMDHMMPEMDGVEATGEIRKLGAQYEKLPIIALTANAVQEVKEIFLSNGFSGFISKPIDIQELNEILREWLPPRKIEEY

SEQ ID NO: 81576 - protein, 236 aa, Unknown
  Obtained from environmental sample
  misc_feature (1)..(236): Xaa is any amino acid
ALHGRHNAQKERALGKPGLLVRQHPLGITGPLTGIRASASAQLAPPLAFTDEAYISGDIDIRHYTHILKRYVWANRLVLGASVGLGDSARTARRYFLGGSENWFNYDVNAENYNSNIGYSYYSSLVSPLRGWNYFDLAGDRVLLMNSEFRFPFIREVSTVWPIPMQIRYINGALFIDAGYAWTGGEALPPRMAGGYGFGMRANLGIFVLRYDRGWPTDFKGLSRGPINYFSLGAEF

SEQ ID NO: 81577 - protein, 58 aa, Unknown
  Obtained from environmental sample
  misc_feature (1)..(58): Xaa is any amino acid
VKANKTKMRIRSTTVLAVRRNGKVAMAGDGQVTFGETVMKNNARKVRRLWTAKSSRPP

SEQ ID NO: 81578 - protein, 316 aa, Unknown
  Obtained from environmental sample
  DOMAIN (1)...(148): 5'-3' exonuclease, N-terminal resolvase-like domain
  misc_feature (1)..(316): Xaa is any amino acid
MAELAGKTDDQLDGSKEAPRLLAAVFDSRTPTFRHKMYSEYKATRQKAPDDLHAQVPLVEEFLSALNISSLRADGYEADDIIAALAQKCRAEKRQCYIISSDKDLLQLVGEGTYALRPAKTAKGESPGGQNSGPVWELIGPNEVKSEWGVVPEKILDLLSLTGDSSDNVPGVKGIGEKTAVELMSRYGSLDEIYKNIAGIEGARGRKLAEGKESAYFSQSLIRLDTGVPLPVSDIEQLSAENLNRLAAARVLFREGLRQSAKQLDPDVGAHNAPDSAPVQDSAPTGVGEPVDADAPSSKRRQANSKPRIIIQLFFD

SEQ ID NO: 81579 - protein, 316 aa, Unknown
  Obtained from environmental sample
  DOMAIN (106)...(185): Bacterial pre-peptidase C-terminal domain
  misc_feature (1)..(316): Xaa is any amino acid
GFFPGYGQGRTDISGEIIDTPEGAIRFYTRLIRTEDRAVDASFHFDIERNEQIVALLSSGSSQGGRSSSSVASDALEPDSFENPVPYEIGADANAQTVNRTIHSGDEDFFLLVPTNDGSLIMETTGGTDTYMEFYNLETREKLAQNDDGGSSSNARIRYSVQTGKSYIAKVRGYDGSTGSYGFRAYLTIRTSSGSFENPLAYEIGSDENVPVMNRTLDNDDEDFFLLIPADDGQLIMETTGSTDTFMEFYDAETRQKLADDDDGGRGSNARIRYNVQAGKRYIAQVRGYDGDTGSYRFRAYIFVQVRLAPDEYEPE

SEQ ID NO: 81580 - protein, 214 aa, Unknown
  Obtained from environmental sample
  DOMAIN (129)...(213): PEP-utilising enzyme, mobile domain
  misc_feature (1)..(214): Xaa is any amino acid
MNAQGEDVVAGIRTPERIATLEKKNPTIYKQLVVIKNRLEKHFKDMQDMEFTVQQGILFILQTRNGKRAGAAAVKCAVDMVNEGLIDKKTAIMRVTPALLDQVLHHQIDFKAQKQAKALTRGLTASPGAGAGRIVFNAQDAETWHQRGEKVLLVRKDTSPEDIGGMVVSQGILTSTGGMTSHAAVVARRMGTPCAARAKSVLYMIKRSKSAENI

SEQ ID NO: 81581 - protein, 267 aa, Unknown
  Obtained from environmental sample
  DOMAIN (123)...(256): Transketolase, pyridine binding domain
  misc_feature (1)..(267): Xaa is any amino acid
MKAKYQSFRRSFDAMAKKLPFIGDVFYDVVVRLKRAVKAVFYIDNFFVDLGFEYVGPIDGHNIRLLERVLRDVRQLDRPVVVHTVTSKGKGYAFAEDDPGGYHGVGAFSISGGLPPKSFKNTARLTFTNSFANALLAAAGREERVVALTAAMEQGTGLSLFRKTYSHRFFDVGIAEGHAVTFAARLAAHGLKPVVAIYSTFIQRAVDQAIHDVSLQNLPVVFALDHCGFVSGGRGDHPGAVRHKSGPYESQHGYPCPGKRQRTRYML

SEQ ID NO: 81582 - protein, 101 aa, Unknown
  Obtained from environmental sample
  misc_feature (1)..(101): Xaa is any amino acid
MANGNFSIPKPQNDPVRSYAPGTSERSMLKAELKRQMSEKITIPLIIGGREVYTEHRMPVRMPHNHSVVLAECCQARGKELRQAIDAAFAAKKGWEDLPWE

SEQ ID NO: 81583 - protein, 238 aa, Unknown
  Obtained from environmental sample
  DOMAIN (1)...(173): Phosphofructokinase
  misc_feature (1)..(238): Xaa is any amino acid
MEKLNLNILFTIGGDGTQRGMLDIAGEVDKRKLKIAIIGIPKTVDNDFALIDRSFGFNTAVQKAVEVVSAAHMEASSAINGIGLVKLMGRDSGFIAAHTALASHEVNFVLIPEVPFNLEGYNGFLYHLEKRILERKHAVIIVAEGAMQDQLIKEKKTDAGGNIKMEDVGVYLKGRISKHFEEKGIEINFKYIDPSYAIPSAPANPDDSIYCERFGHAAAHAGMAGKTKIIIGLVNTDL

SEQ ID NO: 81584 - protein, 120 aa, Unknown
  Obtained from environmental sample
  misc_feature (1)..(120): Xaa is any amino acid
MTPRGYLSIVLHAHLPFVRHPETNYMMEENWLYEAATETYIPLLAYFDNLLSDAVPFKAAMVLTPTLCAMLSDDLLRTRYAAHISRLIELADKEVRRTRRNKARTARLGRSDPWGGGIRG

SEQ ID NO: 81585 - protein, 314 aa, Unknown
  Obtained from environmental sample
  DOMAIN (15)...(126): GAF domain
  misc_feature (1)..(314): Xaa is any amino acid
VSLVFVFALDYEAKNTRLAYHWCADEAPPRTAISNLFEYLITLFPEHLPESDHKPIVVCDDTAKNLEPVFQALYSIDVMAVIGAPLYVDGRLWGVVCVEQNSVPRHWTEREKEFVSVTTSTIAGVIMRDIYTIKLKEALHKATEASKAKGEFLSNMSHEMRTPLNAITGMTAIGKNAKDMDRKDYALGKIQDASTHLLGLINDILDMSKIEANMLKLSAVEFSFEKVLKKVVEMVNFRIDEKHQKFTVRIDKAISDALFGDDQRLGQVIINLSGKRRQVHARKWAPSRLKRVLVEEMGNLCPNRDLRRRHGFRI

SEQ ID NO: 81586 - protein, 301 aa, Unknown
  Obtained from environmental sample
  DOMAIN (3)...(197): EAL domain
  misc_feature (1)..(301): Xaa is any amino acid
DYEKVKSLGPFFSNPDISHEEALSLDRIVRRYAIKKYAEENQKKYLFINIRLAWLMRYADKPEEMITLQLAKEFNIPNDRLVIEISEDEFNASEEYIRSIVHYKKAGCRIALDDYGRRASNIERLAKLQPDIIKINIDYIHNSETSYHYREYLRSIAAFADSVGIEVLYEGVETERQLDICISSKGRFYQGFLIAVPQPSMLSAINQSVFSASIETAYMAIQKKAIDAESIKQSLDLKIERFLLQNPFDREKEADGDMYLMRLFRELPELRRIYLCNRKGVQLSDNIERQLGRSVMGGPIR

SEQ ID NO: 81587 - protein, 306 aa, Unknown
  Obtained from environmental sample
  DOMAIN (64)...(200): ATPase family associated with various cellular activities (AAA)
  misc_feature (1)..(306): Xaa is any amino acid
GLSPRDYGRACALPWNDPAPEEFELKKAQEILEEDHYGLKDVKLRIVEYLAVRKLRKDTKGSIVCLVGPPGVGKTSVGKSIARALGKQFFRFSVGGMRDEAEIKGHRRTYIGAMPGKIIQGLKIVKTKDPVFMIDEIDKMGASFQGDPASALLEVLDPEQNNSFRDHYLDLPFDISNVFFIVTANTLDTIPVPLMDRMEIIQLPGYIDTEKLEIANRYLLPKSLEKNGLKKNQVKYTKDSLLHIANCYAREAGVRNFEKHLDKIHRTLAKQIVDAQDKNEENALRFTLIKTDRKTFRQPYFPVRRH

SEQ ID NO: 81588 - protein, 138 aa, Unknown
  Obtained from environmental sample
  DOMAIN (1)...(123): GGDEF domain
  misc_feature (1)..(138): Xaa is any amino acid
IDHFKNSNDTYGHVAGDEALRHTVKIICSRLRKNDFMGRYGGEEFVLFFYYANKETGLKILDRLRIFLSESPVHLEKCLVEIHASFGLVEVDVGKAAEKGYIQKLIHDADTALYSAKLSGRNKVIVFGQETNFVTYEI

SEQ ID NO: 81589 - protein, 151 aa, Unknown
  Obtained from environmental sample
  DOMAIN (1)...(133): FGGY family of carbohydrate kinases, C-terminal domain
  misc_feature (1)..(151): Xaa is any amino acid
KGLSTGQAALRHYCRKLQRENLARAALESAIFGMRIGLDGFISLDFKPKEIRLTGGGSKSKLWQSIAANIMNLPVRPPSGSEAAAMGGAIQALWCLNKNSADSKKTTIEALADEHVALGDTIAPDKKSVEQYKKAYDVYSKYLGTLSPLYK

SEQ ID NO: 81590 - protein, 125 aa, Unknown
  Obtained from environmental sample
  misc_feature (1)..(125): Xaa is any amino acid
MESLGEKLKTARNEKELTIEQISRDTNISIRYLEALESENFSIFPGEPYLIGFIKNYGAYLDLDIQKLISLYRALKIQEQPDPVEQLLKSPPQIPKILVPTIIILAGVGLSGWLVYSLLSNIKTT

SEQ ID NO: 81591 - protein, 200 aa, Unknown
  Obtained from environmental sample
  DOMAIN (70)...(162): THUMP domain
  misc_feature (1)..(200): Xaa is any amino acid
MTTYLLKPGELTLKGGNRKLFENVLRRNLASLLKGSNAKIISSNGRLFVRCQDGTESEVEDSLGRLMGISGWAKTRVAEKTPEEVIAACVEEGKLLCEKGKKTFKIEARRTDKSFPLDSYQIRCLAGEAVPKEAGGLQVDVHKPDAAIEVEIRGEAFVYGNANEGRKGLPVGTAGRGLLSFRGALIPRCRLYEAPQGHGP

SEQ ID NO: 81592 - protein, 63 aa, Unknown
  Obtained from environmental sample
  DOMAIN (8)...(62): Uncharacterised ACR, YggU family COG1872
  misc_feature (1)..(63): Xaa is any amino acid
MNICFRPDGDKLRLEIKAVPGASKTELAGIKDGRLKIRVAAAPEDGKANAVMLGFLSKRLIGP

SEQ ID NO: 81593 - protein, 220 aa, Unknown
  Obtained from environmental sample
  misc_feature (1)..(220): Xaa is any amino acid
MVNGTSRYSGSFSISGTRITFSISIGSASATFSLSGDTLIISNHSYDSSVNGTYTKDGGISSGGGDNMTWTAVTDSKFGTTTILAIAYGNSKYVAVGKSGKMAYSTDGTTWTAVANSTFGTSTSTDDSYAIAYGNGTFVAGGYDGKMATSTDGATWTAVTQSVFTTAINAIAYGNGKFVAVGNYGKMATSPDGATWTAVTQSIFGTTSARPSLSSWGPMQ

SEQ ID NO: 81594 - protein, 282 aa, Unknown
  Obtained from environmental sample
  DOMAIN (35)...(265): Glycosyl hydrolase family 3 C terminal domain
  misc_feature (1)..(282): Xaa is any amino acid
MFDPPNSGKYGKLGREVINCEKHKQLALKAAEKSIVLLKNDNNLLPLDSSPKVITVTGPAAANAHTLFGNYYGVSARFITILEGMAEKTKDKFGINMEYRQGCLMYGDISKSHIVYGEANVSDVVIAVMGLDGAIEGEEGDAIASDSNGDRVAIELPPWQLNFLKAVRAAGKKIVLVLTGGSPIAFPEDLADAVIFAWYPGELGGKAVADIIFGDTVPSGKLPITFPASTEQLPPYENYSMKGRTYRYMTEKPQYPFGFGLFYTSFRFDSIKLMEPVLDGAD

SEQ ID NO: 81595 - protein, 126 aa, Unknown
  Obtained from environmental sample
  misc_feature (1)..(126): Xaa is any amino acid
MSENKQQSEKLAMIRHSVSHVMAQAVVSLFPGTKVAIGPSIENGFYYDFLLPRPIAADDLPAIEAEMKRIIDSRQDFAAVTVSREEALRRFAGEEFKTELINELPEGEAITVYENRTCPDGQAADG

SEQ ID NO: 81596 - protein, 91 aa, Unknown
  Obtained from environmental sample
  misc_feature (1)..(91): Xaa is any amino acid
MLGLKASGFFPIDLDCASYEEIVRVPGVGVKSAKFIVHSRRFGKIRLEHLKKMGVALKRAKFFIANPDVPVQWQKLYPEQVRAQLSNRTIL

SEQ ID NO: 81597 - protein, 141 aa, Unknown
  Obtained from environmental sample
  DOMAIN (7)...(85): Chorismate mutase type II
  misc_feature (1)..(141): Xaa is any amino acid
MELQDYRAQIDKVDDQLLSLFKERMGISGQIAQFKKEHGLPALDATREREKLADIGEKAGDDIRSFAYILYTTLFIISRPHQVNIINAESDLNKIISAAVEHTERVFPQHALVACQGVEGAYSQIAWTGFAICAICLGGES

SEQ ID NO: 81598 - protein, 90 aa, Unknown
  Obtained from environmental sample
  misc_feature (1)..(90): Xaa is any amino acid
GRPRHRFAPAPAIVGNARTSSLPPHSIVIGELGLSGEIRPVSSLDLRIKEAHRLGFEKIVVRASGKIPAVKGIEIIKFARLEQAVQWLLG

SEQ ID NO: 81599 - protein, 160 aa, Unknown
  Obtained from environmental sample
  DOMAIN (1)...(93): MutS domain V
  misc_feature (1)..(160): Xaa is any amino acid
VAIREFVHDIPQKAAKQIFATHYHELTNLIEGLEHAKNFQISVKENNGKLLFLRKVLEGACDSSYGIHVAEMAGVPSEVVQRAKRILLRLEKEKIDPSDSAHKPKAAQLSFFEPPPISENTELLLRELKAVNPDDMTPIQALQFLGKIKELLIKTTYQPL

SEQ ID NO: 81600 - protein, 308 aa, Unknown
  Obtained from environmental sample
  misc_feature (1)..(308): Xaa is any amino acid
MTDWPSSDVEQDVTMNSETTLAIPLSASMGKPTGSIGGGDVGGVGVLSGAQGRLNAPAVVSNHAGKVSLKLSGHSYKSAEVSLYTVNGKRVLRGQASAAEKGLSITRRDLTSGVYLLSVKGSDGNVFASRITHRGGAMDISVAFSNESNSTRTLAKESAALGVGDWAVTVSALGYIDSAYNFEPVKGRSNAKHTITLKTPTATPKADLRETVAGVSFDMVYIPGGEFTIGCEAANSSDCPSDATPVPGVKVSNYLIGKTEVTIGLYKAVMGVTPSDCYGSSSGSCTCIDWYDAIEFTCKLSQLTGKRY

SEQ ID NO: 81601 - protein, 297 aa, Unknown
  Obtained from environmental sample
  DOMAIN (43)...(206): Peptidase family S41
  misc_feature (1)..(297): Xaa is any amino acid
TFPGYRSGVGLSDYTARGKLEFPVSLTRAVIEVPTTKSAMIGDIGYLKLITFTPKTVERAAEAINDFKSKNFKGVILDLRNNYGGLLNSAIDVSSLFLEGGVVVSTKSRIETENHVFNTRRPFLVPSSIPVIVLINKGSASASEIVAGALKDRGRAFLVGEKSYGKGSVQQVYPLDTAGFKITTARYYTPSDVNIDKIGIPPDRLVKFPEFTDADAEKLNTLIKDNKIPAYVKDNPKANPSQIEAFAKTLERDYKLDLSLLKRLIRNEQNRTTIAPVYDLEYDVQLQEAVNILKSGE

SEQ ID NO: 81602 - protein, 295 aa, Unknown
  Obtained from environmental sample
  misc_feature (1)..(295): Xaa is any amino acid
VPYNYDDMLDDYPAANSGTVSQREAVSTLVYHSGVSVGMDYRQTESIAYSEDMATAMVRNFKYDNSIRYIESIKPVRSWDSDNSLTNDWKDLVLGQIENNSPLYYCGYDTTNGIRSGHAFIIDGYDDRIDKFHINWGWGGSCDGFFALTALNPDTHRFDNSHSMIINIMPKTNGNPPSQIKVTDFNVSLMPFALSARITAKMNYGNEYTGWIGLAVAHGDSVGMVLDSAKIGIYNAHDYSSLTYTINYLNRTITKRFGADTPIGDVTLRPVVKRFPEDEWTPIGEARQKYPFLTR

SEQ ID NO: 81603 - protein, 295 aa, Unknown
  Obtained from environmental sample
  misc_feature (1)..(295): Xaa is any amino acid
MYQIRPSFHRPLRFPYSSKPEWESSFMRGEYINSPLSGLKKNERSFLNSYGMKSIVIIPMFLEDKFWGFFSVDDCRHERTFSDDEMHILASVGLMMSNAVNRNVQSAKMRDADERMQIMFNTMPLGAIIRNENSDYFYCNESIVNMFELSGKQEFTDKFDQLSPEYQPDGRLTSEKMGEFVRKAFIDGYCRFEWMHQKLNGEPIPCEVTLVRFKYNNEFNLTAYVRDLRELKTSIELVNESEKSLSILGNILNGIDAQIYVTVPHSGEILFVNDFMKKEFKLEDDCIGQFCYKIL

SEQ ID NO: 81604 - protein, 161 aa, Unknown
  Obtained from environmental sample
  misc_feature (1)..(161): Xaa is any amino acid
LAETASPKEPELYNIDRLFEAVSAKGHVCVGLDTAAEYVPAAERKRAASDAEAVLVFNKALVDSTFDACACYKVQIAYYEEMGLEGLACYAKTLRYIRDKGGLVITDIKRGDIADTALRYAKAHFAGEFEADFVTLSPTWAWTQSSPGFPTPKITARALLS

SEQ ID NO: 81605 - protein, 84 aa, Unknown
  Obtained from environmental sample
  misc_feature (1)..(84): Xaa is any amino acid
MPVIDMQGIKREYRMESRKGEEAVVVRALRGVDFSAEAGEFVSVMGPSGSRKSTLMNILGCLDKPSAGNYTLDGIEPSNPIPIP

SEQ ID NO: 81606 - protein, 289 aa, Unknown
  Obtained from environmental sample
  DOMAIN (14)...(288): Pyridoxal-dependent decarboxylase conserved domain
  misc_feature (1)..(289): Xaa is any amino acid
MTRKVYVDYNATTPLRPEVKAAIVEDLDIFGNASSMHSSGRLAHSRVEEARTCVEKLMRAQPRTVIFTSGGSESNNAVFQTMRQLASTPNGGPLKEGRCEFITSAIEHPCVLNSAKNLQDLGFKVSFLPVDEYGKIDMDAFKKALSDKTLLVSIMAANNEIGTIQDIKKIASLAKAAGAWMHTDAVQALGKIPVNVDDLGVDYLTVSAHKIYGPKGIGALYARKDSPLRPLIHGGHQEEGLRAGTYNNIGILGFGKAAKIALDELDKYGKETALLRNRLRHGLEKRFPI

SEQ ID NO: 81607 - protein, 143 aa, Unknown
  Obtained from environmental sample
  misc_feature (1)..(143): Xaa is any amino acid
DSEKRNVHGDGFAGEAVIGEDAWWIGAADKEELSKTIFTIIYKEKETGLACIKRCVIEGWIMNKDYFLVPDGALVLHIDTRQKFTFTLKYTPKPRLKVLAEEFKAHDYPVRGLKAGGMRLSNKQVSKADVSKMDIGRKKDDDD

SEQ ID NO: 81608 - protein, 212 aa, Unknown
  Obtained from environmental sample
  DOMAIN (4)...(212): Aminotransferase class-V
  misc_feature (1)..(212): Xaa is any amino acid
MRKVYVDYNATTPLRPEVKAAITEDLEIFGNASSMHASGRLAHARVEQARNAVKTLIGAKDGTIVFTSGGSESNNTFFQTMRRLIDSSASKGRNEFITTAIEHPCVMNSALDLKKLGFKVTILPVDEYGKLKIDELEKTLNEKTLFVSVMAANNEIGTIQDIKRISALVKKTGAFMPIDPVQAVRKIPVKCERSGSRLLYYIGAINLWAKRE

SEQ ID NO: 81609 - protein, 336 aa, Unknown
  Obtained from environmental sample
  misc_feature (1)..(336): Xaa is any amino acid
MIHWPSVNTIMKDILPQLPQLVAMAKSSKPADAAAPPTQAPAASTAQGAPVAYYGGGAASYPAAPAPPAPPPPPPEPKKIILTPVDWTVTDAQTWIDMVNGVRTGGDKKAHNVTIDTDRDIVVPVEDGYTFGSVVHIAVVLNGRGVITTSNGGSLITVGANQKIGLMGSVVLKGRENNSGSVVVVDSGGTFRMEGHSSIIGNSVSGDGGGVFIGNGGVCLLAGNAAVAGNSAKGSGGGIYVSRGKLGVQDSARVYGNVAGNGGGGIYIEHGRCVIVGNATVSGNTVWFGGGVYVGAGGILVMRGNAKVSENTAKQQGGGVYFAGSDLNGRGRAFDI

SEQ ID NO: 81610 - protein, 282 aa, Unknown
  Obtained from environmental sample
  misc_feature (1)..(282): Xaa is any amino acid
MIKEKGRKYVSLDDMSARDLAQSDPQAFLQKYSPPVVIDEVQYAPGLFPYIKIWVDEHRFENKTGGGKPVSPAGAFWLTGSQKFALMKGVKESLAGRIAIIDLLGFSYREISGTPEKSKPFWPDKIQAGKGPKKRTVPDVYRDIWNGSFPELITNPSVGRDRFFSSYMQTYIERDVKDYQGITNELKFYKFVRAVAVRTGNLINYDDLARDCDIDRRTAQKWINTLQASGLVYLLPAYSGNLTQRIVKTPKVYFLDTGLACFLAGMDTPGRAGSQLSFQARC

SEQ ID NO: 81611 - protein, 282 aa, Unknown
  Obtained from environmental sample
  DOMAIN (154)...(236): Bacterial pre-peptidase C-terminal domain
  misc_feature (1)..(282): Xaa is any amino acid
MVIMLFLGFKVNRRTGHALIAAIGFAALSLTGLSLTGCPMDRGIQTVARPTATPEAGPVASGGITVRLETTTPGADIFYTTNGKTPTKNDPDTKKYSNPISITPPETITAIAVKYGMYNSAILKAEYTVKLPTTGVTELIENKWADGNLTTSANEQWFKFTATAGTHYIHAAFGTMDSWNGLYIQVYDSSGAKVEPEANLHGSNNNYVSRSVTSGQEYYIKVRPYSTYYGTYQIAFNDKSSTSSVTVPYPRRKKAYQNTWADGELTASTPSIGSVHRTRNPS

SEQ ID NO: 81612 - protein, 280 aa, Unknown
  Obtained from environmental sample
  DOMAIN (130)...(277): ABC transporter
  misc_feature (1)..(280): Xaa is any amino acid
MLRALKLSAIFHPSVEFLTSIGGVIVVGFGGYLAYKNQLSVSEIVGFLLYLALFYAPITGAAQLLESAQQSLAGAERVIEILDAPQSVKDSPDAKSIGKAEGRISFENVSFSYIQGVPVLDKVSFEIKPGQMAALVGATGVGKTTLSKLISRFYDPTDGRVCIDGHDLKEITLESLRSNISLVLQDTFLFNGTIEENIAFARSDASIEEIKAAAQTARIHDDIMQMPQAYQTQIGERGVKLSGGQKQRIAIARAVLCRSPVLILIGTRPRPSDLGEESAP

SEQ ID NO: 81613 - protein, 175 aa, Unknown
  Obtained from environmental sample
  misc_feature (1)..(175): Xaa is any amino acid
MLPPADRLIDARLDWYIRDSLYWVLHAPRQTGKTTFLQNWAREMNSGDDVVACYITIERCQLMSDPEQCFPNLCAAIKEHAHKSDLPVPDVKDAPAGSMLSQILRNFSEIVAPKPLVLLFDEVDALEGPALIGFLRQLRDGFMGRGVGTFSVSIALVGMRDLMDYISAAKDGFPP

SEQ ID NO: 81614 - protein, 136 aa, Unknown
  Obtained from environmental sample
  DOMAIN (8)...(130): DUF218 domain
  misc_feature (1)..(136): Xaa is any amino acid
MRNTSKAGADYIIVLGCQVVGEYASLPLLSRGYTAVRYLEKNPETKVIVSGGQGPGENITEAEALRRLLLERKIGKERIFLEDKSKNTMENFKFSNELYNLSDKNIIIVTSDYHMFRALSIAKKFKLLGRSDHWGT

SEQ ID NO: 81615 - protein, 188 aa, Unknown
  Obtained from environmental sample
  DOMAIN (112)...(139): NHL repeat
  misc_feature (1)..(188): Xaa is any amino acid
MKRKYIRCILFMVFLFSLLPLYASPTNYTYNYDFWEEQVASPDAYHVGAYILGTSLGIGNFNDPQGLFVRDNRVYICDSGNNRIVLLAYENGEHRLVSEANSVTINGVASPFKYPMDIFESRDGFLYIADTNNHRVLKLDRNWNYVSSILKPDDESIDKDAEFLPLKLVVDFAGRLSSRPSDHRGGFA

SEQ ID NO: 81616 - protein, 318 aa, Unknown
  Obtained from environmental sample
  DOMAIN (33)...(204): tRNA synthetase class II core domain (G, H, P, S and T)
  misc_feature (1)..(318): Xaa is any amino acid
VKLGQDLDIIDFDSATKVSGTKFYYLKNEGVFLELGLVRYALDILQKKGFTPFITPDIAREEILEGIGFNPRGAESNVYTLEGEDTCLVGTAEITLGGYYSNMILPKEKLPLRMAGLSHCFRREAGAAGQFSKGLYRVHQFTKVEMFVYCLPEESDRFHEELRSIEEEIFETLNIPFRVVDTCTGDLGAPAYRKWDLEAWMPGRNNGEWGEVTSTSNCTDYQARRLNIRFKDSDGKNKFVHMLNGTAIAISRAIIAILENFQQADGSVHIPRALVPYVGFDVIKKKVVKASLGKASYRLPRQIKPPQWRGHSCHTTNI

SEQ ID NO: 81617 - protein, 79 aa, Unknown
  Obtained from environmental sample
  misc_feature (1)..(79): Xaa is any amino acid
MIAQNAIAGGKCGIPIEGATLYCRMTPCRTCAMLIINCGIKRVVCQRRYHDADNSEAMFQLAGIKLEYVYNETQQYVDQ

SEQ ID NO: 81618 - protein, 316 aa, Unknown
  Obtained from environmental sample
  misc_feature (1)..(316): Xaa is any amino acid
KTTFLYESSEDKIGVYDTLTGKTKTFNADSGIYDIDVSADGKRMLLSGFRYIENRAAAVVTEHKTDNGWKTGGTISGLGKARYFRDGVIGIRSALHNNCIVYEKFDGEREVLFTGNEKLMFSGPQALDNERIVFIALREGKRELWLFNYVSRELFIIENTQDDNEYWAYMRDLNVSEGKIFFGYNSDDRMYKLGMIDLDAMQAVFSGRDFSGGVLSPVSTDGNVYYLATFVTRNSLMRFPETTDSLSGNKIDLRLTKLDNQTYKTIPESPYTGASKPYVGLRYTNPFQLWLPLPLIRVSEDVLLRLTAGNFLANKR

SEQ ID NO: 81619 - protein, 140 aa, Unknown
  Obtained from environmental sample
  DOMAIN (12)...(137): Putative undecaprenyl diphosphate synthase
  misc_feature (1)..(140): Xaa is any amino acid
MDKSIPAHVGIIMDGNGRWAKSRGLVRTQGHLEGLKTAKRIVKAASDLGIKYLTLYAFSTENWKRTSEEVGFIMGLIKQYLRAEFDFSKQNKIRVRHAGDFTGLPPDIQKELTDSMTDTAGLKECRYSARADLYMGEGIG

SEQ ID NO: 81620 - protein, 250 aa, Unknown
  Obtained from environmental sample
  DOMAIN (6)...(250): Branched-chain amino acid transport system / permease component
  misc_feature (1)..(250): Xaa is any amino acid
MIVFQQLINGVSLGSIYALIALGYTMVYGIVLLINFAHGDILMVGAYAAFFVLSAIGAGPVGMLFAFVIAMIFCAVFGITIERLAYRPLRAAPRLNSLITAIAVSLILENGARVLPFIGPNPRQFPRPTVVNIKIAGELSISNIQIIVIVLSALLMLALNYIINYTKRGKAMRAVSFDIQAASLMGISVNKIISFTFALGSVLAPRRGILYPSAYPRIDPMMGHDAPASKPFVPPVLAGIGSLSGAIAGR

SEQ ID NO: 81621 - protein, 303 aa, Unknown
  Obtained from environmental sample
  misc_feature (1)..(303): Xaa is any amino acid
MERHISLIADMADIDPAELRENNIDPQIILSNVKHKNIIHGKNLIKSTIKMSDYNHKWASYELLRKSRKGKKPERGENPRGIGIAVGFQGSGFLYPGEDNGLYSVEVTLTKEGILEIKTSITSSEDFTRIWAKVVKETMSIEPDMVRIIASNAPDCGPSCASRNITTVTKLVEKCCLTIRKQRFHDPLPITVRRSVKPQYGTLYGGRFTPPEGKNIDINSFSKLGLACAVVEVSLDLIECIPVIRGVWLGMTADSSSPQTGRTEALPARRFKRWVGRIRNILIISTALYRQTPLHTLRFFLRR

SEQ ID NO: 81622 - protein, 313 aa, Unknown
  Obtained from environmental sample
  DOMAIN (155)...(232): Helicase conserved C-terminal domain
  misc_feature (1)..(313): Xaa is any amino acid
MKAADRRTALERIADGRAGYVVGTHALFQDAVEFAKLQLVVVDEQHRFGVKQREAIKEKGIDPHWLVMSATPIPRSLALALFGDLDQSVLDELPPGRLPVATRLLDPADAERAWDLVERELSQGRQAFVVSPAIDPGEETKISLRDIKAMECLLQARFPDTAIAVAHGRLKPADMNARMAEFVSGQARILLATTVIEVGVDVPNATVMVVDHAERFGLSQLHQLRGRTGRGAHGGHFVMISGSETERLRALVETSDGFRIAQRDLEIRGPGEFFGTRQSGLPRFQVADLVRDRQLLAQCREEAAKAVARGLAE

SEQ ID NO: 81623 - protein, 110 aa, Unknown
  Obtained from environmental sample
  misc_feature (1)..(110): Xaa is any amino acid
MDSTVVSSLKNSLDDFKSALEWLNHSYELCKKTGIKDNYSIEELDAFENLTSRYARTTDFLIHKLFRSIDAVEFLEIGTIIDSANRAVKRGFVESIDILHSLKDLRNEIA

SEQ ID NO: 81624 - protein, 313 aa, Unknown
  Obtained from environmental sample
  misc_feature (1)..(313): Xaa is any amino acid
VPQIGNHDTFDFIGDPVEQVALMPLHYNCPNYYELTVDKSDDLYVRAGGNYYFSYGNTLYICLNSNVKGVEPHRDFMKEAVASHPDAVWKIALFHHDIYGTGDHAGTAFQDAQKMQPDWSPFLDEFGIDLAINGHDHVYGRSMFMKGNKIQSAQMSANLDPLGTNIVKSNPGVYVLPQGILYMALSGSATEKMYAPEAQEWVAYTHGLIGVPEYSVITIDGDTLTFVCYRSDTDAVTDSITLRKTATRADLEKLIPDCEAVKQTVNITGGWYVFQNAIAAAKTALSGSPANINAAYVALYNAYIPLRKHPRPI

SEQ ID NO: 81625 - protein, 317 aa, Unknown
  Obtained from environmental sample
  DOMAIN (1)...(76): Histidine kinase-, DNA gyrase B-, and HSP90-like ATPase
  misc_feature (1)..(317): Xaa is any amino acid
MDEFAVTDTGMGIPKENVKKLFLDYYQVDDKANRHIEGTGLGLAITRRLVEMMEGTINVESEHGKGSTFSFRIKQGFVDDSVLGADVSDKLRKFKYTDDRRVISKKMKRVNLSYARVLVVDDMQTNLDVASGILRKYKMQVDVLTSGQEAVDRIQGELPIYNLIFMDHMMPGMDGIETVDRIRALGTEYAKKIPIIALTANAIQGTEKLFFEHDFQAFVTKPIDIIEMDAVVRKWLYEKKRGSVNVSGVPDSDFIEDDGNEMDIYIPGVDTKKGLSLYGRDADIYVPLLRSYVANTPATWKCEKRLAARDHPGGKLG

SEQ ID NO: 81626 - protein, 222 aa, Unknown
  Obtained from environmental sample
  DOMAIN (2)...(66): Acetohydroxy acid isomeroreductase, catalytic domain
  misc_feature (1)..(222): Xaa is any amino acid
PGFPPPLSTRESCRDDRAQGPGHTVREQYKNGAGVPCLIAVHQDPGGDAKRLALAYAAGIGGARAGVLETTFKEETETDLFGEQAVLCGGVSALMKAGYEVLVESGYQPESAYFEVMHEMKLIIDLVNRGGLSFMRYSISDTAEYGDYVTGPKIITKETKDTMRQVLKNIQNGSFARDWILENQVNRPFFNRMRALEQEHPIEKTGKELRAMMPWLKKNEEK

SEQ ID NO: 81627 - protein, 96 aa, Unknown
  Obtained from environmental sample
  misc_feature (1)..(96): Xaa is any amino acid
LLEILDTTLRDGAQGEGITFSVQDKLSVVRALDNLGIAWIEAGNPGSNPKDMEFFRLAESLTLEHAKLCAFRSTREKGGKVNEDPGVLSLLDANTR

SEQ ID NO: 81628 - protein, 249 aa, Unknown
  Obtained from environmental sample
  DOMAIN (27)...(163): Bacterial flagellin N-terminus
  misc_feature (1)..(249): Xaa is any amino acid
MIINHNLSAMFADRSLKVTQVSLDKNMEKLSSGLRINRAGDDASGLAVSEKLRAQIRGLNMAAFNAQNGISFIQTTEGYLQESEDIIQRLRELAVQAANGIYTEEDRMYIQIEVSALVAEVDRVASHAQFNGMNLLTGRFGRPIGENLVTASMWFHIGANMDQRTQVFIGTMTAHGLGIRDVGDNSFISLADPDDANRTIWTLDVALKKITNNAPISEPIRTALNTQSAVFHRNEKPAASDSASRTPTW

SEQ ID NO: 81629 - protein, 293 aa, Unknown
  Obtained from environmental sample
  misc_feature (1)..(293): Xaa is any amino acid
LDEFKTTDVENFEKAWKKTVPFVQENYKSHVFDTEFYYGEFQKSLSTKENGKSFISFQSVKEHFTDKWDGLLFQKKLKWELDIIEKLRKEFCEKLYEQIDRLKKLQELLWPFIGELGRLWDMSKGRWQRVNFDVMEKYAKLLERDESLQELAEMLGRMRQAEREYEEEIFAEMVMKPTWKIERAAKSELVGIHESNDISSILPVEAALLANKTTELLFYKKFAEKKLQTFEFQAKIPSLKNEEIKNKRLKEKEETNGPIIICADMSGSMHGTPEQIAKTVCFAVLKIAIERIE

SEQ ID NO: 81630 - protein, 137 aa, Unknown
  Obtained from environmental sample
  DOMAIN (26)...(137): DEAD/DEAH box helicase
  misc_feature (1)..(137): Xaa is any amino acid
MNDFADLGVLPELIDRLAKKSVIQPTAVQRLVIPKLLENKSVVFRSATGTGKTLAYLLPGLQLLLGDTETPYESPRLLVCAPTLELCSQIKDEIDFLLEGKSGLNVSLFYRSINLSRQIDSLKKTRAAYRCPESGQA

SEQ ID NO: 81631 - protein, 307 aa, Unknown
  Obtained from environmental sample
  DOMAIN (7)...(307): Protein of unknown function (DUF1703)
  misc_feature (1)..(307): Xaa is any amino acid
MGIDINKKKLPIGKSFFDNVMESGSYYVDKTLFIKDIIDKDAAVTLCTRPRRFGKTLNQTMLKCFFEDTAQIGGKDTRALFRGLKIEEAGERYMEHLGKYPVIFLTFKEAESESFDETCHIFKKMLSDEFRRHGYVKEKIDDAVDLKLFESLSSGDTNISSYKDAIKFLSKCLERYHGKKAIVLIDEYDVPLQKSWACKYYKEMIAFIRPLLSSALKDNPHLQFAVMTGCLRISKESIFTGLNNMQVISILDKYYSEYFGFTQLEMDNMLEYYGLSEKRQIVRDWYNGYLFGKIEVYNPVEFCICGG

SEQ ID NO: 81632 - protein, 336 aa, Unknown
  Obtained from environmental sample
  DOMAIN (37)...(200): Radical SAM superfamily
  misc_feature (1)..(336): Xaa is any amino acid
AAIIASEDNEEIDRFFAQARKVREAHYGKSVYIRGLIEFTNYCKNDCYYCGLRRSNSNLERYRLSFDEILECCRAGDKLGIKTFVLQGGEDPWFTSERITEIVSAIRKEFPNHAITLSIGERPQSDYELFFSAGANRFLLRHETAGDEHYAKLHPADMSLENRKQCLWNLKEIGYQVGAGFMVGTPHQTPECLLADIRFLEELQPQMVGIGPFIPQKDTPFASQPAGNLTLCLKMLALTRLILPKALIPATTAMGTITPNGRELALEAGANVFMPNLTPTAFRKLYALYDDKICTGDDAVMCMSCMKNRIVCSGFEPEMVRGDAKEYTRPICHGGP

SEQ ID NO: 81633 - protein, 285 aa, Unknown
  Obtained from environmental sample
  DOMAIN (171)...(257): Glycosyltransferase 36 associated family
  misc_feature (1)..(285): Xaa is any amino acid
LGELSCSPAYGAIISNNAGGYSFVKSGAAGRLIRYRFNEQDRPGRYIYLRDDESGDYWSASWQPVGKPLDQYKSVCRHGTGYTQLEADYKDIHSQALYYVPQDADYEVWKVKITNNGNKARKISCFGFVEFTCESFYEQDQVNLQYTQFITRTYFKEKFILQTINENCLNAVNESRVETRFFALAGAKVESYCGDRASFLGKYRDYGNPVSIENGKLDGTLNYNLNPCGALHTTFNIEPGKSAEFVFLLGQKREAQAKELVSRYEDINLPEKETENSCRSDQSLS

SEQ ID NO: 81634 - protein, 132 aa, Unknown
  Obtained from environmental sample
  misc_feature (1)..(132): Xaa is any amino acid
LIYTGSMKLSEIQGITESQKSALDKQEKGLERQLLPELPDIQSHALVVSGIRRCGKSTLLRQFMHKLGKPFFYLNFDDIRLTSFSHTGYVLLDKVITESGARLIFFDEISSRARWELYVTQKLDESFQLADT

SEQ ID NO: 81635 - protein, 92 aa, Unknown
  Obtained from environmental sample
  misc_feature (1)..(92): Xaa is any amino acid
FFRVYGEISSIAQNPEAIGYISLGSVDSSVKAISVNGVAPTNDNVKKGTYKIARPFIVLTGKNVRPESAAFIDWMLSSEGQAIVSKSWITIK

SEQ ID NO: 81636 - protein, 100 aa, Unknown
  Obtained from environmental sample
  misc_feature (1)..(100): Xaa is any amino acid
GAFASAGNSTIRILAIGRVVGDSAPVLLTVGLTKNMARTIFESGRTLTIHLYYVTNEAVRPEDFGIAFATAFMLVILVVVINTATKIMTANFRKKLGEIQ

SEQ ID NO: 81637 - protein, 174 aa, Unknown
  Obtained from environmental sample
  misc_feature (1)..(174): Xaa is any amino acid
DLAQKSGRAVKNYRRYCIAFSVFSNFNCETIVYNGDANEIIKNAPEVDIAYVDPPYNQHPYGSNYFMLNLILEYQYPQNASTVSGIPSNWNRSGYNKEHKALRLLADLVTGIKSKYVLISFNSEGYITIEQIRNMLNNMGTVEIMEIKYNTFRGSRNLNSREIYVKEYLFLLEK

SEQ ID NO: 81638 - protein, 72 aa, Unknown
  Obtained from environmental sample
  misc_feature (1)..(72): Xaa is any amino acid
MQQDIMTVNTDNTPNNVRRVYVEKRSAYDVQSVRLLADLRDNLGISGLTGVRTLNRYDIEGLTDTYYAAARD

SEQ ID NO: 81639 - protein, 127 aa, Unknown
  Obtained from environmental sample
  misc_feature (1)..(127): Xaa is any amino acid
GVPPWDQKSARDTLRDEYRKLLEKYFGNEVVFEKESDLEGLRIPHFYNAFYVYKYSTGISAALALAERVLSGGEKEREDYFGFLKSGGSRFPIESLKAAGVDMSSPAPVEAACAVFSRLVDELERLL

SEQ ID NO: 81640 - protein, 68 aa, Unknown
  Obtained from environmental sample
  misc_feature (1)..(68): Xaa is any amino acid
IGRVFSAAAEAWIISGGTHHSVYSAALTAEYFRDWAEMNGIEFVLIDRDTKPARLQDELRRNDAYWSR

SEQ ID NO: 81641 - protein, 297 aa, Unknown
  Obtained from environmental sample
  DOMAIN (215)...(297): Histidine kinase-, DNA gyrase B-, and HSP90-like ATPase
  misc_feature (1)..(297): Xaa is any amino acid
VFIVIISMVIYFNIKAIASPIKKLTDDALKISKGDFGVSFEKVAENDKSEIAVLNRSLAKMVEMLTGTLREVELRVESRTHELSLMTQKAEEAKVRAEEASKVKSQFLANMSHEIRTPMNAIIGMSAMGKTAADKDRKDYCLNKIQDASKHLLGVINDILDISKIEANKFSLSYTEFNFEKMLQNVIQSLSFKVDERGQSLKVYYDRAIPPMLIGDDQRLAQVVMNFLSNAVQFTPEKGAISLRTRLVERKEDGCTVRVEVSDTGIGISQEQQKILFQSFQQADGQTARKYGGTGLG

SEQ ID NO: 81642 - protein, 310 aa, Unknown
  Obtained from environmental sample
  DOMAIN (1)...(126): Glutamine amidotransferase class-I
  misc_feature (1)..(310): Xaa is any amino acid
VRAIRAIFDLGIPIFGIWYGMHLMCHTLGGEVSAGGAGEYGRVTVTPESPASTLFHETQGKPFAALMSHRDVAARLPGGFRKTASTAACVAACENAEKKLYAVQFHPETKHTDGGREIFQRFLFDVCGAAGDYKLDDYIDTQVRLIRQKVGDNNVLLALSGGVDSSVCASLLSRAVPNRLVCLFVDHGFMRLNEGDEIERVFSKRKLRFIRVNAQGRFLNKLRGVADPETKRKLIGEEFVRVFEEESAKIGDIPFLAQGTIYPDIVESGGSYGATIKSHHNVGGLPKNLKFTGVVEPLSGLSKTKSARPI

SEQ ID NO: 81643 - protein, 93 aa, Unknown
  Obtained from environmental sample
  misc_feature (1)..(93): Xaa is any amino acid
MYDIEDILEAESPSHAVELLRQHPDAKIIAGGSDVLIEIREGRLAGRTLMSIQKLDCLRGVKIDPDGAIRVGALTSFSHVAQDPRANLSLVFP

SEQ ID NO: 81644 - protein, 144 aa, Unknown
  Obtained from environmental sample
  misc_feature (1)..(144): Xaa is any amino acid
LLEILDTTLRDGAQGEGITFSVQDKLDVVRALDDLGIPWIEAGNPGSNPKDMEFFRFAGSLKLEHAKLCAFGPTRKKGVKAGEDPSLLSLLDAQTQAVVIFGKSWDFHVTEVLRVTHGENLAMIAETIAFLKKRERKFSTMRDI

SEQ ID NO: 81645 - protein, 235 aa, Unknown
  Obtained from environmental sample
  DOMAIN (4)...(235): Isocitrate/isopropylmalate dehydrogenase
  misc_feature (1)..(235): Xaa is any amino acid
MKFTIAVIPGDGIGPEVIAPALKVLDAAGDKYGHTFSCAELLAGGRAIDQTGEPLPKETLEKAKQCDALLLGAVGGPKWDKLPGHLRPERALLGLRSGLGVFANLRPAALLPQLKSACPVKDEVLMASNSEGKAAFDLLIVRELTGGLYFGKRGRLEEPSNGHSPGSAFDTETYSWMEIERVLRAGYEAAAVRRKKLCVVDKANVLESSRLWREVASAVQRISLGRSDPCRGPKG

SEQ ID NO: 81646 - protein, 317 aa, Unknown
  Obtained from environmental sample
  misc_feature (1)..(317): Xaa is any amino acid
FWRLWPSGTRVPNRSVYLYERSLPAGESITLRYTPCVGDGYPGMAKEYRSWLTRTYPSLGADKEDGVPVAIEVVGAVNKTRHRLGIPFDLPLKLTSYKESANMIGDFAQWGWKNVRIKPNGWFNHSVDHSVPNKIKLISELGSKKDFKNLVSVAEKNGYAVFPDVDFMYMRDVKLFGGFSLYRDAARYVNRKRVEKYPYSFVWFGERVRWGKLSYLARPAYMMSLIDNFNRKMSALGLRNLAFRNMGAKLAGDYHEKRLVSREASMKMRQEKLAELKGNGAGVLLNTGYAYAVPWADFITDMAIDDQGSASPTPGAV

SEQ ID NO: 81647 - protein, 217 aa, Unknown
  Obtained from environmental sample
  DOMAIN (119)...(217): Peptidase family S49
  misc_feature (1)..(217): Xaa is any amino acid
MILYLKPLPLTLTQGFCVKYSTHKRITIAIFSAVVSLAILILTVSLRSGSGIHDPAGGLSFGKRLAVVRLEGEIFDAAWHAEQLRAYRLSNNVAGVLLRVDSPGGAVAPSQELYNEVAAYLADSKPLVVSMGNVAASGGYYVSSPAHKIFASPGTLTGSIGVIFSMPSYQELAKKVGVDFRMMKAGEMKDAGSPFRPMTEKETKYFQRCLTTSLSNS

SEQ ID NO: 81648 - protein, 318 aa, Unknown
  Obtained from environmental sample
  DOMAIN (1)...(318): Protein of unknown function (DUF1703)
  misc_feature (1)..(318): Xaa is any amino acid
GLPIDRFGREIFRHTGTPINFLCKCLERYHGKKAVVLIDEYDVPLQKSWVCKYYKEMIAFIRPLLGSALKDNPHLQLAVMTGCLRISKESIFTGLNNLNVVSILSDSYSEHFGFTQIEVDTMLKYYGLESKTQILKDWYNGYLFGNTEVYNPLSTVHVVRAWTQNIERDPEPYWSNTSGNDIVRRLVDIANVEMKTDLETLMAAQTISKPIHEDITYEEIDEDKNKDPDNFWNFLFFTGYLKKVGKGRMDGVKKVLDLSIPNLDCCTFMKPKYKIGLKRKSAGKDFARYIQRFFSGDAETLQKELGNFLVETISYMGR

SEQ ID NO: 81649 - protein, 50 aa, Unknown
  Obtained from environmental sample
  misc_feature (1)..(50): Xaa is any amino acid
MCPNVPFPCAALVDKDTGKVAIYYGCADTVTGVVFGNVDEIVDWVKKNKF

SEQ ID NO: 81650 - protein, 289 aa, Unknown
  Obtained from environmental sample
  misc_feature (1)..(289): Xaa is any amino acid
MPWLNYTVRKNGYNYLAHESVITLFNGSEIWIGGLGDREQADKILGHEYNTIYFNEISQLSYAAVTTAYSRLAMRIKGCRNLFYYDCNPGSPLHWAYKIFVLKRQFLSGEPLEKPELYQSMLLNPEDNSENLPEDYISDILDGLPEKQKARFRDGLWVKAEGVIYERFDESMIVNASELPEQFDRYAAGQDFGLNITFVKIGWLGDMIYVLCDYGAFNMTTHSFNKELTARGWFDCPDGMGLPVYCDPAGGERIQEITGGTKANNSVDSGIDYINARLTPVIFVWIGVP

SEQ ID NO: 81651 - protein, 318 aa, Unknown
  Obtained from environmental sample
  misc_feature (1)..(318): Xaa is any amino acid
AFDEEKPDFFRDGAGNYRLSVPPEVDPVDRVLARTGAGAALFGRYGYNPDSTPIVIQPDSRNALFAPGNRIKDFTVEFWMYPLNMENGEQILSWTSIMSGSRAQRIDCSVSKNKLKWSFVNFFASINGSKQINIDFTSLASIVPKTWSHHLIRFDASTGMIEYIVDGRGESIVYATSTGRENSEVHIPVIGDNGRFLLGGLFSGFIDEFKIHGVCVGRTSIQRYAFGGRIETKPVDLGAISSGVVKINACGGRTSIRGTALQNEFRENGRFKFSDDAEMNFFVRAGENPYSLDKVPWVIFTPGRGHIGRCLGDQPGKN

SEQ ID NO: 81652 - protein, 67 aa, Unknown
  Obtained from environmental sample
  misc_feature (1)..(67): Xaa is any amino acid
MAEARLLADAVIDVWAQDNQYGKRINAGLKGVRFVGDGDAFAGTGAANADDFDDIAVGSGNSVADYL

SEQ ID NO: 81653 - protein, 268 aa, Unknown
  Obtained from environmental sample
  DOMAIN (1)...(268): DctM-like transporters
  misc_feature (1)..(268): Xaa is any amino acid
LIIAGIAGMPIFAAIGGIALIMLQAAGQEPEKAVGQIFSALTDADLIAIPLFTLTGFFLSESKAGERLVSAFKIFFGWMPGGIIIATVIICAFFTSFTGASGVTILALGGILYTILNENKYSERFSIGLLTSSGGIGLLFPPSLPIILVASSTNTILHFMNIPVENTIIHYFIGAIIPGLILVFASIIAGLLLSSKVKIQTEKFNGKNALHSLKESFFEILLPIILVLGYFSGILSLIEVSAVSVIYVLIVEVFIKKIFYLRMSQKFF

SEQ ID NO: 81654 - protein, 105 aa, Unknown
  Obtained from environmental sample
  misc_feature (1)..(105): Xaa is any amino acid
MRKQLVRCTINGKATETMVDIRASLTDMLRNEYRLTSVKKGCEVGECGACNVIINGECFNSCIYLAIWAEGKEITTTEGLLSADGELSAIQQTFMTRARPILSFL

SEQ ID NO: 81655 - protein, 315 aa, Unknown
  Obtained from environmental sample
  misc_feature (1)..(315): Xaa is any amino acid
GIFPPGLWPSGRAKYTENVTQEVRESWNKFCDLTDKLAKEGLPRGSMRFEIHSEYEDYFTNETLNSFFNAPDRLAFRTYGLKVLDNVLEKGVFTMGYTDLGGYNPDLAELIVTRGDRVERERVSYSGITTIANAADAIIQAADSEQIPANFRAIAVPLLLPFVRENVFFSIEDSRLRVAQAMERVPSVMKHIEKGKRVIRKGFVITNEDIKDLQALNDAHQKKDPRSIIGLVLLLGLLYVLFLLLQEKLVIGKEFSGNEKSLLFILVFLYLAGAGIIKNIAPAMNDAPVSLMFPTALIVMIPAVFMGPLLALAMG

SEQ ID NO: 81656 - protein, 315 aa, Unknown
  Obtained from environmental sample
  DOMAIN (67)...(140): HAMP domain
  misc_feature (1)..(315): Xaa is any amino acid
MGTLKRYVDRLGVQMELNYPVIENEHMLDEIRGVSALVSDLLQNFIVREIESAAAESQRIKKRAIILGIGEFAIIFTAVYFAVLMQRSVAKSVDHSIGSLVSLSSSIAEGDLDARAELPNVQELQALTKDLNVMAYKIKTLVEENIREQRNLQKSEMRALQAQITPHFLYNTLDSIVWLAEGNKNEQVISITRAFSDFFRISLNRGDEWVHVQDEFKHIESYLTIQKIRYRDILDYSIEYENEMEHKVMLKLLLQPLVENALYHGIKNKRGMRNIIVKGWQEKGFLCFSVEDNGVRMSCEQLASVKSQFAGMPTL

SEQ ID NO: 81657 - protein, 119 aa, Unknown
  Obtained from environmental sample
  misc_feature (1)..(119): Xaa is any amino acid
MPKISKITVHPDFRIGDISPRLYGAFLEPIGTMVNGSMYNPKHPSADAKGFRRDYLDALKASGLPAVRLPGGNFLSGWDWNDSIGPLEKRKTMLDTAWYQYYTTKLPLRVSPMDRNDWL

SEQ ID NO: 81658 - protein, 74 aa, Unknown
  Obtained from environmental sample
  misc_feature (1)..(74): Xaa is any amino acid
MSVKELYKSICEAKHLVAFTGAGVSTLSGIRDFRGKNGIANGETVFNIDIFEKDPLIYYDKRASVISAESDPVG

SEQ ID NO: 81659 - protein, 283 aa, Unknown
  Obtained from environmental sample
  misc_feature (1)..(283): Xaa is any amino acid
LKNTLYEHVFNEKNNLVSNTNQRLDIFFSAEKDGELNRLTAIEQSVRARIKQIKIFLAQNNSNIRDEFENKLDELSDLLDQKVTEAREKAAQSEAFSAEEREKLNALKEEEVTDEQIRAVSKKNNLERFIGLNVLNVIGIFLLFVGAVAAMRYTYLKLSDLFKGIAIFILGGIMLVTGEILNRKKPNIFSLGISAGGIAILYAALAISYFVLQILGMYPAIIICVLLTAGAFVLSSRYNSQIIAAFALIGGYLPLYTIDENIKFVHGAMVYFAVLQFIRFFGF

SEQ ID NO: 81660 - protein, 147 aa, Unknown
  Obtained from environmental sample
  misc_feature (1)..(147): Xaa is any amino acid
MNNNPVAAYLAAVAPDKINTSLLAYLCNLTEVAKVTPEIASSIVKELENQRKRVKLIASENYCSIAVQLAMGNLLTDKYAEGVPYHRFYAGNEHVDAIEDLAGKEACKLFGAQYANVQPHCGADANLLAYWAILSTRIENPANAKGN

SEQ ID NO: 81661 - protein, 148 aa, Unknown
  Obtained from environmental sample
  DOMAIN (35)...(112): Bacterial Ig-like domain (group 2)
  misc_feature (1)..(148): Xaa is any amino acid
MKNTLNVLLVRVLGIIALVAVIGFSMTACGDLNVPVSGVTLNKSSISLAVGGTETLTATVSPSDATNKDVSWSSSNTNVATVTNGTVTAVSAGSATITVTTADGGKTAQCTVTVTGANAPTTYLLDGIWRNSVGYQITVSGSTGVISA

SEQ ID NO: 81662 - protein, 282 aa, Unknown
  Obtained from environmental sample
  DOMAIN (60)...(282): Prismane/CO dehydrogenase family
  misc_feature (1)..(282): Xaa is any amino acid
MINVQTLYKGTIMESKDTLSKVSDGASVAMLEKSHTDCVETCFDRSETQKTQCGFGKSGLCCRICHMGPCRISHKSPKGICGATADTIAARNFLREVVGGTSAHSDHGRHLVLQLKAVAQGKAQGYQIKDEKALRRAAKLYGVEEEGRSVEEVALELSNLFLGEFSEQEGFLKTLKLAPKKRQGVWEATGIKPNGVDRMIVEAMHRTTMGVDHDYLHLLHHALQVSLADGWGGSRIASICSDILFGTPSPVKSAANFGVLKKETVNILITSCRSDTWGGQYG

SEQ ID NO: 81663 - protein, 137 aa, Unknown
  Obtained from environmental sample
  DOMAIN (36)...(135): IstB-like ATP binding protein
  misc_feature (1)..(137): Xaa is any amino acid
MAHCFTEQQTQAGMHSLSFEERFALLVETEWLSRRNKRTERLVRQAGFRFPAAVEDIDCHAKKGIGKPEVLKLSLCSYIKKAQNIFFSGPTGVGKTYLACALGRAACAQGFQVIYTRLNDLSACSSPSSNLSCGRNA

SEQ ID NO: 81664 - protein, 144 aa, Unknown
  Obtained from environmental sample
  misc_feature (1)..(144): Xaa is any amino acid
MITDGEYDCEVFVKARDGTQSETVYRTIKISTSAPVTRIITPPISRYSNHMILVRGYSGDANGIGKVTISMDRGLTWQDVTLKDDGTWELPLNTAIYTDRVYSALITAEDMYGITSFATAMINIDNTPPAVFITSPSAESVVGK

SEQ ID NO: 81665 - protein, 81 aa, Unknown
  Obtained from environmental sample
  misc_feature (1)..(81): Xaa is any amino acid
MFRFIRTQGSIGELIVRDFHSHLKEVKAGKGICVTVGAFSEEARRYTEARLIDLIEKEKLSAILNTVDSKVENAQKASSKR

SEQ ID NO: 81666 - protein, 290 aa, Unknown
  Obtained from environmental sample
  DOMAIN (8)...(290): UvrD/REP helicase
  misc_feature (1)..(290): Xaa is any amino acid
MIDIKAALNEPQFRAVTTIEGPVLIIAGAGSGKTRVITYRIAYMLERGIPQNAILALTFTNKAAKEMETRVKELTGKKLQSLTVGTFHAFGLSIIRDEAELLGFRKNFSVYDETDRITLIKESLRECRLASKKFDLYALGQLFSNIKTGICSWNEGAGLGGRSASADLKPVYETYQSGLKVYNAVDFDDLLTLPLELFERNPDILANYRKRYRYIMVDEFQDTSLIQYRLLRALAWRNTEGISPDIRQVDTVNLPNVCVVGDDDQSIYSWRGADYRNILQFSANLSWGNK

SEQ ID NO: 81667 - protein, 64 aa, Unknown
  Obtained from environmental sample
  misc_feature (1)..(64): Xaa is any amino acid
MLAGLCLGRKGPFHKTLEPILSDSKLFAVNLYEAGLGEKVESYFEELLAGPGAVAATLRKYVNQ

SEQ ID NO: 81668 - protein, 280 aa, Unknown
  Obtained from environmental sample
  misc_feature (1)..(280): Xaa is any amino acid
GFSPAYREFVISHPTVTTWPTAATITYGAALSTSALSGGAGAGTFAWTTPSTIPTVTNSGYSVTFTPTDTANYGTATNTVSITVNKAAASIVTLPKATSITAGQKVSDSSLSGGVGSPAGGKFSWVTPDTPLLGVGTSSQMIRYTPSADDLSNYNPVSGYVDVIVKPKELKFSHDSGLYSAQFNLALTGEAGDSIYYTTDGSIPVPNKTGTTQYSSAITVKDRNANGGEANVLATPADRFYMVPGDPRGNVPGVHDPRKVPKATVIRAIRVDSKHIKAML

SEQ ID NO: 81669 - protein, 293 aa, Unknown
  Obtained from environmental sample
  DOMAIN (11)...(292): Bacterial extracellular solute-binding proteins, family 5 Middle
  misc_feature (1)..(293): Xaa is any amino acid
MNPKNLTPIFKVGLERLERPEVIDSLHLAIKAKDPHWNNFWEAAGMVAFPKHIWENTDFNSIRFEFPVVSGPYAIKQMKIDRSLELVRREDWWGRQKNYNAGKYNFNKIKYNFMEDRNKALEALKKGDFDAYPIYTSSIWINQTDFDAVKKGYVLKNRVFNEEPKGFQGFALNLRRDKFKDVRVRKALSLMLNRELMSEKFMFNQYFLLNTYYPSLWEGHKNPNAPLYPFAPDSARKLLEEAGYTVNTQGKLVDKNGDPFSANIPKLRGRHPPYHQIQEDLKTVGSAESVVGN

SEQ ID NO: 81670 - protein, 274 aa, Unknown
  Obtained from environmental sample
  DOMAIN (1)...(159): MatE
  misc_feature (1)..(274): Xaa is any amino acid
MLVNALYNVVDRFFVGQGVNEIALGGLSLVLPLMTIGMAFAMLFGIGAANMISMRLGQGRKQEAENALDHCFFLLIGISLVMTAVGLIFIDPILSLMGAAKDSEAIVYARDYFRIILFGMVFFMTSFGMSHCTRAQGFPTMTMIGMILGAVLNTILDPIFIFVFKWGVEGAAWATIISQFASFVFLFSFISSKKAVVRLNPRVFKPDFSIIKQIMAFGSAQFLLQFLMSTVQLLTNTSVGWYGADALGVDNGGGMSPFPEVVPLGEFVLPEENA

SEQ ID NO: 81671 - protein, 273 aa, Unknown
  Obtained from environmental sample
  misc_feature (1)..(273): Xaa is any amino acid
MTQIQIINSAIGMVSSFLIAMALGTEPPIFLFSILLGGGVITGIVSGYVIKKVPEPPSEKDRRGMSLAATFKDAFAQDSLRSFMVILFLVILVSGVTRTFVVVYAREVFEHNDGLILLYSVFGGLGYLIAGLSIKFLVDRLGAKPLFLVCVILGLVCMIPVVFLPVSAIFNMTGAILFLVFLFFMLNFGFLGSEGIAQTYFLALIPHDKILDLGIIYFFVFRARGAGGFFLAGLLLDCFSIIGVSPFVSFRFFLLYKFSYDYRPWHAKKNEIF

SEQ ID NO: 81672 - protein, 319 aa, Unknown
  Obtained from environmental sample
  DOMAIN (16)...(199): Glutamine amidotransferases class-II
  misc_feature (1)..(319): Xaa is any amino acid
MMAGFAVSLRLTKQPGFLHGLLSLQHRGQEGAGIAVVNDGHIFCHKDTGLVSEVFSTAELEKLPKGKIAVGHTRYSTTGVNKRENVGPFVTEYLTGRIAVAHNGNVTNALEIREDLRRKGLRFGATSDSEVISSLMAYCTIKEKDPLSGIIKAVDMLRGAFSLAIVCNDDKLIAIRDPNGFRPLCIGQNELGFAVASESCALDACDFKFVRDVLPGEVVVIENGEIKSQGIKLTNREDDRGICIFEYIYFARPDSVVDGLSVYRTRFNMGKELAKEYQVDADVLCGVPDSGLIAASGYSAVSGIPLVTGFVMNPYIGRS

SEQ ID NO: 81673 - protein, 322 aa, Unknown
  Obtained from environmental sample
  DOMAIN (1)...(301): Beta-eliminating lyase
  misc_feature (1)..(322): Xaa is any amino acid
CSPTTDWPSAGGRAIDCNVKEAEDPTLRTPFKGNMDVKKLQELINKHGAKNIGVVIMTITNNSAGGQPVSIANIRETSEVCKKHGIKLCIDAARFAENAYFIKRREEGYANKSIKEIVREVFSYGDLFAFSAKKDAIINMGGLIGVKEDAALFQGCKERTISYEGFISYGGLSGRDLEALAIGLYEGINEDFLEYRIGQVEYLASLLDDAKIIYQAPAGGHGVFVDARSMFPHIPYNEFPAQALAVELYREAGVRSCDIGSYMLGNDPDTGKQLKSTFEFTRLAVPRRVYTQAHFDLIAEALVEIKKRSDKVKGYKIIGKPR

SEQ ID NO: 81674 - protein, 187 aa, Unknown
  Obtained from environmental sample
  misc_feature (1)..(187): Xaa is any amino acid
DFPPVIARAILHGDFAVRRILLIVDPVLPLVNIIGPAENSGYRDKVNVFGSTMDDYDMDSVEVSLRPGNKFGYSVPGFIQGLYFDINVLGGANFCAGLGLTFLSDNVKVQGNASQTPSGRYSGWSFGFKVLGNIWSQNLGKWFGPDWAFWRTSFTIGAHFSYYLMEEGENPLWMGELIGQWEVIKAT

SEQ ID NO: 81675 - protein, 285 aa, Unknown
  Obtained from environmental sample
  misc_feature (1)..(285): Xaa is any amino acid
MTFYAKWTPKTYSVIWNANGGTPIPAPQTSVDHGTIISAPRLMTKTGYTFDGWYTDAGLTVEASLPMKVTENLSFYADWKIKTYAVKWNVDGGFPIPAQTSVDTGGTITAPAAMEKAGHTFVGWYINSGFTWPAVFPMTNVKADAEFYARWTPVTYSITWNANGGTPVPEQTTVNYGGTIAAPDTIKRERFAFSGWYADSNFTGKAVSFPIVNVTGSKESYEFYAKWTPIVNVYFFGVEKHTPATRMSVEYGGTITRSSGGNDNGGSHFRRLVQDESLTFPVEFR

SEQ ID NO: 81676 - protein, 91 aa, Unknown
  Obtained from environmental sample
  DOMAIN (45)...(77): Ankyrin repeat
  misc_feature (1)..(91): Xaa is any amino acid
MTGTNYSKQSRENGLQLIIASEKGDIETVKLLLKKDVYIHAHDKEGRCAVVAAAYKNNPEIVNLLIEAGADVNMKDDTLQSAYLIQPLREY

SEQ ID NO: 81677 - protein, 190 aa, Unknown
  Obtained from environmental sample
  DOMAIN (12)...(66): Helix-turn-helix
  misc_feature (1)..(190): Xaa is any amino acid
MTEQLKEIGARLSALRDIFDIPVKEMAQTMKISVDEYSAYESGQRDFSFSFLQNAAQIFGVDVVDIISGESPKLTKCAIVRKGEGFDIERRKAYDYKHLAFTFSNKKAEPFIVTVEPKQNEVPTLHSHDGQEFDYMLSGKMEFHFDNLVYELSEGDSVYFDSGVPHAMKAAGDQAVKFVPRPLADHPGKK

SEQ ID NO: 81678 - protein, 100 aa, Unknown
  Obtained from environmental sample
  misc_feature (1)..(100): Xaa is any amino acid
MPVGEYLKDIGFTYDKAFKSGYGTYITRIEINYKKPAFTDDELIIRSWPIKKGAVSGTIAQEIWRGEDLIIEAKVTWAFVDLRGMPARIPPEFDVPGLKP

SEQ ID NO: 81679 - protein, 307 aa, Unknown
  Obtained from environmental sample
  DOMAIN (69)...(277): SMF family
  misc_feature (1)..(307): Xaa is any amino acid
MAERGILDLIISCLPDLSYREKITLCESLGEESDLFQSSGSGIEALIGRRLNAGDVDSSRRAAERTAEKARIRGINIVSWHSPLYPPLLREIYDPPVLLFFRGKLPDPQNPLVAVVGTRKPSPAASAQAFDIARGLGRGGISVVSGLAIGIDACAHRGNMDGGAPTVAVLGSGVDEVYPSTNRVLARRILETGGALLSEYPPGMGPRKWNFPARNRIISGLSRGVLIAEAPRKSGALITARFALDQNRDLWVASSRVGYYSSAEPRRNGESGSVFLTKGYVQTGGRRGRVYKKRPGTYWEHGIYCSW

SEQ ID NO: 81680 - protein, 275 aa, Unknown
  Obtained from environmental sample
  misc_feature (1)..(275): Xaa is any amino acid
MLSQVYALVAQTKTNSARASLGELFLVKELLSRYGFTQGEAEIAKAALISDMEQTVAEKDRQNSNNYVNAFTQHFLTGESVPDPEWELNAIELLLPGITLEEINERVKGYFSGNDLTVIISAPDAEKASLPKDSEIRAMAAEAQMAEILPPAEGDIRRELLESAPNPLPILSETIDSETGAIRWKLGNGAEIILKETKNKNSEISLYAQARGGTLSATYETFVSAFLAAEMLNVSGLGPYSRAELTRALLDKQVSLSFWTQNYLRGFHGSAAVKD

SEQ ID NO: 81681 - protein, 231 aa, Unknown
  Obtained from environmental sample
  misc_feature (1)..(231): Xaa is any amino acid
MADNVNLDVLSTRDGFNTAVRYIKNTIDIASGAASDNLADILFKLDDEDMTSAKTGLLLRMLLVDKLGYKSASANLCATVNNLSAVAKEFSKWNGVDLVAAYHHPELGLLIANPKVAEELADFGELRKNELLAIYAGFYGQETDENCEKAASLALKVFEGAKVTVPSALAKGKYTAQKVSKPKKAGAPPPKPVKEKAAFVKTTSKTRRACYSGGPAGKNVRRTVKMTPGMR

SEQ ID NO: 81682 - protein, 308 aa, Unknown
  Obtained from environmental sample
  misc_feature (1)..(308): Xaa is any amino acid
AALQARAIPAKEPLAQRPVLAPTPAVATAEPEQVASTPAPAQPAQKVEHPKPLPEKKQAEKPIAAKIETVQKETSEEHEQVQHTEQQSVASEPKKTVAFTADVSKVVDPAILARIQKSKQEKASMRNNQRGDKNKGNKNQQNNNRNNGSKQTSATGYSGNLRIQPRQTENKAQAGLQTRRPGFGTTLQDVLSANAPAHKDFLDNRTRGGKGGHGDSRKRGKKGKDSQREREIQKENIEKAQKRVSDVLVSLSKTPVKKVYNKDKIQAEGEEASKVIYVSASVSVGELASLRSSHLQALWQLGRICTCL

SEQ ID NO: 81683 - protein, 318 aa, Unknown
  Obtained from environmental sample
  misc_feature (1)..(318): Xaa is any amino acid
LDKYQIGRDLLLQQPIKGTRVLGIDPGIRTGTKCAFLDDTGKYLGSIVIYNHKAEEAKKLILEGIRRYDIQLIAVGNGTGSREVQEIISSLIADNGLEVLYTVVDEDGASVYSASDIAREEFPDLDLTIRGAISIGRRLQDPLAELVKIDPKSIGVGLYQHDVNQKKLSDTLDEVVSSVVNNVGVNLNTASASLLKYVSGINSSLARKIVQYRDTQGRIASRSALSDVPGMGPKSFEQCAGFLKIPESAEPLDNTWVHPENYPVAREISATITATAGLSADTISALKEKHGVGETTIRDIAEELKKPNRDPRDSYPKP

SEQ ID NO: 81684 - protein, 158 aa, Unknown
  Obtained from environmental sample
  DOMAIN (13)...(133): GtrA-like protein
  misc_feature (1)..(158): Xaa is any amino acid
MIIKMLFDKVFLKFLLVGVINTIVGYAIMFVLHNAAHMSYWFSSGCGYFLSAILGFFLNKHFTFTVKRWSVFMVISFIVVIVVSYYLPYWIAEYAVKIIFPDNTENFNGNVALVAGTGIASAVSYLGQRFIVFRKKEKKEFLTARTGVILSFCTIIGP

SEQ ID NO: 81685 - protein, 74 aa, Unknown
  Obtained from environmental sample
  DOMAIN (11)...(71): Uncharacterised protein family UPF0102
  misc_feature (1)..(74): Xaa is any amino acid
MSGNSVSFGREGEDRAVEALQAAGMSIIARNFRSRWGEIDIIALDGEILVFVEVKAYSKFGLRLCQSVMLGPIG

SEQ ID NO: 81686 - protein, 288 aa, Unknown
  Obtained from environmental sample
  DOMAIN (6)...(164): EAL domain
  misc_feature (1)..(288): Xaa is any amino acid
MRKYAEENRDEYLFINIRLAWLLQFAENPEEMLTLQWAKEFGITPDKLVIEITEEEFNANETYIRTIIHYKNVGCRIALDDYGKKASDIERLAKIKPDIIKINMDYIHRCEFSYHYREYLQSVADFAESVGIEVLYEGIETQKQLDICMSLKGRYYQGFLIARPQPSMSNAKINDAVFSVSIENVYDLFQDEIIVTEALRKSLDTQIERFLAQNPFDFNEEDHDNYLVKLCRELSKVRLVFLCDRRGNQLTLNIVWQKGDPAFINSGRQVKYKNETGYGADFLRNAEI

SEQ ID NO: 81687 - protein, 302 aa, Unknown
  Obtained from environmental sample
  DOMAIN (1)...(206): Binding-protein-dependent transport system inner membrane component
  misc_feature (1)..(302): Xaa is any amino acid
VLVSLALGLPGAWFIGNSRSRFTPLLKTLTAIPFAMPSILVVLGFVLFFGNSGWINRAITVRILYKPQAVILAHGFFNFPLVIRLAGDGIARAKRAYAPAAASLGASPLKIILTVILPLAFPGILSASFLAFMYCFTSFAVVLVLGGGPNTTTLAVEIYRYARVFLNYGSAGFLALIETLIAVCVFLTFVFIGKNSMTVKHDIIEHAETGKSSAASKIIMGAYFAVIAVFILGPLLSIPLESFLYRPSRATAQVFSIRWWNNLGGTCLPALGPSLLLAFLSATTACIWAFLAPGAGKTPGTK

SEQ ID NO: 81688 - protein, 258 aa, Unknown
  Obtained from environmental sample
  misc_feature (1)..(258): Xaa is any amino acid
MKYDFNRVIDRSNSYSIKYEPSWRGKPDDVLPLWVADMDFAAPVCVQEALARRAQHGIFGYSEPDAAYFDVTRKWFDERFSWTVEREWMTITPGVVNALYIAVRALTKPGDGIVIQQPVYYPFESSIRKTGRRLLVNELVYSDGRYGINFEDFETKIKQAKMFIMCNPHNPVGRVWSRDELVRMGGICLRHGVTVIADEIHEDFIFPGHKHIVFAAINQELADITVTCTSPSKPLISRDCFRQYFISIKSYAKIQREY

SEQ ID NO: 81689 - protein, 223 aa, Unknown
  Obtained from environmental sample
  DOMAIN (96)...(219): RadC, DNA repair protein
  misc_feature (1)..(223): Xaa is any amino acid
LGSPWIRSTRNARAEKLKVRGPAALSDKELLAILLNTGIQGKNVIELAEDLLGLLDRSKEIPSIKEISGLTGIGLSKACAVAAMLEFGRRQFGAFSACIKKPQDIFTHVRHFADRKQERFISLSLNGAHEVLAVRIVTIGLVNKTIVHPREVFADLIQDRAAAFCVAHNHPSGKLQSSPEDDEVTDRLQSAADILGLQFIDHIIFSETNWWSYRENGKLSGMV

SEQ ID NO: 81690 - protein, 168 aa, Unknown
  Obtained from environmental sample
  misc_feature (1)..(168): Xaa is any amino acid
MEVSTRALTESDLVLYVLDAVRAPGAEEEEIAALLAPLAEKTVIAVNKMDANGADFNRAKEFITPRMPSLASERIFAVSANTGSGIDELLRALFALAPEGQPLYGDEYYTDQDTGFRIAEIIREQAINRLRQELPHSLYVDIADMEFKDEKLWVRAFSANLTVGGPKR

SEQ ID NO: 81691 - protein, 63 aa, Unknown
  Obtained from environmental sample
  misc_feature (1)..(63): Xaa is any amino acid
GDPPRIWPKSYTIVTHNMGQAARISDKTAFFLHGEIVEFGKTIELFSRPKDKKTEDYITGRFG

SEQ ID NO: 81692 - protein, 238 aa, Unknown
  Obtained from environmental sample
  DOMAIN (4)...(124): Miro-like protein
  misc_feature (1)..(238): Xaa is any amino acid
MADIGLVGFPNAGKSSLLDRFTNARPKIAAYPFTKKIPNLGVLTAGEKDIIIADIPGLIEGASGGAGLGIQFLKHISRTSALAFLIDLSDENYLTAFDILLKELGSFSSRLPQKKRLLVGTKTDLPETEGRLAELSAKYAAEEVIGISVFSGDGLQELTNAFLRLTSDTQNETTDDGENEVEIEAENAQNVFEGEENEAWYFRRQFCSSSTRSYFSGWKSSSGFKLDGVVLYSVPVFV

SEQ ID NO: 81693 - protein, 260 aa, Unknown
  Obtained from environmental sample
  DOMAIN (130)...(260): Queuine tRNA-ribosyltransferase
  misc_feature (1)..(260): Xaa is any amino acid
LDKLSFRLIGADKASAARAVTFSTAHSTVETPIFMPVGTQATVKSMSPLELRQCGCPIILANTYHLHLRPGSKLINEAGGLHKFEGWNGSILTDSGGFQVFSLRDISKITDDGVEFQSHIDGSRHFFSPEAVMEIQHELGADIIMAFDECPPSNADPAVIELAVSRTLLWAAKCREHHHKLHFLHGYPQHLFGIVQGGTVKPLRERCARELVAMDFPGYAVGGLAVGESMESMYDIAAYTARLLPEDKPRYLMGVGTPAD

SEQ ID NO: 81694 - protein, 305 aa, Unknown
  Obtained from environmental sample
  DOMAIN (33)...(102): HAMP domain
  misc_feature (1)..(305): Xaa is any amino acid
TVILTLAPFVILGGHFDGFGLSGDYFSERPYLSSAVPIVCLLLIAACVFGVVLYLRGKISKVSVFADAVAAGDLSKRLDVGSFDGFALMEQHLNAMLSSIEEMNGRALDGLSAAEFANRSKSEYLSRMSHEIRSPMNAIIGMTQIARASASNPEKVQDCLTKIDSASKHLLALINDVLDMSKIEANKFELLNAEFSLDTALNKIYDMMNVKAEEKKQTLSLMIDKKLPEYVVSDELRFSQVVANLVSNAVKFTDEGGKIDIGVCLAGGIGGECVIKVDVKDTGIGLTKEQAAKLSSREQPLAITP

SEQ ID NO: 81695 - protein, 314 aa, Unknown
  Obtained from environmental sample
  misc_feature (1)..(314): Xaa is any amino acid
MNYIFIDEIQLIKDFHKTIKSLMLKNNNDIYITGSNSDMLSGDLANELGGRYIEFTIHSLSYMEFLQFHKLENNDDSLEKYVRYGGMPYLIHLPFEEEIIREYLNSVYSTIILKDVIARKKIRNTVFLEQLVKYLAGNVGNLFSSKSISDYLKNQRTEISTNQVIEYISALLDAFVIHKVDRYDIVGKKVFERGEKYYFENMGIRNAIAGYKLQDRAMRLENVVFNHLLFCGYDVKVGILQSEEVDFVCSKNGETLYAQVAMELSKAETIDREFGNLLKIKDNYPKIVISADRSLKTLTKAWSILILGRLIIGF

SEQ ID NO: 81696 - protein, 184 aa, Unknown
  Obtained from environmental sample
  misc_feature (1)..(184): Xaa is any amino acid
MPASSAVKSGGATKDGGVYIFLGPEIGKKQDETEQIRKKLSANVAAGAFEETVFYAGETPITNIVNTIQNHSLFAQSRLFIIKNAEQIKKNDEINAVASCMKELEPGTALIFVSDEFKLSAGLENACPKENRKVFYEMFEREKSAWIRSFFQRAGRDIDSSGVDAILEPGWKTIPNAMQRGCFR

SEQ ID NO: 81697 - protein, 296 aa, Unknown
  Obtained from environmental sample
  misc_feature (1)..(296): Xaa is any amino acid
LAERLSDDADNRRRLRESAAEKGVIVSAVKKEFAGKKSKFEMYYDYREKAAAIPSHRFLAMQRGEHEKVLRLSIDLPAEGTIERLCAALVKHPRSAAAPYLREAAADAFDRLLLPAAKTALRTEMRERADAEAIKVFGENLSALLLAAPAGRKTVIGLDPGFRSGCKLAVVDDTGKFIETATIYPHEPQRDRAGATATLQSLIRRHKPRLIAVGNGTAGRESDEFVRSALKDIPDEERPLCVTVSEAGASVYSASEAAIKEFPDLDVTVRGAVSIAPRPADPLSELVKIDPQSIGV

SEQ ID NO: 81698 - protein, 200 aa, Unknown
  Obtained from environmental sample
  misc_feature (1)..(200): Xaa is any amino acid
MKVAIIHYWLVNMRGGEKVLEALLDIFPDADIFTHVYNPKAVSSLIKKSRVITSYINRLPFAKKLYQLYMPLMPNALNDFDLQSYDLVISSESGPAKGVIPNPNAYHICYCHSPMRYLWDMYHEYFKGTNIFVRFFMKRLVPKLRLWDAISANQVDFFIANSNYIAQRIRRCYNREAAVVYLPVDIEKFLFVERKPGDII

SEQ ID NO: 81699 - protein, 315 aa, Unknown
  Obtained from environmental sample
  DOMAIN (77)...(315): Glycosyl hydrolase family 9
  misc_feature (1)..(315): Xaa is any amino acid
MGPRSIRSARADFSERELDANRQTDAKAYEPVLSEASYDEASGDTVRVVDFSALSEPGKYFLIADGEKVTITIKEKPYHELSNALVKGLYYQRCGCELPEKFAGPFRHAPCHLGKATLVKDNGELDTNTVIECAGGWHDAGDYGRYIAPAAVTVAHMLYSFEFFPQVYKDQLNIPESGNGVPDILNECRYELEWMLKMQRADGGLYHKVATRYFAKFIMPEEDKDDLFLFRVSHCSTAGFAASAVQASRVYRAYDAAFADRLLVAAKKPGTGWRRTLCSSLSSIRPTIIPADMEIPVAKTNSSGLRRTVFVTGKI

SEQ ID NO: 81700 - protein, 308 aa, Unknown
  Obtained from environmental sample
  misc_feature (1)..(308): Xaa is any amino acid
MNYKWIWFIAARYIFRKRKISPAPVLSILGIATGVLALIVILAVMNGFQLGFIESILEISSYHLRIGPVGDIEDARKAVLAVPGIKAVVPFREFQGLVQGRRGGQQAAIIRGLPQNALEMDAAMADRLIFEEGSFGFKKKSDALLGAELARRLGLKYGDEFTLFTIPSIFNAAGDEGSGLQAFTVAGIFRTGFYEYDTSWIFIDIDGVAAFSESGPVLGLKLKNRFHDQQALELIRKSLVNNPAFADAAFSSWRDYNRSFFGALRTEKLFYVILVGLIFIVVALDIYQAHRRSVLEHREEKGLPRAIS

SEQ ID NO: 81701 - protein, 319 aa, Unknown
  Obtained from environmental sample
  misc_feature (1)..(319): Xaa is any amino acid
AASAYSLHDYDIAGGTGRLGRACQFARTLHEARHPPWFGHGPNHTGIDSKWMIEHPDRFLQLPYPPFPTYNYNCGNLSGRDDITVQIEEHYFSRNDAAVVFKRIDNRTGDTRYIYHGNDGTSMPWNDTAQIDFLNPEAREAVIRTIIGVCQQFSIVRFDAAMTLAKRHIQRLWYPVPGSGGAIASRAEHSISTEEFNKRIPNEFWREVVDRCAAEAPHTLLLAEAFWMMEGYFVRTLGMHRVYNSAFMNMLKNEENAKYRATIKNTMEFDPEILKRFVNFMNNPDEETAVAQFGKGDKYFGICTCLVPNSDTWGGPNPG

SEQ ID NO: 81702 - protein, 104 aa, Unknown
  Obtained from environmental sample
  misc_feature (1)..(104): Xaa is any amino acid
MVSVWPQIDLKSENYAEMCERGLLVHTERGVNVQMRFGGESVFFDATNPAARDYVWQKCKKSYYENGIRIFWLDEAEPEYGEYDFENYRYSMARPLGRSDHWPG

SEQ ID NO: 81703 - protein, 142 aa, Unknown
  Obtained from environmental sample
  DOMAIN (29)...(125): ABC transporter
  misc_feature (1)..(142): Xaa is any amino acid
MAFVQFSKVSLAFGDRDILKDVSLHLASGSRACLAGANGSGKSTLMKVLAGELSADSGDRAVQRGTRISYLPQSGIVHRGKSLRDEAETAFAHIQELIDRSEKIAVLLQDAKSDDGTSKALLEDTTACRNRLKFRLLPPRRR

SEQ ID NO: 81704 - protein, 285 aa, Unknown
  Obtained from environmental sample
  DOMAIN (2)...(226): Dehydrogenase E1 component
  misc_feature (1)..(285): Xaa is any amino acid
MPNNAIVGGSADIAVGSALYKRINHKPGIVVANIGDASMGCGPVWEAMMLAAMDQYRTLWPESAKQISGAVCSGAPPILFNFFNNFYGMGGQTSGETMGYGVMARVGAGVNPDNMYSERVDGYNPLAVADAVARKKAILLDGRGPVLLDTLTYRISGHSPSDASSYRTPEEVKLWQEADSIEEYGAYLVENKAVSKPELDALRETIKAKLLEVVKLAVNDEISPRLGGAFIESVMFSNGKVEKLDDREPELIHPAAEDHRVKALAGKAATVLTPKENRYPKTNLS

SEQ ID NO: 81705 - protein, 314 aa, Unknown
  Obtained from environmental sample
  misc_feature (1)..(314): Xaa is any amino acid
LQPALPVTAVTAPSGQTVEYAAATGTTAPSSGWTDSTTISGLTANTSYYLFARSKANDNYNAGTAARTSSTTKTDAASAAVSTVINFESDALNKTYDYTEGDNKPTSVKVVNDPINSGKKSLEISSNGPNDKGYNQAAVIPVKLPYTVKDYESFSFKFSLVSGNTGTNLDSKQIQVYIARDKATFKKWGFGNGSSESNQFAANLIGAAPSSAVNFGDTYKNKWTDYTITITSPGDAIKDLTGDLYIAIGINCKTNAVYLFDDITFTPKSGFTPPPPPPEPPSTAPNPPSTGAVSSKNYRNMLGSAESVLGGANA

SEQ ID NO: 81706 - protein, 117 aa, Unknown
  Obtained from environmental sample
  misc_feature (1)..(117): Xaa is any amino acid
MSADYASFEILESFMKDVFVKVGVPEEDAAICAEILIESDKRGIDSHGVGRFKPIYIDRIKDGIQNPVTNFEIVKDHLATAVVDGHDGMGHVIGKKCMQMAIDKGEKFGLGMGCARN

SEQ ID NO: 81707 - protein, 322 aa, Unknown
  Obtained from environmental sample
  DOMAIN (1)...(279): Glycosyl hydrolase family 10
  misc_feature (1)..(322): Xaa is any amino acid
MKPLYLQKDKGVFTFETADRLVDAVLKSGMKMHGHTLAWHQQSPEWINREGIGRAEAVENLITHTKTVAAHFRGRVVSWDVLNEAVIDNPPNPADWRTALRQSPWYKAIGPEYIEIVFRAAREADPEAKLYYNDYNLDNWNKAQAVYNMVKEINGQNLDVNGRPLIDGIGMQGHYRTKTRPENVAAALESFASLGVEVSITELDVQAGFNFNLNEEQALEQGIAYARLFALFRKYAAVLGRVTIWGLDDGTSWRRDTSPTLFDRNLQAKPAFFGALNPAAFLAENEDRLAAFKREPLKAHAHYGSPNLDAADPLWQSAPEIP

SEQ ID NO: 81708 - protein, 180 aa, Unknown
  Obtained from environmental sample
  misc_feature (1)..(180): Xaa is any amino acid
VPGKHSLDDAIAAIAIAKEIPVSDNAIIRGLESVKPLFEGLEILNGKRATVIRDCYNANPESAAKSVEFCDSLEWPGRKVYVIADMLELGGSSTSEHEKLGFNLSVSSARKVFLFGNEIKAAVRNLEDNGKSFFYSSDINELSTAIDGYVKKGDLVLLKGSRGCALERLSEMLTGVGDVS

SEQ ID NO: 81709 - protein, 267 aa, Unknown
  Obtained from environmental sample
  misc_feature (1)..(267): Xaa is any amino acid
MRRIQTLTREELAQKAKALAEIDERIQEYDVNLEELLKMSGNVQENLNRLSEESAYVEDVEKKVIEINDKFDSAEGDIDALGERLASIEAKFELENAAALEKAVEASVSNARSIIQDMETEAQTLSQKVEEHREAIDRLERGRVERLARDEERIEKLLTEAVERAGSRASKVEEAAMAKLHEQAQERVNHIKSNFEEKIKNVQETVKTKVAEINEHIKESREEWKTENASIEARQKEYTAHWEREIHELDALPNKVKRMGGVAHRTG

SEQ ID NO: 81710 - protein, 294 aa, Unknown
  Obtained from environmental sample
  DOMAIN (1)...(294): Protein of unknown function (DUF1703)
  misc_feature (1)..(294): Xaa is any amino acid
VSGTWECHGKHPVIFLSFKDVEADSFDGAFSLLKERIAEEFERHAYAAEKISCDYDKNLFQKLSDRTGSVGDYSKSLKFLCKCLEDCHGRKVVVLIDEYDVPLRVSLACGYYKEAVDFICSLFGIAFKNNPHLEFSVITGCLRFSKESLFAGLRHFDVASVLGNDYSEYFGFTQDEMDAILQYYGFSDKRQVVMDCYKGYMFGNTEVYNPWSCIHAVSSWNKDINEPPRLYWVDSGGDNIIREVIGKIGSNAKADLKMLMAGGSVWVVFREGVTYKRIYDDADSLWSFSLCIGY

SEQ ID NO: 81711 - protein, 254 aa, Unknown
  Obtained from environmental sample
  DOMAIN (131)...(253): Methyl-accepting chemotaxis protein (MCP) signaling domain
  misc_feature (1)..(254): Xaa is any amino acid
MAKTLDKFAHDMQTVVVGTMKRISKGDVSVNVVPMCEEDEVGNALKQTVESLHKLIISDGGRVLQAAAQKDLSQRLTGVYEGDFATMKNNINTVMQSLDDALRQVSDATEQVTSASHDISGGAQTLAQSSNEQASSLEEISSSLEEMSSMTKQNADNSNKAKVLASEAHLTANEGDAAMKRMAEAIGNIKHSSDNTSKIVKTINDIAFQTNILALNAAVEAARAGETGKGFAVVAAEVRDLAMRSAAAAKTPRP

SEQ ID NO: 81712 - protein, 88 aa, Unknown
  Obtained from environmental sample
  misc_feature (1)..(88): Xaa is any amino acid
VAGVRWIISQYAQVSGLGKHIHPHSFRHSFATHLVNSGCDVRIVQEMLGHAKLSTTQRYSHVSIERLKKVYARTHPHAKREGVGSREQ

SEQ ID NO: 81713 - protein, 305 aa, Unknown
  Obtained from environmental sample
  DOMAIN (1)...(173): Indole-3-glycerol phosphate synthase
  misc_feature (1)..(305): Xaa is any amino acid
MAEDFVLTEPDYFMGSDQYLREIAATIAIPALRKDFIVDPYQIYEAKILGAKAVLLICALLDTETLTEYIKIADELCLSSLVEIHGEAEAEQALQAGARIIGINNRDLKTFKVDLAVTARLRSFIPAGILTVAESGIKSVEDVRAISGIGIDAVLVGESLMRAADKKQFLAELKGVGSRNCSMKDNHVINTTGLQTKTPLPKATLSTPYSLLPIKIKICGLFREQDIDFVNEACPDYVGFVFAESKRKVSAAFAAQLRRRLSDEITPVGVFVNAPVADIVAFVYDNVIAIAQLHGTEDDEYFTRA

SEQ ID NO: 81714 - protein, 324 aa, Unknown
  Obtained from environmental sample
  DOMAIN (143)...(212): HAMP domain
  misc_feature (1)..(324): Xaa is any amino acid
MNSLYYEVNTKDLENTTKVLMNLIGEDRIKQILKNAADAPVEIELPVKANQAYRLTLIDSGGNVLWDSHVPNELVNHIDREEITTALEGKEASARRNSISTQIKRIYYALPVFDDNNVPIGVFRLSLSVPGFWTRISHVIFPFVVFTCLIIIIVFSAIYAYSRSLSASLGQLVNIAQTSAPLLSSRETMEPIAQEFRSLEKAMRAMTVELNLRFEQAKSEGNRLEAILNGMSEALFAMDNSLKLHLINPKARELFAIEKNEINSMTLLEATRSTELVEIAKKAINGGVPLDTELTFHKGAEQYFHVYASPLINTNNYRESAVWV

SEQ ID NO: 81715 - protein, 275 aa, Unknown
  Obtained from environmental sample
  DOMAIN (124)...(206): Histidine kinase
  misc_feature (1)..(275): Xaa is any amino acid
MGNQGSEEVWRFRYWTTIPFLAIIVAFYANFSFLIPKFLFEKKRVLYILINLLIFAAALFAISIWRNHVVSLGVIKIKSDNWLLKSVISYVFTIGIAMSAYSTTMWFKSKDIMYRLELENISSELSFLKMQISPHFLFNTLNNILTLIDENKELAKESVMQLSKLLRSVLYEFENNTITIKQEIEFLTNYSNLMRLRYGSELNFSLETDLSEPDAPIAPLLLMPLLENVFKHGISNSVKDSFINIKISSKNGKIIFESEIHISQNSSRQKRQRHR

SEQ ID NO: 81716 - protein, 291 aa, Unknown
  Obtained from environmental sample
  DOMAIN (61)...(88): Phospholipase D Active site motif
  misc_feature (1)..(291): Xaa is any amino acid
MLNPIIDLLERKAKQGLDIRFLYDGLGCFMTLPPNFKETLEKKGIKCVVFNPFKPILSSLQNNRDHRKIIIVDGKTAFTGGMNLADEYINAYERFGHWKDAAIMLQGEAAWGLTLIFFQMWNLEKNWQDNIISFYPWKIADGSTDGYKIEGCPIKSRGFVQPYADSPIDDENVGEHVYIQIINNAKKYVYINTPYLVIDDSLLSVLALSAKSGVDVRIITPHRWDKWIVAVVSRSYYRQLIQAGVKIYEYSAGFYHSQTFVSDDRVATVRTTNLDFRSLYLHFECGVWMYQ

SEQ ID NO: 81717 - protein, 172 aa, Unknown
  Obtained from environmental sample
  DOMAIN (64)...(97): Tetratricopeptide repeat
  misc_feature (1)..(172): Xaa is any amino acid
MIKKIIHGFFFVLTLSFSLVFSACETPASAQEYFALGMAYFDLGKFDEAEKWLNRAKQADRTMTASTYNLGRLAYERRRYEEAVKYFETILKKDKDNVMALKAAAYARIRMGDIETAEKHYSRLLTLVPESADDGYNHALVLFALERTAKRKSIGKDPAALKKIRLYAPYAR

SEQ ID NO: 81718 - protein, 297 aa, Unknown
  Obtained from environmental sample
  DOMAIN (106)...(297): Penicillin binding protein transpeptidase domain
  misc_feature (1)..(297): Xaa is any amino acid
LRNYADLRSLSHVVGYVGDITRDELTQLYNQGYQQGDTIGKTGIERQYDALLRGKNGRETRTVDVRGRRIAGQGTRVPPETGKNLVLTIDRRIQTLAEKALGERMGAVVVMRPNGEILALVSYPWFDPNMFTIGGRGQYNILASDPNKPFLNRAIQSSYPPASTFKIIMTTGILTENVFPPDKTVDCPGEIDYGNRQWRCHIRKPGHGRLNLARAMAQSCDIYYWTVGRDNLGAEHIANYAKLYGFGAATGIDLPGEIDGFIPTPHGKTSVSREMAWRRYHEYGNRPRMDSGYADPD

SEQ ID NO: 81719 - protein, 212 aa, Unknown
  Obtained from environmental sample
  DOMAIN (4)...(209): RNA polymerase Rpb1, domain 1
  misc_feature (1)..(212): Xaa is any amino acid
MRDIQEFDSIMIRLASPEMIRNWSYGEVKKPETINYRTLRPEKDGLFCERIFGTTKEWECYCGKFKSIRYKGVICDRCGVEVTHFKVRRERMGHIELAAPVSHIWYYRSVPSRMGLLLDMSMTALRSVLYYEKYVVIDAADTDLKKGQLLSEDEYFEEQERYGGGFTAGMGAEAIRTLLENLNLDQMAAELRNKMMRKERKATLGHSVMFFP

SEQ ID NO: 81720 - protein, 63 aa, Unknown
  Obtained from environmental sample
  misc_feature (1)..(63): Xaa is any amino acid
MSEYILDIENLTKEFPGVRALENVSLKVKKGEIPAVCGENGAGKSTLMSCISGVYPQAITRAN

SEQ ID NO: 81721 - protein, 303 aa, Unknown
  Obtained from environmental sample
  DOMAIN (12)...(45): Tetratricopeptide repeat
  misc_feature (1)..(303): Xaa is any amino acid
VGKTVTEDGSNATVHINLGLSYESKGQYDKALESYKKAQSLSPSDKAVYINLGNAYQGLGRIAEAFDAFTRGLESSKRELAAYDIFLLSRKRGDADRAEKMYALLKKEFPSSVHFARVSAEMDLARGDTAKALAAYESIKEKDAHDWFAVARISAALGQKAKAEGALAKVPDDGAWKRDKSVVRAMLAFNGGDYRGAYQAYKDAFGASGKDGGADADALAYNMVFAAYKGGMYKEALEAADEAVKKAAGGARAEICRTAGDCAVARQKCADAKTWFTKLSTIEPKHAAAQYNIAVAHYNLGEV

SEQ ID NO: 81722 - protein, 291 aa, Unknown
  Obtained from environmental sample
  DOMAIN (1)...(267): Poxvirus D5 protein-like
  misc_feature (1)..(291): Xaa is any amino acid
MEIMNYNTELIHFIQNAAGWAITGDTSEQTMFILFGTGANGKSTFLNTIMNLLGDYAIATPTETFMKKSGDQITNDIARLRGTRFVTTTEAEYGKRLSEPLIKQITGNDRMTARFLYGEFFNFVPTFKIWMATNHKPVIKGTDHGIWRRIKLIPFLTRIEEENQDKHLEQKLMDEGPGILNWLIEGARRWRNEGLKTPPIIVRATDEYRSEMDVIGNFLKERCIMGEDGCIRARELFKCYQEWCDDHNEHAVSERFFGLRLKEMGLEQKRMNEVGGTGRDSESAIILGGKP

SEQ ID NO: 81723 - protein, 160 aa, Unknown
  Obtained from environmental sample
  misc_feature (1)..(160): Xaa is any amino acid
MSESFHYTHSRKSFLKRLLFASWIMAICSMILESILPNDDIVLMNSAFSTFFIAGLYMLFYDMLIDGIKTKKAGKIAAAVLLCLVPIITSLPLIFVANLADSDAFSTPFIRIMLKACLLLPNILMVEGSYIMVALGVLFYALWRWRWASCRILSLWGPIE

SEQ ID NO: 81724 - protein, 122 aa, Unknown
  Obtained from environmental sample
  DOMAIN (33)...(117): GrpE
  misc_feature (1)..(122): Xaa is any amino acid
MSGVKRRKTESMKATAETREASEPSVAAVDTDQSESASADVYAEESGEVAALRQEVEAGKDRYLRLMAEFDNYKRRSGKEYERLVSAANEKLILEMVEVRENFERALKSGGAGGESRRSTRE

SEQ ID NO: 81725 - protein, 260 aa, Unknown
  Obtained from environmental sample
  DOMAIN (164)...(187): 4Fe-4S binding domain
  misc_feature (1)..(260): Xaa is any amino acid
TVKYTKRKKDEYILDVCARNHIPVPTLCSHESLNGLGCCRLCVVEVNEGGGNRVVVSCVYPLSRDCEVFTESEVIKGIRKTILSMLKTRAPEGERLSSLCQMYGVDTGPGRFTAAKTGEGSSAEKRLASSCVLCGLCAQACAILGTGAISTVGRGVGKKISTPFDEPSADCVGCGSCAAVCPTKAIECIQTGESRSIWGKDFTLLKCASCGRAFATREEYAFALKKAEENAVAEFESALCDACRKKKSADVFAAAFGERA

SEQ ID NO: 81726 - protein, 120 aa, Unknown
  Obtained from environmental sample
  misc_feature (1)..(120): Xaa is any amino acid
RGPPGIRSAEVCQQIRNRYALSAIINGSQKWPNKPEDRDALYFLAQSFKAQLVKELPSDKNNLSGASQDLAFRAKSLMKDLANISLEIAQITVSSEDAQVLPDWFVVELIRDLPRLAAKK

SEQ ID NO: 81727 - protein, 184 aa, Unknown
  Obtained from environmental sample
  misc_feature (1)..(184): Xaa is any amino acid
MVNDHPLFYQLWHGTTLQRSENINYPAEGLCFVTSDGYILCNPKIRAEPEQWARALAHSLLHLGMDHFKEKENPVLWNIACDCVVEKFLSDLKFGKSLFDGSLPVGINDEERLYRRLLESPNNMEYGGYGTAGASVPDMLYDKKPRYRYFNKPPLWTKLFAAGLSPPCAARFEWLPRTGNSFCH

SEQ ID NO: 81728 - protein, 91 aa, Unknown
  Obtained from environmental sample
  DOMAIN (18)...(88): DHHA1 domain
  misc_feature (1)..(91): Xaa is any amino acid
ETAALREMMDQVRTRHPSAVIALPSTLDGKVSLLVSVSPDLQQKVEAGALLKAMLSHVDGRGGGKKDLAQGGGTKPDGIGKAFEALKGMIP

SEQ ID NO: 81729 - protein, 266 aa, Unknown
  Obtained from environmental sample
  misc_feature (1)..(266): Xaa is any amino acid
MKAAIIHYWLINMRGGEKMLEALLEMFPFADIYTHVYDPQAVSNTIKSHKVYTSHINRLPFAKKLYQLYMPLMPAALMEFDLQKYDLVISSEAGPAKGVVPNPNAFHICYCHSPMRYLWDMYHEYFRKTNPLVRFFMKRLIPSLRVWDVTSSNLVDRFITNSSYVAKRIRRIYNREAEVVYGPASIERFINIERKPSDYYLFFGQITGYKRADIAIEACIKSGRKLIVAGAGAKKRDKKKYKKNSLVSFLGRVSKKKAGDLFAGAK

SEQ ID NO: 81730 - protein, 199 aa, Unknown
  Obtained from environmental sample
  DOMAIN (24)...(93): ATP synthase alpha/beta family, beta-barrel domain
  misc_feature (1)..(199): Xaa is any amino acid
MGSIFEKYLEMAERIDPIKCVGHIIRVQGILIESRGPQAIIGEICRIELKRAASVDKKFIQAEVVGFKDEIVQLMSYGETGGIEVGCRVIASGSCLDVAVSKKLLGRVLNHLGKPVDGKGDIESPVRYPALADAPDPYRRPRIRERVSTGIRAIDGLLAIGKGQRLGIFAGSGVGKSTSLAWSPAHQRRCQRVALIASA

SEQ ID NO: 81731 - protein, 320 aa, Unknown
  Obtained from environmental sample
  misc_feature (1)..(320): Xaa is any amino acid
EPEKTEKSEKPKRQPDSAPQPSGSLSEEIRNVTETGILSSMLQAVELIRSRDLGGSEFGRTMAGINTILIKLIYPDSLAKLPVVDLPQTSNYARIIREAEKGVYVQPAQTSTDFFEHILPFLAVNDQTEPGVFTSILNDLEKAQTLKPNSVLPLLFQGFIYERTRRFNQAEQSFRQVYQISNECYPARIGIARIRRISGSPQEAIDILSDLIIRYPDSIQIKRERAISYYRNNELSRALSAVDEILQSEPRDGEILLIKASILLEQGQYSQSNTSLDSYASINPNNRTYLFLRARVQAEGNRNRDSALNYLRSIYVFPRR

SEQ ID NO: 81732 - protein, 246 aa, Unknown
  Obtained from environmental sample
  DOMAIN (2)...(164): Glycosyl transferase family 2
  misc_feature (1)..(246): Xaa is any amino acid
MALCFPCTGMGNRWAVGEKLAATGLPVILVDDGNDKQTKEVLAEWRRKIPSVVLVSLEKNIGKGGAVTKGFQKAAELGLTHVLQIDADDQHDTAMTGFFLDESAKNPDKVICGFPVFDEKAPKNRVVGRRVSNFWAAVVTLSRDLKDVLCGFRVYPLDAALKLCSNPFMDRRMGFDAEILVRLYWKNVVPVFYPIKVSYPSGGVSNFRVFQDNLRISWMFTRLCAGMLLRFPMLLILRVKRNAGRL

SEQ ID NO: 81733 - protein, 227 aa, Unknown
  Obtained from environmental sample
  misc_feature (1)..(227): Xaa is any amino acid
VSQLRGLSAENFWGLCHEGKPAKLTESAPFMRLNPIIQLGPVYLVYPGATHTRASHSIGVYHLGKRLLKNLTKRGAEDWLTNEGINSFLAACLLHDLSHFPYTHSLKELSLASHESLTGEIIMKEPMKSLVGSGGADPEFTAAIIDKGKNGIQSDELHFYRKLLSGALDPDKLDYLNRDARYLRSPLRCAGTSILSLSRLQPDKKRGDDIDSRLIPNEGIHTCFQKF

SEQ ID NO: 81734 - protein, 303 aa, Unknown
  Obtained from environmental sample
  misc_feature (1)..(303): Xaa is any amino acid
MILRGAGKEEVRTYLNDITRYILQNEDKQLLGFRGLFGSFNVFGGVLLDGQNRPVPDNYSPHERPWHMEAVAAGGEIIFLQPHTGVLLPDTVITCARGLFDDEGNLLGVVAMDIGFQRIREYVIKENSDSSWFGVLLNEQYEFIAHREPLLEGTKLEDMNSDSIRLVDEMGAGHDISEFRMRNHKNVPSITFIRKLENGWYLGIVTPEADYFAEVRRVRFILIILGVMLSIVFSVIMITIVKGKQKSDADKEKADAEKEKADAEKARADALLKEANNRIADIQIMEKVLYSIDAIIYITNPPT

SEQ ID NO: 81735 - protein, 312 aa, Unknown
  Obtained from environmental sample
  DOMAIN (43)...(158): Domain of unknown function (DUF303)
  misc_feature (1)..(312): Xaa is any amino acid
MTDRPRSRLWLGTIVDADTVYLNGVEVGNTTYRYPPRKYPVPAGLLHAGKNRIVMRVVCCNGEGGVTRSKDFHLFSENGRIELSGTWKYRVGINVNSRPEEFFLQRQPTGLFNAMIAPILNYPCKGILWYQGESNDSKPSEYAALLSALITDWRNKRQQTLPREPHDIPFLFVQLPIFGAPGENNESDSWPIIREAQYSALSLPATGMAAALDLGEWNDLHPLNKKDVGRRLALAAERLVFKNENTAPGPVLRNIEKRGDTLLLNFDNCGGGLTAVEQPHVSAIAGEENSRPCVRLPAKIESPDCLSVNISP

SEQ ID NO: 81736 - protein, 89 aa, Unknown
  Obtained from environmental sample
  misc_feature (1)..(89): Xaa is any amino acid
MDKLVEVKNLKLYYHTSNGVVRALDDVSFDVYKGETLGLVGESGCGKTTTGAGLLKMPSPPGRIEEGSSILINGRDIVPLSDREISCRF

SEQ ID NO: 81737 - protein, 173 aa, Unknown
  Obtained from environmental sample
  misc_feature (1)..(173): Xaa is any amino acid
LAVCGGGFLYTISGKSFVRFGGLGNREGCFLQPVALNQMGHSLYALDSRAAALTRFDMTGYGVLINRALDEYHAGHYEASAKVWEEVLKMNGNYDLAYIGIGRAALRQGEYQKAMKYYKLKHFREGYGKAFQLYRKQFMEENLWKILLVLAVILLAPPLIKTAIKISREVREA

SEQ ID NO: 81738 - protein, 272 aa, Unknown
  Obtained from environmental sample
  DOMAIN (1)...(272): Nitrogenase component 1 type Oxidoreductase
  misc_feature (1)..(272): Xaa is any amino acid
MGAVSALCGIRGCMSILHGSQGCATYIRRHAATHYNEPVDIASSSLTEEGTVFGGEENLLKGLRNMIDLYAPEVIGVCTTCLAETIGEDVGAIVRKFYAQNPDDVGVKIITVASPGYGGTQNEGWFAAIRAVLEQTMPNDEPNGRINVFTPMISPADVRYLKNTLKSFFPGKGTECVILPDISENLDGATEKRYNRLKTEGTPIECVAEMAGARLTIEFSEFTDARHSPAEYLNETFGIPFVKLPLPVGVRGMDMLGSTLIDARGRVNAGIR

SEQ ID NO: 81739 - protein, 333 aa, Unknown
  Obtained from environmental sample
  DOMAIN (64)...(248): Radical SAM superfamily
  misc_feature (1)..(333): Xaa is any amino acid
MPDAVHTNVNTNTVNTDDTVNTVNTNDAVGTNIISKDTDSVNAEKTAAHPCFDEHACQNARVHLPVAPECNIQCNYCLRNYDCMNESRPGVASKILSPAEAFERYVQLKKATPNLTVAGIAGPGDALANFELTRETFRLIRDYDKNVTFCIATNGLLLPQYVSQLRELGVSHVTVTINAVDPVIGAKIYHRVSYMGKTYEGIEGATILLANQLAGIKMLTDAGIICKVNCVTLKGINDNHIRDVVKTVSELGVFMANIMPHIPVKGSAFEGLDRVTNIEISALRKDCGAYVKQMTHCRQCRSDATGTLDDDRSVDFTMAKSSCRLLILRGGPG

SEQ ID NO: 81740 - protein, 64 aa, Unknown
  Obtained from environmental sample
  misc_feature (1)..(64): Xaa is any amino acid
MKIAVIGGAGYIGSHVTRELLDFGNEIFVYDNLSSGLRQNLFKEANFTHGDILDVKLGRSDPWG

SEQ ID NO: 81741 - protein, 253 aa, Unknown
  Obtained from environmental sample
  DOMAIN (27)...(104): Surface antigen variable number repeat
  misc_feature (1)..(253): Xaa is any amino acid
MFSDVKAYARYGENGDVDLIFEVAEQPALDTLLIEGNDDITEEDLRLKIRVIKGNVYSKSDLERDRQAILNHYRSQGYLLVEVWIKEIPVEGHRNRVIIYVSEGNKVKVDSILISGNDDIPREEFVSRMLTKTDSWWGGGDFKQDVFNSDRDTVINVARHYGFLDAELLEYNATYMPDSTCRFYLGRMVRKSSSLPILYSQLNKNMQDKENPLHYLVGKAMAMSSHYYREHREKMGDAQAFPLPDVQNENWQQ

SEQ ID NO: 81742 - protein, 76 aa, Unknown
  Obtained from environmental sample
  misc_feature (1)..(76): Xaa is any amino acid
MSHKPDPNKSVNLTIDGIQVTVPEGTKILEAARKAKVSIPTLCDHPDLCRRAVCRLCVGNGRKETLPICAVGPPLP

SEQ ID NO: 81743 - protein, 313 aa, Unknown
  Obtained from environmental sample
  DOMAIN (1)...(313): Uncharacterized ACR (DUF711)
  misc_feature (1)..(313): Xaa is any amino acid
LIAFVQREKLHANKIREKIMRTAGSLVKTGCDIETEYGIPIINKRVSVTPISLVAASCDEEDFTPFAKTLDSVAKELGVDFIGGFSALVQKGLTTGDKRLINSLPAALSQTDRVCASVNTASSKSGINMDAVRLMGEIIKKTAEATADRDGIGCAKLVVFCNAPEDNPFMAGAFHGPGEAESVLNVGVSGPGVIKAALENCRGKNFDELADTIKKTAFKITRMGQLVGMEAAKRIGVPFGILDLSLAPTPAVGDSVARILLEMGLEAAGNHGTTAALAMLTDMVKKGGIMASTHVGRFSALYSRLQDERCYRL

SEQ ID NO: 81744 - protein, 191 aa, Unknown
  Obtained from environmental sample
  DOMAIN (11)...(187): Pyruvate ferredoxin/flavodoxin oxidoreductase
  misc_feature (1)..(191): Xaa is any amino acid
MKYDVILAGVGGQGVLSVASIIAQAAVSEGFEVRQSEVHGMAQRGGAVLASLRMAKNKISGDLVPKGGADLIISMEPLESLRYLSYLKPDGILITAAEPFNNIADYPDINGIHSTVKKLPKWRIIQTAALAKEAGLAKTVNTVMVGAASCFLPLKAASLEKTITEVFSRKDEKTAQANTKAFKLGQVACQE

SEQ ID NO: 81745 - protein, 305 aa, Unknown
  Obtained from environmental sample
  misc_feature (1)..(305): Xaa is any amino acid
MSGTPAANVFILQPNWAMAMRARGLLAPLESKVVDIRNPQPIGKGYMPVEFNKAVIDSFTFGGKPYAFSVGTSYYNFQALFFNKRLFREAGLDPNLPYDMQKNGTWTWDAFLDICKKLTRDINNDGKIDTYALPRDLSTEILDAIVSSNGATYVDKDPNTGKFVNATNRTEFLEALQFAIKLNTEGVLKPRPENSNWDWYKSEFVDGKVAMRIDESYIAMGSQTELTRMKDDWGMVLFPKGPRSSTYRVYSRDNLMVIPATYKPAEVEKILWAVSLWYTPVDDDWKSRMYHFFRDLRAVDETLEY

SEQ ID NO: 81746 - protein, 158 aa, Unknown
  Obtained from environmental sample
  misc_feature (1)..(158): Xaa is any amino acid
MVMSEKSPFNPDADTTLTAIIEIGSTGIRLNIAEIHSNGSWQTLDRAMQPASLGRDVFTSRLLSRESIMECLSVLQNYRELLSGWGIADNNIHVIATSALRAARNRDVFIDRIYQETGFKLSIVESIEENRLMYLAARFALKHDLPLFWETTSMIIEI

SEQ ID NO: 81747 - protein, 118 aa, Unknown
  Obtained from environmental sample
  misc_feature (1)..(118): Xaa is any amino acid
MVRFGRATEVIESARIDGAKYLRVFRTIVLPMAAPVATTVAILTVTGTWNEFMLINILVSSDGLKTIPVGMNMFAGSLATDYGKQFAALVIGMMPMIIFYAVFRKQITKGVSAGAVKG

SEQ ID NO: 81748 - protein, 176 aa, Unknown
  Obtained from environmental sample
  DOMAIN (2)...(136): Glycosyl hydrolases family 2, sugar binding domain
  misc_feature (1)..(176): Xaa is any amino acid
MMRFDLGGSWQLKTLDGKNNTLTGEVPGSVLDAWVKAGIVPDPYYGENEKQITSLFNNDFEYSRTFSVSAELLAEDEVALVCLGIDTLGEIFINDKSIAKVNNMHRSWRFNVKDLLKTGENTIRVVLFSPNAFIADAFRKNGQVKYISTGSMARASFLRKTHCQFGWDWGPHLPDA

SEQ ID NO: 81749 - protein, 327 aa, Unknown
  Obtained from environmental sample
  DOMAIN (3)...(285): MreB/Mbl protein
  misc_feature (1)..(327): Xaa is any amino acid
MSALDIDGKKYSPQEISAFVLQKMKQTAEDYLGEAVTEAVITVPAYFNDAQRQATKDAGKIAGLEVKRIINEPTAASLAFGFNKDSKKDKVIAVYDLGGGTFDVSILELGDGVFEVKSTNGDTHLGGDDFDRRIMEWLIAEFKKDTGIDIGQDRMALQRLREAAENAKIQLSSMQTTEINLPFITADQGGAKHLQKSLTRAKFEQMVEDLLERSKEPCKKALADAGLSADKIDEVILVGGSTRIPAVQQVVKELFQKEPNKGVNPDEAVAVGAAIQGGILGRDVKDVLLLDVTPLSLGIETLGGVMTKLITRNTTHSHPQEQIFSTA

SEQ ID NO: 81750 - protein, 316 aa, Unknown
  Obtained from environmental sample
  misc_feature (1)..(316): Xaa is any amino acid
MPYATAGTIMAAAFRKNKGRIDVREGFAIVTFSWLATTFIGAIPFFTFLSAHSGAAPFAVWTDAMFETMSGLTTMGATVIADVESLPRSILFWRILTHWIGGMGIVTLALALFPAFGVVAYQMFRGETTGPSKERLRPRLAQTAVILWGVYAFFTLLETVLLMAGDMPFFDAVCHSFSTMATGGFSTRNASVASFDSAYIEWVIIAFMILGGTNFFIHYRIIFYNDWETLKNNREFRLFAAILVAASALCVIFILTHGLHSSEWAQNNFKSQTPNAVEADAKTASEMEESPRPTTLYAARSSNRIRRHTTGFPVPH

SEQ ID NO: 81751 - protein, 276 aa, Unknown
  Obtained from environmental sample
  DOMAIN (1)...(215): Flagellar filament outer layer protein FlaA
  misc_feature (1)..(276): Xaa is any amino acid
MGQQSARASARNVTNIGLSYTREAPSKKYGKVMGVRVHFPVEPHNSWALVKPPFEIPAFEPQSTIADDGSITPVEGNNGITGRSRFEAKEDGQPAYGVVKNVGVIKSVAVNVYGLNFPHGLSTVLIDNQGTQKNVFMGYLRFDGWGELIWNNPAYIQEVRNRDIRLYPLYPESTPFIKFGGFLLQRDAALEGGDFIVYFKDVRIIYDKAVLDTEKDIDDEALWQIILDRETARKTWEMEKFGQTQVLRYLELNKQAKELPFDSPDRQQQEQAARDR

SEQ ID NO: 81752 - protein, 313 aa, Unknown
  Obtained from environmental sample
  DOMAIN (73)...(153): DnaJ central domain (4 repeats)
  misc_feature (1)..(313): Xaa is any amino acid
MISTATRGSRAWDKVTTGVISRGFEDIFGDGGLGSIFESLFGGGFRKSGSSGVRQGANLRYDIEIPFKDAVYGTKVEIQYSHNETCEACKGAGSADGSGKKTCQTCRGSGQIRQSHGFFSVAQTCHTCHGEGFVIETPCKECGGSGTQKKRQKIMVTIPAGTDNGKRLVIPRQGDAGPNGGHPGDLYVFIRVKRHEYFERQGHDLYCAVPISVSQAALGADIHVTSLDGKTIKVKVPAGTQSGKMLRIRGSGVPSGGTYGDMYIKVIVQIPEKLTRRGRDLLEELAKAEGQNDSPKPILSADLIHLGAGGPPG

SEQ ID NO: 81753 - protein, 53 aa, Unknown
  Obtained from environmental sample
  misc_feature (1)..(53): Xaa is any amino acid
KNPATSRPRKIKEATEAYEIFADDQKKAAYDQYGHAGVEGMGQSHDWSNFPGL

SEQ ID NO: 81754 - protein, 306 aa, Unknown
  Obtained from environmental sample
  DOMAIN (103)...(306): Lon protease (S16) C-terminal proteolytic domain
  misc_feature (1)..(306): Xaa is any amino acid
MFICTANHLETIPSALRDRMEVIALPGYTMQEKLVIAQRHLLPKMLKDNGLQEKELSIHVKAVERIIQEYTREAGLRNLERELGSLCRKIARRKAEGQHGPFRVGAAQTPKFLGAPRFLDAEKEKEFKPGLALGLAWTPFGGEVLHIEAGAMKGKGRLTMTGQLGDVMQESAKAALSYARTHAGELGVAPGFADKTDIHIHVPSGATPKDGPSAGVTMVVALISALTDKPVDSTLCMTGEVTLRGRILPVGGIKEKILAAVARGLEHVVIPCQNMKDLEESAKELLRRIHVPPVQHMDEAVRLGLR

SEQ ID NO: 81755 - protein, 192 aa, Unknown
  Obtained from environmental sample
  DOMAIN (1)...(164): NADPH-dependent FMN reductase
  misc_feature (1)..(192): Xaa is any amino acid
GNRQRNLVIQKELEKAEIEVEVIHVGSKHINGCTDCRQCLKTNRCIIKDDVVNDALDKLQSADGIILGSPVYYGGVAGTFKCFLDRLFFAGLKMPFKVGATVVSLRRSGGISVFHQLNNYFNLAEIIITPGVYWNIMHGNSAHETLEDQEGQQIMEIQGRNMAWLIKTLDAGKSIVPMPKPVDERKRTNFIH

SEQ ID NO: 81756 - protein, 78 aa, Unknown
  Obtained from environmental sample
  DOMAIN (4)...(44): UBA/TS-N domain
  misc_feature (1)..(78): Xaa is any amino acid
MADISPADVKKLREKTGAGMMECKNALVSSDGDFAKAEKLLKEKGLAALEKRAGRATNNGKVFIKMKDDHSRRGVSRT

SEQ ID NO: 81757 - protein, 327 aa, Unknown
  Obtained from environmental sample
  misc_feature (1)..(327): Xaa is any amino acid
RVPPPPGGERLLAPSYFYIDHAIEKVKEDRIDQGLEELTDSEIIFNKIGQVQNFTDDDLENPKSKRYTNVSKMILEKIANLRAEIDPETFDQMNMRENIKKIVDIENIRNRGFNTAINSITSILDTSKMGYQYIENLKNAREVYIREYEDTDLANLPDERYQIKLRYFDNSQLVEDRKAYDVQLKSIETEIQHLWDTLDVIYEDSKSGFKVTDFNDLAKKKKPSIKKRLKDKTGEPMYEDIAKVWDEISFVGVGETEVERSNRTYLFEKDRLRNRIILMRNKMKQMYDYLYPVERRVMENRLSFLERNTVGLIHDQPYHLQPGILLD

SEQ ID NO: 81758 - protein, 318 aa, Unknown
  Obtained from environmental sample
  misc_feature (1)..(318): Xaa is any amino acid
MLLVDKLGYKSVSVNLESVASDLPALANEFAKWNGVDLVAAYYHPDLGLLIANPKVAEELANFGMLRKRELLVLYAGKGASPADASCQKAAELAVKFFEGKRAKATPDLLQGEFTVKALKKSIEEEAEEEAPVKAAKAPKKAAGRGRKAAGAKAGARATKAVALQASAEPDAAAPKESARVAPPVVTAAAPAISKGPMKMTPMYSVVVANELFHNGNVEAWKRIVASYSAKYPELQVYIYYEGERILDINSLFKWGKVKHGSSIQFAVSGNDIKDVAKLQRYLIQGASKQFEAFLHGPGTMCKALVGSANLPWGGPRG

SEQ ID NO: 81759 - protein, 120 aa, Unknown
  Obtained from environmental sample
  misc_feature (1)..(120): Xaa is any amino acid
MVIAIDGPAGSGKSTIAKLLAQKLKDKEGRGFTYINSGNLYRAITLGCLRSGITPNDEEKALEYAKKADIAYDGDKIILDGEDVTDGLHTDEIDKWSAPLSAIVPIRHVVNSADLINGGP

SEQ ID NO: 81760 - protein, 302 aa, Unknown
  Obtained from environmental sample
  DOMAIN (1)...(187): YjeF-related protein N-terminus
  misc_feature (1)..(302): Xaa is any amino acid
MGLYVFSLIEAAGRLSADIFVRHFGELFENKPKISVFSGTGNNGADAMVMLRSWILSGLAEASNCKLVVSRLPRDEETGPWTEMLKSLEKMKVPVFTWNGETGKDLISNSGIIFDSDIIIDGIAGTGISGPLRGAALEMINAINSQKTKKPFVVSVDMPSGNSDKWKPDMTIVEANVTLAIEPQKSCIYNPAARSYAGIILPVNGIFPKEIIDRYRCRNAELLDWESVRLRVPKVKAYAHKYERGCVEIRAGSAGNTGAASIAARGAQAAGAGLVRLVVDDDIYPIIASSAGGIMVSRYPAS

SEQ ID NO: 81761 - protein, 119 aa, Unknown
  Obtained from environmental sample
  misc_feature (1)..(119): Xaa is any amino acid
MESTAAEKGRSFKLDEFEGPLDVLLFLIRKNEKNIFDTPIAEITGQFLDYLRNAPAMDLEEASEFHATAAWLLLIKSRSLLPVEMDDSPRNIDPRQELGERLIEYQKFKKCPMKWKRRK

SEQ ID NO: 81762 - protein, 318 aa, Unknown
  Obtained from environmental sample
  misc_feature (1)..(318): Xaa is any amino acid
VKHRTADRDRIRAEMEDENKALEAHMDEVNSMEARFVELQKNIYGLALEKNARENETRLFNEQRGENKVKIGQNEEREKQIIQKIEELNNDAAGQDAIVADMQKQLESIEENIRSFEENIQLSASRISENEKEVRRAEDEIHNIEKEQAELEKDLAKITDDIVAELDAGLKKAGYSAAERKSAEEALHETLGRLNAVLGGREALIRDLAAASAASSTTGGVDAAELGRIAGTLASGLAEAAADAQKALELFKSYREHTPVFIDEFLAPQGIITKKRELDSRIRGAKDSIEERRQRVKNLRSDNINLLAKMTSADSDHG

SEQ ID NO: 81763 - protein, 331 aa, Unknown
  Obtained from environmental sample
  DOMAIN (59)...(102): SWIM zinc finger
  misc_feature (1)..(331): Xaa is any amino acid
VVRIGRGAGYRKVEGNYNPYYYVEIIFPRLAEAEQVYKLIENDPPLLAGIAAGELPESFLEKLKKKDINLIPKRWRDMSRSCTCPDYGDPCKHMAALYYIIAREIDADPHVLFKLRGMDLAQRFGNAAVRKIAPPFAVTFAAKEKAPHEKAAQAEAPPLELEEIPHCGELISSLLPSAPPFCERDFALALTEFYHYCAGYHGWQTAEESEETLAETEHDFSRSRWTAHCSAYEPGADIYLQAQDINGRKKRYGLHEAFDLFSRFSDEDGTASYTFLFYLFKFLNPCLSAGAFIPFILAENKSLKIIWRPFETIPPVSDMLKAIASRGKRVI

SEQ ID NO: 81764 - protein, 327 aa, Unknown
  Obtained from environmental sample
  misc_feature (1)..(327): Xaa is any amino acid
LGRAGRCPHARGCPIKDESAIIVGRSVAGINYDAARGASAHILVLLVSRDDADNARQIEILSEIASFFKTEVVRENILSQEAVADLRVLSAAVKKGLFEKRHRRRAPTKLAGSPLLNAAGQLANNLKARAVIVFADVVKDNDFLDQLGDKHKLIIVTNNKTRFDLAKDKRVLGLVQAPPIPVSRTGQLKIGILLAISRGFISKDDKVICVSGGTNGSIFDTIVCVDIAKEYEFFFLTAQNLLPPDIKPEVFERVIGLAGEISVEGREGKPVGTIFVIGDTNSVNANVRQLIINPFRGYSEAERNVLDPGLVETIKESPQDSPTPGEK

SEQ ID NO: 81765 - protein, 74 aa, Unknown
  Obtained from environmental sample
  DOMAIN (5)...(70): Nitrogen regulatory protein P-II
  misc_feature (1)..(74): Xaa is any amino acid
MAEWQQKALPLGNVHYDEIPKEMLVVVCNDEDKDDLVKIIIRVARTGEGNFGDGRIFVSPVESAYTISSGKPGL

SEQ ID NO: 81766 - protein, 79 aa, Unknown
  Obtained from environmental sample
  misc_feature (1)..(79): Xaa is any amino acid
MPEMDGYEATRRIRAVEAELNKDGGGQPPKRPKGIPIVAMTANVFKEDVEKCLDAGMNSHVGKPVDFGEILDRLHSYLG

SEQ ID NO: 81767 - protein, 260 aa, Unknown
  Obtained from environmental sample
  DOMAIN (13)...(139): GTPase of unknown function
  misc_feature (1)..(260): Xaa is any amino acid
MAKDKFTRNKIHMNVGTIGHVDHGKTTLSAAITMYCAKKFGDKVMTYDQIDNAPEEKARGITINTRHLEYQSNKRHYAHIDCPGHADYIKNMITGAAQMDGAVLVVSAPDSVMPQTREHIILARQVGVPNMIVFLNKIDLVDDAELLELVKEEIKDVLSQNGFPGDKIPIIEGSAFKAMSELAEGKPSEETTKCIERLLDAMDAYFPDPVRDSDKPFLMPIEDVFTISGRGTVVTAIVDRGILKLNEEMKLSGSNPPENR

SEQ ID NO: 81768 - protein, 309 aa, Unknown
  Obtained from environmental sample
  DOMAIN (98)...(234): Histidine kinase-, DNA gyrase B-, and HSP90-like ATPase
  misc_feature (1)..(309): Xaa is any amino acid
MNVILGIVEMQLEKKGLPQETMEALGKMQNSGHLLLNIINDILDLSKIESGKMELVAGSYDIPSLINDTVQFNVIRFDSKPINFVLNIDENIPLNLFGDALRIKQILNNLLSNSFKYTDMGEVTLSFSAEASGAGVPGAGASGAGTPEAGVSGADKTVTLVIKVSDTGQGMTQEQLDKLFDDYTRFNIDPKRQIQGTGLGMSVTKRFIEMMNGEITVKSEPGKGTEFTIRIPQGYVDATVLGKDSVNNLQKLCALREAKESTRQNQRGYMPYAKILVVDDMEPNLYVTHNGSCSFTHDNIYRKKPTKSD

SEQ ID NO: 81769 - protein, 336 aa, Unknown
  Obtained from environmental sample
  DOMAIN (215)...(305): GMP synthase C terminal domain
  misc_feature (1)..(336): Xaa is any amino acid
WLPWSDRHEKVGDKKVLLALSGGVDSSVCAGLLSKAIPGQLTCIFVDHGLMRLNEGDEIERAFSKRNLNFIRVNAQKRFLDKLEGVTDPEKKRKIIGEEFIRVFEEESAKLGDIPFLAQGTIYPDVVESGGKHGAVIKSHHNVGGLPENLKFTEIVEPLSRLFKDEVRELGKKLKLPSSLVNRQPFPGPGLAIRVMGEITEEKLDVLRRADAILREELDALKRRPNQYFCVMTGTRSVGVKGDDRTYDFVIAVRAVTTDDFMTCEYTPLPHSLLSRISSRITSEIPRASRVVYDNTSKAPATVEWELDYDQICFCYRRVVSGLGKGTQRLLGAAAQ

SEQ ID NO: 81770 - protein, 73 aa, Unknown
  Obtained from environmental sample
  misc_feature (1)..(73): Xaa is any amino acid
MVNLVERWFAEITNKSIRRGSFESVDEFITVTKKYIKNWNKSGRTFSWTKKPEEILAKIQKAQSFLILFWTEH

SEQ ID NO: 81771 - protein, 124 aa, Unknown
  Obtained from environmental sample
  misc_feature (1)..(124): Xaa is any amino acid
MADNANPGDSAQITRDYFDSILVEMRHIDSVLPSTKLELYGETFSTPVMLAALSHLQSCHPEGMAETARGIKATDAVMWAGMGDDAELEAITATGARTIKIIKPYAETEDISLCRSEHVGPGKK

SEQ ID NO: 81772 - protein, 295 aa, Unknown
  Obtained from environmental sample
  DOMAIN (105)...(245): Thiamine pyrophosphate enzyme, C-terminal TPP binding domain
  misc_feature (1)..(295): Xaa is any amino acid
MDIKALEKIALSVRALSIDAIEKANAGHPGLPLGTAELGAILYGELLRHDPSDPSWADRDRFILSAGHGSMFLYSLLHLAGYKDMTMDDIKSFRQIGSRAAGHPEYGLVAGIEATSGPLGQGFAMAVGMAVAETMLAARFNTPNGKIVDHYTYALCGDGCLMEGVSAEASSFAGHHGLGKLIVFYDSNKITIDGSTDLAFTEDVAKRYEAYGWQVLHGSMYNFEEIAKLTAQAKAETKKPSMIILKSIIGKGAPNKQNTADIHGVPLGADEVKAARANLGIPGDFYVAPESAALL

SEQ ID NO: 81773 - protein, 85 aa, Unknown
  Obtained from environmental sample
  misc_feature (1)..(85): Xaa is any amino acid
MELNYNSAAELRAFLDENGLGMRKKFGQNFLINPSVREALVRALEAEAGDAVWEIGPGLGAMTSLLLEQGLAVRALKVIRALRRR

SEQ ID NO: 81774 - protein, 58 aa, Unknown
  Obtained from environmental sample
  misc_feature (1)..(58): Xaa is any amino acid
MRAAFRSLVKVRQELEQRFPAKDRWNCLSMGMSGDFETAIEEGSTLLRVGTAIFGERI

SEQ ID NO: 81775 - protein, 102 aa, Unknown
  Obtained from environmental sample
  misc_feature (1)..(102): Xaa is any amino acid
MVQPKHHIFVCTSCRINGQQKGFCFQKGSVDLVQKFMEEIEDKDLSSDCLVTNTGCFGVCDKGPIAVVYPEGVWYGNLDADAVEEICENILRADARTKYRIY

SEQ ID NO: 81776 - protein, 267 aa, Unknown
  Obtained from environmental sample
  misc_feature (1)..(267): Xaa is any amino acid
PLDQIRPSLRRRIRPYELQKGETDKIVENAFGEISDGIARRGIPGANAAFKKAINDLCAVRYDRSKLRDPVYIQGEYYLTFHPGSNFEIENYLEKNGMEVILPRMSTVYRHLFLQHTLAEMNEFKVRHSLYDNLYARIGNIFMDIAENYVDKIASKHPLYEPEISLEEAAKYSDDIIHHSILSGESFLIAAHTLHLAEKGVRSFIILQPFGCLPNHICGRGVIKRVKEMYPDIQVLPLDYEPDVSFANIEHRIQMLLMNMKNLKAAG

SEQ ID NO: 81777 - protein, 288 aa, Unknown
  Obtained from environmental sample
  misc_feature (1)..(288): Xaa is any amino acid
MITCGALVIYKNKPAIVKDQADGKFSISLQNGEQVKVRDKDVEEIHAGPVNNFKEIESAGPAVSSVREAWELLSGEGGSLTLKDLAGFICNEYTPSSAYAAYCAIRDGLYFYGTIDSVTPRTRDEVISEESKRAAVLLESGERMQFLERLKACIKNSPNNKLLPEDARHLQDVEALAFGKSTKSRTMRDLTLSETPEDAHLLLLKTGFWTGMVNPHPNRFGVTLSSASVCPVSPPEEQRRDLCHLASFAIDSPWQHDPDDAGSIEEPDGKSFLYGHVADPAASIPFDG

SEQ ID NO: 81778 - protein, 317 aa, Unknown
  Obtained from environmental sample
  misc_feature (1)..(317): Xaa is any amino acid
VGIHPRRPVVRSAGATWWVMSRKGEIVIRDDNNLPREKHELIYGAHLKLKSLKGEVAGLLPAEGILSDEELPRYAEEMKSGAAQLLKAMKDKDALARLRGELAPVHRRLAAWGAARGFMNSEGQLTEEGEAAPQMAELAAIWPAVSEAVGQAGQVLDEYDLKSEQDARRLAADYQLAVDRPGEFVEWDPFTVPILTEVSGYVSFEDMEEGKTMIERVDQVTGKSSKVIIESKQADVRPRIKVLDAAGKPHLTSKGIPAVYPLPVNAILMVEERARVHAGEALAKIPRETTKTKDITGGLPRGPNFRVPSPSSRICHG

SEQ ID NO: 81779 - protein, 289 aa, Unknown
  Obtained from environmental sample
  DOMAIN (1)...(284): Glycosyl hydrolase family 57
  misc_feature (1)..(289): Xaa is any amino acid
MIVDIHNNYRNLSYNIGPTLFTWMERYHPDTVRKIIASDKESVARFNGHGNAVAQVFNHIIMPLSSRRDQLTQIRWAKYFFKKRYGRDPEGMWLGEAAINMETVLCLIEEKISYVILSPNQAESYRHINGGDWTYTNQAPIDTRRPYRVFPRTRDGAKLEGHLDVFFFDEGLSKAVSFDNLLQDSRILGNSINDRYDRNNGANQLVTIATDGETFGHHKPYGDMCLAYFFTSVAQELGITPVNFGYYLSINPPEHEVSLGDASARAGRGAAPHAWGAGYATAGARPAAS

SEQ ID NO: 81780 - protein, 305 aa, Unknown
  Obtained from environmental sample
  misc_feature (1)..(305): Xaa is any amino acid
MAKRLGTKARGKEPAPARSSAAEYLTFAAVAGEGPQSVEMRYEDENIWLTQKMMATLYDASLATINEHISNIYKDGEWTEEATIRKFRIVATEGTRQVERAVKHYNLQMAIAVGFRVNSQRAVQFRRWANKIAKDYTIKGWAIDKERLINGGSVLTTEYFEQLLDQIREIRASERRFYQKITDIYATALDYDRDAKTTRDFFATVQNKLHWAIHGHTAAEVIVERANASKPFMGLTSWANFPDGKIQKYDVSIAKNYLAVEELSSLEMIVTMYLDYAEYQARRSVPMTMPDWRSKLDGFLQFNGH

SEQ ID NO: 81781 - protein, 105 aa, Unknown
  Obtained from environmental sample
  misc_feature (1)..(105): Xaa is any amino acid
NKLLAESGIKHEGAKEGAPAGSIGMAGTGFEVFVLFSEAVDTQALKKKLSGDLERDLKYIEGLRAKLANEQFVKNAPEPLVAEQTGKLEDALLRTEKLKLYLKDL

SEQ ID NO: 81782 - protein, 326 aa, Unknown
  Obtained from environmental sample
  DOMAIN (117)...(325): tRNA synthetases class II core domain (F)
  misc_feature (1)..(326): Xaa is any amino acid
LQTPQKPLYFRGFRISRGLLEKAVQNEEGLISEAALSADEKSAIADIAKKRGAADAPFRQIDREKVIFAFTVAKDGSVPAEEAAAALKAAGITGDEIGTLTPEMLETGSWKGKTFRSYNVKVPPTRLVPGRTNPYAQFLEDVKDKLASLGFEEFDGPVVETEFWNSDALFMPQFHAARDIHDAYYVADPGKSGFAHAKAIEEPWLSNVAAAHENGGKTGSRGWSYDFDVEFTKRLILRSQGTVLSAKTLPKAKVPGKYFGIVRCFRYDQVDATHLPDFYQTEGIVLGEDVNLRTLLGMLEIFAREVAGADEVKYYPASRDNPGGRG

SEQ ID NO: 81783 - protein, 97 aa, Unknown
  Obtained from environmental sample
  misc_feature (1)..(97): Xaa is any amino acid
MADNPLIVQGDRTLLLDVHAEKAEQARAAIIPFAELEKSPEHIHTYRITPLSLWNAASAGFRPEDIAKALAEYSRYSIPSGIVESFSIPCHATERSG

SEQ ID NO: 81784 - protein, 96 aa, Unknown
  Obtained from environmental sample
  misc_feature (1)..(96): Xaa is any amino acid
MKTIMKICTVCLLLASSTTLFARQKTFIREYTYRASDADSKISARQNAFTCVSNSLLKEVGTYIRTEEGLVTKGSVQEYTEKIEAVTAGIVKVKGT

SEQ ID NO: 81785 - protein, 116 aa, Unknown
  Obtained from environmental sample
  misc_feature (1)..(116): Xaa is any amino acid
MESLKKNPSWKGRRGPVVLVIMDGVGYGKYKEGDAVADSKMDHLTAIKAKSPNTKLKAHGKAVGLPSDEDMGNSEVGHNALGCGRVFNQGAALVSKSIETGAMFPGDPLGKSLAQT

SEQ ID NO: 81786 - protein, 290 aa, Unknown
  Obtained from environmental sample
  misc_feature (1)..(290): Xaa is any amino acid
LIPGHRCVPFANAGLLPHEYIFSWQGSTIPSTTTEGPPEEFYPYYSVLGEEYAPQYVAKDNAENEEAFNGDPFDDPPEVSIKTIDMRNIYRETAFVPGDRFVVRTLDWKQGSFELEKVSKDEWNAADLDAWLLAADEGFENSFSKLGPASCTEEQIAYAYWYGSPRMREVPAYSLEDYIYEKTNRIETSAYGIETRFWYAGREIPDRKDLDLSAVSADITPVVLLLTKNKIPVSRYVIQSYILDSLYRENGNEALTLERLVPARVEMDAKDKVTLLEYIKGIMDEYGLFY

SEQ ID NO: 81787 - protein, 212 aa, Unknown
  Obtained from environmental sample
  DOMAIN (6)...(195): Dihydroorotate dehydrogenase
  misc_feature (1)..(212): Xaa is any amino acid
QRPGSDSAEAASAREFGELAARLAGQEEVAALEVNISCPNVQEGGALFGQDPVQAAAVTSAVRARAGDLPVLVKLSPNVTDIALIARAVEDAGAHAVCCINTLQGMAVDLATRKPRLSTVIGGLSGPAIKPVALRCVWQVSRAVKIPVIGIGGIVNAEDALEFILAGAHAVQIGSASFMRPDAAFACAADLPVACARYGITSLDAWRGSLAY

SEQ ID NO: 81788 - protein, 286 aa, Unknown
  Obtained from environmental sample
  DOMAIN (107)...(250): GAF domain
  misc_feature (1)..(286): Xaa is any amino acid
MRESDYNSAQAAFMRVYGIKSILLIPIFTHGDLWGAVSFQDHTNNRYFDEDCFDLIYSASRIFSNAIIRAETEDSAIKAIEELRHREKMEAALNKAAILFLSQNEETFEATMTAGVGAIANTLNLDRFSIWRNTSSPDALYVSQIYRWDRDSGGTTMPTKSLVNVTYAQFAPRWEKLLASGETINSPAKLLPEAALLKSFDCVSAFVTPLFINNVFWGFALLEDRREERFFEEDAAEMMRAAAFLCAYTVMRADMEREIANAGDFTAAYLTRLRWIYYFDENPRPL

SEQ ID NO: 81789 - protein, 280 aa, Unknown
  Obtained from environmental sample
  DOMAIN (2)...(84): Histidine kinase-, DNA gyrase B-, and HSP90-like ATPase
  misc_feature (1)..(280): Xaa is any amino acid
MGEERGFCTIQISVADTGIGINNEQQKRLFNSFQQAESSTTRKYGGTGLGLAISKSIVELMGGKIWVKSESHKGSNFAFTVKARRGTAKEKGALLAPGIKLDNIRILVIDDDPDILAYFDDIMRESGISCDTASSGEEALKLVEKKGPYHIYFADLKMPVMDGIQLTRELKSRGPQNSVVIMISAVEWSAISEESKKAGVDKFLSKPLFPSTIFEAINECTGVEKEQEEEDQAAVGGSYSGRRILLVEDVEINREVVQVLLNRRSENLGRYCTCRAPALR

SEQ ID NO: 81790 - protein, 224 aa, Unknown
  Obtained from environmental sample
  DOMAIN (23)...(189): GAF domain
  misc_feature (1)..(224): Xaa is any amino acid
MDRDTINLKSIFDIDFELRKIQDLDLLLERILLEARKVVHADAGSIYVKQAAEEDGDPPTDTLYFKYAQNDTVQKSLPPGQKLIYSTFSLPISEKSISGYCALTGKIIDVPDMYNISPDAPYSFNSSFDQQTGYKTISTLTFPLITADGRLLRVIQVINKMDDNGKVIVFTQEDVFLIKHFAANATVALQQAYINRAMILRMIRMAELRDPKKPDPCNRVAGYL

SEQ ID NO: 81791 - protein, 317 aa, Unknown
  Obtained from environmental sample
  DOMAIN (1)...(246): Phosphomannose isomerase type I
  misc_feature (1)..(317): Xaa is any amino acid
LLAAFLEPQPSPQGVEPKVRGSPLEPAPVVLREGFAPLTRALSSRNPAVALRDFLAGLFGLSEAVREALTEYVLSICGHDCGASYNDGASLNDAIELMRDLARLYPGDPAIIAPLYLNVFRLEPGEAVFLEAGVLHAYIHGFGVELMANSDNVLRGGLTPKHVDVPELIKILDFKPYKPRIITPKAGLFNYPMPCGEFLLTRICGRDGSAGGMDIWLLAPGGFTGQDGPSICIVTEGELIITKQGRETVVKQGESLFILPSKNDESPFSLRGILPCLAPPADTKCTSPSLKSKVPLLKNWLTLIPVQNPAEITLRCS

SEQ ID NO: 81792 - protein, 313 aa, Unknown
  Obtained from environmental sample
  misc_feature (1)..(313): Xaa is any amino acid
VRSAESILAEADRNTRPALDNIFVNSQMAGRVPLSSFVRYEQGTGPLTISRENQSRIIHVTAGARPGAKMNTLHSRVDELIKQEIPIEDDVIIEIGGDNAQMIKMFTRFLLICVVAVFLVFGVMASLFESFRDPFIIIFTIPLSLIGIVSIYLITNTIFNVLTAVGLLVLLGVIVNNGIVLVDYTNLLRKRGYSLHDACVEAAGNRLRPILMTTLTTVFGLIPMAFFPGEGSELVAPIGKTVLGGLTIGTLMTLFLMPTVYAVLNKRSDERAARAKTRREGIALGEGGRAQQNKAQSAATAPATTFVRQGRNN

SEQ ID NO: 81793 - protein, 310 aa, Unknown
  Obtained from environmental sample
  DOMAIN (153)...(276): Tubulin/FtsZ family, C-terminal domain
  misc_feature (1)..(310): Xaa is any amino acid
PPLPPGYGQAADGGRGAGSKPSVGEDAAKEDQESISDASRGADMVFVTAGMGGGTGTGAAPVIAKIASDHGSLTVGVVTKPFEFEGEAKMQKAEEGIKKLREFVDTLIIIPNENLFKLVDSKTSSLHAYKLADDVLRQAVQAITDLITKTGLINIDFADVQTTMKGQGDAHMGIGIGRGDNRAKAAADDAIDNPLLEDTGIEGATRLLVNISGPEDVSMLEVKDIMMTIRAKAVPNVEIIFGQLVDPELGDDIKVTVIATGFNAKAVSSAKSSDPVRKAETAPGDVLSLEHFNRIRQGSKSPSMIIMSDM

SEQ ID NO: 81794 - protein, 84 aa, Unknown
  Obtained from environmental sample
  misc_feature (1)..(84): Xaa is any amino acid
MAVAENIKNALASSSMIRKMFEEGIQLKKQHGEDKVFDFSLGNPDIEPPPAFHEAFVKMAQEDAKGSHGYMPNAGILGHSELGE

SEQ ID NO: 81795 - protein, 92 aa, Unknown
  Obtained from environmental sample
  misc_feature (1)..(92): Xaa is any amino acid
MKKIVVLFFLIAVGGVYAQQDAAPDGFVWIQGGTFMMGSPAKEPERENNEIQHQVTVSSFYMCKYEVTQKEYQEIMGTNPSRFRGIICLWRW

SEQ ID NO: 81796 - protein, 48 aa, Unknown
  Obtained from environmental sample
  misc_feature (1)..(48): Xaa is any amino acid
VEMVSWYNAVEYCNKRSEKEGLTPAYTIDKDNTDPYNFKQYRPGLNGQ

SEQ ID NO: 81797 - protein, 312 aa, Unknown
  Obtained from environmental sample
  misc_feature (1)..(312): Xaa is any amino acid
MSDSGIYDRPLSGLEIQELYDSYFDDETVVGSVYNRIVAALGNLANRDSDMPFPTAMSKCAITWSSSNTKLVENSGKVRRPPNTNRNQAEPVSIAISIAKGKAAKIGTINMTVLRMPNDKDIVANDMAALDIESSRLIADIVLPVVGAMGSKITWASSSPKILSHTGAVSRPPNGVGNQNVALTATLKSGKYSQKKIFNVTVAQQSNALELIGAQDIRFVSPVNHIPDLPYYVDGIYASGKTGPRVRVLWTTSSKVAIPPSNEMTNPPTDADNYSKPGTHTVLGRVMGTNYVAKAHVTVVDEIHSADLIIVG

SEQ ID NO: 81798 - protein, 68 aa, Unknown
  Obtained from environmental sample
  misc_feature (1)..(68): Xaa is any amino acid
MGEGLVSLGHAVGILALFHRGPSALGGVQEFAGQLGLHALLAAALGVVDEPADGQGVAAVGLISTGSW

SEQ ID NO: 81799 - protein, 177 aa, Unknown
  Obtained from environmental sample
  DOMAIN (8)...(177): Elongation factor Tu GTP binding domain
  misc_feature (1)..(177): Xaa is any amino acid
LAPSVPITQTRNIGIIAHIDAGKTTTSERILFYTGVSQKMGEVHDGQATMDWMEQEQERGITITSAATTCFWRKHRINIIDTPGHVDFTVEVERSLRVLDGVVAVFCAVGGCQPQSETVWRQADRYGVPRIAFINKMDRVGADYGRCLQECATAWGASRPSSTAPGPGRPLGGLIDL

SEQ ID NO: 81800 - protein, 184 aa, Unknown
  Obtained from environmental sample
  misc_feature (1)..(184): Xaa is any amino acid
MHLDSAGALWSTPHLCFRSMRPCCPEAKAPEATDGYYGYYAPLSIKGNVENAELEVFIRDFDKKEGERKIAALDTFARAVETQFPGGKIEVSSKVQYLNMKEKIGSHPEVIEKLRQAFLNTHVEIKEKPIRGGTDGSRLTEMGIPTPNIFTGGRNYHSRLEWLSVPEMIASCRLVVELIRLWGG

SEQ ID NO: 81801 - protein, 133 aa, Unknown
  Obtained from environmental sample
  DOMAIN (20)...(133): 3-dehydroquinate synthase
  misc_feature (1)..(133): Xaa is any amino acid
MRSVDVNASKNYSVWIDSGGAGLLSQAGERIAAVCKGEAAALVTDDTVNELYGDTVEQSLKAAGYATTRFVFPHGEQSKNMATYTSLLCALTEANLTRSDVVVALGGGVVGDLAGFAAATYLRGIRFVQMPTT

SEQ ID NO: 81802 - protein, 311 aa, Unknown
  Obtained from environmental sample
  misc_feature (1)..(311): Xaa is any amino acid
MPSALTPPKPSEESKTRRVAKFLILIGSNHAAKILGELDPQQVEEISKEIATIRGISPEEAETVLAEFKALFSPGNIGYSGASSGGVETARRILYAAYGPEKGEALLNKSVPDSKENIFDFLEEFNPEQLVFLLKDESPAAAALVLARLPPKVTAETLIKFPAALKPEILKRIAHQNEVSPEVLERVAEAIREKARHLGGSSQDIAIDGMQALAAILKQGDYSLGDRIINELETESPDIGKNLKERIYTLDDVLAVFDRPLAEKLKTMPVQDIALLLKATERELREKIFQMFPAAAGTYPREREISRCSNG

SEQ ID NO: 81803 - protein, 115 aa, Unknown
  Obtained from environmental sample
  misc_feature (1)..(115): Xaa is any amino acid
DGISTTEHGGRRFMRYAFTEQGVAMLASVLNSPKAVTVNINIMRAFVKLRHYVLSQSKDEQIAELRKLLMLYIEKNDKRNDIIIALNNLKTVTTSFFGHPSVFPCVNIRLNGHCY

SEQ ID NO: 81804 - protein, 118 aa, Unknown
  Obtained from environmental sample
  DOMAIN (8)...(118): Protein of unknown function DUF103
  misc_feature (1)..(118): Xaa is any amino acid
MLLDHTPEDYARQRIDRAKKWLQDAKAPNVSFETAANRSYYCIFSAMRAVLALDRFNTKKHSGIIAAFRKDYIRTGIFPKEFSEIINNAFEIRLESDYNDFYLVSKAEVAAQVETLKL

SEQ ID NO: 81805 - protein, 210 aa, Unknown
  Obtained from environmental sample
  DOMAIN (34)...(194): N-acetylmuramoyl-L-alanine amidase
  misc_feature (1)..(210): Xaa is any amino acid
VNINECLLSDGNDYPVGASTIGAMIASSGKEHLWDERKGGVDSVDTVVIHYMSAVAVAPDDPYNLGQLLKIFCDCGVSSHYLISREGEVHRLVPEEKKAWHAGISIMPEPDDRTGVNEFSIGIELAATEESGFTPAQYESLRRLCVDIEGRRRKKMAYVGHDMIAGERAVALGMRKEPKVDPGKIVDWPYFSLIIGFAYFPEYRWFLSVP

SEQ ID NO: 81806 - protein, 318 aa, Unknown
  Obtained from environmental sample
  DOMAIN (172)...(239): His Kinase A (phosphoacceptor) domain
  misc_feature (1)..(318): Xaa is any amino acid
MSVLRALEKKQLLEENRRYREYLEEEVIKRSDELLSSAVRFKTLFNLAGDALFIHDRDGKIIDCNEAAFQHTGYSRKLLLEMNIRDLILPDDVGCFEHAMARLPRTNNMMYELRFAHKSGAVSVMELHATIVTTEASPLIFVICRDVSERRRMEQEREELKAQVEAAQRVELVGMLVSGIAHDFNNVLTALTGYASLLQMDAAQVGAPVAGYVDKITEIAAKGQGLTARLMSFIRKKREELVPVDIHKMLTETEQLLRPNTNHVKIDLDLGAEKSVVLGGDSQLQSVFLTLGLNPRDAMPDRGTLTFKPYHQERLLGS

SEQ ID NO: 81807 - protein, 286 aa, Unknown
  Obtained from environmental sample
  misc_feature (1)..(286): Xaa is any amino acid
VDGNLVIHDGVTYIYEKEFMNKRLTSVTIPDSVTYISELAFADNQLTSVTIGNSVTSIGESAFRGNQLTSVTIPNSVTKIGKGTFMENQLTSVTIPNSVTEIGESAFAINQLTSVTIPNSVTEIGESAFYKNQLTSVTIPNSVTEIGSYAFAGNKLTSVTIPNSVTSIESGAFANNQLTSVTIPNSVTSIESGAFANNQLTSVIIPNSVTYIGGKYFFSTRGAFENNRLTSATIPNSVKTIRENAFANNPLTSIIIPDSMGSFHENVFTGSLRNVTRISIGANVNL

SEQ ID NO: 81808 - protein, 276 aa, Unknown
  Obtained from environmental sample
  DOMAIN (1)...(270): Phosphoglucose isomerase
  misc_feature (1)..(276): Xaa is any amino acid
VLVSKSGITLETLTNELFVKNKLKKAGLDPAKHMVAVTSETSPLAGNPTYLDSFYFDDFIGGRYSSSSAVGGVILSLAFGSDVFGDFLVGAAAADKAALTNDIRKNATLLDALIGVWERNFLGYPYTAILPYSQALSRFPAHLQQLDMESNGKRVNRDGKQIAYSTGPVVFGEPGTNGQHSFYQLLHQGTDVVPLQFIGFRESQRKDDGVIEGSTSQAKLKANLAAQITAFANGKSDSDGNKNFPGGKPSSLIHGEKANTQKPRSPACPLREQSHV

SEQ ID NO: 81809 - protein, 113 aa, Unknown
  Obtained from environmental sample
  DOMAIN (5)...(67): DnaJ domain
  misc_feature (1)..(113): Xaa is any amino acid
MAKKDYYEVLGVSKDASADDIKRAYKKLAIKYHPDKNPGDKEAENKFKEAAEAYDVLSDEKKKAQYDRFGHEGLSGGGFGGGFSGGGFSFDDIFTHFGDIFSISEVSGAIWRR

SEQ ID NO: 81810 - protein, 174 aa, Unknown
  Obtained from environmental sample
  misc_feature (1)..(174): Xaa is any amino acid
MGMIRSSITVFAEGESVADVPEPAINRTPAGVDIPTDGVALAQAMESYQTVEIRLTDDGFEPAIVVMQRGQLALWNINVDSLDPGSASLIFPAYYTTLGTKQGDNVLQIIPSDDFDFSTGDNVFYGFVKVVDDINIVDIEAVKAEVTNFETLIYPEAYFEAAMGGGGGCPCCSR

SEQ ID NO: 81811 - protein, 323 aa, Unknown
  Obtained from environmental sample
  DOMAIN (8)...(213): Lyase
  misc_feature (1)..(323): Xaa is any amino acid
MPPVLHLGATSVIFLDTSFRWRIAGVPREVVLPLLKKLELLLCSFAEKEADTPQVGRTHGQHAVPITLGFAFAEYVSRLGKSIPEIEKRSKELKGKLSGAVGAYNATSMIVKDPQELERIYLAELGLEPSEHSTQLVEPEYLLRLLLEFNTAFGIIANLADDLRNLQRSEIGEVREGFAAEQVGSSTMPQKRNPWNSEHVKSLWKAFMPRVNTFFMDQISEHQRDLSNSASQRFISDYIAGFCLAVSRMSKVIEGLGADREKLLANLRGGGIPGGVMAEPAYILLAETGSQRRSRSCPQDNPCRRKRKYQLAGRRKQPEGKKG

SEQ ID NO: 81812 - protein, 313 aa, Unknown
  Obtained from environmental sample
  DOMAIN (1)...(163): MatE
  misc_feature (1)..(313): Xaa is any amino acid
MAQQLIMSMVSLIDNFMVAGLGDISMAAVNVTNHLFFVYIVMINVICQAGGIYIAQFRGADNSDGMKHAFRFKVIFAVALAMLAFMASRSFTSPLIAMMTTANSSQKEIVSVGSRYLKLISWTFLPTAISSSIGTSFRETARPKIPLVISIFATIVNTVGNWILIYGNLGAPRLEVEGAAIATIIARLFELCVFVIYAAWDRAPFFAVRIFDIHKRLIKEILFKSSMIFASEISWISSETIMIAMYNRRGGAEVVAGMAAGWTIANLFFILFGGIWTASAILVGGTLGSGRLTKRAAAQNGSNRDPRPNLTMG

SEQ ID NO: 81813 - protein, 310 aa, Unknown
  Obtained from environmental sample
  misc_feature (1)..(310): Xaa is any amino acid
MSWRSKTIVDIPGDFLDTNGAPRIANALLPKANLRNRVIDDDFPAGVQLDKLERELVSLRSGSRRGLQECFDGSIGANSVLFPWGGSKQGTPECGMAALLPSLGKQSRTASLMTFGYDPDLMSIDPYSGAKGSIREALAKFACLGGDPFTARLSLQEYFRRPETPETWGMPAAALLGALEAQLRLGVPAIGGKDSMSGNYRDDSRGIDLAVPPTLVAFAAGTVAAGKVRSGALSGKGGNAVLLLSQSPQPATDNQDEWELFKTNMKTLEALAAQGALIAAYPVGPGGVAASLALMAYGTSRRSTRGGEKG

SEQ ID NO: 81814 - protein, 291 aa, Unknown
  Obtained from environmental sample
  DOMAIN (225)...(272): Regulator of chromosome condensation (RCC1)
  misc_feature (1)..(291): Xaa is any amino acid
VSAGGLVTALAPGTADITVTTQDGNKTAKCVVTVASVAVTGVSLNKPATNLEVGNQELLMATIQPSNVTNQTITWSSSNSAVAYVSRTGLVTGVSVGTADISVTTQDGNKTAKCTVTVVPVAINVTGLDLNKTTMFLVAGGRQQLTPTIQPSNATNQNIAWSSSSSGIASVSAGGLVTAVAVGAAEITATAQDGGKTAKCTVTVVPNNLATVAAGEWHSAVIRNDGSLWTWGYNSSGQLGDGTKTNKKSPVRVGAAKDWVAVAAGYNHTLAIKADGSLWAWGRKRILLSVG

SEQ ID NO: 81815 - protein, 274 aa, Unknown
  Obtained from environmental sample
  misc_feature (1)..(274): Xaa is any amino acid
MISRVAYLIILTAFFAAAQGVLRVASLEDLRSIGQVEERPLSADYELVCDIDASESRVRPFDPIGGGGRPFTGRFFGRGGRLYVIRNLYIRSPSEGHVGLFGVVGYGAEVSNVGVVADTVSGSFAVGTLAGSSNGRIVNCYGAGVVVAGRRESNVGGLVGLNGGGIYGSYSTAKVYGAENVGGLVGLLRISASGEILQCFALGAVRGDSNVGGLVGQVFGGRVAESFSAGRVFGAGAVGGLIGRDFAVSLASWSDLGGILVPNIDRCPGPPARR

SEQ ID NO: 81816 - protein, 89 aa, Unknown
  Obtained from environmental sample
  misc_feature (1)..(89): Xaa is any amino acid
MGTINLTKDWQRLNIPEHVRDILSNSRGLLFPVNRSELLELAMGGAGNKSYDVSYDVPGKGSVVEATVVKCKNGLAVNYSEPYMRPRDP

SEQ ID NO: 81817 - protein, 94 aa, Unknown
  Obtained from environmental sample
  misc_feature (1)..(94): Xaa is any amino acid
MPWLDYTVGKSGYTYLAHESMVTLFNGSEIWIGGLGDREQADKILGHEYNTIYFNEISQLSYAAVTTAYSRLAMRIPGCRNCFYMTAIREAPLH

SEQ ID NO: 81818 - protein, 164 aa, Unknown
  Obtained from environmental sample
  DOMAIN (5)...(35): Flagella basal body rod protein
  misc_feature (1)..(164): Xaa is any amino acid
MVRSLWTGASGMIGQQANIDVISNNLANVNTHGYKKQRADFEDLLYQTVRVAGTPATEDTVVPVGVQMGHGVKLADTQRVFSQGSLQQTEVPTDMAIAGEGFFKIQMYDGSWAYTRNGNFKVDQEGRMVTGNGYWLLPDIVMPESFLLGKINIFKDGRVSVMVR

SEQ ID NO: 81819 - protein, 337 aa, Unknown
  Obtained from environmental sample
  DOMAIN (1)...(329): DNA topoisomerase
  misc_feature (1)..(337): Xaa is any amino acid
MNLIFVKNVNPDIKEYPARFNDLSSVNEKFSVPTEKGVITSLVKDKKTIPPPQLFNLTTLQKEAHKKYGYTPERTLEIAQSLYEKHKCLSYPRTPSRVMGDDNVALVQSIYDKLKSFYDCEVIANSEPSLISNANKRLFNSAELQDHHALIPLAPHPRDLDGDPHLNDTEVDEVNIYSLVFDRFFTVLMPPYVYNSIAIDVDISGHKFMGNGIEVINTGWKTVCEKDSDEDDSPEDYSGLVQGNEYKVVSLKTLSKKTEPKKHYTFASLLQLMENPRGDDGKHLTGLGTPATRGAILQKLVDRKYVALKGKNILISDDGKSLSKTFKESAINPGGKT

SEQ ID NO: 81820 - protein, 115 aa, Unknown
  Obtained from environmental sample
  misc_feature (1)..(115): Xaa is any amino acid
MRDVYYEEELRYLKEEGARFAEKYPQRAGYLNIESAKDRDPKVEALFEGFAFISAGIRERIDDALPSLAAGLAGLVWPQLLHPIPAICIAEFKPRPGTLQGVAHTAPRPICPFLG

SEQ ID NO: 81821 - protein, 68 aa, Unknown
  Obtained from environmental sample
  DOMAIN (19)...(68): Ribosomal protein L7/L12 C-terminal domain
  misc_feature (1)..(68): Xaa is any amino acid
VYRDSESFEECQENCGHQGSADRYDLGLKEAKDLVEGVPKPLKKNVPREEAAKIKETITAAGGTVEIQ

SEQ ID NO: 81822 - protein, 180 aa, Unknown
  Obtained from environmental sample
  misc_feature (1)..(180): Xaa is any amino acid
MKKKQGGSTAISNIYKDDEFWENDPDNLDAGLFPWLNRISLITRDEGDDENEGKVNLSTIHAAKGLEYPVVFIAGAENGLLPHEKSIEKPDKNEEEDEAGNVEEERRLFYVAITRAREKLYITSCRQRRRMQNTVDCEPSPFLSEIPQELIKYHEKTEESKMADDEQAEKFISQMKAMFG

SEQ ID NO: 81823 - protein, 83 aa, Unknown
  Obtained from environmental sample
  DOMAIN (13)...(81): Ribosomal protein L11, RNA binding domain
  misc_feature (1)..(83): Xaa is any amino acid
MMAGRIILPFILKTPPAAVLIKKAIGLDKGSAESHKTKVGKIPRAKLEEIAKLKMVDLTANDVEAAMRIIAGTARSMGVEVEK

SEQ ID NO: 81824 - protein, 197 aa, Unknown
  Obtained from environmental sample
  misc_feature (1)..(197): Xaa is any amino acid
MYGIKRALAPPALRAFVVTAAAQTGTFTDKRDGRTYETMKVGAKTWMADNINIETGNSWCYDSDTFNCNAYGRLYNWEAAKTACPAGWRLPTLKEWSGFVKAVSDKEAADKKARAKRGGNEDGYATDERRLPAILGGGRYHIGGEYSNIGGYSYWWAGAEKSSQYTAYFRYVNYGHEDIADDFDIREYGFSVRCLRD

SEQ ID NO: 81825 - protein, 51 aa, Unknown
  Obtained from environmental sample
  misc_feature (1)..(51): Xaa is any amino acid
TLDGYRKHIEKDAALERRFQQVYTADPSVEDTIAILRGLKERYEVQPRRAD

SEQ ID NO: 81826 - protein, 66 aa, Unknown
  Obtained from environmental sample
  misc_feature (1)..(66): Xaa is any amino acid
VVLACKLAAQKQPDFKKNKKLILDEIDREGMQLLDQIGLARKRDFYPYQLVRRQQQRVSICQGFGP

SEQ ID NO: 81827 - protein, 153 aa, Unknown
  Obtained from environmental sample
  misc_feature (1)..(153): Xaa is any amino acid
SGRSERYCQVIRRFTFKRVSRATGDNPFVFTDAASAITPEALALNADYAGYSGIPVGAGVESVCAAALLRAGDETSSSYDREHVCPYLYTHPDLFSLHRPLAPLRWQGSNIRLTVDTQEDFDRALVLYDALKNEPLRYHGFTIIKRYAEIFKK

SEQ ID NO: 81828 - protein, 231 aa, Unknown
  Obtained from environmental sample
  DOMAIN (1)...(228): ABC transporter transmembrane region
  misc_feature (1)..(231): Xaa is any amino acid
MVGVMALVSVGRFLWRYFINGSSRRIEAELREKLFGHLQKLSWDFYQKNKIGDLMARSINDLHAVRMALGMGLVALFDSVFMAAAILIIIFVQDARSAAYSIIPLPFVTVLILLFGGMVGKKFRTVQEAYSKMSDNAQETFAGISVIKSFVKEWWFIKKFADSNDDYRRANMELVRLFGFFFPFVSFLSGLTIVVMLVIGGKRVILGVMTPGSLVAMFRYLGMLIWPLMEP

SEQ ID NO: 81829 - protein, 235 aa, Unknown
  Obtained from environmental sample
  misc_feature (1)..(235): Xaa is any amino acid
MFLTILLKISGKKEILITENNAQKTIQDFAKTAMNTTPSIFNKNIAGYTTIGGRERRDSDDNTGDSTDMCAVILNRPGLPHRSFFQELEKTGFDNVISIESSSPNYNIEELSQRFPFVRFIIPEKEINLGEQINLAASEIESSLFFVLHSDMKIIAGGTARRMAERLIILQEDAGIYSNAVKRLCTVPVIVNANYESIPTIVTAFTRNKKMWTGMMNPHNEGEIRLYPFNGIGIY

SEQ ID NO: 81830 - protein, 317 aa, Unknown
  Obtained from environmental sample
  misc_feature (1)..(317): Xaa is any amino acid
SIPHNPGDVRFRQPTPVTVVPTGTAVDVSSFSGTRHIGAIAYGNSKFVAGGVNGKMAYSADGVTWTAVADSTFGTSGIFAIAYGNGKFVAGGENGKMAYSADGVIWTAISDSMFDLSIGAIAYGNNKFVAGGTYGEMAYSADGVTWTAVSEFLTGNIHAIAYGNGKFVAVTSWDGEMAYSADGVIWTMVTDSTFGPSEIETIAYGNNKFVAGGDSGKMATSPDGVTWTAVSDSPFTQYIGKIAYGNNKFVGGTFWGEMAYSTDGVKWTAVADSTFGTNAIYAIDYGNNKFVAGGEDGKMAYSTDNNIKSKLGDLSCP

SEQ ID NO: 81831 - protein, 104 aa, Unknown
  Obtained from environmental sample
  misc_feature (1)..(104): Xaa is any amino acid
MIIRSKAPLRLGLAGGGTDIADYYNRFGGYVLNATVDMYAYCTIEPNDHDPGKIEFIAADLGKQEEYKAEEKLPISSVLPLHCGIYNRIVPIRLGRSDPWGGKR

SEQ ID NO: 81832 - protein, 327 aa, Unknown
  Obtained from environmental sample
  DOMAIN (25)...(90): His Kinase A (phosphoacceptor) domain
  misc_feature (1)..(327): Xaa is any amino acid
MAGCFIFVLIRLDAAREKSDMENKHKSSFLANMSHEIRTPMNAIIGMTDLLAYEQLNRRQMDFVHDIKISAHSLLSIINDILDLSKIEAGKLTLNPVNYDFHALLDNVFSMFSYITQKKRLKFDYEVDLKTMPRYLYGDDVRLKQILTNICGNAVKYTEKGFIKFKVAIADNKLRFEIKDSGIGIRKEDIPKIFDTFQRFETEKSRNILGTGLGLSISKTFVEMMGGQIIVDSEYEQGSFFLVIIPVVLRNKEEVKLKKGLEEGQILLAPNAQILVVDDNEFNLKVAERLLNLFKGSVETAYPGKEIIEKGQKNDYDIVFMDHMMPG

SEQ ID NO: 81833 - protein, 57 aa, Unknown
  Obtained from environmental sample
  misc_feature (1)..(57): Xaa is any amino acid
LYNTRVEEPYFLNIGNKPKFLCRPGLIGRKLAVQITKKIAEVHEDEFEELVNDGEVM

SEQ ID NO: 81834 - protein, 85 aa, Unknown
  Obtained from environmental sample
  DOMAIN (5)...(85): Ribosome-binding factor A
  misc_feature (1)..(85): Xaa is any amino acid
MPTFRTERLGQTIQEKIGSLILEGKIKDSRVNTFVSITKVDVSKDLSYADVYVSDIRGKITEKEVEGLLSAAGIIQSQLGSAMHI

SEQ ID NO: 81835 - protein, 50 aa, Unknown
  Obtained from environmental sample
  misc_feature (1)..(50): Xaa is any amino acid
MKKENLKICYIGGGSRNWAWVLMQDLAFEKNICGTIELFDIKYEDAQLMK

SEQ ID NO: 81836 - protein, 299 aa, Unknown
  Obtained from environmental sample
  DOMAIN (66)...(131): His Kinase A (phosphoacceptor) domain
  misc_feature (1)..(299): Xaa is any amino acid
NVIGFFRTLDIGWRLGLFLPKDLYYKPLYDMALTLSLLGIALASVLIIVLIRVDAAKSKSDIENKHKSAFLANMSHEIRTPMNAIIGMTTIGKSASDSIRKDYCLSKIEDASNHLLGVINDILDMSKIEANKFELAPVEFDLEKMLKRVVNVITFRIDEKHIKFSVHFDGSLPRTLIGDDQRIAQVITNLLGNAIKFTPEKGSITLAVRLAEKGSDLCTLQFSVSDTGIGITPEHQEKIFKSFEQAESSTTRKYGGTGLGLAISKSIVEMMSGDIWVQSEPGKGSVFTLPSVTARVTNT

SEQ ID NO: 81837 - protein, 310 aa, Unknown
  Obtained from environmental sample
  DOMAIN (225)...(309): Phosphoribosylglycinamide synthetase, C domain
  misc_feature (1)..(310): Xaa is any amino acid
MTKYGVRTASGSSFTDPKKALDFAAHHFKSPTSPPIVIKADGLAAGKGVVIAHNLPDTRETLVAFMQQKKMGEAGTSVLLEEFITGKEVSVLAAVSVCGGKGYILPFITARDHKRRFEGAQGPNTGGMGAVAPAHDFSQQAQADFIRSILEPTLNGIKGEGFDYRGFIFFGVMIHNEHCYLLEYNVRLGDPETQAVLPLMDFDIVDLCEAVITGGEFHLSWKHGAVCAPVAVAEGYPGPYRKGDVISINKAALEKAGAKVFISGASRDADSSALLTSGGRVLTVSCFGHNADEAYDHAYKGPRPILTMLG

SEQ ID NO: 81838 - protein, 68 aa, Unknown
  Obtained from environmental sample
  misc_feature (1)..(68): Xaa is any amino acid
VDLVVRALRDLGKNVRFIYSWDEYDVFRKVPLNMPKQDELKNYLRFPITMVPDPWERDSSYQGSRVSR

SEQ ID NO: 81839 - protein, 75 aa, Unknown
  Obtained from environmental sample
  misc_feature (1)..(75): Xaa is any amino acid
MIRSAELYQEALAEFAAMARELRRNRRNPSPVVALRVKPDVLSKYKALGRGYTSIMADVLNYVVENPEILVKARQ

SEQ ID NO: 81840 - protein, 322 aa, Unknown
  Obtained from environmental sample
  DOMAIN (48)...(313): Beta-eliminating lyase
  misc_feature (1)..(322): Xaa is any amino acid
FFPGLSRVCIEYDFDSVIDRSNSYSIKHEPSWRGKPDDVLPMWVADMDFVTPPCVQEALIRRIRHGIFGYSEPDPAYFDVVGKWFKERFNWDTQCDWLLITPGVVNALYIAVCALTRQGDGVVIQQPVYNPFEAAIRQTGRRLLVNELVYGEGHYSIDFQDFEEKIKQAKLFIMCNPHNPVGRVWSKDELMRMGEICLRHGVMVIADEIHEDFVFPGNKHLVFAALGDDFADITVTCTSLSKTFNLAGLIHANIFISNKIMRDKFKEEYVHFGLSQPGVMGLEACKAAYEGGAEWLEQLLDYLAGNMLHLKTYLSKHIPKIN

SEQ ID NO: 81841 - protein, 284 aa, Unknown
  Obtained from environmental sample
  DOMAIN (32)...(283): DctM-like transporters
  misc_feature (1)..(284): Xaa is any amino acid
MDILHDAAEFGPPEPFFSWVNALYNIAWFIRVPAILLLIFAALTGMPIFAAIGGIALIMLQAAGLEPEAAPIQIFSALTDTDIIAIPLFTLTGFFLSESKAGERLVRTFRCFFSWLPGGMIIATVIICAFFTSFTGASGVTILALGGILFTILTENKYTEHFSIGLLTSTGGIGLMFPPSLPIILVASTSNTILHFMNIPSQYSIIHFFIGALIPGIILVLAMMAAGIFASIKIKIPVETFDAKKAFHSLKESLYEILLPVILVLGYFTGLITLVKASALSVVY

SEQ ID NO: 81842 - protein, 123 aa, Unknown
  Obtained from environmental sample
  DOMAIN (10)...(43): KOW motif
  misc_feature (1)..(123): Xaa is any amino acid
MAEALHKFKLKKEDTVQVIAGKDKGKRGRILKIHRDKDRVVVEGINIVKKAMKKRKQQDRGGIAEIEAAIHSSNLMIVCKKCGPTRIGYKMDGNKKVRFCKKCGEVCKDKNYVPRLNSAESDP

SEQ ID NO: 81843 - protein, 81 aa, Unknown
  Obtained from environmental sample
  misc_feature (1)..(81): Xaa is any amino acid
MINSTGNETEPQKNDDSRADFISEFIKEDLAAGKYSYVHTRFPPEPNGWLHIGHCKAFFIDFNMAERFGGKCNCSPINPGR

SEQ ID NO: 81844 - protein, 302 aa, Unknown
  Obtained from environmental sample
  misc_feature (1)..(302): Xaa is any amino acid
VERQLCDDLGDANKLPDVLPKDKLNILYIVARPSGENDVGFQTLIRPLVDFAYAEGEIWPVQIDLLRPPTLDRLREILADKPNFYHIVHFDGHGGYNAGGQKNAMGAGALVFENGKNEDEGELVPAKMLGQLLREHNIPVMVLNACRSAMLDDQAETPFATVAASLLKAGIHSVIAMSYSLWVSGAKEFVPAFYRQLFKDGGIAEAVRQGRLQMYRNHTRDSSCGKVDFYDWIIPVLYRQSPSVETELPRLAPANEEKESKLPEEVLKTGEYGIIGRGSAMLGLERAIQQQPQAGILFTLSR

SEQ ID NO: 81845 - protein, 148 aa, Unknown
  Obtained from environmental sample
  misc_feature (1)..(148): Xaa is any amino acid
WGPLYSQLALGDLEALPGETFYAEIDEVSPVLDPASRTPAYKGSRFVNRTGGGAVDTRIKAGMFATISLVTRTRANVPVIPRTSVINTYGSWIAFIIDENNIARRRALELGIENERFFEVISGIDLGERIVTAGQNFLTDGDPVRVVE

SEQ ID NO: 81846 - protein, 279 aa, Unknown
  Obtained from environmental sample
  DOMAIN (109)...(175): His Kinase A (phosphoacceptor) domain
  misc_feature (1)..(279): Xaa is any amino acid
GVPPVDREYIAGSLDKTLDEVVGRDDIAALGLSTNTAAVARDTDLQILNGQQRVVYQEWITCSDGTMRPFETAKSPLVMDGSIIGIVAVAHDISEHRAMEEELRSASRAKSTFLANMSHELRTPLNVVIGLTDLILEESGLAKHIKDNLSKISNAGNMLLSIVNDILDFSKIESGKIELMPIEYHMPSLLNDVLTMVFTRLGEKPIIFNLNISDDLPNKLYGDDLRVKQIFNNLLSNAIKYTQRGTIGLNVNCRREGNDVWMEASVSDTGIGISEENLP

SEQ ID NO: 81847 - protein, 154 aa, Unknown
  Obtained from environmental sample
  DOMAIN (40)...(153): D-alanyl-D-alanine carboxypeptidase
  misc_feature (1)..(154): Xaa is any amino acid
VREVKISENYLERAVLIYLFIFCFPLCAQAQIYEAQPALVPIIETAPEIISRSAVLIDADTGTILFSKNPDEEIPPASLTKLMTMHLIMKEIEEGRASYDEIIPITAESWAQNQPYRSSLMFLEPRANSYNTGNITRSCGVSGTTRSADLILVR

SEQ ID NO: 81848 - protein, 103 aa, Unknown
  Obtained from environmental sample
  DOMAIN (6)...(73): SmpB protein
  misc_feature (1)..(103): Xaa is any amino acid
VAEGVKVIAVNRKARHDYSVDETCECGIELLGTEVKSFRDGKISFPDAWAEVLDGEVWLRSLRVAENLFSSVFNHDPEPNKPLPSKKKQIPAENPPKGQGKKG

SEQ ID NO: 81849 - protein, 91 aa, Unknown
  Obtained from environmental sample
  misc_feature (1)..(91): Xaa is any amino acid
MLIYEKYIGKNRDDFKSYQDILENYKVTYKDDFNFAYDVLDELAKNQPDNLCMLWISNEGEEKRITFSQMAKYSNKAANYLSPLGRSDHCR

SEQ ID NO: 81850 - protein, 112 aa, Unknown
  Obtained from environmental sample
  DOMAIN (7)...(112): Queuine tRNA-ribosyltransferase
  misc_feature (1)..(112): Xaa is any amino acid
CQIGREPWGASRKDSEKALAITEQWLGRAKKTWDEEASKGYPGSLYSIVQGNFFPDLRKRSAQVCVQSGTPGIAIGGLSVGEPAGLFIETLAYTIQELPEDKPRYVMGNRDG

SEQ ID NO: 81851 - protein, 119 aa, Unknown
  Obtained from environmental sample
  misc_feature (1)..(119): Xaa is any amino acid
GFPGYRRGLVAFGGGRRLTYKKLHERGVNIIGTSADSIDICEDRQRFDVLLEQLQIKRPKGFGIMTEAEALDAAETLGFPVLMRPSYVLGGQNMIIAFSPDDIREYMEIILRSNRKTLC

SEQ ID NO: 81852 - protein, 122 aa, Unknown
  Obtained from environmental sample
  misc_feature (1)..(122): Xaa is any amino acid
MFRIQTLNKISPLGLDLFPRDKYEVASDIPNPDAILVRSADMNGSEIPSSVLAIARAGAGYNNIPVQKCSDSGVVVFNTPGANANAVKKLPLRLCFFHRAILSGGVNWTLSEAGQPDIAELV

SEQ ID NO: 81853 - protein, 312 aa, Unknown
  Obtained from environmental sample
  DOMAIN (66)...(104): RHS Repeat
  misc_feature (1)..(312): Xaa is any amino acid
IFSYDSEGGVTTSTAYSGKQTKVEYRDSEGITIATYPDAKQSIIERDMLGNIVRVTSETGTIRYKYDAGGKLIEQNDEGAGEITRYVYNKTGQRIRMQSGNRDIIYRYGKTGELLKVTDNSQRLEASYEYDVRGREIRRTYGNGVRQETLYDQIGRIILIRESDSRGGLLRAEGYLYDEKGRRSHSVDEEGRITKYEYDKQSRLSAVLYPWTKEKAEADRREAEEAGLYFTPDKGNGERYSFSAAEQTSLREILNKAGTMRGNAVASSQMMWRESYTYDRNGNRASKATPWGIIKYVYDAENRLIKKGDMHT

SEQ ID NO: 81854 - protein, 314 aa, Unknown
  Obtained from environmental sample
  DOMAIN (188)...(225): RHS Repeat
  misc_feature (1)..(314): Xaa is any amino acid
LALERRYEYNNRKDLVRITEKDLSTGETRESKYTYDKRHLLTEEKDGSGNTIKYTYREDGELIKKIQGPWYWEYGYEAGGRISTVTRGKTGTNKKYTENYAYQWQGWNEKCAVTITGAGTTAYLLDPWGQVTAVTNAVGDSSERTLNGAGNMLREQASSGGFYEYRYDALGRPYQAGREGGPAVQVRYNLDGSIAEKTDRLGKVTQYAYDGRGLLTKETTALGEQRYFYDNAGRLIRQEIASRNSVTYRSDWNYNDSLRTVTVTAGGTYSETLYLNAWGEVIKKTDGEGNETTYEYDKAGKLIKTMTLIGRRLP

SEQ ID NO: 81855 - protein, 161 aa, Unknown
  Obtained from environmental sample
  DOMAIN (12)...(65): HTH domain
  misc_feature (1)..(161): Xaa is any amino acid
MKEKTISGLSSKARLLALLREKNGERASGSLLAKEMGVSRVAVWKTVQALVQAGYLIETGDNGYLLSPKNEKDFLYPWEFGEKENLFFHYLNTGSTMDRAREHALRGAAGGSVFTAEKQASGRGRSGRTWISRQGGLFFTMLERPRLAMGTFPRPSDHGGP

SEQ ID NO: 81856 - protein, 118 aa, Unknown
  Obtained from environmental sample
  misc_feature (1)..(118): Xaa is any amino acid
MIEGLVASGGAGSNAPLRASSGLSALKGVGQKRAEVLAETGHRTIADLLWGLPYRYIDRGSIKAVCDVAYNDPGSGGVVTLLGKIADIRQSTTRVQRMTLTEALLDDRTGAIRLGGST

SEQ ID NO: 81857 - protein, 84 aa, Unknown
  Obtained from environmental sample
  misc_feature (1)..(84): Xaa is any amino acid
MTTQLSPYRLSKARDVYNFFNVLNAVSWNLLVGIIITLFALRLDASSTYIGLMSAAFYIALFLLPLGKLLAKRFSIIGILAYTR

SEQ ID NO: 81858 - protein, 332 aa, Unknown
  Obtained from environmental sample
  DOMAIN (23)...(191): SecA DEAD-like domain
  misc_feature (1)..(332): Xaa is any amino acid
GEEPNPLIISGAAEDDTFKFAEVDRLLGSLKEVEKKQNGEYPDETQGEEVVGDYKINEKNKNISFSNHGLAVIEEILQKRGLIQGAIVDEGNFEYIHYFTQALKAHKLFHLDVDYVVQDGQVQIVDEFTGRILHGRRYSDGLHQAIEAKERIKIAQRNRTLATITFQNYFRLYTKISGMTGTADTEAAEFSKIYKLEVVVIPTNLPVARHDEDDVVYLNENDKYKALCDEIAESNKKGQPMLVGTVSIEKSEKISALLTRRGVRHEVLNAKNHAREALIIAEAGAKGSVTIATNMGGQGHGHQAGRQPRIPRQKTRPNPRDARNIRRHVHEK

SEQ ID NO: 81859 - protein, 249 aa, Unknown
  Obtained from environmental sample
  DOMAIN (4)...(60): DeoR-like helix-turn-helix domain
  misc_feature (1)..(249): Xaa is any amino acid
LSARGRGILDRLSTDGSVSVGALARDLGLSEVTIRGDFRVLEEKGWINRKWGGAAPALHRDILERQKVCQEQKNSIARAAAELVRDGDVIMIEAGTTTALIARYLSGKRDIHIVTNSTLVFSYARMFPNLQITMTGGEFRRSTESMVGPIALETLNRLNVRLAFVGTDGFTIERGMTTHLMEGAEIVRMMKAHAEITVLTADSGKFGRIGFSYVLPLSAMDLILTDWELSDVAETELREAGINIKKVKN

SEQ ID NO: 81860 - protein, 64 aa, Unknown
  Obtained from environmental sample
  DOMAIN (3)...(64): Biotin-requiring enzyme
  misc_feature (1)..(64): Xaa is any amino acid
MAHTLIMPRQANTVESCIITDWKVKEGDSVTPDTVICEVETDKAAFEVPCWSAGTVLKLLYAAG

SEQ ID NO: 81861 - protein, 60 aa, Unknown
  Obtained from environmental sample
  DOMAIN (3)...(57): FKBP-type peptidyl-prolyl cis-trans isomerase
  misc_feature (1)..(60): Xaa is any amino acid
VIGGGREDLPGLDEAIMGMSKGEKRLAIIPPELGYGNRDINNIIPANSYLIFELELVEIK

SEQ ID NO: 81862 - protein, 258 aa, Unknown
  Obtained from environmental sample
  DOMAIN (1)...(242): Pyridoxal-phosphate dependent enzyme
  misc_feature (1)..(258): Xaa is any amino acid
SGNTSISLAAVAAAKGYKFHAYLQDTASVENKQILYAFGATFENLYTNPRLLELTAENNGDAFGSMGPLIREAAEKLGAYTTNQVENPDNPKAHYTTTGPEIWEDTDGKVDFFISGAGTGGTLIGAGKYLREKNPNIKIIAYQPGINSRPFENQNFEQLEMHGVHPISGVPFVVPFLRTKDKIWDEVIDVESPTGYEAARAVAKHEGILVGESSGAAIHTAIQIAKRPENKGKRIVAMVPDSGTHYLTTGLFELPEIK

SEQ ID NO: 81863 - protein, 99 aa, Unknown
  Obtained from environmental sample
  misc_feature (1)..(99): Xaa is any amino acid
MDGPILTMAHIPGGTFTMGSPANEPGRWDNEGPQHQVTVSGFYMGKFLVTQAGYQAVMEGNPSRFKGDNLPVEQVSWHDAAAYCTGMYGIGTGIIPAVR

SEQ ID NO: 81864 - protein, 74 aa, Unknown
  Obtained from environmental sample
  misc_feature (1)..(74): Xaa is any amino acid
MDTDEQIPDTGTHNFNGEVRGHIEFDNVRFAYKNGEDVLKGLTFAVKPGEMTAIVGYTGAGKTTIVKFLPVLGF

SEQ ID NO: 81865 - protein, 295 aa, Unknown
  Obtained from environmental sample
  misc_feature (1)..(295): Xaa is any amino acid
MDKQLLDISGDMTVNNRVLGMNSDEDNSFQKKGEDGADVHSVVNLTVSTGPVVEFFYPDQKFPILRANADMGTKLRVTADTLTKQFSLTSDVKIRGGEMFYFERSFYIRSGLLVFRENENRFAPRLTARAETRDRNEDGPVTISMMVDNAPLMDFTARFESTPPLTQMEILALMGQNITGGQTDENPGSYQKELAVLNSTADILAQFTVGRLVERAVRNFFQLDMFSFRTQFVQNVILRGTGLMQQPVDRTGWVNYFDNTTLLGGKYIGPDLYVQGMLSMRYDATGKWRIAIYCP

SEQ ID NO: 81866 - protein, 51 aa, Unknown
  Obtained from environmental sample
  misc_feature (1)..(51): Xaa is any amino acid
MRLERIPARRNHCAQPILRRFGLEATVRPTIAFYNTAEEIDKLVSAIMEIA

SEQ ID NO: 81867 - protein, 308 aa, Unknown
  Obtained from environmental sample
  DOMAIN (7)...(185): ATPase family associated with various cellular activities (AAA)
  misc_feature (1)..(308): Xaa is any amino acid
VGNRDYEGLAQRIVTGNVPPTLKDFSIYSLDMGALVAGTKYRGDFEERIKKVVEEILKKEKAILFIDEIHTLVGAGSVSGSALDASNLLKPALTSGKLRCIGSTTHEDYTKIFEKDRALSRRFQKIDINEPSQEDAVKILSGLKIKYEDYHKVHYSDDAVEGAVRLSAQYITERRLPDKAIDVIDEAGSYARIEAYLKEEKEFAELFGKTTGEKVHTVQEGIVEKIEIGLPLIETVVSKIARIPERSVGGNEKDRLRLLEDRIKERIFGQDEAVKAVVKAVKRSRAGFRDDNQPVANFLFVGPTGVGK

SEQ ID NO: 81868 - protein, 130 aa, Unknown
  Obtained from environmental sample
  misc_feature (1)..(130): Xaa is any amino acid
MGKKNITYLAVLAALLTPAIVSCNSKEKLYIYNWTYYTPDSVVEKFESEYNCRVIYDEFASNEDMYAKLRANKGKRGGYDVVFPSKDYVPIMIRQGMLERLDHSKLSNLGNIDPEVLKKQVTIRTWNIPF

SEQ ID NO: 81869 - protein, 303 aa, Unknown
  Obtained from environmental sample
  DOMAIN (2)...(204): Phosphofructokinase
  misc_feature (1)..(303): Xaa is any amino acid
YRRERRLDIIGSGRTKIETPEQFASSLETAKNLNLNALVVIGGDDSNTNAALLAEYFVENGTPIQVIGCPKTIDGDLKNEYIETSFGFDTACKTYSELIGNIQRDAKSAKKYWHFIKLMGRSASHIALECALQTQPNICLISEEVEEKKMSLDQVVEDICASIAKRAENKENFGVVLIPEGLIEFIPEIKRLIEELNDVMALNEKEFSKFTSLIDQLYWLSHELTPESYKLLQSLPPEISRELLMGRDPHGNVQVSRIETEKLLIEMVEKRLAKLKEEGIYQGSFSALGHFFVTKAAALFLPT

SEQ ID NO: 81870 - protein, 139 aa, Unknown
  Obtained from environmental sample
  DOMAIN (36)...(129): FMN-binding domain
  misc_feature (1)..(139): Xaa is any amino acid
VENVTSADPSVSVSNAYAAKRGGTVIGMALKLSRASYAGPIVLLVGVSVDKRITGVKIMEHSDTPGLGANAASPSYFVDRAKGITFYGQFAGKSVDDPFTVKGDVVAITASTITSRAVTAAVKAAGQAAVEWFSAGGLK

SEQ ID NO: 81871 - protein, 144 aa, Unknown
  Obtained from environmental sample
  DOMAIN (2)...(58): DnaJ domain
  misc_feature (1)..(144): Xaa is any amino acid
VNYYELLNIERGADANEIKRAYFSAVKLHSPDSDPEGFKAIRIAYETLYDPKKRTEYDAYFVTSGDVQNDLLAARELIRENKYKQASEFLTELSGKNPDSTDVKRLLAEVLWYMKKRPDCRQNVRGDPEKNPRHELGRSDTWGG

SEQ ID NO: 81872 - protein, 180 aa, Unknown
  Obtained from environmental sample
  misc_feature (1)..(180): Xaa is any amino acid
SLKRNTTLPAVASNIYSTPRDYQTTVHISAYQGESPVPEENYLLNCFELSGIPKAKAGKEKINIRFEYDLNGILTVQAEIVSTGKSATVTVNTSQMGKNLDLSKWKDIPAARKYRQIINRAERLVKIHGDEASSNLNAAANELKKALVMDWDDAIIERLKNILANAIDDLEDDLEEENKE

SEQ ID NO: 81873 - protein, 230 aa, Unknown
  Obtained from environmental sample
  DOMAIN (48)...(219): ATPase family associated with various cellular activities (AAA)
  misc_feature (1)..(230): Xaa is any amino acid
MGDYMIEKLSIDFAADALEKVKREIAKVFIGQKELVDHAFITLLAGGHLLVEGVPGLGKTLLVRALAKALGGDSRRIQFTPDLMPSDITGNIMLDVQAGKFITRKGPVFTNILIADEINRAPAKTQAALFEAMQEFQVSLDGTEYPLPKPFMVLATENPFEHEGTYPLPDAQKDRFLMKLLIDYPVMEEEKEMVSRVLEGGTGAELSLEGVEAVLSSIEELSRFLGHQTG

SEQ ID NO: 81874 - protein, 203 aa, Unknown
  Obtained from environmental sample
  DOMAIN (1)...(203): Carbon starvation protein CstA
  misc_feature (1)..(203): Xaa is any amino acid
MSGIVILLISIVVLVVGYVTYGSWLAKKWGVNPDLKTPAHELKDGVDYMPAKAPVLLGHHFSSIAGAGPINGPIQAAVFGWVPVLLWVLIGGVFFGAVHDFGSLFASIRHKGQSIGAVIAENMGGRAKKLFIIFSYLTLLLVVAAFASIVAGTFNGFVVDKGVVTDVKIPNNATVATISVLFILIAIVFGYFVYRRNAPLWLS

SEQ ID NO: 81875 - protein, 319 aa, Unknown
  Obtained from environmental sample
  DOMAIN (5)...(133): Cytidylyltransferase
  misc_feature (1)..(319): Xaa is any amino acid
MKTIYLGLRGDIIHPGIINMIREAAARGDVLIGLLTDSAIASHKRLPYLTWEQRREVVENIKGVSRVVPQEEWSYIPNLKKYRPSAIIHGDDWNSGSLSKEREEVIALMNEMGGEVIEVPYTKGVDSSTLNEAMRSIGTTPDIRLKTLRRLIEIKKPVRIMEAHSGLSGLIVEQLEVEKEDGLHSFDGIWSSSLTDSTSKGKPDIEAVDLTTRLQDLTSILECTTKPIIFDGDTGGKPEHFVYTVRTLERNGISAVIIEDKVGLKKNSLFGTEVTQDLAPVADFCEKISAGKRAQVTKEFMIVARLESLMPVCCSPSSG

SEQ ID NO: 81876 - protein, 83 aa, Unknown
  Obtained from environmental sample
  DOMAIN (9)...(83): Response regulator receiver domain
  misc_feature (1)..(83): Xaa is any amino acid
MDLSIEKKLSILIVDDEKSNIDVLTHILKEKYKLYIAKNGEGALKIARDNLPNLILLDVIMPDMDGFEVWRTQKSRPSDHGPH

SEQ ID NO: 81877 - protein, 178 aa, Unknown
  Obtained from environmental sample
  misc_feature (1)..(178): Xaa is any amino acid
MSTGVIVFAIFLICFFALFANIENEENTETIENDYEESNIEEIFFNEVKNGKKKMKLLKIDNQLDLMFIKSLFQSVNIPYYVEFENMSSIRPGMYIGDLGNYNLVYILVDDYYDAIHVVKDYLERKKKHKEYNKYEDARNLAEITFGNWKVPSADNTNGIEIIYKNRPVILSNQEKIP

SEQ ID NO: 81878 - protein, 97 aa, Unknown
  Obtained from environmental sample
  misc_feature (1)..(97): Xaa is any amino acid
MIQLVAFLGNPGSEYAGNRHNAGWMLAQTLPFYASMRWQKKFKGLYAAINSAEIARFAEPRQDQSAQGSSFEKIHFLMPETYMNHSGGSVHGSASFF

SEQ ID NO: 81879 - protein, 295 aa, Unknown
  Obtained from environmental sample
  misc_feature (1)..(295): Xaa is any amino acid
MAEEKRLKEEEQKLIAEKERLKEEKRLREEQRLKEEERLREEERLREVQRLKEEELKLIAEEQKLKEEKERLKEAQRLKEEERQREEQRLKEEHQKIIAEEQKLKAEKERLTGKLRVITEVPQEEVVEEAPQEAPQEEVVEEAPQEAPQEKVAKEVPQEAPQEKVAEEAPQEAPKEEVAEEAPQEAPKEEVAEEAPQEAPKEKVAKEVPQEAPQEKVAEEAPQEAPQDKVAEEVPQKVPQKIVEEISKKDEQIIFDEPIKQKKKKGCFLYFIIIISLLAVIAYFAKTYYIDIYYD

SEQ ID NO: 81880 - protein, 325 aa, Unknown
  Obtained from environmental sample
  misc_feature (1)..(325): Xaa is any amino acid
ALAWIFREGYEYSGGDGKNAFSFLHPDEASFEITVSYAAPGQRTDNKAYASIEEMSRDVKAKLNSSGDIEFFEYRGKKASFLELAFSLPRDGRMSGWALCMELGQPNQTSAANASATKPLLLAMAYGPAGKQGLEAMHFSALDSIIPEEGDRLAPGPITEFAYPRETRIKAPVFALDCEAWIFEEDADAAQALIDREFLVLRRYQNSPRWKEAWIRFYRAVYRDSFERLTDIAFQVERKLNVPPRENRDFANQALKWVQSFNYERDLFGSDFINLVSSAIEGRGDCDNRAMLWAIILKQACIPSAIMVSRNYSHAMARPIYPGGP

SEQ ID NO: 81881 - protein, 214 aa, Unknown
  Obtained from environmental sample
  DOMAIN (2)...(210): Polysaccharide pyruvyl transferase
  misc_feature (1)..(214): Xaa is any amino acid
MKLLILGNHTCGNRGDSAILRGLLDAINILNPHAEVDVMSRYPVSSSWLLNRPVMGDPLFLQMKQHNSAAGVVGRVKKVLRRRYQHQVLLSRVTDTGKLRNIAIAQGFTDFVRLLSGYDAIIQVGGSFFVDLYGVPQFEHALCTFMANKPLFMIGHSVGPFQDEQFNQLANYVFGHCDALILRGSVSFDLMKRSNITTAKVDMASIPLGWSITT

SEQ ID NO: 81882 - protein, 52 aa, Unknown
  Obtained from environmental sample
  misc_feature (1)..(52): Xaa is any amino acid
GVEGYVAQLRQMFGTVTEFSNVNDVQILVEGRRLDYLGEGIWIGSPINRQSF

SEQ ID NO: 81883 - protein, 328 aa, Unknown
  Obtained from environmental sample
  misc_feature (1)..(328): Xaa is any amino acid
LPASGKQGYKKNIYATPATRDIASLIMMDSANIQARDALYLKNQAQKKGEKFDWTPLYTEQDAIAAIGQTIGVSYNRPMYIGDGVSFEFYDAGHILGSAIAEIKIKKGGEELNILATGDLGRKGKPIIRNPDVPETPPDYIILESTYGDRRHDSTDDALKKLAEIAKRTVQNKGKILIPSFAIERTQELVYYFHILTDEGIIPEVPIFVDSPMATNATTIFQVHPECYGEDIKKAFIKHHKNPFGFNSLHFTTSVDESKALNEHKGPLIIISADGMCEAGRIQHHLIHNIQDPNTTIMTVGYMAENTLGRRIRNRESGGLGRSDPCPG

SEQ ID NO: 81884 - protein, 337 aa, Unknown
  Obtained from environmental sample
  DOMAIN (4)...(336): Pyruvate formate lyase
  misc_feature (1)..(337): Xaa is any amino acid
VAFFKRESLKSFDFTCGAVFRFAQRHAGLVESLPKITANVQRREELLKIAEVCRRVPARAPRTFHEALQSYWFCHLGVITELNGWDAYCPGHLDQHLWPFYKKEIEAGTLTRESAKELLGCFFVKFNNHPAPPKVGVTAAESGTYTDFANINLAGLLADGSDGSNEVTLLLLEVIDEMQLLQPSNNIQISRKTPDNVFKAALNVIRKGYGFPSVFNADSVVEEQLRMGKTLEDARAGGCSGCVEVGAFGKEAYILTGYFNLPKVLELALHNGFDNRLGKQLGPMTGSTDSFETIDDVIEAFRQQLHHFIDVKISGNQIIEQLYAKSMPAPRPIYPRK

SEQ ID NO: 81885 - protein, 325 aa, Unknown
  Obtained from environmental sample
  DOMAIN (92)...(307): 7TM diverse intracellular signalling
  misc_feature (1)..(325): Xaa is any amino acid
VVGFFPVWGNWEIYFNGKLVRSELYPDETGRITKPRTWYNVYFPLDASLVLPGTNILSMRILGDPTYLGTGVFFQTAPVYMDDYRVIERRQFNFINMVLCAVFAFTGVYYLMLYLSIKKRTEIFNLFFGILSILLFIYIICRQEWIYTLIPNSDITIRMEYGSLMLAIPMLGIFFESLGMKKITKTSLGYLIFCSLLCLTQILFCNQYGEEIILIWDLTALVYFSYILVYYIIYFRSRGRHKENIREGDIGESSDMHIGGILIGMVLSYLCGNFDILDALFFRMSITLFTYSIFAVHIGMVFILSQRFSGMYKRLEQFHAMLKNK

SEQ ID NO: 81886 - protein, 256 aa, Unknown
  Obtained from environmental sample
  DOMAIN (23)...(184): tRNA synthetase class II core domain (G, H, P, S and T)
  misc_feature (1)..(256): Xaa is any amino acid
MAALIEPRILKGFRDFLPAAEMVRRNLTERIEATFRSFGFVPIDTPALEYADILLGKGGGETEKQIYRFTDNGGRDVALRFDLTVPFARFTALHQQEIAFPFKRYHIGKVWRGENTQRGRYREFTQCDFDIIGGDSPAADFEIILIIRNTLMNLGLSVDIKINHRGLFNRFLSHIGQLKNSVEILRAVDKISKVGMDETMKTLAAIAGEDNAHKIIEYTGVGKDEEEKNKLPRRYTEVHGGEDNFELTLGRFCQRG

SEQ ID NO: 81887 - protein, 322 aa, Unknown
  Obtained from environmental sample
  DOMAIN (68)...(148): tRNA synthetase B5 domain
  misc_feature (1)..(322): Xaa is any amino acid
MAEPRRGSVGDSELFVELTGLEQKAVTLAASIIACDLADFGFTVEPLEIEYKYDTPFGKKCVTPFYFQEPVFCSLRRIEKFLGVKLSAEECIAALSKMGVKAEKAFDAERGEEPGTKGEGIRAFPPEYRNDFLHAADVLEDVVIGRGLNTFKGERPSDFTVGRLTTLTHFSRRAKELMAGLGYQEMIYNYLGSGKNFVEKMRLDSSGIIRISNPMTENYEYVRNSILPSLLESESVSSHAVYPHRIFEIGKTVYGDEKEKYLSTTRQFLSFLLADREANFNTLAAQIQTLFYYLSREYQVEEKSDPRFHPGRCASLIYKAGP

SEQ ID NO: 81888 - protein, 102 aa, Unknown
  Obtained from environmental sample
  misc_feature (1)..(102): Xaa is any amino acid
MKNIKDKLILITGGASGIGQLMAFAFAEKHARVIVWDINESVMKTMEDEARAKNIFIRGMVCDVSDRNAVYSQAQKLTAEFGPLDILITMRGILGRICPWGD

SEQ ID NO: 81889 - protein, 252 aa, Unknown
  Obtained from environmental sample
  misc_feature (1)..(252): Xaa is any amino acid
VLRGQASAAEKGLSITRRDLTSGVYLLSVKGSDGNAFASRVTHRGGSMYISVSFSSENNSTSKTLAKESAALGVGDWAVTVSASGYIDSAYNFEPVKGRSNAKHTITLKTPTATPKADLRETVAGVSFDMVYIPGGEFTIGCEAANSSDCPSDATPVPGVKVSNYFIGKTEVTIGLYKAVMGVTPSDCYGSSSGSCTCIDWYDAIEFTCKLSQLTGRRYRMTTEAECEYAAQKHKDKLEKIGTGEEWAYNSW

SEQ ID NO: 81890 - protein, 136 aa, Unknown
  Obtained from environmental sample
  misc_feature (1)..(136): Xaa is any amino acid
MHQSIPKKILDFCLEAGADFAEIYEEETRKSRLTLKDNAMEDASASIIYGIGIRMLYGTEVLYGFTSDDSEEALMNIAKNLSLSKNKKGEANFHLAKKKICVIYKREFQRPRQLWQHIKKIFVCGNSSGRIDSKLC

SEQ ID NO: 81891 - protein, 311 aa, Unknown
  Obtained from environmental sample
  DOMAIN (103)...(311): Na+-transporting methylmalonyl-CoA/oxaloacetate decarboxylase, beta subunit
  misc_feature (1)..(311): Xaa is any amino acid
MFDRKVDPIWVLKGCMILLVAAFLFNFIGAAFSPRPAAQTAASNDELPSFRNMGGIIPNSSNLPRITLGNFLMNIAKTTGIYAFITDVIQGETPAGQKITVFGWHELIMVLVGFLVIYLGAAKGFEPLLLVPIGFGIVFANIPLANMGDPGIWNEELHLFEHQGFLSVIYNSGVGNEFFPLIIFIGIGAMTDFGPLIANPKTALLGAAAQFGVFATMFFISVANFLPGVAFNLKEACAVAIIGGADGPTTIYIAAKLAPHLLATVAVAAYSYMALVPLIQPPIMRALTTKQERLIRMRQLRPVSANLIQGG

SEQ ID NO: 81892 - protein, 77 aa, Unknown
  Obtained from environmental sample
  misc_feature (1)..(77): Xaa is any amino acid
MIDIVGQMRSVNKKIPILVHANAGLPQNVDGKVVFPETPEDMANFAPRLAAAGANIIGGCCGTTPAHIKALKEALKK

SEQ ID NO: 81893 - protein, 307 aa, Unknown
  Obtained from environmental sample
  misc_feature (1)..(307): Xaa is any amino acid
MTFSLTNPDNPENNISEISNQQIRGRGNTTWFAPKKPYRIRFRNDQQQAPFGLPAARNWVLLANYYDRSLMHSAFAFELGKRLGLEYTCSYDYVELYLNGKYQGIYILTEHMQVDQAKIGAPGRPKVDLNEGWFVEIDFHYDEEPRFRTVKYNLPVMIKSPEFTPADINNLLYNFVRSDLNKLTNLMFSEDFPENGYRDLIEIDSFIKYFMVQVITNNLDFNIHTFDSRTEPGSILLYKDKGAKISAGPLWDFDRTFGDNPEVTANSYPYPNFPFFKRFFEDPVFLCRWKEIWNIIMMIYYQCVTSL

SEQ ID NO: 81894 - protein, 172 aa, Unknown
  Obtained from environmental sample
  misc_feature (1)..(172): Xaa is any amino acid
MKLYSRGQVLFFSFLSAVIVLLFAVGFGFIKPLLPKSNIDSTVLREQEAPTDEFKLLQSEYRILNTADNVQFSDGERENIDIYEKLNSAVVNITTETMAINWFLEPVPQEGSSGSGSIIDRRGYVLTNNHVIQNAHKVFINLADGSQFEGTVIGVDSESDLAVLKFEPPAGM

SEQ ID NO: 81895 - protein, 66 aa, Unknown
  Obtained from environmental sample
  DOMAIN (25)...(58): Tetratricopeptide repeat
  misc_feature (1)..(66): Xaa is any amino acid
LQKGGDVRGAEKEYLKVIEENDDNAEAHYQLGELYALGGDVTRARAEWRRAIRIDPAHGLARSRLN

SEQ ID NO: 81896 - protein, 97 aa, Unknown
  Obtained from environmental sample
  misc_feature (1)..(97): Xaa is any amino acid
LALGKSTAEISRFLGTVLNPDLEKTVRKDYPTPSNTIKKIMADFTTLKLAGCISGEGGNAGDEIWEITQHGKDIFEVYRITQLEKAMEKKADEETNS

SEQ ID NO: 81897 - protein, 54 aa, Unknown
  Obtained from environmental sample
  misc_feature (1)..(54): Xaa is any amino acid
ASEIILRGAGKVSSSVSSKTDYVLAGSDPGSKLDKALSLGVRVINEDEFDGMMS

SEQ ID NO: 81898 - protein, 236 aa, Unknown
  Obtained from environmental sample
  DOMAIN (72)...(230): Leucyl/phenylalanyl-tRNA protein transferase
  misc_feature (1)..(236): Xaa is any amino acid
MYPLRYLPTGHIFIDPTDDCDLVVDAMLETDYSEEFCIAKDFDEAFICRLMAAGFLVMSMELKDDDSGEENKNEETEPFYILLPKLHLIRSALFFPDLHIKKSIRRFLSQYELRTDTDFDFILDKCIQVHGSDWLTPPLVEILKGIHRDSADAKPVSFAVYREGELKAGEIGVVVGRVYTSYSGYYEEDNAGTVQMILMTRWLEKSGFAFLDLGMPLDYKIGLGAKDISPDGLWSC

SEQ ID NO: 81899 - protein, 262 aa, Unknown
  Obtained from environmental sample
  misc_feature (1)..(262): Xaa is any amino acid
MLKYHYSPQGQQLSEFTLNWLHGTGSPSAVTSRDAHLMAEMYRQLELEWDVYTPGDRYLTSVPFYFHGFFTVLGLNVLTGNHHAPMNMKRSANMKVYLDVHQTYAFEEHTVTYTIHYRSYGAEEAKGVRIVNRLRSDFDFISGTGSPSYDVASNTVSWNIGSVPGFKTSTGINSTNGSVTLKVTISKANLKRYCNNVDITCTNGIAWTSNEYPNMISSVMKRTGVDIARRALRLNHPVYSDTVNPGMDAVYTIDFQNILQVV

SEQ ID NO: 81900 - protein, 122 aa, Unknown
  Obtained from environmental sample
  DOMAIN (1)...(99): Phosphate acetyl/butaryl transferase
  misc_feature (1)..(122): Xaa is any amino acid
MSFSTKGSPEHDNVSKVHAAVKILKDRNVKFVFDGQLQADAALVPSVTDQKAPGSPVKGKVNTLVFPDLGAGNIGYKLVQRLGNAQAFGPLLQGIRETHKRSFPRRFGRRHCNTLPGYIIKG

SEQ ID NO: 81901 - protein, 189 aa, Unknown
  Obtained from environmental sample
  DOMAIN (113)...(187): NAD-dependent DNA ligase OB-fold domain
  misc_feature (1)..(189): Xaa is any amino acid
MRRKDGCGCEDLKVITYDSSTSSATSVNDEGYFQDEVKNIEWLAKPGFEIVVTKICKDADAVISYRGKVAKTRDSLPFDIDGLVIKDIVIDMAHLHRARPEKHIAFKFDLETAFIVLTTVEWSESGATYTPIGILDPVTLAGTTEHRAYLNNPGMIRSLGLSIGSAVSVVKRVDNIPKHEGLLPRRHDR

SEQ ID NO: 81902 - protein, 344 aa, Unknown
  Obtained from environmental sample
  DOMAIN (1)...(344): TraG/TraD family
  misc_feature (1)..(344): Xaa is any amino acid
SIPTCLDYPHSLITIDPKGENFNITAGYAVKFSHILRLSPVSNDTLRFNILDEISLESAYRDASMIADILTSPADGKVDGSSRHWVDTAKDLLTGVILHIKCSNLRDKSLYGCLDFLSQADKGEDKGTALLDGMINSVHCEGKIHEIIANVARRNKSRPDDERGSVFSTAVTALQVFEDPMVRNCSSTSDFCLNDFKVFDNPLSLYITVPFPDLDRLSPFIRIIVTFILRKFSQDEVQFGEQKLKHPILFLIDEFPTLGTFTTLETMMGILAGYGITFYLICQSPSQIYKLYGEHTAIFDHCKFMMTYAMSDPKGAEMFSKMTGVESVTFTNVQKRTRHKPGKN

SEQ ID NO: 81903 - protein, 216 aa, Unknown
  Obtained from environmental sample
  DOMAIN (26)...(206): HMGL-like
  misc_feature (1)..(216): Xaa is any amino acid
VGGQEQSNLTPLPEAPPLEILDTTLRDGAQGEGITFSVQDKLAVVRALDDLGISWIEAGNPGSNPKDMEFFRLAENLKLEHAKLCAFGSTRKKGVKAGEDPGVLSLLDARTQAVVIFGKSWDFHVTEVLRVSHEENLAMIAETITFLKEKGRRVFYDAQHFFDCWKANPEYAPTTLKTAMEAGGERIICATQTAHISRPIKKALKSPKNVRENGRS

SEQ ID NO: 81904 - protein, 119 aa, Unknown
  Obtained from environmental sample
  DOMAIN (6)...(119): Endoribonuclease L-PSP
  misc_feature (1)..(119): Xaa is any amino acid
GFPGYRSGAWAYSQAFVSGNLVFTSGQIPLSAQDGQVTGSSITEQTEQVIKNLEAVLKAAGSSLAKALKTTCFLADMGDFAAFNEVYAKYFTGKPARSTVAVKQLPKSVLVEIEAVAEI

SEQ ID NO: 81905 - protein, 299 aa, Unknown
  Obtained from environmental sample
  DOMAIN (219)...(291): Helicase conserved C-terminal domain
  misc_feature (1)..(299): Xaa is any amino acid
VTQPRRIAAVSVSEFIARQMETPLGGLVGYKMRFEDRTSLQTKIKILTDGMLLQELKLDPWLSKYGVIVIDEAHERSLNIDFTLGLLKRVLESRRDFKVIISSATINAQVFCDYFGGCPVVKIDAQRFPVTLIYDAPMVGQEEYSPRSFTEFHGRKDKKQIEAPANGSVDGADTAAEALLMKIEKIVTRFIAEKREGDILVFLSGEKAIKDCMNRLSLCRAGNKLHLIPLYGRLGKEEQERVFDPAPKGKTKVVLSTNIAETSVTIEGITAVIDPGLSKLNWYNPNTYTSQPVEAPISQ

SEQ ID NO: 81906 - protein, 310 aa, Unknown
  Obtained from environmental sample
  DOMAIN (263)...(309): His Kinase A (phosphoacceptor) domain
  misc_feature (1)..(310): Xaa is any amino acid
MNPHDPIIKALADTELELYEEHFENKVVFWVSDVDKVFYTTGSAPYIINPDDPASYWYNLTLYETEKFNFNINYNPDLDQINLWVNVPVFAEAHDNKHPIGMLGIGINLTDFSNFVASSYREFDENITPYMFNKYNEITSAVDYNLVENKVHLEELLGETGKELIRVARGLSDGESRSFIYNKKIYLVNSIPSMEWYLAVSYPLPGFLALNKAMNTVFFSMLFLIFLMFIVINFHVAHSENAMAKQNLQLFEAHRKAEFASQAKSDFLAKMSHEIRTPMNAITGMADLLLRSSISGDAREHAQDIKQGGK

SEQ ID NO: 81907 - protein, 126 aa, Unknown
  Obtained from environmental sample
  misc_feature (1)..(126): Xaa is any amino acid
MLLSVDIGTTSLKAAFIDLDGKLKAFSRFAYPMGSAAAVWEKAFALVLEYLHTQNPNDKIEGICVSGNGPTLVPVSRDGDVFTPLYWFESTKKTSAKSLFLPHGGSLKEKVPYLYENAAQIFSSHE

SEQ ID NO: 81908 - protein, 328 aa, Unknown
  Obtained from environmental sample
  misc_feature (1)..(328): Xaa is any amino acid
MATARHEFLREVRREVLSKYDIMTVGETGGVTVDQAIQYAESGGGELDMVFQFEQVELDGGESFKWNDRKINLVELKEVFSRWQTRLHGRAWNSLYWCNHDQPRIVSRLGDEGAYREKSAKMLACCLHFMQGTPYIYQGEELGMNNAPFTDIGDYRDLESINAYNTLVIQEKRIAKADMLRYMRLKSRDTSRTPMHWNNGPNAGFSTGTPWIMVNPNFKQINAEEQTRRAGSVYSFYKALIQLRKKMDIITLGSFELLLPDDPDLFVYTRRYRREELLIVCNFSPEERAVTPPERFNDAELLLSNEEAAALKALDCKSLGPFAGRGIL

SEQ ID NO: 81909 - protein, 102 aa, Unknown
  Obtained from environmental sample
  misc_feature (1)..(102): Xaa is any amino acid
MKVILVNGSPNANGCTFTGLSIIKEQLAKHGVDSEIFQVGKKPIIGCTACRTCKQPGKTGICVYNDDMVNTVGQAFRGADGVIIRFPCAFLLRLSGAANLIF

SEQ ID NO: 81910 - protein, 67 aa, Unknown
  Obtained from environmental sample
  DOMAIN (18)...(64): LysM domain
  misc_feature (1)..(67): Xaa is any amino acid
GFTNDQIGRDYSREGVNYRIRWGDTLWDIAEAFYRNPWLYPRIATYNNIRNPNLIISGRTIRIPPRN

SEQ ID NO: 81911 - protein, 334 aa, Unknown
  Obtained from environmental sample
  DOMAIN (1)...(191): Glutamine synthetase, catalytic domain
  misc_feature (1)..(334): Xaa is any amino acid
MAQGPGPHELAPIFSTTNIATDHNQLTMELMKSIANKHGLACLLHEKPFAGVNGSGKHNNWSISTDTGVNLLEPGDTPNDNAQFLLFLVAVIKAVDEYQDLLRVSVASAANDHRLGANEAPPAIVSIFLGEELTEIIEAIESGKGYKNKEKHSMEIGVSVLPHFPKDTTDRNRTSPFAFTGNKFEFRMVGSAFSIGGPNIVLNTIIAESLRQFADVLEKSKNFKADIAPLVKKTISEHKRIIFNGNNYAEEWVVEAEKRGLSNLKTTVEALPEFVSKKSVELFTKHHVFTKTEIHSRYEILMEAYCKNINIEALTMVDMVKRDIIPACVDYQEI

SEQ ID NO: 81912 - protein, 207 aa, Unknown
  Obtained from environmental sample
  DOMAIN (1)...(185): Amino acid kinase family
  misc_feature (1)..(207): Xaa is any amino acid
VSERFGRAYRTFPGSGFRQAFYFVVAGGGPARHWINAYREINAQSKDEEADWIGIMATRLNAQLVKAAMGELCVQDVVTNPGHVDPLTGRVLVAAGWKPGFSTDYDAVLLAERFQADAVINLSNIEKVYTADPKADPNARPIDKISWADFRAMVGDDWVPGKNVPFDPVASRHSEKIGLKVICASGKNLDNLKNILSGNEFIGTVIY

SEQ ID NO: 81913 - protein, 241 aa, Unknown
  Obtained from environmental sample
  misc_feature (1)..(241): Xaa is any amino acid
MSVMAYAPYGAGGIIIRVEADIRRGIPGIDITGLAEGAVREARERVRAAFRNSGFRFPLDRILINLAPAGLKKDGAALDLPIALAVMAAAELAPVPPNLLVMGELELSGRIRPVRGVLAAMAAGREEGISEFIVPAENGREAAILPDMRFTAASTLKEAVDALFIREETGALPLISPPPCDAPDAAETAGDFADVRGQTVYKRALELPPPEATICWFLVRPAREKPCLRGGCLHNGAAQPG

SEQ ID NO: 81914 - protein, 148 aa, Unknown
  Obtained from environmental sample
  DOMAIN (8)...(141): Ribosomal protein L3
  misc_feature (1)..(148): Xaa is any amino acid
MLGLLARKVGMTQVFDDAGNLTPVTVMRIDPNIVIAHKTKEKDGYNAVVVGIDDEKKNRVTKPYAGQFPENVTPKKRIQELRDFEKEVAVGDSLGLEVLEGIRYVDVSGVSKGKGFHGVVKRYGFGGGRKTHGFKFPPRARFYRPVNL

SEQ ID NO: 81915 - protein, 94 aa, Unknown
  Obtained from environmental sample
  misc_feature (1)..(94): Xaa is any amino acid
MLFIRGSLAVSNFRLSQFPVKGINAEYLHIAETARDLSPEEHKKLEILLEYGTPTNSQLSTLNSQLIVAPRAGTISPWESKTTDIVHICGILCP

SEQ ID NO: 81916 - protein, 271 aa, Unknown
  Obtained from environmental sample
  misc_feature (1)..(271): Xaa is any amino acid
VLGFFRIWASSHRDYSASLGRYIPYTPITNSDLKKLGFDKGRIRWISIPHIPTSELLNAMRANQINEADIPAATKKIFSKALDQVGSEELWVFKKKIKGEKDIDALGLHPSARSYLFSAWRNRLFLEYAKGKFFPTWSYRDSRGYNSLSKEEKENLEQLLQKRMARSEKIWEAQGKKLLSVLVESSPMLPCAEDLGAVPNCVPKVLTKLKIFGLRVVRWHREWDKPNQPYIPFEDYPDLSVCTAAVHDSSTLREWSERERNNSHSPALSAF

SEQ ID NO: 81917 - protein, 164 aa, Unknown
  Obtained from environmental sample
  DOMAIN (1)...(155): YicC-like family, N-terminal region
  misc_feature (1)..(164): Xaa is any amino acid
MTSMTGFAYREWANENISISVEIKGYNNRFLEILVNTPPWLPQLEQRVRGIISGLCGRGKVEVGIRVRETNTPMTVSVNENAAKAYLQAISGLASSLDLDEQLSLATLVNMEGVLDIEKNRNDERYWTLNEPVLTEAARLFHAERIREGKHTEEDILHFINRLE

SEQ ID NO: 81918 - protein, 330 aa, Unknown
  Obtained from environmental sample
  misc_feature (1)..(330): Xaa is any amino acid
GAPIDRSAEFNEPYETGTVVRIINRLKLPDNTYRVVLQCEYRGTIVSLYPHNDFSVVRVEPIKATGLSEPLNPDDLALIRSIQKSFTQYADYSKKINNDTLSAVERTENPERLANLICNSAYLKSEKKIELLRYTDTRERLLAILETLEKENEIFGIQKNITGKVRSRMDKRHREYVLTEQLREINKELGKDKIEDEYALLEQRIAGKKPPAEITEKTAKEIKRLKKLQTLSPEAGVLRGYLEWIADLPWSNFSVDSGDLNKAEKILDEDHFGMKKAKDRILEFIAVRQLLNNERPIVSEELPAQILLKTGDSLTNDQRRGSSSSLKDHS

SEQ ID NO: 81919 - protein, 178 aa, Unknown
  Obtained from environmental sample
  DOMAIN (62)...(148): Ribosomal protein L9, C-terminal domain
  misc_feature (1)..(178): Xaa is any amino acid
MKVILNKDLAPLGEEGDVKDVAKGYARNYLFPRGIALPYNERTIKLFESRKEEIEARKVQKRSDASGLKERLESLSIEITMSAGPNGKLYGAVTNQTIVDELAKHGFQIERKRVEIPGTHIKNVGKYKATVRLYESASAEISINVIGQEIKTETVQKRAPSKPSENAVGQSVMPKKKK

SEQ ID NO: 81920 - protein, 129 aa, Unknown
  Obtained from environmental sample
  misc_feature (1)..(129): Xaa is any amino acid
VKGLSLVLHSAVTIMTPILLAATGGLFTELAGFLNIALEGLLLAGAFSAIAAAYYTGSFAAALVASILASLLLSALMAFSTLKLRSNVFIAGLAVNLLAAGLTVILSHYFLRRKEYHFQSRPIYHVGGG

SEQ ID NO: 81921 - protein, 311 aa, Unknown
  Obtained from environmental sample
  DOMAIN (2)...(148): AIR synthase related protein, C-terminal domain
  misc_feature (1)..(311): Xaa is any amino acid
MLIGLGGGAASSMATGSGGEDLDFASVQRGNPEMQRRCQEVIDRCWALEEKNPIAFIHDVGAGGLSNALPELVKDAGFGGKFRLRDIPSEEKGMSPLEIWCNEAQERYVIAISKESLPTFKELCERERCPYAIAGEAIAEQNLILSDDHFKNNPIDIPIELLLGNPPKMLRRDKTIDNGQLTMDNNYQLSIINYQLKEVAERVLSHPAVADKGFLITIGDRSVTGMVVREQMVGAWQVPVADCAVTTSSLDSTMGEAFSIGERTPLALLNSAAAARMAVAEAITNIAAAKISHIQKYAFLRTGSRPNLTMG

SEQ ID NO: 81922 - protein, 173 aa, Unknown
  Obtained from environmental sample
  misc_feature (1)..(173): Xaa is any amino acid
MPLLVKNVRLVDPAQNLDAQGALLVVDGLVAAVGDVTDGQVPPGTETLDGGGKLLCPGLIDLHVHFRDPGQTAKETIQTGCQAAVAGGFTSVCAMANTKPVNDSVAITELMLAKAAKANLCRYFPLGALTRGMVGEELADYGTLKDAGCIAISDDGRPVMNAPVLQKAWSTQM

SEQ ID NO: 81923 - protein, 179 aa, Unknown
  Obtained from environmental sample
  misc_feature (1)..(179): Xaa is any amino acid
MKVWLKLLIGSILGVIIGLHLPADNQTIGRNIAWLGDLAIRLGRYCLVPMLVFSLIIAVYELRQDGQFWTLVLKTFLVIVFTSAFIISAGILATLFFPPARIPILVEEQAEAISLNTAGGILNIFPSNMFTAVFGNGISLLPILVFAFFLGMGLSYDRNYTKPVPGDRDSLQEIGHKQR

SEQ ID NO: 81924 - protein, 180 aa, Unknown
  Obtained from environmental sample
  misc_feature (1)..(180): Xaa is any amino acid
GFSPQGIDPVEDAVHYVTQTLDIPATQGYSPSPHCSLLSPTLWALAHSSFEVVSLWYVIEHFRDCVPALSEIKKLLKTGGVLACATPSFAGISGRSSLKRFLENSPQDHWTVWSPAVCRKALGKAGFKVKKIVGSGHHPERFPFLGKFAHNKKSLLYRLLMAASRIFALGDTIEVYAVKN

SEQ ID NO: 81925 - protein, 183 aa, Unknown
  Obtained from environmental sample
  DOMAIN (29)...(102): MazG nucleotide pyrophosphohydrolase domain
  misc_feature (1)..(183): Xaa is any amino acid
MNESESFKALYDTVVKLRGPGGCPWDQEQTPSSLRGALVEETYECLEAIAENNPDHVAEELGDLFLLATMIGYMHEQEGKFTVSDSLKKITDKLIRRHPHVFADVKVKDSAQVLENWAAIKVNQEARKPKDSVLDEGSGGLPPMNRAFKLQKKAAKVGFDWADAQGVFSKNKRRTAGSKPSPK

SEQ ID NO: 81926 - protein, 166 aa, Unknown
  Obtained from environmental sample
  DOMAIN (1)...(80): Carbamoyl-phosphate synthase L chain, ATP binding domain
  misc_feature (1)..(166): Xaa is any amino acid
VQLALHPNSFDYAVIEVNPRVSRSSALASKATGYPIAKVSTKIALGYTLDEITNAVTGTTFAAFEPTLDYVAVKFPKWPFDKFVYAQKELGTQMKATGEVMAIADTFEEALLKAVRGAEIGLSSLNLPRLAAKSDDEIRAMLKTVTDERCSSQRDSANLYMVWKRG

SEQ ID NO: 81927 - protein, 344 aa, Unknown
  Obtained from environmental sample
  misc_feature (1)..(344): Xaa is any amino acid
ELNGISITPNGNDSGSVTLTAFINEGQGVFKWDISYPTGVPARMTVTPIDASGTPEQTMSFTSGTGSLTLNSGYYRVTLNLFNNSSSSSNTSMRSVERRELLHIYQNMESPFTYTFTVDHFTYLIVTSDADSGLGTLRYAIDVARANNTIIIDPEVKTIALRSGLSIDKNLTIEGNGVTITRSSSWTSGYDNRLLRVNYSEVNINRVWFKNGITTDNGAAVYSYYGNVTLESCIFSGNQSNNGGAIYNYSGIMDIKGCTFLGNRSDNYGGAVYIDGGTLTLTGNLFYGNTASSYPLIYRNYGSISSTGYNVVDVVLGESSSLSGWYPNDGDKTVNISADLISGK

SEQ ID NO: 81928 - protein, 304 aa, Unknown
  Obtained from environmental sample
  DOMAIN (8)...(41): Tetratricopeptide repeat
  misc_feature (1)..(304): Xaa is any amino acid
LARNPKDVDALNNAAVISRRLGNYQRALDYLKEAIELDPGKAEFHYNLGNIHKEMGNLKAASQAYSKVIELDPNYVLAYNNLGIIYDQLKDYEKAFVIFRKGLALDQNNPILHFNYGIALETNGRLDDAANEYNAAIRSKPGWLEPMNKLGMVLFAQSQHDKALSTFNRVLHADPSNVEARNNMGIVLSEQGRTQEAIKNFRMAIETDPKYTQAMVNLGQVLEASGDYADAVVEMERIIQISPDNAKIRNRLSSPLLKLERYPESPAQAEEAALAGEWGTSRALKDPKARIMARLWENDKETPG

SEQ ID NO: 81929 - protein, 316 aa, Unknown
  Obtained from environmental sample
  misc_feature (1)..(316): Xaa is any amino acid
ALCLATLQKDSRALQYVPEALKTEAICLDAVQNNYHVLQYVPEAQKTVAICFAAVQQDGNALRYVPDTLKTEALCIEAMRHSRSSFNNFGHMGPSYYTHPLQLVPEELKTEAVCFAAVLKDCRALKFVPESLKTEAFYIAVMQQDGCALEYVPEDQKTEAMCLTAVQQNGYRLDCVPEALKTEAVCIAAVRQFSYAIQYVPKDKIDAVKAAQYFMSGSGGSGYGIGLIGNIRAVISSGSGISGYGIELISGKDTASSKEQAEEFLFELVRKDGSMLQFFPEEWKTEAICLAAVQRLGWRSIVPDLGRCCPWGGFLG

SEQ ID NO: 81930 - protein, 74 aa, Unknown
  Obtained from environmental sample
  misc_feature (1)..(74): Xaa is any amino acid
VYRKYSTDFRRLGQMDNIANPAIMIQRVNDMKAAGIDVEFYLYPYVGHGFGLGTGTTAEGWLNNAVRFWKKHIK

SEQ ID NO: 81931 - protein, 276 aa, Unknown
  Obtained from environmental sample
  DOMAIN (61)...(237): D-isomer specific 2-hydroxyacid dehydrogenase, NAD binding domain
  misc_feature (1)..(276): Xaa is any amino acid
VCAALDSLGVQVFAWHGATAQEYHDHQVKALEFCPDIIIDDGSDLVTLLHDEKPEYAKNLLGGCEETTTGIHRLRARSEAGKLKFPMFAVNDAKCKYLFDNYHGTGQTAWEAILYATNNMLSGRTVVIAGYGHCSSGIAARAKGLGANVIITEIDPFKALKALMDGFRVMPMMEAAKLGDVFVTATSCNKVITTEHFMVMKNNVLLANAGHFDVEVDKAALEKICVKKENRKPFIDGYHMSDGRILNLLAEAAWSHRGGQRAPCGHHGLELRDSAA

SEQ ID NO: 81932 - protein, 286 aa, Unknown
  Obtained from environmental sample
  misc_feature (1)..(286): Xaa is any amino acid
VASLNDIAKKNKSNIWDAISRLNQARQGGQQQLFQDKKAGNALEEFMELIETQRAEITERKGAPGQPWLLSEKTRGLIEAVDYYSYLVAEHANDEKKAKWKFANMEYFIKMIENWERDPDTENPGLYPWLNRISLITKDDGETDTLGKVSLMTIHSAKGLEFPVVFIAGAEEGLIPHEKSVNPDNSANGDNGGDGENENEAGSVEEERRLFYVAITRAREKLYISSCKKRSRRSHGDPQSDDECKPSPFLEEIPGHLIQAAQPMSKEAGEGMADDIMKDIKGPPAK

SEQ ID NO: 81933 - protein, 308 aa, Unknown
  Obtained from environmental sample
  DOMAIN (47)...(190): GAF domain
  misc_feature (1)..(308): Xaa is any amino acid
FRAAQRGHRAESERNTQKALKALERREKMSDTLNKVSVMFLSQREDTFEETMTAGVREIADLFDLDRLSIWRNLKRPDAMHASQIYRWDRNAGGTTVPTAGLEDVAYTKLAPRWETLFAKGEIINSPINLLPEAAMLRSFGVVSAFIAPIFFNNDLWGFALLEDRHKERFFEKDCAEMMLSAVLLCANTVMRADMEREIINANEFTRAVIDASPLGFNIFDENARIIECNDVILKIFGTTKEYYLEHFYEFSPEYQNDGAKSEDKAVEVVRRALNGENLVLEWTNCTSKGEPVSFEITLVRVMHRGSL

SEQ ID NO: 81934 - protein, 121 aa, Unknown
  Obtained from environmental sample
  DOMAIN (28)...(120): Nucleotidyltransferase domain
  misc_feature (1)..(121): Xaa is any amino acid
EFEANSSLSKKKEIFAWLLTLKRNGKRPKQYVDDVRRAMPVDKAVLFGSYAKGTADKLSDVDICFFLDNYGGKQRPDIIGELLRLTSGHKAFFEPIAFPTSEIYNDNPFVKEILRTGREIS

SEQ ID NO: 81935 - protein, 214 aa, Unknown
  Obtained from environmental sample
  DOMAIN (33)...(113): Mur ligase family, catalytic domain
  misc_feature (1)..(214): Xaa is any amino acid
MRINDNKTPLTLGDLIDWSAGKSDLSETVRKRKVATVWNDSRKVTSGGGDVFIALRSDTDDGHRYVEPAFKSGAISAIVDKKGVGAVPEKYRKKCIVVGDTLKSIQKAAARYRKEMGLLVVGITGSNGKTTTRSFISAVLGSAVKVGETYTNWNNHIGVPQSILRFDGDEWAGVLEIGANHVGEIGPLTKICRPDIAVITNIGYAHVSADSDLG

SEQ ID NO: 81936 - protein, 307 aa, Unknown
  Obtained from environmental sample
  DOMAIN (29)...(194): GAF domain
  misc_feature (1)..(307): Xaa is any amino acid
MGPYSFLTPRKVNIESIIEIDSELNEMQDLDLLLERILFEARKVVHADAGSIYIKQIVEEDGNKIEKLFIKYSQNETLQKELPPGQKLLYSVFSLLVNDKTLSGYCALTKQLVNIEDAYNLPPGVPYSFGKSYDQITGYKTTSSLSVPLKNADGRLLGVIQIINSKDKKGNIVPFTKEDESIITHFAVNATMALQKAQLIRTMILRMIRMAELRDPKETGTHVNRVAGYAVEIYDRWASRNGVSEEERNKFKDSFRIASMLHDAGKVAIPDVILKKPAKFTPGEYQVMQNHTEYGFAAFDDPQSPLD

SEQ ID NO: 81937 - protein, 280 aa, Unknown
  Obtained from environmental sample
  misc_feature (1)..(280): Xaa is any amino acid
MAQALAHGLPGGLQYLSDIFKLSGDKAKDPEGRSLVNLFCSPRDGKRATRSSHPDEWEKFKEYCRRDVEAERALYYKLPAWNCNQSERAIFNLDYEINSRGFMVDVALAEAAVAIVKKEKQSRDNKVFELSGGRVTAGTQRDKMLEHILKEYGVTLPDMTESTLTRRLEDPDLPQAVKELIALRLASAGTSARKYQALLDSVSSDRRLRGTLQYCGASRTGRWTGRIFQPQNLPRPSFGNDEIEAGIKAIKAKSAEYIYDDVTAMASSALRGVIVAPEGQ

SEQ ID NO: 81938 - protein, 217 aa, Unknown
  Obtained from environmental sample
  misc_feature (1)..(217): Xaa is any amino acid
LTLPLTLTEVRGFSPRTIYERARLRALSSKNEFDFKDFKDFDFYSKQCIFYPHTALKGDPMLRPMILDCLKGYNRKQLLTDLTAGLIVGILTIPLSIAFAIASGVSPEKGLVTAFIGGFVLSLLGGSRVQICGPTGAFVIILFGIVQKYGVDGLATATLMAGIILAVMGVSGLGSVIKFIPYPVTVGFTSGIAVIIFTSQISDCSGSIKTRRRITGV

SEQ ID NO: 81939 - protein, 319 aa, Unknown
  Obtained from environmental sample
  misc_feature (1)..(319): Xaa is any amino acid
DTIKTANFPVLASIVALRFEEGTPSQAEIYFINLAGIVQNKFAIPYFDVFDPRFLDFAVPVAVRGTISFKITDYKAFIKLHRLINFDLETFKSQILDAVKKYIKSVVTNIPSENGIPVIQLERKILQINEIIEAFLKPRLQNDFGVLVSALDIGAIEADKESEGYRSLMSVTKDISAQTTQTQAVVSIKNMTDMQQINAGNMEASLAIQREEMQHAQRMQTDAANFALHQLNQQTDVAKAGATALGQMGAGNAMNMGAGSGMNPAAMMTGMAMGGVMGQQMANMMGGMVQGINQPPATGMPGAMPPPPPVSNTMSRPIC

SEQ ID NO: 81940 - protein, 333 aa, Unknown
  Obtained from environmental sample
  DOMAIN (172)...(252): Bacterial pre-peptidase C-terminal domain
  misc_feature (1)..(333): Xaa is any amino acid
LIGRASQWDTGCQNNGAGEINKKLIAGKAGKIAIGQFAYRGNIVPLGNYWVNQLTGELANIPNRSYTVLSAGTAGADWTISGEIIDTAEGAVRFYTRLIRTADQAVEASFQFDFERNEQIVALLASGSSQGGRSSSSVAPDALEPDSFDHPVSYEIGADANAQVVNRTLHSGDEDFFLLLPANDGQLTMETTGDTDTYMEFYNAETQEKLGQNDDGGSGSNARIRYNVQAGKRYIAKVRGYDRSTGSYGFRAWMTIRTSSNGFNNPLSYEIGSDENAPVMNRTLDNDSEDYFLLAPANDGQLIVETTGNTDTFMEFYNAETQQKLAEDDGRGR

SEQ ID NO: 81941 - protein, 204 aa, Unknown
  Obtained from environmental sample
  DOMAIN (130)...(177): Flagellin hook IN motif
  misc_feature (1)..(204): Xaa is any amino acid
MQRVRELAVQGSNGTYSPEDLKLMGVEVNELIKELASLANTVGPDGKQVFAGDKAFTEPFRIVEGTIDGGNESVVVRVEYRGAGASRKTEVSDHAYIDLDLGGGEVFWAEKMQIFSNVNASNYRVSTPGSFFIDGEEIQVIPGDTLPSIVAKINDSGAPVKAFIDPETRGLALEGTNPHLIRAENAVSGATVLKELGIIQGEYG

SEQ ID NO: 81942 - protein, 307 aa, Unknown
  Obtained from environmental sample
  DOMAIN (4)...(279): Phage portal protein
  misc_feature (1)..(307): Xaa is any amino acid
MVVKEGEAFWWFGPDYGGGLPKQLYILNPRKLQLEGEGLDVQDSVVNNKRRWFYHAGAELVPIFSDELIHFKDWNPWNPLRGVNPLVSLSFELEQDYFANKANSTLLKNNAIPQGLLKTEQTLRPEEADALERRWESKYGQAKAGRKIAVLGKGTSFEALSFNPDVVKLFELKRWNLYTILAKYGIPPRVASISDKSTSLSGKDTKEQHSAFWQYTLIPLLRQFEQILESQFFMRFNLRETGRFDLWDVPELQDNEDAQSKRDIAEINAGIKTINDVLKERGKETKPWGDVWHKPNNLISISRSLGR

SEQ ID NO: 81943 - protein, 120 aa, Unknown
  Obtained from environmental sample
  misc_feature (1)..(120): Xaa is any amino acid
KFSPTCGEKIGFLSGYPQQHPTEKNKLILVYEPLGENPALLEFKVDDILYVEDVPQAVTEKGEGIPLAKLWIRRGARGMLLEPFEVDGSLHFLELRREQQGHFVNKQPGKPGGYSNGVRL

SEQ ID NO: 81944 - protein, 158 aa, Unknown
  Obtained from environmental sample
  misc_feature (1)..(158): Xaa is any amino acid
MIPERFFSQASENTVQCVLCPRRCVLSDGRAGSCKVRINHGGKGGIPYYGYITALALDPIEKKPLYHFRPGTEILSLGFAGCNLHCPFCQNWRISQSTDAPGQVYTPAEIIDTAKKSAKNAQVSIAYTYSEPLVHIEFLLDCMNEARKARIANVLCSN

SEQ ID NO: 81945 - protein, 171 aa, Unknown
  Obtained from environmental sample
  DOMAIN (33)...(171): ABC transporter
  misc_feature (1)..(171): Xaa is any amino acid
LSKIEVKNLYAEYEDKNGKFLALKDVSFHVGEGEFVSIIGSSGCGKSTLLSILQGIIFPSAGTVTIDGNIITGPSTNRGVVFQHYSLFPWMSARANVAFGLEQVNKTMPRKERYKTADIFLKKVRLNGFGYKNPYQLSGGMQQRVAIARALAMNTDILLMNEPLARLTQKQ

SEQ ID NO: 81946 - protein, 118 aa, Unknown
  Obtained from environmental sample
  DOMAIN (59)...(94): Sel1 repeat
  misc_feature (1)..(118): Xaa is any amino acid
MNTNLDDKFKEAETHYSKGFLIEEDAFLHDNVKSEHAKADKEFAKAFAIYEELAKADHTEAVFKQGYCYSAGIGIKQDKAKALECFNKAAEQGHELAKQALKEIKKKAIVMSFSADSD

SEQ ID NO: 81947 - protein, 306 aa, Unknown
  Obtained from environmental sample
  misc_feature (1)..(306): Xaa is any amino acid
GRPQTSGEARQGQTPPPRERTEKPENQLAQSPPPKPPQKTPPKPARKPAAKHGHVPEYLAELPAFLDNPDVIDFIGRMAVSHDLDADKLKEQFSKIAPNIRALTLFRPVWPPPEPRQTPPKGTSVQSWKHYSAPFLNNNRIAGGVKFWRENAAVLTKASNQFGVPSEIIVAIIGVETLYGRHKGGFHVMEALASLAFHDPIRGDFFKEELENFLLLARENGFDPLKTQGSYAGAIGIPQFMPRSWRRFAVDYDGNGKIDLDNSVADSIGSVANYMKEYGWQKGEPVAHRATLSDTPDPAWPRPDLA

SEQ ID NO: 81948 - protein, 294 aa, Unknown
  Obtained from environmental sample
  misc_feature (1)..(294): Xaa is any amino acid
TTRRAGTRAAGGNAQGGQRQSGGAQAAGGNQRNASVVRVTSVVLSTIENSVVINGDVLAVNQVSIFPTVAGKVTRTNYQVGDAIKQGAVVAMVDPSRPGQVYSESPVVSTIGGTVLQSPVHKGDTVSTQTAILVVGDLSTLMVETFVPERFSIAAQRGLKAQVSLAAFPGETFEATVQEVSPVLDPSSRTVRIRLGFANPMDARIKAGMYATVSLVTNSRVNVPVIPRTSVINTYGSWIVFAVHDRNIAIRKVIFLGLEDENYVEVLHGLEVGEKVISAGQNFLTDGNPVRIME

SEQ ID NO: 81949 - protein, 329 aa, Unknown
  Obtained from environmental sample
  misc_feature (1)..(329): Xaa is any amino acid
FFFPYRGGARRPEDETYRKNTGHPSYRADDALWLFPTVWKYIAETGDTALLDEVIPYADKGKDTLFKHLKKAIGFSLDNLGIHGLPAGLHADWNDCLRLGAKGVSVFVALQLYYAFDIMIRFAKFKKDSATEREMTQQKTRFGKIIEKYCWKDDRFVRGITEHDVTVGKKSDPEANIWLNPQSWAVISGYADEKRGKQILDLVYKKLNTKYGARLMAPPYRKHAFDGALALLFNPGTKENGGIFLQTQGWIILAEALLGRGNRALEYYLESCPAAQNEIADTRLMEPYAYSQFTESSDSPFEGRSHGHWLTGTASTVMVGSVEGIWDKA

SEQ ID NO: 81950 - protein, 252 aa, Unknown
  Obtained from environmental sample
  DOMAIN (1)...(104): Response regulator receiver domain
  misc_feature (1)..(252): Xaa is any amino acid
MFNVFPEIAKSFGVMCDAAMSGEEALELIDKNGGYHIYFIDWRMPNMDGMRLSHEIKTKVSEHSIVIMISALEWSAIANEAKTAGVDKFLSKPLFSSTIAEIINECLGVDKQQAERAQSADIEGIFSGRHILLVEDVDINREIVQTLLESTQVEIDCAANGVEAVRMFTEAPDKYDMIFMDIQMPEMDGYEATRRIRAMNIPQAKTIPIIAMTANVFREDVEKCLAAGMDSHVGKPVDFEEVLHRLHSYLDK

SEQ ID NO: 81951 - protein, 292 aa, Unknown
  Obtained from environmental sample
  DOMAIN (133)...(213): Cache domain
  misc_feature (1)..(292): Xaa is any amino acid
MVVSSCIFTSRIVRVNLVRNVESILDYMESQINYDLLESRTILDDFGQSIRSLILRGDDSSKLIAYNTDISDHLLSRNNDIYSPNGPFGYIEISPEGPFFFNGIGWEAPDDWQVTDRPWYKAALEAGGGIAETIPYPDTVTGETVFTYSRAIFDNDGNRLGVVAIDVRAGYIGARVVDTASSKDSSYGVLVGQDLTMIGHSNLEYVGKKMYDPEVPLSFLTNELVRTGKISEIEWVNWKGEKVVGFFKTLSNGWRLGLFTLRELYYPPVYNMAVTLSIFGHWVCDSFIYRSE

SEQ ID NO: 81952 - protein, 265 aa, Unknown
  Obtained from environmental sample
  DOMAIN (198)...(264): Biotin-requiring enzyme
  misc_feature (1)..(265): Xaa is any amino acid
KSSADFFRTLQKACVFKPEPEAAGAAVAAPASGPMAAKAGQAAKYSVNVDGVNYNVVVAPAGTVAIAPAAEPKVASGSTVASPAAAAPVPSGGGTPVLAPVAGSIIRYAVAEGATVKAGDNVIIMESMKMELEIKATAAGKVHFLSTPGAKVASQQPIAEIGGVPGAAPVAPVAAAAPAAPVPAAPVAPVSAAPTSGTVVLAPVAGTIIRYATAEGAAVKAGDNVVIMESMKMELEIKATAAGKVHFLSTPGAKVASQQPIAELK

SEQ ID NO: 81953 - protein, 299 aa, Unknown
  Obtained from environmental sample
  DOMAIN (45)...(272): Bacterial type II and III secretion system protein
  misc_feature (1)..(299): Xaa is any amino acid
AAYGPPEDIVDAGDGNTFFFLGSDERRELFLKDLEIIDRPQPRIRYDLFIIQVQESSNLNWSAQAEARFVRPGDRTMVTGQLGNLLNLNFDIITVFGYQFAAKLNLAISDNQANVFADTTLFGLSGQEIKFQNTSTYRYRDSNIDPDTGKPIYTGVTREIVSGLVLEIKGWVSGDGMITTNVTASVSKRGVEVSSAAGNPPPTSERVLTTQVRARSGETVVLSGLRQNDSSIVEQRLPLLSKIPLLGWLFKSKNNSTENTQMIIYLVPHVDIANDEYTVSGLKTPQYTARFVNRTLEGK

SEQ ID NO: 81954 - protein, 185 aa, Unknown
  Obtained from environmental sample
  misc_feature (1)..(185): Xaa is any amino acid
METLVSFFGGQIGRALSLSKIPTVINGHNVFQEGDPEILAILDEMVEKLILPGSGLDGLEHLEELLTLAESGKSCLLLPEHYSNLDLSIISLMARKAGGRGSDISKSIIAIAGMKLNEDNPAVAAFTGAYTKIVIYPSRYLSGLDANEKKAEFARSNMINRAALEVINEQKVKGKMILIFPPVPA

SEQ ID NO: 81955 - protein, 330 aa, Unknown
  Obtained from environmental sample
  DOMAIN (7)...(132): Glutamine amidotransferase class-I
  misc_feature (1)..(330): Xaa is any amino acid
EAAPDKKIYDCGCPLLGICYGLQRMTHDLAGKVEPLPKTEYGRIEVKIAPTAANGNCANFFKGLRSSFTAWMSHGDTLTKLAPGFKEYGSSATGYPAVVVHEQKPWFGLQFHPEVTHCEGGDDILGSFVFNVCGCDKGWSMEHYIEELGRSLKERAGENPVLLLISGGVDSTVAGAALLKTLKSEQVHLMYMDTGLMRKNETAAVRANLEKLGAKNLHIIMCENEFLDALKGKAEPEEKRRIIGDLFITIQEREVARLKLPDSYLLAQGTLYTDLIESGKGVGKKAHVIKSHHNVASPLVDAKRKAGKIIEPLDRRTRTTRPFCHVLGGG

SEQ ID NO: 81956 - protein, 234 aa, Unknown
  Obtained from environmental sample
  misc_feature (1)..(234): Xaa is any amino acid
VVRALDDLGISWIEAGNPGSNPKDMEFFRLAESLKLEHAKLCAFGSTRKKGVKASEDPGVLSLLEARTQAVVIFGKSWDFHVTEVLRVTHEENLAMIAETISFLKESGRQVFYDAEHFFDGWKANPEYALTTLKTAMEAGADRIILCDTHGGTFPDTIEKAVKEALKIVGDHGLSHTTPKCLFGSPPPPPGHGERNNHNAIPWRLPPMSRETLGGFRGGFGETTTLRGRVIPPP

SEQ ID NO: 81957 - protein, 120 aa, Unknown
  Obtained from environmental sample
  misc_feature (1)..(120): Xaa is any amino acid
MGISFIVIWLGTTFFILRNIKALRNDLLKKFSDTEKTSEEKSEYIAHHRLAKPFDFINRVDPNYFLSFIQQEHPQIIALVLAHLEPYKASIILQKLPGEVQADVSERIATLDRVSPEVTR

SEQ ID NO: 81958 - protein, 248 aa, Unknown
  Obtained from environmental sample
  misc_feature (1)..(248): Xaa is any amino acid
MLERIAEDGVLSSTKIIAEAWDAGGAYQVGWFPGGRWAEWNDRYRDEVRKYWRADPSETRHLATRLSGSSDLYLRDGRKPFHSINFLTSHDGFTLKDLVSYNGKHNEDNGEENRDGGNNNYSYNYGYEGMTLDPILEKIREQQIKNFITTLLVSLGTPMILGGDEMGRTQKGNNNAYCQDNEISWYDWSLLEKNKGLFRFVKEMIAFRRRHPCFMRPEFYTGREGSYNAIPDISWHNKRARPILSLNL

SEQ ID NO: 81959 - protein, 233 aa, Unknown
  Obtained from environmental sample
  DOMAIN (3)...(219): Bacterial export proteins, family 1
  misc_feature (1)..(233): Xaa is any amino acid
ATGAGAGWRQWSGGGKHPRRRRLSDLRYEPFSLRFLLLLSGEGIIGIIIGFYLTLIFATFSTAGQFFSLQMGLGASETFDPLAQVENPLMGQYFNLVSMLVFLVVGGFRQLFLGGFWRSVQSINIAMLVEGREHVVGMMASGLAKLFLDAMVISLPILGTLFLTSLSTGLISKAAPQINILSEGFPIAILTAYLLLFATLPFLLETFSDVITAGFANIQRLYTIIGQQIGGSL

SEQ ID NO: 81960 - protein, 322 aa, Unknown
  Obtained from environmental sample
  DOMAIN (1)...(319): Glycosyl hydrolase family 10
  misc_feature (1)..(322): Xaa is any amino acid
MKPSYLAPPRNASTGAFTYAWTTNASNNNPDNFVNACASNNCKVHGHVLLWHSQNPQWVWDQIASKAGIIVSGMDKAKALDIMKKYITEVMTHFKGKVYSWDVLNETFPDNASSSANWKDAIRKGGSDEGQDANPWYIAIGSDFVYEAFLAARLADPSAILYYNDYNTDSSNRARLIRDMVKEVNDKYLALPSGSKPSGDPAGRLLIEGIGMQEHHNTNVTTASINATINLFRPLGVKLSVSELDVLCQGWSEYSSNPAKNTEANYPETSTNTITNNGFIKAAQLYGEYMKLYVENKDIIERVALWGVIDSQSWRGRGLPFS

SEQ ID NO: 81961 - protein, 327 aa, Unknown
  Obtained from environmental sample
  DOMAIN (21)...(181): Metallo-beta-lactamase superfamily
  misc_feature (1)..(327): Xaa is any amino acid
MARSGAFILGCGGMMPLPNRHLTSVLLRREGELFLFDSGEGTQVALRKLNLRWKKISVIFVSHTHADHVTGIPGLLMLSSQVDRDDPLYIIGPPRIAEYIESNRRVLDMYINYEIIVKEVTEPGVVYQGDGFHIRSFPLRHTKPCFGYTLEEYLRPGEFHPDKAEALGVPRGPLWSKLQGGETVKSTDGRDVRPQEVLGQPRLGRKFSFVTDSLAFPEIAPEVAGSDLFVCEGMFEQALAEDAHEKKHMTAVEAAQIATMSSGIKKLALIHYSPRYTEFDLKQLLKEPVRYSPTQSLPGTRLCFQLSTWIRLLILLKILLDNFLVNG

SEQ ID NO: 81962 - protein, 274 aa, Unknown
  Obtained from environmental sample
  DOMAIN (8)...(159): ABC transporter
  misc_feature (1)..(274): Xaa is any amino acid
GYHSPSTGQAIIDSISVEESPIEIKKRIGYLPESNPLYGDMTPEEYLYFAASARLLPKETRRKAVEDAIAACGLEGEKSHRIESLSKGFKQRVGLAQAIIHDPPILILDEPTSGLDPNQIIEIRSLITELGKRKTVILSTHILQEVEAVCSQVLILNEGRIAAQGMPDEIAKNIRSGGGMDTWELYLKGAAAEEVKSSLVNLEKETVEAKAETLEDGIIRLGFAIRDSGAYALDGECIFDWAIKQGYKIIGMNRKKLSLEDIFVKLTTEEESRR

SEQ ID NO: 81963 - protein, 125 aa, Unknown
  Obtained from environmental sample
  misc_feature (1)..(125): Xaa is any amino acid
MRRFIEKVIENILRLSGATTTIIILLMVVFLFKEGFGLFKNPVVERGHVLCVNASNKIDYLNSKEIKLIFDGEIENWNKLGGEHLAIEIFRFNEIFSPYSEEEFGNDYEKCREKLGESISLTPGI

SEQ ID NO: 81964 - protein, 80 aa, Unknown
  Obtained from environmental sample
  misc_feature (1)..(80): Xaa is any amino acid
MTFLPPHDLPELELFEHQLASRYASRAMVRLFSPLYRMRVWRRLWLALAKCEMEMGLPITSEQVAEMEATKDASADSDLG

SEQ ID NO: 81965 - protein, 102 aa, Unknown
  Obtained from environmental sample
  misc_feature (1)..(102): Xaa is any amino acid
VLTGGALISDEAGYKLENATIDMLGKAKRVVIDKDNTTINKGSGKKHDIKARVGRIKKQNEDTTPDYDREKLQDPLRQLAGGVAGYKHRPGHLIRKIREKKT

SEQ ID NO: 81966 - protein, 139 aa, Unknown
  Obtained from environmental sample
  DOMAIN (39)...(114): mce related protein
  misc_feature (1)..(139): Xaa is any amino acid
MKLMIRFADQIVGALIIIAVGILVFVIFMLGSSQRWFVRDNDYVTYFSSASGLSPNMPVLYKGYTIGRVKKVEFNMADDRMDVQFSIFKEFTDKVKRGSRIDLVSSPISALGGNRVPCSIAGKGLSRAEFCPMGGGESP

SEQ ID NO: 81967 - protein, 137 aa, Unknown
  Obtained from environmental sample
  misc_feature (1)..(137): Xaa is any amino acid
LNLRAILKKSEDGLIKSEDGLIKSEDGLIKSEDGLIKSEDSLTKSEDSLIKSEDGLIKSEDGLFKSEDGLIKSEDELTKSEDSLIKSENELIKSKNFGQGKIAPILLPVFHALLRRGNAPVSQARFQFPLLTYFSII

SEQ ID NO: 81968 - protein, 319 aa, Unknown
  Obtained from environmental sample
  DOMAIN (154)...(319): 3'-5' exonuclease
  misc_feature (1)..(319): Xaa is any amino acid
MRSQIRPSVPGVKGIGDKSAVKLITRYGSLDEIYRNIAAIEGSTGKKIAEGKESAYFSQSLIRLRDDVFLPIESIDELSAEELDRSAGAAVLLREGIRQSAKQLDPNVKVPAAQNIQNAETQKETPDSELKNEIKFEKLAASSPDHNLLGDGVYKTILDINELKSVLEQAKKQQIFAMDFETDSLDAWNSHPIGISLAVKPKEAYYVPVAPHGRETVSAFNEPEKVRALLAELLADEKITVVAHNAKFDYKVSRGWGIERWKCKIWDTMVAAWVADPERTGYSLDSLCRYTFDCTPIRYIDIVPKDSTFAGCSLEIAAR

SEQ ID NO: 81969 - protein, 254 aa, Unknown
  Obtained from environmental sample
  DOMAIN (13)...(67): DnaJ domain
  misc_feature (1)..(254): Xaa is any amino acid
LQKQTITTFSASPKTASAAELKKADRKLAVKIHPGKKPGEKTAVEKIREATEAFEVLKDPQKRAQYDQFGHAAFVGPQGRGGPGYDEFNGGFDLSAALRAFMNDFGGDSVVGDLFGFGSRTRRGGGHGGTRGNDLQVKLGLTLEEISAGVKKTIKVRRLDRCSECGGSGSKSGKRITCAKCGGSGRVRHVTNSFFGQMVQETDCPICRGDGQTVSDPCAACGGSGLRQAESTVSVDIPPGVEEGNYIRDPARPI

SEQ ID NO: 81970 - protein, 76 aa, Unknown
  Obtained from environmental sample
  DOMAIN (1)...(72): Protein of unknown function (DUF1667)
  misc_feature (1)..(76): Xaa is any amino acid
VPKRTVTATCQIDKNAASVKRIPVKTASPCPRDKIPALLDDIYKLKVTLPVKAWDILIKDWKGEGINVVATRTINK

SEQ ID NO: 81971 - protein, 219 aa, Unknown
  Obtained from environmental sample
  DOMAIN (29)...(102): MazG nucleotide pyrophosphohydrolase domain
  misc_feature (1)..(219): Xaa is any amino acid
MNESESFKALYDTVVKLRGPGGCPWDQEQTPSSLKGALVEETYECLEAIDENNPDHVAEELGDLFLLATMIGYMHEQEGKFTVSDSLKKITDKLIRRHPHVFADVKVKDSAQVLENWAAIKVNQEGRNPKNSVLDEVSGGLPPMDRAFKLQKKAAKVGFDWRNAQGVISKIKEELEEVTEAENDISRNKQADEAEFLNTQLEKELGDLLFSCHSDHGNP

SEQ ID NO: 81972 - protein, 89 aa, Unknown
  Obtained from environmental sample
  DOMAIN (7)...(83): MutS domain I
  misc_feature (1)..(89): Xaa is any amino acid
MADNRSSPMLDQYRRIKREHEGDVLFFRLGDFYEMFADDAIEVSALLNLALTSRNGLPMCGVPYHAARSYIARLLNMEKNRDMRTAWPF

SEQ ID NO: 81973 - protein, 277 aa, Unknown
  Obtained from environmental sample
  DOMAIN (66)...(155): Cyclic nucleotide-binding domain
  misc_feature (1)..(277): Xaa is any amino acid
GLSRARSFNRRLFKNSGKLKSALYAYSRYLALCPNAPDKDNIKAIIADIESSVTELMTEYAPDKMIQKYPKEHLLFAEGETGHTMYIIQEGSVKITKIVDNKEIILAVLGKGDIFGEMALLEDKPRAATAEVYEDCTLLAVNRDNFSNLIKDQPDMVVRMATLMSERIWLLYRQLDNTFIDNPLGRVYDALLIQLEKNRVNINSDEPYQCNFGIKELIGMAGMQESENKYLDRKIAGDGKLTFNDDKIQIIKISDILEESTFYRRAHRISEIRIDNI

SEQ ID NO: 81974 - protein, 164 aa, Unknown
  Obtained from environmental sample
  DOMAIN (4)...(164): CobQ/CobB/MinD/ParA nucleotide binding domain
  misc_feature (1)..(164): Xaa is any amino acid
MRIIPVASGKGGVGKSLVAANLGVALAQAGQRVVVADLDLGASNLHLVLGHLSPQMGIGTFLNNLNLKLTDVIVETDIRGLRFIPGDTEIPGTANLKTPQLKALVTQLLALDEDTDVLILDLGAGSHQSVLNFFLLSGQGIVVSAPTVTAARAARADADPSSIH

SEQ ID NO: 81975 - protein, 280 aa, Unknown
  Obtained from environmental sample
  misc_feature (1)..(280): Xaa is any amino acid
VEEPSRIFQKHKKLKQYLHELGSVAIAFSGGVDSTFLLKTAHDVLGECVIAVTARSCSFPERELKEAVSFCKSENIRHVICDSEELDIEGFAQNPVNRCYLCKNELFTKIWAVARENGIENVAEGSNLDDNGDYRPGLTAVAEQSVKSPLRYAELTKDEIRFLSKNMGLPTWNKQSFACLSSRFPYGESITPEKLGMVDKAEQLLLDMGLRQVRVRHHDSLARIETDEDGFLILIDRKNREKVHTQLKQYGFTYIALDLLGYRTGSMNETLTSADLIPRG

SEQ ID NO: 81976 - protein, 163 aa, Unknown
  Obtained from environmental sample
  misc_feature (1)..(163): Xaa is any amino acid
VDSANPVAFFPGFINELIETEGKSADIREVFSNSLCVSADVNACWHPLYKEILDEHGEAKLNHGVILFRYWGEKGKENTNDADAQTAAALIKILDEAKILWQTGEGGRVDAGISGTLSRFLANLDIPVIDLGVPLLSMHSPLEGAAKADIYMAHRAFTAFFNR

SEQ ID NO: 81977 - protein, 123 aa, Unknown
  Obtained from environmental sample
  DOMAIN (2)...(122): RecF/RecN/SMC N terminal domain
  misc_feature (1)..(123): Xaa is any amino acid
MFLKRLTILGFKSFADRTDIEFNDGITALLGPNGCGKSNVVDAIKWVLGEHAIKSLRAEKMEDVIFGGTEARKPLNVAEVSLAIANETGLLPMDMPENRKSSDGCTVPGESEIFYQWLRRVRA

SEQ ID NO: 81978 - protein, 117 aa, Unknown
  Obtained from environmental sample
  misc_feature (1)..(117): Xaa is any amino acid
MDLDHNELCALATGRASMNAPNTSAPPPFPHKHLLGIEALSAQDITAILDQAKVFEEACDNPEIKVLPLLQKKIAVNLFFENSTRTRNSFEIAEKRLSPNVINFHATASFHQQGRRP

SEQ ID NO: 81979 - protein, 199 aa, Unknown
  Obtained from environmental sample
  misc_feature (1)..(199): Xaa is any amino acid
VITIDEIFEKWQRATDIAASLDDRLLAAQVLISGIEGKGSLNSNIATLLSEFPTGGIMLFKYNLDTDNDSIRALISQTVSLVNSESGIPPFMAVDHEGGTVNRFRQGTADLPDASFYWELSPKQDKQTSFKKIENDSFRAGKGLKELGINVNFAPVAEYLNDEDRVFLSGRSYGPDPLFTANAAPSFYHGNGTGRKFNG

SEQ ID NO: 81980 - protein, 265 aa, Unknown
  Obtained from environmental sample
  DOMAIN (114)...(180): His Kinase A (phosphoacceptor) domain
  misc_feature (1)..(265): Xaa is any amino acid
LEGTNFANINNDTARLVALLKSGNNRVSEYRMINYQNIPSITFIRKLENGWYLGIVTPEEEYFAEAERVKLILILLGITLSAILSVILAKIITEKRKADEKINEAEKAIVANRVKTSFLAKMSHEIRSPMNVILGITEMQLEKKDLPPDTMRALGRMHNSGYMLLNIINDILDLSKIESGKMELAPVTYDVAGMINDTVQINVIRFDTKPVQFILKVDEHVPSTLFGDALRVKQILNNILSHAFKYTDRGESILSISADGAPDSG

SEQ ID NO: 81981 - protein, 244 aa, Unknown
  Obtained from environmental sample
  misc_feature (1)..(244): Xaa is any amino acid
MRNYLDSGIFAAPRQGFVYLERDTPFNRGRKGLVAAVDLEQYSWSPTARPMIRSTEGTVADRLPPRMAIRRNAPVETPHILLLIDDETNGLLQGLEARAKKAAPVYQGELMLNSGNISGWFLDSEDDFAFLAARLEELASRALTRYQTGNEMSGAQPATASQPFLFAVGDGNHSLASAKEIWEEYKKANGVTHHPCRYALVEIENIYDPAIKFEPIPRGVFGLGFEEAIHGAFGTGLGFSTRTI

SEQ ID NO: 81982 - protein, 174 aa, Unknown
  Obtained from environmental sample
  misc_feature (1)..(174): Xaa is any amino acid
MAEEHTDEHDEDFGEGSPSLNRFKIAVSNDLMEVRMYPLIGVTDGGLTTLEDVLDACHRENIQVEINEKLVEKQLLVSSPVEIAIGKGIKPEDGKDGYIEYKIDMSAKPQFIPKDDNTVDYKSAMQITLVNAGDVLADVIAPTEGSDGMDVRGSPIKAKAGEKAKYFLREGVEE

SEQ ID NO: 81983 - protein, 297 aa, Unknown
  Obtained from environmental sample
  DOMAIN (1)...(295): DNA gyrase/topoisomerase IV, subunit A
  misc_feature (1)..(297): Xaa is any amino acid
MKYHPHGDASIGPALVVLANKELFIDKQGNFGNIYTGDEASAPRYIECRATALSKDIFYNPKLTEWTDSYDGRNREPLLFPAKIPVVLIMGAEGIAVGMSTKILPHNAVEVLEAEIACLSGKKFELYPDFPTGGLMDVSEYRDGNGKVLVRAKLDTSDPKRILITELPFGSNTESLINSVEAAAKTGRLKIQGINDFTTDKVEIEVKLARGVYAQETIDALFAFTECQQSISVNLLVIRDGLPAIMTVTEVIQHHAKQLVKILTKELELEKKSLPDSSTCARWKGFYRGANLQGHEK

SEQ ID NO: 81984 - protein, 81 aa, Unknown
  Obtained from environmental sample
  misc_feature (1)..(81): Xaa is any amino acid
MIITKTPFRISFAGGGSDLAAYYEKYGGAVVSTTIDKYVFLSMHPYFFENGYLLKYSRTEHAEEADKIIIPLFGSIQKIRH

SEQ ID NO: 81985 - protein, 303 aa, Unknown
  Obtained from environmental sample
  misc_feature (1)..(303): Xaa is any amino acid
VVFQLANFDYPGLLKKFDSNFTEGPFSGDPKFFPVKTGLIARDLGEFLAVTHNISPDNDWKALLKLLKSCAGKDLISEDQFAQILIGLRDVVNSKVLELMVQYGSKNPVWTCKPHVPDEHIAENWLEARTSKAQECIDRINESEKNKQIAVLLKEIFDNTEELDRLENYSVAKSDIYRRKELSYFVYAKGLNYLSAFLTDYMEKEIRELCDILLIRGQWTNNTFSKEMSEALHELMDTSEAIARLDGPLVDDGPDGSRLKAALLRFETDRTQARYINAIIDNINETALDLMTTFLEQISVIDK

SEQ ID NO: 81986 - protein, 132 aa, Unknown
  Obtained from environmental sample
  misc_feature (1)..(132): Xaa is any amino acid
MRIKLISTYKIIRLFLQAKLALPVRLALFALLALPALCCLFVTCKDSGGADDEYDDTVIDLGEVNKLTFSHNSGLYDKQFNLTIAAAQGSEIYYSTDGSIPSPEKTGNGYVFKYDSPIRVKNRNGEKNVASR

SEQ ID NO: 81987 - protein, 185 aa, Unknown
  Obtained from environmental sample
  DOMAIN (6)...(173): Glycosyl transferases group 1
  misc_feature (1)..(185): Xaa is any amino acid
PLGGPPGGDREILTLQVSPPVITFSSEDSGYKRADIAIEACVKSGRELVVAGAGNKITGKYRKNRLVRFTGRVSDNEAVRLFSEAKALLYPGIEDLGLVPIEAQAAGCPVIAFREGGAVDTVKENITGLFFNEQTPEALIAAMERFEQNEVTFGDRGVFYDHVQQFSKTAFIDRMRRVLEERKRI

SEQ ID NO: 81988 - protein, 85 aa, Unknown
  Obtained from environmental sample
  DOMAIN (2)...(84): Plasmid encoded toxin Txe
  misc_feature (1)..(85): Xaa is any amino acid
VDRSARAPDAIQLAKILGTLERNPYEQSQGFEKLKGDLKDMYSRRINYQNRVVYDIVPNAENLIDPNGEPYEGIVHVVRAWNHYD

SEQ ID NO: 81989 - protein, 292 aa, Unknown
  Obtained from environmental sample
  DOMAIN (8)...(214): Isochorismatase family
  misc_feature (1)..(292): Xaa is any amino acid
MNNTEMTYDITNTLLLIIDVQNDFCPDGALAVQNGDEVIAPLNRLSAAFASRGGRIAATQDWHPAGHISFASSHSDKKPGDIIDLDTVQGQVLWPDHCVQGTKGAAFHDKLDLDPVNLIIRKGFCKGLDSYSAFFENDRCTATGLEGGIKQMNIQTVIMGGLATDYCVFYSAMDCRRLGFKTIIVSDAVRGVDYPPGSVEKAAACMRDAGIIFSDSENCYRRYADGYCLRCISFRPVHRFLFPDHGAGLLETNQSRQTVDRKAVFEMFFPWQPFGGGYAILAGLRTLLDNLR

SEQ ID NO: 81990 - protein, 324 aa, Unknown
  Obtained from environmental sample
  DOMAIN (1)...(88): Bacterial flagellin N-terminus
  misc_feature (1)..(324): Xaa is any amino acid
MRERSVQSGNDTNPDADRAELQAEVKHLKAEIDRIGNTTEFNTKKLLEGSATRVRDEIKGTLRVNNNSSVVLDANKEKAMYNSIANDKSWAFDGAYMLIKTNQTYDSSGKAVFRSDDFGLVGPDGSVYKFKAYTPDTVVLANGLDAGTIIAEGGQVENIAKAGAVGSDMILGENLTEKELKSVGSGSILASGSVFTLIDDGSGKLAVGGTSGVKEIKSTNGILELTTNAGSVKVEAGKSITLDDGTIIKNHGGGKVSIESGSLTTAGDIDNTVATSFTVTAQSTIASSSETLQDDTDIVVASNLLVSNGTIATNVTSADLISGK

SEQ ID NO: 81991 - protein, 90 aa, Unknown
  Obtained from environmental sample
  misc_feature (1)..(90): Xaa is any amino acid
MNGRILYFAGLPAGKDMVTLATNHIHYKQLSIHGSTRGNVNQYRAVAKMAAAGTLDLEKLISRRYQITEFPHALEYAKKAEGLKTIITFP

SEQ ID NO: 81992 - protein, 230 aa, Unknown
  Obtained from environmental sample
  misc_feature (1)..(230): Xaa is any amino acid
LYIVARPYGESDVGFQTLIRPLVDFAYAEGEGWPVQIDLLRPPTLDQLREVLSQKRNFYHIVHFDGHGGYNAQDSVNVMGGEFSGAIGTLVFEKEGDSNNENEWELVTAEVLGQLLREHNIPVMVLNACRSAMLDEKAETPFASVAASLMKAGIHSVIAMSYSLWVSGAKEFVPAFYRQLFKSGGIAEAVRLGRLQMYRNHLRDSSCGKVDFMTGLCPCCTSSLPPGKPN

SEQ ID NO: 81993 - protein, 241 aa, Unknown
  Obtained from environmental sample
  DOMAIN (13)...(241): Histidinol dehydrogenase
  misc_feature (1)..(241): Xaa is any amino acid
MKIILSDKFDSFWKKNTRRSEDLETEKAVKRIIAEVREKGDAAVRKFASKFDKSSPKKLEVPFSEAKLALEQLRANDSSLAQALELAARHIKRFSDKQREQFTDFEFEMEPGLVTGQRILPIERAAIYVPGGRFPLFSSVLMCMIPAFSAGVEEVILSSPPTKDGIPDKKILAAAAVAADVANNNKVRILAIGGAQAIAALALGTKSVPRVDVIAGPGNKFVAAAKRQYSASLGRSDQSLK

SEQ ID NO: 81994 - protein, 65 aa, Unknown
  Obtained from environmental sample
  misc_feature (1)..(65): Xaa is any amino acid
ERFKGGKLRGESPALSKIKNRVRRELEGLDGSYKRFLNPHIYKVSVTERLRALKLELIKNYLGDL

SEQ ID NO: 81995 - protein, 318 aa, Unknown
  Obtained from environmental sample
  DOMAIN (1)...(318): FHIPEP family
  misc_feature (1)..(318): Xaa is any amino acid
MMAKSGEAGRKQKDDRGDVPQMEPPDPLSLELGVGLIPLVDKDKGAELMERVKQMRRQIGLDMGILIPKVRIVDNILLGQSEYCFKIRGVDVGKGKIRMGNYLCINPGTVKEELSGEKTTDPAFGLPALWIGEEKRDEAERAGYTVVDPPTIIATHLTEIIKRHAAELLGRQETKAIIDSLQKDYSAVVDAIFTSKDEKGRDLLNLGDVQKVLQGLLKEQVSIRNMVPILESIADFAPLANNTRFLVEKARQALSSQICHQYADEDRVLHVMTLDPSLEQKIVESKAQNSSGEIFSALEPALHSAWNKTLGKSVPSVP

SEQ ID NO: 81996 - protein, 128 aa, Unknown
  Obtained from environmental sample
  misc_feature (1)..(128): Xaa is any amino acid
MDVKQAIIENKTSLGIELGSTRIKAVLIDENFTPIAQGSHDWENRLEDGVWTYHLNDVWTGLQDCLKNLALDVNNRYGLSLSSVGSIGISAMMHGYLAFNKNGDQLVPFRTWRNTITEKARRIAYRKI

SEQ ID NO: 81997 - protein, 150 aa, Unknown
  Obtained from environmental sample
  DOMAIN (1)...(150): tRNA synthetases class I (W and Y)
  misc_feature (1)..(150): Xaa is any amino acid
MNEGPVSFYIGCDPTGSSLHIGHMVPFFAYRHLREAGQKGIALIGGGTARIGDPSGKSEMRKMLSYDDLDSNAASIAAQLDRFIGFDGNTARAVNNKDWLANLNYIDFLRDIGSHFSVNRMLSFEAYKMRMETGLSFIEFNTHSADSDPG

SEQ ID NO: 81998 - protein, 93 aa, Unknown
  Obtained from environmental sample
  misc_feature (1)..(93): Xaa is any amino acid
DFPPGLWPTLNKGSIGSYVFTKNEISYLDTPKVNAIDTVGAGDSFAGAFAGALLQGKKIKEAHKLAVDVSSYICTRRGAMHNYVANFLNYSHK

SEQ ID NO: 81999 - protein, 255 aa, Unknown
  Obtained from environmental sample
  DOMAIN (2)...(227): Pyridine nucleotide-disulphide oxidoreductase
  misc_feature (1)..(255): Xaa is any amino acid
MKYVIIGNSAAGIGAVEGIRQIDKSGEITIITNEPYHTYSRPLISYLLLGKTTEEKMKYRGENFYKDNNCTLLSNVSVTKIDSGAKKVVLSDNKQIDYDKLLVATGSSAFVPPFEGLDSVKDKCTFMSLDDAKKLETMLGKDKRVLIVGAGLIGLKCAEGIHERVKHITVVDLATRILSSILDDDGAKIVQNHLESNGVEFKLAASIKKFENKKAVFENGESAEFDVLVLRVGRAPNYALLDGIAKINAVLVSRK

SEQ ID NO: 82000 - protein, 280 aa, Unknown
  Obtained from environmental sample
  misc_feature (1)..(280): Xaa is any amino acid
LPSLKEDAVNISSPALLSLPRNRRLVDTGETASALPFRILISFGAEDSSGLGIAAARSLSGFLSRAKTERPLEVTLVSPIPPHNSQDETEELYGITVLGRIPHLSERLAEYDLLVTHFGIGAFEAIYARLPVIIVSPSSYHERLSRKAGFFSLGIGVGAAGRLGKLACNFGDTGKPDIVKTLEQKSREIADRYGLCEDQKETIATFLCRVSPYSPLVCPVCKKPRNVPVLARFTEESYRQCPHCGIIYLARLAEPPTDTKRLSFRRLQKAVRQNLPGGFS

SEQ ID NO: 82001 - protein, 242 aa, Unknown
  Obtained from environmental sample
  DOMAIN (27)...(114): PSP1 C-terminal conserved region
  misc_feature (1)..(242): Xaa is any amino acid
MVRIGRGYGKDLAQVIGPVRCKHDAADIVWIERIASKEDMDKADHNRVLEQDAFNICKEKILSHQLEMKLVHVHYLLEEPKILFFFTAENRVDFRELVKDLVSVFKTRIELRQIGVRDEARVVSGLGICGRGYCCHSVSDKLKPVSIKMAKDQNLSFNSMKISGPCGRLLCCLSYEHGFYCEQIRRIPQEGSRVNHENETWAVTEANMVTGQVKLSNSDGRLVTLPADRFEKVDNHWRTKGR

SEQ ID NO: 82002 - protein, 305 aa, Unknown
  Obtained from environmental sample
  DOMAIN (83)...(305): Domain of unknown function (DUF323)
  misc_feature (1)..(305): Xaa is any amino acid
MYTLRITRLIVPGYNAFSAGFYNSQGRKAGIYSNSWRWLSAAAPVPVATTQLQQASVKTAQTAQPAQVTNTQQPVVSTDIPPAGKSVVLINGGTIPTKEHITVSSFYMWKYEISQKEYKEVMKKNPSDKKGDKLPVEQVSWYDAIEFCNKLSSSVGLDPAYTISSEGVTWNRSANGYRLPTEAEWEYACRAGTNTPFNTGTDITLKQANFYSEIIHSSAQKTKAVGSYQPNAWGLYDMHGNVEEWCWDWYDENLPSGKQVDPTGPITGTSRVRRGGYFASNELGLGSSIRSELSPLLGRSDHSVK

SEQ ID NO: 82003 - protein, 281 aa, Unknown
  Obtained from environmental sample
  DOMAIN (26)...(276): Methyl-accepting chemotaxis protein (MCP) signaling domain
  misc_feature (1)..(281): Xaa is any amino acid
LIARLHGVTSVFELSSTTKEMTAVANEQSASVSEIVTTMENNRNISAQSAEKTSEVAHLASQTQDLSRRGAELREINENMMLDVRNQNAKIIEIIRNLAEMLSRIDESVKLIDTIADHTKLIAFNAALEASSSGEAGSRFSVVASEIRRFADNVVESASEIKEKISELQEASQSLLTEANNGSRKIDIGYNRIVEQKEVFENIVDASKNVAIRTQQISSLSKQQEYAATQVFSALKEISAGVNQFVHATVITSETVNKLNNMSQELTETLAKYHITGGNNK

SEQ ID NO: 82004 - protein, 332 aa, Unknown
  Obtained from environmental sample
  misc_feature (1)..(332): Xaa is any amino acid
MIRWPSGKLGINPDNCDVCSAAITRQRYALYHKSKKYPDGEPFPKMIWASNYNRYATATMFSLFFAGKTYAQDLQIEGENVQDWLQNRYIAAFKHTQRRLKNCAAITGWGSMNEPHFGFIGHQNLENPENYLIPAGPRPSPWQTIRAASGFPVEVPVYKIETLFKKVSYYETFNTQGISLFKDGFSCPWKQAGIWQEEGGVPRLLRADHFSRYQGRPVDFADDFLKPFIIKYIDTMKEADKHSIFFIEGLPNSAKAESHPSWDKNDPINTVNAFHWYDGFALFTKSFRTWFSMNQNTAELVLGRRNVRSISQMSRAGDRLDKEKMGNIPALS

SEQ ID NO: 82005 - protein, 77 aa, Unknown
  Obtained from environmental sample
  misc_feature (1)..(77): Xaa is any amino acid
LHIGRNFWATLSGFFGFGCRAPTPSGGDLLSQGLANLYAPWITIFTILALFITLMLASFIGEGIRDAFDPKSGDRFE

SEQ ID NO: 82006 - protein, 216 aa, Unknown
  Obtained from environmental sample
  DOMAIN (4)...(213): NAD dependent epimerase/dehydratase family
  misc_feature (1)..(216): Xaa is any amino acid
MKKALITGITGQDGSFLAEFLLEKSYEVHGIMRRSSSFNTGRIEHLYLDEWVRDMKQKRLVNLHYGDMTDSSSLIRILQLVRPDEIYNLAAQSHVKVSFDVPEYTAEADAIGTLRLLEAVRILGMEKTTRIYQASTSELYGLVQEIPQKETTPFYPRSPYGVAKLYGFLDNKKITVKSYGNVCGLMAFYLITKSERRGETFGNQKNTPRSTTYFFW

SEQ ID NO: 82007 - protein, 331 aa, Unknown
  Obtained from environmental sample
  DOMAIN (195)...(307): Pyruvate kinase, alpha/beta domain
  misc_feature (1)..(331): Xaa is any amino acid
DQDKKDIEFGISMDVDYLAASFLSFPHEVTEIKKFLEAHSSHIKIIAKIESSEGLDNIMEIARLADGAMVARGDLGQQLPIEQIPLAQKHIINVCRRAGKPVITATQMLESMIVNPRPTRAELTDVANAIFDGTDAVMLSGETSAGAYPIESVKTMDKIAYAVEQSNEFHKRMKNFHNECHSEVHNPKENLGIIMSRSGVEIAAAVKAKAIVTPTRSGNTARILSVFRPDEPILAVTSDGRAERFMQLYWGVNTCITSKVDDSESMIQNTMKVVSETGVAGISDKVVLIAGLPLESPNMINNVRVVIIGTVLARSSAGGYANPTSAIDMGN

SEQ ID NO: 82008 - protein, 121 aa, Unknown
  Obtained from environmental sample
  DOMAIN (26)...(93): Bacterial RNA polymerase, alpha chain C terminal domain
  misc_feature (1)..(121): Xaa is any amino acid
FPPRIIARFSGLLNFDESNFGFEEDNDEDNERIRNILNTPVEELELSVRSSNCLKNADIKTIGELTRKTEDDIAKTRNFGKKSLQEIKEKLKEWNLTLGITESALKNAVQKMPKKEAADET

SEQ ID NO: 82009 - protein, 307 aa, Unknown
  Obtained from environmental sample
  DOMAIN (1)...(258): Cell cycle protein
  misc_feature (1)..(307): Xaa is any amino acid
CEISGQFYRALASTEYIRQIIWASIGLIIALTLSLLNYRRSYDIALYVYLIILIPLLYTCVFGRVVHGTRWLRLGMFGIQASEFAKISTIIFLARYLTDTRLSGNPFGRFLAACFIVLVPMGIVLIQPDLGTSLVFIPILLSMTFVAGISTRNIFFLIFCILLTSLLTVLPFWQTYILRKSLPAIVMLTNPRLIIITILALGLIMGIALFGYLKYKKRYFYWLFYFVAIIVLSLGASYAARKVLKNYQIMRLIVFLDPNVDPRGAGWNIIQSVTAIGAGGFTGQGFLQGTQNHYRFLPEQSTHFIFS

SEQ ID NO: 82010 - protein, 330 aa, Unknown
  Obtained from environmental sample
  misc_feature (1)..(330): Xaa is any amino acid
GSPNDQIGREYKNVMIGGKIWMAENLNYKTKSGSWCYDDKTGENNTNCDIYGRLYDWATAMGLDTFYNSTEWNFNDVTQQGVCPSGWHLPSRREWGDLAIAAGGTGDYGTNGTAGTTLKSTSWSSWSGANGTDTYGFSAMPGGNYDPDGGSYGYGEFYNVNIIGYWWTTTEFDSGQAYIRDIYYDYKNVLERDFPKKIGISVRCVKDDETPSVTTYLVKVSSAGTGAAGTGSYAVGATVTITAGTPPTGQLFKNWKTTSNGVTIANATGETTTFTMPANAVTVTAVFEPDYAFSCGNRPCKKVKIGGKTWMAENLNYKTESGSWCYGGGW

SEQ ID NO: 82011 - protein, 80 aa, Unknown
  Obtained from environmental sample
  misc_feature (1)..(80): Xaa is any amino acid
MANYDDLTKVLKERIENWKGGAVSGSSGFVVQVGDSVATVYGLNDAVYGELVDFASGAHGIVFTLKKKRGLRNFNRRVPW

SEQ ID NO: 82012 - protein, 98 aa, Unknown
  Obtained from environmental sample
  misc_feature (1)..(98): Xaa is any amino acid
MIVDENHPFSSFGLSEAVLKAIARKGWTAPSSIQSIALPRLLADEGHCIVKARTGTGKTAAFGIPLIERLTHAGQSPRALILAPTRELALHVSGKSHL

SEQ ID NO: 82013 - protein, 71 aa, Unknown
  Obtained from environmental sample
  misc_feature (1)..(71): Xaa is any amino acid
MALVSDGMNYAPNGKPNPVVQKGEFVFSAIALDHGHIYGMCNGLIEAGGVLKSVYDPDPEKVMIFAQLIPA

SEQ ID NO: 82014 - protein, 140 aa, Unknown
  Obtained from environmental sample
  misc_feature (1)..(140): Xaa is any amino acid
MPFKGVDVMDVKKEFVLKALDDRIVFTELCREYGISTKCGYKWKQRFLEEGYAGLEEHSRKPLSNSRSIPEPVSVEMLRIKKLHPAWGAKKILAIYKRNHTGKYAPARGSVENLFVRAGYTGVVEEGTCAAARADSVIVP

SEQ ID NO: 82015 - protein, 142 aa, Unknown
  Obtained from environmental sample
  misc_feature (1)..(142): Xaa is any amino acid
ADSLTLDYMTSPLYDHRNEVVVADRGLAKFSGSNGTGEAKITKHNFNRIELDVNTDKEAILWLSEIWYPAWKATVNGKKADVRRANYSFRAITVPSGHSKVVFKFDSTLFNIGAIISGLTLLLSLAYLIFVWCFPSVRIKRL

SEQ ID NO: 82016 - protein, 207 aa, Unknown
  Obtained from environmental sample
  DOMAIN (46)...(149): DnaB-like helicase N terminal domain
  misc_feature (1)..(207): Xaa is any amino acid
MKRRPPARTAAAEMKPLRPRKITLLKKRPRPRRQKRPQMAKLRENVPPHDDELERAALGSLLADNQAIDAARQNHLRQEDFYSRAHQRIFETISALDIHNLTPDIQTVIQELKQNGKLDEAGGAAYVASLTSVVPSSANIDYYIQSVLDHSLRRSLLRVASDIGVAAYDESMESHEILDKVEENIYKLRDERQAFPYKKLAKFYCLH

SEQ ID NO: 82017 - protein, 323 aa, Unknown
  Obtained from environmental sample
  DOMAIN (8)...(321): Glycosyl hydrolase family 57
  misc_feature (1)..(323): Xaa is any amino acid
MTPRGYLSIVLHAHLPFVRHPETNYMMEENWLYEAMTETYIPLLAYFDNLLSDDIRFRMTLVLTPTLCAMLSDDLLRNRYAAHIGRLIELADKEVRRTRHNATMNRTARMYLERFLLCQYIFEDKYGRDLVAGFRKLQDAGVLEIMTCAATHGYLPNMQSNANAVRAQVDVAVRSYHGFFGRRPRGIWLPECGYYRGLETVLHNCGLRYLFTETHGLLDADPRPPSGVHAPVRCKEAPVAAFARDAECSRSVWSADEGYPGDPHYRDFHKDIGHDLDMRYIAPYVDPAGIRIHTGIKYYRVTDKRNPDKQLTRGKRARPSTPG

SEQ ID NO: 82018 - protein, 272 aa, Unknown
  Obtained from environmental sample
  misc_feature (1)..(272): Xaa is any amino acid
VELPRNNWHFFRILVCLAFRELGLPVNEKAEEESYSIIESCYRDEGWYADGPAGAFDLYNPWAFHFYGLIYARIAGNRNPARAARYVERAKLFAPRFAQWFRDDGSSIPYGRSLTYRFSALSFFSACAFAGVEALPWGVMKRIVLQGMRHWFSRPILDKGGILSIGYGYPNLIMADRYNSPGSPYWALKMFLVLALNENHPFWQAEETPLSNQPQVTADKIPGLIISRNADDVQFLCSGRIAPFEMNMPPRVLQVRYSARFGFCVAHGGAKL

SEQ ID NO: 82019 - protein, 332 aa, Unknown
  Obtained from environmental sample
  misc_feature (1)..(332): Xaa is any amino acid
DRIAVYRLWKGNDRLGQRYVWKYGKSAPLDAELIEAPNNPPMIRWLKTLMKGECIHGRLDIMAEDEAAFLGLLGIRSILFVPIFTYNKFWGMVVLEDHTNYRYFAEDCLDLLCAAARLCANAFIRMEMTHHIDDAFAKLERREQLVDTLNKMAIVFLSQSEGNFEDTMTVGVGKIADVIHLDRFSIWRNYPMPDAMHVSQIYRWDREAGGTTVPLKGLTDVTYAQFAPRWEKLLASGETINSPAKLLPEAAILQSFGCVTAFVTPLFINNVFWGGALFEDRHSERFFEEDCIEVMRSAAFLCANTFIRAEMERKIIDANGLTMPSADLILGL

SEQ ID NO: 82020 - protein, 76 aa, Unknown
  Obtained from environmental sample
  misc_feature (1)..(76): Xaa is any amino acid
MDKKLLEVLRIGIFYDGYYFYKISNYYKYEHEKKSRISISGLHEFIRGEIASLTNMDVRKCQIIDAHIQRASRNSR

SEQ ID NO: 82021 - protein, 317 aa, Unknown
  Obtained from environmental sample
  DOMAIN (1)...(267): Bacterial extracellular solute-binding proteins, family 5 Middle
  misc_feature (1)..(317): Xaa is any amino acid
MAGSAMHAIQKYGANWTRVENFVGNGPFVLSERVPNSRTIVVPNPNYWNKDNVFLTKITFIPIDDDNTVYNMYLNGEIDWSTGIPVSRIDEVKLHKDYNVSPQLGTYYYVINNKDHKPLNDIRVRKALSMAIDRQELVTKVTKAGQIPATALVPPMPGYTPTTGNGFNVTEAKRLLAEAGFPNGQGFPTFTVIYNTNEGHRIIAEYIQQSWKNNLGINVNLQNMEWASFLDFRRTSGMQIGRAGWIADYMDPQNFLELLISNTGNNDGQYSNAQYDSLLRQAATMPGGAQRNPIMRQAEDIAITDEQAMIPIYWNVS

SEQ ID NO: 82022 - protein, 160 aa, Unknown
  Obtained from environmental sample
  DOMAIN (2)...(159): Binding-protein-dependent transport system inner membrane component
  misc_feature (1)..(160): Xaa is any amino acid
AFNADFRIWAQWVPTAGWIDRFGYKAMILPVITLALNQFARIARVMRASMIETLRSDYVRTARAKGLSMPTIIGRHVLKGASLPVVSLLGPALAEIVVGAVATERIFAVPGMGRQIMNASTNRDYTLLMGTIVTYAIVLIVMNFIVDIAYGFLDPRITYK

SEQ ID NO: 82023 - protein, 149 aa, Unknown
  Obtained from environmental sample
  DOMAIN (1)...(147): Phosphorylase family 2
  misc_feature (1)..(149): Xaa is any amino acid
MAVIGVIGGSGLDNPDILKNAKDEVVATPYGASSSPLKHGTINETQVVLIARHGRQHTITPSNVNYRANVSALKTAGCTHIVATTAVGSLREEIRRGDLVIIDQFIDFTKQRKMTFYDQLKAGAPKLCPRAAPFDENLPQILISNRRNI

SEQ ID NO: 82024 - protein, 74 aa, Unknown
  Obtained from environmental sample
  misc_feature (1)..(74): Xaa is any amino acid
MNDAFMNTYHRLPVILAKGEGAWVTDINGKKYLDFTSGIAVNCLGHAYPPLVKAISDQAAKLNHTSRPNLSWGT

SEQ ID NO: 82025 - protein, 225 aa, Unknown
  Obtained from environmental sample
  misc_feature (1)..(225): Xaa is any amino acid
MRICDKIDMIPAIHGAEMFAREARRVCSDGKYDCIAVDIPELFQDDLAEAVDELPLISALIAYTPNIYGGGRAYGSVGIDVDIDNDNDDDDLPFCYYIPIDPCDAMIEGVRQARQRRVPFRCVGSYTLRPPIPMAAMPDEYSVNKIGFDAYTLLCRTAVKDMFNGKGMSAVNNNNGDDNSQSPRESFLAHYSETIRTDANIIAGNLRELQKRYGNILGIVHISRF

SEQ ID NO: 82026 - protein, 315 aa, Unknown
  Obtained from environmental sample
  misc_feature (1)..(315): Xaa is any amino acid
GGFFKFNRGDSLFWRRPGGIFRRVGGKPNDLGPDNRGNEIGPAKWKNPGWETLFSGTCWGTVPNPYEFILDAGENTFRLEGINEPVPIRTLCVKAPVPAEKYRQYATTMDTGMYRNTVSGFLFKIQGEHALYRSDPSLYAIYDRSSGATEPPSVAKIKLNMIGGQSWRVAGQWIEWDFFVPESGMYRFTVKGRQNYNRGFVSNRMVMIDGQVPCMELAAVPFTYSNKWKLATFRDDQGDMLFPLEQGRHTFRMQAAMGGMGEMLSVMEESIFRLNGIYRKILVLTGTEPDIYRDYRVDVVYPEIITAMARKAKSL

SEQ ID NO: 82027 - protein, 312 aa, Unknown
  Obtained from environmental sample
  misc_feature (1)..(312): Xaa is any amino acid
LGTASGFFGVEKVFVRLDSGAPAEAEGTEYWSKLVEFGKIKDGKHSFFFRANDTKGTPGPETRVDFILDTTPPKIELLSNKTGGTISRSVNIKGKASDPNGIKKVELSEDGKNFTELRFSKRKDFVNFDIPVNIAGMPDGPKTYFVRAVDTTGAITVKSYMFLIKNNAPALEVFTPAPGEVVFNTFMLSGRAENKTGTVKLSYEWGKLKGDIPLRAGDPYWSVPIVAAKGAGGNIKVIAKDKGKTVSVTRRVEYRSEGGADVSRYTNIQFISPSKGEVVSGGQTVIGFIEHPVLIQGVAYSQNGFQFQEVPL

SEQ ID NO: 82028 - protein, 318 aa, Unknown
  Obtained from environmental sample
  DOMAIN (201)...(283): B12 binding domain
  misc_feature (1)..(318): Xaa is any amino acid
MTGGAKARKILPMAVDFGCPVIALTIDDEGMAGTVDRKMDVAKRLIELACGEYRLPEHYIYIDPLVFTLVTGDAGTANAALDSLEALRRIKAEFPNVRTVMGVSNVSFGLKPAARRILNNLMLHHAVKAGLAAAIFNPLHVDDINTYDKDVRELGENLLLNRGGDALQKYVEYFVALEASSKSVKKDKSNVDKSIDTKTSQSPEERLHAAIIDRDKRNLSELIDKLLSVRKAPDILNNILLPAMAEVGDLMARGEMILPFVLQAAETMKDAVSILEPHFEESGGGAVKGKMVIATVYGDVHDIRKNLVASILRTQGFD

SEQ ID NO: 82029 - protein, 189 aa, Unknown
  Obtained from environmental sample
  misc_feature (1)..(189): Xaa is any amino acid
LYCVDEMNIVIQTLREHIADRNVRFVFPSQIASDLWARKTCTLGIARSVAKDRFLAWDDFKKEAIQEKETRRKPATAVMRDLFADALTKRNTEESFLKSLIPPEYSGNGKVFAPFIARLLPSLKYWETLWIKLMQKFPNRQRDAEDDDYETVKKEYEAFLERFDLFEPSWPELKTHEGKMRYIISFRAH

SEQ ID NO: 82030 - protein, 322 aa, Unknown
  Obtained from environmental sample
  DOMAIN (96)...(247): Phosphoribosyl transferase domain
  misc_feature (1)..(322): Xaa is any amino acid
MLRGAFSLAIVCNDDKLIAIRDPNGFRPLCIGQNELGYAVVSESCALDACDFKFVRDVLPGEVVVIENGEIKSEGIKLKNKEDNRGLCIFEYVYFARPDSVIDGLSVYKTRHNMGLILAEEHPVDADLVCGVPDSGLDAAVGYSEKSEIPIAAGFVKNRYIGRSFIYPTQTQRDNAVKLKLNPLAASISGKRIVLVDDSIVRGTTSEKIVRSLKNSGAKEVHMRVSSPPFRHTCHYGTDIDSEENLIANKMSLEEIRTKIGADSLGYISIEGLKRACDGCSLDFCTACFTGTGESSRAKKMYLIRNSKCLFTKPLTRPKEPE

SEQ ID NO: 82031 - protein, 320 aa, Unknown
  Obtained from environmental sample
  DOMAIN (127)...(263): 3' exoribonuclease family, domain 1
  misc_feature (1)..(320): Xaa is any amino acid
GEIMIEALRKAHKMIIEFCFLQEKLRELAGKQKLPLNIPDYSLENKDAIRAAAYPKLETACFLPGKQERHDAIKAVKTEFETAHTAQLEDEKQKKLFNALFEDMQYEILRSSILNKGKRVDGRGLEDIRDITCEIGILQRTHGSALFTRGETQALVVTTLGTVFDEQIFDDIEGDKRENFMLHYNFPPYSVGEVGRMGTGKREIGHGHLARPSSEAMVPSKEIFPVYGAACFPKKGNQNGSSFNGVPFWGGAPFSRAFHAGVPKEKNPGWPGIPHGPSFSPREKPGPQNKKNSLGFFLKIFRGERKKTPRGANRGLLKEG

SEQ ID NO: 82032 - protein, 295 aa, Unknown
  Obtained from environmental sample
  DOMAIN (112)...(191): Cache domain
  misc_feature (1)..(295): Xaa is any amino acid
LENKITELKALEKNIQAIMRLSDKDKADILGKLLYSISDQPVVSDVYVTFERGAYFGADKTEAGKYYNIEAFLSESGKREIFLDPVEVADDDDWYNGPKETKKIHMTEPYGWTYPDENRERKMFTLSAPIMVDGTFVGVAGIDLQLDLLRKHLFDKMTDDKRGSYAVLVSNDGLMATHPVDELVLGEIGEDMEAADRQALKDAIKNGEYRRVLKKSLKTGDFSLVSYVPMLPSGLESPWSLASSVSLEAVQAEAKKAQSSLIMLGYSWRVAGGDISVNIYVRHLREHHPDRRRAR

SEQ ID NO: 82033 - protein, 67 aa, Unknown
  Obtained from environmental sample
  DOMAIN (1)...(67): Carbamoyl-phosphate synthase small chain, CPSase domain
  misc_feature (1)..(67): Xaa is any amino acid
MTAYLVLENGTVMKGEYFGAQGEITGEVVFATGMTGYLETLTDQSYYGQIVLQTFPLMEITELSRPI

SEQ ID NO: 82034 - protein, 294 aa, Unknown
  Obtained from environmental sample
  DOMAIN (163)...(294): FtsK/SpoIIIE family
  misc_feature (1)..(294): Xaa is any amino acid
LLGKKEEKLKDNGNSGELRMESGEYIEKSNSQLSTLNSQLTKNEENKVQYEEYRIPFPAEILAPVPDQTVDYSEQELHEIGMDIESKLDNFKVKGKVTGIMTGPVVIRFEIEPGPGIKVSRFESLADDLALLLKTASVRVISSIPGKSAVGIEIPNRKPQTVFCREILESSKFVKDPKRLQVVLGKDIMGDAFVTDLTKAPHLLIAGQTGAGKSVCINVLLASILFSTTPDEVRLILVDPQVVELAMYRDIPHLLHPVITSPEIAVQALKWLCVQMDRRYGVLANAKVRNIEGL

SEQ ID NO: 82035 - protein, 302 aa, Unknown
  Obtained from environmental sample
  DOMAIN (1)...(272): Beta-eliminating lyase
  misc_feature (1)..(302): Xaa is any amino acid
LENVGQIGTRTAELINEHAAKNIGVVIMTITNNSAGGQPVSIANIRETSEVCKKHGIKLCIDAARFAENAYFIKRREEGYANKSIKEIVREVFSYGDLFAFSAKKDAIINIGGLIGVKEDAALFQGCKERTISFEGFISYGGLSGRDLEALAIGLYEGINEDFLEYRIGQVEYLASLLDDAKIIYQAPAGGHGVFVDARSMFPHIPYNEFPAQALAVELYREAGVRSCDIGSYMLGNDPDTGKQLKSTFEFTRLAVPRRVYTQAHFDLIAEALVEIKKRADKVKGYRDYLGASGTAALPGAS

SEQ ID NO: 82036 - protein, 336 aa, Unknown
  Obtained from environmental sample
  misc_feature (1)..(336): Xaa is any amino acid
LVIAVVTAPLYVYGTGQEFENNRIVLSKGNSSVSYRSKGKQRAFDPSNFTIPQAQNYYFALSNWQDLSYTRWYQNASSLRNEDDVTGYLSEALRQNNYNAALNSIPRDFTGSTQHTYKSAAFLGGMTSAYRTFVSEENKMLNAIKTLMNENSLDILKEEHIIDYLLTRGDTVLAYDIIRLIQETKSEKLTIDYCPGLLEAYSDIKRWNTSIDNPVEPLIEQILILVSENLSKDTVSSLVYASGSKERDLYFSVRLGNTLINWAEDAKNADWADIGRSLVLSALTNAGPGAGNLYANLKLSEYYPRALWLAENRIWAWTVSPFRQPSWQDGHLNISF

SEQ ID NO: 82037 - protein, 81 aa, Unknown
  Obtained from environmental sample
  DOMAIN (31)...(64): Tetratricopeptide repeat
  misc_feature (1)..(81): Xaa is any amino acid
MQDRLAEYRTGKFRHADIALSTAVHWMPSNAAWWTRLAYARENAGDYIQAVEAYEKAISLNSQLTDARRGLERVRQTLGNR

SEQ ID NO: 82038 - protein, 199 aa, Unknown
  Obtained from environmental sample
  DOMAIN (22)...(123): Uncharacterized protein family UPF0004
  misc_feature (1)..(199): Xaa is any amino acid
MVDAHLDNNAPSSAPLRLCVRKFSIFTLGCKLNQLESEAIADSFKKAGFRLVPWDLCALEPRIIIVNTCTVTSKADQKARRMIRKLLRDNPESCVIVTGCYAQLDTEEIKTLENKTGYAESAGYACCAGGTGRRLFVLGGGQGTTSSATAASSATAASSATAASSATAAGSESALLGLPQYLLDEIAREKYSQDSIQAD

SEQ ID NO: 82039 - protein, 151 aa, Unknown
  Obtained from environmental sample
  misc_feature (1)..(151): Xaa is any amino acid
MVRFFFPQAQLVWLRLPADISSYDTGIIIAKTAAKLKRKINVLASTDLTHYGVNYGFSPRGSGSAALRWVREVNDANFIKAVESGNSGDVLMRAAGDFSACSAGAVLGAMGFAKEAGLGGAKLLEYATSADTEDGEVPDSFVGYAAFAFGK

SEQ ID NO: 82040 - protein, 74 aa, Unknown
  Obtained from environmental sample
  misc_feature (1)..(74): Xaa is any amino acid
NGIPGNPRGIDHQHLRFVDCFIADNNNIARRREVKLGLDNEELVEILDGISMGDIVITAGQNFLSDGDPVRIVD

SEQ ID NO: 82041 - protein, 192 aa, Unknown
  Obtained from environmental sample
  misc_feature (1)..(192): Xaa is any amino acid
MPLPDHAFFELLRTVFGKIKTPFNKQNLVDDLEKFLKNNDIQKNITAYIDNNDARIITAVAVLNEPTVAELDAFFDGDLDHTELQDIVINLEERFILFRFLEHESRLALNPVLEAVLSPYTDDISSLLPSIHNKKLNKTDKQNAPFFDDRILAALLSFISQNEAFFIKEMRIRQKSLTWRKLCSQPCNLSLS

SEQ ID NO: 82042 - protein, 332 aa, Unknown
  Obtained from environmental sample
  DOMAIN (5)...(157): Type I 3-dehydroquinase
  misc_feature (1)..(332): Xaa is any amino acid
VSGGEAARIRLLQTGLPFAETDRRKNFAYVDIEEDMKVQSLEEAARRFGTRIIRSYHNTERIIDGIPAKLNSMKRTGDEIVKMALKANSTSDVVKVYRAAKESDVHDKIVLCMGHYGFYSRILCEKFGSYMTYSSALSETEVPGAAWQVDVKELNELYRFRNITKKTKLYGITGYPLKASISTWIFNLAFGFENIDAVYVPFPADSINNILELAEELGVQGLSVTVPYKEAVLSKLTRRSAVVHSIGACNFMSRSIDGWFGDNTDNTSFSAAITSFLGKKNLKWKKITVIGAGGVARSVAAEIFRMGGKALILNRTIHKAKDIASLTIPRSP

SEQ ID NO: 82043 - protein, 97 aa, Unknown
  Obtained from environmental sample
  misc_feature (1)..(97): Xaa is any amino acid
LAVCIALPLSAQSRGIVIPNLNGYVTLKCDFHIHTVFSDGNVWPTVRVDEAYREGLDAIAITDHIDYRPHSKDVIGSRNRSYEIAKIPPVQGRYSYQ

SEQ ID NO: 82044 - protein, 115 aa, Unknown
  Obtained from environmental sample
  DOMAIN (54)...(103): DNA gyrase C-terminal domain, beta-propeller
  misc_feature (1)..(115): Xaa is any amino acid
GKEKNADPLRVRLRQTHRIHGIYPRTDEEPGGQKIYTVAEKTGEIVGCVTVLDNEDIMCITSQGKSIKLKVNDIRIMGRAAQGVRILSIDKPDFVIGVDRIVKEDEAADKAEKAE

SEQ ID NO: 82045 - protein, 84 aa, Unknown
  Obtained from environmental sample
  misc_feature (1)..(84): Xaa is any amino acid
MIGDVVGDPGMEVLERRLPVLIKENSADFVVVNGEHAAGGFGLTSDLFNRIIAAGADIVTQRHHIWGKRDFCQPWTAKSGFCGL

SEQ ID NO: 82046 - protein, 324 aa, Unknown
  Obtained from environmental sample
  DOMAIN (162)...(320): Peptidase M16C associated
  misc_feature (1)..(324): Xaa is any amino acid
VGHDGSPLTGAIVDSGLGEDLSPVSGFERELRETSFCAGLRGLNCEEPGLPVDEAAKKAEALIIGELERLEKEGIPKEEIEAALLGMEFSNREIRRSGGPFSLVWMSRSLRAWLHGGNPWDSLLFASPFSELKRRIEEDDRYFEKMIRRYLLDNAHRAFVIIEPEENFLEKKEAALSARLEETEKSLGSTEKEAIRSKMAELKEAQEKEDAPEALAAIPHLSRSDLSPEIKGVKREYADLSGAPALFHPIFTNGISYVDLAFPLDLFPPEDYLWFPFFSRAAVSMGLPGMDYGEVSGLWPELPGGFTPCSIPARRLGRSDTWQK

SEQ ID NO: 82047 - protein, 78 aa, Unknown
  Obtained from environmental sample
  misc_feature (1)..(78): Xaa is any amino acid
MTGVINYGAGNLGSVMNALKRLSVQARFVSNVDELAPGTTPFERLIFPGDGHFATAMASLTKSGYDQAIRNLADHPEK

SEQ ID NO: 82048 - protein, 311 aa, Unknown
  Obtained from environmental sample
  DOMAIN (208)...(310): FliG C-terminal domain
  misc_feature (1)..(311): Xaa is any amino acid
MVLIGSEEASKILSKLDPDQVEAISKEIVTLKTITTKEAEGVLEEFRSLLSSPYGYSGSSSGGKEQARRLLYAAFGPEKGEALLVKAVPDAAENPFSFLSEFSGEQLALLFRDESPAACAMVFSRLPSKLSAAALANTGPERKLEIVKRIAKLNDTSPEVIARTAAAIKEKARHFGQSFPAAGEEIDGKGVLTAILKHSDVAFSGRLLDGLEASDPSLSKEMKERLYTLEDVANAADRPLQEKLRTMDDREIALLLRGRSEAFTQKIFWNISSARADRVKEESDIMGAVPKIEAEAAAREFLSWFRQSLDE

SEQ ID NO: 82049 - protein, 149 aa, Unknown
  Obtained from environmental sample
  misc_feature (1)..(149): Xaa is any amino acid
MKKIFFVVCLVFFIAGFAVAQVGPGGTLYVSVKTTDLKSSAGKKMATLNYGDKVTVTQVDGKNVEVKSATDATLIGWAPAANFTVQKIVTGSTSTTTAKEVALAGKGFNQDIENTYSSHGQVDFADVDKIEAITADETPLCVLLKRVVC

SEQ ID NO: 82050 - protein, 234 aa, Unknown
  Obtained from environmental sample
  misc_feature (1)..(234): Xaa is any amino acid
MGRTPGIICVCSFLAAVIVTLTNLNLSSDGPGDIRDFEVGKVADRDVIAEHSLSYIDNEATLMRVRAQENMVPAVFRSSENIGLEAIESWNKFCDLADKLVTEGSSRNSRQLAIQAEYRDFFTNDTLDAYFNAHDRHEFRTYGIKVLDSVLGKGVFTMDYVDLGSYNPDLAELIISRGDRVERERISYSGIITLANAADAITQTADSEQMPADFTDIAVSLLLPFVRENVFFSM

SEQ ID NO: 82051 - protein, 95 aa, Unknown
  Obtained from environmental sample
  misc_feature (1)..(95): Xaa is any amino acid
IKGVIDLIFEDAQTVHVVDFKTDSREFPQEHAAQMACYYWAVTDLFAVPANKECRVWLYYLRTGHAVEATGQARGYELRTHVTQDYKIDRNLTAN

SEQ ID NO: 82052 - protein, 277 aa, Unknown
  Obtained from environmental sample
  DOMAIN (2)...(276): Aminotransferase class I and II
  misc_feature (1)..(277): Xaa is any amino acid
MRKWFEERFSWTTEREWLTITPGVVNALYIAVRALTKPNDGIVIQQPVYYPFESSIRKTGRQLLVNELVYRNGRYSIDFQDFETKIKQAKMFIMCNPHNPVGRVWNRDELTSMGEICLRHGVTVIADEIHEDFIFPGHKHIVFAALNQDFANITVTCTTPSKTFNLAGLLCANIFISNKELRDKFKEEYAGCGLSQPGVMGIIACKAAYQDGAEWLHQLLDYLSENMLFLKTYLSEHIPNIKFIEPEGTYLAWLDCNELGISAQKLDETLTQKRKLW

SEQ ID NO: 82053 - protein, 292 aa, Unknown
  Obtained from environmental sample
  DOMAIN (66)...(287): N-6 DNA Methylase
  misc_feature (1)..(292): Xaa is any amino acid
MKGTTQGNLEFLPFGAWTDFNSRLSLQERERLNNEAVAILEKAEKGTISDTDKSILRRYSGFGGISASDERGVLYDYYTSPPVAHLVWQLLEKSGQIKSGANILEPSCGTGVFFEYAPKDKNLTFTGTELDERTAKVAQLLHDAENINILNSSFEAFNLSDKAGSFDHVIGNAPFGERSAALYALDMPEEKSLDNYFVSRSIDNLKDNGTMALIVAPGVLENKTNEEFRLSLNKKARFIGAVKLPNRSFHHTHTQVMPDILLFRKYPKDIQERLAAIDDGTFKTLPLYDNDL

SEQ ID NO: 82054 - protein, 263 aa, Unknown
  Obtained from environmental sample
  DOMAIN (106)...(227): Response regulator receiver domain
  misc_feature (1)..(263): Xaa is any amino acid
MVTSQNEFAASLYSDEWYYVFSGYGLYKKIKPLMEQGDSVFRGGKRPHLALMVERGTEEYIPNVRFISVPIQSLSIANTLNGKNDQRDYFKSSGNSSVIRNTYPNARLLVVDDIDTNLKVAEGLLSPYKVKIDTCLSGAEAIELVKLNKYDLVFMDHMMPEMDGIEAAAAIRKLETKEALGKNGRQIPIIALTANAVVGMREMFIEHGFNDYLSKPIDISKLDEILDRWISDKEQITEDREQITDNRELITDKQRTKSTFCYS

SEQ ID NO: 82055 - protein, 92 aa, Unknown
  Obtained from environmental sample
  misc_feature (1)..(92): Xaa is any amino acid
MAATKEEILEAIASMTVLEVSELVKMMEEKFGVSAAAPVAVAAVGAGAGAAAPAAEERQSSRYSKAFDEAKKLPVLKKSAPYRPWALKSKEP

SEQ ID NO: 82056 - protein, 287 aa, Unknown
  Obtained from environmental sample
  misc_feature (1)..(287): Xaa is any amino acid
LHTVADKDARQQAVADDYINCYKKGTDALVITATNEDRRNLNKIIRETLVRQKKIINVGDFTLLEPKNVKSFLFADAFTVGQQVKGLPQLKVDEEYGFGEVIHIDPNQNKITIRNTKTDEEFKIDPSDYVKKPFSVFDKSESTLGVCEKITFLKNAKVTDQNTGKTVNLRNGQLATITELDKCGNITVKVDKKKVKFKLGDYNYLTTAFALSLHKSQGMTVDKVIWHADTSKEVSTNSFYVAITRCKRDIAVYTDDIERLKIKAVTGQDKYSTIDVDEIYNHEYHKR

SEQ ID NO: 82057 - protein, 62 aa, Unknown
  Obtained from environmental sample
  misc_feature (1)..(62): Xaa is any amino acid
MILPPYHSKAVDGLITNSHLPKSTLLMLVSAFSTRETILGAYREAVAQGYRFFSYGDAMAII

SEQ ID NO: 82058 - protein, 200 aa, Unknown
  Obtained from environmental sample
  DOMAIN (3)...(115): Response regulator receiver domain
  misc_feature (1)..(200): Xaa is any amino acid
MKFKLLVVDDEKNIREGLAASLEMDGYSTVCAASGDEAWELYCKGDIDLVITDLRMPGMDGEELMRRILAETPGLPVIILTGHGTIENAVSAMHDGAWDFLTKPVNLDHLAMLVKRALENRELVLRHRELEADLERGRLLSGMIGKSTVMRKVFDTISRVAPTKASVLITGESGVAKNWSPTRSTNFTPQGQLGQSIQLK

SEQ ID NO: 82059 - protein, 311 aa, Unknown
  Obtained from environmental sample
  DOMAIN (98)...(311): Glycosyl hydrolase family 3 N terminal domain
  misc_feature (1)..(311): Xaa is any amino acid
RNAKAVTQENNTVNEPKKQLTIDEISEKWQRATDIAASLDDRLLAAQVLISGIDGNGSLNSNSVTLLSEFPTGGIMLFKYNLDTDNDSIRALINQTAALVNSESGIQPFIAVDHEGGTVNRFRRGTADLPDASSYWDLSLKQDRQTSFKKIENDSLRAGKELKDLGINVNFAPVAECLNDGNRVFLNRRSYGPDPLFTANAAQAFIMGMKQAGVFCVIKHFPGIAGSDPHYSASVINGDKAELEKLVFPFKTVIDNIYGGGAVMVSHTLVSALDGRIASLSKVVMEDWLRGELGFSGLLIADDFSMASAGM

SEQ ID NO: 82060 - protein, 309 aa, Unknown
  Obtained from environmental sample
  misc_feature (1)..(309): Xaa is any amino acid
MKKDKTVIYKCTSCGHEEAKWLGRCPECGEWNTLIETILKNETFNKRGLSKKDGGTAQTMPLSAVDPMEGSRIGSGIGELDRVLGGGIMKRSAVLIGGEPGIGKSTLLLQTAAAALTKGRILYVSGEESAGQLRLRADRLGLSADKNVMERIEILCSGNLEEIETVLNKIKPVLVLVDSTQTLYSENADSAPGGVNQMKFCSFELISWAKEHDAALILTAHVTKEGVISGPKTLEHMVDTVLYFEENDKTAGLNGNADCRFLRASKNRFGSTDEIGIFTMGEKGAYPRGRHGANVPVRRKRTPQGARHN

SEQ ID NO: 82061 - protein, 115 aa, Unknown
  Obtained from environmental sample
  DOMAIN (2)...(110): Resolvase, N terminal domain
  misc_feature (1)..(115): Xaa is any amino acid
MIYGYIRVSTDKQTVDNQRFEIEKFCLKNDLKIEKWIEETISGIKSPEKRLLGSLLAEVKKDDLIICSELSRLGRSLFMIMSIPKLFMLNEVRIWTIKDNLQLRKYIPSKVFGFP

SEQ ID NO: 82062 - protein, 291 aa, Unknown
  Obtained from environmental sample
  DOMAIN (99)...(263): Predicted permease
  misc_feature (1)..(291): Xaa is any amino acid
MGGKLEFEEGFFNIYSPDSVLLGTELARRLGLNTGGSVTLYSITGILSAQEESGPDEFIIKGIFRTGFYEYDCSWAFINIESGAFLEEDNGVDKGGAKGEKIGVKIKNRFQDRLVLERVKKRFSKEEDFKDVKFSSWRDYNRSFFGALRTEKLFMFILVGLIFIVVALNIFQSQRRAVLQRREEIGLLRAIGGQEKAVRFVFVLDGAFIGLTGAGLGLILGLLIASHIPQFFSLVENIVNNVIGLLNTAAGLFGAQKTANFGVFSPTVFYIKENPLRDNTRGSYFKFSCLG

SEQ ID NO: 82063 - protein, 159 aa, Unknown
  Obtained from environmental sample
  misc_feature (1)..(159): Xaa is any amino acid
MRKKKKESQIPLLPIDTEKIETRAVLRKEAQTRQILAELKGFAPVIPNQNILVSAIVLQEAQDSSAIENIVTTQDELYKNLTMQPQYMDPMTKEVINYRGAVYAGYEILKKKQLISISDIVKIHEIIVENNAGIRKLPGNTLVNSATRRNRLYARRRAT

SEQ ID NO: 82064 - protein, 102 aa, Unknown
  Obtained from environmental sample
  DOMAIN (3)...(102): FAD binding domain in molybdopterin dehydrogenase
  misc_feature (1)..(102): Xaa is any amino acid
MYDIEDILEAESPSHAVELLRQNPDAKIIAGGSDVLIEIREGRLAGRTLVSIQKLDELRGVTINSDGAIRIGALTSFSHVAQDPVIQKNLPVLRRACLLHNL

SEQ ID NO: 82065 - protein, 285 aa, Unknown
  Obtained from environmental sample
  misc_feature (1)..(285): Xaa is any amino acid
MPGAGLGIEKLDERKILNTLREGGDVASRLEHFEPRQAQLDLMELAIRCFNENAIGAAEAGTGVGKSFAYLLPAMYFAVESGERVVVSTATITLQQQLFGKDIPLVKDAINARVKAVLVKGRGNYLCYRRLLDALREPELAGSSEQEQLEDISRWAETSKGGGREELAFVPIESVWSRVCSDADLCMGKACPEQSRCFVLALRREAAAAKIIVVNHHLLFADLAARRGGASYEAAAVLPPYSRVVIDEAHTIEKAATSFFSGEFRRIRILHYAGRLYPQPQTKKN

SEQ ID NO: 82066 - protein, 318 aa, Unknown
  Obtained from environmental sample
  DOMAIN (19)...(318): Poxvirus D5 protein-like
  misc_feature (1)..(318): Xaa is any amino acid
MDFRFRTKTDELDCHPWLLNVKNGTIDILSGEFREHRQEDMITKIANVEYDPKADCPMWKKFVREIMDYKTDIIKFVQTAAGWSLSGDISEQTMFILYGTGANGKSTFLNTIMYLLGDYATATPTETFMKKAGDNYSNDVARLRSTRFVTTTEVEQGRRLSEPLIKKITGNDEMTARFLYGEFFNFKPTFKIFMATNHKPVIKGTDYGIWRRIKLIPFTERIPEEKQDKHLELKLREEASGILNWLLEGIANWKQERLKTPKAVLFATDEYRGEMDVIGNFITEKCDQKKEMTILLKKLYKAYSEWCLVPNLIPWLNK

SEQ ID NO: 82067 - protein, 259 aa, Unknown
  Obtained from environmental sample
  DOMAIN (1)...(199): Homocysteine S-methyltransferase
  misc_feature (1)..(259): Xaa is any amino acid
VAGSMGPTGKSAGLSPDVNDPAKRSIYWDELEAAFYDNARGLLDGGADILMLETIFDSLNAKAALFAIKRLLDERNIDIPIIISATITGDSGRLLSGQSLEAFYASVLHAAPWAIGLNCSFGAEKLLPHIRRLSAIVPCFVSSHPNAGLPNKLGAYDESPESMALQVEKYLQEGLLNVIGGCCGTTPAHIAAITAKAALHKPRPLPQSPSPQPLLLSGLEQLEIKTSKPDTTNPHSPLPTPHSPLPIGERTHVSGSKKF

SEQ ID NO: 82068 - protein, 297 aa, Unknown
  Obtained from environmental sample
  DOMAIN (187)...(269): Sigma-70 region 3
  misc_feature (1)..(297): Xaa is any amino acid
GEGGGGLLKNPLFWGGEKFGGPSLLGGPGVFEKPHSPPQNRGGVRVGGGFSPKQKGVPISGGGRPPHSLDIEGRDPWGPTKGFAQKLGAAVHPAEPAEDEVCAGPLTAKMQAMVEESLPLVKYIALRIANRVPKSVELDDLIGDGVMGLLSAVRHFDPARGAKFKTFAEPRIRGAILDSLRNLDWVPRSLRQKQKDIEDAYHVLSMRHGRAAEDEEVALHLGVPLEELHKSLDDLKGVSLGSIEDSAGEGEGLLAFIADPDAEDPHHALHGKEMKGLLVKMVSELPEKDSADSDPGW

SEQ ID NO: 82069 - protein, 321 aa, Unknown
  Obtained from environmental sample
  misc_feature (1)..(321): Xaa is any amino acid
FVGEPRPGRNIGTTITAYLASLGTTTNGKRAAYAHIVFNVIGVLWITAIFSFYITCIRKFIGHDPNTMVIVNGAETFPYIQAGIAAVHSGFNVFNTLLFLPLTNVLAYVLIRAVPDKPYKEPPKLTKLGNHLVDSPMVGIAQARYELINMGKHDREMLDKLKAILSGGVVGGVEGLENEDKLLGSIFYKEEVMDNIQREITAFLTEVLSGNVPRSIAEEAQIQIRLADDYETISDYITTLAKLYKRIKNTTGVEMPQIMRDELISLHDSVSDYFDLVNHAFSVNNKAIISKAHPQGDAITHKFRDLRGRHLAPVVGDPAWT

SEQ ID NO: 82070 - protein, 140 aa, Unknown
  Obtained from environmental sample
  misc_feature (1)..(140): Xaa is any amino acid
MALSKEQEEWLGSIGSEPENVDEVPKELLTEEFCIAAVRQDGLALEYVPEELKTEAVCLAAVQEHGWALEYVPEALKTEAVCLAAVRQIGNALKYVPEALKTEASTFGSIGLAAVKQQPNTLGDIPDALKTEALCLAAVQ

SEQ ID NO: 82071 - protein, 292 aa, Unknown
  Obtained from environmental sample
  DOMAIN (1)...(209): tRNA synthetase class II core domain (G, H, P, S and T)
  misc_feature (1)..(292): Xaa is any amino acid
MTQFHDDIVGLDAAILMHPRTWEASGHVENFTDPLVDCKKCKARFRADQIPPENLTAKKCPECGGELTDTRKFNLMFKTHIGPAEDTASIIYLRPETAQGIYVNYKNIIQSNRMKIPFGIAQIGKAFRNEIVTKNFIFRTCEFEQMEMQFFVKPGTDEEWFNEWRKRRWAYYERLGVKMDHLRWHQHGPDELAHYAKDAYDIEYLFPMGWRELEGVHNRTNYDLNRHTQFSGKDMQYIDQDNNNERYIPYIIETSAGLTRNLLMILCDAYDEEQVAEKATTTIGARYFGSIP

SEQ ID NO: 82072 - protein, 110 aa, Unknown
  Obtained from environmental sample
  DOMAIN (54)...(110): Bacterial regulatory proteins, luxR family
  misc_feature (1)..(110): Xaa is any amino acid
ARSPIHITAGNGHGSLRLCAKSANPEEFLAAIEAVLSGVPYVYTEHQTRNKQDSVKLTSRENEIAALVKQSLTAPQIAERLNISTRTVEKHLERIYVKTETSSWEELHNL

SEQ ID NO: 82073 - protein, 85 aa, Unknown
  Obtained from environmental sample
  DOMAIN (20)...(73): Sigma-70, region 4
  misc_feature (1)..(85): Xaa is any amino acid
GLPGQIGRESDVVVVNDEIRRVIVEAINELPDKEKKILVLYYYEDLTLKDIGRVLQVTESRVSQLHSKAILHLRSKLTNIRKGIV

SEQ ID NO: 82074 - protein, 226 aa, Unknown
  Obtained from environmental sample
  DOMAIN (1)...(178): NADPH-dependent FMN reductase
  misc_feature (1)..(226): Xaa is any amino acid
MKTVIIYGIEHKGSTHNAVQLFKNELGIRDDNLTEFFLPRDMPRFCTGCNACFMEGERFCPHSAYVTPIKEALINAELIILASPVYLFHVTGQMKALLDHFGFQFMNHKPNKAMFSKTALVVSIAAGAGTKSAMKDMTGSLEYWGISRIFKFGFAIFAANWDEISKKNKSKIESRIKKISNAILAKGRQVGPKLKVKGLFYLFRMMHKNTDSIANDKEYWKRQGWL

SEQ ID NO: 82075 - protein, 62 aa, Unknown
  Obtained from environmental sample
  misc_feature (1)..(62): Xaa is any amino acid
TCAVFEPNAICAGTNAGLYPTPGTLSTVMYHTGLDPRTMKPVYVAKGEKERRKQKESLRVKK

SEQ ID NO: 82076 - protein, 282 aa, Unknown
  Obtained from environmental sample
  misc_feature (1)..(282): Xaa is any amino acid
MRDSGVYEMELNSGYNTVRYRQDLTEAIDSVPGKANCAAFNQSERFCLSELWLLTERSAAEGRLPGLSTAFPEAIGKEGLYLPVNHAMDQGSLRPYLQTIENSKLNMVVIDMKDDYGRLRFTPSNPSMLNLGRVFRPVDIDTFLKTMKERGIYTVARIVVFKDPEAANKESGRYAVWDAVTNKAWEGYYDTRRKKTNVPDEPDPNHVTAILPANDPEYEILRTWYDEKWVDPYSESIWDLHVSICEDFARRVLTKFSLITFDSPTDGINLGHAPLSRCGQRN

SEQ ID NO: 82077 - protein, 124 aa, Unknown
  Obtained from environmental sample
  misc_feature (1)..(124): Xaa is any amino acid
MDQNLTEIVFILDRSGSMGGLENDTIGGFNGFVKKQAEMGETSLTTVLFDDRYEILHNGVDARNVTLTDREYFTRGSTALLDAVGKTINDLGRRLNETAEEKKPGKVIFVITTDGPRPILIHAK

SEQ ID NO: 82078 - protein, 224 aa, Unknown
  Obtained from environmental sample
  DOMAIN (1)...(208): Bacterial export proteins, family 1
  misc_feature (1)..(224): Xaa is any amino acid
TRRHVSLPGGTLSDLRYETFSFRFLLLLIGEGISGIIMGFYLTVIFAAFSTAGQFFSLQMGFGASETFDPVAQVENPLMGQYFNLVSMLIFVTIGGFHQLFLGGFWRSVQSLNIMSLIDGREHLVGMFASGLSRLFMDAIVISLPILGTLLLTSLTTGLISKAAPQVNILSEGFPISITTAFLLIFASLPFMIEAFTRVIDSGFRNIEALYIQIGRQITEGGGF

SEQ ID NO: 82079 - protein, 76 aa, Unknown
  Obtained from environmental sample
  misc_feature (1)..(76): Xaa is any amino acid
VSGDYTYKDFKAWAGTTTSTQLGSVGSSLTTTFKDITVPLSGSLAANTDGIMEIGFGFPNANAFVYEIKSIELIPK

SEQ ID NO: 82080 - protein, 86 aa, Unknown
  Obtained from environmental sample
  misc_feature (1)..(86): Xaa is any amino acid
MNEIRAVAFGGNALSGGKFSITGSIFGAYTIEILNMTLLRLRVDPEPIKAYKAAFIILLMLASSPVVKEYAGKLWNNRKFTIKGEA

SEQ ID NO: 82081 - protein, 73 aa, Unknown
  Obtained from environmental sample
  misc_feature (1)..(73): Xaa is any amino acid
FFANDRLAETPRFVLNWAAAMQIQFHVCDLNQTFKNMREQWAKLYLKHFVTQAKKRASDMITKFVKPFEKYLG

SEQ ID NO: 82082 - protein, 133 aa, Unknown
  Obtained from environmental sample
  misc_feature (1)..(133): Xaa is any amino acid
MRLFPFASMNAPESQHTEISQEKLAVLIDADNTQPAIIEGLLNEVAKYGIASVKRIYGDWTSPNLRSWKEKLLTNAIQPIQQFSYTSGKNSTDSAMIIDAMDLLYSEKLDGFCIVSSDSDLPVLRRSRAAKNP

SEQ ID NO: 82083 - protein, 207 aa, Unknown
  Obtained from environmental sample
  DOMAIN (15)...(110): Methyltransferase domain
  misc_feature (1)..(207): Xaa is any amino acid
EQNPGPPSPGPRSLLDIGCAYGAFLAAAKEEGFSPQGIDPSEDAVRYVTQTLGIRATQGYFPTPNYSSFLISHSSFDTVTLWYVIEHFRDCVPALSEIRKLLKTGGVLAFATPSYKGISGRSSLKRFLENSPQDHWTVWSPAICGKALGKAGFKVKKIVSSGHHPERFPIIGKFTHNKVSLLYRMLLAASRIFSLGDTFEVYAVKER

SEQ ID NO: 82084 - protein, 261 aa, Unknown
  Obtained from environmental sample
  DOMAIN (151)...(259): Glycosyl hydrolase family 67 C-terminus
  misc_feature (1)..(261): Xaa is any amino acid
MLAKAVKPFGGVIVWRCFVYNCVQDWRDKNTDRARAAYDHFMPQDGAFDGNVILQIKHGPYDFQVREPVSPLFGALKKTRHVMELQITQEYTGHQIDLCFLPWMWEDIMRYDSAHGEKSSIRELAEKRRESQDGIEGFSAVVNVGLDENWTGHTLAQANLYGYGRMAWNPAVTAKEIAGEWSVLSFTEGEAAHKTENILLKSYPAYEKYNAPFGVCFMVTPNTHYGPNIEGYEFSRWGTYHRADANSIGMTDAVDNPGGKR

SEQ ID NO: 82085 - protein, 217 aa, Unknown
  Obtained from environmental sample
  misc_feature (1)..(217): Xaa is any amino acid
MSKPNIELKKGQILDSGFVILDIVDMDEMQAMGVWAKHEKSGAEVFHVLNDDSENLFSFTFKTFPQDNTGAAHILEHSVLCGSQRYPLKDAFMVLAQGSLQTFLNAMTFPDKTVYPASSTNEHDYFNLMSVYGDAVFRPLLPEWTFMQEGHRYEYHDGKLTITGVVYNEMKGAYSSLDSFASTWSVKAVLPGTPYAFDSAAIRQKSAVIMGRIKGFS

SEQ ID NO: 82086 - protein, 301 aa, Unknown
  Obtained from environmental sample
  misc_feature (1)..(301): Xaa is any amino acid
MDKGPAPDGEEYFITALLFAHARWGSSPSGINNYAQQARQVIYDLTRRKPGNGDPYGEPSMFNTDNYMVRFATLGNSAKFTDPSYHLPAFYEVWALELQSDYDNNKLYGIWADKADLKKDIDFFKQAASVSREFFAKTTHATTGLGPDYAEFDGSPRNEGDHKHFEYDAWRIAMNIGMDYAWWAADPWQITFANRIQAFFVSKGVTTYGNRWTLDGTQRGADHSPGLVGCNSVASLAATHENAWKVIEDFWYISMTKGKYRYYDGCLYMMSMLHFSGNFKAYLSSHTTPIPSSSITRQPRH

SEQ ID NO: 82087 - protein, 107 aa, Unknown
  Obtained from environmental sample
  misc_feature (1)..(107): Xaa is any amino acid
MVRLAVDVDSGDFGPEAMVRGVIAARLAASEPFAVCLCGEEGRIRRVMADIGEDAERCEFTIEHCPEVISDGDRRSTVWKTKKGSSIVRCVTLQKEGLSDASVSAGD

SEQ ID NO: 82088 - protein, 227 aa, Unknown
  Obtained from environmental sample
  misc_feature (1)..(227): Xaa is any amino acid
VSSAVLYMVLCQSLGINAKGVMTKDHAFITITIGDTDIDVETTNAYGFDPGNRKEFHDQFGRLTGFSYVPAKNYRDRQTISRIELVSLIMNNRIVDHERQNQFADSVPVAIDRAALLAGNALTVGSIKDTQDTIFTDPQEDLMDRLLNFGAMLLRAGKEEESLQWAAAASPVYPDEKRWQEFIMAAVNNHLLRLINLNRHAEARSFIDGQKSVFSCRCCPCRGGIWG

SEQ ID NO: 82089 - protein, 161 aa, Unknown
  Obtained from environmental sample
  DOMAIN (15)...(161): Phage integrase family
  misc_feature (1)..(161): Xaa is any amino acid
MTLRNSRKYEKRQGILRFIWFFKGGNPKNSALEKNLKHRLLLMLVYSSGLRVSEVVALKREHIDLSRKVIYIKRGKGRKDRCTLLSEKAARFLNEYYTFYGIQTWLFPGQPTTSSLTIRSAQHIFDNAVRRAEISRKLSIHSLRHTFATHLLESGTDIRYI

SEQ ID NO: 82090 - protein, 136 aa, Unknown
  Obtained from environmental sample
  misc_feature (1)..(136): Xaa is any amino acid
MPFKGVDIMDVKKEFVLKALDERVVFTELCREYGIGTKCGYKWKQRFLEEGYAGLEEHSRKPLTNSRSIQEPVSVEMLRIKKLHPAWGAKKILEIYKRNHTGKYAPARGSVENLLYARATGASRAEFCPWGGGDGG

SEQ ID NO: 82091 - protein, 263 aa, Unknown
  Obtained from environmental sample
  misc_feature (1)..(263): Xaa is any amino acid
CARTPVQPHLQVQNDLPIRLYGITPVMVEDARVVIIPQIKTQDNWQAESKVSFTVSEANGRPMAYTVAVVDEGLLGLTRFNLPNPKNTFYARDASFIKSWDLFQEVIGAFSGKLETLLAIGGGGGVDDDVDDPEKETQRFKPVVRFFGPFEIGRNGQKTETFDLPPYIGAVRIMVLAASSTSEPQTGRALRGYGIAQTSVKITSDLMVFASLPRVLSPADEFDVPVYVNTQRDGRRSVKVNLSAPGAVIQGASSQDVSFEKRR

SEQ ID NO: 82092 - protein, 65 aa, Unknown
  Obtained from environmental sample
  misc_feature (1)..(65): Xaa is any amino acid
VYRLNDWDISDDGRTAEDALQNGNRLLTGNGYLGRRGVADEAEAADMPATILSGLYDRQGDLWRE

SEQ ID NO: 82093 - protein, 320 aa, Unknown
  Obtained from environmental sample
  DOMAIN (2)...(320): tRNA synthetases class I (I, L, M and V)
  misc_feature (1)..(320): Xaa is any amino acid
VQGWSGSLYFGRKPAYPAYYKNEGDYKIIWRKKGAELKGIEYEPLFPYFSWAAESNAFRTYLGGFVTTEDGTGIVHTAPGFGEDDARVLKGTGVPVLVPIDEECRFTSEVPDYAGLFVKDADSAIMARLKAEKKLIKKEQILHAYPHCWRCESPLIYRAISSWFVSVEKIKQDMIDANSQILWVPDHIKAGRFGKWLEGAREWAISRNRYWGNPLPIWRCPDCGKTVCVGSRAELKEYSGVAAIDDLHKHFVDKVTFPCSKAPGEKNCSGIMKRIPEVLDCWFESGSMTYAQNHYPFENRGIFENHILCRSDTCPGPRGG

SEQ ID NO: 82094 - protein, 107 aa, Unknown
  Obtained from environmental sample
  misc_feature (1)..(107): Xaa is any amino acid
MRGFTTENYTKDTIRAVDAKFEALKIAFAPLTFQAVKALVELGLLKIISDSGEKGIGCEKAAEQAQISLYGAKVLLEIALGMNIVKILLETPAFRGKSFLSDNPLAS

SEQ ID NO: 82095 - protein, 221 aa, Unknown
  Obtained from environmental sample
  misc_feature (1)..(221): Xaa is any amino acid
LLYQMAERIILRSGEKLFTLMDFNPYNYVVSGSFKKLKNRNIHRTFFESDLKYFCKGFKYIFDKYGNLENLILAQDEKTDVSNRGKKLSSLQCDVWKGFYLFREEMAKANKGEYSIHVSNAGKEDENGSACKKLNLALRWLVREGPVDLGLWKKIKPSSLYIPLDVHVARTARKMGLLERKSNDKKAVVMLTEKLREYCPDDPVKYDFALFGVGLSSSSTL

SEQ ID NO: 82096 - protein, 129 aa, Unknown
  Obtained from environmental sample
  misc_feature (1)..(129): Xaa is any amino acid
LGCLCLLAISKKEDGCEVVKDIISGDYEVFLHSVNFLEIYYKLLRELGREKSDLICEEILKLPIKIIYSTDLFFMKTAGYFKANYRMSLGDTFVLATAKLNSASIVTSDRHEFSVVENKEPNLSFHWIR

SEQ ID NO: 82097 - protein, 237 aa, Unknown
  Obtained from environmental sample
  DOMAIN (1)...(227): Aminotransferase class I and II
  misc_feature (1)..(237): Xaa is any amino acid
ARGIVVINPNNPTGALYPLDILKQIIEIAREHDLIVFSDEIYDKIIYDDLEHTALASLADDLLFITFNGLSKAYRVAGFRVGWMVVSGRKDNAKDYCEGLTMLSSMRLCSNVPGQSIIQTALGGYQSIYDLTRPGGRLREQRDICYKMLSDIPGVSCTKPQAAFYSFPKVDVKKFNITDDEKMVYDLLRNERILMIHGGGFNWPEPDHFRVVYLPCPEDLTEAMNRITRFFSTYRQQ

SEQ ID NO: 82098 - protein, 293 aa, Unknown
  Obtained from environmental sample
  DOMAIN (47)...(99): Clp amino terminal domain
  misc_feature (1)..(293): Xaa is any amino acid
MDSIPPSEIDVSEFRRTLESTLPRIPGILIRGAVPPSRRTKAMVDLAAAEARAMGSDYLGTEHLLFAAMKEQDSSVQLFLSKKAIDVDLLRVVVQTTFSHPQATRNEGEYISANGCPSYFIHRDRQSKYQGQHTDRAKVRPASYPVLTPTLDNFSRDLTALAKTGKLDPVIGREKEMNRIVRILARRSKNNPILVGEPGVGKTAIVEGLVQLLVSGNAPEALSGKRILSLDMGSIVAGTKYRGEFEERIKKITREITHAGDVILFIDEIHTIIGAGGAESTIDASICLSGGIP

SEQ ID NO: 82099 - protein, 315 aa, Unknown
  Obtained from environmental sample
  misc_feature (1)..(315): Xaa is any amino acid
SLGRIQRREEEGQEIRRANPEHPARYLFLAAVAEAWMQRYQSNKKEAEFYRFCDQAVEKAKKILASDPNDDWARFFMGGAEGYKGTFEARYERYITAFRYGWKGVSIFLKMSAGGSKNPDINFGIGTYDYWRSALMKMLWWMPGVEDKREIGIDKLKGVIKNGVYTRAAAGCVLIDVFMNEKRYEEALGVANDMGKKYPKAISFMWGRAAALHGLKRYDEAAAAYKAIYAKCEKDQNTNHYNAVKARVGMAKAYLAMGKNNEALEQVNAVAEYQLSKDIKKRLDSDLSEANTIKKRANKGNKNSDSGEELASDGG

SEQ ID NO: 82100 - protein, 282 aa, Unknown
  Obtained from environmental sample
  DOMAIN (1)...(282): Glucuronate isomerase
  misc_feature (1)..(282): Xaa is any amino acid
MRALGYDESYITGSASPYEKFLAWARTVENLIGNPLYHWTHLELQRYFGINEPLTEKSAPEIWEKANALLQTPELSVRGIFEKFKVYAVGTTDDPVDSLDCHRAIAEGTAPIGKIATKVIPSFRPDKALNINLPGFAVYIETLATVSGVAIKSADDVLAALEKRLDIFAKAGCRASDHALECVPFALASESHIEKTFREAMAGKEITREDADAYKTKILCGLAKLYADRNMAMQLHLAAIRSVHSRMLKCLGPDTGYDPVHDREQSADLAALLNAWNLAGKK

SEQ ID NO: 82101 - protein, 258 aa, Unknown
  Obtained from environmental sample
  DOMAIN (43)...(206): DAK2 domain
  misc_feature (1)..(258): Xaa is any amino acid
VGTIGKMNYEQKIDGKLLSKMLKGGFTNLSHNIEYLNKINVFPVSDSDTGTNMKKTFESGVATLNGEASFCDAFSAFVRGLLVGSRGNSGFILSQYFLGIYEHTKGKDTVSVADLSSALTHAYQVAYRAVLNPVEGTILTIMREGPKRTLQKINDKTSVQEFFDILADEMFICVRETVNQMNLLHDNNVLDSGAVGLYLIFDGMRSAFHGDLPYFDCEESTALPSRSKTTIKTFSFFRYCTEICFNMQKVQSQALLFQ

SEQ ID NO: 82102 - protein, 198 aa, Unknown
  Obtained from environmental sample
  DOMAIN (4)...(94): Cyclic nucleotide-binding domain
  misc_feature (1)..(198): Xaa is any amino acid
MPKPLQYRTGSLIYFQGDPADKIYILQNGKVSLVSQDIETGEDIRDAVQPGEFFGVKSALGRYSREENAMALSDTTVMAFTVQEFEAVAMANSRIILKMLKVFSNQMRRVHKQVSKLMAKEEQPPADGLFNVGEFYLKNKKFSHAKYVFSRYLVYYPSGKNAFQAAKNLEIAENALSRYGDGKGPGVSSAPSADSDLG

SEQ ID NO: 82103 - protein, 96 aa, Unknown
  Obtained from environmental sample
  misc_feature (1)..(96): Xaa is any amino acid
DILVLKSNNSDPYENIVNADMHDIELLILAGTPIYGEMRFLDIFKGKLPTGYTQIKVNNKPMFVKGDPAGLYREVRKKIGFKKELDYLPFEPEQEG

SEQ ID NO: 82104 - protein, 103 aa, Unknown
  Obtained from environmental sample
  DOMAIN (19)...(90): Glu-tRNAGln amidotransferase C subunit
  misc_feature (1)..(103): Xaa is any amino acid
MQIDDKLLSYLEDLSCLTLSVNEKTRLTKDLQEILDYMAHLGEIDTNGVIERSHPFDNVNYFRDDTVCPSFDRELILKNAPVRNDQSIIAPKTVSADLINVKT

SEQ ID NO: 82105 - protein, 283 aa, Unknown
  Obtained from environmental sample
  DOMAIN (187)...(266): Fibronectin type III domain
  misc_feature (1)..(283): Xaa is any amino acid
MYRIGRDGKLEALEYTTSSGRESGDVYTPIIGEDCHLALGSRFSGMMDEFRIHGNYLEKAETTRYSGSGGRVETRTLDLGYADSQVLKIEAFGGRTSNYSGKVRNEYAGNSPLSFSDHSEMKFFIRLSNSPYRWNDVPWVPINPGTELQQFRGRYVQLAADFFPGTDGETSPYLSELRVIYRAAEPPPPPAYVTAVARDGAVELTWRASASRDVGGYYIYYGTAKGEYLESKCPIDAGNRTSILIEGLKNGTLYYFAIASYNKPENDERLLMHEPGEFSRGVA

SEQ ID NO: 82106 - protein, 275 aa, Unknown
  Obtained from environmental sample
  DOMAIN (45)...(88): LysM domain
  misc_feature (1)..(275): Xaa is any amino acid
LAVTIPDEPVPVKRPEDSVETELKQPANKPEETTKDLITFQWQQYKVQKGDSVSRIAKKFGISLGAVIASNNIRNARQLKEGVTLRIPNIDGIPYSIKSGDSLSKISVSFNVPLEVILDINDLKSDVIKAGETIFIPGARMNDLDLRMSLGELFIYPVSSKHLTSNFGMRKDPISGELTFHTGIDLRANTGASVMASMEGVVSVIGENWLYGKHIILSHPNGYKTMYAHLNATSVKQGDKVAQGRKIGEAGNTGYSTGAHLHFTIYDQTGKIDLI

SEQ ID NO: 82107 - protein, 99 aa, Unknown
  Obtained from environmental sample
  DOMAIN (5)...(99): CBS domain pair
  misc_feature (1)..(99): Xaa is any amino acid
MKIKDVMATPVITGRKEQTMRHLQAMMRENNITSIPITEGEKLVGIISIYDIVTALDMSLINCLAEERMTTNVVVLQDDMPLSFAISYLNKYTHNRFRY

SEQ ID NO: 82108 - protein, 72 aa, Unknown
  Obtained from environmental sample
  misc_feature (1)..(72): Xaa is any amino acid
MLAEISKSRDDYDRAEKHYLSIISDFGENAEVHYQLGELYNQKGDTTRARSEWRTTIKQDPAHAKARARLNI

SEQ ID NO: 82109 - protein, 306 aa, Unknown
  Obtained from environmental sample
  DOMAIN (6)...(73): Elongation factor Tu domain 2
  misc_feature (1)..(306): Xaa is any amino acid
SDREPGSLCYVRMYSGSLKPGGAVYNIGKKKRERANRILRMHSNKSDPMDELCAGDIGVIIGMKLAQTGDTIGSEGWPVLLEKMQFPEPVISVSIEPKTLSDQDKLKGILAILSKEDPTFTTRDNEETGQLIISGMGELHLDVLVTRILKEFNLSARVGKPQVTYRESISITNECVENFSRIIAGKENTADITLQVKPAERGAGNKYVCTVKNKNEIPEEIFNAVERGIQGAFSSGIVMGYPCIDIEATVTDIRYSELTGTEFAFEACASMAFDEACRRADPILLEPIMAVTLTAPQNSADLINGR

SEQ ID NO: 82110 - protein, 290 aa, Unknown
  Obtained from environmental sample
  DOMAIN (128)...(243): GTPase of unknown function
  misc_feature (1)..(290): Xaa is any amino acid
MAALRAVGFRDALPGEFTFRAFMNGKLDLTRAESVMELVSARTDRGHSNAINRLSGVLEKEIGAIKKTLVEVLSGAEIFLDYSDDEISADAEEIAGRLPGEKLAREALARLQKLAQSWQLERIYQEGILAVIAGRPNSGKSSLFNLLLKEERSIVTEIPGTTRDWIEAWVSLEGIPVRLTDTAGLRDSSDQVEKIGVERSRDLLEAADIVLYLIDGETGITDEDAALIDGLTVSRLVIWNKTDIAPAPKGVLAISAKTGEGITELTAAIKAEIAANVKNPDMAPSLGTIR

SEQ ID NO: 82111 - protein, 74 aa, Unknown
  Obtained from environmental sample
  misc_feature (1)..(74): Xaa is any amino acid
LKQTGADMGLRGELFSTRVILQNRTYFFNVKENRVGDLYLNIVESKNRETGGFDRQSVILFADDLQEFLKARPI

SEQ ID NO: 82112 - protein, 65 aa, Unknown
  Obtained from environmental sample
  misc_feature (1)..(65): Xaa is any amino acid
LADHADDCRHITLATINRADVLVSWNFKHIVNLDRIKGYNGVNLKYGYPVVEIRTPKELLKYDKE

SEQ ID NO: 82113 - protein, 51 aa, Unknown
  Obtained from environmental sample
  misc_feature (1)..(51): Xaa is any amino acid
FPVDGRAIIYGNERRILEAGDTAYYNAIVPHYVGSAEGQPCTIYATFYHPA

SEQ ID NO: 82114 - protein, 189 aa, Unknown
  Obtained from environmental sample
  DOMAIN (3)...(189): Aldehyde dehydrogenase family
  misc_feature (1)..(189): Xaa is any amino acid
MTHNEFHELVNKARSAQTLWAELSYNERARRIKKAGHSLADKRDEVTEIIHKENGKLKIDALAAEVIPALMAVPYYIKQGRRLCKPQKVRGGNILMFFKQSRIIYKPWGVVGIISPWNYPFSIPFSEVIMALLAGNAVILKTASLTPGSGRIIAEILQAANLPDGLFTHIEMPGHEAGHAFYQSGNRQL

SEQ ID NO: 82115 - protein, 67 aa, Unknown
  Obtained from environmental sample
  misc_feature (1)..(67): Xaa is any amino acid
MADYFVGAKEYFPEIKKIKYEGPKSKNPLAFKFYDPEKTIGGKKMKDHLRFAIAYWPRADADHSAKK

SEQ ID NO: 82116 - protein, 200 aa, Unknown
  Obtained from environmental sample
  DOMAIN (1)...(200): Inorganic H+ pyrophosphatase
  misc_feature (1)..(200): Xaa is any amino acid
MVSFFAAGGASHYSAGLYGVSISAVGMLSTLGITLATDAYGPVADNAGGIAEMSGLPPEVRNRTDALDSLGNTTAATGKGFAIGSAALTALALIVAYIDEVKLYIPKYKPDFELRLELNNPPVLIGLFIGVMLPFLFSSMTMSAVGRAAQSIVREVRRQFTEIKGLMEGTAEAEYGACVDICTRNAQKEMVLPALAGNIS

SEQ ID NO: 82117 - protein, 96 aa, Unknown
  Obtained from environmental sample
  misc_feature (1)..(96): Xaa is any amino acid
MNLVIKGMQEKQPEYLEFIRQLKDMGLFSIAGLSNASNGMPKEIRPIVDSVLLSMAIECGLCSAIMNPCDKNLMNTVKTAAVILNQTLYADSYLEL

SEQ ID NO: 82118 - protein, 221 aa, Unknown
  Obtained from environmental sample
  DOMAIN (20)...(89): HAMP domain
  misc_feature (1)..(221): Xaa is any amino acid
MSHIEDTISQNSIMAVKRILLIAAGLIFISILLSSLGSKFIIVNPIVKVARVVKIVAQGDLTHNTDVNTNDEIGDLADDFNFMITKMRELIGTMKHKIDALTNTGHELSSNMAKTSESVDQISTNFDGMKSKMGKQEESAAEADKAVKKIKDNIDSMSRLIDEQSASINTSSSAVEQMTANIHSVTKHPIDNGENVNEMTEASENGKAGIRAVPEKIQEKT

SEQ ID NO: 82119 - protein, 311 aa, Unknown
  Obtained from environmental sample
  misc_feature (1)..(311): Xaa is any amino acid
VRLFGEGRPVGNTEIAYNENFTAFTFRSMAFSRLLDRLILPAARAAAGDSLGYFNSEIMTAAGYKLSVDDMKFELHVTFPPEDKAVMFTSLYGGYQAPEPRGEEIPPAAVSLYINYSLDDRARYLWYNYYDNYKGMRYEGNDTLIRDPATMNVDGALNIREWVFESSGWIREPYGDAPFTWENIRRGDARVVHNFVKQRSQLTLGDITTGTSIVPGPVTGGVRYERNSYFFGNNPSDNLNSVTFFMPEPGEVEVYMDGTFRRRIYLPAGHHQLGGFGGEVGRNRVSLLLRMGDGMTEEIPFEFILSSPRVM

SEQ ID NO: 82120 - protein, 318 aa, Unknown
  Obtained from environmental sample
  DOMAIN (6)...(308): AMP-binding enzyme
  misc_feature (1)..(318): Xaa is any amino acid
GTYQLTARDWEYRCNIADVKLLIAVDDPSLLENISVSRANCAKLEKIAVVGSTIPDGYIEMRAEIEKASSVFTRIPTVTSDPMLVYFSSGTTGMPKMVIHNHSLPLGHIVTAKYWQCVEDNCVHLTQTDSGWAKFAWGKIYGQWICGAAIGVYDTEKFTPKGMLTALQRLRPATFCAPATVFRYLIKEDLSGYDFSYIRHTSVAGEPLSPEVYNKFMELVKLEIREGFGQTETSVMAAVFKWLPVKPGSMGKPAPFFGFKLLDENDTVCDQGIVGNMSITCAGKSMYGIEGAKDSETPVIGNSDFRALGHLIMKGGWG

SEQ ID NO: 82121 - protein, 238 aa, Unknown
  Obtained from environmental sample
  DOMAIN (155)...(198): S-layer homology domain
  misc_feature (1)..(238): Xaa is any amino acid
MRLGCYAREDQPLSETARNFDFHFWSQLDDGRWSQKYGWSYSEIIPATSSGVSPEKYYWEMAKYGYLYRSKPLYYAVTKDTDEITVHRPSPFADVELYDYLNSGLEYVFKNGFMIGTSDTPSLFSPDTAITRGMAADAFYRIAGRPDAGKFSNTFDDTDAGYLYLDAVRWAAANGIIADYSGSGKFAPDRKITREEAAVAFYNYQHLTGNIPPDILLNIDPEERDEISKWAKEAAKNL

SEQ ID NO: 82122 - protein, 123 aa, Unknown
  Obtained from environmental sample
  misc_feature (1)..(123): Xaa is any amino acid
LSCQAARGGQSSPSFDVYSHTLPCIEIYGTEGTLRVPDPNTFGGPVYFRRFNEEEWSQIPLINNYTKDCRGLGVTEMAEAIEQGRPHRASAELACHVLDIMHGIHEAAASGRYYELNFVKDKS

SEQ ID NO: 82123 - protein, 292 aa, Unknown
  Obtained from environmental sample
  misc_feature (1)..(292): Xaa is any amino acid
DAGDGYYIPIFYVRLCGVHYADSQGIAEFLCGAQPRIGFNDFAGAVNTMNAAKHTMGKVAGAGANLAGKLTGGAAGLAGNLVASHQNGQAAKEAEKLAGSDEKTQNRAARQGFASSMLRGAVNQVSSIGGSLRGGGKSSGDSMAGTIMAGIGGTPIHRGGRGSHGGDGSDVKGYLPKDAEGKTKSDRQLQSKNAQERIKGAAHKAFENYQSGMSIRDSMKSGISSLAQANRDALPANWNKSDAYKAKEAAAEREAVKGDSDAGKGSRRHGHHGHQSQQSHHGQQNHHGRHRC

SEQ ID NO: 82124 - protein, 235 aa, Unknown
  Obtained from environmental sample
  DOMAIN (1)...(233): Transposase, Mutator family
  misc_feature (1)..(235): Xaa is any amino acid
MYSFGMSDRDIKTHLEKIYNVDVSPDLISRVTNAVIDEVREWQNRPLEKSYPIIYLDALRIRGKEDGKSCMKSVYIALAVDFEGKKEVLGLWIAENEGAKFWMGVLTELKNRGVQDILIACMDGLTGFPEAVRSVYPNTRVQLCIVHMVRNSTKFVSYKDLKKVCADLKTIYSANSEEAGRDALEDFGRKWNDKYPIIYKSWERHWGDLSEFFKYPPEIRRAIIQLSADLIIGKQ

SEQ ID NO: 82125 - protein, 136 aa, Unknown
  Obtained from environmental sample
  misc_feature (1)..(136): Xaa is any amino acid
MTIREALAGGSAALAAADIETPGLDASLLLAEVLKTSRSSLIAAASEPLTEASRAIFDGFIKRRLAGECTAYILGRKEFYGLDFQVNPAVLVPRPDTETLVEAALETHTTNNESLVNRAQFRALDLCTGCGAAAIA

SEQ ID NO: 82126 - protein, 230 aa, Unknown
  Obtained from environmental sample
  misc_feature (1)..(230): Xaa is any amino acid
VVEELSGIENNRLFVVDNSLAQDKEWEMDLFREMIPIKKKWISHTIEDDPEVLDLAARAGAWYVYQAIYDTSDYIKERVKRYHDHGIGVEGTILLGLDNQTEDDIKRLIDFLLQIELDLAEFTVMTPFPHTKAWDDLARQGRIFDHDWEHFNAGQVVFTPKNISAERLQELYDDAWKTFYQDESQEEKMFHLLSAVVSREMEDGTYRPRNRRLFINHSGKMLLSIIRGKS

SEQ ID NO: 82127 - protein, 245 aa, Unknown
  Obtained from environmental sample
  DOMAIN (22)...(244): TatD related DNase
  misc_feature (1)..(245): Xaa is any amino acid
EERRKTGTAAAASAWNGEQFEYHEGLAKKAGEDSAPPVFRCFAIHPQLSGEKNFFLSRGIELLYSLAVETRLDAVGETGFDLYNEKYKAAENIQEEMFVCHLEIALNWDLPMILHLRKAMHKIFPFMMQLKQLPAVVFHSWPGTRGEAKAMLKKGINAYFSFGTAVLKNHREAMASAGILPEERILLETDAPYQPLRGKEYSTWRDLSQICSFIAALRKEAGSPCASPEELEEQTTKNFFRVFNR

SEQ ID NO: 82128 - protein, 112 aa, Unknown
  Obtained from environmental sample
  DOMAIN (1)...(103): Aspartate decarboxylase
  misc_feature (1)..(112): Xaa is any amino acid
MYRMFLNSKLRDVRITGVNLEYEGSITIDADYLERAGILPDEEVHVLNVNTGVRLTTYVIKGERGSGIMELNGPAARLGMVGDRIMVLTYAMLSPEEIAGLSRPYRAIFWGG

SEQ ID NO: 82129 - protein, 68 aa, Unknown
  Obtained from environmental sample
  misc_feature (1)..(68): Xaa is any amino acid
MDVLRRLSCCKKAVDLKPQNASYLDSLVWAYYKNGELLEARTWMRRAVDVAPERKEIKEHFQTVTGAK

SEQ ID NO: 82130 - protein, 327 aa, Unknown
  Obtained from environmental sample
  DOMAIN (1)...(88): Histidine kinase-, DNA gyrase B-, and HSP90-like ATPase
  misc_feature (1)..(327): Xaa is any amino acid
LVRIGTRDGHDTLVFCVSDTGQGMTEEQISTIFTTEYSRFNQEVNRSVEGTGLGMNITWRLVRMMNGMISVESQPGKGTKFTVRLPQQRASSNVLGKELTEKLRNFRISSSAQMKRAKITREYMPYGKVLIVDDVYSNLYVAKGLMSPYGLSIDTATSGAEAIGKVKSGELYDIIFMDHMMPKMDGVEATKIIRDLGYKNPIVVLTANAITGQAKYFLENGFDEFISKPIDIRQLNTILNNLIRNKQTPEVIAEANRQKNDLDSEQRSSLSKPDSVLQTVFLLDVKQSLPILEETLERIDVASEGDLRLFTINVHAMKSALGKYRRG

SEQ ID NO: 82131 - protein, 90 aa, Unknown
  Obtained from environmental sample
  DOMAIN (5)...(77): Heavy-metal-associated domain
  misc_feature (1)..(90): Xaa is any amino acid
MDNITLNVSGMSCEHCVKAVNNALSSLAGVKDVAVSLKDGKVSFSHDPAKATLDAIKAAITEEASKVINIISYKVKKVYLTLYLTTANSY

SEQ ID NO: 82132 - protein, 191 aa, Unknown
  Obtained from environmental sample
  DOMAIN (3)...(190): SAICAR synthetase
  misc_feature (1)..(191): Xaa is any amino acid
MKKLEQLYEGKAKKVFATDNPDLLIVDYKDDATAFNGEKKGTIAGKGVINNRVTNHLMKLLESKGIPTHFVEEISERETVVKKVKIIMLEVIVRNIAAGSLSKRLGLPEGTKLASTVLEYCYKDDALGDPIVNDYHIAALKLAEKAELEKIAAYSFKINQILTDYLKDLGIELIDFKLGVGAQTAGKSFLR

SEQ ID NO: 82133 - protein, 91 aa, Unknown
  Obtained from environmental sample
  misc_feature (1)..(91): Xaa is any amino acid
VAIAGAIQVSSAAENNDVTVSASLGTVRQKNLVEAAIAALREAINLAEKNEPLDLVSPMLREAVNSLGEITGEVSTADILEEMFSKFCVGK

SEQ ID NO: 82134 - protein, 182 aa, Unknown
  Obtained from environmental sample
  DOMAIN (1)...(155): YicC-like family, N-terminal region
  misc_feature (1)..(182): Xaa is any amino acid
MTSMTGFAYKEWANEDISISVEIKGYNNRFLEIYVNTPPWLPQLEQRVRDIINNVCGRGKVEVAIRIRETNTPMTVSVNVNAANAYMRAINSLKSSLGLNENLNLSTLINMEGVLNIEKNRDDERYWALIEPVLIEAGAVFQAERIREGKHTEEDILNSISRIESTLQTVTAHLPLGRSVLG

SEQ ID NO: 82135 - protein, 250 aa, Unknown
  Obtained from environmental sample
  misc_feature (1)..(250): Xaa is any amino acid
VNSVVVLDEAQLVPTDYLEPILETMRLLTEHYRVSFAICTATQPVFEKQKEFPVFPGLPEGSIEEIIQDVSGLYKSLERVKVETPKDLSVSVEWKELAEELSQYDQVLCVVSDRKSCRELHALMPNGTYHLSALMCAQHRSDTIAEIRKKLETGETVNVVSTQLVEAGVDMDFPVVYRALAGLDYIAQAAGRCNREGKMNIHGKLGKVVVFQALTKAPAGILRKAGEIAERMISSGIKNSLIRVYSHPIF

SEQ ID NO: 82136 - protein, 329 aa, Unknown
  Obtained from environmental sample
  misc_feature (1)..(329): Xaa is any amino acid
VGSSNFSALKVNSSGNTTINSFVPENIRAGQYKLRVVPGPAGGGWRIATLASPNIPTAIDFTVTAESGAAGGGYGLALTSFTSNKASVSQNELFTVASTLRNVVLDTFPAGQAGIALVNSSGNIEAVVGMVNFAALRSGASRSTTINSFVPENVNPGQYRLRAVVRPADGAWRVATLALPDVPNAINITVTAESGAVGGGYGLALTSFSASKASVSQNELFTVASTFRNVALPAFPGGQAGVALVNSSGNIEAVVGMVNLAALNSGSSRSLTLNAFVPENVNPGQYRLRAVVRPTDGTWRVATLALPDVPTAVNITVTGGTSADLILGL

SEQ ID NO: 82137 - protein, 267 aa, Unknown
  Obtained from environmental sample
  DOMAIN (1)...(264): DctM-like transporters
  misc_feature (1)..(267): Xaa is any amino acid
MSPPLFAIILFASPSTTILHFMKDDTVPYSIIHYFVGALIPGAILILAMIIIGIINAFRDKMPTEPFNSKEALPSLKESFLEILLPIILMLGYFSGRLTLLEVSAFSVIYIAVVEVFIRKDIALKDIPKVFEKAVPIIGGVLAILAMAKALSYPIIVVSNVPDHFAAWMQTAVSSKYVFLLLLNLTLLVVGCLMDIFSAIFVVLPLIVPLGFAYGIDPVHLGIIFIMNLEVGFLTPPVGMNLFLASYRFEKPFIKIVISRPTLTYGL

SEQ ID NO: 82138 - protein, 280 aa, Unknown
  Obtained from environmental sample
  DOMAIN (38)...(215): ATPase family associated with various cellular activities (AAA)
  misc_feature (1)..(280): Xaa is any amino acid
MSTQSEAAAALIRRAEQVIKGKREFLELLTAGILASGHVLLEDNPGLGKTTVAKTFAALIVGQDGNPLCFKRIQFTPDLLPYDITGVDVFDPETRSFRFVPGPVLANIVLADEINRTTPKVQSALLEVMAERQVTVGSAVHRPPEPFFVIATENPIESEGTFPLPAAQLDRFMMRLSLGYPDRESELSILDENPAVNALAELKPVLTEAEFLSARSAASDVYCHQNLKEAVADIVRQTRNHREFCAWRFSPSGFTLSWGCQALALVRGREYRIDEDLLGL

SEQ ID NO: 82139 - protein, 252 aa, Unknown
  Obtained from environmental sample
  DOMAIN (17)...(183): DEAD/DEAH box helicase
  misc_feature (1)..(252): Xaa is any amino acid
MTALEALKQYFGYDEFRGGQETLINGILAGKDVLGIMPTGAGKSICFQVPSLMMDGVALVVSPLISLMKDQVNALTQSGIAAAYINTSLTQAQIDKALRNAVNGQYKLIYVAPERLPTPEFMAFARSVNISMLAVDEAHCISQWGQDFRPSYTRIPDFIARLSKRPVVSAFTATATPKVREDILVQLKLRNPQILVAGFDRKNLYFGARKPRNKYDALAAFLKRARGAAGSFTAVRAVTWEICASALEATDT

SEQ ID NO: 82140 - protein, 204 aa, Unknown
  Obtained from environmental sample
  misc_feature (1)..(204): Xaa is any amino acid
LIIAIVAVIVTGVAALLLRQASSIALDLSKQKTMYLARQRAQYWDGRMEGYIDVLQTLSNIMNFYENLPAAERRQTYENTMMSVFEDMPDFIRMFTVWKPNAIDGMDAKNIGRMGSTATGQFAYALARDTGEIKPLTAVVVDEVMAHITGTNAKVVQMSDPSPFKNMGKDTFVVRFVVPISHKRLNETVGAIRCQWHISMIPPR

SEQ ID NO: 82141 - protein, 308 aa, Unknown
  Obtained from environmental sample
  DOMAIN (55)...(308): Na+-transporting methylmalonyl-CoA/oxaloacetate decarboxylase, beta subunit
  misc_feature (1)..(308): Xaa is any amino acid
MIPGSKDIPRISLGTFLHKIAQTTGIYAFFNDRIEKETTVIDEATGKNKTTTVIGWQELLMIAVGFLIVYLGAVKNFEPLLLIPIGFGTIFVNIPFAGMGSPGEWNEALKIFEHQGFLNIIYNAGVGNEFFPLIIFIGIGALTDFGPLIANPKTALLGAAAQFGVFGTMFFISLANYIPGVNFNPREACGVAIIGGADGPTTIYIAAKLAPHLLATVAVAAYSYMALVPIIQPPIMKALTTNEERLIKMKQLRPVSHKEKLFSPLWYFHFHCFLYPSAAPLIGCLMFGNFLRECGVVERLSKTAQNDL

SEQ ID NO: 82142 - protein, 238 aa, Unknown
  Obtained from environmental sample
  misc_feature (1)..(238): Xaa is any amino acid
LGVGSILTFHNLEGRGYAFTCAAVVALFAVGCGKKTTLATYSPTTDDSSIESVALTADSAAAPSGTLTDGRDGKKYKAVKIGDQTWMAENLNYQTGNSWCYDNNNSNCNKYGRLYDWNTAITACPTGWKLPDTADWSRLEEMVSGGLGGAGKRLKSKNGWNEDGNGTDDFGFSALPGGCRGSDGRFFNIGNDGDWWTTTEISEKGAYSRYVSYNNDIEMNYDLNDKSIMGHSVRCVRK

SEQ ID NO: 82143 - protein, 168 aa, Unknown
  Obtained from environmental sample
  misc_feature (1)..(168): Xaa is any amino acid
LPLDVNTEDEDLTIATSYSVTTLLERLEGVRNKVNVVVLDSCRVPPRIGGDGRGRGGETSRVIKTVPQVPPDVLVIYSTSSGAVAYDGEGKRNSPFTEAFKKNIKSAEPLVQMVSHVTSETLSLTSQRQRPYTSGSMGSENAYYSLNPSGVRPSPTPTPTSTPQPSLL

SEQ ID NO: 82144 - protein, 129 aa, Unknown
  Obtained from environmental sample
  misc_feature (1)..(129): Xaa is any amino acid
MISAVEWSIIEDKARQAGIDSFLSKPLFPSTIADIIDNCLGVEKKKKEEKQEVDGLFAGRHILLAEDVEINREIVMALLEPTKLEIDCAENGKEAVRKFSEAPDKYELIFMDVQMPEMDARANLSCGSE

SEQ ID NO: 82145 - protein, 166 aa, Unknown
  Obtained from environmental sample
  DOMAIN (4)...(155): GGDEF domain
  misc_feature (1)..(166): Xaa is any amino acid
MKMPEQTFGTDTTKDEIVNALNGSAALIMLKPDRFKILVDSRGHSAGDAAMIRIAIILKNITRQIGHGWAMRFKSNEVGLIVNNCDAVQAEEIAHELYEFVNDMDSVPPEGDIPEFSFSATISWAIWPTDGADWETFFSGNYSSLLDNWKDGGDRVVHYTGGAAQT

SEQ ID NO: 82146 - protein, 276 aa, Unknown
  Obtained from environmental sample
  misc_feature (1)..(276): Xaa is any amino acid
LKSLTEVNTAAEDVSQGAFWVTQAVMTAFENAISAAQSALGSATTQEALDSAVTALQSAITTFSGARQEGVKTSGFTPAQVTELVNSAKADKEGVHISADGDDVSPVEYWVSSSDLEALNAVITALESANGQPAIDAAYLDLVQARETFNSVKQHGTTPDITALNNAITDADAAKDGVETAASGEQVPLGSSWATAAQFDALNTAIDSAAAVMNDANATKVAVDAAVANLNDAINAFTAAVTNNGPGTNSQPTPHVTGVTVNPHTTTVTKSATQTF

SEQ ID NO: 82147 - protein, 159 aa, Unknown
  Obtained from environmental sample
  DOMAIN (1)...(128): ABC transporter
  misc_feature (1)..(159): Xaa is any amino acid
LEDEDSPSVRDFLLKNPFFLNSEHFVESEPFPKTNGALLGEALSLAGIPEHILEQKLPSLSNGELRRLLLARNYMEEPDLWILDDPFGGLDPEYRKFLAERIKLFQQKGIQMQINLKREDEQLLLESSPSNDCISERDEHIYDKKKIKEPISAGEILFS

SEQ ID NO: 82148 - protein, 60 aa, Unknown
  Obtained from environmental sample
  DOMAIN (10)...(43): Tetratricopeptide repeat
  misc_feature (1)..(60): Xaa is any amino acid
GRGSLDALNAAWWTRLGYARENAGDYVQAVEAYEKALSLNSQLTDARRGLERVRQTLGNR

SEQ ID NO: 82149 - protein, 321 aa, Unknown
  Obtained from environmental sample
  DOMAIN (1)...(50): His Kinase A (phosphoacceptor) domain
  misc_feature (1)..(321): Xaa is any amino acid
MNAIIGMTDLLNYEPLNKRQMGFVNDIKVSAHSLLSIINDILDMSKIEAGKFELNLINYDFHMFLDNIFSMFSFVTQKKGLEFKYETEGKIPRYLYGDDIRLKQVLTNICGNAVKYTENGYVKFRVTATSNKIMFEIKDSGIGIRKEDMPKLFNTFQRIDSDKNRNVVGTGLGLSICKTFVEMMGGKIIVDSEYEQGSVFLVIIPIVLGKKEEVKSSKGLPDGHILYAPDAKVLVVDDNEFNIRVAEGLIGLFKINVQTAFSGKDAIEMVQKNDYDIVFMDHMMPEMDGVEATGEIRKLGENINICPYSPYANAVQGAGES

SEQ ID NO: 82150 - protein, 271 aa, Unknown
  Obtained from environmental sample
  misc_feature (1)..(271): Xaa is any amino acid
MLAKFAKDAAERGVENCKIITLKDNPGPNYKQYALSAGIAEARGDYFLFTDGDCEVPPGWIRAMSSRMTDPEAGAVIGPVFKKKQGKGFFSLYQCYDHAVRYNYLAGAIGLGAAGGGFGNNLIISKAALDAAGGYDAVPVSPTEDAALISLIRSQRKYRVHAIALPDAAVETTAEKTWRGFISQTLRWNNGGLFSPEPMTRFNYNLLMLVITTGILVIPLLPFFPNLWPMTAGVYIVMLENTIAAFGLFRKNSPPAPLKPGYVLTLLYPPD

SEQ ID NO: 82151 - protein, 159 aa, Unknown
  Obtained from environmental sample
  DOMAIN (46)...(143): Divergent AAA domain
  misc_feature (1)..(159): Xaa is any amino acid
MNEITALLKQISLGEDSVLELKNIEYANDNVSGPNRNSMADEMAAMANSHGGIVVLGINDKTHELAGLPLDKLDLTETWVRNIANDLIKPPLECKIKKLSVALQEEKNIIVIDIQRSIFVHKSPNGYFYRIGSSLKGNVLRSTGQIISTKNAKQAYSLR

SEQ ID NO: 82152 - protein, 100 aa, Unknown
  Obtained from environmental sample
  DOMAIN (42)...(95): Helix-turn-helix
  misc_feature (1)..(100): Xaa is any amino acid
EKKPRIDGRAAEEAVDYNKVKSPSRKTKLTIKPVAAFNTEDIKRIRQKTGLSQVVFAGSLGVSPKTVEAWENGRNKPEGASRRLLEIVRDDPEFLRRFQA

SEQ ID NO: 82153 - protein, 87 aa, Unknown
  Obtained from environmental sample
  DOMAIN (31)...(63): Ankyrin repeat
  misc_feature (1)..(87): Xaa is any amino acid
GSPTDQIGRENKDIVKALIEAGADMNIQSKDGQTALIVVVGAGDEDIVELLVKAGADADIKDALGVSARKYATIFNNKKMLAMFDAK

SEQ ID NO: 82154 - protein, 107 aa, Unknown
  Obtained from environmental sample
  misc_feature (1)..(107): Xaa is any amino acid
YREEAGIVATELAEAIGIDIPQLPLVLSAAQWLEEQALADGCFGLALGLPLHLGLPPYVTGSKVAVQVLCQDMIYLTGGRVVINSDAKESANLLEAIITEKRTALKI

SEQ ID NO: 82155 - protein, 306 aa, Unknown
  Obtained from environmental sample
  misc_feature (1)..(306): Xaa is any amino acid
LQRAAGQLGYTGLKEAVRFGRRHIIRHTSVNLREGYIGTTLSPRFTLRVTPPSAKIDSDFTAFSPNHGGGQNEMIIRQEDSKEDQWTGEIRRANAPDGERAVRSFKFNGIPLKELRWDGHGESGTFAADGEYTYELYATDQAGNTGRSNTLRFRMSTVDTPVMITTDTRAFSPNGDRVKDTINLNPQIQVKEGIVNYKVEIQDNTGRTVRTFEGRGTPPAAISWDGRTAENAQAPEGLYKASLELRYEQGNQPSAVSLPFELDITPPKGSLSAPYTSFSPNGKRANIPFSVKPRPMTSSANLSSIF

SEQ ID NO: 82156 - protein, 326 aa, Unknown
  Obtained from environmental sample
  DOMAIN (23)...(227): RNA polymerase Rpb1, domain 5
  misc_feature (1)..(326): Xaa is any amino acid
EVASYFLPGGATFQVDEGEKIRAGRTIAKTLKESAKAMDITSGLPRVSELFEARRPKSPAVLAQVSGTVYFRGIVKGKRKVVVEDAFGREASHLIPMNKRLLVRDGDTVESGEQLCMGAINPHEVLYIQGESMLQRYLMDEIQQVYRLQGVSINDKHIGVIIRQMMRKVEIRKVGDTKFIQGSSVDKYRFHEENARVISEGGQPAIALPMFQGITKASLNIDSFLSAASFQETTRVLTDAAIKSSTDYLRGLKENIIIGHPIPAGTGIKRYRNVKLFDEDSQDLDEYMHEILDKRRQEAEEQAEAAVTQQEEFTVKIPMITALGRF

SEQ ID NO: 82157 - protein, 65 aa, Unknown
  Obtained from environmental sample
  misc_feature (1)..(65): Xaa is any amino acid
MVDSLIVKKTCYQPLRDQYTNSPGIAGASILGDGSVSLIIDVGQLLELGLKKEMEQRRIREASTR

SEQ ID NO: 82158 - protein, 323 aa, Unknown
  Obtained from environmental sample
  misc_feature (1)..(323): Xaa is any amino acid
MAEKATFDGGTDFSRINLDAIAGNEILFFSDGISTLSDADFIRNAAVKHPIHCIVSSAKADYSAMKLIAGKTKGKFVNINALSAENLKNELLNETLQFLGAERGEALREVYPSLATPVQGNFSLAGISEADNAEITLLFGFGNKVEKRFKVKLEAKKADKQGNVYRLWAQKKIAELDLNYETNRDELTELGQQFGIITRNTSLIVLETLDDYIRYNITPPAELHDEYSRWQKGRQEQQRTSERNMIKNALSAVEKIRNWWNTDFTPKKPKYPTPDDQIGMRHPATPVIPDTPPPRRSEPVPARNERASEKHEHASQRANAPRT

SEQ ID NO: 82159 - protein, 335 aa, Unknown
  Obtained from environmental sample
  DOMAIN (178)...(230): Signal transducing histidine kinase, homodimeric domain
  misc_feature (1)..(335): Xaa is any amino acid
MASSTQPLTEREIEELRESVDAEMPIYRVSVKFDENSLMNTVGGIQVYAVLKGIGTVLRTVPEFEQLYADNFFPVVDYYFASKSDAQKIKTSVILPDVSLDADVKGVVNVSAEEAPVAAPKPAPAQAAPAPVAQAAPAVKAAPATPAAPAAPAKAAPAAEAKKGASSEDAKKAAKEAGSVLRVDSKRIDDLLNLVSETVITKATFNQINMQFGELTAHLRELENQYRDKIKNLFDNLPNYLEEIQGGKSVKDIQKEINENYGDIFTLFDSFEASFQNIIAKFCAHSQNLGRISGELQERRMRIRMVPISTIFSRFPRLVRDLSNRLTKNHLGIEG

SEQ ID NO: 82160 - protein, 167 aa, Unknown
  Obtained from environmental sample
  misc_feature (1)..(167): Xaa is any amino acid
FFVFFLSPPHPPTKGFFFKKKNGGGGGGKKKKKFFFFGGEKFRPKKKNFWPRVFFRNIWDKFFFFLGKKKKGFGGQKIPGFFFPTFPEMDPLCFPKSSKGGFKKFWKPRFGSIFQFKASKKKVFLPFGDENFYMVENVFIFFPRCFTLNTGIACIYGFFPRIIILLG

SEQ ID NO: 82161 - protein, 150 aa, Unknown
  Obtained from environmental sample
  DOMAIN (10)...(102): Phosphoribosylglycinamide synthetase, N domain
  misc_feature (1)..(150): Xaa is any amino acid
VFFWDDGPRLAWNWLIENVEKIFAAPGNGGTATEEKTVNLLLDGANPETEKGQELLLEFAKKEGIDLTVVGPEAPLAEGIVDRFRSAGLAIVGPGQKAARLETSKVYSKSFMSKYKIRTRGSKNFSDHADALKCAENILARRRKQPSPRW

SEQ ID NO: 82162 - protein, 290 aa, Unknown
  Obtained from environmental sample
  DOMAIN (20)...(138): S-adenosylmethionine synthetase, central domain
  misc_feature (1)..(290): Xaa is any amino acid
VHGQSPDIAQGVNVGQGLHKEQGAGDQGIMFGYACHETKVYMPLAIYYAHRLVEELTVLREKGKIKYLRPDAKTQVTVEYDGLKPKRIDTVVLSTQHDEDVKYATIKKDMIEKVIQKVIPAKMLDEKTTYHINPTGKFVVGGPHGDTGVTGRKIIVDTYGGYGAHGGGAFSGKDPSKVDRSAAYAARWVAKNVVAAGLATHCVIQLSYAIGVAKPISIHVDTYGSGKIPDAEIVRIITKLFDLTPAGIIKRLDLKRPIYKQTARNGHFGRELPEFTWEKLDMLVPNSDHG

SEQ ID NO: 82163 - protein, 122 aa, Unknown
  Obtained from environmental sample
  misc_feature (1)..(122): Xaa is any amino acid
MIEELSVRNFALIDSLNLSFEKGFTVLSGETGAGKSIIVGSLSFLFGAKADSEIIRSGSEEASVSAVIAIDGKNRDALQWLTQREIEPEDYRLVIRRSVKASGLQFNLYPECPCNAKRSRGI

SEQ ID NO: 82164 - protein, 56 aa, Unknown
  Obtained from environmental sample
  misc_feature (1)..(56): Xaa is any amino acid
VERYDTFAGFVFSLLGQIPEDGSQAVLETHGLKIELREIREHRLERAVVTKMESLS

SEQ ID NO: 82165 - protein, 312 aa, Unknown
  Obtained from environmental sample
  DOMAIN (12)...(263): Subtilase family
  misc_feature (1)..(312): Xaa is any amino acid
LHYRKRGDPGVDPDSIANNPRNPRYRNDRHGTQTLSLAAAYVPGVYMGTAFGASFALARTEDDSVESHVEEDYWAAAMVWADSLGADIISSSLGYRDGYTDSTDYKYYDMDGATAIVSIAAAEAVKRGMIVVNSIGNEGNRTEGTLTAPADVDGVVSVGSVTQNRTLSDFSSTGPTYDGRMKPEVVAPGSVISVPEPYPPYKGAPPYITVDGTSFSAPIVSAIMALILQAHPNISAQAAKERLYASCSFAAGQNAANNRFGYGIPSAALAVMDTNEIFLRVVGTAKTALAGAVAEFNGRTYTAHTCGNILLR

SEQ ID NO: 82166 - protein, 329 aa, Unknown
  Obtained from environmental sample
  DOMAIN (2)...(294): tRNA synthetases class I (R)
  misc_feature (1)..(329): Xaa is any amino acid
MQVHAGLQRAGRSQNPGSERIKSDRFVGDWYIKFSQGLKEETETLEKEKGLNKKDAEARTPLLLRAQELLRQWEAGDSETVELWKKMNAWAIDGWKETYKRTGVSFDQYYYESQTYLLGKDEILKGLEKGFFYRQEDGAVAVDLTAEKLDKKILLRSDGTSIYITQDFGTAIKRYKDWSFDKLVYVVGSEQQYHFKVLFVLLEKLGYEWAKNLYHLSYGMVNLPEGKMKSREGTVVDADDLIDSLRDMALEEIRSKEREEALDNPEETAEKIALGALHYFLLQVSPTRDILFDPKESLSFNGNTGPYLQYMGARIHPSSAESDHGGGFF

SEQ ID NO: 82167 - protein, 230 aa, Unknown
  Obtained from environmental sample
  misc_feature (1)..(230): Xaa is any amino acid
MPQVSKDAKKLVAACPNSPEFRSYMKKWIEAVCSCDIETVFWDEPHFYFEKNNPSLQACYCEYCSGTSRQQSLISFLAFLTEEVHKLGKRNSVCLLPPWFPAGLENWDEVAELPFVDEVGSDPYWEKGDALEKVQKSYSEVSGRIADLAKKYGKEAQMWIKNYHIEAGTEHFITETTQIASSAGIKNIFAWSYLGSKYMDFLRSESPETVWKTQIKAFSLAKACSLGSRV

SEQ ID NO: 82168 - protein, 286 aa, Unknown
  Obtained from environmental sample
  DOMAIN (147)...(208): Bacterial type II/III secretion system short domain
  misc_feature (1)..(286): Xaa is any amino acid
VLPTFSQQPPQAPPPQAQQQPIGRPAAPTERYSINGDRIVDYFDVHAAELRSVLRQLSAYSGRDIISNDGAKATVTLSVTNKSWREILSIVCMVNNLAFVEESSFIYVMTKEQAATYSANMGRGGDGAGGLMNAMAMGTDLSGPLVREVIPMRFTTAAETGAAITPFLTQRGKMTAIEHTNSIVIVDTDDNLKQLKNLVSQIDIQTPQISISCKIIEASSEAVQNMGVNWGFVDGKNNVTVNQFGQSFNGFEPATMAASTQLTATYGLLTPEKFRVALEYLFADNK

SEQ ID NO: 82169 - protein, 123 aa, Unknown
  Obtained from environmental sample
  misc_feature (1)..(123): Xaa is any amino acid
MPKVIITGADRGLGLSLCKEFLNRGWIVFAGKYLDDYSFLEDEAKKSPNLHIIKLDMGCADSIACTKDHLLQITDSLDMLISNAALMGPVHCNLYEPPMDLEAVWNSFRVNALWACLSCRKTF

SEQ ID NO: 82170 - protein, 100 aa, Unknown
  Obtained from environmental sample
  misc_feature (1)..(100): Xaa is any amino acid
MEKQYNPATVEERLYDGWIKKGYFHADPSSPKPKYSIVIPPPNVTGVLHIGHALNHTIQDILIRHKRMRGFEAMWMPGTDHAGIATQNVVERRLPRRNAP

SEQ ID NO: 82171 - protein, 213 aa, Unknown
  Obtained from environmental sample
  DOMAIN (117)...(193): S1 RNA binding domain
  misc_feature (1)..(213): Xaa is any amino acid
MILGYDLQAGRVSLGLKQVKDNPWETIEEKYPVGTRVKRKVVKITSAGAFIELENGIDGFLHVDDMSWTKKIKNPGSALAVGQEVEVMVISVDTANRNIKLGMKQLSEDPWKKFCETYKPGSPVEGEVASITDFGVFLRVPGGIEGLIHKSNLVENREDDPDEALKKINVGDTIKALCWKFKATSKKSRFQSAVIRRRRKRRIIALLAGEEVS

SEQ ID NO: 82172 - protein, 89 aa, Unknown
  Obtained from environmental sample
  misc_feature (1)..(89): Xaa is any amino acid
MKTITVNASKTYDIKIGSGILDNADSILQKIGSTTAVVTDDIVAPLYAQRLENSLSRNKTRIIRYVIPHGETSKSAEQLVSLKFLGSSP

SEQ ID NO: 82173 - protein, 253 aa, Unknown
  Obtained from environmental sample
  misc_feature (1)..(253): Xaa is any amino acid
MGIRYFVFAVNKMDLAGYRQERFETISREIEKLVGDLKLANAVIIPVSATEGDNITKRGENMPWYAGSTLLSYLESADIAGGQTEAGFYMPVQRVCRPDHTFRGFQGQIESGGVSVSDTLTALPSGEMAVVTAIYAADRQVNSAAAGQPVTIQFDREVDVSRGCVLTREAGLKIVKEFEATLLWMDDQKLIPGKEYWIKIGTKLLPAIVSGIRHKVDVNTGALMPVNSAVKNEIVRCEIVMTEVAVLDEFART

SEQ ID NO: 82174 - protein, 141 aa, Unknown
  Obtained from environmental sample
  misc_feature (1)..(141): Xaa is any amino acid
EASPPNFSFGQDYFIKEQIDDCEEEIVKINNALAELEEKIALLRKEKQSLPEDLKTEKRRLVKLLDQEKLKVFNLREKFEEHSESEICCRGTIYPGVVIESHNRYYEVQQKRNQVVFYFDRKSGRIKEKHLEINNDSFDQG

SEQ ID NO: 82175 - protein, 189 aa, Unknown
  Obtained from environmental sample
  misc_feature (1)..(189): Xaa is any amino acid
MAKPTVDDILNIETGEHYTAEQLLGTDKIKQFKLRHDIEQRIQKHLSKYVCAICLQKIKLRAGDYNRFHFAHLKDSPDCPIKTDTKYTKKEWLALIYHGTKESKRHIKLKNMLNDILELDSRFSDVKLEKTVKEIKDKIKWKKPDLPCMYNNRKHIFEIQISHTFISVIVAREISMKKTRCPRFGYSTS

SEQ ID NO: 82176 - protein, 59 aa, Unknown
  Obtained from environmental sample
  misc_feature (1)..(59): Xaa is any amino acid
MLGLMARKVRMTQVFDETGSLVPCTVIRIEPNACRAPKSREKDGYQAVVLGVDELKKAG

SEQ ID NO: 82177 - protein, 116 aa, Unknown
  Obtained from environmental sample
  misc_feature (1)..(116): Xaa is any amino acid
MDLKKFEFWFIVGSQDLYGDATLKQVADNARVIAEEFNKDPLLPGKVILKPTAITPHAIRGLFEEANAAGACAGIITWMHTFSPSKMWIQGLAANRKPLLHLHTPVNRDIPWGSID

SEQ ID NO: 82178 - protein, 220 aa, Unknown
  Obtained from environmental sample
  misc_feature (1)..(220): Xaa is any amino acid
VVYYDKTNQILKMAISNSTRPVEGSAWRIIPNVIPTDNKSYKGTGDYVSMKIDPRNNTVHIAAMNSTNKNLVYIKGTISGQNFTTSNANVQVVDSVGSVGRWCSLSLDSNGDPWISYQDESYQGSRDGAKLAYYKTGTYYKGSATDDTHRRGQDVDLYNTNITGWEAMHVPTAFRVENARQGMECFPKLNVNPNNGTTKIWRGAVGYLGQDYFRIAYYIE

SEQ ID NO: 82179 - protein, 320 aa, Unknown
  Obtained from environmental sample
  misc_feature (1)..(320): Xaa is any amino acid
PFSPDIAGLCDPIPNYCPDLQPFQDGIDKGFFKRRIRKAILARSSYDLSRESARLVFAEADFLPGLIIDRFVGWPLDALEVAVKERPFRFENAAAMGPPASWLSVQFLAYGMDSRQELILDALEEVLAAPLLPGMEPLGAPTGIVEKSGAKVRELEGLLLREGLVRGNFPSSGIIIFENGLPFAVHLEEGQKTGHFLDQRDNRHLAAACLSRLSQEEKIDGGPRVLDAFSYTGCFGINAARAGAGSVVCVDVSAAALETVKVNAALNGVSDKIKTVEADIFEFLRTEERRTEHYDMVILDPPAFAKTRLSLEGAIRGYKE

SEQ ID NO: 82180 - protein, 296 aa, Unknown
  Obtained from environmental sample
  DOMAIN (108)...(228): HD domain
  misc_feature (1)..(296): Xaa is any amino acid
MVQEQRNSLDGGYNYRAACSFRQIGNPFPYTGITNDIMEISSGAVREKIASNSSWRYLVPDVARIIIEDRKLYGCRGSATDDGARSASVKNIIRRIEDEAREKLNLARFLHSRHTALLAWDLCCRFRKDYPSLDPAVGYLTGIAHDLCKQLCDEEQIRLATIYGGEISNVERAKPSLLHGRACAVVLKDRFNINDDEVLKAIAVHTEGGRNMSPLAKVLYIADKMEMSRVKVDPATRTRILAGDTLDRIFIPVLERAVSSIRDKKLELSKNTVGLLEEMGIPDPAQQNGGIRSAGK

SEQ ID NO: 82181 - protein, 189 aa, Unknown
  Obtained from environmental sample
  misc_feature (1)..(189): Xaa is any amino acid
MANRKLLTVMLAVALVSAMTACKSPKAGGWKVVNGKGTKNARAIAFGNDMFVMARKGGEMAVSVDGVTWTAIKSKALGKGNINAIAFGKDKFVAVGEKGRIVYSEDGEDWTAAEDNAFEKKDSITAVAWSGSRFVAARGKGKMAYSSDGEDWTTVRTASSARKTTYRRCRLRGGRFVALGERRKMATSP

SEQ ID NO: 82182 - protein, 56 aa, Unknown
  Obtained from environmental sample
  misc_feature (1)..(56): Xaa is any amino acid
MIGTKGIVTGVNGNMVSVRFNGDVSMNEVGYVKVADKRLKSEVIRIPRRNQPTSGL

SEQ ID NO: 82183 - protein, 297 aa, Unknown
  Obtained from environmental sample
  DOMAIN (176)...(295): Alpha-2-macroglobulin family N-terminal region
  misc_feature (1)..(297): Xaa is any amino acid
MNFNPGSAVPGRVTARFMTRIFEPSGVFSSEQISKEYSPYSCYVGVKLPKGDARDMLFTDTDHKVDIVILDEDGKPLRGNNDLDCAVYKINWRWWWEKGDDESAEFTSALSSAPISRQTVTAANGKASFSFSIKYPDWGRYIVIAKDSKGGHAAAKVAYIDWPGWAGRARDSGQGSQSMLTLTTGKPAYNTGEKIQITFPSNKDAAALIVLEKGGNIIKNEWVSCQEGTTKYEFNAEQSMVPNIYVHITLVQPHLQTQNDLPIRLYGITPVMVEDARVVINPQIKRRKTQAITSRQP

SEQ ID NO: 82184 - protein, 301 aa, Unknown
  Obtained from environmental sample
  DOMAIN (7)...(301): Glycosyl hydrolases family 2, TIM barrel domain
  misc_feature (1)..(301): Xaa is any amino acid
ASSRRYRHDFDPDTGWAISPERYHEDLRLMKQLNINAIRTSHYPNDPLLYDLCDEYGILVMDEADVETHGARRKIPASDPLWTAACIDRMRRMVLRDRNHVCVFFWSLGNEAGKGGAFSSMRKAAESLDNTRPFHYEGEHSKDSSDVISRMYPDEKIFKTLCQKQTLKTSANPLIAYAMFDKSVPEKLYDKMPVLLCEYAHCMGNSLGNFSEFTEAFEKYFHLCGGFVWDFVDQAIHRKDAVTGGDQWLYGDDFQESYSRDGYKSKRRTGSDGNFCGNGIVAADRKPHPAAWELKKCYQTL

SEQ ID NO: 82185 - protein, 71 aa, Unknown
  Obtained from environmental sample
  misc_feature (1)..(71): Xaa is any amino acid
MNIEIGKDKLTIENLVSAAKKQIKVRLCRDAEFEAEIEKGAALLDSMLAKHGGIYGVTTGYGDSCTETVNP

SEQ ID NO: 82186 - protein, 288 aa, Unknown
  Obtained from environmental sample
  DOMAIN (47)...(160): MMPL family
  misc_feature (1)..(288): Xaa is any amino acid
MSTQYITGDSDSIVVSDLVPEDFSGTDEEITELKRRIASWDLFRGSLVSDDLSATQILITLEAVTADFTRPEVMRSVEKIRKAAGDIFTGEAEVYFTGQPIINAIINNSMISDNILLIPLVVIVVLSMLFFSFRRFAFVILPFLTVIIAVVWAIGIAALFGIKLSVITTILPVILVAVGSAYGIHIVTHYMEDIRGKTLTVTDHRELVLTLVRKLIKPVFLAALTTMAGFISFCFTPIVPMREIGYCASFGVSLPLHGCTAYPLMFCFTAPRSERKQKKNPRVLIHIS

SEQ ID NO: 82187 - protein, 161 aa, Unknown
  Obtained from environmental sample
  misc_feature (1)..(161): Xaa is any amino acid
MKKIITTVIAVLIYAGAVFAADPVEGFWMSVDDKTGEIKSGWEIYESNGYLYGKMLSAVGFSSATRATRCRESYANFPVAGKVNQLPLLGPPWIFGLRREGPGHWTNGNVINPEDGNMYKCSIIHRPADGKKFKQETLEIRGQLLFSRAANLGHLIFTFVS

SEQ ID NO: 82188 - protein, 237 aa, Unknown
  Obtained from environmental sample
  DOMAIN (77)...(110): Tetratricopeptide repeat
  misc_feature (1)..(237): Xaa is any amino acid
MLYVGLALCFLERSWVVKLRVLVIVALLMMFVRGVGFAQTESVEYYYNCGKEFLDNGDYYNAIENFNQALRIKPDFSEAINGLGEIYYYIGDYAKAEHYFLEATAIREKALGKEHPDYAESLNNLGVLYKNMGDYAKAERYYLEATAIREKALGKEHPDYATSLNNLGALYHSMGDYAKAERYFLEATAIREKALGKEHPDYAESLNNLGVLYKNMGDYAKAERYIWSLGRSDHDYP

SEQ ID NO: 82189 - protein, 230 aa, Unknown
  Obtained from environmental sample
  DOMAIN (1)...(230): Endonuclease/Exonuclease/phosphatase family
  misc_feature (1)..(230): Xaa is any amino acid
MRVISWNVNGIRSVEKKGFASWVKNESADMVCIQETKARPDQLSPELLEIQDKNGKPYYAYWACAKKPGYSGVGIYSKTEPLNLKNLGVEEFDNEGRVLQAEYRDFTLISAYFPNSQDEGKRLDYKLRFCAAILELCSAYRKENRHFVLSGDYNIAHTPIDLARPKQNENNPGYLPEERAWMDTFTKEGFVDTFRHFHPGEKDHYTWWSYRMNAREHNVGWRIDYHCTDP

SEQ ID NO: 82190 - protein, 66 aa, Unknown
  Obtained from environmental sample
  misc_feature (1)..(66): Xaa is any amino acid
MHHERIAVLDFGSQYTHLITRRLRELGAFSLVYKHDADPEEIGGSDLKGIILSGGPILSWGLSPQA

SEQ ID NO: 82191 - protein, 115 aa, Unknown
  Obtained from environmental sample
  DOMAIN (2)...(115): Response regulator receiver domain
  misc_feature (1)..(115): Xaa is any amino acid
MKTIFVVDDSDTNLSMAEETLDRLYRVMTMPSAAKMFSLLEKMMPDLILLDIEMPGMDGFEALNRLKSENLWANIPVVFLTGRTDAAVEVRGFEMGAVDFITKPFFRARVDTRPI

SEQ ID NO: 82192 - protein, 326 aa, Unknown
  Obtained from environmental sample
  DOMAIN (1)...(325): Carboxypeptidase Taq (M32) metallopeptidase
  misc_feature (1)..(326): Xaa is any amino acid
EQLALLKGIAHEKLTSPETGRLLSELGSSTENPGGDEKLPELERDFLKVLRRNYDRAVKLPGDFVSAAARAEGLSQAAWVSARRENNFSAFLPHLVKMIDFSRQRAIYWGYKDNPYDGLLDIYERGMGVKAISEVFTPLGKRLAELLKKISSSPRPDNSFLDQKFDVEKQASFSRDLLKRLNFDTSRGRLDVSAHPFTTTLGSDDIRITTRYLERQVQSNIFSTIHEAGHAFYEMGFPEELRVSSLADGASMGIHESQSRLWENVIGRSRVFWEAMYPVLRSCFPGQLSAFKTEDFYRAINLVEPSLIRIEADEVTYSLHISQKTG

SEQ ID NO: 82193 - protein, 98 aa, Unknown
  Obtained from environmental sample
  DOMAIN (17)...(97): Uncharacterised protein family UPF0047
  misc_feature (1)..(98): Xaa is any amino acid
MTTLSGFNVRTGGVTDWINITGEVQKAVSASGVREGICVVFVPHTTAAVTINENADPDVPHDVNLALNIISPDRREFQHSEGNSAAHTKTSLWDRLSR

SEQ ID NO: 82194 - protein, 206 aa, Unknown
  Obtained from environmental sample
  misc_feature (1)..(206): Xaa is any amino acid
MYIHQKFLIGVISPRLYGAFLEPIGTMVNGSMYNPKHPTADGKGFRHDYMDALKESGIPAVRLPGGNFVSGWSWKDSIGPMEKRKTQLDTAWFQYYTNEIGHDEYLQWTHMIGAEPMYTVNLGTDNLIDALHIVEYTNHKSGSYWSDLRREYGHEAPYNVRTWYLGNEMDGPWPIGSWQKNPRGYGILAHEVSKGMKWIDPCDETV

SEQ ID NO: 82195 - protein, 290 aa, Unknown
  Obtained from environmental sample
  DOMAIN (168)...(254): Hpt domain
  misc_feature (1)..(290): Xaa is any amino acid
VLVVDDVLTNLDVAAGLLRKYRMQVDCLDNGPAAIKRIRSGTPVYNAIFMDHMMPDMDGIEAADHIRALGTEYAKNIPIIALTANAIHGTEQLFYEHDFQAFISKPIDIAELDLVIRKWVRDETRDDVPVLNAPVYNDPSTPIAIEIPGVDTKKGLALYAGDTGVYLTLLRSYVTNTPGLLDKLRIVTEKTLPKYNVTVHGLKGSSAGIGAELIRESAFELEKISKEGNLQGVWALNGKLIADTKIIVANIKAWLEQYDASREKKPVKKAPDKELLKQLRQDWKSRPSNP

SEQ ID NO: 82196 - protein, 72 aa, Unknown
  Obtained from environmental sample
  DOMAIN (1)...(60): Holliday junction DNA helicase ruvB C-terminus
  misc_feature (1)..(72): Xaa is any amino acid
IIERTKGGPVGAENPAISIGESVETLEDYYEPYLIQAGLLQRTPRGRTVTSLTYGHLGIAPNTASDEGRLFD

SEQ ID NO: 82197 - protein, 71 aa, Unknown
  Obtained from environmental sample
  misc_feature (1)..(71): Xaa is any amino acid
QWSESAENRLLDIREDRLVIYGSVGSKVSSFSYRARAINAGSFVTPALFAEALYDKSVWALRPQASIKIAK

SEQ ID NO: 82198 - protein, 71 aa, Unknown
  Obtained from environmental sample
  misc_feature (1)..(71): Xaa is any amino acid
GAMRESGTSGVQEQYDYRIQVIEPVFANIVSCKGLDRFTVRGKAKVNGQWLLYCMVHNLGKCLKGFNKGLV

SEQ ID NO: 82199 - protein, 236 aa, Unknown
  Obtained from environmental sample
  DOMAIN (45)...(128): Carbamoyl-phosphate synthetase large chain, oligomerisation domain
  misc_feature (1)..(236): Xaa is any amino acid
MKATGEVMAIADTFEEALLKAVRGAEIGLSNLNLPRLAAKSDGEIRDMLKTVTDERLFALYEAIKRGVSVDELFDITKVDRWFLHGLVNIHKGLFDDNSQSIDGGKLIYKMVDTCGGEFEAKTPYFYSIRNGSENEALPFIEKSSKPRIVVLGSGPIRIGQRIEFDYACVHCVWTLKKLGYEVIVIHNNPETGLTHFETGRRLLLRAALLNDLMDVLKSKNLAASSGPFGEGRAIN

SEQ ID NO: 82200 - protein, 324 aa, Unknown
  Obtained from environmental sample
  DOMAIN (52)...(243): ATPase family associated with various cellular activities (AAA)
  misc_feature (1)..(324): Xaa is any amino acid
PCQIGRGEEPALERFATDLTALARDNKLEPFIGRTEELDRTVQVLCRRLKNNPIHVGDSGVGKTAVTEGLAQRIVAGNVPDTLKDFSIMALDMGALIAGTKYRGDYEDRVKRVIEELLKKEKAILFIDEIHTLVGAGAVSGSAMDASNLLKPALTSGKLRCIGSTTHEEYGKFFDKDRALSRRFQKIDINEPPEDDAIAILHGLKSKYEEFHKVRYSDEAIEGAVRLSVQFITERRLPDKAIDIIDEARAFARIRAGQSDKTADSADNNNAETDITDETKTDDATAKVIETIDIGLPLIETVVSKIARIPERSVGESEKDKLRL

SEQ ID NO: 82201 - protein, 314 aa, Unknown
  Obtained from environmental sample
  misc_feature (1)..(314): Xaa is any amino acid
LCGDRVDRPVHEYLSDEFMGIVAACVEKARKEKMLAWLYDEDRWPSGAAGGIVTKDPKYRVRHLLLTRSPYGSQAGKAPEKRSRVDSGRCENGELIACFDVVLDKNGDLETYRAIGEKDKASGFRLYAYAETALPSPWFNNQTYVNTLDARSIREFIRVTYGAYEKHFGKDFDNVIPAIFTDEPQFSRKGTLNFAHEEKDVTLPWTYDIEDTYRAAYNGESLIGALPELLWDFPGGRISTIRYHYHDHVAERFAAAFADQCGAWCREHGIMLSGHMMEEPTLRSQTCALGDAMRSYRSFQLPGIDMLSDKREYT

SEQ ID NO: 82202 - protein, 331 aa, Unknown
  Obtained from environmental sample
  DOMAIN (63)...(117): GHMP kinases N terminal domain
  misc_feature (1)..(331): Xaa is any amino acid
MLGEVAVSARKDSSLRFYAADLGERKRTTLANLKFKREDRWANYIKVAIHVFAKLGFPVKGANFTVVGNIPQQIGLASSSAIEIASAVALKGFLHVKIDDMDLALRLADAHEFIFGKSGDLADYITGLTARSDQFLVIDEQGPTVTKIKSPFSRCKIIIMDSRVPRFGIDGELDNRREDIKAGLAMLSQGREGASFREYAAMDLVESLGNLPEEIRRRSLHVVQEIRRVFGAKDYLMRGDLLDFSRLVFNSHESLRDLYEVSCPEIDWMVKRAQETIGVYGARMTGQGFGGCTYTIIKNEMVSEFKNPSDDHERIFGFAPPSTKLNWAAEV

SEQ ID NO: 82203 - protein, 158 aa, Unknown
  Obtained from environmental sample
  misc_feature (1)..(158): Xaa is any amino acid
MNTWYNEKLIYQDFPLQTVAEDGNNILKSGVAGAFGGNWDLPYRTDYNINADLAKNVPGASFIAVDLYLKNKAMLDKVGLFMFIPIYSKSQKEALQYLNWLAKFENFNYLQIGERGTNHNIVHGVPQILNYTDPRWIQNSTQNIDITMPVDDDFHGKR

SEQ ID NO: 82204 - protein, 289 aa, Unknown
  Obtained from environmental sample
  DOMAIN (202)...(288): Histidine kinase-, DNA gyrase B-, and HSP90-like ATPase
  misc_feature (1)..(289): Xaa is any amino acid
MIGNDDLTALGVPGEVTAIANDADKRVINERQRIVLEELIPCADGCTRICETVKSPLILDGEVIGIIGIGRDITQRKIMEEEIRAASRAKSTFLANMSHELRTPLNVVIGLTDLLLENDNLDNHVRVNLLKVSNAGSTLLSIVNDILDFSKIESGKLELTPVVYYMPSLLNDVITLAVMSLGEKPIRFSLNIGDDLPDILYGDDLRVKQIFTNLLSNAVKYTREGSIELSVRCTRETDTVRVDVTVSDTGIGIREEDLKKLFSDYYQADAKANRKIEGTGLGLSITKRL

SEQ ID NO: 82205 - protein, 310 aa, Unknown
  Obtained from environmental sample
  DOMAIN (39)...(310): PEP-utilising enzyme, TIM barrel domain
  misc_feature (1)..(310): Xaa is any amino acid
EATLGDFSFSEGNYITIDVPFYGESKVYLGAAELIEPDPQGSGLLDFIDMSKSFLKEFHVRCNADTPRDANLALEFGAEGVGLCRTEHMFFKADRINVFRDMLMSDDKKERQKVLNKLQVMQREDFYGIMKAMAGKEVTIRLLDSPLHEFMPHSADEIQGYIDHVTKTSGKKPSKADIMVRIDSLHEFNPMLGHRGCRIAVSYPEIYAMQVKAIFEAAYKLRSEKIDARPEIMVPIVMNAAELKLIAYGKKIEGSNYLGIVDIEDNLRKTLKAKEMEYKIGTMIELPAAALGAGEIAKYGRLGHLNTGPR

SEQ ID NO: 82206 - protein, 181 aa, Unknown
  Obtained from environmental sample
  DOMAIN (1)...(181): Dihydrouridine synthase (Dus)
  misc_feature (1)..(181): Xaa is any amino acid
MEGVTDLPFRRFIRELSKDKQPFFVSEFLSTGSSVFLTPVNIRAVRFEKEEEPFCMQLFGHSAERLAATALQAQELGAAFVELNAGCPAPKIANKGSGSGLLRDLPNLQKILESMKSVLKVPLFLKCRLGWDEKSIVINEVLEMAEGSGVEQLPFTAEQNAGLQRPLKLGKQSVKCGKGKN

SEQ ID NO: 82207 - protein, 301 aa, Unknown
  Obtained from environmental sample
  misc_feature (1)..(301): Xaa is any amino acid
MENHPRRHFIVRTGSACPLFAKLAAFGLALVFTLSCSDDTSGGGGGDDGGNGGTIADPLNGTWKAGNGETITLNNGSFVISQNNKQGMRGTYTAANARSISANISLAVKELHGDFLTEELKKEGIDKTFESKWFTKEQFIDAFKKILKELGASDADANAYINQHSGDLNSMYPTITGTIDGDTMFLNVDGGTTYTKDGGGQTPGTNPGSGNMTWTRVSSPFSNYEYEFVQAIAWGGNKFVAGSSSGQIATSPDGITWTFAAYPFGQGGGIKGIAWGNDKFVAVGYDKDYSNKIAYSTNGTT

SEQ ID NO: 82208 - protein, 176 aa, Unknown
  Obtained from environmental sample
  misc_feature (1)..(176): Xaa is any amino acid
IASKSTAVLGRETSERRVKNYQLTGRLSGFPVLHFACHGYFNSEYPELSAIVFSEVSGLLTESTEDGYLTVAEAALLRLNARAVILSACDTGKSGLKRGDGMVGLVRSLLVAGSRSAGVSLWPISDEATVKFMEGVYRRALKNGKSFRDAYYEVKQEFRRGKWSHPYYHAAFVLYE

SEQ ID NO: 82209 - protein, 152 aa, Unknown
  Obtained from environmental sample
  DOMAIN (8)...(152): L-rhamnose isomerase (RhaA)
  misc_feature (1)..(152): Xaa is any amino acid
MESYLNPEKIEKAYALAKDAYAAFGIDTDKAISAAVDIPISIHCWQGDDVTGFEGADGLSGGGILATGNYPGRARNGEELRADAEFAFTLIPGEKRFNLHTLYAETGGKKVGRDELEPEHFMNWMAWSKKIKSRWILTKLFFAPHGRIPLYP

SEQ ID NO: 82210 - protein, 286 aa, Unknown
  Obtained from environmental sample
  DOMAIN (122)...(201): Cache domain
  misc_feature (1)..(286): Xaa is any amino acid
MARIMRANLINDVGGVFNTVENQIKFDLLEPRTILYDFAQTVRSMILYGDDAERLLVYTTEISDRICMREMGRFCGLYGYIEKVKGGPVFLNGLHIESTDINTPEGRPWYEAAITAGGIAETAPYTDLVTGTSIISYSCCIFDDEGAYLGVVSIDVHLDYIGNRVINSALTEYGYGMLVSQDLTVITHSNPDFVGAKMYDPKIPVSIFTDEMVEKGSISEASFINWKNEKALAFTRRLPNGWYLIILAEKDIYYKNLTDMAATLSLLGIVLSAVLIVVLIPVDAAR

SEQ ID NO: 82211 - protein, 319 aa, Unknown
  Obtained from environmental sample
  DOMAIN (8)...(316): Periplasmic solute binding protein family
  misc_feature (1)..(319): Xaa is any amino acid
IGRESLLLPIIATVLMFTGCGKSNKPATDNAKISIVTTIFPPYDFARAIAGDNAEITMLLPPGSESHSFEPRPQDIIKIQNSGVFIHVGGESDAWVKDILKSIDNPKMKVVTMMDCVEAVEEEIVEGMQEEEGEDKKDGEGEDGPEYDEHVWTSPRNAKLIVRKISETLREADPSNAETYQKNTEAYLSRLDELDAKFKGVVDSATRKTLVFGDRFPFRYFADAYGLKYFAAFPGCATETEASAKTVAFLINKIKTEKIPVVFHIELSNEKMARAIAEATGAKALLLHSCHNVTKADFESGKTYLDFMTAHADALRGGV

SEQ ID NO: 82212 - protein, 320 aa, Unknown
  Obtained from environmental sample
  misc_feature (1)..(320): Xaa is any amino acid
NRLVVLQQVSSFRFSFGPLFGLSEASSYRWFPAFYSACRCKMLLRSINAPLTAIQNIGKKAMEESAPKFARLGIRNVAGLLCHYPRDWEDRRFTVPIAEFGRAKVCTEATVLAHDWIWFGRNRTPKIFIEDESGRAVLVGFNRPWLAKQMEVGNCYRVWGSFEYKRGEIQSSNFEFEEASKAENFNTMLPVYPLCAGLRQAMLRRFTTAAIEQYAALLENELPGEIIERDKLLSKAAAIKAYHYPSSPEELEQARKTLVYEELFYLEVIVGKRALERRGIGNRERGTGTGEQGTGTREQGLGTGEQGTGSGDSCMVSCRF

SEQ ID NO: 82213 - protein, 295 aa, Unknown
  Obtained from environmental sample
  DOMAIN (27)...(105): OB-fold nucleic acid binding domain
  misc_feature (1)..(295): Xaa is any amino acid
MDEYRDLWEKTVKVDLGHLAGPETGNQILVGIIKAIRIVNSKSGKMAYVTIADYNGEIDMIFFPRVWEAWQDRIQEDQIAIVKGRIDYQKDRDKYSFIAEGLIDSREVETVITEEDALRRKREKFHSTWLYMADLKSGGLASAGKGSYTVIGQIVSLKETKDKNGDDMAFGTLRDFEGDIDLVFWAKTWKENRDLLGTDEFVALKGSLDPERDRNPQKPSLKVSKVDNLASLTRSAARKAEAGEQPKVPPLEMQAVKKENPPDTERTVQPLNQIHIRLQTGRRRQGRKYTAPCRI

SEQ ID NO: 82214 - protein, 87 aa, Unknown
  Obtained from environmental sample
  misc_feature (1)..(87): Xaa is any amino acid
MVLLFCPRQANLFFVKAPPKKTSIEKSEPCIGGADLMAALREKGILVRHFNKNRIADYLRVSMGTDEEMDAFLEACSAIICNSGNAK

SEQ ID NO: 82215 - protein, 325 aa, Unknown
  Obtained from environmental sample
  DOMAIN (1)...(235): MutS domain V
  misc_feature (1)..(325): Xaa is any amino acid
VLESGNRTVIKEGRHPIVEAHLPRGEFIANDLYLDASDNGGPGEISFALITGPNMAGKSTYLRQAALITIMAQCGSFIPASEGRIGIVDRIYCRFGSQDNLARGESTFLVEMNETAYILHTATNQSLVIMDEVGRGTGTEDGLSIAWAVCEELLNNIKCRTLFATHYHELAGIDHHAMANRSMDVDERNGKVVFLRKIREGSASESYGLHVAALAGIPERVLKRAGEIMLRRKNEKPVFAETPLPQEETQGSSYNCQEAAVLKNLSELEINTITPLEALNLMQRWKKIVTGEERPASGQKIKSASKHPGAEPSLFGFSANLSWGN

SEQ ID NO: 82216 - protein, 205 aa, Unknown
  Obtained from environmental sample
  misc_feature (1)..(205): Xaa is any amino acid
VNSALEVLNNRIDRFGLTEPVIRRQGSDQIYLEIPGSADPERINDIIMGKGSLAFHMVDSEATDAFNSYYIANPTRTFDNEGNLVNPTIVPADVMVLGVYQKDRYGLDEQMRNADGSLRYAALKREVGLDGNHIRSAVVDRNNLDGKPEVTFMLDSEGGEIFYRLTSANVGKPMAIVLDNKVKSTANNTTAIRDAVRLTGFGLDE

SEQ ID NO: 82217 - protein, 297 aa, Unknown
  Obtained from environmental sample
  misc_feature (1)..(297): Xaa is any amino acid
VYQLIKTEAADAFINYNVGEAAFDAYDDVVIEDFIPLNFNTMCMAAQNPELAPVISVVTKALRNGGIQYVNKLYNEGQNNYIRNKFLKSLNAEEREYLQNTSVVPVTAAPWFYPLDYFNKFENRWEGIAFDVLDEVTKLTGLSFDVVNSGDASWAEVFQIFNDEASICLDLIASPERINRYLWSKYIYLSENYALVSRYNFPNISISEIQYAKIGLIKSTAWASMFQNWFPEAVNATMYDSQDEAFLALDRGEVDLVMAGTNALFALTHYYEFSNYKANYVFNSTIDYVIAYIKGED

SEQ ID NO: 82218 - protein, 74 aa, Unknown
  Obtained from environmental sample
  misc_feature (1)..(74): Xaa is any amino acid
MAERRVDSGGQTGVVHLVVGKVSMEPEKVAENVEVVVTEIKRKRPPDVKGEFIQSVSVASTMGPGVWVAMRDQD

SEQ ID NO: 82219 - protein, 85 aa, Unknown
  Obtained from environmental sample
  misc_feature (1)..(85): Xaa is any amino acid
MADDYRRHDISDGTWELLRPHLKGRKGTWGGNAKDNRRFIDGVLWILRTGAPWRDLPPDYGDWKNTHRRFCRWRDPRQWESCWIY

SEQ ID NO: 82220 - protein, 328 aa, Unknown
  Obtained from environmental sample
  DOMAIN (59)...(233): Radical SAM superfamily
  misc_feature (1)..(328): Xaa is any amino acid
DGNGGPFDVSPILEAVEKKANNPCLAESWFPNIIMDDMTQAQCSFSSSHLREGQFRSFVPIMHGCNNFCSYCIVPYVRGREVSRNPKLIAEEIRLVGERGVREITLLGQNVNTYNWNGGELDFAGLLRLAAAEAEKSGVKWLRFLSANPRDFSRETIRVMAEHRVFCRHLHLCVQHGSNRILQAMNRGYTREHYLSLVKEIRSSMPEISLSTDILVGFPGEQEEDLEETLALMEEVRFLYAYMYHYNPREGTSAYDLPDRVSEETKRERLSRVIALQKKHTSALLKKRIGSREIVLIEGISRKNADELVTRTERDEMVLPPSASSDLT

SEQ ID NO: 82221 - protein, 240 aa, Unknown
  Obtained from environmental sample
  misc_feature (1)..(240): Xaa is any amino acid
MMAGFVRILDDDGAKIVQKHIDGEGVEFKLAASVKKFNKKSAVLENGESIEFDVLVLAVGVRPNTALLDGIAKIERGIVINEKSETTAPDIYAAGDCTQSLDVSSGQSKIMALLPNAYMQGECAGINMTGDNASDCARFDKAIPMNAIGFFGLHIITAGNYTGDVYTDNKDGNFKRLFYSENKLNGYILIGNVEKAGIYTSLIRERIPLDTIDFALVCEKPGLMVFTKEDRKVKLGGASS

SEQ ID NO: 82222 - protein, 193 aa, Unknown
  Obtained from environmental sample
  misc_feature (1)..(193): Xaa is any amino acid
MQKKTIKLGTVKTANFRNNAFLCIGTGRMGLALQKEYLEQLKLVQENIGFKWIRGHGLFNEDMAIYQEYKKEDGTVTPEYNFTYLDFVIDSYLELNIRPFIELGFMPHAIASGEQSVFYWRGNITPPKDYAQWNKLVAVTLRHLIDRYGENEATSWLVEVWNEPNLSHFGKTPTEKNILRFPRINKNRKLGHQ

SEQ ID NO: 82223 - protein, 111 aa, Unknown
  Obtained from environmental sample
  DOMAIN (46)...(107): Hsp20/alpha crystallin family
  misc_feature (1)..(111): Xaa is any amino acid
MKTVSLYRPNVMENALSGFDRYLDSFFRDNFLDPAERVFNRLPTVDVKETEKAYVLEAELPGLDEKDVEIRLDGSTLTLQSKKEEKEEKEEKTRRRKFSLVPNSDPWGGPK

SEQ ID NO: 82224 - protein, 300 aa, Unknown
  Obtained from environmental sample
  DOMAIN (23)...(244): Cytochrome C biogenesis protein transmembrane region
  misc_feature (1)..(300): Xaa is any amino acid
MFSTSSLVTAFPAAQTGMGYGMVLIIGLLTSVHCIAMCGGINLSQTLRREQGTRQQSWRGNREQGYSLLMPSVLYNTGRVISYTAVGVAVGALGSVLTVSGRFQGAIMLIAGIFMLVMGINMLGLFPALRRFIPRMPAKLQNSLTSIFTKKPDNHKTNRGPLVVGLLNGFMPCGPLQAMQLYALSTGSPIRSGISMFLFSVGTIPLMFALGAASGILSKGQAFSHKVMRVGAVLVAAMGLTMFSNGWNLAGFVSPLNRVTAAFNSSGTEGGAFISDIQTAYRLSFQPASQRYRPIVCDRA

SEQ ID NO: 82225 - protein, 62 aa, Unknown
  Obtained from environmental sample
  misc_feature (1)..(62): Xaa is any amino acid
LAVISFRNGMTLFTGIRNQDYPLISGSTLIITVMVLAANFIVDIICGLIDPRVRMTTHEEGA

SEQ ID NO: 82226 - protein, 326 aa, Unknown
  Obtained from environmental sample
  misc_feature (1)..(326): Xaa is any amino acid
MASSTVDEWDNLGKAAGGQRDTYGGHINWRGTGKRLKAKHGWKSDISGKRGGGTDSRGFSALPGGHRRPDDYFFTVGTDGTWWTASGSKHKGSAHIQSMSLSSDDLEEATGNKDYGFSVRCVLGVSDAVEELNEAEEENSEQNEAEQEEQQIEIDSSYLTDERDGKKYRAVRIGGKRWMAENLRYKMNNSLCYNGSLDSCVKYGRLYDWDAAVVSCPTGWHLPFLEDWDSLARAVGGKPRPPGWKGTVDCDDAGRKLKANSTWDDYAGNSGNGTDNYGFRALAGGYYVGAFRAAGADREWWSATTADDSNTFYAGLYCKLHRLSQH

SEQ ID NO: 82227 - protein, 299 aa, Unknown
  Obtained from environmental sample
  DOMAIN (1)...(137): Domain of unknown function (DUF323)
  misc_feature (1)..(299): Xaa is any amino acid
MTEIGRKYGLPTEAEWEYAARGGARSKNHVYAGSGKAEEVAWFGDNGEIKTVKVGIRAPNEFGIYDMSGNVWELVGDWYGRYDTSSHLDDPVGPPWGNSRTMRGGSWSSSARACRVSNRMSLSQDFRSGDMGFRLAIGTRELKVPEPARPVLAAQPLLPPAPALVAQPTLPVRSSVRVERESPHDHTYKPRKRTSVGLGAFYGGDYGGGIVWPSGEALGMPYRGAGTYMFFDAIYAEVFTGYSAGRGKWVSPFAKDPNNLPDMSRTYLNIGVFAKYPLGGAGNFFPLLGLITRRLLGRF

SEQ ID NO: 82228 - protein, 151 aa, Unknown
  Obtained from environmental sample
  DOMAIN (27)...(148): Bacterial flagellin N-terminus
  misc_feature (1)..(151): Xaa is any amino acid
MRISHNVAAMNTHRQMGISESDGSKSMEKLSSGFRINRAGDDAAGLAISEKMRAQIKGLNMASKNSSDTISLIQTAEGALGETHSILQRIRELAVQSANDTNTDSDRTELQAEVKQLKAEIDRIGNTTEFNTKKLRKVARRRSRRSVMGGG

SEQ ID NO: 82229 - protein, 99 aa, Unknown
  Obtained from environmental sample
  misc_feature (1)..(99): Xaa is any amino acid
GGWEEYHLYPKVKELAPHVFGKLRKIYKGVSANIDFYPGFVYSMLDLPEELFTPLFAVARISGWGAHRIEELVNAGKIIRPAYKSVSKQRNYTSMQERG

SEQ ID NO: 82230 - protein, 148 aa, Unknown
  Obtained from environmental sample
  misc_feature (1)..(148): Xaa is any amino acid
MTKEEIAGVIDGYSNQILGKGGINNELYTKYEVKRGLRDVSGKGVLVGLTEISEIVSYIIEDGDYIPCEGKLFYRGINIEKIVQGFLDEGRFGFEETSFLLLFGHLPDKKEFDEITGLLEQCAVLPEHFLRDTIMTAPSQDVMNSLAK

SEQ ID NO: 82231 - protein, 66 aa, Unknown
  Obtained from environmental sample
  misc_feature (1)..(66): Xaa is any amino acid
LDRGGKNKQSCSITVGYSIFTKGAAVNVGSMLLKYGGGGHTQVGTCQVPYEEADKIIADVIRQCKA

SEQ ID NO: 82232 - protein, 322 aa, Unknown
  Obtained from environmental sample
  DOMAIN (4)...(96): Response regulator receiver domain
  misc_feature (1)..(322): Xaa is any amino acid
DSRGTRAVSVATAASGDEAVRLVEENPAAYDLVLLDKQMPVKSGNVTLDEIKAIRPNLPVVMLTGYQHSAEIAMGKRYEAYLTKPIDPGKLLIACQQILDAGHGASRKLADRYLRGYTEMSARAGGVLGVSDWMGLYHSLVKWDIELEGITSDAVSRMHTGLKSDCGKKFCDYAAENYTDWVRGGDDHPPMHVDVLKRVVEPELSLGRSVLMIVLNGMRLDQFLCMEPELRRNFSVSGMKLMSLLPTLSNFCVTALAAGYYPDEAAEAEPGIFEAAAADPIVMKRLMRRGLERAGAARVKTLYASADGSKRSAARAARRYER

SEQ ID NO: 82233 - protein, 315 aa, Unknown
  Obtained from environmental sample
  DOMAIN (1)...(315): Borrelia P83/100 protein
  misc_feature (1)..(315): Xaa is any amino acid
LEALNFRAWLHAGVDHIRNLRTIIQGYLQEAYGYTASDAALIAEYVTIYNAVYRGNWNYFSGRFKKPVTDNLNRDSAGLAVRYQEWPGRTLMLIPLNAGGLSSINTSAISDNRVVERMRTEDDKGIPQRQGMVDLKEREAAQAREDAANKRDAAKAEEAAIAKDRQTLNEQQRQAERDRQQLEQDKASGKVTDEEAAKRDAELARRETEASKKSDELDQRDKDLAAQRQNAANQEQFAQQKQDEARQDREGIARDQQTMLEQGIPPQGSIQGIICLLLEKPDATSGRLVSLDPGTGKELKRSALNTVYVRTLTII

SEQ ID NO: 82234 - protein, 73 aa, Unknown
  Obtained from environmental sample
  misc_feature (1)..(73): Xaa is any amino acid
LGKLGLSMSGAINVFFRQAIDEQAIPFRVRAVSEHDEYFNERNMERLRESVAQAESGQLIVKTMAELEAMENE

SEQ ID NO: 82235 - protein, 306 aa, Unknown
  Obtained from environmental sample
  misc_feature (1)..(306): Xaa is any amino acid
VVPHIGNGVYQFSQTNFFPLDNAPTAYNANGRNPGVEFTSGAPLSPGKQWKTDHNFSFTMEMVCEFTMQDDLMFSFTGDDDVWVFINGRLAVDVGGIHSAVKDSINLREKRAALGGLVDKTKYKLHMFYAERHTTESNIKITTNIIFDPTEIGLKVDGSPMVAGEPKLAAGVVKRTDGTRVTDFSKGWFTWTAKDIGPNKNGTTVTGQQITVTNKSGQRCDLNNNCSKKDSIHVTATKAYTYVRIYGEYYDSLSGSRARDSADVWVNPGPAAKLFIDALRDSTRSLRDSSKLDTIRIIATSTADSN

SEQ ID NO: 82236 - protein, 82 aa, Unknown
  Obtained from environmental sample
  DOMAIN (1)...(82): Ribosomal L18p/L5e family
  misc_feature (1)..(82): Xaa is any amino acid
FSDDGREILTTPRPYPGFRFPLEKELRDIKATVAGAAQLGELFGKRLLEKNINSVVFDRNGYLYHGIIKALADGTRKAGIKF

SEQ ID NO: 82237 - protein, 234 aa, Unknown
  Obtained from environmental sample
  misc_feature (1)..(234): Xaa is any amino acid
LWGGGVVWGGGFWVFGLGCWVCFVGGGGGGWLGWVVWGFLGGVGLGGLFFFGVGGGGVCWGGFWFVWGCFFLLGGVFVGGGLGFWGVWGFCFVFGGVGWGFGGGFFFGGVFLGVVGGVGGVVFGVWGGLCLGGGGFWGVVVWGGVGVVVCVGGGGGFFGGLGGGVGVGGCFGWVVFWVFGVGCVCLWVVGGCGWVLWVVGGVGGGGSVGGGVGGGVGGGGGAAPTFFDFDFAFD

SEQ ID NO: 82238 - protein, 316 aa, Unknown
  Obtained from environmental sample
  DOMAIN (3)...(316): Glycosyl hydrolase family 65 central catalytic domain
  misc_feature (1)..(316): Xaa is any amino acid
FPDKSTDLPGQTKPEYGYRGAFFAWESQENGDDACSDFNVTDVFTGRPVRTFFRDKQIHISADIVYSIQNYVDCTGDFSILAEGAMELILEAARFFLSYLYYSPEYKRYEVLDVIGPDEYHERVHNNAFTNRMVFSVFETTHNFIEALQKSNPEFIAALIKRIDFNDDRLFMEKVMQQFYLPMPDRRGLIEQFDGYFRLEDCTLDTVRSRLKDPKEYWGCSGGVATATQIIKQADVVTMLVLFGGDYTTGVKRANLDYYEPRTEHGSSLSSCMYALLSCETGNSDWAYPFFHQSAEIDITAKSKHFAGLVHIGGTH

SEQ ID NO: 82239 - protein, 110 aa, Unknown
  Obtained from environmental sample
  misc_feature (1)..(110): Xaa is any amino acid
AFGIFSSSGVSLLPSGGFQGYCLFRYEILFERDRQGRNEQYYQRSEEINVTAMNGIRLGISNAQAVKMQVIGAGRTVPFEAGGAGEVVAADLRWVRDDENRYRLLLLRLE

SEQ ID NO: 82240 - protein, 269 aa, Unknown
  Obtained from environmental sample
  DOMAIN (116)...(240): D-alanyl-D-alanine carboxypeptidase
  misc_feature (1)..(269): Xaa is any amino acid
DDYRKSGGGIARSAEGTCHFFKGEQGTTGIDPDRGAYVEDYWRVIFGEAGIPDRLARNVAASALESPAFVMELLVILQQDPFTYYLVDKQHPLPDGYEPDDLVSLQAGLYRLDQSGLRLRKMAVDALQEMASAAAKDGIAFVIGSTYRSAAYQAQVYERAVNAYGKETADRESAQSGKSQHQLGLTVDFSPIDDAFAATPACKWLKENASRFGWSLSFPDGYEEITGYRWESWHYRFVGKDLAAFIDNYFDGIQQYALQFIHAWQEQAE

SEQ ID NO: 82241 - protein, 313 aa, Unknown
  Obtained from environmental sample
  DOMAIN (28)...(280): Pyridoxal-dependent decarboxylase, pyridoxal binding domain
  misc_feature (1)..(313): Xaa is any amino acid
VMNKSFPLSKDELEKLTRHFPTPFYLYDEKGIIENVSRIKAAFSCFPGYKQHCAVKALPNPYILKILAAEGIGADCSSGPELLLADMAGISGESIMFSSNETPAKEYELARQLGAVINLDDISHIEFLEKTAGFPQLISLRYNPGPLKDGNAIIGKPEEAKYGFTREQIICGFALLKEKGVRRFALHTMVASNELSIPYHVETGRMLFELAVEIQDKAGVKIEFINLGGGVGIPYRPDQEAVDYEVLAKGIQKEYDNILKPAGLDAVGIRTEWGRTITGPYGWLVTRAIHKKEIYRNYIGLTPVCNVIPRDHP

SEQ ID NO: 82242 - protein, 81 aa, Unknown
  Obtained from environmental sample
  DOMAIN (4)...(71): OmpA family
  misc_feature (1)..(81): Xaa is any amino acid
MSRDRFRFTEGHTDERGTENYNLGLGMRRADAVVKFLTNYGVASSRLTKVSYGEEQPKAAGSSEEAWAQNRRAAFRVKINN

SEQ ID NO: 82243 - protein, 326 aa, Unknown
  Obtained from environmental sample
  misc_feature (1)..(326): Xaa is any amino acid
EKWGIPKNEKTGCRRQYTDAASFLNVDPSGMGELPFTPVFLESKNLDGDALSLSVGSVTVLPSIAAVIGADISAGLTALDILNVPGPSFFIDIGTNGEMALCKDGSIYCCSTAAGPAFEGAEISCGVGGIKGAISGVKFAEDKTAVLSLTTIGNVQPVGICGSGLVDTVAVMLKQGVIDETGFMAAPKNEFSLADGVSVTGRDIRQFQLAKSAIFSGIKILCKSRGLRLSEIKNVFVAGGFGFYINKQNAVNAGIFPVEFLNQLSVCGNLSLQGAEECLGAKDFPMRCEKIISRCTVINLAAEPSFTDEFTENMLSCQFCPMGGPQ

SEQ ID NO: 82244 - protein, 55 aa, Unknown
  Obtained from environmental sample
  DOMAIN (5)...(55): Carbamoyl-phosphate synthetase large chain, oligomerisation domain
  misc_feature (1)..(55): Xaa is any amino acid
ATGEIRDLLKTVTDERLFVLYEALKRGISVDELYDITKVDRWFLYGLVNIMNNEQ

SEQ ID NO: 82245 - protein, 206 aa, Unknown
  Obtained from environmental sample
  DOMAIN (3)...(189): NAD dependent epimerase/dehydratase family
  misc_feature (1)..(206): Xaa is any amino acid
MKALFIGGSGTISAAISRLVLELGWELFLLNRGSRNNEINAKGKPGKLVEINCDIRTDSVETIHRKIKDASGGLVFDVVADFIAFTPDHVEKDLSIFEYLCRQYIFISSASAYQKPLSSYLVTESTPLANPYWEYSRNKIACENYLMTVYRNKGFPVTIVRPSHTYDERSVPLGGHGNNGSWQVVKRMLERQARDHTRRLHKPLDM

SEQ ID NO: 82246 - protein, 167 aa, Unknown
  Obtained from environmental sample
  DOMAIN (5)...(167): Uncharacterized BCR, COG1636
  misc_feature (1)..(167): Xaa is any amino acid
LLQPQYLSDDEFELRLSEAKKASAIYGVPFTWDDYDPVAWENAVAGLTDTPEGGARCRECFLLRLTRAAEVCRDMGWPAFGTVMSVSPHKRIAMLDEAGKKAAEAVGGVQYVPFDFKKKDGFRKSVALSRRLGLYRQDYCGCRVSLEEAEERRAGGKTTPPTRRPAM

SEQ ID NO: 82247 - protein, 116 aa, Unknown
  Obtained from environmental sample
  misc_feature (1)..(116): Xaa is any amino acid
MQSVIITGADRGLGLSLCKEFLKREWIVFAGKYLNDYSLLESEAEKNTNLHIVNLDVRCADSIAAAQESLLKVTDSLDMLISNAALMGDVKCDLYETPMDIESVWKIVSVHALGPI

SEQ ID NO: 82248 - protein, 145 aa, Unknown
  Obtained from environmental sample
  misc_feature (1)..(145): Xaa is any amino acid
MLQLSFELEKIIRKDGETAYPNECCGVLIGEVDNAGVKTVKSTLTIDNAREDSEQYHRFLITPEDMMRAEQTARIMKYDVIGFYHSHPDHPSTPSGYDKDHALPFYSYVIVSVDSGQAQILTSWELTADRSEFTQEKIKSIGGIN

SEQ ID NO: 82249 - protein, 144 aa, Unknown
  Obtained from environmental sample
  misc_feature (1)..(144): Xaa is any amino acid
LHVTKPSFSGYQRRQKLSEADLFNRLLDRAFIPYTQDIAVNEWPKAKPDRGEFVTRAGAAWFIWHLYAEMRADRTILSRYSSRYATGANPRSPIADIPPLSPFFDSILGSVETELLSLPDGKNFRPAQPIRGTEMLSVLKKIDN

SEQ ID NO: 82250 - protein, 312 aa, Unknown
  Obtained from environmental sample
  DOMAIN (116)...(312): Putative RNA methylase family UPF0020
  misc_feature (1)..(312): Xaa is any amino acid
MERWPSRRRPRAAGSRSFYAADFDALFEGTLGAQWEKIVPKGLGLKIAKVRSNRSQLRAETSIQSVVHKAAAQRLCGKYKVNRLPEDGKIAEVRVYVEKDIVSLLVDLSGAPLFKRGYRSEGGAAPLRETTAASILLLSGWKRKFPLYDPFCGSGTILIEALMYAWDMAPGLGRRFAIEDLLIADGKTEKSVREECRSKIDFSRLVRIAGSDEDSRSVSIAASNAARLRDIAEGREPQKGIHAANDKAAIALKTMPMKEASSTFEDPGFLVTNPPYGKRLGDQSQSEQIYREMGGLARQFSGWKLAVITDHS

SEQ ID NO: 82251 - protein, 242 aa, Unknown
  Obtained from environmental sample
  misc_feature (1)..(242): Xaa is any amino acid
MVTVVNSNFTSGFPGEHCFIFSEESAKAIASLMTHETDIQLDEMAMSVIGEVVSQIAGTQITVLTDKTGNKSIAASSPTAANIAKAAAALPAGDFAVMTYGLDMGDGLSHQIWEVLGPSPAADISNSLSGGAPAQAAGMAMPGMQNAGMNMGGMDMSGMNMGGMGMGQGMPMGGNIGSANVQPVQFPNLMQPRLGPHETGNIGLIMDVSMEMTVELGRTRKLIKEIWEGRRYDISADSEPGW

SEQ ID NO: 82252 - protein, 306 aa, Unknown
  Obtained from environmental sample
  misc_feature (1)..(306): Xaa is any amino acid
GFPTDQIGREAHIAGGRTAASAFSLYYSLDLSMPFFLRKNTAISGFLSLYRQGLVRLSFDKGQVDVSLVLVPGSGSGVNLVNSVLVETRDRPNNRIYGSQDNSRIFISAGNTVISVNTSDNSVSEMSGQDKLWIISADGIKEKNTFNAWVVSERGRVTLVNGDLEPAQGFPVLTGIRLSAAPAAYNGKLYLCDEDGKVHSVDANGAQKIWETTFISPLRSPPSFITAKVKTGEIHYAAVYPKSFFGELWLLDTDGKLLPEWPAQLMRVDEDGFTAHAGISFGSPILVSLNTMCTQRFVASPATFLF

SEQ ID NO: 82253 - protein, 314 aa, Unknown
  Obtained from environmental sample
  misc_feature (1)..(314): Xaa is any amino acid
AFSPHVQIGRDGTVDVAGGVVAIYNTAPTGNPGITEIKLDDNDRLIFNGGTGVSPLEVGKSLTLDNGTVIKNNGGGNVSIENGQLTILGDGLVARDDVDDGLGLSTFLDQNVKDFYIAAQSELNSLSTVAKTSTDLVLASNLYVQAGVIDKNVTIGNSMGLALGDIGNLAAGSVLAKGSFMSTDGATDWSLKIEVKGKEVEVKWASDVGVLTVGGEMVAAGKSITLEDGSVLTHNATLADPTVATGDIFVEHGRVKLAQDIAYGDNLSKILDKFLIAKDSTLVAGSQLGGAGLSQNVRLMAGTVINERQRRQSF

SEQ ID NO: 82254 - protein, 117 aa, Unknown
  Obtained from environmental sample
  misc_feature (1)..(117): Xaa is any amino acid
MAGRKTGVTSETMKHLVLDAGVIYLNWGSTDPQKPQTKLGACRGGNTFTVETEWRDMPFDGVGGTVAGARRPISVSVSLTANLVEINKDLLKIAVPGADYDAGSPAVILGQSDHVYP

SEQ ID NO: 82255 - protein, 268 aa, Unknown
  Obtained from environmental sample
  DOMAIN (3)...(258): NADP oxidoreductase coenzyme F420-dependent
  misc_feature (1)..(268): Xaa is any amino acid
MSTIICIGSGNMGAALMKGARCASYARSDGGNIFFTDVDIEKARSLAADMKANVIESNTEAVKKGDYIFLAVKPQVLPHVLAEVAAAVKERLNSGALPVFVSMAAGWSIAKIKEAISVKLPVVRIMPNTPALIGKGMIALAASVEVPAEKISELEKILGGAGIVDILDENYMNAATGLSGSGPAFVYMFIEALADGGVRAGLPRDKALRYAAQTVFGSAAMVQETGKHPGELKDMVTSPGGTTIAGLAALKTALSEVLDLGRSDQWGN

SEQ ID NO: 82256 - protein, 134 aa, Unknown
  Obtained from environmental sample
  DOMAIN (21)...(128): Protein of unknown function (DUF1312)
  misc_feature (1)..(134): Xaa is any amino acid
VNSLIYIYAVCMKRRIKILDIIIIFIAVSLTISSAYAAYIKPESTVRVLIRGQNKEWTYLLGTNETVIVSGPLGDTIVKINDNRAWIESSPCDNQTCVGMGSVQRQGQWALCLPNKVMLIIEGTDDKDIDSISW

SEQ ID NO: 82257 - protein, 90 aa, Unknown
  Obtained from environmental sample
  misc_feature (1)..(90): Xaa is any amino acid
MVTNVPCRGDIIRFDLDPKQGHEQKGYRPYICVSHHLVSDYANIAIFAPISNTTRRYPLYIRLEKTISSGVILLDQLVAIDYNARQWDYV

SEQ ID NO: 82258 - protein, 102 aa, Unknown
  Obtained from environmental sample
  misc_feature (1)..(102): Xaa is any amino acid
FSFFWGGRQIVSHNHIPGVNGKKINIPSYLVKKNDEISVCDKSRGLTLIKDALKEYGKSGVMPWLSLDADAMKGKFLAAPQRSDITDLGDIKEQMIIEFYSK

SEQ ID NO: 82259 - protein, 72 aa, Unknown
  Obtained from environmental sample
  misc_feature (1)..(72): Xaa is any amino acid
MKGTQPEEKIKAFGASAKSTVVKGLSYLVTNNPGSGSAKNKKARELGIPIINEEEFLELLSSPAEPVQGELF

SEQ ID NO: 82260 - protein, 330 aa, Unknown
  Obtained from environmental sample
  DOMAIN (11)...(155): Glyceraldehyde 3-phosphate dehydrogenase, NAD binding domain
  misc_feature (1)..(330): Xaa is any amino acid
MIAREPCFSSLVGQGLLGKDKIDVVAVVDLSTDAKYFAYQLKYDSTQGQMNAEIGTDGDDVLVVNGHKIKCLCGKGLTPDQFPWKDLGIDYVVESTGIYTNEKAYGHITAGAKKVIISAPGKSGDDSKPIKTIVMGVNNEEYDASKHHVLSNASCTTNCLAPVVHVILKEGIGIETGLMTTIHSYTATQKTVDGVSQKDWRGGRAAAINIIPSTTGAAKAVGEVLPVTKGKLTGMSFRVPTPTGSVVDLTFRAEKDTSIEAIDAAMKKASETYLKGILAYCNEEIVSSDVIHNVNTSIYDSQATLENNPQGEKRFFRLFHGTTMNGGYPT

SEQ ID NO: 82261 - protein, 178 aa, Unknown
  Obtained from environmental sample
  DOMAIN (2)...(172): NAD-dependent DNA ligase adenylation domain
  misc_feature (1)..(178): Xaa is any amino acid
MRNNAKRIEHLERVIQKYQKSYYGGEAEISDGEFDLLWDELKALAPNSPVILGIGGSADNADGFPKAKHLIPMGSQEKAANPQEFLEWAAKHPLPEFLAQYKLDGVSLELQYEKGALVRAVTRGDGVIGDDITANARRMAGVPEKLDPPFSAGVRGEVVMPRETWRQKYPSKANCRHA

SEQ ID NO: 82262 - protein, 124 aa, Unknown
  Obtained from environmental sample
  misc_feature (1)..(124): Xaa is any amino acid
MTETKKTELLKVNLNALGKSLERLLESYSICKEISIKDEFSAQELREFESLTARFARTIDLFINKSLRSLYKVELEDPGTVIDILNKAEKREIIESAEIWKEIKELRNTIAHDYICSRSSGGEK

SEQ ID NO: 82263 - protein, 83 aa, Unknown
  Obtained from environmental sample
  DOMAIN (1)...(83): DALR anticodon binding domain
  misc_feature (1)..(83): Xaa is any amino acid
GGKLRRKSRFPGGVIHACNRLSPSVIANYAFDLAQLFNEFYHASQVIGSGGTTEKFRINLVAAFRSVMRGCLGLMGIEAIEEM

SEQ ID NO: 82264 - protein, 186 aa, Unknown
  Obtained from environmental sample
  misc_feature (1)..(186): Xaa is any amino acid
MPFMRKNAGYFGNFWHEGFEFIETLFRTACDYKTLKFVCPSDYIYEQNLSSLQVVSPEFSSSGINGYAETWLDVSNDWIYRHLTRSMERMTELAERFPDDTGLKERALNQAAREILLAQSSDWPALLFRQDSTEYAGNQAGNALRNFTTIYEALGSNYISTEWLTTLERKHNIFPNINYRVFRKKK

SEQ ID NO: 82265 - protein, 308 aa, Unknown
  Obtained from environmental sample
  DOMAIN (1)...(308): Protein of unknown function (DUF342)
  misc_feature (1)..(308): Xaa is any amino acid
MTEKSIFIVAQGTPPVKGEDGRVEFCFNTDPSPAPTIAEDGSADYKNINIVNLVTNGTVLAKLYPAQKGTPGQNVYGNAVAALNGIPARLPVGANTAIPNDDPNSLVAVSDGIASYDGTSVNVSPGYVISGDVDFKTGNIKYDNSIMINGDVKSGFEVECGGDLQVKGIIEDCKITVKGNILCKFGFVGTGKGVITADGNVNLNFMKNQTIVAGGNVNIAKEALNCNITAAKSINVYGHPLSVAGGTLISHGSITCRTVPHISGAKTTLQINPEPELIVEMDKLKLAISHNERHIKKAAPYDQNDALR

SEQ ID NO: 82266 - protein, 95 aa, Unknown
  Obtained from environmental sample
  misc_feature (1)..(95): Xaa is any amino acid
MPAHSLIYKMVDTCGGEFEAKTPYFYSIQNGTENEALPFIQKSVKQRIVVLGSGPIRIGQGIEFDYACVHCVWTLKSLGYEVVGNNNIPKTYHRL

SEQ ID NO: 82267 - protein, 331 aa, Unknown
  Obtained from environmental sample
  DOMAIN (1)...(331): Formate--tetrahydrofolate ligase
  misc_feature (1)..(331): Xaa is any amino acid
MAESVTYDGKPIFARDLQAHGAMTALLKDAINPNLVQTVEGVPAIIHGGPFANIAHGCNSVRATKLALKLGDYCVTEAGFGSDLGAEKFFDIKCRNANLKPSCAVIVATARALKYNGGVPKSELNNENIDALKKGIANLQVHIENIRKFGVPPIVAVNRFHTDTQAELTAIQDFCAGMGVPAPVSEVFAKGGEGGIELARKVCETIEKQDGAKTFAPLYSNSATLKEKINTIAKEIYRADNVIYRAQAEKAVKEIDALNLGDIPVCVAKTQYSLSDDPTRLGKPTGFNITVRDIKISAGAGFAVALTADIMTMPGLPKKSAAINIDCDNDG

SEQ ID NO: 82268 - protein, 93 aa, Unknown
  Obtained from environmental sample
  misc_feature (1)..(93): Xaa is any amino acid
DFSRLIREQYGQAEPTSEFMFSVDMGYEIKNGKIGKALRETTISGVAFEMLKTVDMISDDMVWECAGFCGKKQPMTVGMGGPAIRCDLNIGGR

SEQ ID NO: 82269 - protein, 76 aa, Unknown
  Obtained from environmental sample
  misc_feature (1)..(76): Xaa is any amino acid
EPDISIPGFCSVYSGDFFHEFVTNCPNTGKTLELLESHGILGGYPLSKNELLWCVTELNTKEEIDNLAKILREGQK

SEQ ID NO: 82270 - protein, 68 aa, Unknown
  Obtained from environmental sample
  DOMAIN (7)...(63): YcfA-like protein
  misc_feature (1)..(68): Xaa is any amino acid
MKGQMNFRELEKMIKADGWRLDRIQGSHCQYEHPAKRGIVTIPRHSGDVPKFIVKSVLRQAGIAIEVK

SEQ ID NO: 82271 - protein, 126 aa, Unknown
  Obtained from environmental sample
  misc_feature (1)..(126): Xaa is any amino acid
MSMVKTVVSRPTTFLIIFLLLIGLGFFAMFNLSIDLYPEINPPIMAVFTTYTGAGPEEVERSITRPLEAALSSASGLEKVTSISSTGSSVVIMNFTYGTDMSDAANSIRDLLERVRNYMPFGAERR

SEQ ID NO: 82272 - protein, 122 aa, Unknown
  Obtained from environmental sample
  misc_feature (1)..(122): Xaa is any amino acid
MAENINLTRERYGYGFVPDAFLPHGKDEYWLRNSHQDTKPWRALYPDEIEILTVNGNYCADWNNFFVVDPFEPNLIRNSYFYGLVRIGTMKNTLLKHHDFCVPSGIRNSTIIFCDIGDDTPF

SEQ ID NO: 82273 - protein, 234 aa, Unknown
  Obtained from environmental sample
  DOMAIN (1)...(234): Protein of unknown function (DUF935)
  misc_feature (1)..(234): Xaa is any amino acid
VLSTRKDAITGLEIKVIPAGEGGKEAELAAAVERDIVKNSTAKLRSLIRDMLDALAKGFSVIEIIWDTSNTPWKPKAYKFRDPRWFQYDRETGDTLMLRAPYGNDLEPLKQFQFVVHEPHLISGKQITAGLALPTLYYWMLKTYDVTSWAAFIDRYGYPIRIGKYGKKFTDEDRITLKRAVAAIGQDFGAIIPESAHLEIIESKSTGEKSNVYNNMADWIDKQISKLVLARAEC

SEQ ID NO: 82274 - protein, 189 aa, Unknown
  Obtained from environmental sample
  DOMAIN (2)...(115): Response regulator receiver domain
  misc_feature (1)..(189): Xaa is any amino acid
MKTIFVVDDSDTNLSTAERALEKLYRVMTMPSAVKMFSLLEKVTPNLILLDIEMPDIDGFTALERLKFNNSWANIPVVFLTGRSDTEVEVRGFQKGAVDFILKPFSEPVLLNRIRTHLNIDELIRERSAQLNRLQNGIVSVLANLVESRDKDTGGHIERTSAYIKVLLTEMKKARSYKEKSRPILTLGK

SEQ ID NO: 82275 - protein, 161 aa, Unknown
  Obtained from environmental sample
  DOMAIN (20)...(159): ATPase family associated with various cellular activities (AAA)
  misc_feature (1)..(161): Xaa is any amino acid
MRISEAKKCITELYKNTDNVVALVSERGIGKTSAFQQCAEEMGIGYMGLYAAAMEGPDFMGLPDKDREKGITRYLAPQFLPTISAVQEGFFPDKGLLVIEEINRVPTDTISVLYPLLLERKINGHSLAPGWKIGVTMNPDTLNYTVNTLDDAMLDRFIAVK

SEQ ID NO: 82276 - protein, 105 aa, Unknown
  Obtained from environmental sample
  DOMAIN (8)...(99): Penicillin-Binding Protein C-terminus Family
  misc_feature (1)..(105): Xaa is any amino acid
ASAAVLKLQRFINRGEGVLALFNPEPDSKVYVPRELDNSEGKIVFTAAHRNESEIIYWHLDDTFLGSTQTFHEMEARPQPGLRTLTLVDTSGNTIVRSFMVLDGK

SEQ ID NO: 82277 - protein, 294 aa, Unknown
  Obtained from environmental sample
  misc_feature (1)..(294): Xaa is any amino acid
VAKFSWLVGSEQASKIFGELDSKQVEDISKEIASIKGVDKEEAESIIAEFKSLISGSYRFLGPSFGGVETARRMLHAALGDEKGEALLQKTLLGLPQNIFGFLEEFTPEQIVFLLKDESPVTSALVLARLSPEISAKTLAKFPPALKPEILMKIARQGEVMPEVLEQVAGAMRERARHLGSSGKDDIEIDGMQALTAILKQGDYTFGDQIIKELETDNPDISKKLKDRLYTLDDVLEAFDKPLAEKLGTMTEQDIAILLKGRSPEFCEKILSNFPPGAALNREKALDQTGGEKG

SEQ ID NO: 82278 - protein, 326 aa, Unknown
  Obtained from environmental sample
  DOMAIN (141)...(210): RNA polymerase Rpb2, domain 3
  misc_feature (1)..(326): Xaa is any amino acid
DSFQRLFFDHRRYEIGEIGRYRLNSKVYVSAEQQANIPSGEVMTLTTDDFISVIRYMIGLYNAEEGYSLDDIDHLGNRRIRSVGELVANQISIGISRMLRSVRESFSSREREGVLTPTELINSRTVNSMVAAFFGSSQLSQFMDQINPLSELTNKRRISALGPGGLSRDRAGLEVRDVHHSHYGRLCPIETPEGANIGLINSLATFSIVNRFGFIETPYRIVGLLPFKDDSGKTCEFPEAKWHANIMKSFFGSINQQLLTQTELNENEIKNTRKKYSGRQLELFDLFCNKSFEFDFGNESTIIKNGITMAHKKRRALPILSLGLAS

SEQ ID NO: 82279 - protein, 317 aa, Unknown
  Obtained from environmental sample
  misc_feature (1)..(317): Xaa is any amino acid
VLAAKILWKDEGERYANLIQHQYKNSVPVREQAFEVAGTKNKLNAIYAISDWVRTHIKYSKRGFGGHSLIPKPALSTLKEKQGDCKDQSLLLQEMLATIGVKSHLALIHLEEAGSEALSSIQQFNHEILYVPATKEYPELWIDPSDKVSNRRPIPLDLEGRVALVIKGDSSYSTLTPILEINQEHEAFMFHRLRIDEKGIGNFRDSLIFTGKFASAIRNELLQRDQKEHSEYISKWISHSLESSELVAFMPHNVEDFSKPLTLTIVYNSPQFSPYPALWESSLMRLPAVKERYHPDRIRTRQIPLLAFCVLSKKQTC

SEQ ID NO: 82280 - protein, 302 aa, Unknown
  Obtained from environmental sample
  misc_feature (1)..(302): Xaa is any amino acid
GVKGISRQNPAGLLELTLTYQFHDVIPGSSIRRVYKEAEEDSAKMLAALAQTVSSAQSLLAGSANGGASKDISASRETGVFVFNDLSWERKSAVTISGDLAGNAAALRGADGEVYPIQRYVDHDGNKQAVFFPKTPSLGWIRLAVLDKNNEEKSPFIWKNNILETPFYTIAFDTAGRITSLIDKRRGCEMVAPGGVFNAIITAEDVPVYWDAWDIDADWTKHIKQETQLVSTGVAADGPVCFRLRRAYEISEASRLVQDMVCYANNPRIDFDTKVFWYEKWRVLKAQFDTAALMRPLGRSDH

SEQ ID NO: 82281 - protein, 209 aa, Unknown
  Obtained from environmental sample
  DOMAIN (1)...(205): Chorismate synthase
  misc_feature (1)..(209): Xaa is any amino acid
LQLLKRDGINIAAHIVQIADVKAKLFDPVNVGEAEMRSLQNAEFPVLDTQAGEKMRAAIEAAKKENDSVGGIIECCIIGVPAGLGEPIFDGIENRVAAALFGIPAVKGVEFGNGFAAASLRGSENNDAFYMNGNTVQTKTNRHGGILGGISSGMPVIFRAAFKPTPSIAKEQDSVSLSRRENVKLAVTRRHDPCIVPRGGSLRRSPRRQ

SEQ ID NO: 82282 - protein, 319 aa, Unknown
  Obtained from environmental sample
  DOMAIN (209)...(319): Histidine kinase-, DNA gyrase B-, and HSP90-like ATPase
  misc_feature (1)..(319): Xaa is any amino acid
MIDEIGIQSFRIRMINYQNIPSITFIRKLENGWYLGIVTPEEEYFAEAERVKLILILLGITLSAILSVILAKIITEKRKADEKINEAEKAIVANRVKTSFLAKMSHEIRSPMNVILGITEMQLEKKDLPPDTMRALDRMHNSGYMLLNIINDILDLSKIESGKMELAPVTYDVAGMINDTVQINAIRFDTKPIQFILKVDENVPSTLFGDALRVKQILNNILSNAFKYTDKGEVILSISADAPESGGAPDSGDLKSGASGSITLILSVSDTGHGMTPEHVDRLFDDYSRFNTDARRQIESTGLGMGITKHFINMMKSEI

SEQ ID NO: 82283 - protein, 256 aa, Unknown
  Obtained from environmental sample
  DOMAIN (131)...(254): RadC, DNA repair protein
  misc_feature (1)..(256): Xaa is any amino acid
MQTAHLRPNTYMSEIDYSCCITDFQAIYLEKRKRARKGLLDLPPAQRPRERLINKGPEALSDAELLAVLLNTGIKGKGVAELAGELLATLDISKEIPSVDKLSRLSGMGTAKACAVVAMLEFGRRRWGASGSAIRQPAEIHALIRHYADRKQEHFISLSLNGAHEVLSIRVVTIGLVNRTIVHPREVFADIIQDRASAFIVAHNHPSRKLNPSGEDDEITERLAKAAEILGLHLLDPLIFSDSDWWKYRQNGRIIN

SEQ ID NO: 82284 - protein, 129 aa, Unknown
  Obtained from environmental sample
  misc_feature (1)..(129): Xaa is any amino acid
MAFVAKRLVITLITLFLVSVITFAAFRFIPGDAALVSLGIEAGEGQIEALRAEMGLDKSFAEQYFSWLGKFLTGNLGNSSRFRGVSISQMLKERLPVTFALAGLSFLFIILIAMPASLMALKKKIRCKS

SEQ ID NO: 82285 - protein, 95 aa, Unknown
  Obtained from environmental sample
  misc_feature (1)..(95): Xaa is any amino acid
DLRDDDIPGGYTSDLLSDVMANAKTGGVLITIQAHKNTVAVSTLVNISVIVICNSRPLPDDMLEAAKDEGIAVIRTKENQFTVSGKIWELLNKEQ

SEQ ID NO: 82286 - protein, 95 aa, Unknown
  Obtained from environmental sample
  misc_feature (1)..(95): Xaa is any amino acid
LRFVRLGGKEPDSLTVLLSDGDLKKIEGALKSQLVSALKGGVELKAGKTLDGGFHIVEKDGAAYYDFSVQAVAKLLSAYLNPRLAEILSNAAKGN

SEQ ID NO: 82287 - protein, 246 aa, Unknown
  Obtained from environmental sample
  DOMAIN (69)...(246): SMF family
  misc_feature (1)..(246): Xaa is any amino acid
MAERGLLDLIISFLPDISYREKITLCEALGDEADLIRKSGSDIEALIGRALNARDIDSSRLAAEQAAGKARARGINMVCWQSPLYPPLLREIYDPPVLLYFRGKLPNPESPLAAIVGTRKPSPASSAQAFDIARGLGRGGISVVSGLAIGIDACAHRGNIEGGAPTVAVLGSGVDEIYPSSNRVLALRILETGGALISEYPPGTGPRQWTFPARNRIISGLSRRVLIVEAPRKIGALIPRGSRLIR

SEQ ID NO: 82288 - protein, 303 aa, Unknown
  Obtained from environmental sample
  DOMAIN (77)...(303): Domain of unknown function (DUF323)
  misc_feature (1)..(303): Xaa is any amino acid
MVVQGNDVTISYSSGSGAVSVSGDEVFTVQENGNQLTLTLKDNSAQLSNLLVQFGLPAKSVTLTKTDGSGNNNNSIKAIEMVSIPAGTFMMGSPTNEPYRYDEETQHSVTLSNFSMSKYQITQAQWVSVMGSGEDRTTTSYGKGDNYPIYYVSWYDAIVFCNKLSIIEGLNPVYSISGKTNPTDWGTIPTSSSSTWDAVVMDKSKNGYRLPTEAEWEYACRGDYPNKATKTDTKPFGIGDGTQMVSGMANFDFTRPYDLAHGGEYSDSSATGYLGKTTAVGSYSANNYGLYDMHGKCEEWCWG

SEQ ID NO: 82289 - protein, 313 aa, Unknown
  Obtained from environmental sample
  misc_feature (1)..(313): Xaa is any amino acid
MRYAHQGMEQTFSDFRFKQALQKSQPAPEGAAANAAANAVQKIAVTKNTPANAAFVIAMDSPFTLVMYPEIAYNDAVELASMSRVTGTGLNVSFEIDKDAAVSAFNRGISAASAIELLQRLTGNRIDENAAFTLLDWEKRHKEIALSKGLVLSLSPERRYLAETKPLSKYISAELAPGIYMLPENMEEKVYTALKKAGITIFAKPNGVGASNGAGQADDGNILSGPDSRIFFPRVTPHIEKTRQFKTEIKEEGVNNNTSSSVPASSVPATSVPAAATLIEGFHSIMNKMRLGAEQRDELTARINRRLVLCESQ

SEQ ID NO: 82290 - protein, 325 aa, Unknown
  Obtained from environmental sample
  DOMAIN (1)...(183): Uncharacterized BCR, COG1636
  misc_feature (1)..(325): Xaa is any amino acid
SAEGITPTLFWYIPNIHPLNEYHNRRDALSAFAAAANLELEILDEYGLESFLTNIGSKTEAPERCSVCYRMRLERTAAYAAEKSFDAFSTSLLISPYQKHDVIRSLGEELAARYGVEFIYRDFRPLFKQSRNQARVLGLYMQKYCGCIFSEKGSPQKAHNQAELKDVNPLFQRLALLTGAEALEKLARTSVLVVGIGGVGSWCAEALVRSGVGKMTIVDFDTVDVSNVNRQLQATSRTVGCVKVEVLQQRLLEINPRCEVTAWRKIFSRENAAEFGIEKMDYVIDAIDSLECKLDLIETTCGAHGGAYGVKFFHQWSRDMGGEIR

SEQ ID NO: 82291 - protein, 226 aa, Unknown
  Obtained from environmental sample
  DOMAIN (101)...(125): The GLUG motif
  misc_feature (1)..(226): Xaa is any amino acid
LDAVSNCLGDSYSDKYYELQNDIDLGDYLANSSTGWQPIGYDISYYYYFNGKFNGNGHKVSGLWINRPLTNYVGLFGYVYNIAELRNIGVEIDDGKDGVRGNSSVGGLAGSGGTITNSYATGSVTGSGNYVGGLAGSGGTIINSYATGSVTGSGNYVGGLAGSGGTIINSYATGNVTGSGDRVGGLVGYNGYGSTISNSYATGNVTGSGDRVAAVSCRSCMKGEWG

SEQ ID NO: 82292 - protein, 283 aa, Unknown
  Obtained from environmental sample
  DOMAIN (36)...(166): Oxidoreductase family, NAD-binding Rossmann fold
  misc_feature (1)..(283): Xaa is any amino acid
MAETGTRRRGLLFFPPGDGRFWQNGSYSQEVSMEKINAAIIGLGRIASLLEEDSLREKPCTHAGALAANPDCVLAAGCDIDEERRRLFAEKWQVPVYADAAEMLRLHAPRILAIATHPDSHYHYCRLAAASDVPVIICEKPLADNISEARKIARLTYNGPVIITNHERRYANDYIRAKAILDKAALGRLLSVRAVLYMGKTKRLIDVLWHDGTHLADAIMFLANGTLKHQRRWGAKLTANTGTAWLEGELHVKKLHCAGSGCYRSRRGAGSLCSRTNPCSAKK

SEQ ID NO: 82293 - protein, 327 aa, Unknown
  Obtained from environmental sample
  misc_feature (1)..(327): Xaa is any amino acid
NIPLGQASGETREPTNGLQEMNYARFAPRWEKLLAAGEIINSPARLLPEAAMLRSFGCVSVFITPLFLNNIFWGFALLEDRHNERYFEVDYIDMLHSAALLCANTIIRADMEREIVDANEFNSAVLDASPLGFTIFDENANVIGCNDTIVKLFKTTKKYYINHFDEFSPEYQIDGKKSRDKTVELVKRTMNGEKLVFEWVYCTSSGEAIQNEVTLVRAMYKGKYVVLGYQYDLQERIKREIELARAKEVIELQLAKLNLVVQATKIGLWDMEAVHDNPVNPNNTLLWSDEFRHMLGYTDENDFPNILRSGATCAPRDKKLSIILLAS

SEQ ID NO: 82294 - protein, 222 aa, Unknown
  Obtained from environmental sample
  misc_feature (1)..(222): Xaa is any amino acid
MYFMKRHDKYSLTLEGKNAITGYLFLLPFIIGFFAFMLFPIIESLTMVFSTVKIDTEKHGFAMEYIGIENIRRVVAVDPEFNRFVTEEIGRMLLIVPAIIIFSLFVALILNQEFKARGFVRAIFFLPVILSSGIMIGLETNNSLLNSMSEIIKEGNLMKSSVTGVLEDILVTEGAASDFMEYIFLIINQIYDIAMASGIQIIIFLRALQLGRICPWGGGAPR

SEQ ID NO: 82295 - protein, 290 aa, Unknown
  Obtained from environmental sample
  DOMAIN (29)...(176): Anthranilate synthase component I, N terminal region
  misc_feature (1)..(290): Xaa is any amino acid
MQIREYPNDQEYKEMLAQKSSGANLIIPVGVRILADTETPVSVLSKFMDESSLFLFESVEGGEHWGRYSFLGFSPHLEIQVFSSIVKVNKKGKIDEIPHNGEPLDVLRKIASEYCHAELAGLPKFKGGFVGYFAYEMVSFFEPRVKSKLPPDQPLAHFILPEILLAFDNVHHTLDLMSFAFSEDDFQNAKERLNTTLKKLTNPIPHTPYPIPQKSAHIPQPLMQPEDFKAMVEKIKKHIVAGDIIQCVPSQAFVCDAPPNLLGLYRAQRFINPSPYLTYGIRRSTRGGFG

SEQ ID NO: 82296 - protein, 316 aa, Unknown
  Obtained from environmental sample
  DOMAIN (28)...(107): Bacterial Ig-like domain (group 2)
  misc_feature (1)..(316): Xaa is any amino acid
MIARFSSDSYYYDAGPPSVSVGITTTVPVTGVTLNKASLSLTVGGDAETLTATIAPSNATNKAVTWGSNDPAIATVDANGKVTAVAAGSAIITVTTADGSFTKTCMVTVTDGGGSITSPTTGMELVRIPAGTFTMGSPSTETGRNDNEGPQHSVTLTGFYMGKYEVTQEQYEAVMETNPSNFSSNPQAGETQGKRPVENVTWYDAVEFCNKLSEKDGLQEVYTISGRTPATGYPITSATVTADFTKSGYRLPTEAQWEYACRAGTTTAFNNGDNDYTNAALVSAVAWYNRNSGSKTHEVGLKTANAWGLYDMHGDV

SEQ ID NO: 82297 - protein, 310 aa, Unknown
  Obtained from environmental sample
  DOMAIN (101)...(308): Carbohydrate kinase
  misc_feature (1)..(310): Xaa is any amino acid
KFSPQAVSREPSGNSDEWKPGMTLVEADVTLAIEPQKSCIYNPAARPYAGIILPVNGIFPKEIIDHFRNCKRGTELLDWESACLRVPKVKAYAHKYERGCVEIRAGAAGTTGAALIAARGAQAAGAGLVRLVLDDDIYPILAPGAGGIMVSPVSGKFQDFEGKFTPDAILLGPGWGRAESRAPVLEKALQKEKAGTPLILDADAIELSKNAKFNGNAILTPHPGELSRFSGIEKDDLLCRPAQALLKLSQEINAVILFKSHVLYIASPDGRLGIIDGMAANLAAGRSGYLLARICAAIAARTAREGGFDA

SEQ ID NO: 82298 - protein, 160 aa, Unknown
  Obtained from environmental sample
  DOMAIN (106)...(138): Ankyrin repeat
  misc_feature (1)..(160): Xaa is any amino acid
RLNSSDDFGPTPLHIAVQEKASLSIISTILIWGARQSMVDAEGRTALRLALDLDQLKTAELLADSGGDVFSAARDGKTPAEAAFSKGADAVRAIFSGAAINSRDSSGNTVLHYAARLGDASLVSLLISLGANKSIRNIASESPADIALRWRNNEAAALLN

SEQ ID NO: 82299 - protein, 280 aa, Unknown
  Obtained from environmental sample
  DOMAIN (7)...(39): Ankyrin repeat
  misc_feature (1)..(280): Xaa is any amino acid
LASVDSSGKTILHLASEAGSASAVNTILKAGANAAPRDKNGKTALDYALERTDSRNHAETAVQLILAGAVSNNPLYAYFAPAAKSSNYNIRSADGMTPLHYIAREGYIGYLTFILEKGADVNTKNASGASPLHEAARSGNIAMMRTLLNNKADIKAQDAKGNSVLHVAVPPESHLEAINLFLTYGAHVNLRDEHGDSPLHIAILLNRSENIIRTLLSSGADVTIRDIDGKTPLYLAVERGRIHFIPILLEYKSDIFAVDNKGITPFERAFTEDSAVVFSL

SEQ ID NO: 82300 - protein, 278 aa, Unknown
  Obtained from environmental sample
  DOMAIN (8)...(193): ROK family
  misc_feature (1)..(278): Xaa is any amino acid
MGTKKAIGIDLGGTAIKGAVIDEGGICGGVTRVPTEAHEGGRRIMENIMSLIDKLASGGGGPEAFIGVGIRTPGFVDRNGVILNGGANMPGWTGMPVYQPIKERFGLRASAANDVTSVALAELMFGAGRGVQNMVCFALGTGVGGGIVTNGRLYKGSHGMAGDIGHIVVETDGEPCPCGQRGCVERYASATGIVKMAVDTAKDDGYETEFAALVRKNPGDVTSELTYEHVAKGDALALLVHERACDMLGSRRVRYHKHLLDQPHGAGLRRDNGRDHGA

SEQ ID NO: 82301 - protein, 97 aa, Unknown
  Obtained from environmental sample
  DOMAIN (1)...(68): YGGT family
  misc_feature (1)..(97): Xaa is any amino acid
MLIIFLRIILTWFPGFGNGGIIDFLSGITDPYLNWFRRFSFLRLGFLDLSPIIALGVLSLVNRVLGMLARYGRISVGIVLASALQADGSSRQPGGRG

SEQ ID NO: 82302 - protein, 305 aa, Unknown
  Obtained from environmental sample
  DOMAIN (189)...(289): Divalent cation transporter
  misc_feature (1)..(305): Xaa is any amino acid
VMTPCFVDIRADMTAAEALDHIREHGPESETVNVVYVVDAEGKLLDEISLRHMVLAPLEKSVESIMDGNFVTLTGYSDQEEAVAMIKKYNYLALPVVDSKGVLIGIVTIDDLMDVAEAEVTEDFQKLGAVSVQVGGEGPIESVREAAVSILFRSRIGWLVLLVVVNILSGFEMSFFTDTIAATVALVFFLPLLVGSGGNAGSQSATLLVRALATGNVKMGDLRRMFIKELSVSALLGATMAAAVSGLAFYRGGPRVGIVVAVSMVVIVTASSLVGLLLPFILYKLEKTPPPQARRIGRYVMGGEK

SEQ ID NO: 82303 - protein, 66 aa, Unknown
  Obtained from environmental sample
  misc_feature (1)..(66): Xaa is any amino acid
MAKIIEAVQMPTLIVSHNKTLAAQLYRELKVFFLTTQLSTLFPTTTTTSRKLMLQAEICTSKKTLQ

SEQ ID NO: 82304 - protein, 94 aa, Unknown
  Obtained from environmental sample
  misc_feature (1)..(94): Xaa is any amino acid
GFFPGYREIIVHLLLQPRKLNNNEIFGIFSYSIPANPYPLEVRLEALPSSGERVRVFSANYIGGEFTVPYKFPSGTVLVLSMLNRELYRETVGE

SEQ ID NO: 82305 - protein, 96 aa, Unknown
  Obtained from environmental sample
  DOMAIN (4)...(96): Oxidoreductase family, NAD-binding Rossmann fold
  misc_feature (1)..(96): Xaa is any amino acid
MAKLRFCIVGCGRIATLNVLGYKDHPNAEIYAVCDQDQVKAEALATQTGAKKIYANYQQALNDKDIDVIDLLVPHHLHRGMGIAAVYAKIHVSVQK

SEQ ID NO: 82306 - protein, 151 aa, Unknown
  Obtained from environmental sample
  misc_feature (1)..(151): Xaa is any amino acid
ATNQRPIGDVLKELKDSIDTITKSTGIVIERFGVIAEEVKTVSNQETQIRTAMEEQEVGSRNILEAVSQLNEVTELVRSASKDMTNDGNEILKQSLDLRQLTADVSDSMGIMAESASQISNVVIRVTEISKENKDNTLSLRGEVERFKVKE

SEQ ID NO: 82307 - protein, 280 aa, Unknown
  Obtained from environmental sample
  misc_feature (1)..(280): Xaa is any amino acid
VLFLQEYDISAATASRLYKVYGDGAKMRICENPYSLIDDVWGIGFVKADAIAVKIGFDADSYKRIKAGLIYALQNAATAGHTYLPKAELETAAAELLGVAHERILYTLDHCVNQDYLICQDECVYLPYLYAAETGVAQRLSERIRGGGAGSGERSLSDKEINNFITQYEKRTGWIGAPEQLEAVRYAAKSGIFILTGGPGTGQTTVLQVIVALFKEMGLRVELAAPTGRAAARMGSISGIAARTIHRLLEFKPGGKEGVSPSALRNNPINADAVIFDETS

SEQ ID NO: 82308 - protein, 224 aa, Unknown
  Obtained from environmental sample
  misc_feature (1)..(224): Xaa is any amino acid
MITKWGVKNFKSILEADLELAPLTVFTGVNSSGKSAFLHSIAMLTQTVRNKDGGVIKLNGNLIDLGHYDQIYHKNSFEIKKQPTGEIVLNFTIKPEEYEYIRLELCLSDAKQGNEKLSLHQWNDEINILKDSINKVNKLIDDKLIDENKSMEENISSNIFSVGHVIHVLKDIEKIKKSINKTYIDILSQKLFINQALIESKETGDKNPECFKVGYGTTESFDKI

SEQ ID NO: 82309 - protein, 94 aa, Unknown
  Obtained from environmental sample
  misc_feature (1)..(94): Xaa is any amino acid
LNLYEETLDLSAVPVLKELSHLPVIIDPSHAIGVSRYVKSMALASVASGADGLIIEVHNDPQNAVCDGAQSLTLEQFADTAEKVRRIREVIAEL

SEQ ID NO: 82310 - protein, 65 aa, Unknown
  Obtained from environmental sample
  misc_feature (1)..(65): Xaa is any amino acid
MTGEAKKLLELSGVLSDICPLMYMNNPLCGKRPVITNSNKLRTYSSARFYTDDEICEIITGKERK

SEQ ID NO: 82311 - protein, 135 aa, Unknown
  Obtained from environmental sample
  misc_feature (1)..(135): Xaa is any amino acid
MYVGFYSLGAAEEVTGSKHVLEIDGQSYLIDCGAFQGSRAEADKKNRDFGIAADRIESVILTHGHHDHCGLLPLLVKHGYKGNIYATPASRDIASLIMMDSANIQARDAIYLKSQAQKKGEKFDWTPLYTQQDAI

SEQ ID NO: 82312 - protein, 113 aa, Unknown
  Obtained from environmental sample
  misc_feature (1)..(113): Xaa is any amino acid
MSVGRQDYEERKESKIDAYKARARKSAILANQESDNARNMGSVIPFGQPILAGHHSEGGHRALLKRIDSAHRRASEAYDKAGYYEGKAAAAEYNLFISGDDPEALERYQKKLA

SEQ ID NO: 82313 - protein, 295 aa, Unknown
  Obtained from environmental sample
  DOMAIN (2)...(294): Aminotransferase class-V
  misc_feature (1)..(295): Xaa is any amino acid
MGAGPHTVIFTSGGSEANNAVFQTMRQLASAPNGSTMKEGRYEFITSSIEHPCVLNSAKNLQSLGFKVNFIQVDGYGKIDMDAFKKALSENTVLVSVMMANNEIGTIQDIKEITSLAKAAGAWMHTDAVQALGKIPVNVDDLGVDYLTVSAHKIYGPKGIGALYVRKGSPLFPLIHGGHQEEGLRAGTYNNIGILGFGKAAKIAFDEIDKYGREIAPLRNRLRDGLVKAIPKIKINGHPEDVLPNTLNISFPGAEGEAILLSMDLIGIEASTGSACASGSLSRPMAMHCDIRGSR

SEQ ID NO: 82314 - protein, 223 aa, Unknown
  Obtained from environmental sample
  misc_feature (1)..(223): Xaa is any amino acid
MSAYRDKGFPVTIVRPSHTYDERSVPLGVHGKNGSWQVLKRMMEGRPVIIHGDGTSLWTMTHNSDFAAGFTGLMGNIHAIGEAVQITSDETLDWNQIYRAIARVLNVELHAVHISSEFLAKNSPYDFTGSLIGDKANSVVFDNTKLKRLLPGFCAKVRFDQGIRRTIDHVLSHKECQIDDPEFNAWCEKIITAILISFSSMLSMIARDSRRIFFSLMRLPPLW

SEQ ID NO: 82315 - protein, 188 aa, Unknown
  Obtained from environmental sample
  DOMAIN (17)...(105): PhoU family
  misc_feature (1)..(188): Xaa is any amino acid
MERVVLSEEMNRIKREIAIMAARVEEDLGKALAVLRSGGEELAQEIKESGRIVDNLQLKIEDMAMILIATQQPVASDLRELITVFKITANLERIGDYGIHLVKAALRLSKMPTFRSVERIERMVETAILMLKEAISAYLSQDPDAARKAATLDDQIDQEHKVLTDEVLELIKKTTDFRKGRRPASCGF

SEQ ID NO: 82316 - protein, 275 aa, Unknown
  Obtained from environmental sample
  misc_feature (1)..(275): Xaa is any amino acid
LEFEFLNEKLKIENCEPVSQTLSLWEGTLSSEFKVDTHTVKTETFVHPEEDTLYVRAASPLLKEKTLRVTVVFPYGSHKKNGADFSAPHLHETEVCVSKDGFIYIERKLDGTIYTVAVGGSGFTILLNERQHTLQLIPHEETIEFSIRFEPVEIPAFSNAGLTLDKPHSDNAEPFDEAKTKCLSFWEHYWNSGGIIDFTGSSDSRAFELERRITLSHYLTAIQSRGRLPPAETGHTCNSWYGKFHLEMHFWHHAHLPLWGRTEDLLKTLEYYKTI

SEQ ID NO: 82317 - protein, 301 aa, Unknown
  Obtained from environmental sample
  misc_feature (1)..(301): Xaa is any amino acid
MFLKKKLINEDPYKQESKISDLEIPDTGPFNEAKRREQISIRLANYDSQMDFLVNFYQFGVDFLNVERIRRIVGLVRYIDWINLTPDSQSPNTKVVAEIVSNAKSGGDALTLSIIGESLTKLPKCTNTIMGILRDLSIYHKETYKLNVRKAITGMQAQEANAANIKKKMGSAMPGSVFYQEYVDELIKEDYSKDGPALREAVLKALMVTEDKTKSAKPKTDYKSLLLSGISAIGNAGTVMNEILQKIDENEEVLADQKKGFWEKIRQLIRTMMHAEPEEVYTISYLSIKQQGCRKRRIPIC

SEQ ID NO: 82318 - protein, 324 aa, Unknown
  Obtained from environmental sample
  DOMAIN (65)...(243): RecF/RecN/SMC N terminal domain
  misc_feature (1)..(324): Xaa is any amino acid
LAEGARNESKHTENFRDTHSRDLMEFEERVFTITAHPADLREKLAAARTQMKDLGSVNLMAPEEFAETKERYDFLSSQMADLLKARKDLEDLTTEIRTESSELFIKTYNRVRKNFHNMFRRLFGGGRAELQLSDNNHVLESGIEIFAQPPGKKLEHISLLSGGERSMTAVALLFATYMVKPSPFCLLDEIDAALDEANVGRFVQLLREFSNTSQFIVITHNKKTVAGAGTLLGVTMEESGVTKLISVRLEHEDIAIAEEIPPQQGLWDSDGHFKEEDVENEERRQLPAGIDDPKKVSEEQLRPYRARVKQQNKYPRINTGNKAR

SEQ ID NO: 82319 - protein, 151 aa, Unknown
  Obtained from environmental sample
  misc_feature (1)..(151): Xaa is any amino acid
MLFPVDMREWLPEDHLVYFVIEAIEQIGVTGFKVNRHGSGSEQYPPEMMLALLVYSYVTGRFGSRTIEAATYTDVALRYICGGEAHPDHSVICAFRKDNKEAFEETFTKILVLAKQMKKLKQTGGASVDGTKIHANASKHNAEASADLISL

SEQ ID NO: 82320 - protein, 98 aa, Unknown
  Obtained from environmental sample
  misc_feature (1)..(98): Xaa is any amino acid
MATAELNALNKAQAYQLTDITKTPPQFGAITPRWLTRFLEFKGLDAGIYRVNKVVEGETPLDVLCSSEKKSAEIPEGYVQYQPKPRNIFLTRFSTLSM

SEQ ID NO: 82321 - protein, 328 aa, Unknown
  Obtained from environmental sample
  misc_feature (1)..(328): Xaa is any amino acid
MVTSEDEMVKKVRNFIDKEETLVLARYTPKEISKLLDEVGGADKFNSGEIEKSIVNMYGHLMGHVQRGVNELETLTNGLLRQKMDTGAFVRGENAYSIVKCAFTDSVDKPKNVTDVKLSINIIDSELISPIFHYQVTQDYLVRDLLSKYIIDTIDRELEKLKEERVEKGHEELSDAEVIFAKVGRVELHTDDDLDNEKAKRYKLVSKAIIDKLNGLRAEIDPETFDQMNIRENLKKIIDIENIRNRGFNTAINSITSILDTSNMGYQYIENLKNGRGVIIREYEDTDTKNLPDERYQIKMRYFDTPSPTESRKPTRCSLKASRRKFHM

SEQ ID NO: 82322 - protein, 249 aa, Unknown
  Obtained from environmental sample
  misc_feature (1)..(249): Xaa is any amino acid
MRICFILPSYNITSGKTVKGSKVWIHGLTLPLLAAFVGKEHSVTLVNDYVQTLPDKNSIDVFFISIMGSVLDRAGELIKSLKTDNNYIIVGGKTLNETSSDYASLADAIVLGEGETLIGQILADIQNKKLKKQYGDPLLRTSLEDLPVPRYDLIDKRYHSSIFPVEATRGCENTCSFCYIHSWSKGVFRKRPVEQVIRDIAYIKTLRVRRLLFVDDNLFSDREYALELFRAMIPLKVKWFSQITAKAVS

SEQ ID NO: 82323 - protein, 233 aa, Unknown
  Obtained from environmental sample
  misc_feature (1)..(233): Xaa is any amino acid
WESDVRSAEPFIIGKRNTYLQIEASDRQLQEVRDFKQEIQQSLSHAWNEDRELAEKRFITLNKLVERLSSQESEHKRWRDSVLDVRQHVEFIGRERDENDVEIEIYRSGAGKSGGQRQKLATTCLAAALRYQLGGNDLGVPKYAPVVLDEAFDKADNEFTTLVMNIFKNFGFQMIVATPLKSVMTLEPFIGGACFVDINDRCISSVLIIKYDSEQQRLNLTNHTSREADIEVS

SEQ ID NO: 82324 - protein, 228 aa, Unknown
  Obtained from environmental sample
  DOMAIN (48)...(136): Mur ligase family, glutamate ligase domain
  misc_feature (1)..(228): Xaa is any amino acid
MKIPGRHQALNAAAAVALTASLLKEQGAVLDEEKIQSVGKELENFRSTKRRSEIIGEAGGIIFMDDYAHHPTAIKTTLAGIKNFYPSRRLVVSFMSHTYTRTSALLDEFASAFDGADIVFFHKIYASARENYKGGVNGRTLYEKADRRVKAFYQDEPDGAFAPLCEMLKPGDIFITLGAGNNWPLGVKLFNHFGGTMISMTGFAYREKTGQDLSVTAEIKGIIPAIWK

SEQ ID NO: 82325 - protein, 83 aa, Unknown
  Obtained from environmental sample
  misc_feature (1)..(83): Xaa is any amino acid
FFFPGCSRRQEKKGERARSTREKKDISWGNQIRSYVFQPYTMVKDYRTKAEVGNIQAVMDGDIDQFIEEYLRWTWHQRSGSRE

SEQ ID NO: 82326 - protein, 138 aa, Unknown
  Obtained from environmental sample
  misc_feature (1)..(138): Xaa is any amino acid
MRQIGGRGRNDKPFFSDHTGGLWVSLVVPLPDISAHFEHNRAISLAIRMALLECKPSEDAPVLIKWPNDIFWGERKIAGILLENSPKKSNVLIIGFGINVNIAQDDFPISLHKTTTSVLMEIGEEYVLDALLDRILRE

SEQ ID NO: 82327 - protein, 295 aa, Unknown
  Obtained from environmental sample
  DOMAIN (7)...(288): Glycosyl hydrolase family 57
  misc_feature (1)..(295): Xaa is any amino acid
NPRGYLSIVLHAHLPFVRHPETNYMMEENWLYEAMTETYIPLLAYFDNLLSDAVHFRVTMVLTPTLCAMLSDDLLRNRYAAHIGRLIELADKEVKRTRHDAAMNRAARMYLERFLLCQYIFEDKYDRDLIAGFRKLQDAGVLEIMTCAATHGYLPNMQSNANAVRAQVEVAVRSYHGFFGRRPRGIWLPECGYYRGLESILHGCGLRYLFTETHGLLDADPRPPNGVYAPVRCKDAPVAAFARDAECSRSVWSADEGYPGDPHYRDFHKDIGHDLDMRYIAPNRPRRSRDHRGDT

SEQ ID NO: 82328 - protein, 145 aa, Unknown
  Obtained from environmental sample
  DOMAIN (4)...(141): Adenylosuccinate synthetase
  misc_feature (1)..(145): Xaa is any amino acid
FFGYGGIVRIIGGEFGATTGRPRRCGWFDAPVVRKAAAVNGLTHLAITKLDVLDTFKEIKICTNYKMEGKELQSFPNGLTQVALCEPVYEILPGWQCQTSKCRFWSELPTNAQKYLTRISELAGVKIGIISIGAKRDESIILDIN

SEQ ID NO: 82329 - protein, 322 aa, Unknown
  Obtained from environmental sample
  DOMAIN (13)...(314): Phage portal protein
  misc_feature (1)..(322): Xaa is any amino acid
KFSPRDYRRGLHDNFLEEPFVGNAYLYNAWVNIAIGILIRNIARADFTIKSGGNDVVDGPIYNLFQKPNNFQSRFDLWKETAAWWHLEGEVFWWFGPDYAAGIPKEIYVLDPRKMRHEGELRGGVDFGFWNAPRRWFYNSGTELIPILSDEIVYFREFNPWNPARGVNPLLSLALELEQDFYANKANSILLKNNAIPQGLLKTDQTLRPEEADALERRWESKYGQVKAGRRIAVLGKGTSFEALSFNPDVIKLFELKKWNLYTILAKFGIPPRVANISDRSTALSGKDTSEQHSAFWKYTLIPILKQFEQILENAFFIRVWS

SEQ ID NO: 82330 - protein, 115 aa, Unknown
  Obtained from environmental sample
  misc_feature (1)..(115): Xaa is any amino acid
MNQNLTEIVFILDRSGSMEGLESDTIGGFNGFVKKQAEAGQTSLTTVLFDDQYEILHNGIDARDITLTEREYFTRGSTALLDAVGKTINDVGKRLNEAPEASRPGKVLGQSITGK

SEQ ID NO: 82331 - protein, 92 aa, Unknown
  Obtained from environmental sample
  misc_feature (1)..(92): Xaa is any amino acid
MYRELIPLVKPGVETIEIDKWVHSWIMSAGGKPAFLGVGAKKNPFPASICISINSEVIHGIPSKRKIVSRDLVSLDCGITLDAYISDQAITL

SEQ ID NO: 82332 - protein, 92 aa, Unknown
  Obtained from environmental sample
  DOMAIN (6)...(68): DnaJ domain
  misc_feature (1)..(92): Xaa is any amino acid
MAAKRDYYEVLGVPKDASADDIKRAYKKLAIKYHPDKNPGDKEAEAKFKEAAEAYDVLSDSQRKRNTTVLVTRGLTAADLAAVLVLVVSRLK

SEQ ID NO: 82333 - protein, 159 aa, Unknown
  Obtained from environmental sample
  DOMAIN (9)...(80): Pyridine nucleotide-disulphide oxidoreductase
  misc_feature (1)..(159): Xaa is any amino acid
LTGRNTCPASAGQLILVHRRDRFRAQQALADRVMRNRNIEVRFNTVIKEIKGDKKVGSALLECEGRTYEETADAVFIFAGTSPQSWLVSGESGGLKAELDDSGCIVSDQKMATSVPGLFVAGDVRSGSFRQVIVAAGEGAVAAHSAAAYLDELRGTTYK

SEQ ID NO: 82334 - protein, 106 aa, Unknown
  Obtained from environmental sample
  misc_feature (1)..(106): Xaa is any amino acid
MFLYHGSYLEIKSPQILAGRYAKDFGLGFYCTELKEQAIRWASRYSSPILNVYEYEKNSSLKIRDFAEMTEEWLDFVIFCRSGKKHDYEIVSGPMANDQVLIISDT

SEQ ID NO: 82335 - protein, 296 aa, Unknown
  Obtained from environmental sample
  misc_feature (1)..(296): Xaa is any amino acid
MDLKELMKSHIDSGAAITIACTPVNRGDASALGILKIDKNCRITEFMEKPGPTKDISDYKVPPELKIDKKIDGDAFLASMGIYVFNAKAMDDSLENELTDFGKEVIPQAINTLKVNAYLFDGYWEDIGTIRNFYETNLELTALRPKFDFYDEDRPIFTRRRNLPPSKINFGNMNQSIAAEGCIITNGSITDSIVGIRTIIETGSSLNGVICMGADFYDTESQKAYNAEARIPNVGIGRGSIIKGAIIDKNVRIGEGCRIGVDNISRTDGITAIITLLTGSSSSRKYGTVPGNGYLT

SEQ ID NO: 82336 - protein, 81 aa, Unknown
  Obtained from environmental sample
  misc_feature (1)..(81): Xaa is any amino acid
MAGKQLSFDVSAREKLLKGVDALADAVRVTLGPRGRNVVLDRGFGSPLVTKDGVSVAKEIELDDKFENMGAQMLGQSDLVG

SEQ ID NO: 82337 - protein, 327 aa, Unknown
  Obtained from environmental sample
  misc_feature (1)..(327): Xaa is any amino acid
YFDESALVQDGIRSGSAMAETSETKTDDLADAQNNEKMTSAEAVEEKKPPAPIAAVQPPPAPPVRPDQPPPAAVKEEPPAAKTPAEEATAAEKPADEKQEASSESEEPPKPPARNQPWITPPPAVSAVKDDAPVPNRQVLVPPKEDNVFSRIVRATVGQLVEIPFRGNNWSYLEDMVSRRGIAYMSRRVDSEGMTFTFRAEEAGTFALRFYRRDYIRDYILYDYVQVIVEEQPDKGRAGNSSIDRGKVTAEPRWPSALEEAEMQRGGARSAPAAESAPGNKNGSSGRDSSASPAQRTTPQVSSANSDSSTQSQGSVMPPSTSADLII

SEQ ID NO: 82338 - protein, 107 aa, Unknown
  Obtained from environmental sample
  misc_feature (1)..(107): Xaa is any amino acid
RRSAIRGRSKSSSPPPSRTGRWPAAKPPIWEVLLPAAKQDELQKSFNVGAGQTLSAGVTVNFSSDIKAGFRIGPSSGTYKISLTDEDFKEFFKEYLRPKTRAYLFGE

SEQ ID NO: 82339 - protein, 103 aa, Unknown
  Obtained from environmental sample
  DOMAIN (1)...(73): Pyridoxal-dependent decarboxylase, C-terminal sheet domain
  misc_feature (1)..(103): Xaa is any amino acid
VFSCYREFGKKRAGESTYDVTGSLCENNDKFAIDRKLPKIVPGDIVVIHDAGAHGHAMGFNYNGKTRSSELLRRENGEVMEIRRAETLDDLFATLDFEKLKSF

SEQ ID NO: 82340 - protein, 91 aa, Unknown
  Obtained from environmental sample
  misc_feature (1)..(91): Xaa is any amino acid
MTDRRDMSATIASPCIVRGRNHTAPSTWLRNGMSMGSAAAFMITGPATKITNLGALKIVLGVKHFFFYLLFTVVFAFVSGVVVDLIYAAIR

SEQ ID NO: 82341 - protein, 301 aa, Unknown
  Obtained from environmental sample
  misc_feature (1)..(301): Xaa is any amino acid
MLTEMQLKEKKLKEGDRLSEEQKLKDEAKRLKEEEEKQRLMEEQRLKEEERQRLKKEEEQKIIAEEQRLIAEEKRLKEEEQKLKEEKERLKEEKRLREEQRLKEEERLREEERLREVQRLKEEELKLIAEEQKLKEEKERLKEVLRLKEEERQREEQRLKEEHQKIIAEEQKLKEEKERLTGKLRVITETSQEEVPQEAPQEEVPQEVPQKEVPQEAPQEEVPQEVPQKEVPQEAPQEEVPHEVPQKEVPQEEVAKEAPQEEVAQEVPQKEVAKEVPQKEVAKEVPQKAPQKVVEEISKKM

SEQ ID NO: 82342 - protein, 287 aa, Unknown
  Obtained from environmental sample
  DOMAIN (43)...(112): HAMP domain
  misc_feature (1)..(287): Xaa is any amino acid
GSPIDSIGRDILASYKNGNGNTVVALVPEQDYHRERNSLLLDSVMFLLITVVIITAVIYLVVGGLLRRVNHLVKGIEKIAEGNLEARIEGSYNDEFDIIKNAVNSMAADIKTYMEEKLKTERKLNESRISILLSQIQPHFLYNALAVISRLCDKDPAKAKKATINFSNYLRANMNLLESAEPIPFQNELNHTISFLNLENAMYGEALKVIYDIQAQYFRIPALTVQPIVENAIRHGIGKKEGGGTVTISTKETEEHYLVIITDDGAGFDSAKIPHDGQQHIGINTSA

SEQ ID NO: 82343 - protein, 309 aa, Unknown
  Obtained from environmental sample
  DOMAIN (9)...(98): Cyclic nucleotide-binding domain
  misc_feature (1)..(309): Xaa is any amino acid
MPAEFQPFTVHLKKDAYVFVEGKQYADKFYIIKHGSVRIIREALIDETGGVLGTGDMFGLISAMAAHGYIESAIAATDVDLMAVERKQYGSLIHKVNSVAVNSIKFFSQRLRELDIALSQRTLKNTASADPSHIIQIGDYYKNSGKLTSALYAYNQYLALRPDAPNTDDIKAIITEIKKTPTGTRLEYPPDKMIQKYSKGHLLFAEGEPGHTMYIIQDGSVKITKIVDNKEIILAVLGKGDIFGEMALLEDKPRAATAEVYEDCTLLAVNRENFTNLIQDQSDMVVRMASLMSERIGAYPSCAITRKSR

SEQ ID NO: 82344 - protein, 331 aa, Unknown
  Obtained from environmental sample
  DOMAIN (15)...(331): DegT/DnrJ/EryC1/StrS aminotransferase family
  misc_feature (1)..(331): Xaa is any amino acid
MQKPRYKDGDRILYASGVLDEQEMVNLVDSSLEFWLTSGRYTDRFEKQLTQYLKIPYCSLVNSGSSANLAAFMALTSPLLGNRAIKRGDEVITVAAGFPTTVTPFLQFGAVPVFVDVTIPQYNIDVSLLEKALSSKTKAVMLAHTLGNPFDLQAVKTFCSAHNLWLVEDNCDALGSTYTIDGVTKFTGTIGDIGTSSFYPPHHITMGEGGAVYTSDPLLHKIIRSMRDWGRDCACPSGKDNLCGHRFDKQYGELPQGYDHKYVYSHFGYNLKATDMQAAIGCAQLEKFPSFVEMRRYNWRRLHEGLKDLHDKLICPKRLLIPLGHKPGGKK

SEQ ID NO: 82345 - protein, 138 aa, Unknown
  Obtained from environmental sample
  misc_feature (1)..(138): Xaa is any amino acid
MVRSFHDLESYGIYDMKVVLLAGGLGTRLSEETELRPKPMVEIGGYPILWHIMKTYSYWGFNEFVILTGYKSHMIKDYFINYYTRYSDMTIDMANNSVELHQIRNEQWQVTLLYTGPNTQTAGRMLRAKDICVKNGLC

SEQ ID NO: 82346 - protein, 266 aa, Unknown
  Obtained from environmental sample
  DOMAIN (1)...(252): Protein of unknown function (DUF342)
  misc_feature (1)..(266): Xaa is any amino acid
VEDGFSVKADGNIEVKGTVSKAELDAEGEIIIYQGINGKGGGKVRAGKSLWSRFIENANVEVGNMVVVTDGIINSNVDAVKSIVCMGKRASIMGGRLRAGEEISANVLGNPTSGTETICEVGFDPKSKIELERLLIQKTSSTEELETIRMDLQVLINTKKQRRTLPEEKEAYMQELMERRQVLTEELKKVEERIAKIQEFMNSIQTRGRVSAAKKVYPGVKIMIRDVREDVRSDYRATTFILENGLIRVSKYEEPNEMAQKGLDGY

SEQ ID NO: 82347 - protein, 90 aa, Unknown
  Obtained from environmental sample
  misc_feature (1)..(90): Xaa is any amino acid
MNSIASQTNLLTMNAAIEAAHAGEAGNGFAVVADEIRELAESSSGQSKTTATMLKKMKASIDDITNSSDELLSRFRAIDTSVKTAFRDMR

SEQ ID NO: 82348 - protein, 315 aa, Unknown
  Obtained from environmental sample
  DOMAIN (30)...(315): Aminotransferase class I and II
  misc_feature (1)..(315): Xaa is any amino acid
MYISKLASTSEANVLQTLEERKTAAMAKGVDIINLSAGTPDRPPADHVMKAIREASKNPLNYKYTLIDPPSLIDAARNWYKTRYGVDITKDGILSLYGSQEGFTHIFHALCDPGDLVIVGTPGYPIFSFGPLMAGAKVYHTPLLPENEFLIDFDAIPVEIAKKARVIVVCYPSNPLGAVAGKDFYGKLVAFAKEYDIVVIHDNAYSELVHDGPPGGSFLAVPGAMDVGIEFNSLSKSYNLTGLRISLAIGIEKIIGVFKKLRTNFDYGLSMLDYIAAIAAFTGTQDVVTQNRDTYRDRRNVLWSALFKNGWNAPK

SEQ ID NO: 82349 - protein, 160 aa, Unknown
  Obtained from environmental sample
  DOMAIN (12)...(101): Cyclic nucleotide-binding domain
  misc_feature (1)..(160): Xaa is any amino acid
MNQNLGGFSRFSRIFERDEIIFSEYEPGETFYVIQSGRVKLLKDAGEYERTIDIMAPPDMFGEMAILEGSPRSATAIAMDEVKLLEFNAQNFEILMTGNPQIGLNLLRIFAQRIYDTKRRFMILTLKNPQAKVADVFLMLEEKMTDVDRRTDTREFLTTI

SEQ ID NO: 82350 - protein, 80 aa, Unknown
  Obtained from environmental sample
  misc_feature (1)..(80): Xaa is any amino acid
MGPDMTKKIKVVKRFLKQAKFTNLVLYAALVLISYQFMYPLLRMIMTSMMSQEDIINPTVNWIPKAALWATFGWPCGYLI

SEQ ID NO: 82351 - protein, 171 aa, Unknown
  Obtained from environmental sample
  DOMAIN (2)...(170): Glutamine amidotransferase class-I
  misc_feature (1)..(171): Xaa is any amino acid
MIIVDYGAGNLTSVHNALEYLGIESEISSEPRKIENAEKIIFPGVGAAAAAMENLNKSGIGNALGIALKKGTPILGICIGCQIILEESEEDGGVKCLGFLQGKAAKFRKEPNLKIPHIGWNQVNFTKEHSIFQGISHNSHFYFVHSFAPYSCEAEAIYGTTTYGSQTFPCI

SEQ ID NO: 82352 - protein, 290 aa, Unknown
  Obtained from environmental sample
  DOMAIN (67)...(250): Peptidase family M28
  misc_feature (1)..(290): Xaa is any amino acid
MLLPYLKGIPWQRFMDFISPEADRLAILKETLKEAELEYKVTEIAGSRHIIVTPPPLEQLKSIGHCLPTILVAHYDRADGSPGANDNSAGVFLLIETAMKLIKKNKSHWLVIFTDREEIKSGGKLQSQGAYGLAEYLKKIKMEKSKIFSFDACGTGDTLVISTTLESLLKKEGSGEKLRDSILELRKYALDAARNLNMAKVLLAPTPFSDDAGFIRAGLIAQTVTMLPSNECITLVAELRKKPEFAEALITAQNEQASHLQSIPDTWPRLNTPADSHLRLTPEHFRTVSK

SEQ ID NO: 82353 - protein, 104 aa, Unknown
  Obtained from environmental sample
  misc_feature (1)..(104): Xaa is any amino acid
VNTVLLRQSIRNASEISFSRSGGPGGQNVNKLNTKVILRLRLSLIDGLSDAELERAKTLLANRISSDDEIVISSDEERSQRTNLERAYFRVRRYSSAESDLGAS

SEQ ID NO: 82354 - protein, 48 aa, Unknown
  Obtained from environmental sample
  misc_feature (1)..(48): Xaa is any amino acid
MAEMSYPAELNGVKKVLTAAALTYVASALTALMSLLRLILLSQSRRRR

SEQ ID NO: 82355 - protein, 116 aa, Unknown
  Obtained from environmental sample
  misc_feature (1)..(116): Xaa is any amino acid
MAALAQSLRRDNRLFAVCQRKQDSGDDPGEYLCPVGTVVRIIQHLRLPDSTFRVVLQGEYRGRINEFEPHGDYSLVKVSPINTGNFSDSPLPQDIALLKAVQRGFTQYAELSKKIG

SEQ ID NO: 82356 - protein, 309 aa, Unknown
  Obtained from environmental sample
  DOMAIN (94)...(298): Lon protease (S16) C-terminal proteolytic domain
  misc_feature (1)..(309): Xaa is any amino acid
MEIIEIPGYGENEKLSIAKQFLVRKELRKNGLSTAKIKFADDALRSIIRYWTMESGVRGLEREIARCIRRVARQAVAAGYGAAPHSEVNAFRKTIKSDGLEKLLGRRKYKNDVMFREARIGVSCGLAWTETGGATLPVESARFDGSGEVLMTGNLGDVMKESARIALSYLRSVRDSYKYLVKDIGKTDFHIHVPEGAIPKDGPSAGLAIAVSLLSTLCQKPPRPGIAMTGELTLTGRVLPIGGLKEKLLAAIRNQLEKVLLPADNRSEWDELDKDITSAINVEFVENALDAFAILFDKSIRGSRRSASL

SEQ ID NO: 82357 - protein, 93 aa, Unknown
  Obtained from environmental sample
  misc_feature (1)..(93): Xaa is any amino acid
MIQKEFPILEFDEDINAYIRPSNFIQPLENTPEKCVLCFFSEAIDKVLMEYQYKIIFIFQSEGMNYPLYELEYKGEKISLNTAAGGAPMAAGQ

SEQ ID NO: 82358 - protein, 202 aa, Unknown
  Obtained from environmental sample
  misc_feature (1)..(202): Xaa is any amino acid
LLALKLFFPFKKDTANSKAVILKTLIKDAPILGAYGLGYASSMILFVIANKLTASANAIMLQYTAPVWAALLGWIFLRERPGLEHFAAMAFVGLGMFFVFRGGLAAGSLLGDILALASGVMFAANPVLLRAREDKNPADIMLFSHITCALVSAPFFFLFPPAPTAKYFLSVIYMGIFQLGMASVLFAYGIKRISPLQAMLTA

SEQ ID NO: 82359 - protein, 96 aa, Unknown
  Obtained from environmental sample
  DOMAIN (2)...(94): Chromate transporter
  misc_feature (1)..(96): Xaa is any amino acid
LREYLELLWAFIVIGATTFGGGYAIVPALERELIKKRGWISMDEVLDFYTIAQITPGVIAVNIATFVGCKRKSIFGGAVATIGLILPGVASRPILT

SEQ ID NO: 82360 - protein, 321 aa, Unknown
  Obtained from environmental sample
  misc_feature (1)..(321): Xaa is any amino acid
LPRGLPFLDPILAGNWAERHIRNSAEYSYADGFAYGLEPEILSVGTPGILAKILESDDGQVERDILLSVIQKDINAFDIETEISSVDIRCHRINLCADTKRNFLLLKNFISAANGKLPFADEVENIVENHPEILRTLPAFYPIQVYGGCPQKCSICPYPMFTDAAGRKDFMDGEKFKSLLDKITVFSGDAVIDLSLWGELSLHPEKMKLIEEVLRRPELALIIETSGIGWKNEDIEKCAELCGNLEKSAVVRKNALPPLSWIVSLDTSDPQRYAGLHGNGFAEAETLVKKLFSLFPNDCYVQAGARKRRGRRHGKILPRPI

SEQ ID NO: 82361 - protein, 142 aa, Unknown
  Obtained from environmental sample
  misc_feature (1)..(142): Xaa is any amino acid
MNTLSILYAGNLSGFAFEPVFDGKNAVQLSVEQVKKFPGAGKTVLLARTDADFPGITDIQVEKKDLWTKRALLEKISELQAGFDFTFFAFADCPFLDPVLAGNITERHIQGKAEYSYADGFSLRSCARNPFTGNQRAFWQKF

SEQ ID NO: 82362 - protein, 316 aa, Unknown
  Obtained from environmental sample
  DOMAIN (43)...(157): Response regulator receiver domain
  misc_feature (1)..(316): Xaa is any amino acid
MGGSIWVESELGKGSTFYFMVQVTRGTEDKQKHLLDDVNLNNVRILAIDDDPEILSYFREVTQGFGLSCDTALSGEEAFKLMDQKGGYHIYFIDWKMPEIDGIQLAHEIKERTLENSLVIMVSAAEWSAIAEEAKAAGVDKFISKPLFPSAIVEVINECLGVDKQQMEKSQSADIAGIFAGKHILLAEDVEINREIVQTLLEPTQLEIDCAENGAEAVRLFTEDPHKYDMIFMDIQMPNMDGYETTQRIRALDDPIANTIPIIAMTANVFREDVERCLEAGMNSHIGKPIDFEESMGKLRSYWVSDSVNIFSRFLV

SEQ ID NO: 82363 - protein, 128 aa, Unknown
  Obtained from environmental sample
  misc_feature (1)..(128): Xaa is any amino acid
MRVTGGGDPSGGLRDTLVGKLPQIKIAREAAAGYSSYGNQIGLANGQVAEFYHPGFIAQRMELGAVIGAVPEAWVRREEPVAGDMVILVGSRNGKGPHRGARLGSPRVHTGPVRKKPGGRKLQKGKPP

SEQ ID NO: 82364 - protein, 264 aa, Unknown
  Obtained from environmental sample
  DOMAIN (75)...(259): CheB methylesterase
  misc_feature (1)..(264): Xaa is any amino acid
ASANHRVKKYLSLQLFRPLQNPQTLSARSAHAEFEPKVSTAKSSDVESYVKLAAQAPTGPAQPPVRARYPANTEIIAIGISTGGPDALRVVFANIDADLKVPIVVVQHMPAGFTNEFAKSLDRICPLDVKEAEDGDEIRPGRILIAQGNKHLEVEKKGSDNAVARLSDSPQVSGHRPSADVLFASVAMAFTNHVLGVIMTGMGRDGAQHLGTIYREGGMTLGQDEASAVVYGMPRVAYELGHVMEQVSLNNMARRICDVAKQKR

SEQ ID NO: 82365 - protein, 114 aa, Unknown
  Obtained from environmental sample
  misc_feature (1)..(114): Xaa is any amino acid
MVSPKYHVFVCGSSRINGTQNGTCHKKGAVALVQKFMQEIEDRDITSDCLVTNTGCFGICDKGPIAVVYPEGTWYGNLTEDAVEEICEQHFEGGKVGRSTRFDGLIVGSADSDL

SEQ ID NO: 82366 - protein, 188 aa, Unknown
  Obtained from environmental sample
  DOMAIN (16)...(188): dTDP-4-dehydrorhamnose 3,5-epimerase
  misc_feature (1)..(188): Xaa is any amino acid
GSPIDQIGRAARAFSFEPCPIPGLFEIQPKVFSDSRGYFFEAWSRRDFEAAGINANFVQDNQSRSVRGVLRGLHFQKTHAQSKLVRAIEGEVFDVAVDIRPGSPTRGKWHAVVLSGEKQNLFYIPAGFAHGFLVLSDTAVFAYKCTDFYYPEDEGGIIWNDPVIGIKWPDLGMDYLLSEKDKKLPGYV

SEQ ID NO: 82367 - protein, 123 aa, Unknown
  Obtained from environmental sample
  DOMAIN (4)...(123): RmlD substrate binding domain
  misc_feature (1)..(123): Xaa is any amino acid
MTDSIWLIGCKGMLGAEIFLLLEKSGRSFIGTDREVDITDAAALKQFAKKEAVDWIINCAAYTAVDKAEDDAEHCRRLNTHGAANIAACARSIDARLIHISTDYVFDGSLPRPYREDDSTNPI

SEQ ID NO: 82368 - protein, 304 aa, Unknown
  Obtained from environmental sample
  DOMAIN (17)...(304): Beta-galactosidase
  misc_feature (1)..(304): Xaa is any amino acid
MTESAEVLTAGIKSRTWPRETWPEDMRLLSLADIDILTINVFSWALLQPSQDEYDFSVLDAIVETVSKAGMKICLATGTGAHPAWMARKFPEILRVNSDGSKRKFGGRQNSCPNSPIYRLYSTLLARKLAERYGKLDSLVAWHISNEYSGLCYCEKCEKAFREWLKKKYKTITALNEAWNTSFWGHTYYDWDDIVPPSNLSEEWPVNRTTCQIHSIDYRRFNSDSLLECCLAEYEALKEITPQIPVTTNMMGTFWDLDYFKWGKNMDFISWDNYPSPGTPYTRTAMNHALMRGCGGGKPFYLME

SEQ ID NO: 82369 - protein, 81 aa, Unknown
  Obtained from environmental sample
  misc_feature (1)..(81): Xaa is any amino acid
VKYLLDTNIISETRKPHCNPRVKAFVEGIDWEDLYICSITVGEICYSMEKLPAGKKKHELAVWLYSKLPEWFKGRIIPLDA

SEQ ID NO: 82370 - protein, 280 aa, Unknown
  Obtained from environmental sample
  DOMAIN (2)...(155): Glycosyl hydrolase family 3 N terminal domain
  misc_feature (1)..(280): Xaa is any amino acid
NTRPLCGLGRPRWGRTYESYSENADIVSAMGEYFIKGVQENGGAACMKHFLGEGQTVDGRNQGNALLDNDGIEKILPPYRASINAGAMSLMPSFSSINGIKMHQNKELLTDLLKEEMGYKGFIVSDWSAIKQLTGGSYRMQIANAINAGVDMCMAADGRENWINFISNLTKLVEDGIVPMSRIDDAVVRILRFKQKLKLFENPLITQAGKIGTDENRAAARELVSDSLVLLRNEQDTIRKLSESKRILVTGQGANNIGMQCGGWTITWQGGNGAITKGTT

SEQ ID NO: 82371 - protein, 293 aa, Unknown
  Obtained from environmental sample
  misc_feature (1)..(293): Xaa is any amino acid
MIQRFLSDPQARLPTFPRDGNFEYPFAVAVKTGTSEGFRDAWCVAWSDRYLVAAWMGNADNRSTKRMTGYDGAAPLVKKILLRLHPNERDGLYEGGFPVPDGWLPFSICRLTGLLANENTPYVTSDYFAPGTEPTEASAVLRPLPVDRRNGLLANQRCPKQYREYRQFLFLPPEYEPWGRAYGLPIAPRLQSPLCPGGESLPAEYALEILPPRAGPPPFSPPPPRRRPDPPFPLRAPCPPGRPAAPAPSPWFRPRARGPRRSRPPPALRRRPARFPPPGRFAGSPPGGWAGPR

SEQ ID NO: 82372 - protein, 250 aa, Unknown
  Obtained from environmental sample
  misc_feature (1)..(250): Xaa is any amino acid
MNPYAVDRREYADLLRLQGYPARYLEELRLLQDQGIADRSMNDAIETYSALLSGALFQRWQVNPVEIDGRHWKVAVFSVGGQSSYRHVDAGAVASSYIKELLIHDRSIIPMNLEVNQPSFSQAFRTAREANADYFLVITTMENERDISLKGELFVGRTGSAAASFYTYRTGVDRLRNASRGIVEQLDAAIPLRGKLVLRRQAQGLIDKGRADKVMEGAVYDVVKKGQSQLANQGIGMVYSPEDLVGKITI

SEQ ID NO: 82373 - protein, 78 aa, Unknown
  Obtained from environmental sample
  misc_feature (1)..(78): Xaa is any amino acid
MDVSRIDHIGIAVTNLDETIKFYEDVLGVKCSGTETVADQKVKVAFFPVGDTELEFLESTSEDGPIAKLSRLGRSDQC

SEQ ID NO: 82374 - protein, 284 aa, Unknown
  Obtained from environmental sample
  DOMAIN (32)...(284): Methylmalonyl-CoA mutase
  misc_feature (1)..(284): Xaa is any amino acid
MSDGGLKDSYNQWEETQVKKTLSKFPEQKQKYEFDTGVEVKRLYTPLDLPEFDYETSLGYPGQYPFTRGVQPTMYRGKHWTMRMYAGFATAEESNKRYKYLIEQGSMGLSVAFDLPTQMGYDSTDSIAQGEVGKVGVAIDSLADMEILFDGIPLDKVSTSMTINAPAGVLLAMYIAVAEKQGVAPDKLRGTIQNDILKEYIARGTYIFPVKPSMRLITNIFEYCSKNVPQWNTISISGYHIREAGSTAIQEVAFTLANGIAYVQAAVDAGQDVDDFGPRLSSFL

SEQ ID NO: 82375 - protein, 172 aa, Unknown
  Obtained from environmental sample
  misc_feature (1)..(172): Xaa is any amino acid
MSTEYQKIVNALKRRRKGAVAADICAATALPLSSVNELLPKAADEYSGHLRVTESGEISYYFPNGFTSRYRGLSATLKKAAKKTFTFIKAACAFLFKIWIVVMLVGYFLFFIALAFASVFLSVAGKSGGRGGRGSGGSVNFGLFNLIWRIWFYSELTRPRYGIILGRSVVGN

SEQ ID NO: 82376 - protein, 272 aa, Unknown
  Obtained from environmental sample
  DOMAIN (3)...(271): Glucose inhibited division protein A
  misc_feature (1)..(272): Xaa is any amino acid
MAVGLGVSGGRVASVTLDNGEVVTAGAVVVAAGTFLNGVIHVGMCSRSGGRSGEPPSSGLTESIRELGISSGRLKTGTPPRIDGRTVDYSKLSVQRGDEEPWPFSFFTDWRLRNRVVCWSVKTNKETHKHILESLDRSPLYTGKISSVGPRYCPSIEDKVVRFGERDGHTLYLEPESLGNCELYINGMSTSLPYDVQERMVASIEGLRGARIMRPGYAIEYDYFQPLQLRPTLESKIVGGLFFAGQVNGTSGYEEAAGQGLWRINAVGSVMV

SEQ ID NO: 82377 - protein, 287 aa, Unknown
  Obtained from environmental sample
  DOMAIN (15)...(177): Type III restriction enzyme, res subunit
  misc_feature (1)..(287): Xaa is any amino acid
APDNVWQREFEDSFIYEETPDQLRAIKEVKADMESAKPMDRLICGDVGFGKTEVAMRAAFKAVMSGHQAAVLAPTTILAAQHFATFSERMSSFPVRIEVLSRFQKGKEVKTTLEKLAEGKVDILIGTHRILSDDIKFKNLGLLIIDEEQRFGVKHKEALKQLRYKADALSMTATPIPRTLHMSLVGARDLSIINTPPRNRLPIETVVAEYHDDLVKSAIETELDRGGQIYFVNNRISNIPALQDRLEILAPKAKTISAHGQMDESELEAIMKEFIAGRSCRSDQWLT

SEQ ID NO: 82378 - protein, 76 aa, Unknown
  Obtained from environmental sample
  misc_feature (1)..(76): Xaa is any amino acid
MDTQTNYIDTLIRRYPPLETVKNDISAAFDIIAGSFSNGGKLLIAGNGGSASDAEHIAGELMKTLQKLGRSDQWLK

SEQ ID NO: 82379 - protein, 261 aa, Unknown
  Obtained from environmental sample
  DOMAIN (1)...(235): Fumarate hydratase (Fumerase)
  misc_feature (1)..(261): Xaa is any amino acid
LCFSRAEGRNQRGGGRFNGRGLPDPACGKTRNPRKKERIACCQDTGTCNVILEIGQELSWKGIPLFDAVNDGVLRGYEEGFLRKSIVKDPFDRVNTGDNTPAMLHTEIVPGDRVSVTVMPKGGGCENMGAFCTLLPSDGVQGVKDFVIQTIDKAGGKPCPPLLVGVGIGGSMDKCVWLAKKALLRPVGSRNPSPFYSNMETDLLEKINNLGIGPMGTWRQDHHPGRACRLLSMSITGPQRGKKSKKCWENGKEVGIKPVGR

SEQ ID NO: 82380 - protein, 142 aa, Unknown
  Obtained from environmental sample
  misc_feature (1)..(142): Xaa is any amino acid
DRERILWKDKKKALKLANKKIAFVGSVNEHNVPNIKAMSVVKHNGLETFYFVSNHSEIKTEHYKRNFNACIYFTGGPIYKELILEGIMKVFHGDEIKNFVRMNNNKNAYKNGRPDPDYCVLQFVTKKGRFHHWFKTEAFDID

SEQ ID NO: 82381 - protein, 311 aa, Unknown
  Obtained from environmental sample
  misc_feature (1)..(311): Xaa is any amino acid
VFPNDQIGRGQLGLGAELSPGTVREALECMERCLVAETETVRLQEAVARLESERDALLIPLKQLLDKLGRAPLSGPDGFPDWPASLDALLRDTRLAERAAEERAHKAQRIAEEEIALRAAQSAFNDERNAEAELFALAQVDNAEDFLRHAAIQAERETLTRRRRDLEDALRLAAGDTPFDEFTASFASFDRQEREQRLAVLDAELERQDQEERALVDTLGELTARLSSLDAAAEELGKLRRQENALLENLRQLTLEYGRHALARQLIHTAQLNFERESQPAVIRAASSIFGAITNGAWNRVSASLDDSALS

SEQ ID NO: 82382 - protein, 302 aa, Unknown
  Obtained from environmental sample
  misc_feature (1)..(302): Xaa is any amino acid
VPPKRRGFRIIKETLAAYKEISVNNRLRLDEEVRWCKFNNVDCVISDITPFAFDVAHKAGIPSVAISNFTWHDIYSPYVERFPEYGEMLAEMADQYRKASIALTLRPSLPMPVFERKKPIHILGRRGVDRREDICRHFGIDRGKRLGVIYVGNFGLDRVDWRRLEKFDGWEFVGVYPLPGGPKNYHLVSKEQFRYQDLSASADAVIAKMGYGVFSESILNGIPLVYLPREDFAEFPVLDAEAKRLGCGVCVDTEEFCGLGWLKVLNGIVDNNNMTPDNCGGALMCADEIIKIAKSEITRDQP

SEQ ID NO: 82383 - protein, 266 aa, Unknown
  Obtained from environmental sample
  misc_feature (1)..(266): Xaa is any amino acid
VLPRKFQSPRESYHVNDRIKAYIAEVKKENAGLQIVLSRTHTEFVKKIFELEVPEIYDKTVEIHKIVREAGFRTKLAVYSNREDVDPVGACVGLKGVRIQAVIKELEGEKIDILKYDPDPRRFIKNALSPAEVRDVIILDEGKHTALAVVNDSMLSLAIGKQGLNVRLANKLVDWNIDVKTESQFSQMDIAAESRRAVADLFGDADSDVNEFFHISEMPGVNSGVAQTLLDNGIDSIEDFLAPSQEELETKGVTGAQIDELRKLIK

SEQ ID NO: 82384 - protein, 306 aa, Unknown
  Obtained from environmental sample
  misc_feature (1)..(306): Xaa is any amino acid
VTINANVNPGVNNANITHVANPTVDTNVNTNVNTNVNTNANINANANVNTTNNNIANANIAPNTNVSPAPSSGGQPDDFLQIARRIWANTEKLRAGFREAFSTLDLQSRASPLDKPADDSTAGTVRRSADSLRTEMLLDVSRALRDVFSSVDELREIVSQLSSGQMALPEEAEAALLRAMRALEHQARQSGTDVMERLKDMLRELNRLQADAARAQELGMAAGAARSSPAEAIRSAALTAARSLENLQLLSTQTRAAESEQHLLALPAKIGGEWTEVQIKFVKERKGEKGEAKDGHGRIPNCHRLK

SEQ ID NO: 82385 - protein, 91 aa, Unknown
  Obtained from environmental sample
  misc_feature (1)..(91): Xaa is any amino acid
VSEKLEQLKEIRKKLEEAGGQKRIDKQHESGKLTARERIAMLFDEGSFVELDAFVKHRCVNFDMATTEAPAEGVVTGYGKYTSAVTLSITG

SEQ ID NO: 82386 - protein, 293 aa, Unknown
  Obtained from environmental sample
  misc_feature (1)..(293): Xaa is any amino acid
MGQNRTSTPEYEFDSDATAARIVHNVPQDGDIITGDFEISGLAYTDVGVSAVCWRILSPQNSWEPPEVTLARGGTTPFNRIETSQNYMVNLTLADVRDGENILEIYAEDYYGEPGPLVTKMFGVSTAPPVTTVVEPSKEVWNKGSMIVRGTAYDRNGVDEVRISMDNGISYQRADIIADNQDRPSVWTISLNTRAYADGQYSMLIRTTDGYKVQSFTNAIINIDNTPPMIDMGDPKNGAPIGRTLDITGQIHDNLKINYISLLLTDTNNPNSFMMVEPHLEDAIEDYVIMETM

SEQ ID NO: 82387 - protein, 273 aa, Unknown
  Obtained from environmental sample
  misc_feature (1)..(273): Xaa is any amino acid
MMARYTDRSKTLNGEGSFVSRQNLRQQNGIDEKTILDQQANAEMTYYQRIGDNKNITIKTRQEYNLSTGLVRRQLPDIQFRASGSLFESDMSGENIDPPFWEKINYSYQNHLNNHVVRAYDSLKAVDTTAYYTGFSDNLSFNYTGTLFKVLNVTPSLNLAGDWTAREYTSPDDSVNNKRNRFAFDPSKNEYGQYYLKGNGSLQLATKLYGFWLPEWGRFTGVRHTLSPTVGYTYAPELDTNKAFYPHPLLGQRAFQNKQQTVNFRLGNDFDMK

SEQ ID NO: 82388 - protein, 88 aa, Unknown
  Obtained from environmental sample
  DOMAIN (1)...(86): Cobalamin adenosyltransferase
  misc_feature (1)..(88): Xaa is any amino acid
MTDWPSEEYLVNLIEKLESELPAFASFAVPGANPASAKLHIARTVCRRVERRMISLVLDAETKAAIVPYINRLSDLLFLLAQKEAEKN

SEQ ID NO: 82389 - protein, 205 aa, Unknown
  Obtained from environmental sample
  DOMAIN (3)...(173): Orotidine 5'-phosphate decarboxylase / HUMPS family
  misc_feature (1)..(205): Xaa is any amino acid
VDGRERRLADTALRYAKAHFAGDFEADFVTLSPYMGMDSIEPWLSYADSAGKGVFVLMRTSNKGMRDFEYLEIAPDKRRLYHAVGDKLAELAAAHSGMYGYGAFGAVVGCTEREEAAEIRAKYSNLFFLIPGYGAQGGAADDAALLLREGNGGVVNASRSILKAWSAEIAASGGDESTATNSFAAEAARRATLAMRDAIRAAVKK

SEQ ID NO: 82390 - protein, 102 aa, Unknown
  Obtained from environmental sample
  misc_feature (1)..(102): Xaa is any amino acid
GNPRTDSARKTGRRWDGTDDYGFSALPGGIRFYDGGGDFNHAGNMGFWWAASVASYHDVYYRSMQSDNDDVHEYYFYNNLGLSVRCLQDEMLIDDMDDDEDE

SEQ ID NO: 82391 - protein, 105 aa, Unknown
  Obtained from environmental sample
  misc_feature (1)..(105): Xaa is any amino acid
MDGRLPARPLTGLYEEMTSNGCTLSEQGRSPLTLGGKLKNGNYSLPGNVSSQFISGLLFALPLLEGESTICVTGNLESRPYVDMTLDALRLFGINVENSADLSWP

SEQ ID NO: 82392 - protein, 95 aa, Unknown
  Obtained from environmental sample
  misc_feature (1)..(95): Xaa is any amino acid
MKLIFEKGKKGRGCSILPPCDVSYHELPEKFIRKVKARLPSMDENEISRHYSAMAKRAFGVNDGFYPLGSCTMKYNPKINEEIASLPLANPRHNP

SEQ ID NO: 82393 - protein, 97 aa, Unknown
  Obtained from environmental sample
  misc_feature (1)..(97): Xaa is any amino acid
LNTERKVLVTGASGGIGRAIALAVSDAGYRLTAHYNKGKEAAEALQKEILQKGGSVELIQFDVSNRDECQEKLERWSEEQRALLGISAMRESPPNDP

SEQ ID NO: 82394 - protein, 226 aa, Unknown
  Obtained from environmental sample
  DOMAIN (1)...(195): Glutamine amidotransferases class-II
  misc_feature (1)..(226): Xaa is any amino acid
GDHDRIRRLVFSCEEYGRVQAVGFPEDVGRFYKLEEYEGYCFTAHGRYPTNTPGWWGGAHPFALLDYSVVHNGEISSYDTNRRAIEMYGYKCSLQTDTEVIAYIIDYLHRRKRLTLEEIALVVAAPFWQTIERMEPRDREEHEYLRTIFSSQLITGPFSILVGFNGGLMALNDRLKLRSMVVGERGDMVYIASEEAAIRVIEPNLDALWAPVGGQPVIIRANGGEV

SEQ ID NO: 82395 - protein, 236 aa, Unknown
  Obtained from environmental sample
  misc_feature (1)..(236): Xaa is any amino acid
MSMVPSAARRGAKSELVKISGDHYRLDARFIDMDVTVRLHIHLSEKGIKYRIYDGEIEGPGANRMASLIITPFMGAAGGVRQFFNPATGEYGPETPNPMKPGYAFVPDGSGALIRYNDNTVSINRYVGKVYGENPAESMFYYDDTVYAVKKKEPLMPVFGVAIGNNQQGFAAWADEGGEQMEIVMSPKENMTKYNFIYPRFVYNRQMYQVYNRKGEGYFRLYPDRLHYDISLEYHF

SEQ ID NO: 82396 - protein, 210 aa, Unknown
  Obtained from environmental sample
  misc_feature (1)..(210): Xaa is any amino acid
VISSITDAVTTTDELIPSGENCSYRSNPLKLAEFTFSRKDPCYVKKAKEVQAREDHRSKGTKVGELEKALNSIQGIANCFVILPANIGIGSAIFARKPGDGFAREQAASCQRVLGGSANLALEYGTKRYRSNLIKWGILPFLVMDEKAFSNGDYIFFPGIRTAVQEKREKISVYVLGEKPVEISAALGELTDAERQILADGCLINFYAKK

SEQ ID NO: 82397 - protein, 160 aa, Unknown
  Obtained from environmental sample
  misc_feature (1)..(160): Xaa is any amino acid
FRPGYRGILGPAEIGAGTREDIGLLRAIGGGEHAVQFVFVLDGAIIGFSGASAGLISGLLIASNIPRFFSIIESIVNFGINIVNIIASFFGGLFGGGAAGINDFFFFSPAVFYIKEIPSRIIPGEVVLIFLFGLLSALLAAWFASRKVARIRPAEVLRYE

SEQ ID NO: 82398 - protein, 278 aa, Unknown
  Obtained from environmental sample
  misc_feature (1)..(278): Xaa is any amino acid
MFLDSADLTLEGLTEGQNNSTIRNNSSVVYLSGGKLELRDGTISGNTSSSSPGGGVYVYGGTFTMSGGEISGNTSSSSGGGVYVYGGTFTMSGGEISGNTSSSSGGGVYVNNGGTFTMSGGEITGNRSSSYGGGVYVGSGTFTMSGGEITGNTGSGVNVSYGTFTMSGGEITGNTSRESGGGVYVYYGTFTKTGGGTIYGYTDGDAKSNVVKDSSGVVQNNRGHAVYVDSSLIKRKETTAGSGVNMDSNKMGAAGGWENNLGGLAAQLTWLQTNAASN

SEQ ID NO: 82399 - protein, 275 aa, Unknown
  Obtained from environmental sample
  DOMAIN (4)...(275): Serine hydroxymethyltransferase
  misc_feature (1)..(275): Xaa is any amino acid
KMGEANPSKLSREDWNTLRAKTGNQRLLGMDYYSGGHLTHGYRHNVSAQMFDAYSYGVNKETGLLDYDEIERMALEIKPLILLAGYSAYPRKVNFARMREIADKAGAVFMVDMAHFAGLVAGKVLTGEFDPVAHAHVVTTTTHKTLRGPRGGIVLCNEEFAESVDKGCPLVMGGPLGHVMAAKAVALTEANAPAFRKYAASIVKNADAMSKYCVAEGMTIATGGTENHLFLIDVTPFGLTGRQAESALRECGITLNRNSLPYDKNGPWYTSGLRI

SEQ ID NO: 82400 - protein, 291 aa, Unknown
  Obtained from environmental sample
  misc_feature (1)..(291): Xaa is any amino acid
NVNTVGYKGRRVTFEESFNQLMKGASRTESKAGGTNAMQVGLGVSVGSIDVLTGQGNLQNTGRIFDLAIEGNAFFGVSDGNGTYYTRNGAFQLDSEGYIILPTNGMVLQGRMADSFGNFPPGTAIGNLQIPMSQQAPAKETTQVDIGRNLNSEADAKGSVTYSQRMLHPVDSFRLPETNTVNDPGRESTTLNSLYNSKGQSLNIKENDALTISWYDQASVTSGAPAFGSVTVKVSEQEGDRSINGIRTTVWTIDDFAEAITEALNHDRNGNRLTYTAEDPPGCSADLIIVE

SEQ ID NO: 82401 - protein, 74 aa, Unknown
  Obtained from environmental sample
  misc_feature (1)..(74): Xaa is any amino acid
VVGENLKLRCKQTGCMGLCHSEPTVEVIVPGMQSVIYGMVDPELTKSIIQKHIIGRELLGENILERPAVDILAS

SEQ ID NO: 82402 - protein, 132 aa, Unknown
  Obtained from environmental sample
  misc_feature (1)..(132): Xaa is any amino acid
MLASLYIHVPFCSQKCDYCDFYSLPVASNLADQALMDPYIDAVSGDIEEQISMFNVNSIPSVYIGGGTPSALGAERITRLLTSIKKLLAGMDAPPVEFTMEANPESTNGAFLHACLEGGVSRISLGVQSFCE

SEQ ID NO: 82403 - protein, 63 aa, Unknown
  Obtained from environmental sample
  misc_feature (1)..(63): Xaa is any amino acid
SILKELLTQLYGKGVSDGMRIQYGGSMKPDNAKDLLAQSDVDGGLIGGAALKAGDFAGIVHPK

SEQ ID NO: 82404 - protein, 285 aa, Unknown
  Obtained from environmental sample
  DOMAIN (29)...(284): Aldo/keto reductase family
  misc_feature (1)..(285): Xaa is any amino acid
MLSSKNFFLDSLFFKRGKKGIIMRYVDFGKTGVKVSRLGMGCMRLPSDMKEGKTVYDEEKSIALIHRAIELEINYFDTAPYYCDKLSEVILGKALKGGRREKVFLSTKNPVENDSGDDYEKRLENSLKKLDTSYIDFYHFWGISLDAFIKKVRAKDGPLDRAKKLKAQGVIRHISFSFHDHGAGTKEGDNLMEILKMGEGVLETVLCQYNLMDRNKEKGIALAHDMGLGTVVMGPVGGGRLGTPTKAILDLLPGKFTSSAELALRFVLANNKVDIALSADLIMRE

SEQ ID NO: 82405 - protein, 305 aa, Unknown
  Obtained from environmental sample
  DOMAIN (8)...(303): PEP-utilising enzyme, TIM barrel domain
  misc_feature (1)..(305): Xaa is any amino acid
MAELIKPDEMSKDMITFLNWCDEFCTESKRGSLKGFQVWANADQPADAKRAFQFGAQGIGLCRTEHMFFDKEKLIHFRAMIVSDTAEERKEALKKILPLQKEDFLGIFKAMEGKPVTIRLLDPPLHEFVPHTPEETKELADYLNVPIETLQVKIDKLREQNPMLGHRGCRLAVTYPEIYDIQVEAIALAAVECLKQTIPVNPEIMIPIVISARELKLLRPNAEKILKKVFDAEGVQIKVKIGTMIEVPRAALRSGHIAKYADFFSFGTNDLTQMTFAFSRDDVASFLPTYLEKPYWMLTRLNPLT

SEQ ID NO: 82406 - protein, 240 aa, Unknown
  Obtained from environmental sample
  misc_feature (1)..(240): Xaa is any amino acid
MLSTNAQLPLLIDCLNCEKGCIGGPGTGNAEKPLAILKEPVQKRMAELEKKQHPQIGNNAYKKYHNLLSKYWKKGLYNRSYRNLSENNTIKHPDETEITEIFHSLKKFRKEDIYNCTCCGYGSCKAMATAIYNKLNKPENCAHYILALLKENQEHIANASNLIEGINNLIQELNDTISSQADAVDNSAAETEEIITSIKGTSEVSHKQKESLHGLIEVAEQSTESMEKTIQSIHEISQSV

SEQ ID NO: 82407 - protein, 83 aa, Unknown
  Obtained from environmental sample
  misc_feature (1)..(83): Xaa is any amino acid
TERMLMFGAVMAITQAFNVADVTVVLAGNPSTDYAVHTVVNHLVDYGSTRFEMGYASAIATILFFTMIVSNAIIQKLLKRVGT

SEQ ID NO: 82408 - protein, 70 aa, Unknown
  Obtained from environmental sample
  misc_feature (1)..(70): Xaa is any amino acid
LAVFLISIEEINKVVETYPRNKRYTLAILQDIQRVFGYVPKEAFEVIACYLGIKISALYSMATLQLGHQP

SEQ ID NO: 82409 - protein, 109 aa, Unknown
  Obtained from environmental sample
  DOMAIN (1)...(78): Pyridoxal-dependent decarboxylase, C-terminal sheet domain
  misc_feature (1)..(109): Xaa is any amino acid
YHHISIPGKENAPHDKTYDIVGSLCENNDKFAAGRKLPEIAVAAEGDGDFVVIHDTGAHGRAMGFNYNGKLRCGELLLRPDGSIKQIRRTETVEDYFATLDLDALQEFS

SEQ ID NO: 82410 - protein, 103 aa, Unknown
  Obtained from environmental sample
  misc_feature (1)..(103): Xaa is any amino acid
ETGGKYLPYYPPLTLTGYMVIRPWLKEISVIPRFEYAGSRYGDMLGDEKLPGYFLLHLKIKADIGAYVSVSAAVNNILDTSYELRRYSPQEGRSFHFTLECHY

SEQ ID NO: 82411 - protein, 308 aa, Unknown
  Obtained from environmental sample
  DOMAIN (113)...(260): DEAD/DEAH box helicase
  misc_feature (1)..(308): Xaa is any amino acid
LTDSAEPSTVEIYLLNSFMLTTPGLPPVLRNRILRLASFANPEFYLAQKMRLPTWNKPHILYCYEFFPKYIGLPIGCLDGLLAILEHYQITPELQNKQNHGQSIDVQFTGELRDDQKEAFQILMINQIGILSAATAFGKTVVALKIIAERRVNTLILVHRKLLADQWVERINQFLGIPKKDIGYYSGTKKKRTGIIDIAVMQSIVKKDKVEDWVAEYGQIIVDECHHISAASFERIIRKCPAFFRLGLSATVIRKDGQHPIVLMNLGDVRYSNTRSIPLFVQKVFPRYTNFNISIDVNKTDTTEENTP

SEQ ID NO: 82412 - protein, 289 aa, Unknown
  Obtained from environmental sample
  misc_feature (1)..(289): Xaa is any amino acid
MELTAVYDGSEPVSYQWKRDGVNVGENSSKYTPTEAGSYTVTVSVFGYHSKTSEVVDVSDPSLLNLSGIVIITPNSGVTTGTELTAVYSGSETVNYQWKKDGINVGGNSYKHTPTEAGSYTVTVSAEGYNPKTSAAVNVVVEYTIVIEMFDNISGDTVTATPDKGIATDMVTLIYTVANTAANNQLDFGGVTADIASVTGYGAGTRTYTINAADASNGVITITAIFTHTDLEIDHIAFNEHDGGHITKTYGDAPFTNAITTAHHGTGAITYHSSDEDSPRNSPNLHSHL

SEQ ID NO: 82413 - protein, 66 aa, Unknown
  Obtained from environmental sample
  misc_feature (1)..(66): Xaa is any amino acid
MSRHKGGFTLPGEAGYDELTPELAEKWGADVIRDSDGTVLSDEILNSRYDIYSTICVIRKPTSGRV

SEQ ID NO: 82414 - protein, 304 aa, Unknown
  Obtained from environmental sample
  DOMAIN (1)...(304): Hsp70 protein
  misc_feature (1)..(304): Xaa is any amino acid
MKQTAEDYLGESVTEAVITVPAYFNDAQRQATKDAGKIAGLEVKRIINEPTAASLAFGFNKDSKKDKVIAVYDLGGGTFDISILELGDGVFEVKSTNGDTHLGGDDFDRRVMEWLIAEFKKDTGIDLGQDRMALQRLREAAEKAKIELSSMQTTEVNLPFITADQSGPKHLQKSLTRAKFEQMVEDLLERSKEPCKKALADAGLNADQIDEVILVGGSTRIPAVQQIVKDLFKKEPNRGVNPDEAVAVGAAIQGGILGGDVKDVLLLDVTPLSLGIETLGGVMTKLLHVTQRFRHAKVRFSLPL

SEQ ID NO: 82415 - protein, 114 aa, Unknown
  Obtained from environmental sample
  misc_feature (1)..(114): Xaa is any amino acid
DNDLQHRKKYKDLGDKVNAADKAKTEEAIAALRKALESGDIPSIKEKTEALKQVSYKIAEEIYKQQAASGQGGAQGAGPDMGGFNPNMGAGGSSSGGENTKSAEDADYEVVDDK

SEQ ID NO: 82416 - protein, 329 aa, Unknown
  Obtained from environmental sample
  misc_feature (1)..(329): Xaa is any amino acid
LFPPFFAGVSLGADTAWACVVAKGNARFVMILRREASDARVLVVNHHLLFADLAARRDGAGYTASVVLPPYTRVIIDEAHTTEEAATSFFSSEFSRLGIYRSLGRLYRKRRSPQSTLLMRLKSLLSYKVDDAYEDRVADGLEKIRSAADSLDEAALELCSSEGVFRLTPQRDEVIRARLSPEFSSLRKSINSLASFIRELLEHIPKENEDDPVVWEIRSTLRRLDSVSSVCTSFLEYMENTDDVMWIERRGAEAGSLSNGRKRVSEGPWAVFNVTPLDVAPHLKEALFEPNKTVICVSATLTTGRSGGSSFDYWKSRSGLSLVTEREIL

SEQ ID NO: 82417 - protein, 139 aa, Unknown
  Obtained from environmental sample
  misc_feature (1)..(139): Xaa is any amino acid
GAYGRVGQPFDFDNVHKDSLTGRQAESALHECHITLNRNSLPRDPNGPWYTSGIRLGTAAVTSLGMGKAEMKELGALIAEVIKGTTQPPDKKDPSKKSMAKYDINANVKEQVIGRVKKLLDRFPVYPELDLEFLKKSFV

SEQ ID NO: 82418 - protein, 346 aa, Unknown
  Obtained from environmental sample
  misc_feature (1)..(346): Xaa is any amino acid
DYYALLFARIGIPHCPICGREIREQPVISIIDTILQFKKGTRIQLLAPVIRGKKGEHQKIIEDARKAGFARARIDGVPVNLDESIKLDKQKKHSIEIIVDRIVIEQDIRSRLAESAETALQTADGLLLVLASDEDKSSEHFFSQKNSCPDCGVSIPELQPRLFSFNNPFGACPSCTGLGAKLEFDPDLVIPDHSLSFNEGGIVPYNPDSAWHRSRFESLAKHYKFSLDTPLKSLPKKVQDAILYGSNDEIKVRYENREGTGRFEYQSKFPGVLEDLKRRYLETQSPGIKEWLEKFMSQKPCEDCGGKRLKPEVLGVTIAGKNIWEISRLSVTDSLKFCSAIMGGKK

SEQ ID NO: 82419 - protein, 226 aa, Unknown
  Obtained from environmental sample
  DOMAIN (31)...(226): Lyase
  misc_feature (1)..(226): Xaa is any amino acid
VKKNTAAKKIPAQKNGGSPKGKSVLWAGRLAEIPQADAFAFQASINTDKRLVFDDITGSKAHAAMLGKQGIIPKESASKIVKELDRIAADIKSGSLKIDASVEDIHSFLEAVLTKRLGDDGKMVHAGRSRNDQVATAFRLYLKRTVPELQNELSAAANVLLDAAQSHITTIMPGYTHLQRAQPVTLGFHLTAWCAALERDFSRFSDALARLDECPLGSGALAGSTL

SEQ ID NO: 82420 - protein, 317 aa, Unknown
  Obtained from environmental sample
  misc_feature (1)..(317): Xaa is any amino acid
VQISKDWQHVKIPLADFPDRGMYWDDTKKTELPDRINWDKIAEFRVSVDKGTNPQGFLVWVANVEIVKGTVPVAKPKPKIVYWDEKTETIDGPKDPAKLDGKAKAVPNGVFYAGNMQGFGYVYGGLTAFKEQPTKTPGRNVLASYMDDNEYSGVTLSLGEGKYIDLSKVRDKGGVYFWAKGKQGGEKVAFGVLDNQGDGIKSQTKTNLQDWVDGQILTKDWKLVKIPLKKFVDAGKAWDANKQAEVTKKMQWNKIQEVRFSVGKAENKRDGRQDDPVTIYVDQITFTENIDWVDPDLKWDTFQSTAPRLVLPDLENN

SEQ ID NO: 82421 - protein, 320 aa, Unknown
  Obtained from environmental sample
  misc_feature (1)..(320): Xaa is any amino acid
VDSRLERTSSEGRGDREMTISELLRNVQTAKEANAQLSLEHERTLVSMEGATARQSTDSTEPAVAVTPAKKKAPRRERNTVNQYENRLEQIAKSRKANDAVIAQYMVEVHKKFAIPAACLIFVLIGAPLGIMARRGGLAVGASYSVFFFIIYWVFLITGENMADRMIIPPAVGMWAGNVFLAICGLVLIALMTRETTIGFGFLKTFFGKLSPAFKRLSSVKAFSLPGALFRFPRRFLNKTVGILPGYLIWMFLSYVIGLLAALIVIFVTIDYVSNLRKFDNATFEPIILYYWYFLPLIVQTVLPIVFSLSSCSSGANLPS

SEQ ID NO: 82422 - protein, 323 aa, Unknown
  Obtained from environmental sample
  DOMAIN (167)...(233): His Kinase A (phosphoacceptor) domain
  misc_feature (1)..(323): Xaa is any amino acid
MYQREMQLAHAKELNELQLAKLNLVVQGTKIGLWDMEVVMDDPINPNNTFVWSDEFRHMLGYNDENDFPNILSSWSDLLHPEDKERTLSAFANHMLDRTGKTPYDVEYRLKRKTGEYAYYRASGESIRDRDGNAIRVAGALMDITETKNMLINKDRQREEAEAANRSKSTFLANMSHELRTPLNVVIGLTGLIMEDKSLDKHVTDNLIKVSNAGSTLLSIVNDILDLSKIESGRLELTPDEYYTASMLNDTVTLTLARIGEKDINFHLKCDDNLLYKLYGDDLRVKQIFTNLLTNAVKYTDEGSVELHVSCEREGDAVGITPP

SEQ ID NO: 82423 - protein, 287 aa, Unknown
  Obtained from environmental sample
  DOMAIN (15)...(283): Beta-eliminating lyase
  misc_feature (1)..(287): Xaa is any amino acid
MSNQENIVYLDNNATTRVAPEVLEAMMPFFGDRYGNPSSIYRFGGTVRRQVEEAREKVAALIGASPDEIVFTSCGSEGDNMALKGFFQEHGERTHIITTTVEHPAVRNTARFLGGRGARVTELPVDGDGLLRDGAIESIAINPDTLASIMWANNETGVVFPVRELAEAVKARGGFFHTDAVQAAGKVVIDVKKAPVDMLAFSGHKLHAPKGVGAAYFRKGTPARAILHGGHQEGGIRAGTENVPYIVGLGRACELAAQRISEENTRVRAVRDKLEKALLGKCARAKL

SEQ ID NO: 82424 - protein, 310 aa, Unknown
  Obtained from environmental sample
  misc_feature (1)..(310): Xaa is any amino acid
MAPNANDPAYWENIRQGLAIQQASAAPQGAPQGDWRVEPSDGGVVITEYKGKDTAVQIPSQIDGKPVTGIGEKVFSRKGISSVTIPDGVTSIGAKAFADNQLSSVAIPDSVTAIGEEAFIRSQLSSVAIGGGVTTIGKAAFALNQLSELTIPFSVTSIGAEAFRRNRLSSLSVGSSVIDIGAQAFADNQLAEITIPNSVKTIGRDAFADNQLKKVIIMQPNIANVAIAGSSPFGKAEVLTEEAYSFERDEGANYTDKKHFDVRKVDGGVEIARYKGTDTDVRIPRLITETALLKIPGTRSRRRAYICYDS

SEQ ID NO: 82425 - protein, 310 aa, Unknown
  Obtained from environmental sample
  misc_feature (1)..(310): Xaa is any amino acid
CAGAGYGKTTAVHDFLKGYNARKAWIQLSERDNVGGRFWENYTHSILTANVTLSRALSKIDFPDNKEKIRHYKALLQDYFFDKKRILVIDDYHCIEDPLVLRFMEEGFFRNMLPGTTVILISRSITRLNIAGITYRDQIFNVNESDLRFTENELAQYFRRMEISLRTESLREIMQDTEGWAFAINLIARSYQKAPGYGGYVRSAMKQNIFRLLEMEIWAGLSEPLQIFLVRLSLIDHLSVDLLTQLAGKEEEFVGELEKQSAYVRRDSYINAYLIHPLFLEFLRTKQTLLTEEQKRETYAVSGDWCARTV

SEQ ID NO: 82426 - protein, 312 aa, Unknown
  Obtained from environmental sample
  DOMAIN (134)...(259): Response regulator receiver domain
  misc_feature (1)..(312): Xaa is any amino acid
LSNAVKFTHEKGSITLDALCIGEENNICTIQISVKDNGIGISDEQQKRLFMSFQQAESSTTRKYGGTGLGLAISKSIVELMGGKIWVISEPEKGSVFSFTIMAKKGKTIEIVNNGDNRQAEGTQIDINGLFAGHRVLLAEDVEINREVVLALLEPTQLEIDCAENGAEAVRIFNEAPNRYELIFMDVQMPEMDGYEATRRIRSLDAPNGKTVPIVAMTANAFREDIEECLAAGMDDHIGKPIDFERSWKSYALIYQKIRNNLQRINLCRNVLIFSSTHLRRAGNVPQGGFEPPQIDPESIVLPLHNGGWTDT

SEQ ID NO: 82427 - protein, 87 aa, Unknown
  Obtained from environmental sample
  DOMAIN (1)...(83): Response regulator receiver domain
  misc_feature (1)..(87): Xaa is any amino acid
MRKALTCITGLVPHLVLLDLSMPEMGGWDTFIRIRDISKLHKTPIAIYTTSEDPKDRAKAKELGAVDYIKKPVAKAEMLEKVARLIK

SEQ ID NO: 82428 - protein, 319 aa, Unknown
  Obtained from environmental sample
  DOMAIN (242)...(319): Elongation factor G C-terminus
  misc_feature (1)..(319): Xaa is any amino acid
LCTDSAEPGRHHDAGPGDIVALFGIECASGDTFTENGLNYAMTTMYVPEPVISLAIKPVDKQSSDNMSKALNRFTKEDPTFKTFVDPESNETIIRGMGELHLDVYIERMRREYKVAIETGMPQVAYRETVTAAARFDYTHKKQTGGAGQYGRVAGILEPNHEQDYEFVDNIKGGVIPIEYIPSCDKGFRACLAKGKIIGFPIVGVKLTIDDGQFHPVDSSDIAFQQAAIGGFWQAFEKAKPEILEPIMKVAVETPTEFQGSVLGSVNQRRGIIISTTEENNFSSVEAEIPLSEMFGYSTVLRSLTQGKAEFTMEFLKYS

SEQ ID NO: 82429 - protein, 287 aa, Unknown
  Obtained from environmental sample
  DOMAIN (1)...(144): DEAD/DEAH box helicase
  misc_feature (1)..(287): Xaa is any amino acid
LFSGFGCILADDMGLGKTVQSIATLLRLKEDGQLDSGCLVVAPASLLSNWEKELERFAPSLLVSRFHGPNRIINRKFNVFLTTYQTAVRDVEKLKDVAFSVLLVDEAHLMKNSETRISRAVKLLQSQYRLALSGTPVENRLEDLRSLFDFIIPGYLGSAKTFQKQYRVPIEVMRSKEQAEALRKITAPFLLRRVKTDKAIIKDLPKKIIVNEYALLEKEQAALYESVVSESIKKSEKMKSSERSSLILSLLTSLKQICDHPRVLTKKARQFRSFRKSATARTINREK

SEQ ID NO: 82430 - protein, 84 aa, Unknown
  Obtained from environmental sample
  misc_feature (1)..(84): Xaa is any amino acid
MNDFAGLGVLPEFADRLAKKSVNCPTVVQRLVIPKLLEGKNVIFRSATGTGKTLAYLLPGLQRLLSDIGTPYQGRVGESVMGGK

SEQ ID NO: 82431 - protein, 259 aa, Unknown
  Obtained from environmental sample
  DOMAIN (1)...(254): Protein of unknown function (DUF1703)
  misc_feature (1)..(259): Xaa is any amino acid
LIDEYDVPLQKSWACKYYKEMVSFIRPLLSSVLKDNPHLQFAVMTGCLRISKESIFTGLNNLQVISILDKYYSEYFGFTQAEMDNILEYYGLFEKRQIVRDWYNGYLFGNTEVYNPWSSVFVVDSWLADINEQPKPYWANTSGNDIVRRLVDIANVEMKADLETLMADKTISKPIHEDITYEEIDGDKNKDPDNFWNFLFFTGYLKKIGKGYQNENGESILDLSIPNLELKYIYHTKIQDWLRRRSASCRSDTWGGGKR

SEQ ID NO: 82432 - protein, 127 aa, Unknown
  Obtained from environmental sample
  DOMAIN (13)...(123): Response regulator receiver domain
  misc_feature (1)..(127): Xaa is any amino acid
MVVRDGNDNNNKKKILLIDDNEVQLSMTAIQLKKEYEVTSAKSGKEALDYLFHGLVPDLIILDILMPEMDGWEIFGRLRAVSALKEVPIVFMSSINEKDEIDHAIDIGVADFIVKPSKRAAISGGKP

SEQ ID NO: 82433 - protein, 187 aa, Unknown
  Obtained from environmental sample
  DOMAIN (8)...(141): 3' exoribonuclease family, domain 1
  misc_feature (1)..(187): Xaa is any amino acid
MKVETKFGDAVVSIETGKVARQAGGSVIVRLGETMILATAVASNDKREGLDFVPLTVDYLERFYAVGRIPGNFFRREIGRPSEKETLTSRFIDRPCRPLFNKNWTYETQVIVQAISVDDKYDPDLPAMLGASAALTISDIPFAGPIAGARVVRVDGNLVVTPPRPNWKQPIGPHRAGRPICHGGGAG

SEQ ID NO: 82434 - protein, 212 aa, Unknown
  Obtained from environmental sample
  DOMAIN (8)...(212): ATP-NAD kinase
  misc_feature (1)..(212): Xaa is any amino acid
VRGDMAQKVILVVNLHKEHAQAAAAEIRGELENRGAVVTVFAFEGRPETAPSGTWDIALSLGGDGTVLYAARILAPAGTPILPIHLGTLGFLAGVERHEWLAVYEQWQNQTARISPRCMLGFSVNRGGQSVYRNTCLNDTVISSSGKAKLIRLRVKTEIAAGEYADLGCYRSDGLVIATPTGSTAYSMAAGGPILDPEMEALILSPVCPFHL

SEQ ID NO: 82435 - protein, 117 aa, Unknown
  Obtained from environmental sample
  misc_feature (1)..(117): Xaa is any amino acid
MAITQNKSIAQTSIYRSAVEAILKSEQEALIAIRNNAPDSAFIRLNLVESMLNLASNYIIIDGVVQSVLKVKNEDSLNEARKALYKSIIYLEEIVSNFMTRPRPLCRSAIKGEGKLK

SEQ ID NO: 82436 - protein, 344 aa, Unknown
  Obtained from environmental sample
  DOMAIN (52)...(177): Signal transducing histidine kinase, homodimeric domain
  misc_feature (1)..(344): Xaa is any amino acid
MMAEGTAAAPAKAPAAAPAAAPAPAKAPAAAPAAAKASGTSEDAKKAGKEAGSILRVDSKRIDDLLNLVSETVITKATFNQISGQFNSMAIQLREIENQYRERIKTLFDSLPDYLGNIQDGKSVKDVRKEINEHYGDIFSLFDGFEVSFKNNMGKFRSTAQNLGRITGELQEGVMRIRMVPISQIFSRFPRLVRDLSKQLNKKINLVIEGEDTELDKSVIEDLLDPIMHSVRNSIDHGIESLEERRAAGKPEEGRVLLKATNEGNMIVIDIADDGGGIDVEAVKTKAIERGIISPNKLLTEPESFNLIFEPGFSTSRKIPAFRPRRRAGRVRSRSTAQRTVTVT

SEQ ID NO: 82437 - protein, 128 aa, Unknown
  Obtained from environmental sample
  misc_feature (1)..(128): Xaa is any amino acid
VWFPRIPIKEVLDENDHHQAKKLRLSTKVAIEYNILLSNESPAISAEAPFIKSLSLAIKEVYGVAAHPVGIGGGTVASFLRKIGIDSAVWARLSGTAHQPNEYSLVKDILGDAKVMALLMRGTDNNQE

SEQ ID NO: 82438 - protein, 160 aa, Unknown
  Obtained from environmental sample
  DOMAIN (1)...(87): Pyridine nucleotide-disulphide oxidoreductase
  misc_feature (1)..(160): Xaa is any amino acid
GGDAAAEEARYLSNLTDKVVLIHRRDAFRAQKTLAERTMKNPKIEVRFNTVIKEIKGEGKVKSVVLENNKTGKTNEEETDAVFIFAGTVPQSSLARDLGAKLDEGGCIITDSKMTTNISGFYAIGDIRSGVFRQVVTAAADGAIAAHNAADYVDEAKNKK

SEQ ID NO: 82439 - protein, 169 aa, Unknown
  Obtained from environmental sample
  misc_feature (1)..(169): Xaa is any amino acid
MFGFFLEWLRDRKACKTDRQDPKVSLIVPIHNEGRRMEALLESLLEQDYWQDDSHPCHPRGDLVEIIFVDDRSDDESPAMLAKFAKDATERGMKNCKIITLRDNPGPNYKQYALSAGIAQARGDYFLFTDGDCEVPPDWIRAMSRRMGDPETGAVSGRVKLSLSRGKSR

SEQ ID NO: 82440 - protein, 170 aa, Unknown
  Obtained from environmental sample
  misc_feature (1)..(170): Xaa is any amino acid
VHEQREDIYEIRQKLTSGKTIKFRQRRDGFVTEQPALPVLNDLSVYDESFEALLKANGYGNIGKLVPSLNVFFNRLTFLNKTFAERMTLDLGLGYGYNGMELRLNETAIVELKRERGPEQTVSQRYFRSIHKCPSGFSKYTIGISLTHGEAKKNRFLPKIRHLAFERSAA

SEQ ID NO: 82441 - protein, 209 aa, Unknown
  Obtained from environmental sample
  DOMAIN (12)...(208): GXGXG motif
  misc_feature (1)..(209): Xaa is any amino acid
MISAQNFDFRELNRRIKTAKETIYYIEDCYGQRYIGCGMNGKHITIKGTPGNALGAYLDGGIIEVHGNAQDAVGDTMNDGKIIIHGNAGDALGYAMRGGCIFVKGDAGYRTGIHMKEYKEKKPVIVIGGKAGSFLGEYLAGGLIVVLGIGAQDVPVWYFTGTGMHGGKIFIRTDKELSGLPEQVSEKVADNDELKEIEPYVSANLKTGP

SEQ ID NO: 82442 - protein, 300 aa, Unknown
  Obtained from environmental sample
  DOMAIN (113)...(295): Adenylate and Guanylate cyclase catalytic domain
  misc_feature (1)..(300): Xaa is any amino acid
MGNGQRVLFLLIIIPLFFILTARQAPVIRASTGFVSALFIFIVSILLFRFTGIYWGPLGAVLAMIGAIITREVISYSGSEKEKKFLRTAFSTYVSDDVVKEIISDPSRLQLGGTKRRMTAIFTDVRGFSTISEQLDPEHLVSLLNKYLSAMSDVILAEKGTIDKYEGDAIIAFFGAPLELKDHALHACLSAIAMKKLETELNKTIMENNLSPLPLLTRIGINTGDMVAGNMGTANKMNYTIMGNAVNLAARLEGVNKQYGTWILASENTIRESRRQAFHRKAEPRAARAEFCPWGGGKKR

SEQ ID NO: 82443 - protein, 332 aa, Unknown
  Obtained from environmental sample
  DOMAIN (148)...(264): Response regulator receiver domain
  misc_feature (1)..(332): Xaa is any amino acid
MIRSDERPFAAVEKPEKKKILVYEGRAVYAKSVCWTLDNMGVPHTMVSNQDDFAAALYREEWFYVFSGYGLYERIKPLMEKSATAFCGGKKPSLALMIEWGTEAYIPDVRFVSIPVQSLSIANVLNGMADNKGYIKSSGLIRFTFPRARLLVVDDIATNLKVVEGLLAPYLAEVDTCLNGLQAIELVKRNKYDIVFMDHMMPEMDGIEATTTIRALKGERFRTVPIIALTANAVVGMREMFIENGFNDFLSKPIDVTKLDEMLNRWIPKEKREKYADNGHLNFDYDSVSSLSPNNSNRNFPLSHIPGVDTTKGIAMTGGTIARYMQVLSHVR

SEQ ID NO: 82444 - protein, 256 aa, Unknown
  Obtained from environmental sample
  DOMAIN (1)...(231): EAL domain
  misc_feature (1)..(256): Xaa is any amino acid
MNLTSDNIIAYFQPILSADSNYVYAFEVLGRYIDDDGTVNSLGPFFTDPNISHDEALRVHRIVRRYAMKKYSEEKRNEYLFINITLAWLLPYLEKPEDMITLQLAKQFGIPNDRLVIEITEEDFNSNEEYLRAIFHYKKAGCRIALDDYRKEASNIDRLAKLQPDIIKINIDYIHNSEKSYHYRQYVHAIAVFADSIGIEILPESLETERQLDICLSSKGKVLSGRFCFAAHPGGPCLDPCLPTPFCFFPIKSKTR

SEQ ID NO: 82445 - protein, 181 aa, Unknown
  Obtained from environmental sample
  misc_feature (1)..(181): Xaa is any amino acid
DPVFNYRTWLREREDEPESQARLVFCELLHLREDEAIKIWRKNGGINFSMEKYMDREDWMDCSFILAEELDRRGHCYEAFRLLESIIREERRKPYFGIFTPELERYTREIVRQRLRPQVDDETWIECMESLLDLGFSARDTAYWLRSLAQTLHKIGDQAGSQQVLKEAKKMSGKQYTRTLK

SEQ ID NO: 82446 - protein, 315 aa, Unknown
  Obtained from environmental sample
  DOMAIN (169)...(282): Response regulator receiver domain
  misc_feature (1)..(315): Xaa is any amino acid
VDENIPTTLFGDELRIKQILNNLLSNAFKYTSSGKVTLSVVCEAQQEKAAGIMLVFRVIDTGQGMTAEQINKLFDEYTRFNTEANRTTVGTGLGMAITKYLVQMMDGAISVESDPGKGSVFTVKLPQGTVDGAGVLGRELTENLKQFRLGRAEQMKKAPQIIREYMPYGRVLVVDDVETNLYVAKGLLAPYGLSVETVGSGFEAIEKIKNNVVYDIIFMDHFMPEMDGIVTTKKLRELGYTRPVVALTANALAGQAEMFAANGFDDFISKPIDIRLLNAVLNKLIPDKYPTETIEAARRLKDSMGKNSPTAILPL

SEQ ID NO: 82447 - protein, 317 aa, Unknown
  Obtained from environmental sample
  DOMAIN (1)...(277): RNA polymerase Rpb1, domain 5
  misc_feature (1)..(317): Xaa is any amino acid
VNEDDCGTITGISYTAVKEGEDIVEPLSDRIIGRYTIEPVKHPFTGEIIVDVNEEITEEIAKKITAAEVNSVRIRTVLTCEAKHGVCRMCYGRNLATNRTVDIGEAVGTIAAQSIGQPGTQLTMRTFHIGGTATKISEENRIFLKYPVYISDVIGTHVVLDDGRWLFTRRGHAIVSKVMHEYVIEANDQIMVESGQRINPDVTIIRRGSTEIKAPDSTYVQILKGPDGNSDILYLVGKEQKIEIRNGSDLLVKKGTVVEKEKTIATFDPFSDPIIAEFSGKVKYEDIISGTTLKEEMDEVTQNMKSASRPPAINRGG

SEQ ID NO: 82448 - protein, 157 aa, Unknown
  Obtained from environmental sample
  misc_feature (1)..(157): Xaa is any amino acid
SLSRSGAFRTYQGSYVFVQRNERNNFNALQLWKDNFSVELDFPRLAATRIEARLDASISYPDEEYGAFYEALIRAASDTSWTGAKTEDDFWIRKRYSANETEGEQETWEFLVLVTIEKSRFSSQLEKIFESIKPIPPPNKNQIAAINWVKEHFFENF

SEQ ID NO: 82449 - protein, 85 aa, Unknown
  Obtained from environmental sample
  DOMAIN (17)...(84): Uncharacterized BCR, COG1699
  misc_feature (1)..(85): Xaa is any amino acid
VKVLTKAYGTVEVDERQKITFPSGLFGFESLKDYVLLDAEQKPFYWLQSLDEEKTAFVLIDPFLFRPDYEMDMTLGRFCPWGGKW

SEQ ID NO: 82450 - protein, 87 aa, Unknown
  Obtained from environmental sample
  misc_feature (1)..(87): Xaa is any amino acid
GFLATFLPGLSKIVWQDSPGLLFGKSVEGSLACFAATFVSAIWFSQSYFVSLSAAFTAMTVEALPLEDYDNIALPLVVGAVVQLALH

SEQ ID NO: 82451 - protein, 86 aa, Unknown
  Obtained from environmental sample
  misc_feature (1)..(86): Xaa is any amino acid
VRVIDTPGIRRFAIAGLEAEELILYMRECAPLAGKCSFGLSCSHRTEIGCKIMEAVHAGVIHEDRYESFLRIQDEISGRNSYPDTD

SEQ ID NO: 82452 - protein, 185 aa, Unknown
  Obtained from environmental sample
  misc_feature (1)..(185): Xaa is any amino acid
MEAVQTANPPSFESVWAILQEVAESQKEYEQERKKDKAEFNERLGKYINLFGDFTEYMMAPKLREKFKDFGLFFPRTNRNVSVEDENKNILLETDVMLENGDKAMMVEIKTQLTVERIKKHIERLEKMRKHADTHGDKRAFLGAVAGVVIDNDAREYALNQGLYLIEPAGEETYITPPAGKPKEW

SEQ ID NO: 82453 - protein, 70 aa, Unknown
  Obtained from environmental sample
  misc_feature (1)..(70): Xaa is any amino acid
MSTPESRIERGYCASVREQGGEAYKFVSPGCRGVPDRLTLYAIPPKHRAIVAQYVRFVEFKASADLIIGP

SEQ ID NO: 82454 - protein, 267 aa, Unknown
  Obtained from environmental sample
  misc_feature (1)..(267): Xaa is any amino acid
MTKLFIDIETYNETVSLRTSGLYKYAEKAEVLLVGYAIDDAPAKVWCAQSESFPHDLYELVYKQEKDKYQVIAHNAAFERTIFAHQRRDDIYEIWANQRNWHCTMAQALAHGLPGGLQYLSDIFKLSGDKAKDPEGRALVNLFCSPRDGKRATRHTHPVEWQKFKEYCRRDVEAERALYYKLPAWNCRQSELDVINLDYQINSRGFQVDVGLAEAAVAVVKGKSRRATIKCSSFRRPRVFRTQRDKMLEHILNEYGVALPDMTESTL

SEQ ID NO: 82455 - protein, 264 aa, Unknown
  Obtained from environmental sample
  misc_feature (1)..(264): Xaa is any amino acid
TAEYSIASKKGIPVLPLFIDDKAAGKPAKKETDIALIRKLNNLKTKLREGACETWLNTPDLCQKAQTLLAQEFTVNRQPGWIRGDRTIDPRVANELSRLCSENSFLRRHYGREDHEVLAKMQDEKKHILKLLTANKISLSFYYTPGENWENTRHFRYLRIFKLLVPELALGKSTAEISRFLGTVLNPDLDKTVRKDYPTPSNTIKKIMTDFATLKLVSCISGEGGNTGDEIWEITQHGKDIFSAYRITQLEKIMEKKTEEGTSS

SEQ ID NO: 82456 - protein, 269 aa, Unknown
  Obtained from environmental sample
  DOMAIN (4)...(245): Glucose inhibited division protein A
  misc_feature (1)..(269): Xaa is any amino acid
MEGKIFIGEYDAPCGRLGEEAAAGLGKSLRRLGFPVGRLKTGTPARIAEPSIDFSKMEKQDGDEMRPFSFCAQMGAQDIVKNRPSLPCWITYTNSRTHEIIKANIHRSPLFGGKIIGVGARYCPSIEDKVVRFPQRERHHIFIEPEGLSTNEMYMNGASSSLPEDVQRDFIHSIAGLEDAKIVRPAYAVEYDYIDPLDLYPSLESKRLSGFFTAGQTNGSSGYEEAAAHGLMGGINAAMKMLGRPPLVLSAPSVYRCFGDDLRLLEQGS

SEQ ID NO: 82457 - protein, 233 aa, Unknown
  Obtained from environmental sample
  misc_feature (1)..(233): Xaa is any amino acid
VESEYGKGSTFTATIPQTFESEVPIAVVEEPEKKNVLVYEGRAIYAQAVCWSLNNMKIPHTMVTNFDDFKEALYQKEWFYVFSGYGLYEKIKPLLEKSDTAFRGGKKPPLALMIEWGTEAYMHGVRFVSIPVQSLSIANILNGKTDSKGYNESSGIIRYAFPTARLLVVDDIATNLKVAEGLLAPYRVIVDTCLSGLQAIEMVQQHDYDIVFMDQHDAGNGRSAILSWGGGGT

SEQ ID NO: 82458 - protein, 327 aa, Unknown
  Obtained from environmental sample
  misc_feature (1)..(327): Xaa is any amino acid
LRKAETENFSLITAHLKEGMAGLEKGLEELRNASHENISEKLRTFEDEFFTDINKRSNDMNLKIAEWQSVIEGRLSVIGENSVTALRELEQSRTEEMKKNLSALDARLVSELEHLKSETGAFEGGILDQMKAADDSVSSFKEQLDRDLEETRKEAEISIKAEIGNYSITAAETVKKYQRELDDAWNGLSARLRELDENVEEARRRIGDLTAETDNRIASVRVSVEDAERHIREAVDQTKLIDRADMMRLEMERRIEDLKSDIDRLDQRRAEAARIENEFIKIKRIEDEINSQMIKIFSEERRVENMEANFTRFLQISRSVEDSLRKV

SEQ ID NO: 82459 - protein, 341 aa, Unknown
  Obtained from environmental sample
  DOMAIN (20)...(341): Alpha amylase, catalytic domain
  misc_feature (1)..(341): Xaa is any amino acid
PLGAPPRDDGRAFRFALLYETHLKGLTANPNSGVSAPGTYKGVIEKIPYFKDLGVTSLEFLPIQEFNENELNSKNPLTGNKLINYWGYSTLGFFAPKGSYAHDRSPGGQVREFKEMVRELHKAGLEVILDIVFNHTAEGNEWGPTISFRGLDNTIYYMLNENRRYYQNYSGCGNTVNCNHPVVRTFIMDCLRYWVIEMHIDGFRFDLGSILGRDERGNLMENPPVLQRIAEDPVLSSTKIIAEAWDAGGAYQVGWFPGGRWAEWNDRFRDDMRRYWKGDEQQTRHLATRLSGSSDLYLRDGRKPFHSVNFITSHDGFTMKDLVSYDRKHTMKTAENTATAA

SEQ ID NO: 82460 - protein, 68 aa, Unknown
  Obtained from environmental sample
  misc_feature (1)..(68): Xaa is any amino acid
MRRAKLFKNGQSQAVRPPKEFRFNGDRVGLKKVGPAIVPFPLDNPWESLMKPWGDSAPTSWPKETRPI

SEQ ID NO: 82461 - protein, 62 aa, Unknown
  Obtained from environmental sample
  misc_feature (1)..(62): Xaa is any amino acid
MAENTWFDAQERVIANRGSAGIDGMTVEELGDYLIKHYRELCESIRGGWYKPKPVKRVEIPL

SEQ ID NO: 82462 - protein, 161 aa, Unknown
  Obtained from environmental sample
  misc_feature (1)..(161): Xaa is any amino acid
MTEERYYIGMDVHKDSVQMAVFEQTGEEPIYERKLNNDPALLVKEARRFSQKGETEAAYEAGCLGYVIQRAFDKAGIACHVLPANKVAKKRDDRIKTDKRDARLIGRELRSRSIRPISVPEEIDEAARDILRCPGDLSEDLRRAKQRLLKFLVRHGHIYSA

SEQ ID NO: 82463 - protein, 94 aa, Unknown
  Obtained from environmental sample
  misc_feature (1)..(94): Xaa is any amino acid
MNRSIIADLIVSIHFGYVIFVVGGLFVIILSGILRWRFIKNFWFRVIHLAMILLVVFEAIFGISCPLTDWEYDLRIAAGQNATSESFGARLIIH

SEQ ID NO: 82464 - protein, 322 aa, Unknown
  Obtained from environmental sample
  DOMAIN (18)...(240): Queuosine biosynthesis protein
  misc_feature (1)..(322): Xaa is any amino acid
LDADVQECAGVYCLNHVYNLKDYDFVFPAELIAQKTAGKGKTKILHCPKNGGALRVLESCRITDLFKAGDCIVVNNTRVIPARLLGKTKHGGKAEIFLLRQLEPAADNTAMWEAWVKPGKAFENGKEIFVSNIKCKSLGFAKTQDSKTRIINFSISNSEFNSFLEKNGQIPLPPYINRSVCTSDESDYQTIFAKYAGAVAAPTASLHFSEDMANELKTKGVFFAETTLHVGPGTFENISETSDFRRHKMHSEEYELNEHNANIINECKKIAEEYLRRHNEHESFGNRGSEDGFVKAAKGNTNILFIPVLNQGNRCPAPNFHW

SEQ ID NO: 82465 - protein, 265 aa, Unknown
  Obtained from environmental sample
  misc_feature (1)..(265): Xaa is any amino acid
MMFEHDALAEESKAAKETKKNRGINVVIGNPPYSGESANKGNWILSLLDDYKKEPGGIDKLKEKNPKWINDDYVKFIRYAQLYVGRAGSGIVAYINNHSFLDNPTFRGMRWNLLKSFDKIYIIDLHGNAKKKETTPDGNKDENVFDIQQGVSINIFVKNLTTDMELHGREKSFGLTEVYHYDLYGLRDDKYEFLLEKKIKFVEWNEIKPSIPQFFFVEKDFTNQIQYENGFSVEDLFITSSVGIVTARDDFVSNKVSADSDLRFP

SEQ ID NO: 82466 - protein, 85 aa, Unknown
  Obtained from environmental sample
  DOMAIN (2)...(81): Ribosomal L27 protein
  misc_feature (1)..(85): Xaa is any amino acid
MARKRGGSGAKNGRDSNPKYLGVKASGGTLVKAGTIIARQRGTRIHPGTNVGCGRDYTLFAKADGTVKFHQRRGRKLASIVPNNN

SEQ ID NO: 82467 - protein, 203 aa, Unknown
  Obtained from environmental sample
  misc_feature (1)..(203): Xaa is any amino acid
MTRKQASTISIMILAVVALTFLVSRRLWFRLDLTKGKSYTISDVSRNLHNEIPDRVRITYFLSDKLRALYPFPGEIEDLLREYANYSRGKIQFTVRDPAKARLTQEIEQLGILPQQLQTVEQDQASLITVYTGIVIEYLDETQVMPLVFSMETLEYDLTSRIRAMVRGRSRLLGLLFGSIQKLYQEYSFCLTRICRRDTSSGC

SEQ ID NO: 82468 - protein, 279 aa, Unknown
  Obtained from environmental sample
  DOMAIN (35)...(229): CobQ/CobB/MinD/ParA nucleotide binding domain
  misc_feature (1)..(279): Xaa is any amino acid
GRKFAAGFVEGREKNPASLRLLPQKAAWEKPPFRVNMALAFARLGKKVVVMDADLGLANVNVMLNMIPKYNLYHVIKKQKTIHEILVETEYGISIVAGASGFSQIANMSEQERQDFISELDTLSFADIIIIDTGAGVSSNVLDFIAAADDAIIVTTPEPTAITDAYGIIKIIAMEYDPVNIGLKLVVNRAKGAAEAKSVADRMTNIAGQFLNLKLDYLGFIYDDQAVPASVRQQKPFMVIDPKCKASLCIQHLVERMDKNRMLESAGISAMFKKIFNRT

SEQ ID NO: 82469 - protein, 309 aa, Unknown
  Obtained from environmental sample
  DOMAIN (1)...(308): DctM-like transporters
  misc_feature (1)..(309): Xaa is any amino acid
MIIATVIICAFFTSFTGASGVTILALGGILFTALSGASYPERFTIGLLTSAGCIGLLFPPSLPIILAGAASRTNIVHMFLGALIPGCILIVAMIVIGIAASKKVKIPVEPFHLRAAVSSLKESAAEILLPFFLIVGYFSGICSLTEIGAISVIYVFIVEVLIRRDIKFSEFPRVFYKALPIIGGVLCIIASAKALSYAIVDTQAPENFAHWMRGAVESKYLFLLLLNLALLVVGCLMDIFSAILVILPLVSPLGAVYGIDPVHLGIIFIMNLEVGFLTPPVGLNLFWRATVSKAFYGSVPLCASLSAGQ

SEQ ID NO: 82470 - protein, 232 aa, Unknown
  Obtained from environmental sample
  DOMAIN (4)...(232): Isocitrate/isopropylmalate dehydrogenase
  misc_feature (1)..(232): Xaa is any amino acid
MKFNIAVIPGDGIGPEVIDPALEVLDAVEDKYGHIFNYVRLEAGGLAIDHSGEPLPKETLEAAKQCDAVLLGAVGGPKWDNLPGHLRPERALLGLRAGLGVFANLRPAALLPQLKSACPLKDEVLISSSGEGKAAFDLLIVRELTGGLYFGKRGRLEEPSNGHTPGSAFDTETYSWMEIERVLRAGYEAAKVRRKKLCVVDKAKCAWEFVPVSGARSPRCPLPLGRICTKAS

SEQ ID NO: 82471 - protein, 65 aa, Unknown
  Obtained from environmental sample
  misc_feature (1)..(65): Xaa is any amino acid
ARELQEVRFTDYKVRVIDGGAATAAKVRVLITSSDGRQTWTTVGVSEDIIDASRAAPLLILLSTN

SEQ ID NO: 82472 - protein, 288 aa, Unknown
  Obtained from environmental sample
  DOMAIN (1)...(130): DEAD/DEAH box helicase
  misc_feature (1)..(288): Xaa is any amino acid
MMDGVALIVSPLVSLMKDQVNALTRSGLPAAYINSSLTPIQIDKALRNAVNGAYKLIYVAPERLPTPEFMAFAGSVSISMVAVDEAHCISQWGQDFRPSYTRIPDFIAKLSKRPVVSAFTATATPNVRRDILTLLKLRDPKILIAGFDRKNLYFGARKPRNKYDALSAFLKANPERSVIVYCSTRSYVETICKRLRADGHSASRYHAGLPYNERHDNQDDLLHYRAKIMIATNAFGMSIDKSNVSFVIHINIPKDIESYYQEAGRARRDCESAECILLYSDRDITMNA

SEQ ID NO: 82473 - protein, 339 aa, Unknown
  Obtained from environmental sample
  DOMAIN (50)...(232): Anticodon-binding domain
  misc_feature (1)..(339): Xaa is any amino acid
LCPPGYRRVSGVILREVNGELIGNLGNLVNRTLSFVTRYYDGIIPEGKSDGAFWAEAVKFENSITEKLDKAELRDAFREIFELSSFANKYFQDNEPWRLRNDDPDKGKSVIRDLTYIVRDLSVLIEPYMPQAAEKIASFLGLKLRSNLTWKDIGKADGIGNIKIKSEILFNKLEDELIETLRVRFSGSQKERQESDNTQTAVSKPFSSVVDLRVAKIEKIERHPKADKLYIEQLEVGEGVTGTREERTIVSGLVPFYKEEELLGKKIIVAYNLKPAKLRGIESRGMLLAAGDKGGIGPDGQPMERVEVLDAGDCPTGTPLFADGEDVLPAAAEIDIDTF

SEQ ID NO: 82474 - protein, 274 aa, Unknown
  Obtained from environmental sample
  DOMAIN (32)...(97): His Kinase A (phosphoacceptor) domain
  misc_feature (1)..(274): Xaa is any amino acid
MTSSTIAGVIMRDIYTIKLKEALNNAMEASKAKSDFLSNMSHEMRTPLNAITGMTTIGKNAKDMERKDYALGKIENASTHLLGVINDILDMSKIEANMLELSPCEFIFEKMLQKVVSVINFRVDEKRQKLVVRIDKNIPKTLIADDQRLAQVVANLLSNAVKFTPEEGTIILNANFMGEKNGSCTIQVSVSDTGIGITEEQQKRLFSSFQQAESSTTRKYGGTGLGLAISKSIVEMMDGHIWVQSEPAKGSTFTFTVQATRGEESNSADSVHGS

SEQ ID NO: 82475 - protein, 82 aa, Unknown
  Obtained from environmental sample
  misc_feature (1)..(82): Xaa is any amino acid
MSNSVITVQNLTKRYKGAQKPAVDDISFSVGKGEFFAFLGANGAGKTTTISILTTTLSKTSGEVKISGFDNEKEAQEGAGKI

SEQ ID NO: 82476 - protein, 284 aa, Unknown
  Obtained from environmental sample
  misc_feature (1)..(284): Xaa is any amino acid
MLKKENHRRYLDRFAGIEDEVLAFFKVFLELTDKRKSLEASLKSDREREERLEILNYAVDEIGKAAVHAGEIRELENELQKLSDFEKLAGLINTASDNFFDGENSVLSLARRTKNSVDSASAVDASLSEIYRRLENLYYEAEDIAGDFRAYRDNLTFDPRRLEEVNERLALLYKLKKKYVKAETQAGGEEEAILSYMSAAQAEIEALCGAEENREKLKTEIAAIEKDIKAKAQSLRQKRMSAAEKLGQLITGILKNPWNAERRLSGENCPKQQARPSTRGGKKG

SEQ ID NO: 82477 - protein, 185 aa, Unknown
  Obtained from environmental sample
  misc_feature (1)..(185): Xaa is any amino acid
MKIEVYSPTIRRKEMDAVLTAMVEDKIGVGDRNRLLIQTAKEQVKFDYAIALRSPAVALHLALKAALKTQNVQAGQAVVISALSPRYYYQVIEDLQLTPLYCDVSYDFPCMSRETIENAVSQKPSGVEICAVVLHHTLGFQPDSKAIAELGFPLIEDVSHSYGQIIKTNNSEDSADAAADGYASK

SEQ ID NO: 82478 - protein, 158 aa, Unknown
  Obtained from environmental sample
  misc_feature (1)..(158): Xaa is any amino acid
SNALQRIVLTAGKYDLTLQDKMPEIIEKFIKSIEELLQENKIKDMLVNTVSSSFGGIIGGQKNIAEIINISEDEKKELDNFLFDKIMSAADAHIENILSTINIKALVAERIDSLDMLKVERIILDVMADQFKWINIFGGILGFLIGAFQAVFSWGISN

SEQ ID NO: 82479 - protein, 322 aa, Unknown
  Obtained from environmental sample
  DOMAIN (82)...(318): Putative esterase
  misc_feature (1)..(322): Xaa is any amino acid
VVRVGYSEGHMVEMKKQPNGIWTATIDSERAKYFAIFLEVDGVYVLNRMAPIGWSHAHPINIIDFPFEGADYFLLKDVPHGTVARDYYFSKTCGCYKSCLVYTPPDYTLGKWDNLPVLYLQHGYGENETSWVHLGKVNWIMDNLLAEGKAEPCVIVMNNGMVQTEHSDGSRDWDPMTIEKLLLDDCIPYIEKHYRVASDKWRRAMAGLSMGSMQTSVTTLKHPELFGYAGIFSGFLGKIGDPGKVENSHFAILEDKQKMFDSYKLFFRCIGDGDQFIGQFKSEAAMLQEKGLAPDQWKAHKEVIYPGGHDWNVGVLRRDSAD

SEQ ID NO: 82480 - protein, 82 aa, Unknown
  Obtained from environmental sample
  DOMAIN (1)...(75): SpoU rRNA Methylase family
  misc_feature (1)..(82): Xaa is any amino acid
MGDLKEAGFWITGADMEGEPVYAKELSGRTALVIGSEGSGISRVLRERCDGMVGIPSMGRIDSLNVSVAVGVLLYEVRRQRS

SEQ ID NO: 82481 - protein, 208 aa, Unknown
  Obtained from environmental sample
  DOMAIN (43)...(202): Penicillin-binding Protein dimerisation domain
  misc_feature (1)..(208): Xaa is any amino acid
MNSLPKRRFLFAVSALFAAALYILIRYAMRIEPGNSGNADGPKTAIERGPIVDRNGKILAGQVRRYDIYIIPPKERNQNRQNEKIDNLANRLAPVLEMDEEEIRQRISASKKDFVIKKYVTPEAYNIIKTMQEEKGRPLAGVIARPVPFRVYPEQSLASQIIAFVGAEYQGQEGIEYALMTNWPGKRIRKRKQVELTIDATSRTFWKR

SEQ ID NO: 82482 - protein, 327 aa, Unknown
  Obtained from environmental sample
  DOMAIN (47)...(249): Cytochrome C biogenesis protein transmembrane region
  misc_feature (1)..(327): Xaa is any amino acid
VIRLAETGATAHILPFADDTPTTAEPGAASPEPNPSRSGLLVALILFFLGGIGASLTPCVLPMIPITMAVIGARGAGKSRGVLLGVALTQGMALTYTILGVAAALTGAVFGQFAQRPAFLIPVSAIFALFALSLFGAFEIRLPESWTAKLQSSGPRKGFLGAFVMGLILGPLSAPCVGPLIGTALVDIAENHHVFEGALKMFVFAQGMGVLFIIGGTAVSALPKSGDWLIRFKQTLALIVLAFAIWTVRLIVPEWANYTMWSAELLLASGVYGAFEPAARLVSGIRKGFALFALSVAVLLGARAVKLGLDYSCCQGARQPRRKSSMA

SEQ ID NO: 82483 - protein, 330 aa, Unknown
  Obtained from environmental sample
  DOMAIN (76)...(235): Thiamine pyrophosphate enzyme, central domain
  misc_feature (1)..(330): Xaa is any amino acid
VGISAPITKHNFLVKDVRELPVMLKQAFHIARTGRRGPVLVDIPIDISRATLDGYEYPSEVSIRGYKPTFEGHPKQIEKAAAMIANAKKPIIFAGGGVVASGAHEELKKLAEATNIPVTLSFMGLGAFPGGHPLFIGMPGMHGAKCANRALQECDLIISVGVRFDDRVTGFVARFAPNASVIHIDVDPASVSKIVQVDVPVVGDAKNILTTLNKLVKPREADVWNETVKEWRGQKLFTYQDSDTEIKPQAVIEKLYEVTGGNAIICTEVGQHQMWTAHYYRFDKPRTLISSGGLGTMGFGLPAAMGVALACPGRTVVNIAGTSANLTMWN

SEQ ID NO: 82484 - protein, 295 aa, Unknown
  Obtained from environmental sample
  DOMAIN (1)...(118): GTPase of unknown function
  misc_feature (1)..(295): Xaa is any amino acid
VGKSTLFNRLLRKRRTITDPTPGVTRDPVEADALINGKPIRLIDTGGFKLDRIKGNRKAEYSNSIDDMVVERTLAVIEKASLIVLLLEAGEITSEDEEFIKILRCYRERLIVAVNKTEGGRREADAWNLLSYGFEKVFMISAEHGDNIGELTEEIINRIDFSETSAITDAAAIADEEEDNERRPIRITILGKPNTGKSTLSNRLTSSNASIVSDIPGTTRDVIEGSFRWKSRDFTILDTAGIRRRTKVNENIEYYSVNRAIKTIDEADIVILLIDSEEGLSEQDKKITRAEFGTS

SEQ ID NO: 82485 - protein, 91 aa, Unknown
  Obtained from environmental sample
  DOMAIN (9)...(88): Domain of unknown function DUF143
  misc_feature (1)..(91): Xaa is any amino acid
MDDTLQINALGLGKLLADHNGNNVVVMDMRSLNFWTDFFIIATVTSNTHLSGLERHIKDYTRETGMEILHRSKSPITRTVFREWSLLASAA

SEQ ID NO: 82486 - protein, 267 aa, Unknown
  Obtained from environmental sample
  DOMAIN (27)...(184): RNA pseudouridylate synthase
  misc_feature (1)..(267): Xaa is any amino acid
FPPGYGGARREPLPQDIPLNILYEDDHIAVINKPAGLVVHPGRGNANGTVVNALLHRFGINSVSSGSECYRPGIVHRLDKDTSGALIVAKTDAAHVAFAELFMSRAINKVYTGFCVGARPLEHEVIDLPLAASQRERVKRIVNERNGKPAVTEYSLKDFICGIALMEFTLHTGRTHQIRVHCSHRGFPIVGDDLYGGTREAALKIQPMERPFAYSVFKCFKRQALHALSLSFVHPLTQENVKVTAPYPDDFNKALEIFSQHPLPNLR

SEQ ID NO: 82487 - protein, 96 aa, Unknown
  Obtained from environmental sample
  misc_feature (1)..(96): Xaa is any amino acid
LYNIDKLFEAVGAKGHVCVGLDTAAEYVPPTERKRAASDAEAVLAFNKALVDSTFDVCAPVQVQIAYYQEMGLEGLGWYAKTLRYIREKGGWLSAT

SEQ ID NO: 82488 - protein, 274 aa, Unknown
  Obtained from environmental sample
  DOMAIN (177)...(254): Hpt domain
  misc_feature (1)..(274): Xaa is any amino acid
MSYATVLIVDDVVSNLDVARGMLKPYKIGVECVTSGKEAINRVLDGKVHYDAIFMDHMMPGMDGIQTTRIIREEISNEYAKTVPIIALTANALLGNDSLFLENGFQAYLSKPIDIIRLDQILNQWVRDKKKEKELKPQEADSENSIKTRQIKKYVIPGVNTTEALERFDDDDEVYFQVLKSFITYNPKQIETLRTAGEDHDAYRLAAHSLKGSSRNIGAEDLGNQAERLEKSAIHEDWDYINAVNADFIKAAEKLVADIEALLKIGMPYDPEAN

SEQ ID NO: 82489 - protein, 296 aa, Unknown
  Obtained from environmental sample
  misc_feature (1)..(296): Xaa is any amino acid
MPVAAADGAVKIAVLVNLKAGENSRQFIEGCVSEGRALDFTVDSFVSGEDEKRCGEIAKDIALADYDGLIFAYGDVGFSYDILKPIADKGIPVVTFEALPYRDGKSIKGLVTTFQDDYRLARLSIETLLSLTPDSQGSLDKPARIIRVGCEPGITFLDRRAWAFGEFVSRGEIEEAAFVKLDGLENPHGAAWEALAAILPDFPPGTVDGLWVPWDEFACGCAEAIASAERQDIKLTSIGISDDDIHRMLRHPDIWLANAAVDPRLAGTVNMRILAARLAGEDTGDTFSFRPQLVKT

SEQ ID NO: 82490 - protein, 257 aa, Unknown
  Obtained from environmental sample
  misc_feature (1)..(257): Xaa is any amino acid
MRDAFTLFDQIASFSAGSIKSDVIREKLGITGLEKLNALAEACAVNDSPTAFALMDEILTSGVAIEQFVIDLAGFYRSLLLLKNGVTRESLLGYRPSLFSTKALETYDSIRLEQALDILLDCYRNNRYSVSPRFELETAVSKLTWLSKWVSPTELKEAVDDARSVLGIAGNHVSPDTYRTQTSAVSHNGASPTTARGGVNASGSHAAQYQSSTGGNSLVDEFNRMIAKKDNAAVSDAAHGTTSEEEDVPMWDSVRKS

SEQ ID NO: 82491 - protein, 273 aa, Unknown
  Obtained from environmental sample
  DOMAIN (96)...(209): Response regulator receiver domain
  misc_feature (1)..(273): Xaa is any amino acid
LKSIPRFNTEANRTTVGTGLGMAITKYLVKMMNGTISVESEPGKGSVFTVRVPQGTVKGSGVLDKELAENLKQFRLGKAEQMKKAPQIIREYMPYGKVLIVDDVETNLYVAKGLLAPYGLTVETARSGFETIEKIKDGAVYDIIFMDHFMPEMDGIVTTKKIRELGYTRPVVALTANALAGQAEIFAANGFDDFISKPIDIRQLNAALNKLVRDKYPAKIVEESAQYKDNLTKGPARRSTARYTAGNTTGNTAGRTIADSNSTYSASQSSIDP

SEQ ID NO: 82492 - protein, 136 aa, Unknown
  Obtained from environmental sample
  DOMAIN (3)...(128): N-(5'phosphoribosyl)anthranilate (PRA) isomerase
  misc_feature (1)..(136): Xaa is any amino acid
VKIKICGLFREQDIDFVNEAKPDYAGFVFAESKRQVSPAFAAQLRRRLSDEITPVGVFVNAPVADIAALYNDNVIAIAQLHGEENNEYITQLKEESALSGKKPIEVIKTMRINEMPDATIAFQAETDRSRPICHGK

SEQ ID NO: 82493 - protein, 183 aa, Unknown
  Obtained from environmental sample
  DOMAIN (1)...(178): Indole-3-glycerol phosphate synthase
  misc_feature (1)..(183): Xaa is any amino acid
NTRRPEPPRFRSDRAGLFLGSDQYLREIAAAAAIPTLRKDFIIDPYQIYEAKILGAKAVLLICALLDAQTLAEYIKTADELNLSSLVEIHNEAEAEQAVRSGAKIIGINNRDLKNFKVDLAVTARLRSLIPSDILTVAESGIKSPEDIRAISGIGIDAVLIGESLMRAADKKRFLAELKAGEN

SEQ ID NO: 82494 - protein, 82 aa, Unknown
  Obtained from environmental sample
  misc_feature (1)..(82): Xaa is any amino acid
TAPFGLEMRYQMNLELLKKGSIRDIASIVRSLYNRSKVKELPILERKLYDSALRLLVDEASISLKKTKEEIEQMIFSRLELE

SEQ ID NO: 82495 - protein, 198 aa, Unknown
  Obtained from environmental sample
  misc_feature (1)..(198): Xaa is any amino acid
MKITKLDTNHLRNDAHFQFHTEFRDLVVQHNPLTLKIKPQFDGYLPLYNREDDALKKIVKSEFTAKIHEADKARDEIYLGMAETVAATLRHFNPSVRQAAERLKILFDTYGNVANKPLNEETSAIYNILQELKGKYTADVASVGLTEWVAELETRNHTFEALVKERFDETRGKNNRHSDEAGKGTARRRYLANHPGEK

SEQ ID NO: 82496 - protein, 240 aa, Unknown
  Obtained from environmental sample
  misc_feature (1)..(240): Xaa is any amino acid
MQAAQEREMDVSLYAINHWERAIETHSANYPAAEHLLQSVEHIDPVKVIPGQKLDLLWASPECTHHSNARGGRPRSEQGRASAWLILKWLSELYVERAIIENVAEFLSWGPLDAAGKPVKSQKGKTFRAFVASIRSLGYTVDWRVLCAADYGDPTTRKRLFIQAVKGRKKIVWPQITHMDGDANLLGCLPWRPARGIIDWSVPGESIFGRKKPLSEDTIKRIAAGIEKYWGGFAEPFLAV

SEQ ID NO: 82497 - protein, 78 aa, Unknown
  Obtained from environmental sample
  misc_feature (1)..(78): Xaa is any amino acid
LGYFPAYRVDLAILRMSVYTLMYQSEIAPSIVIDEAIGISKEFGTDDSYRFVNGVLDSINHTLLAQAEKGAVLSKNAL

SEQ ID NO: 82498 - protein, 288 aa, Unknown
  Obtained from environmental sample
  DOMAIN (1)...(158): Insulinase (Peptidase family M16)
  misc_feature (1)..(288): Xaa is any amino acid
LENSLPENMAQLALVVNAGSVLEREDQRGLAHFVEHLCFNGTKRFPSNSIIEYFRSLGMRFGGDSNAYTSYDETVYHFDIPVEKTGGVKRIPDKALAVLDDWTYAVTFLNEDVKSESRVVLEELRSRSDAMDRVRKKLLPILFEGSAYADRQPIGLAEIIENATSENVKEFYDRWYTSDNMAIVFAGDFDGKALEAQLAQHFTMPAASKPVNRPRHELPPPKNGNFNVNIITDPELTSTSLYVYYKMNKGAQRGTLASYRESVIDYLIDYMLSFRFDEARSDPQSASN

SEQ ID NO: 82499 - protein, 212 aa, Unknown
  Obtained from environmental sample
  DOMAIN (103)...(176): Sporulation related domain
  misc_feature (1)..(212): Xaa is any amino acid
MEKIIFVSKLRVSPWLIILLFIAGIASAYAQEGSSVILKLIPSQEWIPPAELRINPEYIIPPIEGHPASLAEKREPADSPAPAEIPVVRNSLLFKANLISDLERGKWYVQIGVYERAVHVENAVKRVGTAGPVVIQNVGTDKDPMFRVLLGPFTQSESKTVLRRFKDKGYDAFLRNGNKHLSLKNMLYLKKKFIWGTVYAEKTLRNEWDVGQ

SEQ ID NO: 82500 - protein, 310 aa, Unknown
  Obtained from environmental sample
  DOMAIN (24)...(310): ABC transporter transmembrane region
  misc_feature (1)..(310): Xaa is any amino acid
MNLPWKGGRLALVASAAEDRRFRLFLGCVATMGTVGFSFLNPQIIRFTIDSVIGNSPVNAPASVKVLVERLGGVLYLRHNIWICALFILGAALFSALCNSLRRFTDIELGETVAWRLRNTLYAHIQKLTYDWHVSCQTGDIIQRCTSDVDTIRNFIQNQVSELMRVFFVMVIALLMMFSMDLFMSLMALILIPVIFVFSFLYFRKVSKEFTKADIAEGIMQATAQENYTGVRVVRAFGREFHEMEKFSEKTKIYQDIWIRIGKMLGLFWGAGDFMAGLQLFIIVGAGIWRSVQGQLTPGTFLAFYTYSHW

SEQ ID NO: 82501 - protein, 122 aa, Unknown
  Obtained from environmental sample
  misc_feature (1)..(122): Xaa is any amino acid
MRGYIQTISFLPMILPEIIIGVSLSIFFAGIGIPLSLFTIFVAHTTFNLPFVFLMVMARLDEFDFSIIEAAADLGASEKETLFKVTLPICMPGYYFRASYRYYIIPGRLCNHILCRPVRILP

SEQ ID NO: 82502 - protein, 64 aa, Unknown
  Obtained from environmental sample
  misc_feature (1)..(64): Xaa is any amino acid
MPEQRIVVTIDAHGKINAETHGVKGEVCVSELPELLGEMADLESITKTDEYYQHNELHVQKHTT

SEQ ID NO: 82503 - protein, 124 aa, Unknown
  Obtained from environmental sample
  DOMAIN (73)...(106): Tetratricopeptide repeat
  misc_feature (1)..(124): Xaa is any amino acid
MAIAGASRFPVFILSALLWAAGASAQEVTAPKYQPIGAAKEFFDRGEGLKVRYEWDKAILDYTSAIRADPSYSDAYFGRGVSYYAKSDYGKAIVDFSKAIDLGFKTRLYTATAPGAQKEEDYGL

SEQ ID NO: 82504 - protein, 281 aa, Unknown
  Obtained from environmental sample
  DOMAIN (1)...(275): Aconitase family (aconitate hydratase)
  misc_feature (1)..(281): Xaa is any amino acid
MPYVLTNCHNSLCAVGGTINQDDHVFALSAARKYGGVYVPPHLAVIHSYNREMMAGCGKMILGSDSHTRYGALGTMAVGEGGGELAKQLVGRTYDMVYPQVVGIYLEGEPATGVGPQDIALAIIGAVFKNGYVKNKVMEFTGDGVSKLSVDFRNGIDVMTTETTCWSSIWKTDSQVKTYLEQRGRGDDYRELKPGNAAYYDGFIKVDLSKIEPCIAMPFHPSNVYTIKELQHNAKDILAKVEEDNTDAGFSLKLGFKYHDGGVWADQAIIAGCSGRIYSIS

SEQ ID NO: 82505 - protein, 132 aa, Unknown
  Obtained from environmental sample
  misc_feature (1)..(132): Xaa is any amino acid
GPLAFARKTARKTFHQRQRENRRGLTQLHSAISSAIQRLASAQQTESQQTTAQASLQDAPITAAVGTERQKNLVDAACSAMEEALGLARRNEPLDIIAPLLREAVNSLGEITGEVSTADILEEMFSRFCVGK

SEQ ID NO: 82506 - protein, 119 aa, Unknown
  Obtained from environmental sample
  misc_feature (1)..(119): Xaa is any amino acid
GFSPRLSARLQDFNECRYYVSSLNPDPELFATAVRAHWGIENSLHYVLDVAFREDASRIKTGCAPENWACFRKIALTVARSDKQSTYSMKKRIKQMTWSDEYLEHLLFHSSFASEPAHS

SEQ ID NO: 82507 - protein, 292 aa, Unknown
  Obtained from environmental sample
  DOMAIN (106)...(291): Glutamine amidotransferase class-I
  misc_feature (1)..(292): Xaa is any amino acid
VKALRSLGLQPDVLVCRAEQDVPSNLKEKIALFCSVTPDAVFSARDTDYIYEVPLNLNKEGLDAKVTSLLGLKDAEPDLQAWTDLVGRIRNPKRSVKVAVVGKYVGFKESYKSLEEAINHAGYGLEVQVDIKWVESEKLESAPFSTHLGDCQGILVPSGFGVRGMKGLILAAQYAREKGVPFFGIGLGMQMAAVEFARNVAMLEGADSTEFEESPRHKIIFQYGEIADDEEPRGLMRLGSFPCTIKEGSLASKAYQCSIIGERHRHRYEFTCRSTWTSLKGGDGLHGYEPRQ

SEQ ID NO: 82508 - protein, 224 aa, Unknown
  Obtained from environmental sample
  DOMAIN (3)...(213): Amino acid kinase family
  misc_feature (1)..(224): Xaa is any amino acid
MKKRIVIALGGNALGDNLKEQMEAARITSTAIVDLVEEGHEIVIVHGNGPQVGMIETAFETAAKADKHFPVLPMSVCVALSQGYIGYDLQNTIRMELDHRNMKNQVATIITQVEVDPADKAFENPTKPIGGFHSKEEAEILKDKGVPVMEDAGRGWRQVVASPKPVNIIEADTIKALLAAGQIPIAAGGGGIPVAMKDGQYRGMSAVKTRIFRGQTLGHQPGGG

SEQ ID NO: 82509 - protein, 312 aa, Unknown
  Obtained from environmental sample
  misc_feature (1)..(312): Xaa is any amino acid
MAEVQAVQSVSGSGMADMMQTDGNNIKVVTGSRDGFTDEYTIEGIKDISRNENYNDTVGCSIGSGGGIVKTYKADGKVIGVNVNGGGGGGSFSSGRNSQTAGFIDVNGDGLPDYIEGNAVRSMNLGRQKWKPVLGGYDGIELSKGVSDTLGFSMSLGKTTSPGRTEDNGNYTAPLNVGVSGGINYSATVTQTGSMLIDMNGDGLPDQVAIGAGGKWGVRYNLGNKFQEEVTFDAPGWNLDARQKKNFTMHSDGEIKVGMFGSVPLLGDIINSAGLGALIPGNGETFNPYGAVMDNYLKSLQTNMNISLGLSV

SEQ ID NO: 82510 - protein, 308 aa, Unknown
  Obtained from environmental sample
  DOMAIN (186)...(304): Probable molybdopterin binding domain
  misc_feature (1)..(308): Xaa is any amino acid
MKLLQCRYDSRGTGKNLDRVKSWSLKTETIPLEKGLGRILAEDIYASGDIPGVRRSVVDGYAVHAADTAGAGEAVPVFLKLTGSVSMGKQADFSISRGECAYIPTGGMLPAGADAVVMVEYAEIAGNDAAVYEAAAVGMGMVEAGEDLRNGELLLRRGTLIRPQEAGALAAAGICSFPVFVPLNLFLISTGDELIPPDQIPRMGEIRDINTNALDALALTHGYKVISKRILPDDEAQLEQALREAITSSDVVIVSGGSSQGDKDLTCDIINRAARPGVFTHGLAVKPGKPTILGCDKESKTLRRLAIN

SEQ ID NO: 82511 - protein, 278 aa, Unknown
  Obtained from environmental sample
  DOMAIN (1)...(105): Pyruvate kinase, barrel domain
  misc_feature (1)..(278): Xaa is any amino acid
MVARGDLGVQLPPEEIPLAQKHIINECRWAGKPVITATQMLDSMIHNPRPTRAELTDVANAILDGTDAIMLSGETAQGSYPVEAVKTMDKIASTIEQSEEFRKRMRKLHDECHSEVHNPKENLGVIMSRAGVETARSVNAKAIVTPTRSGNTARILSIFKPDEPILAVTTDERSERIVQLYWGVIPCIRTKVADSDSMILDTMKVVSETGVAGLSDKIVLIAGLPLESPNMINTVRVVIIGTVLARSNGRRFCESCRYTRSRQDNPCHTRPSDHGGGG

SEQ ID NO: 82512 - protein, 85 aa, Unknown
  Obtained from environmental sample
  misc_feature (1)..(85): Xaa is any amino acid
VTQSFDLRPYDADDIERELWQFTTIKERGIELREDDFPRITEVIKNAGDNEALKAARRKAREAAWQYPGEAGKRTFEFMTGIVNG

SEQ ID NO: 82513 - protein, 317 aa, Unknown
  Obtained from environmental sample
  DOMAIN (1)...(132): Uncharacterized BCR, COG1636
  misc_feature (1)..(317): Xaa is any amino acid
LIRSAETIGLELFLRNVGPETGMPGRCLICYRLRLEKTAAFAQEHGFDAFSTSLLISPYQQHETIRQLGEELAAQYGVAFLYRDFRPLFRKGQAAARALGLYMQKYCGCIFSEKERYEKKPTPYSPLPIFQRLALLTGPDVLEKLKQTNVLIFGVGGVGSWCAEALVRSGVGKIGIVDFDTVNASNVNRQVQATSGTIGRSKVEVLRQRLLEINPDCEVSIWAKNFSRESAAEFGIEKADYAIDAIDTFPHKLDLIEFLFTSGVTFFSSMGMALKLDPTRIKTSSIWEIGGCALARLVRQRLRTRGLYRRLLRWCTV

SEQ ID NO: 82514 - protein, 50 aa, Unknown
  Obtained from environmental sample
  misc_feature (1)..(50): Xaa is any amino acid
MTKYVFVTGGVVSGLGKGITAASLGRLLKQRGLKVAAQKLDPYRTSIREP

SEQ ID NO: 82515 - protein, 108 aa, Unknown
  Obtained from environmental sample
  DOMAIN (26)...(107): Peptidase S24-like
  misc_feature (1)..(108): Xaa is any amino acid
MKGIKPVLLAISTALVLKLFFFDFIIAQGHSMEPAIRDGAVLVVSRINYGLQLPTNKYLLRWGEPKMGEVVVFYTPSGELAVKRCAMQAENGMFYPKETQRFRITGEP

SEQ ID NO: 82516 - protein, 281 aa, Unknown
  Obtained from environmental sample
  DOMAIN (163)...(262): Histidine kinase-, DNA gyrase B-, and HSP90-like ATPase
  misc_feature (1)..(281): Xaa is any amino acid
MNDPASEMEGLKLGAIDYIFKPFLGPLLVQRIKTHLSLIEHQMKAMKASQAKGEFLSHMSHEIRSPLNAVIGMITIASGTDDIQKIKHCLERADSATRFLLGLINDILDMSKIEANKLELSYGEFNFEKMLTSIINVTSVRAIEKHQDIVVNINANVPPFIVSDELRLSQVITNLLTNAIKFTPDFGRIVLSAENLDEKHGRPPHAAPAADEITLKIKVEDNGIGISQEQQKKLFTSYSQADSNITKTFGGTRAGSRHFQTHSGTHAGELYGFKSGTGQKA

SEQ ID NO: 82517 - protein, 324 aa, Unknown
  Obtained from environmental sample
  DOMAIN (76)...(324): Alpha amylase, catalytic domain
  misc_feature (1)..(324): Xaa is any amino acid
NFPPGLWPVEWQTGLADYNPIVGNLTLNTIKKFIPKKIGSGFIDTVLDLLNTESEIPEINTAESKPAWWKEAVFYQIYPRSFGKNGTSCVLHGILAKLDYLRALGVDAVWLSPVYDSPNDDNGYDIRDYYKILPEYGTMEDMDTLIAGLHDHGMKLIMDLVVNHTSDEHPWFQSALNDENSPYRDFYIFRKSKDKPPNNWTSFFGGSAWNYYPKQDIWALHLFSKKQMDLNWECPALREEIYKMVRWWLEKGIDGFRLDVINCISKAPGLPDGDPFIGSLLTYTGIERYFYGAKLHEYIKELRAQAFEPYNAFSVGETPGIGIQ

SEQ ID NO: 82518 - protein, 308 aa, Unknown
  Obtained from environmental sample
  misc_feature (1)..(308): Xaa is any amino acid
ILPPGLWPRQNHPAIERLYSDDNRPSEIVRKIFAAVLLNHCRIDKPRDFTADVKTQFDIVCTEWKKQSKKIIDLLNEIENMISENNELLADLAPLMAKYNKIAVPEAEEIQKYFEYLLSLPAESCIEKAESHPIQNQMTAFLGFISAICALNLTKGKPRENTVKEDIKEIRAMFGLFSSLAVSCMQAGLIISLMSLLSELQERYLERKRLEGVLTFNDAANLSKTILLEQHDIRRSEKESFKAIMIDEFQDNNDLQKDLLFLLAEQPEVLNNGIPGAQDLSRGQLFFVGDEKQSVYLFRGANVSVFRK

SEQ ID NO: 82519 - protein, 307 aa, Unknown
  Obtained from environmental sample
  DOMAIN (100)...(297): Pterin binding enzyme
  misc_feature (1)..(307): Xaa is any amino acid
LKGGCVVKNLKKVVFFGGFWGFVLGVGEGGFCGGGGGERGGGGGGGGGGGGGEFVGGGGGGGGGGGGGGGGGGGRPWKPQEFKKRSVEMAEKYMVTLAENLNVINKGVGAGFKDKDPKPVRAMVENIIKSEPDWVDINLGPARKNGEELMPWVVNIVQEVTDLPVVLDTSNIAAIEAGLKVCKKPALINSIMCRPERYNAMLPLVKKYNADYVALMWGPNGMARDANERAELTTELLMAAQALEIPVERAWIDPIITPVNIQQEQLMQNLHFFEMLPHIVDALQPGGATKSTNGCPTLPRDQRGGNR

SEQ ID NO: 82520 - protein, 318 aa, Unknown
  Obtained from environmental sample
  DOMAIN (2)...(103): Anticodon-binding domain
  misc_feature (1)..(318): Xaa is any amino acid
DTDKIEAYGTLYDALKTLMTVAAPFMPFTTDAIWRNLRLEGALSKESDPVSVHLTDFPLPRAERRDKALEFRMATVRRAVSMGRSLRSQYNIKVRQPLRMAELVTRNSDEKNALLEMAEIIREELNVKDVVFRDNEEDLVEYEVKANFRVLGKELGKDMKAAAARIEALNHAEIQGVLEGAALSLDIETGDGNVRTVVITADKLDIRRNEKANLRVINEGTLTVGLDTEITRELSREGDIRDLIRGVQNNRKEMGFSVTDRIRLTVYGSDKLKEAWDNLSGTAAAETLAIETAWAQVKAKLQGSGGRLLSADLIIVKP

SEQ ID NO: 82521 - protein, 225 aa, Unknown
  Obtained from environmental sample
  misc_feature (1)..(225): Xaa is any amino acid
MPWSAKARSLILEQYAPTGTAGQNGLAKAVEALRTAKVSYNGKDASGVTLVSGTPGDMNLAAVLADYQNRQECVERYIEAYRRYCWPVNSVDDYRIAPFHVLATEGKVWHDENHPRHLSVIRDYITAGNDPVFVATNHLTADLNNETSIAEAVDWWLNLTKSGSEGMVVKPLDFIARNKTTLLQPAVKCRGREYLRIIYGPDSPRQPTSTDSRAARADSDPMGKP

SEQ ID NO: 82522 - protein, 259 aa, Unknown
  Obtained from environmental sample
  DOMAIN (18)...(256): Protein of unknown function (DUF990)
  misc_feature (1)..(259): Xaa is any amino acid
MGLKAILEYRLSAWLVAIAQTFTMLFAFIGLDLMFRRFGSLAGWSFEEAALCFGVTCMAFSLSECIARGFDNFSRMVIQGEFDRVLLRPRSTIIQVLGTKTDITRLSKAVLGIAILCAIIPKTEINWDFLKAITLALMVLGGAAVFTGIFILGATVCFFTLEGLEVINIFTDGGKELASYPLPVYGKWIARFFTFIIPFGCMNYLPLLYLTGRTASQGIFLPAWVYMLMPLMGFVFILPCVFVWRLGKARPICHGGVLG

SEQ ID NO: 82523 - protein, 125 aa, Unknown
  Obtained from environmental sample
  misc_feature (1)..(125): Xaa is any amino acid
MEEVLQWGLDFIRQIQTYATPGLTLTMRAITNISSTAVYMAFIPFVYWSIDEKKGLSLAVVLLISAWVNFALKFLLNQPRPFFEAYDPSVGMGSMTMRGFPSGHAQNSLIMWMILASWCLIPQLF

SEQ ID NO: 82524 - protein, 262 aa, Unknown
  Obtained from environmental sample
  DOMAIN (103)...(218): Beta-ketoacyl synthase, C-terminal domain
  misc_feature (1)..(262): Xaa is any amino acid
RGPAFTQVTACASGTDALGQALDVIRAGRCDVVIAGGTEATIVPFAVGGFQMLKALSTKRCNEPTKASRPFDADRDGFVIAEGSGVLILESEEHAKARGAKILAELAGYGASADAYHITAPDPTGTSGANAVKLAIADAGLKPEDIQYYNAHGTSTEINDPTETKMLKMVFGDHAYKMKVSSTKSMHGHCIAGGGGIEAIACILAIRDSFYPPTINLDNPDPECDLDYVANKAQYGEINAAASGSLGFGGHNGVVVFKKYKG

SEQ ID NO: 82525 - protein, 99 aa, Unknown
  Obtained from environmental sample
  DOMAIN (1)...(64): Phosphoribosylglycinamide synthetase, N domain
  misc_feature (1)..(99): Xaa is any amino acid
MANLGKCLPVDVANPKAIAEIAKNEKADFTVIGPEIPLVAGVVDEFKKQGMQIFGPTAAAAQLEGSKAFSKEFMKRHKIPTAAYETFTDYKKQLGHNPG

SEQ ID NO: 82526 - protein, 170 aa, Unknown
  Obtained from environmental sample
  DOMAIN (18)...(158): SpoU rRNA Methylase family
  misc_feature (1)..(170): Xaa is any amino acid
AAAKEESDREVPLYKPKPYAVLVHNVRSAYNVGSIFRTADCFGFSEINLSGYTPGIEHPALKSAARGCETWLKSNRWESPLDCINFYKERNYSIIALETGGESINNFKFPQKFLLVVGNEELGIAKELLTLCEHKISIQMKGRKASLNVSCAFAVAASFSTFSKFTKFPK

SEQ ID NO: 82527 - protein, 190 aa, Unknown
  Obtained from environmental sample
  DOMAIN (52)...(189): Redoxin
  misc_feature (1)..(190): Xaa is any amino acid
YRREIIRAAAFALLASISLTAQSQDSKVYKLAKEGHWGGEPKEKEFSKHAALIGKPMPKLDLSGWVNGQVGSEDMKGKIVVIDFWATWCRPCIAAIPHNIEMAKKYADKGVLVLGICGSGQGEEKMGDVVKTKGVAYPNARPTPATEKAWRVSWYPMYAVVDRNGTLRALGINPDYVEKVVDALLEEQPK

SEQ ID NO: 82528 - protein, 288 aa, Unknown
  Obtained from environmental sample
  DOMAIN (66)...(179): Response regulator receiver domain
  misc_feature (1)..(288): Xaa is any amino acid
MYGKINVKSAVDEGTSITVRLPQKTDGIGISGIIGKEMAENLCQFKLNNSIQSKKAQITREYMPYGQILIVDDVETNLYVAKGLMTPYGLKIDLATSGFEAIDKIKEGNNYDIVFMDHMMPKMDGIEATKQLRKMGYTKSIVALTANALAGHAEMFLKNGFDDFISKPIDIRQLNTTLNKLIRDKQPPEIIEAAQKEKAEMDKKQDPGQGFQQADSQLAKIFARDAERAIDVIQNSIRNDLNDEQDIQMYIINIHAMNSALANIGEKELSHTASRLEQAGREKDINVL

SEQ ID NO: 82529 - protein, 306 aa, Unknown
  Obtained from environmental sample
  DOMAIN (19)...(96): Helicase conserved C-terminal domain
  misc_feature (1)..(306): Xaa is any amino acid
VFFLHNRIETLKETRHKIERLVPEMLVETAHGQMEAYELEDIMRRFIHGGFHVLVSTTIIENGIDIPNVNTIIIDRADKYGVSQLYQLRGRVGRSDRTAYAYLFYPESKSLSEIAMKRLQTISDFTELGSGFKIAMKDMEIRGAGNLLGKEQSGDIYSVGFDLYVKLLDEAVKRLEDSSYEAETETLMELEYSGFIPDSYIDSPQRKMEIYKMIASVREKDELDRVYGELNDRFGPLPDEAASLLALAEIRIICRELAVCSIKERDGIVHIEFAKVARIKVDTLVRMMKESQGKLNCPPRHIRGLS

SEQ ID NO: 82530 - protein, 322 aa, Unknown
  Obtained from environmental sample
  DOMAIN (189)...(322): Protein of unknown function (DUF1538)
  misc_feature (1)..(322): Xaa is any amino acid
CRGALFFSRNGTEGESGLYRRRRKRAFSIAEKAVYSGDLSEYQLKVFFPDHKLGEGLQADEPSLFAPNAFLKYAKSALLAVLPLALVLIISIGLIARDRIFNADIVALGILFAAIGMFALNLGMTGGITVLSSQAGNSLKQAYTDTLYENKTVTLSGVNENSIITVAGENGPETYIWVQGKKGPTLEKFFSHRLVGDRYTHIPIKDALSSELGIIGAYFVILIIVFFLGFFAIFAEPGLAVTAVTVEEMTTGTFKRSKLIMIAAMGVGGGMVIGFARVLFSNMLPAGGIHLSWILAPCYAIALILTIFAPEDFSSIAWDVAG

SEQ ID NO: 82531 - protein, 239 aa, Unknown
  Obtained from environmental sample
  DOMAIN (1)...(220): Dihydroorotate dehydrogenase
  misc_feature (1)..(239): Xaa is any amino acid
MMNSIGLENPGIPAFIETELPRLRELGPVIIANLSGSTVSEYVQGARLLGDTDVDMVELNISCPNVKSGGMTFGLEPETAASLTRQVRKAVSKKPLMVKLSPNAPDIAAVAQACVNVGADALSLVNTFKAMAIDINTRKPVFENISAGLSGPCIKPIALRMVWELYEAVKVPIIGIGGIACAADALEYLLAGAAAIQVGSATFAHPPTMNEITAGIKAYMKEREFTKIAADSADLSWGP

SEQ ID NO: 82532 - protein, 300 aa, Unknown
  Obtained from environmental sample
  DOMAIN (96)...(149): Ferrous iron transport protein B C terminus
  misc_feature (1)..(300): Xaa is any amino acid
VLFFFLSLLEDSGYMARVAFVMDKPLRKIGLSGRSFVPMLMGFGCSVPAIMATRTLASERDKKMTILLTPFMSCSAKVPIYAIFAAAFFPKHSALVMSSLYLLGILFGVLTGFIMEKTIFKGEPIPFVMELPNYRFPSAKTVLLLCWDKAKDFIQRAFTIIFMATVVIWFLQSFDIRLNYVQGGEGSILALIGRLISGIFVPLGFSDWRISTALITGFTAKEAVISTLAVLTGADAAELGNTLHNLFSPLSAFSFLVFTLLYTPCVAAIATVKREYGSVKGLIFIILYQTAHAWLAAICV

SEQ ID NO: 82533 - protein, 128 aa, Unknown
  Obtained from environmental sample
  DOMAIN (57)...(112): Phage derived protein Gp49-like (DUF891)
  misc_feature (1)..(128): Xaa is any amino acid
MDLEWKVIYYSEQDGSKPVEKYIDNLTTREQAKTLAFIGLLEENGPNLPRPYADILDDGIHELRIKLSGTQVRILYFFCYQNIIVLINVFDKHSDKVPKEQINLAKKNRSDFFDRFSEKDIKEIYYDF

SEQ ID NO: 82534 - protein, 263 aa, Unknown
  Obtained from environmental sample
  misc_feature (1)..(263): Xaa is any amino acid
MDTNFTDKVLNFFTKVICPVPRASHQEDLIADNLEEFAAVRGLTSFRDDNNNVIVFKPGTGKYAGTSTPVILQAHTDMICVPASADFSFGVEAYYSAENRLTGRSAVTGEKTSLGADDGIGVAAAMAVLDGGDEIVHPPLVAVFTAEEECGLTGARDISADDILGIAPGLDFGRAAFINLDDGRFGQFSVGCAGSANVTVKVPVERTGIAPPPDAFCFEFAVCGLAGGHSGLSIHEKRANANILLWKSINTLCLKDIELQILG

SEQ ID NO: 82535 - protein, 140 aa, Unknown
  Obtained from environmental sample
  misc_feature (1)..(140): Xaa is any amino acid
VYPLVIAEKRRRYTKNMATYTEMEDFINIGEYKSGSNPVVDEAIAKHVPIEEFLVQEVDEPSSLEDTLTAMSEIAGIQIPTEEMKDNNAKLVSAARPAQVKKEKQQAQKTTSAQDTSSALNSVAALFSSMPGIGGLGISK

SEQ ID NO: 82536 - protein, 132 aa, Unknown
  Obtained from environmental sample
  DOMAIN (2)...(114): Response regulator receiver domain
  misc_feature (1)..(132): Xaa is any amino acid
MENALIISNSEKDTALYTGFLNAASIHQVTSAQSCDSARRLILKQDFDLIIVDSSPEDESGENFSRYTASKGVSQVILLVNSEVFNSVTAACEEDGVLTISKPLNRELFWAALSLAKSVKALGGICPWGGKG

SEQ ID NO: 82537 - protein, 63 aa, Unknown
  Obtained from environmental sample
  misc_feature (1)..(63): Xaa is any amino acid
MDSLASAQVIKEVATAKDLKEIAPYIGEFAKYFDMDAEQLLKDRYYVLKPNARNPYKQLYTAN

SEQ ID NO: 82538 - protein, 277 aa, Unknown
  Obtained from environmental sample
  DOMAIN (1)...(237): Poxvirus D5 protein-like
  misc_feature (1)..(277): Xaa is any amino acid
MFILYGTGANGKSTFLNTIMYLLGDYATATPTETFMKKSGDNYSNDVARLRGTRFVTTTEVEQGRRMSEPLIKKITGNDEMTARFLYGEFFNFKPTFKIFMATNHKPVIKGTDHGIWRRIKLIPFTQRIPEEKQDKHLELKLREEASGILNWLLEGMAIWRQERLKTPKAVLFATDEYRGEMDVIGNFIKEKCDQKKEMTITIKKLYKAYSDWCEEHNEHPVSERFFTLRLKEMGFEQSRNSTERFWGGGGLVEMSKRDFYSPMIKNYQNHIISILN

SEQ ID NO: 82539 - protein, 222 aa, Unknown
  Obtained from environmental sample
  DOMAIN (29)...(112): Glycosyltransferase sugar-binding region containing DXD motif
  misc_feature (1)..(222): Xaa is any amino acid
MDEIKIPKTIHYCWLSGEKMPADAVTCMDSWKAHMPEYRLVLWDTNKFDVDSHPFVKEACTAKKWAFASDYIRLYALYTEGGVYFDTDVFVKTSFDRFLCDSFFTGVEYHAGPAKRGRRLLNEDGTLKNPHSGEIFSHGIQIQAAIMGGVSGHPFPKACMDWYDDQHFSLGAWTSSDKLISPYIYAHVALKYGFRYKNELQRLSCGMTVYPNTIFAGNQTQS

SEQ ID NO: 82540 - protein, 69 aa, Unknown
  Obtained from environmental sample
  misc_feature (1)..(69): Xaa is any amino acid
MDNASFHGKKELRKKDRGKARLLFLPPYSPDYNPIEKTRANMKRFIRNNLKNFQSVVSGIYNYFGFIDK

SEQ ID NO: 82541 - protein, 90 aa, Unknown
  Obtained from environmental sample
  misc_feature (1)..(90): Xaa is any amino acid
MLSEKGKKEIKIAVSGKSGCGNTTVSRLLADALDVRFINFTFRNLAQEKHLSLKEVLELAAKDDSWDRQVDTRQTEMAREQAGCVLGSSL

SEQ ID NO: 82542 - protein, 154 aa, Unknown
  Obtained from environmental sample
  DOMAIN (73)...(153): Response regulator receiver domain
  misc_feature (1)..(154): Xaa is any amino acid
MAESGKTLVKETDDLIQTSKETVQGMNEVLSGINQISNSMVHVKEMSEENNKNFEALKDETNKFVDSMGNEKKKILVVDDEPTVHVMVKGVLGDIYDVITASSGKDALGLFYQGLLPNLVLLDLVMPGMDGWDAYTRIKGLTGCTTRPILTLKG

SEQ ID NO: 82543 - protein, 332 aa, Unknown
  Obtained from environmental sample
  DOMAIN (134)...(315): Bacterial conjugation TrbI-like protein
  misc_feature (1)..(332): Xaa is any amino acid
GYTTPGKQIGWIKPEAGHYMFHRFSDKNCDSPTGEYDQKIGMISDLKDPSKKIGSDAEHIGGRGGGMNLTMPTLSNQPPPKQVYRAVQLDNPPLPASGATHVFTAPPPQSSQSPSSLGTQATLSSVPYDRTFVLRHFKPIPATIVNEIRAVENAGILPVMATVDRHVYSDNGRTIIVPAGTLMLGNVKGNLPGPYKTIGRIEIEWYRFIRPDGVEFNFTAEDNRPFSGDSQGRIGVPGYGSSDYLEQMVLPMLTAIVPAVTNLIAPVSDKIVNQIDLDRNVIVQSGQMRSSEMAKQQMIQSWNKVTEKLFMDMRTIPSRRLLLGHLIMGGGG

SEQ ID NO: 82544 - protein, 285 aa, Unknown
  Obtained from environmental sample
  DOMAIN (2)...(114): Response regulator receiver domain
  misc_feature (1)..(285): Xaa is any amino acid
MPSILIIDDEPGIRVTLASILEDEKYKVFTSEDALAGIETLKREIIDLVFLDVLLPKMGGIKALEIIRQEWPVTEIVMISGHANIEMSVSAVKLGAFDFLEKPLSLDKVLTVCRNALAIKKLREENKTLKKIYDLKSEDIIGTSAAIRNIRETAKQAAASDARILITGENGSGKEVIARVVHLCSSRADSPFVDVNCAAIPEALIESELFGHEKGAFTDAVSTRKGRFELAHGGTLFLDEIGDMSLSAQAKVLRVIQEQKIERVGGEKTIETDVASANLTLNVKF

SEQ ID NO: 82545 - protein, 318 aa, Unknown
  Obtained from environmental sample
  misc_feature (1)..(318): Xaa is any amino acid
MRQSAIAAFKRTKEEHSRSVAVPMADLGMMRVFYRSGDFSAVESQFEELNALGVPDSIKYHAYYIMGQTHIQRGDYQAARQLFTMIPENHPDYVFAYHAAAVANAMAENFQGAIADLEFVIQIKPKNKAQEEAINRSYVFLGFLYYEDLNTEGALARAVTALRKVPKNSYYYQDALLGLGWTALKARQWPDCLSAGKELASTATDPVLQSEGSLLQAYAYAMQKNYAQAVSLLDEASKKLGSYTGPNESDLAANRSEYENVRSEYETMGVRIDELGQARQSSVVQTSIDSLPASQSKGKAAIDQHFQFEDEFQRKSFF

SEQ ID NO: 82546 - protein, 334 aa, Unknown
  Obtained from environmental sample
  DOMAIN (1)...(316): tRNA synthetases class I (R)
  misc_feature (1)..(334): Xaa is any amino acid
KPLHFGHLRNMPIDESVARILTFCGCEVFIASINNDRGVHICKSMLAYKRCGNEATPKSAGVKSDRFVGDYYVMFNDKSNADPSWGEDAQKMLKEWEDGEPGTVELWKKMNKWALDGFRETYKLFGISFDKEYYESDIYKNGKEVVAEGLSKGIFYKREDGAAVVDLEEEKLGAKVLLRPDGTSVYIVQDLYLALLKDKEFKYDKSFYVVGNEQDRHFAVLIAVFKKLGYDVAGKMKHLSYGMVELPEGKMKSREGTVVDADDLILETKELAKREVAERYEVAEAEAEGRSLRIALAAVKYQLLKIDIAKNMVFDPKKAISSKGHLGRSDPSIL

SEQ ID NO: 82547 - protein, 326 aa, Unknown
  Obtained from environmental sample
  misc_feature (1)..(326): Xaa is any amino acid
NGANDCDYTKFYDVFIQDLLSDRSFSTQASVPCVVYLNGEYWGPYNFQERHSDNHTEYKYGVKKENVISVDNGELDDGNPGEDSFFWKMVGMADNDMSVPANYNAFCALVDIDNFIDYWASQIYIYNEDWPQNNFRIWRTRSAESGSPYGDTKWRWQMFDTEFAMGIYSGGGLTDNEENKDAFAKILSGKNKDHYNNKLFKSLLASPEFNKKFVNTMMDLYNANFHPDNYLPKLNSYETVYRPLMKGYYDRWGYPGDNGNWTSVYQNKADDAKRYLKDIRDAMVYHYLPTYFSGIGISADNLRDVTVSVTGVSGAAIKVTQNSRPI

SEQ ID NO: 82548 - protein, 249 aa, Unknown
  Obtained from environmental sample
  misc_feature (1)..(249): Xaa is any amino acid
MAKTTDQDRALYHEKAKIYVAMTKALLDTEKKLLVEAKKNTPNSPIQKLALADEMLNLASYYIAINGLSQAVLKSKNEEALNDARKSLYKAVIYLEEVVSNYIDAPFSDYAEKLTAIESYNQDQRYHLICKMGFAIDMLEQAYGDNSKWRWTFVDLEGRFAVTAKNILDLKNIYENMAPGAEYYDSTVYHLRLVKKLISQAADRYREKYELSTGQVLDFKTGNNFSWRVTPSAHCFIRERRSHEIKRNW

SEQ ID NO: 82549 - protein, 344 aa, Unknown
  Obtained from environmental sample
  DOMAIN (250)...(338): Histidine kinase-, DNA gyrase B-, and HSP90-like ATPase
  misc_feature (1)..(344): Xaa is any amino acid
GFPPRLWPAHKNLRKRYGFLLNNKLDIIAHPASYSINDQVSNIENGLTNILPDLAEGKNIYSYKMKNYMYEDTVVFIKGINHGWRLGIVIPVKEYYANIIKTAVFLIVGGIVLALLLCIMLYNIYSAKTEADKKTRQKSNFLATMSHEIRTPLNAILGLTEIQMQNSSHPPATSEAFSKINNSGNLLLNIINDILDLSKIETGDLMLNLVKYEVASLVNDVAQLNHIRYEGIPVEFNVNVDENTPTELVGDELRIKQILNNLLSNAFKYTEKGTVTLTVGADCVSRAGTVLVTLIFQVIDTGQGMTQKQVNNLFNEYTHFDTGANRTIEAHVLELPLRRIQLTL

SEQ ID NO: 82550 - protein, 306 aa, Unknown
  Obtained from environmental sample
  DOMAIN (135)...(281): ATPase family associated with various cellular activities (AAA)
  misc_feature (1)..(306): Xaa is any amino acid
KDGGRSLGKCFPAGDMDLVITDLRMPGLAGEELMKRILAQAPGFPVIMLTGHGSVETAVNAMRDGAWDFLTKPVDMDHLSLIIKRALENRELVFKHRQMTEEIERRKQFKSIIGNSRNIRDVFDTMNKAAPTKASILITGESGVGKELVADAIHELSPRKDFPLVKVHCAALSSTLLESELFGHEKGAFTGAISQRHGRFELASGGTLFLDEIGEIDQNIQIKLLRVLQEKKFERVGGEKTVEVDVRIVAATNKDLKAEIEKGNFREDLYFRLNVVNILVPPLRERKDDIPLWRLLLKEFSANLTW

SEQ ID NO: 82551 - protein, 282 aa, Unknown
  Obtained from environmental sample
  DOMAIN (9)...(152): GAF domain
  misc_feature (1)..(282): Xaa is any amino acid
MFLSQREDTFEETMTAGVREIADLFDLDRLSIWRNLKRPDAMHASQIYRWDRNAGGTTVPTAGLEDVAYTKLAPRWETLFAKGEIINSPINLLPEAAMLRSFGVVSAFIAPIFFNNDLWGFALLEDRRKERFFEKDCAEMMLSAVLLCANTVMRADMEREIINANEFTRAVIDASPLGFNIFDENARIIECNDVILKIFGTTKEYYLEHFYEFSPEYQNDGAKSKDKAVEVVRRALNGENLVLEWTNCTSTGEPVSFEITLVRVMHKAKVVVVVYKYDLRKN

SEQ ID NO: 82552 - protein, 104 aa, Unknown
  Obtained from environmental sample
  DOMAIN (3)...(78): ABC transporter
  misc_feature (1)..(104): Xaa is any amino acid
MMAGIVGRSKQRIAIARAVLCRASVLILDEATASVDVHTEEQIQQAINDIAGSRTIVTIAHRLSTIRNADVIYVFEKGRIIQSGSHAELIEREGLYRSLCHTGK

SEQ ID NO: 82553 - protein, 202 aa, Unknown
  Obtained from environmental sample
  misc_feature (1)..(202): Xaa is any amino acid
MNSVLKILLDNIDSPVSRFIFPTDTAASRWADYLLRVKGGSAAMNKFIAWDVFKQDSIKSKVKNKKSVPSVLRKIFVSRLINENAESYEKGTPVFISLIRAQWAKQAAHFTPWLTGILPQLGVWFKKSAGLPIETILSENAEAAAQNFEGDDRDLFVLAFRYAQFLEKYGLFEPAWETPPFNDDGKEYFLFFPQSLSDYGEY

SEQ ID NO: 82554 - protein, 79 aa, Unknown
  Obtained from environmental sample
  misc_feature (1)..(79): Xaa is any amino acid
MGPNITSTQTRLLRATWLPTILLLSGRTRIAAPPYWIAFAPGRWGTPDDLAGAAVFLASPAASYINGYTLAVDGGWLAR

SEQ ID NO: 82555 - protein, 81 aa, Unknown
  Obtained from environmental sample
  misc_feature (1)..(81): Xaa is any amino acid
MLLTIPFPSWLKPEVIPGLPVRWYGVMYAVAFAVAFLLYRRQVKERNFPMTEDELSGLFTWGILAWCGRAPSAIIPGGGKG

SEQ ID NO: 82556 - protein, 287 aa, Unknown
  Obtained from environmental sample
  DOMAIN (113)...(280): DNA methylase
  misc_feature (1)..(287): Xaa is any amino acid
MEKFSSKYKLNEEQLNQLKQIVPEAFKDNELDFNSLYEALSDFTEKEEDDIEQFGLSWPGKRAAKRAAAIPPVGTLVPVPGEGIDEENTRNIYIEGDNLEVLKIIKKAYQGKIKMIYIDPPYNTGDDFIYPDDFSESVESYQKQTGQVDKDGVKMTTNNRSDGRFHSKWCSMIYPRLRLARELLREDGVIFISIDDNEVAQLRKICDEIFGENNFEGHIHWRRRHNQPNDKTKMIAIVAEHIIAYAKNSKDLRIAGVGKIDLTGDFSNPDHDTRGDGASNHGKWVRS

SEQ ID NO: 82557 - protein, 114 aa, Unknown
  Obtained from environmental sample
  misc_feature (1)..(114): Xaa is any amino acid
RNNPRCHEILRGRSSISRRTGRGRDYFLSLPETPAGELKNAKALAYKRPLFEFSGACGGCGETPYVKLMSQLVGDRALIGNATGCTSIYGGNLPHYPLLQAGGRARAGVVKQPL

SEQ ID NO: 82558 - protein, 152 aa, Unknown
  Obtained from environmental sample
  misc_feature (1)..(152): Xaa is any amino acid
MEAVKTARHPQDAAPPSFESVWAILQENAQGMKELRESQKQLTESQKQLTESQKATDRQIQRTDSELGKLSKRMGEVVEYMVAPNLCEKFREFGLNFSQSSQNADVTDKDNKIFLEIDVKLENYRKAMLVEVKTTPTTEDVKDHIKRPEKMR

SEQ ID NO: 82559 - protein, 223 aa, Unknown
  Obtained from environmental sample
  misc_feature (1)..(223): Xaa is any amino acid
MSNRCTLSLVLNGHVPFTRHPDIQNPSQELWLFESISETYIPLLEVFDRLDRDLVPFRMAISFSPVLCHMLADEFLLRRYNEYTDKQIAFGEQELRETADDPALNSLVKLYYDRANERKAFFTEKCENNILKKFDYYQKKGRIEILATAATSAFLPFYTGYPEAVQAQFEVAISSYKTNFGRFPQGFWLPELGWKAELDFWLRAYNFGYTIGTRTLWLLGRSV

SEQ ID NO: 82560 - protein, 65 aa, Unknown
  Obtained from environmental sample
  misc_feature (1)..(65): Xaa is any amino acid
KRGQIGRGRIEAARVGQAGKGFMVVAENMTKSVESVRKLTVEIDAVNKTLQEVSAAMVSVLELLK

SEQ ID NO: 82561 - protein, 222 aa, Unknown
  Obtained from environmental sample
  DOMAIN (10)...(209): DAHP synthetase I family
  misc_feature (1)..(222): Xaa is any amino acid
MSPWPEGFGTFLGPKFRFPNQGGSPVLDGRSHGGLGQLPLWPLATGGRFADTSLPFAAQTDLLLAAAAPGKAINIKKGQFLAPWDMRHAVEKVKSVPQAGPVWVTERGASFGYGNLVVDFQSFPHLRKTGCPVVFDATHSVQKPGSLGDATGGAREMIPTLARAAATCADGFFFEVHEEPERALSDGPNVFRLSEFGQLLDDLLSIWRTARPVVMREAQGKG

SEQ ID NO: 82562 - protein, 327 aa, Unknown
  Obtained from environmental sample
  DOMAIN (241)...(327): DnaJ C terminal region
  misc_feature (1)..(327): Xaa is any amino acid
VLEHLGGYKGALGDGLKKGFRKLGGKYHPDKNPGDRSAVEKFREATEAYEVVKDPQKRAQYDKFGHAAFESPQGGGAGYDGGYGGGSFDLSDALRAFMNDFGGDSVFGDLFGFGSRTRRGGGHGGTRGNDLQVKLGLTLEEISAGVKKTIKVRRLDRCSECGGSGSKTGKRITCAKCGGSGRVRHITNSFFGQMVQETDCPICRGDGQTVSDPCAACGGSGLRQSESTVSVDIPPGVEEGNYIRVPGRGDAGRGGGESGDLIVVLHEKPHDVFTRHGIDLSCKLDITFSEAALGCSKTIKTLEDKVSLKIPGGTQSEKVSNKIQARR

SEQ ID NO: 82563 - protein, 234 aa, Unknown
  Obtained from environmental sample
  DOMAIN (33)...(187): DHH family
  misc_feature (1)..(234): Xaa is any amino acid
VAQLLQTIMLRQFSHINQPPFKEISLPAEFIEKLAKHSRFLLTPHESPDADAIGSSLGLAWHLRGLGKEFRIVVSPKLPHFLKFLDTQSWIEVYSPNEHGSIASWPDCWVMLDASELGRLGPLKKAFSESAATKACIDHHLFGSMDLFDFFVSKPAASSTCELIAEALAPKDPMCAEMASAIYAGIVDDTGSFKFPSTTPQVHRLAAALIEMGARPDDINHGLYCQASESKIRI

SEQ ID NO: 82564 - protein, 221 aa, Unknown
  Obtained from environmental sample
  DOMAIN (33)...(212): ABC transporter
  misc_feature (1)..(221): Xaa is any amino acid
MSNAAITVQNLTKRYKGAEKPAVDDISFSVGEGEFFAFLGPNGAGKTTTISILTTTLSKTSGELRIAGFDADTQARQVREEIGIIFQQPSLDQNLSAEENIRFHACLYGMCAYRPSFKLMPAAYRKKVLELADMVGLGDVLGKPVKKLSGGMQRKLEIIRSLIHTPRVLFLDEPTQGLDAVSRRGLWDYINTVRRQYGTTVFLPPTISRSETRPSDQPGKM

SEQ ID NO: 82565 - protein, 232 aa, Unknown
  Obtained from environmental sample
  misc_feature (1)..(232): Xaa is any amino acid
MTRKKLSQDEIRREAIALQDMGHKRLAIEAGEDPVNNPIEYITESMKTIYSIRHKNGAIRRLNVNIAATTVEDYKLLKEAEIGTYILFQETYNKEKYKELHPSGPKSDYDWHTEAMDRAMQGGIDDVGLGVLFGLGQYLYEFIAILMHAEHLEAAHGVGPHTISVPRIRAADGINTGSFQNGIDDDTFARIVACIRISVPYTGIIVSTGKVKNAEKKFRDWSFPNQRRFPHQ

SEQ ID NO: 82566 - protein, 67 aa, Unknown
  Obtained from environmental sample
  misc_feature (1)..(67): Xaa is any amino acid
MVRLAEGCLAVEMECAELYTLAAKYEREALCIVTISDSFITGEATSSEERQTTFTSMMETALETAVS

SEQ ID NO: 82567 - protein, 195 aa, Unknown
  Obtained from environmental sample
  misc_feature (1)..(195): Xaa is any amino acid
MKIKETLKEQRQKKGLLIAAHRGTYGGDIMFNTIAAYENALRHKADIIELDAAMTTDGVFYCFHDGKEILVLGTDRNIRTMTSSYVDEQYMRNPSLGITSEKVNRLEDALEYLRGRCLINVDRAWFYWKEIITLIKRMGMEEQVILKSPPKAEDLALLEAMAPDMGYMPILNNREGAELTARYKIHYCMAELVFR

SEQ ID NO: 82568 - protein, 270 aa, Unknown
  Obtained from environmental sample
  misc_feature (1)..(270): Xaa is any amino acid
MYGYAGGTDPAVKVTVKINGGDKVEADVDPVSGFYTIPLTVEHLVEGNNTVVVYSDFGGYGTIQSRAQTLVYAPNGPWVTIDSFKFGDFAYERPYVSGRYGYNLSAEDQELLAAKETDKEIKDAIRKKIPSFVEISFDNGKTFIKTSKALAKNVDYRYRLETGDMYEGIHYILLRATMANGETALTRMLVQVDKTPPVIRLISPEAGGVYNQELFYSASASDDVELVRLTYHLRKGDKAAYEIPGFLPGMYLERIIPPLIKQFIWADAPD

SEQ ID NO: 82569 - protein, 252 aa, Unknown
  Obtained from environmental sample
  DOMAIN (1)...(233): Transposase DDE domain
  misc_feature (1)..(252): Xaa is any amino acid
MDNSKTKKEGVSYTYKKFEGYHPIFAYIGKEGYMIDNELRPGSQRCQEGTPEFIRLLLERLPDNLSGLPLLFRLDSGNDSIDTIKAIFNDTNVKNRFLILKRNIRREKGEDWLKYAQEHGKAKQVKTGKSVWTGHAYDIYPDGFNKIHCVYEITERTIDENGNPLLIHDIEVNTWWTNLSYVAETIIGLYHDHGTSEQYHSELKHDMDIERLPSGKFNVNELYLMIGMNAYNVLRFIGESATRPSDHGGGKG

SEQ ID NO: 82570 - protein, 50 aa, Unknown
  Obtained from environmental sample
  misc_feature (1)..(50): Xaa is any amino acid
MFNVNPVSCTTMVVGGKPKRQRYRKGYTATWKKAIVRLSKDEKIPLFEGV

SEQ ID NO: 82571 - protein, 125 aa, Unknown
  Obtained from environmental sample
  misc_feature (1)..(125): Xaa is any amino acid
MQGKKHYEEKFFVNFRLSERIQEDNFYKRLKNALDLEYLRPLTAKYYGKEGQKSIDPVVFFKLMLVGYLENICLDRKIIEQSSLRMDVLYFLGYDIDEPLPWHSTLSRTCKFVGEEVFLGFFETY

SEQ ID NO: 82572 - protein, 280 aa, Unknown
  Obtained from environmental sample
  misc_feature (1)..(280): Xaa is any amino acid
MPAILNLIWLLPILAVFASLLIPRQQNLALKMFHATCALANVVLCVFFVIKIYGLALSSQAPIGNALQLQYLTDVSWFPVLNIRFIIGADALSILMCFLASIIVFTGILMSWEVERPKEFFAMIQILGAGVMGVFLSFDLFLFMIFYEVEALAMYLMIAGWGTGRKDYCGKKLTLTLALGSAFALIVVIAMYFEGGIGSWDIRKLADVAFSEKFQMWAFPLLFIGFAISGSLFPFHNWSPDGHSAALHAVSMFAAGVMMKMGTYGCLREAMYFAARMRSF

SEQ ID NO: 82573 - protein, 326 aa, Unknown
  Obtained from environmental sample
  misc_feature (1)..(326): Xaa is any amino acid
MGGGRGQEEQEKKEREKREAEKRERERIEKEKREADKKEQKRLEKARKEAEKNEQERLKREKKEQEKRDKEKKAQEKRAGGTAASAPAPAPAAEAPAQTEPQPEPVKPAVPAGAKKQPEPAKPAAPAEAKKQPEPVKPETPVKTAPADDDDDALTAPAKPDGSAKGDGLTKPGDAPKAESPPKPAEPAKADAAPKPAEPAKVDAAPKPAEPAKVDAAPKPAEPAKVDAATKPAEPAKVDAAPKPAEPAKVDAAPKPAEPAKVDAAPKPAEPAKKADAAPKPVEPAKKVDAAPKPVEPISEESVAAEPSAPAVDEPKAAEKTRSAAG

SEQ ID NO: 82574 - protein, 80 aa, Unknown
  Obtained from environmental sample
  misc_feature (1)..(80): Xaa is any amino acid
MIKTVKSVDLKGKRIIMRVDFNVPMKDGVVQDDTRIVAALPTHKYILEQGCKSLTLMSHLGDPSKTRRSAGKSLEDCRSF

SEQ ID NO: 82575 - protein, 244 aa, Unknown
  Obtained from environmental sample
  DOMAIN (1)...(241): Triosephosphate isomerase
  misc_feature (1)..(244): Xaa is any amino acid
IAGNWKNAFTPRRSAEIGAGTGDRLRDGAHEYLVAPSFTLLETVSGVIEGTNIRLGAQNCASEEQGAHTGEVSVLQLKDLGVQTIILGHSERRHIYKEDDALINKKVKLALKHGFEVILCIGELLEEREKGKVEEVCERQTVKGLEGVSASDLGNVVIAYEPVWAIGTGKTATPQDAEAVHSFVRKVIARLYGQDAATKIIIQYGGSVKADNAAQLMAMENIDGALVGGASLKTDTFIPIAKFS

SEQ ID NO: 82576 - protein, 313 aa, Unknown
  Obtained from environmental sample
  DOMAIN (138)...(214): Helicase conserved C-terminal domain
  misc_feature (1)..(313): Xaa is any amino acid
MVGTPGRVLDLNKTGRMNLMEISFLVLDEADRMFDMGFYPELRKLIKVVPPVDRRQTMLFSATLNAWVKNLAWEYTKTPYEIDIKPEIVTVEEITQILYHVPSEEKMQLLLGILKREQPESVIIFCNTKKYTEIIAKRLQMNGRTCEFIMGDLPQVKRLKIIDDVKTGKVKILVATDVAARGLDIESLSMVINYDLPIEAENYVHRIGRTARAGKTGKAITLASEQDVYELPAIERYIGKKIPSEIAMQELYEKDLSAGQIIHTDFYEERSHVTSHSGTKTTVGKTRETGIAVRSKTRERSWKRNAKQPTIIN

SEQ ID NO: 82577 - protein, 324 aa, Unknown
  Obtained from environmental sample
  DOMAIN (119)...(288): Radical SAM superfamily
  misc_feature (1)..(324): Xaa is any amino acid
MRVIESAKQESINAVLGGRKLYPGKKILLAGCLAQRYAKELAEALREADGFFGTEDITKIVDAANSFWTVHEEFVTTEDTEDTEKEKIFVPKLRVTPCNSVVNSFSSRPLLSLPGCAYVKISEGCGNYCSFCAIPLIRGPLRCRAVQDITDECKGLLARGIKELCVIGQDIGSYKSGASGLPELLASIAEIPGDFWVRLLYMHPDHFSMAVLDLMEKDSRFLPYFDIPFQHGSKKILSAMNRRGDAESYIALAETIRKRLPSAVMRTTFLVGFPGETEDDFAMLADFQEKLRPDWAGCFAYSREEDTPAYTMKAQSQKNRCHCP

SEQ ID NO: 82578 - protein, 89 aa, Unknown
  Obtained from environmental sample
  misc_feature (1)..(89): Xaa is any amino acid
AALSPSGLLLLNNVFKFGRALRKDLRRDFLEIRSHSKAPCIFITHDREEALMLGDKVALMKDGRIVETAAGKEIISAPKTEFAREFFNK

SEQ ID NO: 82579 - protein, 263 aa, Unknown
  Obtained from environmental sample
  DOMAIN (1)...(263): tRNA synthetases class I (E and Q), catalytic domain
  misc_feature (1)..(263): Xaa is any amino acid
ALTNQSRKRDISYVEAIKRDIKWMGYDWEDREFYASDYYEYLYELAVKIIKKGKAYVDDLTDTEMSEYRGTAVADKNNITVTPPGRNSPYRDRSVEINLDLFAKMRAGEFPDGAKTLRAKIDMTHPNLIMRDPVMYRIRRETHYRTGNSWCIYPMYDFQHPLSDAKEEITHSLCSLEYEIHRPLYDWFIREAEVFPSRQIEFARLNLSRTVMSKRWLLKLVQEKQVTGWDDPRMPTIAGLRRRGYTPEAIRSFVSRLESRRRT

SEQ ID NO: 82580 - protein, 88 aa, Unknown
  Obtained from environmental sample
  misc_feature (1)..(88): Xaa is any amino acid
GYIRGGVSYTYQGGPDNKSYAVGGEVGIDTAPEDDAGATIIKMQAVRAAALAPSDPSAQDRAVAAAAAGNENLARADLAAEKQNDDEN

SEQ ID NO: 82581 - protein, 67 aa, Unknown
  Obtained from environmental sample
  misc_feature (1)..(67): Xaa is any amino acid
IGIDGMREMLSASTVPAVAIGGINLENLPDILAAGAKNFCMVRQLTQSENPKSVLEEIIRIVDGFRR

SEQ ID NO: 82582 - protein, 215 aa, Unknown
  Obtained from environmental sample
  misc_feature (1)..(215): Xaa is any amino acid
MDTVILERHLTLVDTGGFKLDRERDSAAGELEKVVVERTLEVLKEADLIILIFAAGEITSEDEEFIDLLRPYQNKLIAAVNKTEGGRREADAWNLLSYGFEKVYMISAEHGDHIRELEEVIVRRLDFTGSRRNSSRPSVDRMKSNTNRPLGKPIRGKSPFQPTHPFFRFIGREIPETPRAWKKVFLRKKPPSGLEPPRFRGRERKPTFDFFRERG

SEQ ID NO: 82583 - protein, 60 aa, Unknown
  Obtained from environmental sample
  misc_feature (1)..(60): Xaa is any amino acid
MAKIKVQNEITVRSSAAEYLTYIAATGNNKQSFEIRYEDENIWLTQNMMAVLYDVTVATI

SEQ ID NO: 82584 - protein, 196 aa, Unknown
  Obtained from environmental sample
  misc_feature (1)..(196): Xaa is any amino acid
MAGINATPFDIVSSKEGKAIKNMGIVISNGKMLAPANSNYDALVFYKDGKAAIVNQSSINSVENIENAVGGFHQILTNGEPAQRTHGKEARHPRSAAGISQDGKYLYLVVIDGRRAGSVGATEEETALLLRSLGSWEGINFDGGGSTALAMRFADGKVRVVNIPIHNGIPGQERAVAGCLAVRYGNSIIIYEISFS

SEQ ID NO: 82585 - protein, 47 aa, Unknown
  Obtained from environmental sample
  misc_feature (1)..(47): Xaa is any amino acid
MCGIVAYIGDKPALPILLNGLKRLEYLGYHSAGVQPDKRGFWQNPDD

SEQ ID NO: 82586 - protein, 58 aa, Unknown
  Obtained from environmental sample
  misc_feature (1)..(58): Xaa is any amino acid
MLAVLSLFIFTTGSMKDFALVLLIGMTSGTYTSLFIASGFVNFWENRSKNQAKKKAAA

SEQ ID NO: 82587 - protein, 137 aa, Unknown
  Obtained from environmental sample
  DOMAIN (1)...(107): Phosphoribosylglycinamide synthetase, N domain
  misc_feature (1)..(137): Xaa is any amino acid
MKILVVGAGGREHALAWKLAQSPKVDKVFVAPGNGGTAAEAKCENVAMNADPASVEGQETLRQFALREKIDITVIGPELPLANGIADTFHSAGLNVIGPGRQPAQLEASKIYSKAFMAKYGIRAASGSSFTDPHEAL

SEQ ID NO: 82588 - protein, 280 aa, Unknown
  Obtained from environmental sample
  misc_feature (1)..(280): Xaa is any amino acid
MGRKADCLVPLRAWTSAERAFISIPETVKSISGTDAARNRPFVKDLFLRIACGDRVDFPRNNVSKCGNILSAAPDRAIAVEAAENAARCILIRLDPSDPETGEFLSKTGNREQGTGNGEWGRGGCTALSGVFKFMRQCGSPRKCPSLQKRREGFSLSGGRITGFPPDAYPLGSELKAALAALPETRIEGQRESLQIIPFPAFQASGLKDYAGRSVAESLEAVRELSGLKLPEFHAENAINTPKSSDNNRNNILGKEFWAALIRGGYQGAVYYIEGLGIRD

SEQ ID NO: 82589 - protein, 100 aa, Unknown
  Obtained from environmental sample
  DOMAIN (7)...(78): Bacterial flagellin C-terminus
  misc_feature (1)..(100): Xaa is any amino acid
MYLVSAPDSANRVIGTLDVALKRINKQRADLGAYQNRLELAVRGINIGAENLQAAESRIRDADMAFETVNYTKNMILTQSGTAMLAQAIQKGQTVLQLLQ

SEQ ID NO: 82590 - protein, 321 aa, Unknown
  Obtained from environmental sample
  DOMAIN (167)...(318): Semialdehyde dehydrogenase, dimerisation domain
  misc_feature (1)..(321): Xaa is any amino acid
MKPGVIGATGYAGAEWVRLLSGHPKIEKLYLSSVSFEGENIEEVYPNFLGRISCKLQKAEEVAAAADVVFAALPHGVGEPFAAACMERKIHFIDFSADFRFDDDEPVYTAWYGKSYKYPELHKNSIYGLVELNRQKIKTAASKGPVIIGNPGCYPTGGSLGAFPALAKGLNREDIPVIVDAVTGVTGGGREPSRSFHYAECADSVSPYKVASHRHSPEIARNLAAMAAVGNNPAVRLIFTPRLAPVNRGILSVIYIPLKPQWRVNADNANLPPSKEIEAKAAEIRKLYSDFYKDEPRLYACFRQGLQPRPTAAQQLAITRG

SEQ ID NO: 82591 - protein, 310 aa, Unknown
  Obtained from environmental sample
  DOMAIN (183)...(309): Glycosyl transferases group 1
  misc_feature (1)..(310): Xaa is any amino acid
MSYKKNVLINGDFLCRRLTGIERYAYEITRRLDKLCKKNEIAIVIPSHAENIPAYKNLEIISLEKKGGFNIRWQMLTLQWFLLTHRKYIVLEFGNCCLPLAHGIVFLHDIYCEFFPEDFVSKRDKLIRLYSRIQYRFIAYLAKKIATVSEYSKKEISETFNINPSKIDVIYSSADHIRNIEPDFSIFEQFPMLKEKQFFFSLGSLSKRKNIKWIIEYAKKHPESTFAISGTSLSTVKVNELDDEIPNNIIMLGYLDDSQVKALMTRCQAFVLPSYYEGFGLTPLEALSCGAPIILQKLQVSLKSTEKLRI

SEQ ID NO: 82592 - protein, 319 aa, Unknown
  Obtained from environmental sample
  misc_feature (1)..(319): Xaa is any amino acid
MPKIEVNEQVFYTLAGCPGGKSRWKSRDEFEEALVCAKAELDEDSDKSLPEGERTLKIELNDTNRPDLWGTAGCARQLKIYHSGKIPDYEFFSRPGDIKKTARKVKVQASVKQVRPYLAGFVAKGKPISDPLLRDMIQTQEKLAWNFGRKRRTISMGLYRTSLIKWPIIYKGVDPDSVSFVPLQWDVPLTLREILKQHPKGKEYAFIQEHEPIHPLLTDAEGFILSYPPIINSNDLGAVQVGDSEVFVELTGTDIACLNLAASIVACDLADNGFTIEPVEVEYEFDTPFGKNMVTPYYFQNRFLFAFKIDKSSAKNKRR

SEQ ID NO: 82593 - protein, 74 aa, Unknown
  Obtained from environmental sample
  misc_feature (1)..(74): Xaa is any amino acid
LKVVLDTNIIVSALLSPQGLSAKLLNLVFDEKLTIVYDNKIFAEYSEVLNRDKFKLDKELVNLIMDFIAKEGDI

SEQ ID NO: 82594 - protein, 85 aa, Unknown
  Obtained from environmental sample
  misc_feature (1)..(85): Xaa is any amino acid
MIPEAHDSGRAEYVPVTDEEAVCAFEYLSRAEGIISAIESAHAVAHAQKIARNFGKEQSIIICLSGRGDKDVAAIARYRGRAINE

SEQ ID NO: 82595 - protein, 307 aa, Unknown
  Obtained from environmental sample
  DOMAIN (1)...(292): Protein of unknown function (DUF1343)
  misc_feature (1)..(307): Xaa is any amino acid
KLIDLDALVIDLQDVGVRYYTYLSTLRNLFKTLKKNNIPLPVWVVDRENPAGTFVEGSPLKPEYASFIGIEGLPHRYGLTIGEMACYFHAEIEADFPLHIVSWQAGARGFPWTISPSPAFPGFFTAGFYSGQCLWEGTNVSEGRGTTRPFEVFGAPWMENLLGYNKKAGYEGWNNPRHPLFDPGAALRWHRFIPIYHKYKDECCFGFQLIRRNPDGAYHALLHALRIIRFIGTHCEGFSFRPGKYETGNDKTAIELLAGDPLILDYLKGEGPEETELREYFRKDEEEWMKSPVNTGSMRTHKGSAIN

SEQ ID NO: 82596 - protein, 318 aa, Unknown
  Obtained from environmental sample
  DOMAIN (50)...(128): PDZ domain (Also known as DHR or GLGF)
  misc_feature (1)..(318): Xaa is any amino acid
VVRMETVATKIHQNYVEEVSSKDLVDNAIKGMTQILDPHTTYFEAKEYEDLRTQTEGKFGGLGIIISVRDKVLTVMTPISGTPAFRAGLQSGDQIIRIDGVSTRGYTSDKALTKLRGEPGTEVKLLIRRKGEAQDHEYVIRRDIIQIKSVPFYGVLEGGIGYLTLQQFSQEAGAEVEKAVKELLKKNIKGLVFDLRHNPGGLLPQAIEVSEKFLPKKSLVVSTRGRVRNQNKEFYSNSGPVLPLDMPLIVLVDRASASASEIVSGAVQDWDRGIILGDTTFGKGSVQSVLQIDPPHHIKLTMAFYYTRAGRCHNRRKT

SEQ ID NO: 82597 - protein, 61 aa, Unknown
  Obtained from environmental sample
  misc_feature (1)..(61): Xaa is any amino acid
MKFKILIVDDEKNIREGLAASLEMDGYNTVCAADGEEGWKLFGKGDIDRLYPRPSDHGGAW

SEQ ID NO: 82598 - protein, 306 aa, Unknown
  Obtained from environmental sample
  DOMAIN (4)...(143): BPG-independent PGAM N-terminus (iPGM_N)
  misc_feature (1)..(306): Xaa is any amino acid
VGENPGIIDQDLKEFVIAENGKPIGTIEDGDSVVYFNFRGDRALEITAAFEEDKFDKFDRKRRPKVCYSGMMEYDGDLHVPKRYLVSPPSIDRTMGEYLAASGVRTLAISETQKYGHVTYFFNGNRTGKFDDKLENYVEIKSDVIPFEQRPWMKCADITDQVIEAIGSGKYDFIRLNFPNGDMVGHTGIYQAVVCSMEAMDIQLGRLAKAVEEAGAVMVITADHGNSDDMFEHDKKTGNVSRKADGTPKAKTSHSLNPVPCIVYDPEYKGEYVNEPKESCLNESLGISSIAATCIQLLGYLPPQDY

SEQ ID NO: 82599 - protein, 287 aa, Unknown
  Obtained from environmental sample
  misc_feature (1)..(287): Xaa is any amino acid
MAVKQDGDALEFVPEKFKTAKLCLEAVKNDKWAFEFVPEKLKTPQLCTEAVKEDHRMIKFVPETLKTKELCLLALSPIDNLVFMDSKEGIECPLAWVPQEFITKETCLDAVAAYSESVKFLPDKFKIPEVYLAAVTKSGWALEYVPEEFKTYEFCLAAVKEHGSALKHVPEKHKTAELLDAALKNDGTALEFVPEEYKSREICLAAIKKDWRGLAIKYVPVPLLTKEFYTEAFELNAKIFEHIPKEFITRSMCKEAVKKKNTPLNTFPPNFVLKKYCQADKKNGFAL

SEQ ID NO: 82600 - protein, 319 aa, Unknown
  Obtained from environmental sample
  DOMAIN (7)...(309): Arginosuccinate synthase
  misc_feature (1)..(319): Xaa is any amino acid
MTIKKCVLAYSGGLDTSVIIPWLRENYDCEVIAFAADLGQGDCNAAALKKKAIASGASKCYVMDLRKEFLEDFVWPTMQAGAKYEGTYLLGTSFARPLIAKYQVLIAQKEYADAVAHGATGKGNDQVRFELTYAAMDPRLKVIAPWKDSKWNIHSREEAIDYAQKRHIPLGGISKKKIYSEDGNIWHLSHEGGILEYPEKEHKYDMLKLSKTFEKAPNKAEYVRLLFENGVPIALHNRRMDAVTLLSMLNKIGGKHACGLLDIVENRLVGLKSRGVYQTPGGTILYQAHELLGIPWSKQSNPWQKKQKLPPNLCISWLH

SEQ ID NO: 82601 - protein, 287 aa, Unknown
  Obtained from environmental sample
  DOMAIN (7)...(262): Aldo/keto reductase family
  misc_feature (1)..(287): Xaa is any amino acid
MLYREYGQTGKKVSLLGFGGMRFAHIDDHDECVRVMTAAAEGGVNYFDTAPGYFETKSETVFGKGFAELRRRKIPYYCATKTFASGPDDIRREIEAQLKRMDIPAIDFYHIWCITSLENWRSRKQNGILQTFRKLKEEGLIRHICVSSHLIKDEIKELLMEQGEVEGVLFGYSLYNFQTRQAAFDAIRKNKLGAVVMNPLGGGVIPQNPEKFNFLCRPGESAVTAALRFLWDHQDISVTLVGFQTSKSEGALAARKLQAPDRGGTGSGKVPTPFLPMRDMYWLRLLR

SEQ ID NO: 82602 - protein, 326 aa, Unknown
  Obtained from environmental sample
  DOMAIN (7)...(97): N-terminal ig-like domain of cellulase
  misc_feature (1)..(326): Xaa is any amino acid
VIFCLDQFGYREQAKKTAVVRVPQTGYGSPSSYNPGNNFQVVNEVSGAEVFSGAPAAFNGGQTDTASGDKIWHFDFSSVKTPGRYYILDKTNNLRSFSFSIANDVYNNVLKAAIKMLYYQRAGTDKPSQHAGQSWADALNFGQDRQTRDFFKKNDASTERDLSGGWFDAGDYNKYTKWTTDYVENLLLAYEENPEAFADDYGIPESGNGIPDILDEVKWGIAWLLKMQNSDGSVLSVQGLSDGSPPSSVTKASYYGPANAVASYGTAKAFAIASRIFGKLGETEYASDLKNAAIKAWTWAEAHKDSIFSHNCGDSWKQSDCPNTIQ

SEQ ID NO: 82603 - protein, 185 aa, Unknown
  Obtained from environmental sample
  DOMAIN (24)...(162): NUDIX domain
  misc_feature (1)..(185): Xaa is any amino acid
MLFNEELYRNDKHLINFNKGKIILRNTVRAIILKENTILMAFLGKTNEYKFPGGGIEESETIEEALKREVLEEVGYNVMKIGEKIGIITEYGIALEDKNSIFKMISEYYAVNIDYNQISQKLDNYEKDLLFKPCWTKIEEAYKTNKIIIDNKCDSTPWIKRETRVLEILNEDIKVNGIRHYLGRF

SEQ ID NO: 82604 - protein, 341 aa, Unknown
  Obtained from environmental sample
  misc_feature (1)..(341): Xaa is any amino acid
MAGYQPLDQSITYGDPVQFTVEATLNGASSLTYQWQEMVPIFSEDFESETNSFTIVNGSQTNQWHIGTATSAPGGGTKSAYISNDNGVSNSYTTSAASVVHMYKDITFPSSSQQYTLTFDWKKGQGEGTNYDILSVFLVETSVTPTAGTFLNSGTYGTYVGQSTWQKATINFPLNGVAGTTKRLLFSWRNINSSGTQPPIAVDNIKIGQFINVSTGTGGTTATYTPAATVAKSGYAYRCIVRNNYNQSTTSTPAALTVSKANPTVTFPATATITYGQTLSDAVFAGESGTGTFAFTESTRKPTVAQSGTPYELTSPPPTRQLPHPHAKRSGNSKQSRSLNQ

SEQ ID NO: 82605 - protein, 213 aa, Unknown
  Obtained from environmental sample
  DOMAIN (15)...(201): Protein export membrane protein
  misc_feature (1)..(213): Xaa is any amino acid
ETKDGRVRSDEVIQNLESYFGKGGIAVMRSDYVGSSQSQKLIEQVFYLIPLTLLLILVYLVIRFKIQYAIGGVIAILHDLLVIIAYLVWARMEFNTTTIAAILTILGYSINNTIILFDRIRENIRVYPDNTYTDIMDISITGILGRTIITTVTTMIAVLFLFIFTTGSMKDFALVLLIGMTSGTYTSLFIASGFVNFWETRKKKQTKKKPAAS

SEQ ID NO: 82606 - protein, 59 aa, Unknown
  Obtained from environmental sample
  misc_feature (1)..(59): Xaa is any amino acid
MPHAYRRKVLELADMVGLTNVLGKPVQKLSGRMPRTLEIIRTLIHTPRVLFLDEATHGS

SEQ ID NO: 82607 - protein, 326 aa, Unknown
  Obtained from environmental sample
  DOMAIN (41)...(205): Alpha-2-macroglobulin family N-terminal region
  misc_feature (1)..(326): Xaa is any amino acid
YRPGRVVLALSSRDRLGRLQTVKIDLYLAGGEQQQAWKKAEQSVFETVMDRNSYEPGQQAKILLKSPYKKALALAITEMPNGELSYKWVNVDNGQGTFTFEIKQEMAPRVPVSFLLMRPRSAAPRRASDGLSVDAGKPETVGNTTWLTVNPVANMLDIKLSHTSMVTPGSTLELTINLRDIQGKARPGEVALWLVDEAVLSLRKEHSLDPLEAFLKEVETHVSIADSRNLALGDLLSLENPGGDGEEEDEDGLGKITPRKNFKVVPYWNPSIIVDKNGNRGREDSDVGRPDKLRDTSDGGERVGQIRHGQVAGVGAPAGNDPSRAA

SEQ ID NO: 82608 - protein, 102 aa, Unknown
  Obtained from environmental sample
  misc_feature (1)..(102): Xaa is any amino acid
VTTAGGEKIAGKYLKATSGWNDYAGKSGNGEDKFGFSALPGGFGSLVDDDFNMKVGYGGHWWSSSEINKLDAHARYIYNDFEKVYYNEGDKIGMYSVRCVQD

SEQ ID NO: 82609 - protein, 264 aa, Unknown
  Obtained from environmental sample
  DOMAIN (58)...(91): Tetratricopeptide repeat
  misc_feature (1)..(264): Xaa is any amino acid
ICRADRNRLIGGFSQARAIKQDNFEVNFNLGSLEFERKNYDKAIQLLQQARAQNPDNPAVLRCLGHSFFRMKKPKEAMSIIRKAIELAPDDKESLYTLAECYYEANQVDQAIKIFSHLRADPVMGPSACLISGNIHNEVRRSDLAIQDYEMGLRHENIRPDILAELRYYLAVSYIKINEISKALPLLHSLQADNASYKDVNVLINKYQELNANKNLQIFLMAASADFVALCRKIVMTYFAKAKVKVLNISVHKNEWADILAEIN

SEQ ID NO: 82610 - protein, 187 aa, Unknown
  Obtained from environmental sample
  misc_feature (1)..(187): Xaa is any amino acid
VSIIYFLVQQTMFFSIPLLIVALGGMFSERSGVINIALEGIMIIGGFTGILFISAVQQFIPGQPVLLLAVLISMISGVAISLLHAYASINMKADQIISGTAINMLAPAIAIYIARMIRTVQQIPFVNQFRIEKVPLLGDIPFIGDLFFKNTIYHHIYRFYYTWTFSRYSLQNTIRASSALLRRTSSA

SEQ ID NO: 82611 - protein, 285 aa, Unknown
  Obtained from environmental sample
  misc_feature (1)..(285): Xaa is any amino acid
MLKNDRELNSLIKDYYQAEADVDTLRDKQDEDDGEGKVLDLQAINTEFDTLRQSVKMTVGRQGNHFPILTSEYFRSGPNDVAFRENIITMLAKIESIDKEAFCRVYKNKLNRIVPYVVLLPCYGDLGICWEPFNKHNRATSRGRIFIPMYPKNLYMAVLNAVADLRWQVAKEKASFYWMEEGLTGNYYQWFVAQKLKGDVKDYFIQDYIIWMTKEAEGIQKLEKEIRGTFWRHMPFTQEVKERLKTRSFVYQNCTTGILTAQCPMDTKKKLLFPALPFLPTAGSN

SEQ ID NO: 82612 - protein, 169 aa, Unknown
  Obtained from environmental sample
  misc_feature (1)..(169): Xaa is any amino acid
KKNPADREESSAAAGVNEYLDIKLDDEIREKMGGVYSISSGVSVSPVPQGELSMQVYFSCDPKRATELQTAVIALLNQAADGVINRDTFTKAMEAPKKEWEVSIQSNAYIAQSYANSSVLLNLPLSRLDKRPKLFDAVTQADIQRVCRQLLQSDGPAIVVLMPEIGTRD

SEQ ID NO: 82613 - protein, 79 aa, Unknown
  Obtained from environmental sample
  misc_feature (1)..(79): Xaa is any amino acid
MGGRMVFWDSPQAVLLGPGKPQGSEFPPPKLRPGLAMLIAPLCAEGRSALRNVYQIERGYERLVERLSSLGAAITKSRD

SEQ ID NO: 82614 - protein, 240 aa, Unknown
  Obtained from environmental sample
  misc_feature (1)..(240): Xaa is any amino acid
VVYDAPEARRKFWDMLISQTDRAYLSALLSYRRAMVCRNALLDKTGDALQFEVYEQAMAEAAAKLVFVRVEAVRELSALTSDYYAEISGGAEAADVEYAPKIKCDILDTKEWQNAYLTSLAQRRERDAELRHTALGPHRDDLRFTLGGRAAKSHASQGQCRSFALSLKLASARFIEQRRSGGMVFLVDDAVSELDPERTSRVYPLLEGRGQVFIATPRCQAALGGGVLRCAVESGKVKTT

SEQ ID NO: 82615 - protein, 99 aa, Unknown
  Obtained from environmental sample
  DOMAIN (5)...(87): Polyphosphate kinase 2
  misc_feature (1)..(99): Xaa is any amino acid
ASIQGLQKERLQERLDNPEKLWKFSPSDIPERMLWEDYQKAYAAAIENCSSQIAPWYIVPAERKWFRNLLITKVLVETMESMDLRYPEAKFDPKTIVIP

SEQ ID NO: 82616 - protein, 76 aa, Unknown
  Obtained from environmental sample
  misc_feature (1)..(76): Xaa is any amino acid
MVDKALLEILCCPETKQSVSLIDKDAVQKINDGIRSGTVVNRGGATVKEAIDGGLLRQDGKYLYPIREDITIMRST

SEQ ID NO: 82617 - protein, 316 aa, Unknown
  Obtained from environmental sample
  DOMAIN (71)...(263): Stage II sporulation protein E (SpoIIE)
  misc_feature (1)..(316): Xaa is any amino acid
MMTAQLRRHIEEIARATAERQRIDTELDVATRIQMSMLPVWKIRKNGCDLYARVYPAREVGGDFYDFFFIDDDHFAMLVADVSGKGVPAALFMAIAKTIIKNRLQSGEDPERAMDNINRELCGSNSMDMFVTAWICVLEISSGCLAYINAGHNPPLVMRHGTGFDFLVSPPDLVLAGMDDTRYHSRLTRLKPTDMLFLYTDGIVEAENAKGEFYGKDRMKAFLDANAGRPLRELIDAFREDIAAFAGSAEQSDDITMMALRIGGLTTSGDLVTSGDLAVSGNSITLKAGLKTWKNYRLLGKELTQPPSANLSWVLG

SEQ ID NO: 82618 - protein, 54 aa, Unknown
  Obtained from environmental sample
  misc_feature (1)..(54): Xaa is any amino acid
MFDMIYTGTETRDPHYTHQNLPRYLSYFLPRLFDHIKPGKNGGGWYDLLNFAED

SEQ ID NO: 82619 - protein, 56 aa, Unknown
  Obtained from environmental sample
  misc_feature (1)..(56): Xaa is any amino acid
LAEFRLALMNDISENVIINNAKAANPKVNCIIKYPNWYDSFQANGYNLKTNRKCLT

SEQ ID NO: 82620 - protein, 272 aa, Unknown
  Obtained from environmental sample
  misc_feature (1)..(272): Xaa is any amino acid
MASYRHQFVDNDSEKSAGTDSEDKDKTESITNADMYRTVIPFFLAGEAQKIEDAYIFDIRPITDSRPYYTGFLKMNELSMYLDQLRDISEEWGYLLLFAMLIQACIFGVIVILIPVIGKRKTLFKKRRGTIGVILYYAGLGLGYMLIEIYLIQRLAVFLSNPTYSTSMVITVMLISSALGNITSGLLKRYRVFVVPAACVLIGGGFLFYIFGLDGFLAIFHSSSMVSRFLVSALVIAPPAFFMGIPYSNGLASLQETKTALLPWAWGMNRRS

SEQ ID NO: 82621 - protein, 323 aa, Unknown
  Obtained from environmental sample
  DOMAIN (1)...(322): Glycosyl Hydrolase Family 88
  misc_feature (1)..(323): Xaa is any amino acid
MAESVMNRFRPGQVQWHYEHGLVLQSIFLLGQKTEQDNYCRYVKEMYDSMISPDGDILSYREGEYNLDQINPGKTLFLLYARYGEEKYRKAIEKLREQLRSHPRTKTGGFWHKQIYPWQMWLDGLYMQGPFYAQYAKEFGSSADFEDVTRQFSLIESKTRDMQTGLLYHAWDESLKQKWANPVTGCSPHFWGRALGWYCMALADTLDFIPPEHSEKAETLKAIARRLFTPLLKYQDDDTGLWFQVLDCRDRPGNYTESSASSMFVYFLLKMIRLQVASEDVASLKTAAEKAYQALFQKQIREDITGELHLTCICRSQVLAEAV

SEQ ID NO: 82622 - protein, 181 aa, Unknown
  Obtained from environmental sample
  DOMAIN (5)...(181): C-5 cytosine-specific DNA methylase
  misc_feature (1)..(181): Xaa is any amino acid
MGNGWTLGSLFDGIGGFPLAAVREGIVPVWASEIEPVPVSITKRHFPDMRHLGDIRNINGADIEPVDIISFGSPCQDLSISGKRAGLDGERSGLFIEALRVINEMRSATNRAYPTRIVWENVSGVLSSNKGLDFQTVIQETQGLPKREFQFLDLRQNSVEWLLGALMGNCWSLAWRVLDLH

SEQ ID NO: 82623 - protein, 156 aa, Unknown
  Obtained from environmental sample
  DOMAIN (33)...(156): tRNA synthetases class I (E and Q), catalytic domain
  misc_feature (1)..(156): Xaa is any amino acid
MNEDNADVKPDSLGTDFISEFIKEDLAAGKFNYVHTRFPPEPNGWLHIGHCKAFFIDFSMAERFGGKCNLRFDDTNPEKEDISYVEAIKRDVKWMGYDWEDREYYASDYYDYLYDLAVKIIKKGKAYVDDLTDTEISEYRGTAVADKNLGQSDHGS

SEQ ID NO: 82624 - protein, 326 aa, Unknown
  Obtained from environmental sample
  misc_feature (1)..(326): Xaa is any amino acid
MKTLYRYVHAPLFAATVIAVCLSGCVRKDVHQPLDAGSAATDGGCRVAGILMESVDQTGAPSLTFTDSRDCRRYRAVKIGGDVWMAENLNYKTPRNSWCMENEESNCEKYGRLYDWETAKAACPVGWHLSTAEEWDSLLTTVGGKRMDDNEGRWMGASKKLRAKSGWIMDDDYKDVTGNGTDDYGFAALPGGERYGNGEFENPDSSDSRGHWWIADENNGSSAHRREILNYDLVFEGTGFKEAGHSARCVSDDSYIAKAGERGAFSLTVTAGSGGTAVAAPRKNTYAAGERVTLTAVPDDGYVFAGGRAPASRIPRRVTPAIIWGG

SEQ ID NO: 82625 - protein, 344 aa, Unknown
  Obtained from environmental sample
  DOMAIN (66)...(233): Type III restriction enzyme, res subunit
  misc_feature (1)..(344): Xaa is any amino acid
PPNAGSESAENRSCPEPLSAALLGTRFGIAASILASLCKKGYLSKEMKTVFRDADELSYSSAGEEKVTLSPGQLDCVERVAASLSAPDKPFLLYGVTGSGKTHVYTELAKRVLSAGRGVIILVPEISLTPQTISRFRAAIGDAVTVIHSRMSDGERRDSLQEIVAGRRRAVVGVRSALLCPMDDVGLIVVDEEHDGSYKQSDTDPRYNARDAAAMRGRLQGAAVVLGSATPSLESYYNALTGKYNLLTLGDRFGTARLPAVKIVDMTVEHKEKNWTALSRYLAARLDEELSLRRPAILLLNRRGFSTSLLCKECGYSHTCPNCFVNLRYHKADIVLQCHLCGHE

SEQ ID NO: 82626 - protein, 98 aa, Unknown
  Obtained from environmental sample
  misc_feature (1)..(98): Xaa is any amino acid
MKYVIIGNSAAAIGAVEGIRHVDKKGEITIITSEPHHTYSRPLISYLLLGKVTREGIKYRNDNFYEDYKCTLLANTIVTGIEAEAKKVFTRPSDLEFP

SEQ ID NO: 82627 - protein, 304 aa, Unknown
  Obtained from environmental sample
  DOMAIN (1)...(252): Conserved region in glutamate synthase
  misc_feature (1)..(304): Xaa is any amino acid
VQVASGRFGVHPEYLNSGAAIEIKMGQGAKPGIGGHLPGTKIVGDISRTRMIPEGSDAISPAPHHDIYSIEDLRQLVFSLKEATNYQKPVIVKIAAVHNVTAIASGIARSGADIIAIDGFRGGTGAAPTRIRDHVGIPIELALAGVDKRLRDEGIRDNVSIVVGGSIRSSADIIKAVALGADCVYIASAALIALGCHLCRSCHAGRCNWGIATQVPELVKRLNPDIGYKRLINLMTAWQHEIKEMMGGMGINSIDGLKGNRLMLRGVGLNEKDLKSSALARRRVNVDADLAVTGGGDEKLISGK

SEQ ID NO: 82628 - protein, 86 aa, Unknown
  Obtained from environmental sample
  DOMAIN (22)...(84): Uncharacterised P-loop hydrolase UPF0079
  misc_feature (1)..(86): Xaa is any amino acid
LTRWTQAECFLIEFHSDSPQDTFSLGQRIASFLSAGSVVALQGELGSGKTYLVKGIAEGLGVTDTITSPTLHINSEYNSLPRIVPH

SEQ ID NO: 82629 - protein, 293 aa, Unknown
  Obtained from environmental sample
  misc_feature (1)..(293): Xaa is any amino acid
MADIDAKPIWKLLSTIITSSTKSNTYGWLGAFPQLREWIGDRVIKDIAEFAYQIVNKKYESTLGVDRTDIEDDNLGQYRVLAREMADEFERFMNRNVAALIAGGFTSLCYDGQKFFDVAHPVYPNADGTGEAAEVSNIVGAGNGSPWALLSLSGSLKPFIAQQRSQPEFEEITDTKNDRVFMQDKYLYGIRYRGSFGYGLWQQAVGSKAPLTAANYEAARLAMQTLKRDGGDPLGIVPTHLAVGPANEAAARAILSRELINGGQVQPQLPHRRAFGSPAHFRRGRYGKRKTEQ

SEQ ID NO: 82630 - protein, 291 aa, Unknown
  Obtained from environmental sample
  DOMAIN (2)...(291): Carbohydrate phosphorylase
  misc_feature (1)..(291): Xaa is any amino acid
PPANDQIGRGDYIGACHDKFTSENISKILYPNDNNVSGKELRLKQQFFFSSASLQDIIRRYLQTNKDFKAFADKVAIQLNDTHPSIAIAELMRLFIDEHGLSWDEAWDIVQKTFAYTNHTLMPEALEKWSVGLMQHLLPRHMEIIYEINAGFLRQVSYKFPGDIDRLRRMSLIEEGDDQQVRMAYLAIVASHSVNGVSALHSELLSSGLVRDFYEMWAERFNKQTNGVTQRRWLYKANPACANSSRAKSATAGFTDLYEPKKAGKTPPPKKGVPQKKGAGTKTPPAQKRFF

SEQ ID NO: 82631 - protein, 191 aa, Unknown
  Obtained from environmental sample
  DOMAIN (1)...(78): Fibronectin type III domain
  misc_feature (1)..(191): Xaa is any amino acid
MYSIGRGATVSGSAITVTWTTVAGASGYTLYRASAYDGDIYIFRTNADSPLYTDTGLAKGEYSYQVRAYNDDGDGYISLPWGPVEIVIGSGPPAPAKPQNLRAAVNYAAEPAVVALAWNGAANADSYTVYRSLDDELYERIGQAPSATYQDADTRSGEAYYYRVRGNNGTSGRVPVGIMRACSAPPREPRG

SEQ ID NO: 82632 - protein, 203 aa, Unknown
  Obtained from environmental sample
  DOMAIN (1)...(203): Histidinol dehydrogenase
  misc_feature (1)..(203): Xaa is any amino acid
MFKITTPDGEIRQAVRAWNRVGVYIPGGRTVYPSSVLMNIVPAQSAGVKEIAAVTPPQKDGLDAGVAFALNLLGINEVYQVGGAQVIAALAYGTETIAPVDKIVGPGNAYVAAAKRLVYGKVDIDCVAGPSEVVIVADKNADPRLVALDLLAQAEHGTGDEIAVCIVESKVVANKIAAALTKEINASPSKETLGTPPPLAKAG

SEQ ID NO: 82633 - protein, 103 aa, Unknown
  Obtained from environmental sample
  misc_feature (1)..(103): Xaa is any amino acid
MTEKSFFAGFGGQGIVSLGQIWVYCAMQDGKNVSFFPFYGAEKRGGIARAGVIVSDEEIASPLVTKPDSALVMNSDSLPLCEEILKKTGFSGEYSLVRKTPAD

SEQ ID NO: 82634 - protein, 326 aa, Unknown
  Obtained from environmental sample
  DOMAIN (4)...(197): Beta-ketoacyl synthase, N-terminal domain
  misc_feature (1)..(326): Xaa is any amino acid
KTRSPCRYKLPVIQENNPRSWKVAQLAFTSADKALSDAGISRDEAMLKNGRCGIAYGSSMGSLDSLLDFYSMLILNDLNKMNATTYIKAMPQTCAANIGVILGLTGRIITTNTACTSGSQAIGFAYEAIKHGHQDLMLAGGAEELSAADAAVFDTLFAASCKNDTPEKTPAAYDKNRDGLVVGEGAGTFILEEYEHAKKRGARIIAEVAGFGTNTDGSHITQPNRSTMGIAMQLALKDSHVDPSVIGYVNTHGTATDAGDVAESWATVDIFQRPVPVSTLKNYIGHTLGACGAIEAWISVMMMKEEWFCPNINLLVPLGRSDPWGT

SEQ ID NO: 82635 - protein, 328 aa, Unknown
  Obtained from environmental sample
  misc_feature (1)..(328): Xaa is any amino acid
LGSPSIRSARVAEAETENFSVTAARLNEEMTEIEKGLVALKSTAHENITEELKTFENEFVTDLTKRNNDIGLRITEWQGGLEKRLSAIGENSETALRKLEHDQAEEMKKNLSAMDARLVSELERLKSETGAFEEGILGQMKAADDSVSSFKEQLDRGLEDARKEAEISIKAEIGNYSITAAETVKKYQRELDDAWNRLSAKFIELDDNVDEAHQRVRDLAAETDTRIASVRSSVEDAERHIKEAKEQTKIIDVAKAMKLDLERSIEDLKGDIDRLDQRRPEAAQLENEFIPDQHHEDDHHAKYIQILSEERRNDTWKRILPLPQIHAR

SEQ ID NO: 82636 - protein, 300 aa, Unknown
  Obtained from environmental sample
  misc_feature (1)..(300): Xaa is any amino acid
VYLTGAAADKADLASAKATELTMGVTRYVTLGKRGSADYGFKIKEPGIYKVETTGRLHTQLTLRDRFGGLSKSQSGNGVGRNALAVEFFLPGDYLAIAETKGESAGRMGIVLSKGELRKGGTLQDGVDKRAAVKANSAVVYNFKAGKKARYRFESFGAAGSQEMRLEDSDGWPLIPHGSEAPQEVVLDKGSYKLYSLPCQYENYRVTRVDAVRTPQKFNGPGPHNIAVNEPASATWLESGTGSAARFLFDISAPIDAKIFLSPDFKGTLKQSGNKEAAPISVNGEIQGMLQKGKYKIAVT

SEQ ID NO: 82637 - protein, 322 aa, Unknown
  Obtained from environmental sample
  misc_feature (1)..(322): Xaa is any amino acid
MAEEKGRGLARLCNYWWKSPGETELFQFVGKDNIPFHTVIFPSSLLGSGENWTMLHHMSSTEYLNYESGKFSKSRGVGVFGTDVIETGIPADIWRFYIYYNRPEKSDTLFTWKDFQEKVNGELIGNLGNLVNRTLSFVNRYYGGRIPDGIANAEFRETIRKKEEEITAALERADLRDAFHLVFELSSIANKTFQDGEPWKKRQGDSAEQQKAAALIRDLSYVVRDIAVLIQPFMPQAAEQIASFLGLSFGKDLVYQKGEGKLSWDDLGKDSGLDKVVKCEVLFSILEDDKIAELRREYSGNQKERIMGTPDIRFAKTIDLRG

SEQ ID NO: 82638 - protein, 293 aa, Unknown
  Obtained from environmental sample
  DOMAIN (1)...(293): Beta-galactosidase
  misc_feature (1)..(293): Xaa is any amino acid
MDMLAENGITAVLATPTGAKPAWMSKKYPEVLRVNRDRTKNLHGGRHNHCLTSPVYREKTTAINTALAERYKNHPTLGVWHVSNEYGGECHCPLCQERFRAYMKDRYKTLDALNEAWWSTFWAHTITDWSQIESPSPLGETCIHGLNLDWMRFTTEQFVDFFLCETKPLKAITPGVPCTTNLMGTYLGVDSFRMAQVLDVVSWDCYPQWTGTEKDIERGIEASFTHDMNRSFKGKPFMLMESCPSATNWRSVAKLHRPNVHMLQSMQAVAHGADTVQYFQFPQSRGSAQKSTA

SEQ ID NO: 82639 - protein, 138 aa, Unknown
  Obtained from environmental sample
  DOMAIN (13)...(117): ATP synthase alpha/beta chain, C terminal domain
  misc_feature (1)..(138): Xaa is any amino acid
SPRRRFGADKGYAKISGRIRLDLAQYREMAAFAQFGSDWDKATQDKLAQGERLMEVLKQPQLSPYPLVEQIAILFLAVEGYLLDVKTENVSTFVKEFLSHLKSQKQDLLKGIADTGIVSKEQEDELRLTVQNFKRAGK

SEQ ID NO: 82640 - protein, 320 aa, Unknown
  Obtained from environmental sample
  DOMAIN (1)...(250): Glutamine synthetase, catalytic domain
  misc_feature (1)..(320): Xaa is any amino acid
YLERPDLIYTGRILFGSRRPKGQELEDHYFGCLKPRVSAFMKELDEELWKLGILAKTKHNEVAPAQHELAPIFSTTNIATDHNQLTMELMKSVADRHGLACLLHEKPFAGVNGSGKHNNWSIMTDTGVNLLKPGETPHDNAQFLIFLAAVIKAVDVYQDLLRVSTASAANDHRLGANEAPPAIISIFLGEELTEILEAIDSGTNYKGKEKLQMQIGVTALPHFPKDSTDRNRTSPFAFTGNKFEFRMVGSSFSIADPNAILNTVVADVLQEFADKLENSKDFNGDLAALIKSTVHEHKRIIFNGNNYSEEWVRKPKSALG

SEQ ID NO: 82641 - protein, 146 aa, Unknown
  Obtained from environmental sample
  DOMAIN (2)...(133): Respiratory-chain NADH dehydrogenase 24 Kd subunit
  misc_feature (1)..(146): Xaa is any amino acid
VVASASLDIRRHRVELRCGVLGGVGFTVLNVPLSKIYDILTFYAMFSTKERGEYVIEICQSTPCHFTKAGEVVHWFEAAAGIKVGETTKDGKLSLCRTSCVGACDIGPAVKIGDHVFGNLTEERVKTLVKCCREGNSQELQSLCQN

SEQ ID NO: 82642 - protein, 181 aa, Unknown
  Obtained from environmental sample
  DOMAIN (45)...(172): Respiratory-chain NADH dehydrogenase 51 Kd subunit
  misc_feature (1)..(181): Xaa is any amino acid
MSKLIHLLTENSGSTEPSNPADSPNPVDSPNPESSLSVEYYMKSGGFKGLKKAVLMTSEEIIAEIKKAKLLGRGGAAYPAGNKWEHLLHIPETPKYIVCNADEGEPGTFKDRLIMEKLPMKLLEGIIIAGFVFQAKAGYIYVRGEYRKIKSGSSRLLITLKLRVFWVTTSSSPGFNFDIHV

SEQ ID NO: 82643 - protein, 229 aa, Unknown
  Obtained from environmental sample
  misc_feature (1)..(229): Xaa is any amino acid
MAMGWELPKHILAHGWWMIDGSKMSKTSGTGVNPMDYVETYGVDVFRYFLIREMVVGLDATFGYDSFVRRINSDLANDLGNGLNRIYKLILTNFNGKIPTPVKNGEQEAELFRHCEKATQFAKENIGEAKLSLVVEEILNSVKALNKYLEITAPWKLAKSTAQEDKDKLATVLYTGAEVLRITLTLLSPVMPQKAEQGLLMLGGGNGVLKGGETLGNGEALFLRILEEK

SEQ ID NO: 82644 - protein, 64 aa, Unknown
  Obtained from environmental sample
  misc_feature (1)..(64): Xaa is any amino acid
GNAGSESARDIEEPEGGAAKDIDLTAKNIKAFLTETVNKLMKEDFKGLPEKRYQKFRKIGVFTE

SEQ ID NO: 82645 - protein, 217 aa, Unknown
  Obtained from environmental sample
  DOMAIN (3)...(217): Isochorismatase family
  misc_feature (1)..(217): Xaa is any amino acid
MNLDVSKTLLLIIDVQNDFCPGGALAVNDGDKVVAPLNAISRSLAEKGGQVAATQDWHCLGHISFASSHNGKKPGDVIDTPLVKGQVLWPDHCVQRTKGADFHKDLDLKPVSLTVRKGFHKDIDSYSAFFENDRKTKTELEKHLRDIGIETVIMGGIATDYCVFFSAIDCKNLGFNVIVANDAVRGVGFPEGSVEKAITEMKNAGVKFVSSKKSLIV

SEQ ID NO: 82646 - protein, 41 aa, Unknown
  Obtained from environmental sample
  misc_feature (1)..(41): Xaa is any amino acid
KPQALKKSPAILLEQYNGEVPADMDALLALPGVGRKTAILV

SEQ ID NO: 82647 - protein, 322 aa, Unknown
  Obtained from environmental sample
  DOMAIN (74)...(308): Carbamoyl-phosphate synthase L chain, ATP binding domain
  misc_feature (1)..(322): Xaa is any amino acid
MTDKNIADKIYIETLTLATFRRIVEKEHPDSILSGLGGQTGLTLCMQLARDGFLEKMNVRLLGSSPETIDKAEDRKLFKETMQSIGQPVIPSVIAVDVETAVKFADEIGYPVIVRPAFTLGGSGGGIAANDAQLKEIAANGLSLSPIHQILTEKSIAGWKEIEYEVMRDRAGNVITVCSMENFDPVGIHTGDSIVIAPAVTLADKEYQMLRSAALNIIQALGVEGGCNVQFALHPDSFEYAVIEVNPRVSRSSALASKATGYPIAKVATKIAIGYTLDEIINAVTGNTFAAFEPTLDYVAVKFPKWPLTNLDAQRLAIIRGK

SEQ ID NO: 82648 - protein, 349 aa, Unknown
  Obtained from environmental sample
  DOMAIN (1)...(216): Glutamine amidotransferase class-I
  misc_feature (1)..(349): Xaa is any amino acid
VLNPGFDGRGIRASRRYTREIIPGDTPLETAITKDVKGIILSGSPESVYDAGAAPDKKVYDCGLPLLGICYGLHRMTHDLGGKVEPLPEKEYGRIEVKIREEGKEQRAMSNEQRAKSNEQRAMSNEQREEGIEQGTGGSVVSGFLKGFKDTFTAWMSHGDTLTQLAPGFKEYGSSATGYPAVVAHEEKPWFGLQFHPEVTHCEGGDDMLGAFVFNVCGCGKGWSMERYIEELNKTLKERAGENPVLLLISGGVDSTVAGAALLKTLKSEQVHLMYMDTGLMRKNETAAVRANLEKLGANNLHIIMCEEEFLIALKGKAELGEKRRIIGDFVITIQERGVARLKLRESIC

SEQ ID NO: 82649 - protein, 166 aa, Unknown
  Obtained from environmental sample
  DOMAIN (74)...(107): Tetratricopeptide repeat
  misc_feature (1)..(166): Xaa is any amino acid
MSPVNVDDILERAKNSFRVGDYETAERLLRNYIAKVPESREAYILLGNTFAREGKLTEAEDQYITLLARNPKDLDALNNAAVISRRQGNFQRALEYLKQAIELDPLKAEFHYNLGNIHKEMGNLQAASQAYSRSIELDPNYVLGLHNLGIIYDQLKDYDQAFLVFQ

SEQ ID NO: 82650 - protein, 329 aa, Unknown
  Obtained from environmental sample
  misc_feature (1)..(329): Xaa is any amino acid
RFPPGLSPTAELTWTGVRGAAYYMVERATVSSQDWKGYQPDEEGYVILDRFIYGTTFTDVILKNASLDAPENQNRYFYRVSAFNTAMKYEESEHTDPVSAMLFNAPDNVKASGGVSTEYVELRWELSPGADSYEIFRSDFPSGVSASSLGTVRGNQSWFRNMVSAAEQGKDFYYMVSAKNGFGYKTPLTRPAYGYARVFGAPDQPKVRLADNSGRGQSKGEIKIEWDEADEDGVYYAVYRYSSVDSSLTRLADKENKTEYTDKVGLKTGVYYYYKVQAIVDDTASGKALKSQFSSSDHLTESLIPSPPDNVVAVKNPDGTVTVKWGPAI

SEQ ID NO: 82651 - protein, 330 aa, Unknown
  Obtained from environmental sample
  DOMAIN (1)...(330): Phosphoglucose isomerase
  misc_feature (1)..(330): Xaa is any amino acid
MSAKFISNVDPDDASAVIASVALIQTLFILVSKSGTTQETLANELYVKNKLEKAELDSAKHMIAVTSETSPLANNPAYLESFYIDDYIGGRYSSTSAVGGCVLSLAFGRAAFREFLTGAEEADKLAMEPDITENAALLDALIGVWERNFLGYPYTAILPYSQGLSRFPAHLQQLDMESNGKRVNRDGQPIAYDTGPVVFGEPGTNGQHSFYQLLHQGTNIIPLQFIGFALSQRGADVIVDGSSSQTKLNANLAAQIVAFAKGQGDASNLNKDFPGGRPSSLIYGQSLTPAVMGSLLAHFENKIMFQGFVWNLNSFDQEGVQWARHQSGEK

SEQ ID NO: 82652 - protein, 307 aa, Unknown
  Obtained from environmental sample
  DOMAIN (1)...(295): Inorganic H+ pyrophosphatase
  misc_feature (1)..(307): Xaa is any amino acid
LDCAHNPERIGIYFAVLSGLLAGVLIGFFTEYYTSDHYKPTKNLAAASLTGPATIIIGGISLGMLSTLLPVIIVGASVLISFFVSGGAHSFAYGLYGVSISAVGMLSTLGITLATDAYGPVADNAGGIAEMSHLPHEVRQRTDALDSLGNTTAATGKGFAIGSAALTALALIVAYLDEIEIYIPTVKPNFELNLTLTNPPVLIGLFVGVMLPFLFSSMTMSAVGRAAQNIVKEVRRQFKEIKGLMEGTADADYSTCVDICTRGAQKEMVLPALTGIISPIIVGMALGVTAWRVCLPARQLPALSWRL

SEQ ID NO: 82653 - protein, 304 aa, Unknown
  Obtained from environmental sample
  DOMAIN (122)...(300): Binding-protein-dependent transport system inner membrane component
  misc_feature (1)..(304): Xaa is any amino acid
MISLVILAALYVVMTFAEFFAPYSPNTSFPDKSYHPPNVRFYQGKPQAQEWWITNTVSWKYTRVRGQYAAIHFWGKGEPYRLWGIIPAERHLFTVNPGSYPVFLMGTDSLGRDLFSRIVYGSRISLTIGFVATFLSLALAVLFGGLSGYYGGLTDWSIMRFSEFLMLIPSLYLILFLRSLMASTMDTGQSYMMITVILSLVGWPGSARTIRGMVHSIKREEFVLNAQLEMIPSPLIIVNHIIPQIASLLIVSVALSVPGFIMTETVLSYLGLGITDPAVSWGSLIKRDIFTLANLQAYPWLLNP

SEQ ID NO: 82654 - protein, 98 aa, Unknown
  Obtained from environmental sample
  misc_feature (1)..(98): Xaa is any amino acid
MRRVVITGSSVISALGSEWSDILKNLKSGKNCIQRMNDWDKYPRMNTRLAAPVDCALPDYPRKIIRGLGRVAQLAFASTDKALSNAGINRSADLILVR

SEQ ID NO: 82655 - protein, 224 aa, Unknown
  Obtained from environmental sample
  DOMAIN (4)...(172): KR domain
  misc_feature (1)..(224): Xaa is any amino acid
GYCFAVSSAGYSVTAHSIEGKEQAESLQKEIHDRGGIIELVQFDISDRNECQEKLEKWQEENGAFWGVICNAGISADDSFPGMSAENWDAVLRTDLDSFYNVLHPLIMPICRKKQGRIITLSSVSGITGNRGQVNYSAAKAGIIGATKALAVELASRSITVNCIAPGIIETDMIREAPLDKILPSIPMGRIGKPEEVAALAVFLLSEEASYITRQVISVNGGMV

SEQ ID NO: 82656 - protein, 300 aa, Unknown
  Obtained from environmental sample
  DOMAIN (1)...(68): RNA polymerase Rpb2, domain 3
  misc_feature (1)..(300): Xaa is any amino acid
MDQVNPWAELTHKRRLNALGPGGLSRERAGFEVRDVHYTHYGRMCPIETPEGPNIGLIVSLANYTRVNDYGFLETPYRKVVKGIATKDIEYLSAMDEDRYYIAQASARLNNSGSFADAQVPCRRQGDYTTRSPGDIEYMDVSPKQIISVSASLIPFLEHDDANRALMGSNMQRQAVPLVFTEAPRVGTGMEGKCAYDSGVLCKARRSGTVINVSSQEVCIEPDDKKDTVPETNADGIDVYRLVKYQRTNQDTCYNQRPIVRLGDKIVKGQVIADGPATKNGELAWAGISVVLPELAITGL

SEQ ID NO: 82657 - protein, 100 aa, Unknown
  Obtained from environmental sample
  misc_feature (1)..(100): Xaa is any amino acid
MVRLAEAGRVPFRPSYEEILQVRNRLKRYGVSAVNYSEVRTYLDSKPVYSVVNENDPRAIYDFFVERRDTCLLRKKVSAPGPLHTLEEIYLKYRIILEST

SEQ ID NO: 82658 - protein, 88 aa, Unknown
  Obtained from environmental sample
  misc_feature (1)..(88): Xaa is any amino acid
VLHRIWKAADFMCSSRLKAAIPLWLPHYEQEYGRVDAETKRLLLSVSTATLDRILRPIRARYRKGLCGTKPGTLLREPIPIRTGFWDV

SEQ ID NO: 82659 - protein, 168 aa, Unknown
  Obtained from environmental sample
  misc_feature (1)..(168): Xaa is any amino acid
KKNNRIGRAASTGVAAYQYEGDDPEMHVHRVVDAFVRKSNLTTIKPDLRHYGFNSPNPVDETGRHGYEVWVTIPDGFSVPEPLVKKHYEGGLYAAHMIPFGAFDEWGMLNQWMENNGKYEFRSSGDHRNMFGLMEEHLNYVNRVHLDDPEEEGCQLDLLMPIKEKGKE

SEQ ID NO: 82660 - protein, 293 aa, Unknown
  Obtained from environmental sample
  DOMAIN (1)...(240): tRNA synthetases class I (R)
  misc_feature (1)..(293): Xaa is any amino acid
MIGGARPHYDRAQELLRKWEAGDSETVALWKKMNAWALDGWIETYKRTGVSFDQYYYESQTYLLGKDEILKGLEKGFFYRQEDGAVAVDLTEEKLDKKILLRSDGTSIYITQDFGTAINRHKDWPFDKLVYVVGSEQQYHFKVLFVLLEKLGYEWAKNLYHLSYGMVNLPEGKMKSREGTVVDADDLIDSLRDMALEEIRSKEREDALGNPEETAEKIAIGALHYFLLQVSPTRDILFDPKESLSFNGNTGPYLQYMGARISSLLRKAERKSGHCCRAATARAPVRRPPRGAG

SEQ ID NO: 82661 - protein, 99 aa, Unknown
  Obtained from environmental sample
  misc_feature (1)..(99): Xaa is any amino acid
LAKICICLTAKTIQKDLEILDKYRKYTDLAELRVDCLDPDERLHIRRFPELAELPVILTIRRDSDGGYFTGGEGARVNYSRAGLPSRKPTEEKFRVRGH

SEQ ID NO: 82662 - protein, 161 aa, Unknown
  Obtained from environmental sample
  misc_feature (1)..(161): Xaa is any amino acid
MKDNSAKQSEYEEKTKSYSSSVEQLLKDTQDVEAALKKGEIPEPEFMKIKLSITMLTLVSNYLAMNQISQSVFGKINENLLNEARKSIHRCLAYLEEVVTNIVDAPFSDYADGLAKIEAVSPAQRYSLVEKIGQQLTNLKEAYGKNSKWANPIWSLGPRDK

SEQ ID NO: 82663 - protein, 128 aa, Unknown
  Obtained from environmental sample
  misc_feature (1)..(128): Xaa is any amino acid
MIPKVIDLHCDSVFSLMDGKDLRQSVPDVHVDVPRLRAGNVGLQVFAAYVPASTDGDKAFAYAGERLDAIDAFARSDDRLALVETVAELRECLKTDKVGVMLAVENGVAIENSLEKRNNCAADSAIKP

SEQ ID NO: 82664 - protein, 324 aa, Unknown
  Obtained from environmental sample
  DOMAIN (7)...(226): BadF/BadG/BcrA/BcrD ATPase family
  misc_feature (1)..(324): Xaa is any amino acid
WFPNDQIGRDEGDFSAAVRKLLEDGKVPEGIPALVTGNEGRFMFDVSGTLEPLCVEAALRNLGLNADAVVSMGGEDLIVYSLDAQGKIINNFSGNKCASGTGEFLKQQLARMDMTLDDIDKVPETAKVHALSTRCSVFMKSDCTHRLNKREATKDDIVLSLSDVMAVKVIDFLKRAKVTKGRVVLTGGITLNRHIIRFIREKAPQIEFIIPESAPVFEALGAAVMAPKSGSPLPPVGKLLKTNEIRFGALSALRDWKDKVQFFDKGEGKVRADHKYILGVDGGSTTTKACLVDMETDEVVASHYGRTHGDPVKALKECLGLIQE

SEQ ID NO: 82665 - protein, 116 aa, Unknown
  Obtained from environmental sample
  misc_feature (1)..(116): Xaa is any amino acid
MASKKDRINELEALIQRYQASYYNGEAEISDGEFDLLWDELKNLAPQSEVLKKVGSGPDTDGFQKARHLIPMGSQDKASNPQEFIEWAEKMGLETEKRRFVNRKKITVNKNFHCSV

SEQ ID NO: 82666 - protein, 314 aa, Unknown
  Obtained from environmental sample
  DOMAIN (35)...(314): Protein of unknown function (DUF1015)
  misc_feature (1)..(314): Xaa is any amino acid
MGGLSAKNLLVWHFVMVFSTLTGMSDIQNRLEKVGIGIPEILLPRAELKQWAVIACDQFTQDRAYWKKAADIAAGSPSSLNLIFPEAFLEDENRAPRIENIHSSMRNYLDNGIFNAPRKGFVYIERDTPFNRGRKGLVAAVDLEQYSWSPTARPLIRSTEGTVEDRLPPRMEIRRNAPVETPHILLLIDDETNSLLQGLGERAKKNAPVYQGELMLDSGNISGWFIDSENDFAFLAERLEELARRALTRYAAQQPASAKQPASAKQPASAKQPFLFAVGDRHHSLGSAKGIWEEYNKKNGTAGSHPCRYAPVEM

SEQ ID NO: 82667 - protein, 105 aa, Unknown
  Obtained from environmental sample
  misc_feature (1)..(105): Xaa is any amino acid
MNLAQKIIKAHLRAGEMVPGREIGLAVDQTLVHDATGQMALLQFEALGFPRVRTRRSLVYTDHNTLQAGFENADDHAFLASAARKFGLYYSRRSRISADLISEGP

SEQ ID NO: 82668 - protein, 85 aa, Unknown
  Obtained from environmental sample
  DOMAIN (1)...(85): ABC transporter
  misc_feature (1)..(85): Xaa is any amino acid
MEMVGLLKYYRSRYRHEFSGGQRQRIGIARALALKPQLILADEPISALDVSIQAQILNLFKDIQKEMGLSYLFIAHDSCRYRIYF

SEQ ID NO: 82669 - protein, 170 aa, Unknown
  Obtained from environmental sample
  misc_feature (1)..(170): Xaa is any amino acid
EKKKPPRGGYFFFFFFFRGKKKKKFFFFFPRGEKKNIFFFSPGGGGGGCFFFFFPKKKRGGNPLASSLGGKTGCWGKFLCFFPGGFITFFNRGFFGGGFFLCGEKKFIRFVERRWDLFGKRGPEISKFCFFKKPHRVFLISKEWAPGGIFCRNRWGLFKQRRAFLKLAEE

SEQ ID NO: 82670 - protein, 309 aa, Unknown
  Obtained from environmental sample
  DOMAIN (47)...(164): Phosphoglucomutase/phosphomannomutase, alpha/beta/alpha domain II
  misc_feature (1)..(309): Xaa is any amino acid
GRQKLVPEGDLGDFVLSAYMYNYCCVEKIPENASGKITEYDAEDDSVNWMTQILGEDTKSALKDITLIFDSANGATDSIGRKVLENLGAKYVSVNEKCTGDNINRGVGVAEIEGTEFYSGKDYDKHILTVKKIFDEGRKSPAQSVFAIAVDGDGDRGFLLYYSKKDDDIYVLDGDKCGYILAQYLIKTKNIDAKKYWFLSTIESDIMTAAAASANLGLNAKIVSVGDKWIGNFKDGEVLVGLEISGHLIFPIEVIDKNGKKHTLLSGVGLLTGLVSICAIRGLGLSEEKIIEPFEPGFQKRSRPSDHGK

SEQ ID NO: 82671 - protein, 86 aa, Unknown
  Obtained from environmental sample
  misc_feature (1)..(86): Xaa is any amino acid
MTSMTGYAYREWASDDISISVEIKGYNNRFLEIFVNTPAWLPQLEQRARGIISGLCGRRKVEAAIRVRETNTPVNISVNVNAAHAY

SEQ ID NO: 82672 - protein, 202 aa, Unknown
  Obtained from environmental sample
  misc_feature (1)..(202): Xaa is any amino acid
MEPNKDKVILNDEQQAAAYCDENAVVAAGAGSGKTMVLASRFAWLITERKCRVREILTLTFTKKAAAQMYRRIHLMLAEKAVNSGIKGKLAREALEEFAQARIQTLDSYSAAIVKQAANRYGISPEFSIDEERCFRIAHDEAMSFFIAKREHPAIRRLYPDKSRLSISNEIFADGLFSYAHIDAQPNRRMILPGQCISFGGD

SEQ ID NO: 82673 - protein, 299 aa, Unknown
  Obtained from environmental sample
  DOMAIN (125)...(226): Hpt domain
  misc_feature (1)..(299): Xaa is any amino acid
VQESANKCIALVEKIIFQEIKPTDGIAQISDVLTALRRKCQYGDAAAVTDEAADAAALSADGGDIAKDMDFDMDADEGDAKKEPPKPAAQPLKQDAEGFFVDSVNQAKPKVNFKREIAIASLDASLLSEFIAEAQEHFANADSALLRLEAAPADVDIVNELFRVFHTIKGVAGFLALDAIQALSHVTESLMGNAREKTFVLNSAAIDLIFSVVDVLKKEVETLTSALESNGTYVVQDIMDHVIASVDAMKHSFAHNKPMPEIARDIGLRRPGLPAEVDSVLHEPERRPGAQMGEILVER

SEQ ID NO: 82674 - protein, 101 aa, Unknown
  Obtained from environmental sample
  misc_feature (1)..(101): Xaa is any amino acid
MGFKDLVYFMLSMINESSQNALERYFTKTGRDVFITQQAFSLARQKIKWEAFRELFDLTVNSHYKEYSDEIRLWDGLRIYAIDGSKLSLPYDEPLRPVFGP

SEQ ID NO: 82675 - protein, 71 aa, Unknown
  Obtained from environmental sample
  misc_feature (1)..(71): Xaa is any amino acid
MPKSIVVDPKEVRKPQILKIKDIPVNQYKSDFKKENGLYGTQRLVRIWHDMAVIREFESMLSCRMLCVDGA

SEQ ID NO: 82676 - protein, 214 aa, Unknown
  Obtained from environmental sample
  DOMAIN (1)...(208): Basic membrane protein
  misc_feature (1)..(214): Xaa is any amino acid
MDRLAEVHQYEQALFLGYLAGLVTTSGMSHANSAKKIGFIAAQEYPLLTRQMVPGFIAGARRVDPNIELDFRVIGNWYDANKAAELTSGMINAGVDVFTSIAGGAAQGLARTIKERGAYSVNFNTNDYSQAPGFIVGCGKMEQNKLVKEILTDALAGKINYGNSKTVGVKEGYINFISDDPGYRDHVPAEIRQKFDIFMDDFRAGRIEYTVPAL

SEQ ID NO: 82677 - protein, 335 aa, Unknown
  Obtained from environmental sample
  misc_feature (1)..(335): Xaa is any amino acid
MAEPAAGVALDVFRVRGKDGGADPLRMSFAADITAPTFQNLAGKVGMSFLIADIINISGSSQFNLRESQNGNGPSPIPSIGISAILKLNSGGQKIIGGALTSEGELAVDLAAKPLYNGIWTMGGGATWTAGVADKNPPVITLDYPQTAWISPNNDGKSDYLEFPISITDERYIAEWIFEISDAYGEPVRVYRNKEIRPETQGVQNFLGRLRSINSGVDVPESMRWDGTLDSGGIAQDGRYFFTVTAQDDNGNTSRKGPYEVNVDNTAPEINLNPFVGEMNIFAPGSGGGRNTLTIIQTGSPEDLWEGGIYISQGKRVKNLHFTNSRPGSLIWGRT

SEQ ID NO: 82678 - protein, 304 aa, Unknown
  Obtained from environmental sample
  DOMAIN (125)...(164): e3 binding domain
  misc_feature (1)..(304): Xaa is any amino acid
MAHVLIMPRQGNTVESCIITDWKVKEGDTVGAETVVCEVETDKASFEVPAGAAGTVLKILYGSGDDVPVLAPMAVIGAVGEDWEKGIRELGIGNRESNSTTPIPDINKSPLPTPQGGNAVPPLPISPRARNLAEREALPLSTALPVPGTGPGGRIIERDVKAALETRPALTAAAKAAGAGPLPDVGSGIGGRITTADRLEDRASLRQPSPLPPEGEITETPIKGIRKVISDRMFKSLGESAQFYLNASARAARLQENPFQNERVRRFLRANLPWVKHRERSCSFCGVPALTLFPFRMAKNPRIH

SEQ ID NO: 82679 - protein, 147 aa, Unknown
  Obtained from environmental sample
  DOMAIN (10)...(64): Helix-turn-helix
  misc_feature (1)..(147): Xaa is any amino acid
MAEHTPGERIAEIRKTYSISREDLAERSGVSVELISKIEDDGLIPDLAPLIKISRGLGVRLGTLLDDHEQLGPVICRAGQASTSGRFKTGLPDGADKSSGHHGMNFNALAADKNSRHMEPFVVTIQSDARQEKSTQEGLGRSDPMAG

SEQ ID NO: 82680 - protein, 147 aa, Unknown
  Obtained from environmental sample
  misc_feature (1)..(147): Xaa is any amino acid
VGNRRHLNVKNINRFLSSLSREAERFVEFEQGKNGGKCKFYIDLNIGYEILNLISPEIAAYLSVLMAPVATGEEMTKAEYLALVSSVFSKAVSDEISAARLRVSISFPGQVTNAAGGKFTGKSAEFDIPLLDILVLETPLTYEVSWK

SEQ ID NO: 82681 - protein, 283 aa, Unknown
  Obtained from environmental sample
  DOMAIN (171)...(252): Helicase conserved C-terminal domain
  misc_feature (1)..(283): Xaa is any amino acid
MGSISLDRQIENYKKTKPDIVVGNPNRLLLLAQKKILKLNNLSSLVFDEADRLISGEMIDDTAELCSLIRKFAKIDKILLAACSATINKKCVEKIQTVFFGEEQGRGVSFIESEDNEILRDKIEHWAIFSEKRRKDQTLRSLLAAIKTKKSRIKALVFISKGDEAALVLSRLQYHHVPCSGLFGKIGKNQLSGAERKEALELFRNGSVDVLVSTDLAARGLDIPDITHVIALDVPADSEVYIHRCGRTGRAGKRGIMVTIGDETQMRLLASRKKSETRDNPEK

SEQ ID NO: 82682 - protein, 296 aa, Unknown
  Obtained from environmental sample
  misc_feature (1)..(296): Xaa is any amino acid
MRTFHIGGAATKISEENRIFLKYPVYIREVEGAHVELPEIKSKNKDGKWEVSKPSYWLFTRKGRAIVNKVMKEYKLESRDELLVEDGQRVIRDAPIIKRGSKEILSPEIAYAMILKDAKGNDSTLCLIGQNQTIEIRNGSEFVAKKGEVVEAEKTIATFDPFSDPIIAEAGGIVKYEDIIPGTTLKEEVDEDTGNIEKRITEFQLEGKQPRIIIMDENGNEAASYFLPGGAYIQVDEDEKIDAGRTIAKTLKESSKAMDITSGLPRVGELFEARKPKKPAVLALISGTVRFRGIVK

SEQ ID NO: 82683 - protein, 332 aa, Unknown
  Obtained from environmental sample
  misc_feature (1)..(332): Xaa is any amino acid
FFPVYGESGFARRSRLPTPSGAPTKITVEVFDRGTDGGRTLATDNNYTKWIHDKVLKDINVDVTFQAVGRWSENTDIVNLLASNSAPDLCITYNLEAINSFARQGGILELTPYIDRLLPDFKNLLGKDPQYPGQDFIYRDRGSVEANKMYSLATYVIDVRGAQRNIFIRKDWLDKLGLPLPKTTQEFHDALVAFKNRDPGGVGANNVIPFGQDSDARWGFAPIIYAYFDPKISARDEWIYGITDRPISMPGYKDGVRLINQWYNEGLIYKDFPLLKVAEDYYYLIKTGRVGAFAGNWDLPWRQDYKIHDDLAKNVPGAHFVAIDCIQAPDGT

SEQ ID NO: 82684 - protein, 130 aa, Unknown
  Obtained from environmental sample
  misc_feature (1)..(130): Xaa is any amino acid
MAQNSARGARAIDEFGLEGPESRVDFILDHLPPQIELINHEVGDIIAGSTTVRGKVTEPVGIQSLEISKDGGETFVPLRHSAGLKKGDPARYFSFSIPSKKLEDGAMVYYIRAINKPGVSITRPILFLVY

SEQ ID NO: 82685 - protein, 326 aa, Unknown
  Obtained from environmental sample
  misc_feature (1)..(326): Xaa is any amino acid
DRRDTARKRPRREKPVRSFRFNGIPLKELRWDGHGEAGTFAADGEYTYELYAVDQAGNAGRSNTLRFRMSTVDTPVMISSDTRAFSPNGDRVKDTINLNPQIQVKEGIVNYKIEIQDNAERIIRTFDGRGMPPAAISWDGRTAENVQAPEGIYKARLELRYEQGNQPSAVSLPFELDITPPKGSASAPYTAFSPNGRRATIPFSVKTEADDEWEAAIIGANGRQVKTWNWKGAAPEIVWDGKDAAGNAAPDGTYQFTLESTDAAGNSAKYNIPSLALDARIPRLILTASSTAIAPKANQATDLVRFGIICSLQDARPNLSLGGVFW

SEQ ID NO: 82686 - protein, 310 aa, Unknown
  Obtained from environmental sample
  DOMAIN (192)...(304): Transketolase, C-terminal domain
  misc_feature (1)..(310): Xaa is any amino acid
GDKIATRAAGNKILGSFALANANFVGASADLKGPNAVGLPAGAGTWTRDNVMGQYIHFGIREFAMAAICNGISLHGGLRPYCSTFMVFADYLRPALRLSALMKQPVIYVLTHDSILVGEDGPTHQPVEHLAGMRAMPGLLVLRPGDAEECAEAWAMAMEYTKGPVVLALSRQNITVFPKADPDWRNTIRVGAYIAKQVEGSDPEIVIIATGSEVNTALDVASKAADKKIRVVSMIGKELFESQPAPIRDAMIPSGARVIVCEAGVRFGWERWAKPQDIHSIERFGESGPAEKLAEHLGMTAEGLLKIINN

SEQ ID NO: 82687 - protein, 290 aa, Unknown
  Obtained from environmental sample
  DOMAIN (52)...(197): GAF domain
  misc_feature (1)..(290): Xaa is any amino acid
MSNNLKCPESTEIRRESALPADGAWASRRGKGLMSTLGRMAEIFLSRSGGATFDEVMTAGIRLLSDAVGLDSVSVFRSINAPDGRHASQIYRWHIASGGTTKPNSAFADFRYADIVPSWERSFLEGNAVNGPVAKMPEREAATLNPAGTVSLFAAPIHINGVFWGFVFFEDHRKERTFDSDTADMLRSAAYLCANMVMRSDMESAIEITQTMIDATPLGCMLIDKDFKLLACNNESVSLFGVSGKEELIKNFDKLSPERQPNGELSIDMGIDLIRQTLQGRNDCTFQWGH

SEQ ID NO: 82688 - protein, 322 aa, Unknown
  Obtained from environmental sample
  misc_feature (1)..(322): Xaa is any amino acid
PQASDQIGREEQGKWLSKIRSDYKNVREVPEELLTAEFYLAAVQQDGRALEYVPEAQKTERVCLDAVQQDGRAFEYVPAAQKTETFCLDVLKKNWRALEYVPEALKTEAVCLAAVENNGKAFEYVPAALKTEAICLTVLQKNWRAFEHVPEALKTEAMCLDAVQKDGKYLEFVPEALKTEAMCIAALQQDGMAHEYVPEALRNDALAEVAFISLAQKDYHIIETLPNKYKTEAICLAALGKSVKAFDLIPDKCKTEAICLAAVQKDGKLLEFVPKAKKTEAVCLAAVEKYANALEFVPDAKKTEAMCLAAVKKRMCWNSSPG

SEQ ID NO: 82689 - protein, 284 aa, Unknown
  Obtained from environmental sample
  DOMAIN (3)...(168): MatE
  misc_feature (1)..(284): Xaa is any amino acid
VGPTVIGMAAYQLNDLVSTALAGNAGEGIVSSLQYSLRLQELILGIFAVSIGTVLLPDLAEYAKSKQWDIFNRRLSSGMNIIAFITIPVTFFSLSQGPGLIALLFQTRSFDQESARLTLAAFHFHMPGLYFIALNRILAPAFYAQSDAKSPTIAGIFSFIVNMALAAVLAFPFKGSGIAFALSFASAVNTAALLFFLRKNQEISLGRTLKSALGYAAQLILFSALALVPILLLSPGISGLFSGRGRVISYGVPLLLNALVYAATGVFLLAVSRDKQLLGMIRML

SEQ ID NO: 82690 - protein, 289 aa, Unknown
  Obtained from environmental sample
  misc_feature (1)..(289): Xaa is any amino acid
MLNKMIWRIDIDIKQLQTKISSLEKTEKNINQIDEMLEKSQESISEIRNFKELMKEMTQMVEETRRLDSHFENRLAEVQQHTKNIDAINERVREVHNVAKSTEATLNSLKKHLSIAEGSRAQVMEYEKSLDKVKVKIEEVSKEWQSVDAITAHISGIESQLREFDMKILALAKQERVVAGFEAKLEDIRSLVDDISANEENLQKRRVDIEGTNGKIREYFDSLGKLEKNVEGIGKYEELISGISRKIDALEALSGRIEGRIKATEDRAGIIDEVQRKIEGWAHSAINRG

SEQ ID NO: 82691 - protein, 145 aa, Unknown
  Obtained from environmental sample
  misc_feature (1)..(145): Xaa is any amino acid
MWHPKMTEFDERMKKLFDEVDACIENLYGDRYSLHPMRPERGETSNPEADGLFNIGAVFTPGYGSEHGRGYLIDISISTLESVDEDTRREIYETVADKVKELLPVHFPERELTVLRDKNHFKIMGDFNLGIIKKSSSRPILILPS

SEQ ID NO: 82692 - protein, 160 aa, Unknown
  Obtained from environmental sample
  DOMAIN (5)...(156): Phosphoribosyl transferase domain
  misc_feature (1)..(160): Xaa is any amino acid
MEVPMHSTLLLRAEDMERIIERLALQIIERHGDCSSLVLVGIQRRGVDLARRLAVCINERLECAIPLGTLDINLYRDDWTSLLGKPHIGQSSIPVRLDDQVALLVDDVLFTARTVRAALQAPADYGRPARVELLVLIDGGHRELPIHADYVGTTLEIARS

SEQ ID NO: 82693 - protein, 323 aa, Unknown
  Obtained from environmental sample
  DOMAIN (127)...(216): Helicase conserved C-terminal domain
  misc_feature (1)..(323): Xaa is any amino acid
MTDWPRFNIDFILGLLKRVLESRRDFKVIISSATINAEVFSEYFGECPIVKIDAQTFPVTLIYDPVTENPSFKQKDSMGEEILMKIEAITTRFISEKRGGDILIFLPGEKMIKDCMNRLSLCSAGKFLHILPLYGRLGKEEQERVFENAPNGKTKVIISTNIAETSVTIDGITAVIDSGLAKLNWYNPTTFTSSLIEAPISKASANQRKGRAGRTQEGSCYRLYTRKDFENRPLYTTEEIFRTDLSEVILRMADLGITNFEDFDFISAPERAGIIGGIETLNLLEALESDRSLSNIGKLMTEFPLAPASSRINVEAILRYPDV

SEQ ID NO: 82694 - protein, 321 aa, Unknown
  Obtained from environmental sample
  misc_feature (1)..(321): Xaa is any amino acid
MVEFFQKETDISRSDRFIREYFGGSKDINLVVKADTTEELLHPDVLKAIDDLSVYLTENVPDVGKVVGFADIIKRINQVFNAGESPEGLRKIVSSDTSGSFGFSDTGDFGFGSFGFSDNTPVKETPKQDIEYHDISKYNMADLLAFLDTASGKSQHLSGNDLIRELKRLTNYEGMAYYEIPSDPKRYGKETPEELQRLIANYLVLLAGDDDSGYSNDPLEPTAIRTMIQLRTTGNMDSQTVIDIIKEYTEINFPKNVQVIIGGGVTYEIAITELIFNSPIISNYISVFIVFVIMSFSYKSPVAGFVGAVPLSLANLCNFAR

SEQ ID NO: 82695 - protein, 50 aa, Unknown
  Obtained from environmental sample
  misc_feature (1)..(50): Xaa is any amino acid
IARKGFGAVVDGCPAGLEISEEYIQPFLDLRKPGQSAITTQRKESDLLKF

SEQ ID NO: 82696 - protein, 240 aa, Unknown
  Obtained from environmental sample
  DOMAIN (1)...(237): Domain of unknown function (DUF323)
  misc_feature (1)..(240): Xaa is any amino acid
MGKELGTAGSGDTTPVHTVTLTGFSMSKYPVTQEQYQAVMETNPSYFTSAVSGESGTPGKLPVESVSWYDAIVFCNKLSVKDGLTPAYSIGGSTDPSDWGTVPTEPNDPNITTWRTVVIVADSTGYRLPTEAQWEYAAKGGTTQGNFTYAGSNKAGDVAWYKDNSGSKTHEVGKKASNALGLYDMNGNLDEWCWNWYGPYSSETQTNPEDGPLWSSNRVLRGGDYYLSSVEYLNVVYPNS

SEQ ID NO: 82697 - protein, 258 aa, Unknown
  Obtained from environmental sample
  DOMAIN (83)...(248): ABC transporter
  misc_feature (1)..(258): Xaa is any amino acid
SQIGRDFSRFSSNASKARQATSRKKVLEKLDLDNVPVTSRKFPYAGFKSDREIGNNVLRAEKLNYTFEGTSLLKDFSLIVNKGEKIAFVGLEHSSKSAFFDIITGEKKAESGDCYWGQTTSFSYFPKENSTYFSSNLSITDWLRQYSPDQDETYVRSFLGRMLFSGDEALKPVNVLSGGEKVRCLLSKMMLSGANVLILDEPTNHLDLEAITALNDGLAAFSGVILFNSHDHEFIISIAKRIIEILLKKKTPAGLSTD

SEQ ID NO: 82698 - protein, 314 aa, Unknown
  Obtained from environmental sample
  misc_feature (1)..(314): Xaa is any amino acid
LLAQIILSFCAENDQNEDELFKTIRGFYVYRNLSRENFDGVVRMLSGSYEDTRLRELKRRLFRDEETKTLSAAPGTLPLLYTSSGVITSRGLYSLRLAPGVEGAGTKIGELDEEFVWERRLGDIFDFGNRSWRITAIGNEAVEAIPISTGADYAPFWTGEGFYRSPVISRRILEILEGYYPKGWTSLKAERMLDNFSDEAKKELEDFLFSQWSLQKGIPFPGPSFIPIEIIDDPDRGDAYLIIFHSFKGGAINFPLSLALARDLEAHIHMRVDGAANDNAVFIRLPPFHRRGAGCNNSGISAPHFRRRNRRRTL

SEQ ID NO: 82699 - protein, 344 aa, Unknown
  Obtained from environmental sample
  DOMAIN (133)...(307): von Willebrand factor type A domain
  misc_feature (1)..(344): Xaa is any amino acid
LEGQVPPAFKDMSNWYGGMTQETFNTSEFDHIVDNPFRRVIDSPLSTFSIDVDTAGYSITRSFLMNERKPPKSAVRIEELINYFDYDYSPPMDGKPFAVHVETGAAPWNTDHLLARIALKGKEFPVNGRPKVNLVFLLDVSGSMDEPNRLPLVISSMKMLVNELKGTDKVAICVYAGAAGTVLPPTSGDNKNMILAALDRLQAGGSTAGGEGIQLAYRLAEENFDPNAVNRVILCTDGDFNVGITNRSDLTDMVAAKAKSGVYLTVLGFGMNNYRDGTLKQLASKGNGNYGYIDTMEEARKILVEQLSGTLITIAQDVKIQVEFNPETVGASRSCRILSHGGGG

SEQ ID NO: 82700 - protein, 128 aa, Unknown
  Obtained from environmental sample
  DOMAIN (1)...(87): Phosphoribosyl transferase domain
  misc_feature (1)..(128): Xaa is any amino acid
MGGIVVAYELGRQLGLPAFFTERDDTGKMALRRGFEIKPGQKVLITEDVVTTGKSSGECAAVLVEHGAKIAALACLIDRRAAGIDVPYLFYPVCKVDASNWEAGDCELCRKGIPAVKPGSRKGIGNRE

SEQ ID NO: 82701 - protein, 69 aa, Unknown
  Obtained from environmental sample
  misc_feature (1)..(69): Xaa is any amino acid
MANKRSSVTKTFGILTAGGDCPGLNAAIRGVCRAAHDRYGMTIVGISDGFRGLIEGNTKTLKPEDFSGI

SEQ ID NO: 82702 - protein, 179 aa, Unknown
  Obtained from environmental sample
  misc_feature (1)..(179): Xaa is any amino acid
MFLPFSLYSFGKSEQKKGGSTSINKIAEPEKQEPPIPAPPKQEVKSPVTLVGTSNGLYSIEPAGISSLRSGEVKKILHVKSDASGGNPGGYWTILGSDGIFISTDLKRWEQRGQGLPVKTIKVFQDGNKSFLRVPHEIKDLEINTADPKIMVCATKDNVYLSRDQGVSWRNLGFAPLPD

SEQ ID NO: 82703 - protein, 320 aa, Unknown
  Obtained from environmental sample
  DOMAIN (217)...(320): B3/4 domain
  misc_feature (1)..(320): Xaa is any amino acid
MAERPRIVYSWLKDFVDIAAPVTQVADALASAGIEVASVVETAVPKGVKVARVVSRVPHPNADKLSLCRVDAGEGEPLQIVCGAPNVAEGMTVALATIGTILPGDFKIGKSKIRGQESFGMLCSGKELGLSEDHSGIMALPGDYAVGAPLADYIPYDAVIEIEITPNRGDCLSVVGVAREVSARFGLPFRKPVRRLQAQGRDPVSEAISVEVKDQGRCPRYMGRLVRNVAIGPSPEWMKRRLALAGLRPINNVVDITNYILIKYGQPMHAFDYDAIEDKRIVVQTAGAVGVSSFTTLDGVERKLVGDDLLICDGKRAVAL

SEQ ID NO: 82704 - protein, 117 aa, Unknown
  Obtained from environmental sample
  misc_feature (1)..(117): Xaa is any amino acid
MCRAISQENRRWFYHAGTELVPIFSDELIHFKDWNPWNPLRGVNPLASLALELEQDYFANKANSTLLKNNAIPQGLLKTDQTLRPEEADALEKRWESKYGQAKAGRKIAVLGKGTSF

SEQ ID NO: 82705 - protein, 123 aa, Unknown
  Obtained from environmental sample
  DOMAIN (8)...(123): Fructose-bisphosphate aldolase class-II
  misc_feature (1)..(123): Xaa is any amino acid
MTSYTELGLVNTKKLFEKAVSGGYAIPAYNFNNMEQIQAIIQACVETKSPVILQVSSGARKYANQNILKNMAKGVVQYAHELGYDIPIVLHLDHGHSFELCQDCIETRVFSVMIDGFHLPYDK

SEQ ID NO: 82706 - protein, 144 aa, Unknown
  Obtained from environmental sample
  misc_feature (1)..(144): Xaa is any amino acid
VGTWAGALLGTCTVTSYVESTAGVAAGGRTGLNALFTGLFFLVALFFWPVFRIVPIAATFPALIFAGFLMMSPVVEINFKDPTEGIPAFMAIIMMPFTYSIADGIVYGVLTYVTLKVVTRRLKEIHPVTWLFFIVFILKVVLDR

SEQ ID NO: 82707 - protein, 303 aa, Unknown
  Obtained from environmental sample
  DOMAIN (1)...(295): Aminopeptidase I zinc metalloprotease (M18)
  misc_feature (1)..(303): Xaa is any amino acid
MTTPVFTITDLLPHLAQDQMQKKASEVVEGEDLDVLSGSRPYDDEKVKEKVKLRFLSILNEKYGLNEKDFASAEIEFVPAAKARDLGLDRSMIGGYGHDDRSGAYPALRALMEIAAQKEAPEKTVLCYLSDKEEIGSLGNTGAASQGLENFIAALAGEDDLRRCLGNSSMLSCDVSPAFDPSYASVYEKRNSSYMGKGIVINKYTGSRGKYGASDANAEFCARVLAMMDKNKIPWQFGEMGKVDKGGGGTIALHMAKYGIGVLDCGIPVLSMHSPFRVISKIDLYMAFKGYAAFLRGDLSQAP

SEQ ID NO: 82708 - protein, 212 aa, Unknown
  Obtained from environmental sample
  DOMAIN (1)...(136): SPFH domain / Band 7 family
  misc_feature (1)..(212): Xaa is any amino acid
LSFPPGYREFGFSLRTLTGDSVTVNVDAFCFWLVWDPQKAVLEIENYEEAVALASKAALRNAMSKNDLSTFLARGDLIEKQIQEEVERQTTEWGITVQYVEITDIQIPEALQDSLSRMAQAEREKKARVFLAEAEIEIARKLEEAISIYAKNEGALKLKILSILNEGLKAGNSMMLIPNSIAEELKTRDVFGLAALNELKKKEGENNDSSKS

SEQ ID NO: 82709 - protein, 315 aa, Unknown
  Obtained from environmental sample
  DOMAIN (199)...(264): His Kinase A (phosphoacceptor) domain
  misc_feature (1)..(315): Xaa is any amino acid
MADWYNPTERSWYQNAIAANGEIATTMIYSDVIYDSPVLIFSRCVYDDHGRRLGVVGLRIEIDAIGEFVINTASAHGGYGILISEDLVLFAHPNRKLIGKNMREIGASISVLADKLLSGKEITEYPITSYKGEDSVAFLRRLPNDWYLGVNFPRLPYYKGVINLALILSIMRIALASVLSFILIRVDAARNISDMESRYKSTFLANMSHEIRTPMNAIIGMTELLANRQLSERQMGFIDDIWVSAHSLLSIINHILDLSKIESRKITLVPVNYDSHMLADNIVPWSVMWRKKKASNSNFEAQATCPNTFTGTYYG

SEQ ID NO: 82710 - protein, 106 aa, Unknown
  Obtained from environmental sample
  misc_feature (1)..(106): Xaa is any amino acid
VNKIIKTVYLGMRGDIVHPGIINIIRKGAMFGELTVGLLTDSAIASHKRLPYLTYEQRKDVIENIKGVARVIPQEEWSYIPNLRKLNPITLFHVMTGKTALCRKTR

SEQ ID NO: 82711 - protein, 164 aa, Unknown
  Obtained from environmental sample
  DOMAIN (133)...(156): 4Fe-4S binding domain
  misc_feature (1)..(164): Xaa is any amino acid
VFPRIIDDGRGYTGLKTCRGAKVAGGTKLCTWGCLGFGDCVKMCKFGALSMTDNRLPKIDYSKCTGCGLCSGECPMGLFKTVERKQKGAMVLCSNLNPVRPTIAKTCKIACFKCGLCVKNCPEHCISLDTLIPVVDLSKCTSCGTCAQKCPCKVFKIIEKDIVV

SEQ ID NO: 82712 - protein, 286 aa, Unknown
  Obtained from environmental sample
  DOMAIN (1)...(286): Histidinol dehydrogenase
  misc_feature (1)..(286): Xaa is any amino acid
VIFASPPLEDGFPDRKILATAAISAETAERTLRVFAVGGAQAIAAMALGTESIPRVDVIAGPGNKYVAAAKRLLYGEVGIDFIAGPSDVLIVSDNSTTKDIAQNANLIAADMIAQAEHDPDARARALIPNRELADKIAEAVEVQLAKLPTAENARSSLESGGLIVVYEGKEEAVRIANAIAPEHLELHVTDPDCWIPKLKNYGSLFSGALSAEVLGDYSAGINHTLPTSGSARFTGGLSVRHFLKTVTTLRCTSGEGFEKTRKAAEILAAAEGLPGHAQSAAIRKA

SEQ ID NO: 82713 - protein, 240 aa, Unknown
  Obtained from environmental sample
  misc_feature (1)..(240): Xaa is any amino acid
MLFLPGSIAVSDFRLSQFPVKGISAEYLHIAETERDLTAEELKKLEILLEYGEVGARVRARVRARLIAPLLAPPAATQLIVAPRAGTISPWSSKATDILHICGLHAVIRIERAVVWNFAQDLPPKEMLFDRMTQQIFQSKEELAALFAHKEPKPLTRISDLEKANSELGLALSAEEINYLKEKFAELGREPSDVELMMFAQANSEHCRTKYSMPRGKSRKQQICPCSNDKEHLQCSLNAF

SEQ ID NO: 82714 - protein, 78 aa, Unknown
  Obtained from environmental sample
  DOMAIN (1)...(51): Helix-turn-helix
  misc_feature (1)..(78): Xaa is any amino acid
MEPLGITSYRLSKEIKVQQTAVSQIINGSRKITVDMALTLSRYFGNSAQFWLKSQINMIWNLKWRKRIPDKRIVPYSI

SEQ ID NO: 82715 - protein, 153 aa, Unknown
  Obtained from environmental sample
  misc_feature (1)..(153): Xaa is any amino acid
MDVPLRYRFVYSTSFKVSNGSLSLEIPYYSDPYVNRDFMGRSEVLDWLAMLREGVTASDVVSDASISSYEWKLNGSFNVPVAKFAPYVSSFSISNLSSTLTFSQRYSGRYSGPSAPPNPGRAFFFPNRLTILSISASGHWTSADLMHGGGKTR

SEQ ID NO: 82716 - protein, 208 aa, Unknown
  Obtained from environmental sample
  DOMAIN (24)...(70): Bacterial regulatory proteins, tetR family
  misc_feature (1)..(208): Xaa is any amino acid
YKKGKYDTKIKQAYRQVERTKSWIFDALMLLMDEKPYDKITVSDIADKAGVARPTFYRNYPDKDEVIVQYLNNSFNAEIMSTEKVDKGGKPNNIILTFDVTYLNKNQKNLKKILSTADVEARIYRELQVYTLLLIKNYKKQLSAEEYLICHYKICYQITGSLKVLFDWFINNMPMPIEKLVPMLNAMNIPKTVQYSNIPGVEVRIKEE

SEQ ID NO: 82717 - protein, 222 aa, Unknown
  Obtained from environmental sample
  DOMAIN (75)...(219): GGDEF domain
  misc_feature (1)..(222): Xaa is any amino acid
MFINPPLFNLCLTISAMAGFIVSAIFIKNFDVWFLDIINVSIAGAISLFFTWHITKLRIGLELSTTMLENERDGYYDQSTIDELTKLKNRRDFQQTFKRYLSNYRTSDNFLCVAIIDIDFFKFYNDHYGHPGGDECLRSVGRALNSMKETHNVYTARVGGEEFALLWFEAEISHVDVVVSHLQSLIKELKIPHEKSRVSPYVSISMGVFVERSRVSTDTQTM

SEQ ID NO: 82718 - protein, 340 aa, Unknown
  Obtained from environmental sample
  DOMAIN (135)...(339): Competence protein
  misc_feature (1)..(340): Xaa is any amino acid
MCNFALPREKITAVEGVLLEDPRIINGGRAMASLSLKKCAGNGKIRAGSIRASAKGTITVFFPQDNAIRITEFGRGAAVFTEGALRATDTGLLFSAESAHIVKPAPPVERMRTGIRLKLIEKFGGKAWGGLALALLLGIRDNLDTNLAVMYRDAGCSYILALSGMHLAVLAALIAFLLKKPLGFKGASLAGAVIICLYCFIVGPMPSLNRAAIMYLLGVVTLLGAFPKEPLSILALSFLLQIIISPSQGNSISFILSYSALAGILLIRQPLYSLFSEKAPDFHLQPLTACCGAFLATAGITSFTFGVLAPPGVVIDLALSPVTTVSMIGSTIWLAPDLTR

SEQ ID NO: 82719 - protein, 313 aa, Unknown
  Obtained from environmental sample
  misc_feature (1)..(313): Xaa is any amino acid
MLYRSATGLRCIESVPDALRTEVVCIAAVQQRGHFLSYVPEAMRTEAVCLAAVQQDCRAFECVPETQKTEVLCLAAVQQNYWALRYIPEALKTEAVCLAAVKKNGGELCYVPVAMRTEALCLAAVQQNGEALYFVPEALMTEALCLAAVQQNGWALLYVPEALWTEALCLEAIRIDDYANNYRGYNPEGLNAKVEAAFKKAFSTEALCLAKVQKNGRALKYVPEEFKTEAVCRAAVQQYGHALKYVPDALKEKFVRRAEKEYRIGDTGPAGGIVFYDKGNDSDGWRYLEAAPAETEFKAQTATEWLSIFCRGG

SEQ ID NO: 82720 - protein, 150 aa, Unknown
  Obtained from environmental sample
  DOMAIN (38)...(130): ATP cone domain
  misc_feature (1)..(150): Xaa is any amino acid
RSAEIRTLADGDAIRRRRECLSCSYRFTSYERTEDKQFMVVKRGGRREPFDRAKIERGVNRALEKRPVSQMGIESLVNEIEDQAAILGKVNHEIDAAAIGDLVLEKLAILDKVAYIRFASVYRHFEDLDEFLREIQKIDGKKNEEKGEQV

SEQ ID NO: 82721 - protein, 131 aa, Unknown
  Obtained from environmental sample
  misc_feature (1)..(131): Xaa is any amino acid
MKSYKAYIFDLDGTLLDSMGVWEQLDIDFLEKRGIAVPPDYMNAVSPMTPYEAAAYTIKRFVLKDTIDGLMREWNDMAAYAYGNTVQMKPHAKEYLMTLRERGAKLAVATSLSAELREPALLTSAIIPGEK

SEQ ID NO: 82722 - protein, 67 aa, Unknown
  Obtained from environmental sample
  misc_feature (1)..(67): Xaa is any amino acid
MSLLNTPFWVVFWASFSPKVWKEIWPATLDTLYMTLIASLITLVFGLLLGIIMTITTKDAAELSINR

SEQ ID NO: 82723 - protein, 152 aa, Unknown
  Obtained from environmental sample
  misc_feature (1)..(152): Xaa is any amino acid
VDYVFDASFLGALIIPDEKNPRVDKIHKSIGQNEVIFVPQLIWYEIANVFKNLMRRKRYQFDDVLELSKLLTEDRLTCDFETGPNYAEKLLRLCNDYNISSYDAAYLELAWRKKGRPLYTGRKLVTAAKKYGVTVLNKPYGLCRSELVGPKK

SEQ ID NO: 82724 - protein, 54 aa, Unknown
  Obtained from environmental sample
  misc_feature (1)..(54): Xaa is any amino acid
RANNFGTGGIATKLEAAKLAVSYGIPAILANGAEPRSLETLAAGGQKGTVFLAS

SEQ ID NO: 82725 - protein, 233 aa, Unknown
  Obtained from environmental sample
  DOMAIN (63)...(152): Mur ligase family, glutamate ligase domain
  misc_feature (1)..(233): Xaa is any amino acid
ESDAWGNWYTVFISQAREYIDFRDKLPGSYNSGNVLAALLTVSELVKRPARDIAPYVKFLKPVRGRMTSINKKQPFEVVIDYAHTPSSFQAIFPPLRVRLDKTGRKIISLFGSAGERDTQKRAEQGKIAAHYSDFIILTDEDPRGEKPMDILEEIEKGVHEDQELKTVFERDKNLFLIPDRPTAIRKALSLAQKGDLVLLLGKGHENSIIYADHVMPFDEIAETEKALKEIGF

SEQ ID NO: 82726 - protein, 284 aa, Unknown
  Obtained from environmental sample
  DOMAIN (27)...(163): Bacterial flagellin N-terminus
  misc_feature (1)..(284): Xaa is any amino acid
MRITFATVNRNVQRNLSRRYSNMVNLQEQLATGKRLRKASDDPVDVANAIKLRAKEAEFGQYKRNIQDGLALMGVGASAMASMNEILHRARELAVQAANGTYNDSDRLYMQQEVDQLFRQMMSVVNSQFKGSYIFNGTNGNVPPYKIASSGSELVDYENRTMATFGTVFARKADGNEWNTPNIPDPAVVTAATHASRVPNPDTLYVNYTTSNLRIGDKVQLAWNSSDPRVYARGLQYIYPETMPLDEITVTVGGVSETLATALMQQITRRLRHCRVVRTASSPE

SEQ ID NO: 82727 - protein, 311 aa, Unknown
  Obtained from environmental sample
  DOMAIN (61)...(126): His Kinase A (phosphoacceptor) domain
  misc_feature (1)..(311): Xaa is any amino acid
MIRSAERHELGVDLPRLPYYQSESKLAAIFSILGIALASILSFVLIRVDAARNKADMESKYKSAFLANMSHEIRTPMNAIIGMAELLTNEQLSKRQMGFIDDIKVSAYSLLSIINNILDFSKIEAGRFSLIPVNYDFRALLDNIISMFRYMTQRKGLDFKYESLGEPPEYLYGDDLRLRQVLTNIYENAIKYTDWGYIVLKTSFLENNLIFEVSDTGMGIREENLPKLFDAFERFEMKKNRSIEGTGLGLPICKSIVEMMGGMILVKSEYGKGSVFTIIIPVVSGGKPEVNSVKDLKKERILCAPKRNILI

SEQ ID NO: 82728 - protein, 172 aa, Unknown
  Obtained from environmental sample
  misc_feature (1)..(172): Xaa is any amino acid
YGSAKFVAGGGSGGKMAYSADGVTWTSVDVSSIFDYIGKIIYDNGKFAAAGSDNVSSKMAYSSDGVTWTAVADSKLNVGISNLAYGNGRYVISGGSTGDNQMAYSTDGVTWTVFAKPSAFSGAIGEIIYANNMFVGVSQSGRITTSTNGTTWTAVSNSGVSSDLRSEAARSA

SEQ ID NO: 82729 - protein, 310 aa, Unknown
  Obtained from environmental sample
  misc_feature (1)..(310): Xaa is any amino acid
MSKDFDPIKSALGVADVLVEAFACDIPEKVFRIALNQSKLIINLEYLSAEDWVEEYHLFESLLGSGTARKFFFMPGFRETTGGLIINSKLKALRECGGLDRFAVINGVVGDFGVSIAPDGDTLVGTVFTYERGFDTLISDLVELGRDTLLIVFGEKSRLGMAATLGRLLGVASSCEGWIDCYKDPCQAYKNVRVLYAPFLPQHDYDALLCCTDFNLVRGEDSLARAVLSGKPFVWHAYIHAEKHQRVKAEALLKTMRPYYQESELDGVFAEYHALTMAFYDAESAFTDQITSERYGAFFKDLKNMSAARA

SEQ ID NO: 82730 - protein, 230 aa, Unknown
  Obtained from environmental sample
  DOMAIN (4)...(230): Glucose inhibited division protein A
  misc_feature (1)..(230): Xaa is any amino acid
MDYDCIVIGGGHAGIEASLAVSRLGFTCLLVTQNPDSIGVMSCNPAVGGLSKGNLVREVDALGGEMAHLTDKTMIQYRVLNRSRGPAVQSPRAQSDKKAYQAAARKAVEGQKGLTIFMDTVVDLITGETDGVQSVQGVITGRGHRISSSTVILASGTFMEGKIFIGEYDAPQGRLGEEAARGLGQSLRQLGFPVGRLKTGTPARIARDSIDFGGRKNRTGNASAIIRGEA

SEQ ID NO: 82731 - protein, 86 aa, Unknown
  Obtained from environmental sample
  misc_feature (1)..(86): Xaa is any amino acid
KGLEILAVNCARDQATSVSFLKNEGFSFPVLLDLSGRVSINYGIQAIPTTFLIDRDGMIILRLVGSIDWDTPIIHAALESLLSNGL

SEQ ID NO: 82732 - protein, 318 aa, Unknown
  Obtained from environmental sample
  misc_feature (1)..(318): Xaa is any amino acid
MAEFEKGFATLKSTAYENISEELKSFETEFFADLTRRGNDMDLRIVEWQNSLEKRLSAIDENSETALRKLEQDRAEEMKKNISALDAHLVSELERLKSETGTFEEGILDQMKAAEEMKQKALEANAAKLEEYRRAQDIEFQRLESLADDSRNMDAELRRYMQELIERLKDEFSVYRGEAEELRKAEMENFSSNVMRIEGEMADVEKGLAALKSAAYENISGELKSFENEFFADLTRRNNAIDQRVAEWQADLEKRLSTIGENSETTLRELEQDRAEEMRKPWPPWTRTLRRSLTPQIGDRGALRGDTGSNKTGEENEA

SEQ ID NO: 82733 - protein, 258 aa, Unknown
  Obtained from environmental sample
  DOMAIN (43)...(256): DNA gyrase/topoisomerase IV, subunit A
  misc_feature (1)..(258): Xaa is any amino acid
VAKIDTTGELPMNEPTGKVIPIAIEDEVKTDYLNYAMSVIVSRALPDVRDGLKPVHRRLLYAMDTLGLRPGGGTKKSALIVGETMGKYHPHGDLSLYDALVRMAQDFSLRYPLIKGQGNFGSIDDDPPAAMRYTEAKISKIGDEMLQDLQKETVNFIPNYDESFNEPSVLPSAIPNLLVNGSSGIAVGMATNMAPHNIGEICDAICALIDNPEATNEDLMRLVQGPDFPTGGTIFGRQGKKRLKNRSRKTSANLSLPT

SEQ ID NO: 82734 - protein, 173 aa, Unknown
  Obtained from environmental sample
  DOMAIN (2)...(136): Uncharacterized ACR, YhhQ family COG1738
  misc_feature (1)..(173): Xaa is any amino acid
YRVYGFALARRVSGQVYCSVPLFSAFFVLARLPADSVWEGYAGTAAFDAILGGMSTGGITIASLAGYVIGEFSNSVVLSRLKVAMKGNALWVRAIASSLVGELLDSLTFVFFASLTGVFGWELFLSLVLTNYLFKVLIEVLVFPLTFLAVKKLKKAEGIDAYDVGVKLNPFRG

SEQ ID NO: 82735 - protein, 138 aa, Unknown
  Obtained from environmental sample
  misc_feature (1)..(138): Xaa is any amino acid
VGGRFISVISPVSCGLTHRDAASVAANDKQRLDEIYNVNADSAAGDIARALKAGDLISFSDVPGVKIGGAVRGVIHTSEIEGLIESGDVTGGMIPKLRSAAAAVEAGVGRVHICGWHGPTTLMDEMDEGTALGTTIQK

SEQ ID NO: 82736 - protein, 104 aa, Unknown
  Obtained from environmental sample
  misc_feature (1)..(104): Xaa is any amino acid
MEPTVAVEKGRSFKLDDFEGPLDLLLFLIRKNEINIYDIPIAKITGQFLDYLREAQSMDLEETSEFHAMAAMLLLIKSRTLLPVEMDDDGELLDPGRNWSSALS

SEQ ID NO: 82737 - protein, 201 aa, Unknown
  Obtained from environmental sample
  DOMAIN (2)...(178): ABC transporter
  misc_feature (1)..(201): Xaa is any amino acid
MSERFRQVYGFPQRGGMRIYGKKYVFNSPRAAISSGLGYISEDRKGLGLVLIQDVKTNIAHASLDKLSRFGVMDSQKEILEAERYRKDLNIRMPSVNQIVRNLSGGNQQKVVVSKTLLANPDIFIVDEPTRGIDVGAKTEIYGIMNNMIAAGKSVIMVSSELPEALGMADRIYVMNEGKIKGELNKNEATQEKIMHLALVG

SEQ ID NO: 82738 - protein, 147 aa, Unknown
  Obtained from environmental sample
  DOMAIN (85)...(120): Sel1 repeat
  misc_feature (1)..(147): Xaa is any amino acid
YGGINKLPNKGSKGGGLPWAVMYAGGRGVVQDNVKAARLWRQAADQGHARAQLTLGMMYAIGQGVPRDATQAAQWYRKAADQGDADAQFNLGVSHLTGKGASRDREKGCALLRASAEQNLKQAVKLYNDVCVAGRPLPSRTHKAPGR

SEQ ID NO: 82739 - protein, 318 aa, Unknown
  Obtained from environmental sample
  DOMAIN (84)...(159): His Kinase A (phosphoacceptor) domain
  misc_feature (1)..(318): Xaa is any amino acid
LWELIPDERIADFFQQTLKRGGRLLEQEMDLQTQGLPGPSRLLSISVHPLVEKRHITGSLVYIEDITEKRGREVRLRRAENLASLTTLAAGVAHEIKNPLGAISIHLQLMRKALDKKERRHDTETDALVDKYFSVLNEEVDRLNGIVIDFLFAVRPMSLELCEGDLNALISALGEFIRAELEQSNIRLLLELDDKLPPVLFDERYMKQVLLNLIKNAQAAMPKGGLLTIATVGRDGEVRISVCDTGTGISQENLKKIFEPYFTTKGNGTGLGLTLVYKIIREHQGEMSVDSRVGEGTDLKSSFPSIRKNSLGQSVIGS

SEQ ID NO: 82740 - protein, 344 aa, Unknown
  Obtained from environmental sample
  misc_feature (1)..(344): Xaa is any amino acid
MIRSARDFGAGGVSVAVGELARGLEVNLDAVPKKYAGLDGTELAISESQERMAVLCSASDAEAFIKAAAAENLEAVIIAKVSDENESRLRMSWRGKTIVDISRDFLDTNGAPRTAKALLPKTNSKNINHGEYGVSRSKNNEDDISAGVLAELPAGVLIDNLERELVSLRSGSRRGLQERFDGSVGALSVLFPWGGSEQGTPECGMAALLPSLDKQSRTTSLMTFGYDPALMSLDPYTGAKGSIREALAKFACLGGDPFTARLSLQEYFRRPETPETWGAPAAALLGALEAQVSLGVPAIGGKESMSGNYRDDGRGIDLAVPPTLVAFARRTVAPDKSARRISGK

SEQ ID NO: 82741 - protein, 57 aa, Unknown
  Obtained from environmental sample
  misc_feature (1)..(57): Xaa is any amino acid
TAIKKAAGQGLRAFALTDHDTITGLESAKKAAYAEKIHFIPGIEININGAGEKGFPE

SEQ ID NO: 82742 - protein, 321 aa, Unknown
  Obtained from environmental sample
  DOMAIN (209)...(304): Alpha-2-macroglobulin family
  misc_feature (1)..(321): Xaa is any amino acid
VLSRRPAKVLLQSTLPEGWYLITVEREGIFTEEVRHFTEPVSVIDIPIARNYVPVVYVAVSSYSTRSGPPTHEYGSPDLDKPKGYFGVTPLHVNPRARAFSVKVESNKKTYRPGEEVTMTLTATKDGKPLPNAELTLMAVDRGVLDLINYHVPDPIQYFYNESLFKLMVAGGDSRSWLMDPVTYSVKDLAGGDAEGDSKIEERKDFNPTAVFEPMLITDDSGKVTCKFKLPDTLTTYRVTVFGVRGDIFALKETEIAAQNKINVREVLPRRMRERDTAEAGVLITNLDTSSHTLSVRLDIGPAPAQRRLKRNKKNSRASFC

SEQ ID NO: 82743 - protein, 319 aa, Unknown
  Obtained from environmental sample
  misc_feature (1)..(319): Xaa is any amino acid
MHERAQRGDHAAVIFGEYLDAVGLRSEVQNPRQVVENELKSWARVQLSGGGFPYWPSGTEADFYVSLRIAHIIAIARSKKMSVPTSLNIADLNSYLTREYQRLQGWRSNSSTYYYQSYLQSYMLYVQSLLGEKVDPSRLAEILSRDNVDPSVLAFAGMTYRALGRNADAANTAQRLRNLVRMSTRGADITDPLERYRYSYYGGMVEQLALTLQFFVDQYPGDDINTRLLFSLLENKRSNRGYWESTAVTVRVLAAVDALIRAENLINLDVNGTVTLAGTELLKGAFKGLGAKPVTETFDFTGPILAGLQRDSMHLSADL

SEQ ID NO: 82744 - protein, 88 aa, Unknown
  Obtained from environmental sample
  misc_feature (1)..(88): Xaa is any amino acid
VLASKRPLQLSHPTEKPVRLAERIIALISDEGDTIYDPFMGSGSFGVACINTGRKYIGSEMKQEYFDIACERIEKTVNQKMLNFGEAS

SEQ ID NO: 82745 - protein, 316 aa, Unknown
  Obtained from environmental sample
  DOMAIN (17)...(94): Helicase conserved C-terminal domain
  misc_feature (1)..(316): Xaa is any amino acid
VVNDRVQSIEKLAAEVEGWVPNLRVAIAHAQMSDSSLEKTMSAFINREFDVLVCTVLIESGLDVPNANTIIIMNAQQFGVGQLYQLRGRVGRSAVQARAFLVVPEGEVGVSKSAKKRLAAMEQFTDLGSGYQVAMRDLEIRGAGNLLGMEQHGFIEEIGFETYVRMVKEAVAELLGTQSDSAVQPRLELRTDAYLPETWIKDGLARISIYQRIARIEASEEIATLAEELRDRFGPIPGPAEMLLMSAEIGLKAKKFSITGIARKQGVAVLTFSNKITAKSPILAEMYAKSKFPMRFLTTMPMQAVVKCSAESDLGK

SEQ ID NO: 82746 - protein, 139 aa, Unknown
  Obtained from environmental sample
  DOMAIN (1)...(139): Starch synthase catalytic domain
  misc_feature (1)..(139): Xaa is any amino acid
MVSSEAVPFAKTGGLADMVSALSINLAKLGHEVKIVIPRYYSVDRGSLKHLPGALGVPMGGIEEWGGVYTASMPGTAKKNPVTVYFIDHEIYFGRDGIYGTAFEPDFLDHPPRFTFFCRAVFQLCRKGGWDPDIVHAHD

SEQ ID NO: 82747 - protein, 264 aa, Unknown
  Obtained from environmental sample
  DOMAIN (1)...(263): Domain of unknown function (DUF323)
  misc_feature (1)..(264): Xaa is any amino acid
MGSDSGNSNERPVHTVTLSSFYMGKYEVTQEQWVAVMGSNPSAYKGSPASGENQWKRPVEQVSWYDALVFCNKLSMKEGLTPAYSISGSTDPTVWGTVPRDWDSTWNAVTIVAGSTGYRLPTEAQWEYAARGGYGSPGNYTYSGSNTVDDVAWYIDNSGYKTHEVGKKAPNGLGLYDMSGNVLEWCWDWYYGSYSSGAQTDPMGAASGSYRVNRGGYHSDDVSYARSTFRIINKWISGTGFLYNIPYERGSFVGGGVGFRLVRP

SEQ ID NO: 82748 - protein, 356 aa, Unknown
  Obtained from environmental sample
  misc_feature (1)..(356): Xaa is any amino acid
LGPPRSDSAERRVHEKDYLIFTVKGKTFDQYFEFEKNFKTGDTVFSIGNALGEGVVVRNGLVLGTIPEEDSGRWNLLKSSADGNPGNSGGPLVTPDGKVVAVVCALRENILYSVPAEVVLGGSRSVLPYRLKSGVRHLLLANGLDNIFEFQVKLPDTYTSVKKSIFGAYNSYYDKSMETLFKEAPEYLSGPNNVYVLSSSLVSDFPELSFVDPDDDYWTLTNLNKSKKSYPLDDDGMLYHTPVSGFSFYKVKRPLSVSVEKISTDPKYIMDLILRNIRTERTLWGSDKYRILSYGEPSSMGSFKDALGRTWHTAYWLIGFEDEVQIMYILPLPHGPVGVYTKQTACSFHVYDGDMH

SEQ ID NO: 82749 - protein, 205 aa, Unknown
  Obtained from environmental sample
  DOMAIN (1)...(189): Pterin binding enzyme
  misc_feature (1)..(205): Xaa is any amino acid
MIIIGEKLNGSIPSVAKAIAEKNEQFIRDLAKKQSEAGANFIDVCASVPEVREPEVLEWMINLAQESCDTPICIDSPSVRVIAQAIRFCKKPGLINSVSGEGDKIDTIFPLIANTGWECIALLSDDKGIPRTVERRIEIFRDIMNKADEHKIAANRLHIDPLIEMLCASENGIATVTGTINKVRNCTRPSMSPAGQATFPFNLPA

SEQ ID NO: 82750 - protein, 71 aa, Unknown
  Obtained from environmental sample
  misc_feature (1)..(71): Xaa is any amino acid
VTDVKNIIAARAAKELKDGDVVNLGIGIPTLVVNFLPPGIDIILHSENGIMGMGPTPHPGSNPAAINPGKY

SEQ ID NO: 82751 - protein, 290 aa, Unknown
  Obtained from environmental sample
  DOMAIN (116)...(195): Phage integrase, N-terminal SAM-like domain
  misc_feature (1)..(290): Xaa is any amino acid
MERLSMKELVPRLEQELIRMGYAEGTLKYYRANWKMITAHFDGLGESYFSEALAMEYADKKCNFFEKERTGTLTQSNAYLFHIVRMMGDFAQHGTVLRRYARSLSRVNEQMNREMLDTFKEHCKNIGYAVSTCSSYARTAENFLSYIEAHGILLQALNAADLTAFVKTLLGYSHKMVEFVLCGTRAFLRFLYKEGAVPSDFSESLPKYQSRTQTRIPSVWNKDDLLKLLNAIDRGNPSGKRDLRIILLVARLGLRCIDVKRLTFSNFNWNENYVEVSQSKQGARFASRSE

SEQ ID NO: 82752 - protein, 324 aa, Unknown
  Obtained from environmental sample
  DOMAIN (22)...(324): TCP-1/cpn60 chaperonin family
  misc_feature (1)..(324): Xaa is any amino acid
MAKQLLFNEDARRKLLAGVEQISKAVKVTLGPKGRNVLLDKKFGAPTVTKDGVSVAKEVELADPYENMGAQLLKEVATKTNDVAGDGTTTATVLAYSLVKEGLKSVAAGMTPIELKRGIDKAVEIAVEEIKKNSKDIKDKEEISHVASVSANNDSEIGNTIADAMEKVGKDGVITVEESKTMDTSIEFVEGMQFDRGYISAYFVTDRDTMTSVYEDVFILIHDKKISSMKDMLPLLEKVAQSGKPLLIIAEDCDGEALFTLVVNSLRRTLRTCAVQAPGFGDRRTAMLEDIAISTGAESISEEIGLKLRTRSSQLRKLERKVDK

SEQ ID NO: 82753 - protein, 116 aa, Unknown
  Obtained from environmental sample
  misc_feature (1)..(116): Xaa is any amino acid
MDPNRGKKPKSKGERKPGGQPGHAGFTLQQVENPDKTITIKVDRDSLPPGDWKHSGYEKRQVFDLKIVKHVTEYRAEILVNEPERSDCGVSLWRSAKSSVWQWCKAHSVYMSVKQL

SEQ ID NO: 82754 - protein, 169 aa, Unknown
  Obtained from environmental sample
  DOMAIN (80)...(169): Uracil DNA glycosylase superfamily
  misc_feature (1)..(169): Xaa is any amino acid
MTSIEKQKTACFLDLTQDFITSGYKGEKREYHFEDDAPAAQNGTSNIDTAGKIESIEKIAGEIRACYNCSLGKTRTNAAPGEGVLQPLVMVIGEGPGADEDAQGRPFVGKAGQLLDKMLGAINLSRNTHCFIANVVKCRPPNNRDPYPEVTIACAHFLEKADTLLKPKS

SEQ ID NO: 82755 - protein, 211 aa, Unknown
  Obtained from environmental sample
  misc_feature (1)..(211): Xaa is any amino acid
MKEITDEPLIWRYFVTPLPTRLADSQLDEREFTSKCVFNVNTRIEGAYVFSSGKNMGVFKAVGFPEDVGRFYKLEEYEGWCFTAHGRYPTNTPGWWGGAHPFSLLDYTVVHNGEISSYDTNRRAIEMYGYKCTLQTDTEVITYIIDYLHRKQNLSLSEIASVISASFWQTIEKAAAGRAGDARIFTRNVQCTAYNRPRLISWWVLTADSWR

SEQ ID NO: 82756 - protein, 206 aa, Unknown
  Obtained from environmental sample
  DOMAIN (33)...(200): Clp protease
  misc_feature (1)..(206): Xaa is any amino acid
YEYGRQNEQSGSHSCRTDGSRREILRYIFPALERQDRFIDGEINDLSADLVVAQLLFLDGQDTEKDINLYINSPGGSVTAGLAIYDTIQYVKSDVQTICLGQAASMAALIVAAGAPGKRLVLPSSRMLIHQPWGGASGQARDIGIQSKEIIRLKKMTIDYFAKHTGKEPQIIAADMERDFYMSAEDAVAYGVADRILTREKNGANA

SEQ ID NO: 82757 - protein, 79 aa, Unknown
  Obtained from environmental sample
  misc_feature (1)..(79): Xaa is any amino acid
MSSYKLDNIIADRKTKKIYLDGDKVIKLMGEEYPAPDVLSEAHNLAAVGETGLKVPRLVEVTKIDGKWAVVWEYVTLPI

SEQ ID NO: 82758 - protein, 242 aa, Unknown
  Obtained from environmental sample
  DOMAIN (39)...(240): Phosphomethylpyrimidine kinase
  misc_feature (1)..(242): Xaa is any amino acid
MAVLSIQSHVVFGYAGNTAAVFPMQRLGHEVWAINTVEFSNHTGYGAWKGKILGAELTADLVTGLEERDVLVRCEAVLSGYLGDASVAMAIVDAVKKVRSKSPDAIYACDPVMGDVGRGFYVKPDIPGIFKKELIPLADIITPNRFELDAITGINAKNMTDTLKAINILHEMGPSIVLVTSYKEKEGELSMIASNNNEIYKITTPELPFSKNVAGTGDMTTAVFLSRYLETKDLKKTLESCT

SEQ ID NO: 82759 - protein, 287 aa, Unknown
  Obtained from environmental sample
  DOMAIN (63)...(283): FGGY family of carbohydrate kinases, C-terminal domain
  misc_feature (1)..(287): Xaa is any amino acid
MIFDIHKLTWDDRLLKALDIPRAMLPEVKLSSMVYASTNIQGRKVPIAGNAGDQQAALFGQCCFEKGEAKCTYGTGCFLLMNSGNEAVESGNGLITTVAASVCDKVQYALEGSVFVGGAVIQWLRDEMRFLTESADSEYYAGKVEDTGGVYLVPAFAGLGAPYWDMYARGCIVGITRGTRRYHIIRAAQESIAYQVMDLLRAMEKDSGNKMSELKVDGGASVNKFIMQFQADICGANIVRPVVSETTALGAACLAGIAVGFWKDLAEVKKQLETSCRFCTCRGPGPP

SEQ ID NO: 82760 - protein, 129 aa, Unknown
  Obtained from environmental sample
  misc_feature (1)..(129): Xaa is any amino acid
MISRVYSDTGKYPAIKGFDFIMLPVTFMPYMNGREQINEAVEWWEGKNNGTVLLPNKPSVHGIVTFCWHWRTGDKDEFYSNKTNFRIPWKNFQLDTESGAFKEIIKDLDRVSLRFQTLKEKIFRIMAAL

SEQ ID NO: 82761 - protein, 248 aa, Unknown
  Obtained from environmental sample
  DOMAIN (84)...(148): DHHA1 domain
  misc_feature (1)..(248): Xaa is any amino acid
MGNPQKALDLLMEKDSHQRDRLASELISMNEERKKIGEEIWTIVEPVAAENLQAYQKKIAFAYGSNIPRGVTGVMANRLLNRFKVPALVVSFGEDVYTASLRSTRGYSLHFLLESCSDLFLDWGGHDFAAGFSISKANWEPFLERLKTKAAEINLSDDDGETLKIDAELPLSYLNPEIFTLLDRFEPFGEGNEPITFLARNIKISEISLMGKPEAKHVKLILDTQSHKWPAVYWQAAIKQSLGHHSGG

SEQ ID NO: 82762 - protein, 199 aa, Unknown
  Obtained from environmental sample
  DOMAIN (11)...(199): Cation efflux family
  misc_feature (1)..(199): Xaa is any amino acid
MTRTKAGYVEGAVSIIINLLLFILKMWASVISGSIALAADAWHTLSDSLSSVAVVIAAKLASKKADKEHPFGHGRWEQIASFFIAAILAVIAYGFLENSIKHFWEKDRVEYGTIAIVVTAVSIVVKELLAQYAFYMGRKADNSSVKADGWHHRSDALSSVVVLAGILFAKRFWWIDSVLGIIIALMCLRGFSANRSPLS

SEQ ID NO: 82763 - protein, 68 aa, Unknown
  Obtained from environmental sample
  misc_feature (1)..(68): Xaa is any amino acid
MLIYMGRNYEKIVDKDGLYSTKKMFIPKPEFIVLYNGIDEYPDRQVLKLSDMFIEPLGESICSLELVV

SEQ ID NO: 82764 - protein, 324 aa, Unknown
  Obtained from environmental sample
  DOMAIN (163)...(243): B12 binding domain
  misc_feature (1)..(324): Xaa is any amino acid
MLKKYERAVVALCLDDNGIPETVRGRVQIAEKIIAAAAEYGIPKKDIIVDALTMTISTGADNARVTLDTVEYVRHELGVHTVLGVSNVSFGLPGRENINAVFFTLAMKAGLSAGIVNPMNSAIMDAVYAYQALNGSDENCAGYIAHFSNQSHAAVSTAKDAAREVSLQDTIIRGLKEQAAKMASAMCADTPPMEIINAHLIPALDKAGKDYETQKTFLPQLLMSAESAKAAFEAIALKMAKQGGVQRKRGKVVVATVKGDVHDIGKNIVKTLLENYNFQVIDLGKKRRAALLFCGQCGRKSNACGLKRVNDYSRANLMLGRGFW

SEQ ID NO: 82765 - protein, 74 aa, Unknown
  Obtained from environmental sample
  misc_feature (1)..(74): Xaa is any amino acid
MVALLGRIIRDRMIGEIKSNYALALSAKGTPFRRIVMTHCFKNTLIPVITVGGVQVGAMVIGAVLVEMFLPWAE

SEQ ID NO: 82766 - protein, 282 aa, Unknown
  Obtained from environmental sample
  misc_feature (1)..(282): Xaa is any amino acid
MVTATAASGYTFTGWSGASTSTSSSVTITMNGDKTLTANFKQQPTYTLTTRVSPFNGGSVSRSPDQTSYTSGASVTVTATAASGYTFTGWSGESTAKSSSVTITMNGDKTLTANFTQRSGNYDVSLSCGNRACKTVNIAGQTWMAENLNYQMTESWCYGNSADSCAKYGRLYTWDAAKAACPAGWHLPTRVEWADLTIAVGGTGTYGTGGTAGKVLKSASGWYNDRNGTDAYGFSALPGGNRNSSGTFSNVGNNGDWWTATEYSSGNAYRRDMYYSNDNVGE

SEQ ID NO: 82767 - protein, 79 aa, Unknown
  Obtained from environmental sample
  DOMAIN (21)...(79): Quinolinate phosphoribosyl transferase, N-terminal domain
  misc_feature (1)..(79): Xaa is any amino acid
MLTFPAQDAKTLVHLALNEDVRTGDYTSLWTLPAEQVQTAKLIAKEDGVVAGLPVIELVFAELGGKVKIETYVQDGRPL

SEQ ID NO: 82768 - protein, 296 aa, Unknown
  Obtained from environmental sample
  misc_feature (1)..(296): Xaa is any amino acid
GFHTYQIGRGSPAIGSMGEPLTGEWYKVLTEDGSMGYCFSYRLRLFEYGDGQFVVSGAVINEKTEDPVLDELLSKTWSPESYLTMINSKKINLEELYKNWHFDPGQETGRARIFAPDIDSNNQSHNSIDKSYSYTSIRRDGNRTWRFEGTNLSMQLRSDTILAVQFLEGSGSTRTLLFVSLPVSVDDLIFQETARRNRLYNEIYNQGPVYTSTNYGTITFKKGPPPAGGGTFSWRNFDLLVPRYIPENIEGDGTILLDLFVDTALEDRYGGAFTMRFLIQGLRCVVCTCLTPRASR

SEQ ID NO: 82769 - protein, 294 aa, Unknown
  Obtained from environmental sample
  misc_feature (1)..(294): Xaa is any amino acid
MRENAIPLYTHASFSEIKSFDALGITVQTELNFTNIPYILELANITAFAANRNENEPVVIAGGPAMANPMPIADFFDCLCIGDGEILAPKALRIIGEAKKAGKNKAEILEQIAKLEGFYVPAIHREIKSVKRTYVEKLAKDLFPTKNLIANMPLVHDRFCVEVMRGCTQGCRFCQAGYWYRPTRELDADDVLDIAKEGLKATGDRQLGLLSLSTADYSPVEKMLDSFIEDPFFKNIDVSLPSLRVAVLAAALRIRFMRSRRTQRYACSRKRLREAPNIINKTITMQILKCTQSA

SEQ ID NO: 82770 - protein, 137 aa, Unknown
  Obtained from environmental sample
  DOMAIN (1)...(136): Asp/Glu/Hydantoin racemase
  misc_feature (1)..(137): Xaa is any amino acid
MLGVFDSGFGGLTILKDLAKALPNYDFVYLGDNARAPYGNRSFDSIYRYSLQAVSYLFSIGCPLVIFACNTASAKALRTIQQKDLQKIAPANRVLGIIRPLAEEIGKFTKTGMRWILGTEGTIASKSLVPILSSAPQ

SEQ ID NO: 82771 - protein, 95 aa, Unknown
  Obtained from environmental sample
  DOMAIN (3)...(73): Bacterial flagellin C-terminus
  misc_feature (1)..(95): Xaa is any amino acid
VPFRNGKSGIGTVTQLKIVSKQRADLGAYQNRLKMAAQGVAIASENMQAAESRIRDTDMASEMVNYTRGAILNQAGTAMLAQANMRTQSALQLLG

SEQ ID NO: 82772 - protein, 324 aa, Unknown
  Obtained from environmental sample
  misc_feature (1)..(324): Xaa is any amino acid
LIGEKRGTLAETEHNFSRSRWTAHCSAYEPGAEIYLQAQDINGRKKRYGLHEAFDRFLQFSAEDGTASYTFLFYLFKFLNLVCSAGAFIPFVLAENNSLRIIWRPFETIPPVSDMLKAIASRECGLFTVKTGVKREQTLSGQSTVDLLSSAFLNEWVRRKFLSFRGKLNKQGTDEEYRDLLNLFFQGFRIDVSAPMRRSLPAAIDRWLSVLHIDFSAYQYVLNVKESGVNNDTIQYALSMNVLIEEKDGVIKTPIGQCKDIGILRAPVALSNYLPEIKDLMTAKKSGGSQVLLSKEPLFPFWIPRRPSCAFGNKVNFPNPWEGR

SEQ ID NO: 82773 - protein, 166 aa, Unknown
  Obtained from environmental sample
  misc_feature (1)..(166): Xaa is any amino acid
MPASNSGTGGGAAKNGSYIFLGPELGKKQDEIGQIKKKLSETGAYEETVFYAGETPITNIVNTIQNHSLFAQSRLFIIKNAEQIKKKDEINAVAACMKELEFGDALILVSDEFRLAAGLDSACPKESRKVFYEMFEREKARGCVLFFSARAAALSLRVLTQYWNWL

SEQ ID NO: 82774 - protein, 98 aa, Unknown
  Obtained from environmental sample
  misc_feature (1)..(98): Xaa is any amino acid
MFYTRWVLTLTVCLPKITLFKAGTHAAVTTAANINTFRTQIKTLGFSYDWDREVNTSAEDYYRWTQWIFLKLFEKGLAYEAESPINWCPSCKTGLANE

SEQ ID NO: 82775 - protein, 300 aa, Unknown
  Obtained from environmental sample
  DOMAIN (209)...(298): Domain of unknown function (DUF814)
  misc_feature (1)..(300): Xaa is any amino acid
MRWREKWGGRFNDALNGLMADVLPGEGTLFQRHAEWSAQRADKLLLQPKVQAASRKVVKERQRLERYGKALAEDRERHLGAVGLREPAGKLQAELWRLKGANGSVELLDGTTIELPPGMCIEVTVQKWFTQAKKAERGLLRVDALERNRIRQIMELERSTGADAQPQNDAPKKSSPQSKQAGISGHGKKKMEQEKDHKRSDGKGRAFRSQMVEGFEVLIGRGDTDNDTLTFKVASPPDFWLHVASVPGSHVVIRNPDKISEPPQAVLERAAELAAFYSKARDGGKVEVHWCRAADVHKPR

SEQ ID NO: 82776 - protein, 88 aa, Unknown
  Obtained from environmental sample
  DOMAIN (7)...(37): Flagella basal body rod protein
  misc_feature (1)..(88): Xaa is any amino acid
MGLFTSINIASSGMSAQRTRGDVISDNMANASTTRTAEGGPFRRSGTIMRPRVSSPYWRSPFLPEGMDNGVSAGVRIAEIPKDFKTET

SEQ ID NO: 82777 - protein, 68 aa, Unknown
  Obtained from environmental sample
  misc_feature (1)..(68): Xaa is any amino acid
MKNQTVIIDQAAVPIEGERNLLELCRKAGIELPTFCYHSEISVYGACRMCMVEVEGKGITSADLIDGW

SEQ ID NO: 82778 - protein, 97 aa, Unknown
  Obtained from environmental sample
  misc_feature (1)..(97): Xaa is any amino acid
MNSYHPVKIGSLELSGNLFLAPVAGYTDRAFRSLCAEQGADFSFTELVSAEALYRCCGRYGLGGTDVPNAAVETAINLVRRGGKGKTVCDTIIWREE

SEQ ID NO: 82779 - protein, 135 aa, Unknown
  Obtained from environmental sample
  DOMAIN (9)...(128): Respiratory-chain NADH dehydrogenase 24 Kd subunit
  misc_feature (1)..(135): Xaa is any amino acid
LIGEFGSVFLSAGGIMTYVATALEVSPGIVFGVATFYSHFTLEPKGKYVIKVCDGTACHVKKSMDIINTLEAELKLNEKKKTSDDMLFTLETVNCLGACGIAPVVVVNEDVYGSMDSAKTKALIEKIRKEESANA

SEQ ID NO: 82780 - protein, 191 aa, Unknown
  Obtained from environmental sample
  misc_feature (1)..(191): Xaa is any amino acid
MPENLTLEQRKEQFEKSAAAQKPRIIICAGTGCVAGGSLKIYDRFREELSKRGLKVAVALEQEQGDYSIAESGCQGFCQMGPLVTIKPKGILYTKVSPNDVEEIVEQTLVGGEYVERLLYTSPDHGAPMKDMNNIPFYSRQHRLTLGLCENIDVQNFNEYVYHGGYFMARKALTEMKEHELCDSMLASRSR

SEQ ID NO: 82781 - protein, 309 aa, Unknown
  Obtained from environmental sample
  DOMAIN (85)...(172): PSP1 C-terminal conserved region
  misc_feature (1)..(309): Xaa is any amino acid
SLEDNPQEEHIDGGSVIAGEDLSTLTQDTPIYRLRLVYPRETFHAAWAGETLEPGTKVLVPTRYGRDLAEVIHSIQCEAGQIPQAVTRIERIANDDDVSRAASHKQQEKEAFDVCKKKIEVHKLDMKLVSVHYILEEPKILFFFTAESRVDFRELVKDLVNIFKTRIELRQIGVRDESRVLGGLGVCGRGYCCHAVSDKLKPVSIKMAKDQNLSLNSTKISGPCGRLLCCLAYEHLFYGEQRRLIPCEGTRIFWDGSSWKVSEINVVIGKLKLSSEDGRVIQLPLEALKKTKAAGQSTPQNRRIICAGI

SEQ ID NO: 82782 - protein, 114 aa, Unknown
  Obtained from environmental sample
  misc_feature (1)..(114): Xaa is any amino acid
MKKEKQEFMTDAQGRQVPVTMIKEIDILRDQTVRNIAKEAVEMKSGLMDFKNRIREAIMSFVEKSAKEYDVKWGGKKGNLSLLSYDGKFKLVIAMNDNLVFDERYKSLANLSWL

SEQ ID NO: 82783 - protein, 293 aa, Unknown
  Obtained from environmental sample
  DOMAIN (203)...(270): Oligopeptide/dipeptide transporter, C-terminal region
  misc_feature (1)..(293): Xaa is any amino acid
NLKGGGNSRACWGFGLRKERNFPRGFRLVDKKHTRLGGAVLFDGKNLLSVPEKEMRTIRGKRISMIFQDPLNSLSPLETVGSQIREAMTNHLDLSRDELRRRTEELLVKVGLHPDTAKHYPFELSGGMQQRVMIAQAISCNPELLIADEPTTALDLTIQAQVLSLLKGLQKELSITVLFITHNFALVTENCDRVSVMYSGRIVETAPSRAIIGSAAHPYTRALINCIPRPQTGGNRRKKLPVISGSPPRLYAPLEGCPFVKRCPKADKACVDMPPITDIGGERSVCCHNWSDV

SEQ ID NO: 82784 - protein, 78 aa, Unknown
  Obtained from environmental sample
  misc_feature (1)..(78): Xaa is any amino acid
MDYKEAGVDIEEGYRAAVHYRGLSEMTINGKDAVLGGIGGFAGLYSLKEFLSGLGAMEEPGAVSGTDGVGTSWTLPSK

SEQ ID NO: 82785 - protein, 318 aa, Unknown
  Obtained from environmental sample
  DOMAIN (6)...(135): Type III restriction enzyme, res subunit
  misc_feature (1)..(318): Xaa is any amino acid
VCSAFQKNAFQVAAHHLHKRGGVIIGDVVGLGKTITATAVAKMFEDDFNLETLIICPPNLIDMWKDYRHKYQLRAEIKSLGEVQFKLKSERRYRIVIIDESHNLRNRDGKRYRAISEYLALNNSKVIMLTATPYNKSYLDLSNQLRLFLNENQNLGITPERYIKEIGGKIQFEAKHQVNENTLAAFEKSDYSDDWAELMRFFLVRRTRSFIKANYSKKDEKTGRMYIEFAPNDEGVIEKSFFPDRIPAKVEYSFNKEDNDDQYARLYSADVVNIINELLLPRYGIGQDIYENKTNIKNIKQEEEKIKTICSAIIPGEK

SEQ ID NO: 82786 - protein, 241 aa, Unknown
  Obtained from environmental sample
  misc_feature (1)..(241): Xaa is any amino acid
LDKRLKKFRGVPNEYLDQFGGIRQVLLRAIKQDPMYRESYYHLARYYNYYENPTEERLTLDVAVRVFEAAKEESPKRIGYHVLTLGRYAEVLINSKEFFPAEENLIKGINVYQNGLSRRLLTRSPEYGKLYADLGDLEFFVKDGDMQTALDYYSYSEQNGWAPPEIQYRMGAAHYQLRQWGPALERFFAASRDMPFNRKILYALGNVSYMRGNYFAAQGYYDRLLEILMTTDPLGRICPWP

SEQ ID NO: 82787 - protein, 302 aa, Unknown
  Obtained from environmental sample
  DOMAIN (200)...(302): Response regulator receiver domain
  misc_feature (1)..(302): Xaa is any amino acid
MGRLFGKFTRLDGEKNRAVEGTGLGLAITSNLCEMMGGEICVDSEYGKGSTFTVRLPQGVVDDAPLARLETPGDCATLVFERRPKYLESIEATLGGLGVPFAAASTLSAFKDGLSGGGYRFAILPKHLYDEAPGVLAAAAVGGAEVFVLLEFSETVPAKGVGTLSMPVSCISVANAFNHAGSEGDPGRAGGFEYFTAPGARVLIVDDIPTNLRVMEGLLAPYGMRVDTCASGEEAIELARAGGYDMVFMDQMMPEMDGIEAAGHIRALGGRAGSVPIIALTGNAVRGAKEMLLSHGFSDFVS

SEQ ID NO: 82788 - protein, 301 aa, Unknown
  Obtained from environmental sample
  DOMAIN (4)...(222): Peptidase family U32
  misc_feature (1)..(301): Xaa is any amino acid
VYTAQYLSSVGPDALIVQDFGVLAMARSEFPQLKLHASTQMNIASGRGANMLSRYGVSRVVLARELGLEELRSIRSETNMELEIFVHGALCVSVSGLCLFSGYLGGKSANRGMCTQACRRLYHRGEHGDSTGDGYYFSPADLQLLEHLPALAAAGINALKIEGRMKSADYVGAVVSAYRMVLDAIEQGDEEKIQCGIAEGQKILRGDFARGKTAYFFNAAHTDDGVNWLNPAQDGGTGISLGVIEKIQGKAGERRALVSGGELSAAALPAVGDSIRLHRSDDSETVSHKVQFAETMPDGLT

SEQ ID NO: 82789 - protein, 146 aa, Unknown
  Obtained from environmental sample
  misc_feature (1)..(146): Xaa is any amino acid
MRLVCLDLEGVLTPEIWIAFSEATGIPEFRRTTRDEPDYDKLMRFRIDLLAKHNLKLADIQKAIGGMDVLEGAADFVRSLRERTQLIILSDTFEQFARPLMAKLGYPTLFCNRLEIAADGSVSGYTLRQMSGKSVRWRPLNPQLQV

SEQ ID NO: 82790 - protein, 139 aa, Unknown
  Obtained from environmental sample
  DOMAIN (1)...(124): Leucyl/phenylalanyl-tRNA protein transferase
  misc_feature (1)..(139): Xaa is any amino acid
ENIFTITFDKDFSGVIVSCSQAKRPGQNGTWIDHDIIEAYTELHRLGWAHSAEAYLGGELAGGCYGILMGKVFFGESMFSLKPNASKAAFITLASMLFEKGIRLIDCQQHTAHLGSLGAEDISRTEFIALLKDAVRDRA

SEQ ID NO: 82791 - protein, 323 aa, Unknown
  Obtained from environmental sample
  misc_feature (1)..(323): Xaa is any amino acid
MGLQDRRKIATGKTVVQMRPATWVTFFLIVMAVYAGVNLYLGKRIFQTMCALYPKTNAAIFAAIYAAAAVLMIAANFATVSTFPAAVKEALRWCGGCWMGFFLYALMFFLAADAAIAIGRIAKIIPSPVPQNVRLYAGLAAVTLTAALMTYGIIHANKIKAASYSVRLNENKTLPGGMTIVMASDLHLGAAGSEKRLPKIIDAINDRKPDLICFAGDIFNDNYYALSNPERASELFKSLKATYGVYACPGNHDAGKSAEDMVDFLERSGVTLLGDEFEIVNGQAVVMGRLDPRPIGGFGGKIRAGIGELIVEQLGQSIHGGAR

SEQ ID NO: 82792 - protein, 53 aa, Unknown
  Obtained from environmental sample
  misc_feature (1)..(53): Xaa is any amino acid
LTDSAEAGMPQYTLRTGGKIVIVNNQPTPLDGRAEMHFDDLGLVFEELNRCLA

SEQ ID NO: 82793 - protein, 256 aa, Unknown
  Obtained from environmental sample
  DOMAIN (1)...(185): Adenylate and Guanylate cyclase catalytic domain
  misc_feature (1)..(256): Xaa is any amino acid
MTALLRDIQGFSGISEQLDPAHLVRLLNKYLTEMSNIIMENLGTIDKYMGDAIIAFFGAPLFNADHGALACRSALAIKAAEKVLNETIIGEKLSPVPIFTRIGINTGEMVVGNMGAEKKMDYTIMGNAVNLASRIEGVNKYYRTGGILISEYTRAKIGDEFSLRRIDRVRVVGINTPLRLYELLPTDTEHGAVETWEKALDLYERRDFRKAFALFVSLIKRYPNDNVARVYAHRCKAYTVTPPPEDWDAVKNLTNK

SEQ ID NO: 82794 - protein, 174 aa, Unknown
  Obtained from environmental sample
  DOMAIN (6)...(174): Radical SAM superfamily
  misc_feature (1)..(174): Xaa is any amino acid
MTASLYIHVPFCSQKCDYCDFYSIPVTSSDTVTMMDSYIEAVSDDIEDQIRLFNVNNIPSVYIGGGTPFVLGVKRITHLLTAMKTLLANMDAPPVEFTVEANPESTDGAFLQACVEGGVSRISLGVQSFCEASRTAVHRPGSIRQIEDALTLSRGITRRFFRRTYHRPSLPERR

SEQ ID NO: 82795 - protein, 207 aa, Unknown
  Obtained from environmental sample
  misc_feature (1)..(207): Xaa is any amino acid
MLTTSPKRPVRFFNTTGPCNPWDHYMLPPEERLEGAQLHRYIRDKLYWVLHAPRQTGKTTFLQNWMREINSKNEVIACYASLEACQGITGRAEAMITMHKAICESARANEIPIPELPLDNPELLLYETMRKWSELTAPKPLVVLFDEVDVLEGEALISFLRQLRNGFASREARKFPVSIALVGMRDLKDYITKAKDGVAPHPGSPFT

SEQ ID NO: 82796 - protein, 286 aa, Unknown
  Obtained from environmental sample
  DOMAIN (16)...(178): Radical SAM superfamily
  misc_feature (1)..(286): Xaa is any amino acid
MTLRRFGKTIQLYLPLYLSNDCTNSCVYCGFNQKNHIERKTLTEREIFEEIMEIKKLGSFEHILLVTGESPKNAGFEYIKNAVKLCHEHFSAVSIEVQPLGMEEYAELAKCGVSAVYVYQETYREETYKQHHPGGKKSIFEYRLHCPDRIGIAGVRKIGIGALLGLENWRADSFFTAVHLSYLQETYWQSKFSISFPRLRPFEGQTFELHTPSDRELIQLMCAYRMCFPDVEISLSTRESANFKDRAMMLGLTTMSAGSRTDPGGYAVFKNELTQGEINDFRSPRR

SEQ ID NO: 82797 - protein, 219 aa, Unknown
  Obtained from environmental sample
  DOMAIN (61)...(208): Thiamine pyrophosphate enzyme, C-terminal TPP binding domain
  misc_feature (1)..(219): Xaa is any amino acid
MVDPIPVSNILASKLIKRNLRVDKLPHIWCPGCGNGILMRAVAQAIENKELDKTKVCIVSGIGCSSRAAGYMNFNTLHTTHGRALAFATGIKLANPELIVIVITGDGDATAIGGNHFIHAARRNIGITTIVFNNSIYGMTGGQYSPLTPTNDFATTAPYGNVDRPFDIIKLADAAGATYVARITTYHVKEAESYRKGAENKGFSLMRESARPRPICLGG

SEQ ID NO: 82798 - protein, 333 aa, Unknown
  Obtained from environmental sample
  misc_feature (1)..(333): Xaa is any amino acid
GRGFQVRAGHSVLKLKSFRYEVGDKQSALKKKTEKRDAVRETIEAANKALEENMDKVNSMEAALAEHQKSIYGLAVEKNALEKEVRLLSEQRGDIKAKIAVNEGREKAAGIKIEELLSDAQEQDGVVRDLQKQVTAIEDNIRSFEGNIQLTSTLIRENENSVKKNEEDIRRLELDRAAREKDLEAITDDIVAALDAGLREAGYSAAERRYTEAALSETLTLLKTTLSGREALIRDFSAAAGRAVSGEKPPGAEELKRIAESLAAELAEAASRSEKAISLFEAYRKSSPSFLDDFLAPEGIITKKRALDAEIRSCREGVRKSASKSGLAITRVK

SEQ ID NO: 82799 - protein, 76 aa, Unknown
  Obtained from environmental sample
  misc_feature (1)..(76): Xaa is any amino acid
VKHGFVIPVYRHGETVGPLAEKLSATGLPVILVDDGNDERTKEILAECQKKIPSIVLVSLKKNTGKGGLGHKSGFK

SEQ ID NO: 82800 - protein, 66 aa, Unknown
  Obtained from environmental sample
  misc_feature (1)..(66): Xaa is any amino acid
MTDWPSLLTADAKLYDDLELDSIDAVDLLVKMKEFVPLKIEPEQFKKARTVQNVVDILYPLIEASL

SEQ ID NO: 82801 - protein, 145 aa, Unknown
  Obtained from environmental sample
  DOMAIN (3)...(145): Uncharacterized protein family UPF0007
  misc_feature (1)..(145): Xaa is any amino acid
MEAAAVICAAGASARMGGIKKEYQKLNSNTTVLGSAVLAFASVPAVELIVIAVCADSQEAAQEALSPEILSAQRPKLLFVNGGESRRASVFNALALLSQYSPCYVLIHDGARPWVTASLIRNTLESAKKHGAVISPASASRPILS

SEQ ID NO: 82802 - protein, 326 aa, Unknown
  Obtained from environmental sample
  misc_feature (1)..(326): Xaa is any amino acid
ASRGQTTAERDQPHRQYDRVHHEEIAEGSAKGVSDEIKGTMRINNNSSLILDPAKTVKMGETVAGDKSWAFDGAYALVRTGKKKDGEFNAEDFMLVGPNGAQYKFITLNADGTNAGISDLKAGTIVSSGKYIITDDPTGTLSGINVTIGNETALTAAEVASLAIGSVLANGSVVNVANELKILVSGKEVNIEYNGGGLKVGGELVAVSKSITLEDGTVLTNNGGGKISVTVGSIKLAQKWDVAANDAIAKDSTLASGSEIKKGAAFEAGTIITNAGVFAPGSITFAEKNFGAGDTYIQFSSNAGAALAANYKNAEVGGIVTFVSPT

SEQ ID NO: 82803 - protein, 321 aa, Unknown
  Obtained from environmental sample
  misc_feature (1)..(321): Xaa is any amino acid
MKLAGLTVLTAALLLSCSDDIDDPVDNSGQDKVEPPTAAVSIAVTAIAADYSAANFEIISTDNYSVRQNLIPGLHTDNVVRAKGGDVYILERFGKDNVIKYNSKRMAVEYQEHIGEGLNIQDIAVVSETKAYISCHESVNLIVFNPKTGKKVSTVDLSRFNAYAGTDSAEAYPYASSLAVYGDYLYVACQRLNSIFEIADTSLIAVIDTRANAIVTSIKLNKKNPASMDILDGKLLVSSSGDWSDVTATSSGIEMIDLVNNENLGLIADGGAFGGSLGNVIFISHSTAYAAAMIANCTTDIIEFHPAMKTIVAKINGITDG

SEQ ID NO: 82804 - protein, 291 aa, Unknown
  Obtained from environmental sample
  misc_feature (1)..(291): Xaa is any amino acid
MYKDAPLARQRLIECYVVKKDHEKANKERERLVDDYGEGSKWYTANSKERKVIDLAKGQVRRALGDIALFYHGEGQKKKDKASYDKAMKRYNEFFAKFPDDKWRVFEYKYNVAEIYSSMGDCEKAAENYKFVAEEDVSRYPAYVNDVDTLGMDAEDLEKLKATKGDKTNPIAISQEDAGYNVIVALDMCRKKEMAKEGISEDKSYGLASTKKLLDYSITFQRKFPQSPNAADALYLAGNIHYEGKNYGDAVTAFKWSWTSTPTRRSTKTPPVCWVTVTLATTSLIWLCPHS

SEQ ID NO: 82805 - protein, 223 aa, Unknown
  Obtained from environmental sample
  DOMAIN (2)...(223): Glucuronate isomerase
  misc_feature (1)..(223): Xaa is any amino acid
VEKGNEGRFSPGLTGKNPDAGENEIVEDFLLEFLGEEYSNRNWAMQLHVSVIRSANSAMLASAGPDTGFDTVADYPVAEKLARFLDLLAFRGKLPKTILYSLNFKDLYPMATIMGSFQGQADAAKEAVPGKMQLGSGWWFLDHIDGMEAQMRLLGNTGLLSRFIGMLTDSRSFLSYPRHEYFRRVLCNILGTWAENGEIPNDFELLGNMVRDISFRNAKNYFK

SEQ ID NO: 82806 - protein, 137 aa, Unknown
  Obtained from environmental sample
  misc_feature (1)..(137): Xaa is any amino acid
MNNRNRIIAGVIISLLIIIAAASLGSSGISLRDTVSIVLHKMFKLSLKAGIDPKNVSIVWLLRLPRVLLAFLTGGCLAMSGAVCQSILRNPLASPYILGVSSGASLGAGNIIVSGIALPLLGALPCLYPVYLSPFTV

SEQ ID NO: 82807 - protein, 87 aa, Unknown
  Obtained from environmental sample
  misc_feature (1)..(87): Xaa is any amino acid
MKKFMDDNFLLANRTAEKLYHEGAAGEPIFDYHCPSIPKDIAENVWFNDIASAWLGGDTINGADALQRDHERLSQECRTYDKSLPGP

SEQ ID NO: 82808 - protein, 348 aa, Unknown
  Obtained from environmental sample
  DOMAIN (84)...(225): Pyridine nucleotide-disulphide oxidoreductase
  misc_feature (1)..(348): Xaa is any amino acid
FSKRFIAGKPDKGRKISLIKGTAAFTGPKTFNVTDAVGTAAEYGAENIIIASGSEPSSIPVPGANLPQVLNSDAVLSLTAIPDSAVIIGGGVIGIEFATLFNSLGKKITVIEMLPRILNGMDQSICDAMTKTLSKRGVEIHTGAKLLEIKAASNGTVCAYEENGAKKEASGSLIIMAVGRRPVSKNLNLAAAGVAENKGYITVNEKMATNVPGIYAIGDVTGKVLLAHVASAQGMVAAAAIAGKKAAMNYDIIPACVYTNPEIACVGKTEAQVKEAGLPYKTGNFPATGNGRSLIMNATGGLCKIISHAETGEILAAYIMASRATDMIGEIVVSMKAEATIEELAGPI

SEQ ID NO: 82809 - protein, 189 aa, Unknown
  Obtained from environmental sample
  misc_feature (1)..(189): Xaa is any amino acid
MVKAPFFIGITRLFNIHWKLFKEILHKSGMIFISELSFVSSETIMTAMYNRRGGAEVVAGMAAGFTVANIFFLLFGGIWTAAGVLVGGSLGAGKLDEARSRAEWLKSGSLIAAFTLAIPGAIVSVPLISLVFSNLSAAARANCTGLVFVILAYLPLWCFLNVQFAISRAGGDTATGMYADLPRPSDHGK

SEQ ID NO: 82810 - protein, 328 aa, Unknown
  Obtained from environmental sample
  DOMAIN (165)...(230): His Kinase A (phosphoacceptor) domain
  misc_feature (1)..(328): Xaa is any amino acid
MAEYAWHRHKSYRLFNFVASSYLKFDKNITPYMFNKYNEITSAVDYNLVENKIRIDELLGDAGKELLITAHGLSEGESRSFIYNKKMYLVNSIPSMEWYLAVSYPMPGFWALNRAMNTVFFSMLFLILFLFIIINVFIARSENAISKQNLQLIAANRKAESASQAKSDFLAKMSHEIRTPMNAINGMAELMLRGELSDEARGYAQDIKQAGNNLVSIINDILDFSKIEAGKMEIIPVKYLLSSLINDTVNIIRARLIEKPIRFFTNIDGHIPNSLIGDEVRLRQILPYPLSNAVKYSEQGHIGLTATSKSRDGSEIWLTNNIQTPGEE

SEQ ID NO: 82811 - protein, 133 aa, Unknown
  Obtained from environmental sample
  DOMAIN (10)...(126): Alpha-L-arabinofuranosidase C-terminus
  misc_feature (1)..(133): Xaa is any amino acid
FHPRVDGRGGDYGYLSRTGAPDGDNVPRPSYWAFKMASHSLGRGSLLESTTGNDRVSSYYTHDGKKKSLMIVNKHPKSVADVTINIPGFQGSAKKLILNAENAKKGPTEETIEVKPGMKLSMPAHSVVTLTVE

SEQ ID NO: 82812 - protein, 315 aa, Unknown
  Obtained from environmental sample
  DOMAIN (16)...(214): DNA methylase
  misc_feature (1)..(315): Xaa is any amino acid
GDFVCWYAKNIKTYKYHQIYLSKASPFEDSSSKYDQVDFSNGERRAMARDEKTGVKSLPLGSKIFRYDNIVSTRPAGEGDVKKFEYNGKTFFPGTGTFKTDEKGLNVLAKNNRLGYSENKLNYIRYYDDFPVQQINNIWTDIGGTVQSRSDPKVYVVQTGVPVIQRCLLMTTDPGDLVLDITCGSGTTAYVAEQWGRRWVTCDTSRIAITLAKKRLMTATFDYYKLAYPEQGVSSGFVYKTVPHITLKSIANNEPPEQETLYDQPEIEKRKVRISGPFTVEALPAPVVKPLDDDTHPAPFFHENAAKKQSDWMQE

SEQ ID NO: 82813 - protein, 303 aa, Unknown
  Obtained from environmental sample
  DOMAIN (73)...(109): Sigma-70 factor, region 1.2
  misc_feature (1)..(303): Xaa is any amino acid
FSRDDGRELSDFLPEHITNTDKIEQVLSLLEANNVQLIEEDNSSEEDESDDGKKQQNSKNRAAANDKETSLVDDPIRLYLREIGKEHLLTAEQEIELSKKMEEGENIIKSVIKRSGMIIPEFFQIAQKAFAKKDMKELNFSKKEITEYMTECRRLNQFYKDTLRTIHGDLRNYIDLKNHLISKDMDYLEDKDCSTIRKRIMRALKNIHIHPDEILAFSEKFLQASKKIKKYVKEQERLQKHLKVVSLKELRTLGRYLTIKDERERVEAELGLPSDDIKEKIKLVQVTQNKFKDSGSRISRNYR

SEQ ID NO: 82814 - protein, 125 aa, Unknown
  Obtained from environmental sample
  misc_feature (1)..(125): Xaa is any amino acid
MQKIIIDTNVIVSSLIQKSYPYRIIFDLFIEDKICLCISPPLMAEYYAVLERPKFAHFQEFTTKARSVLANIEIKATRYNPKVTLHLVSDKDDNKILELADECGADFVITGNTNDLLSADSDLAR

SEQ ID NO: 82815 - protein, 317 aa, Unknown
  Obtained from environmental sample
  DOMAIN (135)...(312): Putative RNA methylase family UPF0020
  misc_feature (1)..(317): Xaa is any amino acid
KRKRVWPYSLKADLDDFYRCLVGLRAADRVLLEIAWFKASDFDALFEGVRRQPLEEYIPPGMGLRVAKVRTNRSVLEAETSIQAVVHKAAADRLCAKRGINRLPENGEEAELRVYIEKDQASVLLDLSGEPLFKRGYRINGGPAPLRETTAAAIILHSGWRRKFPLYDPFCGSGTIAIEAALYAWDIAPGLGRAFARGFAKGFALDRLILGDSKTLQRIRQEYLEKADFSRMVRIGGSDSDYASAAAAKQNMERAIALSGKRGPQNPPFFKVLPMEKAEIPDTMRNITDEQDEPGFIITNPPYGHRLLTRPNLYLFG

SEQ ID NO: 82816 - protein, 325 aa, Unknown
  Obtained from environmental sample
  misc_feature (1)..(325): Xaa is any amino acid
WVTQGSDRPRAAGEAQEAGELGFPDEPEQEGEPEEEHGVELGNLDEQLSVDGLVETASDDAFEGFDPASGIGQDTGDDTGDTLDAFDDIDDMSFPDLDVGESPKDKKTTAAGKAVRKKDKRKGEIPIPEKEDDIELNDSELRYLQETLAGYPLNLRIACEEIIAEQSVRPEQMVRLIRNLIRGAPARETAALASEILDRAITVPRGFEKSSVEALEAEKSTFAYIFFHNFLPVLRLVTLIAIVAGSIFYLTYKFVYIPLKAESIYNMGYERIPEGEYQRANERFNEAFNIHRKKDWFYQYADAFIKKRSIYMRSRNTMSCCVIIP

SEQ ID NO: 82817 - protein, 296 aa, Unknown
  Obtained from environmental sample
  misc_feature (1)..(296): Xaa is any amino acid
GDAQPLPEAKANLAALKSECAGAVAVFPRFFGYTADGDVATFSRGGSDLTGAILAEALDVDEYENWTDVDGIFSAHPHMVDSPKQISALTYKEMRELSYIGFNVLHEEAVRPVMRKKIPIRLRNTNNIENNGTLIVSERLPGLRDIVGIASGGGYCSFTLQKFLMNREKGFGRRLLSIFEDMNLSYEHCPSGVDNISVILDQDQLKPETVNNIIRAFDEKLTPDELKTEFGIAMVSVVGEGLAHKIGVLATAANALSKAGVNIKMVNQGSSEISIIFGIDAADEKKAVNALYNEFF

SEQ ID NO: 82818 - protein, 256 aa, Unknown
  Obtained from environmental sample
  misc_feature (1)..(256): Xaa is any amino acid
LFWISPIYDEGKFSGALRGSGFLNPGAVNDVSIQEKYDKKADDSAYEAISPEEFERRILAFPTGDEEKINSLSEMLHLCAETLSTGNENYHEMLSLRFEQQASLSALIDDLKTKYPKGSGFPVYPLEKERQLVALLRRGNKQEAGKFLDELLSVIVFCNQDHFRYIQLRTIELAVLLARAGTNSIGSAGMENKARYIKQIQDAKTVEELAAILHNMVEKIVIQIVLFQGIPHASAMRKAEFFIKENYLGRSDHWLG

SEQ ID NO: 82819 - protein, 309 aa, Unknown
  Obtained from environmental sample
  DOMAIN (74)...(278): 60Kd inner membrane protein
  misc_feature (1)..(309): Xaa is any amino acid
MAETGLPSLFRLEDKYHFYLGPKNQEDLSTYNRGDNDFKLFDTDLFEIANSKGFLAPLEKVLKWLLQIFHKVIPNYGVAIILVTLVVRLLMFPLTKKGSESTLRMQALSPKIKEIQAKYKDNPQKMNAEMAELYKKEGYNPLSGCLPMIIQIPIFFAMYNLFNNHFDLRGAMFIPGWIPDLSAPEAIYNFPDGFKLPILGWTAIRLLPFIYVGSQLLYGKVTQTPDQQGNSQMKIMLYIMPIAFFFILYDVPSGLLIYWIMSNLLTLVQQVIINKFVLKRKAVVAEVEPKNVIAPNIPRKKEKSNMENI

SEQ ID NO: 82820 - protein, 172 aa, Unknown
  Obtained from environmental sample
  DOMAIN (3)...(171): Glutamine amidotransferase class-I
  misc_feature (1)..(172): Xaa is any amino acid
MLLLIDNYDSFSYNLYQVIGAIESDIQVVRNDEISVDEIKRLAPSRLVISPGPGKPSDAGICIEAIKRLYSSIPILGICLGHQAIYEAFGGTVSYASRLMHGKSSQVKLDAENVLFKGLPPVISAARYHSLAGIESTLPDALRITARTDNGKLWRCATGSTRYLGQSDHGPP

SEQ ID NO: 82821 - protein, 105 aa, Unknown
  Obtained from environmental sample
  DOMAIN (1)...(97): chorismate binding enzyme
  misc_feature (1)..(105): Xaa is any amino acid
LTPLTQCSRPGTLSGAPQIRAMQIINELEQNKRGIYGGASGYLDFTGNMDTCIAIRIVYRRNNKVFIRSGAGIVADSMPESEYQECVNKSKAVMDALKNSSGGLE

SEQ ID NO: 82822 - protein, 256 aa, Unknown
  Obtained from environmental sample
  DOMAIN (25)...(206): ABC transporter
  misc_feature (1)..(256): Xaa is any amino acid
MLVCNIKKNFSSFALNVSIEAKRGVTALMGASGSGKSMTLRCIAGISKPDSGHIELNGRVLFDSEKKINLPPQQRNTGFLFQDYALFPNMTVLQNIMTGIKSKTNREKQASEFAETFHIHSHLNKYPHQLSGGEKQRCAIARILVGSPDILMLDEPFAALDSHLRWELETELSTLFKSFANPVLYVSHNRDEVYRLSDNIAIMNCGKNEPISEKKALFKNPASVQAARLTGCKNIAKAISKGTQILGDSDPGGEKK

SEQ ID NO: 82823 - protein, 293 aa, Unknown
  Obtained from environmental sample
  DOMAIN (13)...(78): His Kinase A (phosphoacceptor) domain
  misc_feature (1)..(293): Xaa is any amino acid
MRANRKAEFASQAKSDFFAKMSHEIRTAMNAITGMAELLLRGELSGEARGYAQDIKQAGNNLVSIINDILDFSKIESGKMEIIPINYLLSSLINDTVNIIRMRLMEKPIRFFTNIDGNIPNSLIGDEVRLRQILLNILSNAVKYSEKGYIGLTITVDKRNNKQVWLKIAVTDTGKGIKPEDQAKLFDEFVQVDMKKNQGIEGTGLGLAITKRLCVAMGGDISMESEYGKGSVFTILIPQGIESEAPFAMVEEAKKKKVLVYEGRAVYAKTGVLVAGKHEGPSYHGSADLILGQ

SEQ ID NO: 82824 - protein, 77 aa, Unknown
  Obtained from environmental sample
  misc_feature (1)..(77): Xaa is any amino acid
MPAAMADGMVKIAVLVNLAAGDQSRQFLEGCVSEGRSMGFTVDTFVSGADKGRCAEITAGIARADYDGLICSRHNGK

SEQ ID NO: 82825 - protein, 172 aa, Unknown
  Obtained from environmental sample
  DOMAIN (6)...(128): HD domain
  misc_feature (1)..(172): Xaa is any amino acid
GDKKSREELYQSGTYREEQKGGDVNLLFQSCQLHDVGKISIDDNILKSPGKLSDEEFNVMKKHTSFGEQIIEKVETLAKESDFLNYAKIFAASHHENWDGSGYPRGLKENEIPLLGRIMAVADVYDALVSERPYKKAFTHEEAVRIITEGSGTQFDPALVIVFINAADKFKK

SEQ ID NO: 82826 - protein, 136 aa, Unknown
  Obtained from environmental sample
  misc_feature (1)..(136): Xaa is any amino acid
LTIGIAASVKLVDWEHMAFRRYRGHNYQATVISLDSQIVSARNFLARYRSDNSGNFIGFYNADFDRVYDAILTETDEVKRKHLYLEAQRIITSNAASVYLQDILYYKVFRAGAFDGVKNYPLLVVDFSAIYGIKKN

SEQ ID NO: 82827 - protein, 151 aa, Unknown
  Obtained from environmental sample
  misc_feature (1)..(151): Xaa is any amino acid
LFALGNSALKRGDSCAANGYYNRLLDILENQRSRLPLLLPNDRPEYLDLAERLMMARNNAGVANQMLAARTGSRVYQSRAMSLYSESERAWDSLTREPRSMVRSSSTSLPFLNIRNILYPRQNYEPQMFMRIDREASESSRWEQLAPAFRD

SEQ ID NO: 82828 - protein, 225 aa, Unknown
  Obtained from environmental sample
  DOMAIN (2)...(218): alpha/beta hydrolase fold
  misc_feature (1)..(225): Xaa is any amino acid
MHCHAKAILRLLTKAIGQAIGQAGVASPENPAILAGSSLGAAVCEMAASKRPDVVKALILIDGCFPIQNKIDKGLLPLMLPSVGKRWYRSFRKNHETAWNSLYPYYADLDAMSGEDREFLRERVIARVESENQERGYLSTLSSMNVFFIFNGRRISRRIKTYPGKIAILWGEKDRVLPVEKAALFRGLRPEAKMTLISGAGHLPHQEKPEETAAQMLRFLKESGV

SEQ ID NO: 82829 - protein, 320 aa, Unknown
  Obtained from environmental sample
  misc_feature (1)..(320): Xaa is any amino acid
VCTPVYGRGNHDGGFVGDGFFGWYLTTTEGHLGLQENTDDAFINYSNYGLGHSWSYAVRCIQDTSSFISSSSSVSSSSVEIVYGTPVNYQGETYKTVVIGNQIWMARNLNYAVEGSKCYDNSTANCNKYGRLYDWATAMKLPASCNDNSCASQVSQKHQGICPDGWYVPNDDDWYVLMKFVNPNCYDDEKCGNVGNKLKATSDWSYDDTRNTNGTGNGQDIYGFAALPGGGSDSDGYFAGVGYSGSWWSSSEVISQLSAQSELNANCWHMSELWYLWKRQGKKNGFYSVRCMQYGNGGGNLSSPSFISSSSVSSSSVEDC

SEQ ID NO: 82830 - protein, 338 aa, Unknown
  Obtained from environmental sample
  DOMAIN (1)...(108): 3' exoribonuclease family, domain 1
  misc_feature (1)..(338): Xaa is any amino acid
MGDAFVLATVCFGPKKEADFFPLTVESGEKAYAAGRLPGGYKKREAPPGDDETLKARIIDRPIRPMFPDGVSREVQIIVQVLSSDKNFDADVLGVSAASIAVGLSELPFEEQVAAVRVAVVDGKPVINPTFAQLDVCELDMVVGGTENSVCMVEGGAYEVSEQIMIDAIQAGHQAIKDLCKAQTELVARSAKPKMVLTPKAENENTAKIAEAVKSAIYDELSKTLHTPMVKTEHYPAMAALEEKALASEAVTAIIGEDAALKSLAKAAFKEIERDTMRKMILDEGVRIDGRKTTDIRPIEIQLGVLPRSHGSAIFQRGETQASLVPNSDPWGGGGAQG

SEQ ID NO: 82831 - protein, 79 aa, Unknown
  Obtained from environmental sample
  misc_feature (1)..(79): Xaa is any amino acid
MPAALTETKTSISEGELTQRMAVVKRFRELLEQQRERFRSYLAALDRQQLAISAGSADEITAHVELEEQIVEDIFSSRK

SEQ ID NO: 82832 - protein, 315 aa, Unknown
  Obtained from environmental sample
  DOMAIN (2)...(308): Dihydrouridine synthase (Dus)
  misc_feature (1)..(315): Xaa is any amino acid
LALAPLHEVTDKAFRIFMRELGGLGMTVSEMVSSEALIRKAAKAEKMLERDGRRPFAVQIVGARPDVMAEAALIALEGGADVIDINMGCPASNVTGGLAGSAMLRDIRLAESVAVAVIKSAKAPVTVKMRVGWDESQKGRGEYLDFLKMFDAVGVSAVTIHPRTRAQQYSGAADWACIGRAVEKGFGYPIIGNGDVLNAADADRMVAETGCQGVMIGRGAMYNPFIFKQIIDRTFAVGPKMRIEAAIRFFEILIRLNEERDALHKIKKFSGYFTKGIPGAASLRQKLNSIHLTAGILEELRNLGDAIHSILNRSA

SEQ ID NO: 82833 - protein, 349 aa, Unknown
  Obtained from environmental sample
  misc_feature (1)..(349): Xaa is any amino acid
MIRSAELFTSRLRETAVNILPKQRYGVMTTESIVAFLGSQERAQKECKEASCLAELGRKVNADYVAQARIGRFDNNLSIVVELYRSKSGVMVGSFTGNSKSISGLLTFIDEKAPILFKELLSAFSSSSTASPAVVLTPTPVPIPASTQPVAIEYGQQLTDSRDGKKYRTVIIGKQTWMAENLNHDANGSKCYNNEPENCQKYGRLYNWDMAMKVCPKGWHLPSDKDWNVLMKFVNPNCSENSNCAKAGTKLKATDGWNNIKQGKSGNGTDDFGFAALPGGYGISDGSFYDVGYSSGWWSSSEKHASPRYYRNTGYGYELAYRGPYDQDSSLFNVRCVKDDAPTILLKCL

SEQ ID NO: 82834 - protein, 286 aa, Unknown
  Obtained from environmental sample
  DOMAIN (1)...(223): Glycosyl hydrolase family 53
  misc_feature (1)..(286): Xaa is any amino acid
MRFLLDFHYSDTWADPGKQYKPVSWQSLNTVALLSDKVRSYTKESLQKFKDAGALPDMVQVGNEVVHGMIHPEGKNNGDAFARLVLAGINGVKDVDPNIKIMMHTINSENPLGWLTTLKSNLNKVEANAANKIDVIGLSYYPKWHGNVDSLKRVMTAISKNHNIKIAVAEYADFHREVNDAVYTLPENEGLGTFAWEPQEFSGDDSKPLFDYTNGARRSNARLELYPQMVIDYGINNIHLATVQIRQATVQSRKAAVAEQTPAAVQTQRKGSSSNVPSNTSSPGTT

SEQ ID NO: 82835 - protein, 80 aa, Unknown
  Obtained from environmental sample
  DOMAIN (34)...(67): Tetratricopeptide repeat
  misc_feature (1)..(80): Xaa is any amino acid
DSALNLARAYTSAGELAKAQNSYQAVLRLNPDNWDAMYELGKIYVSMGRPEDAKKYLRDLVQRNSSYSARADAERILAGL

SEQ ID NO: 82836 - protein, 213 aa, Unknown
  Obtained from environmental sample
  DOMAIN (1)...(210): Aminopeptidase I zinc metalloprotease (M18)
  misc_feature (1)..(213): Xaa is any amino acid
MGLDRSMVGGYAQDDKVCAYSALTAFLSVSEPEYTSCLVLADKEETGSFGISGMKSAFFLRFINELLEAAGEAANEREVFSNSFCVSADVNTCWYPLYKEVLDEHGDARLNHGVILFRYWGEKGKENTNDADAKTTAALIKILDEDQILWQTGEGGKVDSGASGTMSRFFTNLDIPSIDLGVPLLSMHSPLEAAAKADIYMAYRAFTAFFKRR

SEQ ID NO: 82837 - protein, 93 aa, Unknown
  Obtained from environmental sample
  misc_feature (1)..(93): Xaa is any amino acid
MAKIQDLIERAERLHGSRITEPAFKSWRNDSIRFLQKVFGEEISEAVTFKNIEFSITYLSFDFLRFGWKRNILKEKETFREGLKYAIYYLKTL

SEQ ID NO: 82838 - protein, 323 aa, Unknown
  Obtained from environmental sample
  misc_feature (1)..(323): Xaa is any amino acid
GGRFGGPKARKNPAGGAAFPKGRDNIISNGPGIVGNKGPVALIVDTGKIVELCAEEGQYKYDQSSEPSIFYGGLGKGILDAFKNIGERFKYGGQPGKEQRIYYFNTKEIMGNKYGTPAPIPYLIVDPNINLRLTISLRANGEYSYHIINPMAFYANVSGNVEDVYTRDKIDSQLKSEIVTVLGPSLAKLGTGLEYHEISYQTEKLAEILNEALSNKWREGRGIEIVNFGITCTATPEDEQKIKQLQTAAVMRDPTMAAASLVNAQGDAMRTAAGNTSGAMAGFMGMGMANMAGGMNSQNLFAMGQAQQAQQAAAQQAAPAAAG

SEQ ID NO: 82839 - protein, 87 aa, Unknown
  Obtained from environmental sample
  misc_feature (1)..(87): Xaa is any amino acid
MPEQYIFRNNEYIEILPVWAQELASKYGSKTANLYILYGNIRDLLPHRRKEDEFTFTRVQEYVFEVLFGKRDIIAYYDWSSGVTFCE

SEQ ID NO: 82840 - protein, 312 aa, Unknown
  Obtained from environmental sample
  misc_feature (1)..(312): Xaa is any amino acid
EDCTTNHEPAGFGGSNAQAKRPAKNPPPVFFKETEKLKIPVSAPEGEPSQDSKYRRVAKFLILIGSEQAAGILAELDPDQISEISKEIALVKVIRPEERDQILAEFRSLFSKPFDYYGPSRGGIETARRILYLAKGPEEGESILNKAIPKSKDNLFGFLEEYSAEQLVMLLKDETDQTAALLLSRMTAKLSAETLSRLPAKRKAVILKRIAHQSEVSPEVLEQVSAAMKEKIRNISVSSDEIKIDGMQALTAILKQGDYSFGDKLINEIEKNDPEIGQNLKEKLFTLDDVLLALDPPIQEKIVFHDGSRHWR

SEQ ID NO: 82841 - protein, 266 aa, Unknown
  Obtained from environmental sample
  misc_feature (1)..(266): Xaa is any amino acid
GGTLDGWNTLADGTGTTYKAGASYTRAGNITLYARWVCYITYSSVNNAYGTPRTETVIYGSSIWLHYPSSNSNLGLTFDGWDTNASGTGTVYRAGDSSIILRNDITLYARWLCTVTFDANGGYGKIDAKTVLAGSAITIPSGNNGFGYSGGYLFAGWSVNSTGTVMYSDGASYTPTRSVTLYARWGYRVDFNINGGIGTTPPRQYALLNGSSLSGITLPDSTGFSHPSSMMTFRGWTTWKGGGDKYLSGYSFTPPYSTITLYAWWE

SEQ ID NO: 82842 - protein, 60 aa, Unknown
  Obtained from environmental sample
  misc_feature (1)..(60): Xaa is any amino acid
GISLYRPNRNTMGIAMKLRLEDAGLDPAAIAYVNTHGTATDTGDVAESWATADISKDPFL

SEQ ID NO: 82843 - protein, 270 aa, Unknown
  Obtained from environmental sample
  DOMAIN (192)...(270): Transporter associated domain
  misc_feature (1)..(270): Xaa is any amino acid
MLPFIFPALKFSSLFRQEDNNITEDELRNVLLEGEKQGIVESNERTMVEGVFYLGDRPVEAFMTHRSEIQCLDVNAPYNETKEKVIEHRQRCYPVVDGSPDEIVGAVDLDDIVFDMAQEAPKGLRAIMKKAQFIPQTMSALKAFESFKHSQANFLFVMDEYGGLSGVISIKMLFEEIVGEFSTPVKKEEPIKKQEDGTWLADGTLNIDDAAEALSLANLRDKGDFQTLAGFVLSLAGELPQAGDSVEYKGYKFTVKEMDGNRIDKIVISK

SEQ ID NO: 82844 - protein, 332 aa, Unknown
  Obtained from environmental sample
  DOMAIN (210)...(325): MutS domain V
  misc_feature (1)..(332): Xaa is any amino acid
LAIYHRAEVFRQWLLKPYRTLEGGEILREDPLTESARVLPNCADVAKEVFKILDLEGKLRDLPEFKELRRRIRALQKNIESTASRYAGNEEKRRMLQSEIPSQRDGRMVLAVKANFRGRIKGIVHEVSSSGQTVFIEPEEVVEMNNELLIENRRLDAEIRRVFRELTGRISSRREDLGTFYRGIVFLETIRAKARYGYENKLIFSENMETEGEGKLVLRQARHPLLGRKAVPLDLFMGEGIRTVIITGPNTGGKTVALKTLGLLALMNQFGLALPAGEGTLLPVFDCVYADIGDEQSISQSPSTLSAHMTNIAENYLLLNGTFPLCFLTSWG

SEQ ID NO: 82845 - protein, 104 aa, Unknown
  Obtained from environmental sample
  misc_feature (1)..(104): Xaa is any amino acid
MARGRTSEALLRYRDASRRYPDDKRILISLALVSGSLGDNEGSLSFINRALAQHPDDYRVFYYAAYVNANANNLAQAIRYSEMALTHRPGYGPARSLLETRHNG

SEQ ID NO: 82846 - protein, 228 aa, Unknown
  Obtained from environmental sample
  DOMAIN (3)...(174): Thiamine pyrophosphate enzyme, N-terminal TPP binding domain
  misc_feature (1)..(228): Xaa is any amino acid
MKLSGARISIETLLAHGIDTVFGYPGAAVLALYDELEKSADKIKHILTAHEQGAVHAADGYARVSGKTGVVFATSGPGATNLVTGIANAYLDSVPLLAITGNVALSLLGKDSFQEVDIVGITQPVVKHSFVVHSVDRLEFTLNEAFRVANSGRRGPVLVDIPKSVQSDICEYTGIPPSSEKEPPLSFDIEQIVSAIKGSKRPFIYSGGGVVPSGAKKNCKSSLKSYPP

SEQ ID NO: 82847 - protein, 70 aa, Unknown
  Obtained from environmental sample
  misc_feature (1)..(70): Xaa is any amino acid
VYKSVDPKVNFPKLEEEVLSFWEKNKIFEKSISRREGKEEFVFYDGPPFATGLPHFGHSSPSADLINGGP

SEQ ID NO: 82848 - protein, 333 aa, Unknown
  Obtained from environmental sample
  DOMAIN (143)...(272): Protein of unknown function (DUF1215)
  misc_feature (1)..(333): Xaa is any amino acid
VSVQPGLPSLARDLELLADRDCEVGRMLAAVCSLATQPPADLSLSQVSAKSASSVKGQVASAVNKLRGGAASIAYDIRDPFAEARAVSFAHVEAFLKNGALDVYRGGLSKLAEKIRVCGDRGSYVPFIARGSDGPLRECRIALDRAYVSMPPPVSASLKRVLEPPLEVAAATLTKAIAEEIEESWSAEVVNPYVNKLTRRYPFDKKGNDAAWSDFEEFFKPQSGLLWVYCDKNLSGVLERTSRGWEGVGRLLPLPLSLNDEMLRALGGAERIADSFFKKDGSPQRHEMIFRPIKSSSGEVVLLSGGKMFDFKTGQPVTIGSQQGSDADEAIVF

SEQ ID NO: 82849 - protein, 140 aa, Unknown
  Obtained from environmental sample
  misc_feature (1)..(140): Xaa is any amino acid
TAPKAVSMFAKDPSLYDINFMNIQMPKMDGYEATRRIRAIEAEQYKAPAGIAGKKAVNNDSMNSGKGENKLQLLEQTKRIPIIAMTADVFKEDIEKCLAAGMDSHIGKPLDFDEVINRLNLYLGVKKIKENIGTKYAAAV

SEQ ID NO: 82850 - protein, 326 aa, Unknown
  Obtained from environmental sample
  misc_feature (1)..(326): Xaa is any amino acid
VAIDPGVSSITAGGVWGCFNLESVSVPNSVLEIASGAFLGCANLTAINVSFENIYYSSVDGVLFYTKGGVYSLVRFPAGKSSGSYAVPDGVTAIERWAFYGCTHIASIVIPNSVTSINGAFAGCSGLTSIEVAADNADFRSVDGVLFYAGNKEEYILLTYPGGRRGAYAIPGGVTRLREKAFSDCVGLTSVTIPNSVLFIENYAFSGCAGLASVTIPRSVLSIEEWVFSGCTGLKSIEVAPGNDVFRSVDGVLFRIGYDSDELLAFPAGRQGAYKIPDRAASIESMTFFNCAGLTAVSVPDSVKHIGGWAFMECYGLTLGRSDPWG

SEQ ID NO: 82851 - protein, 129 aa, Unknown
  Obtained from environmental sample
  misc_feature (1)..(129): Xaa is any amino acid
MSKARYNSLNFATCYLLFALYILGHMTVHDKIQSFLSSMILSHSGWRGVFSVSGDEEDRTGVISTAQGLIAAGAAAVFAEYLESGASGGIPPVVLVGRDSRPSGKALADMVNAALCRITASRAMPGIVA

SEQ ID NO: 82852 - protein, 334 aa, Unknown
  Obtained from environmental sample
  misc_feature (1)..(334): Xaa is any amino acid
VEGVAEIGMWGAKKYAMRIYIDPVKMAGYGLTLNIIRSALDRENAELPAGQLEGSAAIVTLRSSSKLISEDDFRNVILSNNANRYVRLGDVADVVLAAENEKNTLRMNGRPMISLPVVAQPGADQIKIADEVLKRVEEIKKDMPEGVVIQITFDNTHFVRMALSEVEETIVIAFLLVVAVIFLFLRDFRTTFIPMITVPISLIGVFFIIWILDFSINILTLLGVVLAIGIVVDDAIVVLENIYAKIEKGLEPKEAADKGVNEIFSAVISTTLVLCAVFTPLLFMEGFTGRLFRGFAIVIGSSVLISAFRGITLAVCSPAEYLGVAKLPLLCGNR

SEQ ID NO: 82853 - protein, 347 aa, Unknown
  Obtained from environmental sample
  DOMAIN (3)...(347): Hsp70 protein
  misc_feature (1)..(347): Xaa is any amino acid
RKFNDQMAENPGAIVCDKRLIGQRFDSQKVQETMAHLPYPVVRAANGDAWVAVGERQYAPPEISAIVLGEIKRAAEAYTKEKILDAVITVPAYFDDAQRQATKDAGRIAGLNVLRIVNEPTAAALAYGIDKKGKKELLAICDLGGGTFDFTLMEMSDGVFEVLATSGDTFLGGEDFDLAIIRHLLGKVQNAYGIDISGDPFAMQRLKEASEKAKCDLSFSDQVEIIVPFLTKGTASPLHVEEKLTRGEYEKMVAPLVGRMIGPMTDALQQAGKSVSDVDQVILVGGQTRTPIVQKAIKDFFGKGPTKDINPDEVVAVGASIQGAVLSREQKTCAAGLTRFHWHKTRE

SEQ ID NO: 82854 - protein, 262 aa, Unknown
  Obtained from environmental sample
  DOMAIN (1)...(240): DNA gyrase/topoisomerase IV, subunit A
  misc_feature (1)..(262): Xaa is any amino acid
MIVRGRAEVIKKANDREEIIITEIPYQVNKSVLYQRICDLARNKIIEGISFTRDESDRRGMRIVIGIKKDDFGEAVLNKLYKFTDLQTTFGIINLALVNMRPQILSLKELMAHFLDHRHNVVVRRTQFDLKKAQDRAHILEGLRIALDHIDEIVALIRASSTTEEANEKLMRRFGLSEIQAKAITDMRLKQLTGLEREKIEQEYQELVKLIEDLTAILASRDRRMQIIQGELEEMRERYGDARRTEITDALGDVDIEDMIAE

SEQ ID NO: 82855 - protein, 57 aa, Unknown
  Obtained from environmental sample
  misc_feature (1)..(57): Xaa is any amino acid
MVSDLLERSKEPCIKALRDAGLTAEKIDEVILVGGSTRIPAVSRLLKTFSKKNPTRA

SEQ ID NO: 82856 - protein, 120 aa, Unknown
  Obtained from environmental sample
  DOMAIN (1)...(113): Response regulator receiver domain
  misc_feature (1)..(120): Xaa is any amino acid
MNILAIDDNVLALEELVSSIKEACPDDDIHSFSKPSELLDFAKENPCDIAFLDIEMWGMNGIELAQKLKEIHGKINIVFVTGYSKYALDSYTVKASDYVMKPRYQRSGKEARKITRPSPA

SEQ ID NO: 82857 - protein, 314 aa, Unknown
  Obtained from environmental sample
  misc_feature (1)..(314): Xaa is any amino acid
EDGVRWLFVAHGEIRKNPDLPKGDVIRLRVKGEWDATLYDTISGEIVPASANRQDGWTTIIRPFYEHDSLLFKLESVRTNLSPIISHGDTKHTEDTEKNKEITKNPSKYSPCSLCREPQVRCGLREMSSGNGLVPITLEESNVLLLDMAEYALDAGEWRPKEEILRLDNKLRAELKWPSRGDAWAQPWVERDASTPFTLRLRFSFESEIAVTGTELALENAASARVALNGEAAGVVKGWYVDKCIGKVSLPAIKAGANVLEVSFPYGRKVDVEAMYLLGDFGVNVAGSSCVITRPVRSLGFGDISRQGLPSRPI

SEQ ID NO: 82858 - protein, 307 aa, Unknown
  Obtained from environmental sample
  DOMAIN (95)...(143): Regulator of chromosome condensation (RCC1)
  misc_feature (1)..(307): Xaa is any amino acid
LNYYGQLGLGNTVNRYTPTRVGTLAYWAAVSAGVDHTLALKTDGSLWACGRNNKGQLGLGDSDFNAHPTPTRVGQGANWTAVSANFEHALALRADGSLWAWGNGPLGQLGLGATNGYRNTPTRVGTDADWATVSAGGSHTLALKTDGSLWAWGHNGYGLLGIGTSDYNAHHTPTRVGTDANWAAVSAGYIHTLALRADGSLWAWGSNYYGQLGDGTAWRVFPVLVGGPASGSSSTPVDIDEYATPVGSDGDTWTWEAANSQTVATDGDVEHPASPYAHHAPVYSPRRDSYDRHRPDHPDGHGLSQHR

SEQ ID NO: 82859 - protein, 181 aa, Unknown
  Obtained from environmental sample
  DOMAIN (4)...(74): ACT domain
  misc_feature (1)..(181): Xaa is any amino acid
MGMKQISVFLENTTGRLCEVTRTLAKAGINLRAINIADTAEFGILRLIVDKTDEAEKALSAAGFTIKMTMVAAVEIEDKPGSLDALMELIQESKINIEYLYASLGGSPPSESCGKAVVVFNLEDHQKGFALPEKSGLVSGGKINNVENINGCQPRLFPFAKNGRSGGTWPPPPSYQVLPHF

SEQ ID NO: 82860 - protein, 333 aa, Unknown
  Obtained from environmental sample
  DOMAIN (3)...(162): Amino acid kinase family
  misc_feature (1)..(333): Xaa is any amino acid
GFGERLSANLIASIFTANNIYASFLDARDLIKTNSNYGKAEVLKKETEENIKAYFKNVKKTVQVVTGFIGSTMDGYTTTVGRDGSDLSAAVFAAALGAKKLEIWTDVDGMLTADPDQVKNAFLIDEISYNEAIEISHFGARVIFPPSVKPALEKNIPIYIRNTFNPKGSGTKITAKASPGKYPIRGISSINQVALIRIQGTGMVGVAGFSARVFGSLARKGINVMLISQSSSEYSICFAVLPEDIHGADAALKEEFANEIHSCSIENPIIEKDLSIIAVVGSAMKNTTGISGKFFHALGRNGINIVAIAQGSSEINISAVISAARADLILGFP

SEQ ID NO: 82861 - protein, 54 aa, Unknown
  Obtained from environmental sample
  misc_feature (1)..(54): Xaa is any amino acid
ILTGNSAWMPVIETILTTKPMKFVIVGMGHLYGPDGLLSQLRNKGYTVKQLINK

SEQ ID NO: 82862 - protein, 278 aa, Unknown
  Obtained from environmental sample
  DOMAIN (3)...(273): Pyridoxal-phosphate dependent enzyme
  misc_feature (1)..(278): Xaa is any amino acid
MNVLDMVGNTPVVEIEKYIQCGKWSFLICQSGIFNPSGSVKDRAAKAMILDGIKRGLLTKDKILLDSTSGNTGIAYAMFGAALGYKVHLFMPANASEERKKIIKAYGAKVIETDPLEGSDGAYRLAMELAEKEPDLYFFPNQYDNFENSKMHYETTGVELYNQCKPTHFVAGTGTSGTFMGVSKRLKEFDSSIKVMLMQADSPFHGLEGMKHMESTITPKIFDKSIADLYSEVKTEDAYKTARRLALEEGLFVGVSSGANVYAAMELQKLASRSREPP

SEQ ID NO: 82863 - protein, 126 aa, Unknown
  Obtained from environmental sample
  DOMAIN (13)...(77): Heavy-metal-associated domain
  misc_feature (1)..(126): Xaa is any amino acid
METTEKQNLQKRSFHIDGMFCVNCQNIIEKELKNTEGVKKAAVNYHTGHAVITYDEAIIGFDKISAVIESLGYKTLEDSGKNQTLQNKTIPQILWDSYNYPRAVYADTSFWSQPTGRYFSRLPGRN

SEQ ID NO: 82864 - protein, 93 aa, Unknown
  Obtained from environmental sample
  DOMAIN (2)...(20): SEC-C motif
  misc_feature (1)..(93): Xaa is any amino acid
MKACPCGSGRNYKECCEPYIKGKKPVPTAEALMRSRYSAYAEHEIDYILETCSEDERKKIDVKQTKEWSENSKWLGLKFFLLKRAARKIRRGS

SEQ ID NO: 82865 - protein, 337 aa, Unknown
  Obtained from environmental sample
  misc_feature (1)..(337): Xaa is any amino acid
CFPPGLSRESIFFGGSIIIEMKTPGKDLNKAYEQAKAYALTLPQKDIPKGILTCDFLNFQYYDLEDAPDGAAKCRSFKLEELPAHAELFGHLAGYREIDPFKHWDPVNIEAAVKMGELHNRLKDIGYSGHQLELYLVRLMFCLFADDTGIFEPPNLFNKYILERTNEDGSDLALHIQKIFEVLNKPKDQRLKTIDEQLNIFPYVNGHLFEERLETADFDRPMRDTLLECCALDWSKISPAIFGAMFQSVMNDEERHDIGAHYTSEENILKLIRPLFLDGLIEEFEKIKKLSPAQRRERLLKFHDKLASFKFSDPACGCGHFLVISYREFAPFGIGVL

SEQ ID NO: 82866 - protein, 323 aa, Unknown
  Obtained from environmental sample
  DOMAIN (202)...(235): Tetratricopeptide repeat
  misc_feature (1)..(323): Xaa is any amino acid
MLKVMAGARGLCPRRKRRWIDYYRYFVLALRPNILREFTEAAILKARNCDCESALEIFDALRGLFPASPVVKLNRALAMEERASQFERRSKPEAEAAFQEAQAAYEDVLAIQPPFPEAYFNAGFFYLGRKDFRNARECLSVYIENSDNEEKQKQAHAIVKNINENGLEDEDLNAAYQLISQEKEEAGMLRIRDFIEKYPSVWNGWFVLGWALRRLGRWKDGAAAFSKAVELDGSVSDVRNEFAICLMECGDLKGARRELEAALRIDPENIKIISNLGVLAVKSGNVNEAAAFFRAVHELDPEDAIANQYWGRGQGPDSSITGG

SEQ ID NO: 82867 - protein, 75 aa, Unknown
  Obtained from environmental sample
  misc_feature (1)..(75): Xaa is any amino acid
MIKTVKTVDLKGKRVIMRVDFNVPMKDGVVQDDTRIVAALPTITYILEQGVKSLTLMSHLGDPSRTLKKRKEKPR

SEQ ID NO: 82868 - protein, 186 aa, Unknown
  Obtained from environmental sample
  misc_feature (1)..(186): Xaa is any amino acid
MPVRVLERLGAKQFAARKKGLESGGINFCSFLSILGLALEAALLLGEILFALMTASLLFPTAVDYLQENNQIAEVFIFAAFCFNYILVESLYGCMGFGLYINSRVEVEGWDLELLFKKFAKLQIVKQQSEARQNDAQLIKIALLVCLFTVLPFSAHSQSTGDFPRYFPCCSEQAVLALQEILASPD

SEQ ID NO: 82869 - protein, 335 aa, Unknown
  Obtained from environmental sample
  DOMAIN (141)...(264): Phosphoglucomutase/phosphomannomutase, alpha/beta/alpha domain III
  misc_feature (1)..(335): Xaa is any amino acid
MGRDEQIAKGLLVIIDKEADEPYQNMVRSRLFRPELIKEKGREVKIVYTPLHGTGAFHVEGVLGSLGLNVITVPEQREGNGDFPTVAFPNPEEAAALELAVKLGIKEKADVVMATDPDADRFGIAVPAGNRGKEGEYVLVTGNQMGALLADYIFLSLKETEKMPPNPVMVNSIVTTGMQKRVAEHYGAKCLECLTGFKWIADVMAKCEKDKSATVVFGTEESYGYLVENEVRDKDGVSAAAMTAEMTLYWRSKGKSLLDRLEELYQICGFWKEIGISKYFQGPEGPAIMQSIMEEYRKNPPKTLGGIEVERVRDIKNGADGFPPSDVLQFFLKER

SEQ ID NO: 82870 - protein, 305 aa, Unknown
  Obtained from environmental sample
  DOMAIN (43)...(197): CDP-alcohol phosphatidyltransferase
  misc_feature (1)..(305): Xaa is any amino acid
MHNAKFIVPNAFTSINFLLGVASICCSASLFEIKNEYSVVMGAHFIIFCALLDKLDGFAARAFNASSEFGAQFDSLADLIAFGLAPAFMIMFAYKDILPDWYESHKLALFAGAAVYMVCAAMRLAKYNAMDNDSYPDYFSGMPSTFAGIVNALVIILLCKYKFFDECPDILYIPLVIMLITSVLMVSPLFLVKLKKRKSNIINAIQVINIAGAYIAGFAMILPEYLMALVLIYFIIGFAHGIINRNKITAKEPIMEAETSSDVLYYIWFAVLVAFLVFCLSQNLNLIKTFDKRPERPQNVYVFQK

SEQ ID NO: 82871 - protein, 254 aa, Unknown
  Obtained from environmental sample
  DOMAIN (1)...(190): ATPase family associated with various cellular activities (AAA)
  misc_feature (1)..(254): Xaa is any amino acid
LLIYGGTGLGKTHLMQAIGHHIYLNSDLQILYITGEGFMHEFVETVGLGQKNKDAFAKKYRNVDALLIDDIHNIGAQATGTQDELFYTFEALYNKKKQMVFTCDRPIAELKHIADRLKSRFASGLSVELQLPKYEELINILKKKVELKKLELKKNIEISDEIIELIIKNISSNVRDMEGALNKLMGYADLVNKPVTMEIAQRELKDIFSDPKQGNMSIDIIIKGVADDYHLTPNDLEGKKRSAGIGKAPGNCLL

SEQ ID NO: 82872 - protein, 330 aa, Unknown
  Obtained from environmental sample
  DOMAIN (44)...(306): RecF/RecN/SMC N terminal domain
  misc_feature (1)..(330): Xaa is any amino acid
GGEVTVSYSGVRKNLIQLVEKWYFSLCGEKLGWGRGYRKGSDKMLRELRIKNLALIENLTLDFASGFTVFTGETGAGKSILIGAIGLLLGERASSEMIRSGCDDAEVSGSLDIENIRHKLREFLREAGIDAEDGELIIRRNISKSGKNRIHVNQVPLPLSTLKALGDLLIDLHGQHDHQSLLNEETHAGIVDALPEASAAKGGYTASYNNYTAAAQELRDAQRAARELADKKDMLEFQYKELSTLNPQRGEETALEQELSLLSTAAQRSECVNGILSLLGSNDTGEASGGESIQKRLSQINRKLEALCKHDPSAAPYISEIARPILTHGL

SEQ ID NO: 82873 - protein, 273 aa, Unknown
  Obtained from environmental sample
  DOMAIN (199)...(272): GTPase of unknown function
  misc_feature (1)..(273): Xaa is any amino acid
MGIEKAILVGIATPKVKIQKAQEHLQELQRLAETAGAMVAEIFLQKVQAFNPATLIGEGKIEEVRTALENHEASMVIFDEDLSGSQVRNLEKRLPGIKVLDRTGLILDIFAKHARTAESRLMVEVAQMQYMMPRLTRAWVHLSRQVVGGSPGIGTRGPGETQLETDRRLVRKRIQELKEKLKKIERDRALQAKRRENIFHVGVVGYTNAGKSTLTNRLTNAGVLVEDKLFATLDSTTRQFHIAEGQDIILSDTGDSFATASSLGGNFKALWGV

SEQ ID NO: 82874 - protein, 256 aa, Unknown
  Obtained from environmental sample
  misc_feature (1)..(256): Xaa is any amino acid
MERKRASSLRNDKPHKTYNPKRRLKIIGDDDTILDDAPAGGLTLNEAINKINNATDAESEDLKQKLLYAFINRAAKILAARYDAYKREKGLVSYDDMLRLMRNAVRSHDVKILERLRKRLRYGIIDEFQDTSPVQWSIFQKIFLEEAEGAKIYIVGDPKQSIYSFQGADINSYISAKDAIAAQNGTVYSLKNNFRSLPEMIDGYNAILCGDTENWFAPEGGDSDISYSKANAACPPPQRGAPPRPLPVSPRPSISR

SEQ ID NO: 82875 - protein, 64 aa, Unknown
  Obtained from environmental sample
  DOMAIN (1)...(64): Ribosomal protein S3, N-terminal domain
  misc_feature (1)..(64): Xaa is any amino acid
MGQKVNPTGLRIGINKTWGSRWYAAPKEYVEALHGDLKLRKLIMEMPETKGANIAEIEISVIRS

SEQ ID NO: 82876 - protein, 102 aa, Unknown
  Obtained from environmental sample
  misc_feature (1)..(102): Xaa is any amino acid
MFQRCRFILLHKIYASAREVYRGGVTGRTLFERTKENYGERVFYAEEVEDGFELMKETLKSGDLFITMGAGDNWRLGKKLFEFFYKSEINNELVKKENGNSI

SEQ ID NO: 82877 - protein, 308 aa, Unknown
  Obtained from environmental sample
  misc_feature (1)..(308): Xaa is any amino acid
MVLLSILIWFHCRVRGRGYPTSEKEKEPRPKAALFDNLPLAEPLKAYGDVNPICLQRFGADPWGIVYEDRVYVYMTGDTFRFSSGTSPTSDFSNLLPNEYNNINTIRVVSSSDLVNWTEHPEIKAAGSQGAARQATNSWAPAAICKNIDGIDYFFLYFADNANGIFVLRAEDPLGPFINPRTNGSALINRSTPNCSNVTWLFDPAVFTDDDGRSYIYFGGGVPSGRDALPGTDRVVQLGDDMISIVGTPQALNAPFIYEDSGINKIGSTYYYSYCANFRVHNYLNRPEEYPAAVTLGESGSYLGRSDL

SEQ ID NO: 82878 - protein, 134 aa, Unknown
  Obtained from environmental sample
  DOMAIN (30)...(134): Hsp20/alpha crystallin family
  misc_feature (1)..(134): Xaa is any amino acid
WGPGYRQRSFFGDSVLSPSTRILNRLPAVDVRETEKSYILDMELPGYDEKDIEIHIDGASLSIASKQEESSGKEGDTGTWLLRERHVSSFSRSFKLPDNANPEEVNAEFKNGILKLEIGKRAEAQKRAIRINVK

SEQ ID NO: 82879 - protein, 353 aa, Unknown
  Obtained from environmental sample
  misc_feature (1)..(353): Xaa is any amino acid
KALDVGDKNTNIYRSQSRISSCRVSDNVPSGTYKLKMVFSVDGGVNGLPINLSYANVPNSIDCTVNHVPPIITAHPSDQTVAPGVAAKFAVTAASNDAGTVTYQWQVNTSASVAPISRSVTVSMWDKTGDGWNGGSLRISVNGADLSTNPTINMGNTGTYRFNVYPGDVVAFYWNISNYNSECAFAAFYADAPPSPAFNPAVGAANDTAALLVYRQYGGLISAEGKLLGSFKAAAAVDVDVFSNVSNGVGAASASYTTPAATAAMSGYRYRCVVSNSHALSDTSEYAVMTVKTNAVMSSDRVIPIRSDGDGREAVSATPSALTAEFTAGPNPASRRGGAVGSPYRLAIMGEKP

SEQ ID NO: 82880 - protein, 353 aa, Unknown
  Obtained from environmental sample
  DOMAIN (1)...(72): OB-fold nucleic acid binding domain
  misc_feature (1)..(353): Xaa is any amino acid
MAENYPRPRGVTFLDLRDQYGVTQIVLHVEYKSGKETVITVSGIVKKRDADTINPKIATGTVEVHAETLVIQSKAVRALPFEISDSKNTREDVRLSYRFLDLRNPEVKKNIFLRSKVISFLRAKMEELGFTEFQTPILTSSSPEGARDYLVPSRKHRGKFYALPQAPQIFKQLLMVSGFDRYFQIAPCFRDEDSRADRSPGEFYQLDFEMAFAGQEDVFRVAETVMYGVFTAFSDKTVSPAPFIQIPYAEALLKYGTDKPDLRNPLVITDLTGFFAGVEFQPFKNIPVRGIVAVGAALQPKSFFEKCLPCHRDRHERASLHLRYGRRQPSGAYSQILFAEKQDTLKKTLPKGN

SEQ ID NO: 82881 - protein, 313 aa, Unknown
  Obtained from environmental sample
  DOMAIN (86)...(313): Alpha amylase, catalytic domain
  misc_feature (1)..(313): Xaa is any amino acid
MFRKRGSRFNSNKTLFDPYAKALTDLSNWDLKACVGYDPYTASKDLSYSYIDDIFTQPRCIAIDDNFDWQGDLPLNYPLRFSVLYETHVKGLTNHPSSGVSAPGTYKGVIEKIPYLKDLGITSLEFLPIQEFNENELNSTNPQTGKKLVNYWGYSTVAFFAPKTSYAHDRSPGGPVREFKEMVRELHKAGIEVILDIVFNHTAEGNEWGPTISFRGLDNTIYYMLNENKRYYQNYSGCGNTVNCNHPCVRTFIMDCLRYWVMGMHIDGFRFDLGSFLGRDECGILWKTSCFARIAKDPGLSSTKIFAEAWDAG

SEQ ID NO: 82882 - protein, 310 aa, Unknown
  Obtained from environmental sample
  DOMAIN (1)...(132): ATP-dependent protease La (LON) domain
  misc_feature (1)..(310): Xaa is any amino acid
VGTAAKIVKKINLPDGGVNIFISTLKRFKVKKTLHASNPIVAAVEYLNEEEDDTSEVKALTRALISEMKQISENNPLFSEEMRLNMINIDHPGKIADFIASILNIDKAEMQKILEILNVRKRMEQVLVFIKKEQELLRIQKKIQKEINEKIEKSQRDYFLKEELKAIKGELGMTTDAKSSDYQRFKDIIDAFKFEGEVKEAVEQELEKFNLMEPNSPEFVVTRNYLDLIVSLPWNDPEPENFSMKGAQAILEADHYGLEDVKNRITEYLAVRNFAATTPKAHPPRLPKPRPYNPWRGLLRPRRKLSPPRL

SEQ ID NO: 82883 - protein, 331 aa, Unknown
  Obtained from environmental sample
  DOMAIN (231)...(325): Mur ligase family, glutamate ligase domain
  misc_feature (1)..(331): Xaa is any amino acid
FSVDGRGKAGFFSTVQYSDGSGGLAGAQWTKEHQTTPEAPDVQRMLWEMAENGCEYAVAESSSHGLSPRTNRLGDVEFDACLYTNVTHEHLEFHGTWEQYRDDKANLFRALDRVQKRFTTEDTVDSYEPFGVINADDPSAEFFSNATRRETLSFSVKGKDADLVVKSIESCAQGNKYNVFIRAEKAYIDIIDNLPGAFNAGNVLASLLVVSGLTKIPVRELCPLCPKLLPVRGRMTAVDKGQNFEVLVDYAHTPSSFQTIFPPFRKRLDSSGKAALTRRIISLLGSAGERDTQKRAEQGKIAARYSGHIVLADEDPRGEVPMDILDEMPAE

SEQ ID NO: 82884 - protein, 127 aa, Unknown
  Obtained from environmental sample
  misc_feature (1)..(127): Xaa is any amino acid
MAVIIELKNVSFSAQNGIIVDDVSVDFKVSKTTAIIGPSGGGKSTVLKLTAGLLVPDYGEVLYYDKNIAYMSRAENLEFRREGAFVFQDSALWANQNLNQILELPLKIHYPEMDASCRSCRILSFVW

SEQ ID NO: 82885 - protein, 325 aa, Unknown
  Obtained from environmental sample
  DOMAIN (165)...(234): HAMP domain
  misc_feature (1)..(325): Xaa is any amino acid
MSDRPRISYSAYQSTIENQAKPLGNATDILAAIHSLRAELRLCVLNTGKPDKVNDAEALINNWYKKYEENTAEFAKHISRPENKALMDDAAVSYANFKVAMREVIDRAKNGDDQGEVMKYMLTNALPNANKTADIMTKVIENKRNLLQDAEDRGDALSGSLFATTLTIILLSAAIAVLLGMYISSLISKPLHSTVKMINEMSLGHLEMRLGIDRKDEIGVMAKTMDKFADDLKNIVIGTIKKISVGDLSTNIELRDNRDEIADALQRILDSLRALIIDDGGRVLTAAAEKDLSQRLTGKYEGDYAKMKDHINTRPQQLRRGPEPA

SEQ ID NO: 82886 - protein, 330 aa, Unknown
  Obtained from environmental sample
  DOMAIN (30)...(118): MGS-like domain
  misc_feature (1)..(330): Xaa is any amino acid
GSPRVIASARRSNEKRGGVLITVRDSDKAEIIDVAEKFVRAGFSLHATRGTARYLAGKGFEVQATDKISDNKDNNTATLLESGKISYIISTSEKGRDPANDSVKIRMRACMLGVPCLTSVDTANALADGLLSGYSEINTELVDINRLRNERTKLAFTKMHTCGNDYIYFNCFEMEINSPESLSVFLSDRHTGVGGDGVVLILPSSVADAKMRMFNLDGSEGSISGNAIRCVAKFLYDNGIVKKRDMRIETKSGVQELSLSTRNGQVSSVKVDMGRAELRPEQIPVNVRGESVIARKAVIGGDEYEITCVSMGNPHVVVFYDHLDDLDLAE

SEQ ID NO: 82887 - protein, 240 aa, Unknown
  Obtained from environmental sample
  misc_feature (1)..(240): Xaa is any amino acid
MQKAAALFLILFFGVFVLLFAQDDAPETEPDWEDIYTSDLYSRGDQTLAIGLGVGFPIAFINTYNREIITDPKIEPPLGGTGFINYTYYFNSRFFLGGELGLLFLPTIGGNTVFITFFGPRLGTQFIFGKFEFPLSIALGGTIQTYLDMGYFGYYNKIGVGAYFRITHQWSFGITSNFCWFPQWTDDSTKNIDALFVDLAIVGEISFLVDKVRVMKIYLLKLLHLFLIFFRLNPVTIPYF

SEQ ID NO: 82888 - protein, 277 aa, Unknown
  Obtained from environmental sample
  DOMAIN (213)...(277): B3/4 domain
  misc_feature (1)..(277): Xaa is any amino acid
MKIVYSWLKDFVDISAPVTQVADALTSAGIEVASVTETSVPPGVKVARVVSRAPHPNADKLSLCRVDSGEGEPLQIVCGAPNVAEGMTVALATMGTVLPGDFKIGKSKIRGLESFGMLCSGKELGLSDDHSGIMALPDDYAIGAPLAEYIPYDAVIEIEITPNRGDCLSVVGVAREVSARFGLPFRKPVRRLQAQGRDPVSEAISVDVKDRERCPRYMGRLVRNVTIGPSPDWMKRRLALAGLRPINNVVDITNYILIKYGQPMHAFDYDAIEDKRI

SEQ ID NO: 82889 - protein, 298 aa, Unknown
  Obtained from environmental sample
  DOMAIN (21)...(222): Stage II sporulation protein E (SpoIIE)
  misc_feature (1)..(298): Xaa is any amino acid
LVTTKAQKAYRGDYFDYRDLDGRYYAIIKCDASGKGMPAALIMIQVATMFLNCFKQWKQNPRRMHIEEVVYQINEFIETLAFNGHFAAFTLCLFDSVTGKARFCNAGDNIVHLYDASEERLKTITLSQSPAAGVLPNSMIESTGGYSVQTVMVDNGDILLLYTDGIEEAKRKFRNSSFKEIACTEGPAGTPHENHLCGQTSEEMSNERVEAIINAVMARKVYTLKKYHNPEGDAELQFNFSICNGSAEEVVMAMVSVEKMFRCYKNPNAGEESRVLVDKKVDSFLKNHFCSTSSADPV

SEQ ID NO: 82890 - protein, 96 aa, Unknown
  Obtained from environmental sample
  DOMAIN (7)...(96): Bacterial DNA-binding protein
  misc_feature (1)..(96): Xaa is any amino acid
MKGIGNVTKKDLVNDISSRTGLPQVETKKIIECFLDSVARSLIEGNNIEIRGFGRFKIRNRNGYKARNPRTGEPIEIEAGKKPVFEPRQGIKESTP

SEQ ID NO: 82891 - protein, 78 aa, Unknown
  Obtained from environmental sample
  misc_feature (1)..(78): Xaa is any amino acid
MSNESNTDGLILLNKPPGLTSFDALRDIKRILGTGKVGHTGTLDKFAEGLLLVLTGRALNKSVVYPWTNSVGQSVLGK

SEQ ID NO: 82892 - protein, 262 aa, Unknown
  Obtained from environmental sample
  DOMAIN (1)...(262): Glycosyl hydrolase family 1
  misc_feature (1)..(262): Xaa is any amino acid
MKELGLNAYRMEIAWPRVIPEGTGAVNHKGFNFYDKLIDALLAAGIAPWVTLYHWNLPQSLQQRGGWMNPESPKWFADYAAVVVDKFSDRVTHWMTINEPQVVINHGMFTGVHAPGYKLTIAEALAAGHNLLLAHGRAVSVIRKRTKKPASVGFAPVGWLRRPATLDQRDVDAARTATFEVDPAGLWNSAWWLDPVYLGAYPQQGLEAYGKNAPKFTDEDMSIISQELDFLRRHIYTGRGPLKRARTDGRKLVANQIGYRMN

SEQ ID NO: 82893 - protein, 304 aa, Unknown
  Obtained from environmental sample
  DOMAIN (190)...(265): Acetyltransferase (GNAT) family
  misc_feature (1)..(304): Xaa is any amino acid
ISRVLNLGMVPILPCIGWSPAGKPYNVSSDEIALALSAALGAIKLFIVSVQGGLRRGNFPIPENIEVRENGSVVRLTPQEADTVVAAFTAYNTGVMPAALRELKLALRASRAGVDRVHIIDGREEGAVLKELFSNLGAGTMIYADAYESIRPFRNGDLPDILRLMEPLMQTGILIRRTAEQIQEKKNDYVVFEIDGSVHACAALYDWGEGQGEIAAVATDPLCSGMNLGRRIVSYLIEKARKNRMNRVFVLTTQTQDWFESLGFREASVENLPERKRQMYDQSRKSKVFALELGRGNQKYSAIN

SEQ ID NO: 82894 - protein, 153 aa, Unknown
  Obtained from environmental sample
  DOMAIN (1)...(151): Histidinol dehydrogenase
  misc_feature (1)..(153): Xaa is any amino acid
PPFPPGYGERLPPCPCKTAGASLENGLIIVCNSREESVRIANKIAPEHLELQTADADSWIPHLKNYGSLFIGSLSAEVLGDYSAGINHTLPTSGSARFTGGLAVRHFLKTVTTLRCAQGEGFEKARNAAEVLACAEGLEGHAQSAVSRGFLRK

SEQ ID NO: 82895 - protein, 236 aa, Unknown
  Obtained from environmental sample
  DOMAIN (4)...(227): Aconitase family (aconitate hydratase)
  misc_feature (1)..(236): Xaa is any amino acid
MGKTLTQKIFDTHTADKPFEGIFVLKLDRVFCHEITTPAAINDLVSKNLDKVFDPDKIKAVIDHVTPAKDSLTAQQGKTLRDWARRHNIKDFFDIGRNGVCHAIFPEKGFVRPGYTIIMGDSHTCTHGAFGAFAAGVGTTDLEVGILKGVCAFRKPETLRIDLLGELPPGVSPKDVILAVISEISVSGASGKVWNPRACNFRHEHGRKNDYLQHGCSRRSDQRRMYGGYDYGKLSL

SEQ ID NO: 82896 - protein, 114 aa, Unknown
  Obtained from environmental sample
  misc_feature (1)..(114): Xaa is any amino acid
MLSGGNAADGPKGRELLSRLGNAPEGVWLLMDRAYEGKATRELAESLGYRPVVPPKRNRRDPWGYDEELYKKRNEVERFFCRYKRFRRVCTRYDKLDRMFAMFIHMGLIHDALH

SEQ ID NO: 82897 - protein, 318 aa, Unknown
  Obtained from environmental sample
  DOMAIN (26)...(266): Ribonuclease BN-like family
  misc_feature (1)..(318): Xaa is any amino acid
GRGEGARLLSCRQFAVFVRVVVSEYMQNHCTSRASGIAFVLLITLIPLIVTVAVLFGSIAEITPHHVERAVTALLPFAPPTVVGYILEFFQNARGLKGIGIAVLVVTAMGLFSIIEQSLNAIWKVGRVRSFFNSLRTFTMVIIYSPILFFVSFQVRHSGIFGLLPRDFFLMRLPPVILTALAFAVMFWSIPNTRVRPSSAAIGGLISCALFELERWGFGYYVNLSIQTQTIYGTFGLIVFFLSSLYFSALLLLIGAQVVYVHQNFRPLLRAAQRWDRRVSDYRSYITMRMIIDCVSAFRKWSRRRQSSASAKSTNSPT

SEQ ID NO: 82898 - protein, 160 aa, Unknown
  Obtained from environmental sample
  misc_feature (1)..(160): Xaa is any amino acid
MTNSLNTIFTSLKQAQTKLAAQNRANKDKALAAAAAAIDRDRTAILEANSRDVEQARNGGMKESLVDRLLLNDKRIDGIIEGIEIVIRQEDPIGKVQAGWTLPNGLQIDKVTVPLGVAAIIYESRPNVTADCAAPAYKAAAHTFTKLSSALESNKRWLSY

SEQ ID NO: 82899 - protein, 252 aa, Unknown
  Obtained from environmental sample
  DOMAIN (66)...(251): Glycosyl hydrolase family 3 C terminal domain
  misc_feature (1)..(252): Xaa is any amino acid
MLTASLKKGLVTEEAINTALSRVLRTRFKLGMFDTAGKGKYDELDRKVINCEKHRQLALKAAEKSIVLLKNDKGLLPLDSSAKKITVVGPGAANAHTLFGNYYGVSSRFVTVLEGLGEKVKDKYGINLEYRQGCLMYGANNMSNAEFGQANAADIIIAVMGLDGAIEGEEGDAIASDSNGDRTYIELPPWQINFLQKVRKAGKPGILVLTGGSPIAIPEDIADAVIFACYPRRAGRPKPWLTSSFGDGVPSG

SEQ ID NO: 82900 - protein, 259 aa, Unknown
  Obtained from environmental sample
  DOMAIN (1)...(193): Penicillin binding protein transpeptidase domain
  misc_feature (1)..(259): Xaa is any amino acid
STNTGGCLFGRHTGIDLPGEKAGYLSEKRAYNERFASRNGRWTQGLVMDLAIGQQQVFTPLQLSLMVGGMGNGKFIYRPRLLSEERNKDGILVYQNLPVVKNKIEVGQYALDVIHEALAAVVRPGGTGWRAGVQGIPVGGKTGSAQNPHSDLTHAMFIAVAPVDNPVIAVAVAIENAGGGGAVAAPVAGALLNYFFSETEEGKSVYKKYNSDSEQKPRRSLMPRPASAAESAANAAADAADRSESAPASRPSIPEGGND

SEQ ID NO: 82901 - protein, 233 aa, Unknown
  Obtained from environmental sample
  misc_feature (1)..(233): Xaa is any amino acid
MVNSNENLLKVLSGTNPWWRTGKLPDGIAKPVKRFAYFEGMKILQHPDIRRIAVLTGARRIGKTTIMYQMIEDLLKQSIAPQRIVYISFDHPLLKLCGFDTILDVYRQNIYPNDDIYCFFDEIQYAEDWDSWLKTLYDTNTQCRVVATGSASPVLAGKASESGVRRWSIPLIPTLSLYEYCTLLGVQTPELAPEIKPTRMRTLSHQEQTMTFQKLSPLLRAFYRYLAVDGLPE

SEQ ID NO: 82902 - protein, 100 aa, Unknown
  Obtained from environmental sample
  misc_feature (1)..(100): Xaa is any amino acid
LPAKDILNGLDDEQIKAVTLETNGVVSAGAGSGKTKVLASRYAWLVMEKKLKPEDILTLTFTNKAVSEMYSRIYRYLLDQTDTEAANALKISQALHNPKK

SEQ ID NO: 82903 - protein, 139 aa, Unknown
  Obtained from environmental sample
  misc_feature (1)..(139): Xaa is any amino acid
MKEILLAAINAKWIHPSLALRLLKANLGPSLEKSCDIIEFALRQPLCEKIDPLLLAQPRILGLSVSIWNHLATLELLKKLREAWAVEAVQKQGRFQRPIVILGGPEVSYLPQEAEIFQYAGYCIRGEGEMAFRDCARQF

SEQ ID NO: 82904 - protein, 319 aa, Unknown
  Obtained from environmental sample
  DOMAIN (65)...(187): Response regulator receiver domain
  misc_feature (1)..(319): Xaa is any amino acid
LSPTAEGEPPLALLVEWGTEAYIPGVRFVSIPAQSLSIANVLNGKADDKGYIKSSGIIRFTFPRAQILVVDDISTNLKVVEGLLAPYRSEVDTCLNGLQAIELVKRNDYDIVFMDHMMPEMDGLEATAIIREIEMNNAEMGIRRKQIPIIALTANAVVGMREMFIENGFNDFLSKPIDISKLDEMLNRWIPKEKREEGTGNREQGTDNSEQITENGEQGTDAQDSTASSGVNEEGQQGGSPNNGYSNNIRGHALPGPVGVGITIPTIPEYDVQKGIAMTGGTVAAYTKMLGAVFAKMFKEPPAAFWQKPPGRRAPLSTF

SEQ ID NO: 82905 - protein, 142 aa, Unknown
  Obtained from environmental sample
  misc_feature (1)..(142): Xaa is any amino acid
GRGEPKRRHRLFTGNYAYYLDRIAKEEAGEISTSDNVETKPAKIQPPSERREQEKQKQTLVRRFERQEAETLLAMEKLETEKKRLEEELGKPEVYSSGEKARAVKFALDKTAAALEAKSKEWEGIAGELEKARKNLTPQTLL

SEQ ID NO: 82906 - protein, 100 aa, Unknown
  Obtained from environmental sample
  misc_feature (1)..(100): Xaa is any amino acid
GSPIDRFGRAGGGARDEIRAERQDQQSNASEATAAALGNETGADFLLTGTVRTIIDRADNKTVRTYFVNAEMSNIETNQRMWMGQNNEIKKLITRPKVKL

SEQ ID NO: 82907 - protein, 233 aa, Unknown
  Obtained from environmental sample
  DOMAIN (52)...(189): HD domain
  misc_feature (1)..(233): Xaa is any amino acid
RPAGILEKRAAEFKILTAFADEGEEKTQNVLELQNALLKTMAELVECRDDITGGHIERTQRGIKILLEEIRKHGVYQEETKDWDVDLLLQSSQLHDVGKISIDDSILKKPGKLTENEFNEMKKHASFGEQIIEKIETLAKESDFLNYAKIFAASHHERWDGAGYPRGLKGNEIPLLGRIMAIADVYDALTSVRPYKIAFSHEEAVRIITKANGTQFDPLLIEVFARAAEQFRR

SEQ ID NO: 82908 - protein, 86 aa, Unknown
  Obtained from environmental sample
  misc_feature (1)..(86): Xaa is any amino acid
MDNRYAISFILAAHVPFVREYRKDDDLSQSGEEGRFFEYVSETLLPLLGVLDRLESDHVPFCLGLAVSPVLMFLLGDEHLQNKTRR

SEQ ID NO: 82909 - protein, 329 aa, Unknown
  Obtained from environmental sample
  misc_feature (1)..(329): Xaa is any amino acid
LIGEKFAGSARISDDINVDLSFTAEKTDFKSVLRLIPAIYMKNFESITTTGSFTLSGYIKGAYNDKQMPNAGVSLAIDNAMFKYPNLPKSVNNINVKADAYYDGAVFDKTTLDVEKLHFEMAGNPFDAELRVKTPASDMQVAAKFLGKIDFNSLLDIIPLDDISLKGLLECDLALAGRMSALENKQYEDFDAKGMLKLSGIDFISPGLPLAVKIAGTRLDFTPRRVDLTDFDALIGNSDISLNGMLENFIPFVFKGGTVRGSLNLKSNNVDLNEFMNAKNAGKPKETVEKPEEKESSPLVVIEVPKNIDFAVKADIRRLPVRQLDIPIP

SEQ ID NO: 82910 - protein, 137 aa, Unknown
  Obtained from environmental sample
  DOMAIN (2)...(137): Adenylosuccinate synthetase
  misc_feature (1)..(137): Xaa is any amino acid
MLTAVVGINWGDEGKGRMVDLLSEGYEVICRYQGGNNAGHTVINDRGKFILNLLPSGIVREGTVNVMGNGMVVDLEHLCGEIKALKEKGINVTPDTLKVSDKAFICLPYHKTQDILEEERLGDKNRVSRDQAGGEIR

SEQ ID NO: 82911 - protein, 326 aa, Unknown
  Obtained from environmental sample
  DOMAIN (1)...(307): Nitrogenase component 1 type Oxidoreductase
  misc_feature (1)..(326): Xaa is any amino acid
KTKFSVTFWGEYNIGGDGWEEVRILKRCGIEVLNLFTGDASVESLKSAHLAHLNLVMCHRSINYIAEMMKTKYGLDWLKVNFIGVEATCKSLREIAKYFNDAALTKRVEEVIADETAAIKEEMDHYRSKLTGKTAGIFSGGSRSHHYQALLKDLGMKTVIAGYEFAHRDDYEGRDVIPTIKEDADNKNIESITVKPDEKLYRETYTAQQIADLKSGEAGIELDTYDGMIPEMCAGDVVVDDYNHFETDALIKTVKPDIFLSGIKDKHSIQKAGVSSRQIHSYDYSGPYSGFHGAVNFGRDVAMAIYTNAWPRHERHELGRSDHRLK

SEQ ID NO: 82912 - protein, 244 aa, Unknown
  Obtained from environmental sample
  DOMAIN (85)...(184): Biotin carboxylase C-terminal domain
  misc_feature (1)..(244): Xaa is any amino acid
MLPALIDSLGIVGYANVEFLISENDIYLLDVKENIQHFHGVTNLLTGVDVLREQIRLHSGESLLLQKDSIRTEGSVIAVNVDAMDPYSNFSASPGKIERMFVPFGEGIVVQSPFVSGDTVSANYESVLAKIMAYSGTREKAISNMESALANFRIEGISTTLPFLRGVLKHPDFINLKWTGMHLAYENRIQEVLENIHVPDEEEQAALIAALALSTDSNASAIMANAEHGGLLWAMFRPKLAINP

SEQ ID NO: 82913 - protein, 342 aa, Unknown
  Obtained from environmental sample
  DOMAIN (142)...(211): RNA polymerase Rpb2, domain 3
  misc_feature (1)..(342): Xaa is any amino acid
VQKFIFNGLFFDHRRYEIAEIGRYRWNSKVYVNAEQQAPSGEVMTLTTDDFISVIRYMIGLYNAEEGYSLDDIDHLGNRRIRSVGELVANQISIGISRMLRSVRESFSSREREGVLTPTELINSRTVNSMVAAFFGSSQLSQFMDQINPLSELTNKRRISALGPGGLSRDRAGLEVRDVHHSHYGRLCPIETPEGANIGLINSLATFSIVNRFGFIETPYRIVGLLPFKDNSGKAYEFPEAKWHANIMKSFFGSINQQLLTQTELSENEIKNTRKKFSGRQLELFDMFCNKSFEFDFGNESTIIKNGITIGVYKKGESKPKADGHNRALLCKWARRSSGGEN

SEQ ID NO: 82914 - protein, 296 aa, Unknown
  Obtained from environmental sample
  misc_feature (1)..(296): Xaa is any amino acid
MRVFLSVYPGFTLAIPMDAVASMMLYNQETEKIVQYDPKSRCTFISLPWLFNMRDLEVPHGVIMREWNSKENKVVLLTAEVKSVIEIPDEEFSSIPKALGDLRFSKIFSGIKFSDKPVLLLNVDQLLQIIQNERWVLDKKTSPPEQPVPAVTSETSPPAASKVIEEPPVSPTVTNEVIEVCEVVEVCEVIEEPSTSPTVTSEPSSPATSEIIEEPPVSPAVTTEPSPTAASEVIEEPQVSPAVTSEPSPSVTNEVIEVCEVVEVCEDIEEPPTSPTETVESSSLKLEPQPSPEASV

SEQ ID NO: 82915 - protein, 291 aa, Unknown
  Obtained from environmental sample
  DOMAIN (115)...(194): Toprim domain
  misc_feature (1)..(291): Xaa is any amino acid
LEQREISEKTRDLFGLGYAPQVGFLEAAVNNGFKPESVLKAGLAAEKDGKAFDKFRDRLMIPICSLSGAIVGFGGRDLGGNSPAKYMNSPETLIYNKSEILFGLNQSRKAISKENSVILVEGYFDVISMFQSGVENVVAISGTALSETQAKLLARYTKSAFISLDGDAAGQAATERCIEVLLTQSFAIKIVNLTTESGEKADPDSLVRQGGAEAFKKLQERAKNWLNYLADKSPLSSPEEKANFVSRTKRLIASMGHVELKKQYLDLLNERFGADKNLPVLQTKKAFANQT

SEQ ID NO: 82916 - protein, 95 aa, Unknown
  Obtained from environmental sample
  misc_feature (1)..(95): Xaa is any amino acid
MKGHPVSGGSGINVSMELFKDQSYEMSYEYIDKGTEPFIWKGKFKWDDTGNIIILDTKDAPNYYKVEKTKLIQLDMKGKPIKGKLADDYVLNRVL

SEQ ID NO: 82917 - protein, 314 aa, Unknown
  Obtained from environmental sample
  DOMAIN (80)...(229): Anticodon-binding domain
  misc_feature (1)..(314): Xaa is any amino acid
MSKSLGNGLDPLELVDEYGADALKFTLAFMCAQGQDILVDKDSFKMGSKFANKIWNASRYILMNLEGLNLVQNPGLLAVDKWIYSRLNAVAREMGKAFLSYRYNDAAQTAYEYFWNDFCDWYVEATKLSMKTGDAAEKDRAATVLLDILSESLRLLHPLLPFVTEEIYGKLPNTEGLLITAPYPQFSEDRCYPTEEKNFAFLQEFVRIIRTMRSECMITQEKKLRVMARLDGGQEQTLWRNEGLVKLLAGVGELEITVPAKESDERRRPAGSIGMAGVGFEIFVFIGEAVDIAALRKKLKKTCSRYALRQGLRV

SEQ ID NO: 82918 - protein, 253 aa, Unknown
  Obtained from environmental sample
  DOMAIN (108)...(245): RNA polymerase Rpb1, domain 3
  misc_feature (1)..(253): Xaa is any amino acid
MKKLVDKDVVYNIKKAKMLLEAESAEIFAILDEVVKEHPVLLNRAPTLHRLGIQAFEPVLVEGKAIKLHPLVCHAFNADFDGDQMAVHVPLTQAAQMECWTLMLSARNLLNPANGRTIVFPSQDMVLGINFLTRIRPNGKRPESPRAEGKNIIPYYSSPDEALMAVENKFLDWGSLIRVKPVKFPIWDKIDHELEIGPDGIIETTVGRLVFNEEQPREIPFINYEMKDKELRALMSSFKSNGSDTRDQPGGKS

SEQ ID NO: 82919 - protein, 314 aa, Unknown
  Obtained from environmental sample
  misc_feature (1)..(314): Xaa is any amino acid
MQCPREHFFHGKSGTLKNNGIKHTLSPEDSALMRNVQVAFSQYAEFSKKIGTDTLTAVEKTEDPERLANLVCNATHLKSEKKVELLAYTDTKERLLAILETLEFENEIYGIQKNISGKVRSRMDKRHREYILHEQLREINKELGKDKTEDEFAILEKRIADKKPTAEVTERTVKEIAKLRKLQPLSPEAGVVRTYLEWIADLPWSDYTVDSGDLAEAEKILNEDHFGMAKAKDRILEFIAVRQLLADDVSGDSKIVDSELTDNASSINDEKIKTDSGENRVPQSIKGPILCFVGPPGTGKTSLGNLGLAINRGK

SEQ ID NO: 82920 - protein, 296 aa, Unknown
  Obtained from environmental sample
  DOMAIN (34)...(296): Amidase
  misc_feature (1)..(296): Xaa is any amino acid
LNRVDQNRPRSIVPHSSALELSTLIKAKKISAVEAASAYIDVIEKNDSRYNAFLTVSKEKALARAQEIQSQIDSGGALSLLAGVPIAIKDNISTEGIETTCASKMLKGYTPVFNAAVIEKLEKAGMIVIGKVNMDEYAMGGSSETGAFGPVHNPWDISRVAGGSSGGSATAVIAGETPIALGSDTGGSIRQPCAFCGVTGIKPTYGSVSRYGLIAYASSLDQIGPIGQNIDDCAALLSIISGPDTRDSTCVIEKPFEFSEPKSNLEGVKIGLPRNYFGSGIDERVKIAVFGCRKRA

SEQ ID NO: 82921 - protein, 77 aa, Unknown
  Obtained from environmental sample
  misc_feature (1)..(77): Xaa is any amino acid
VLDEPFAGLDPLISAQLYSLLARINRDTGITVIMVSHEIEAADCVKNVLHLQKKQIFFGSMEEYKKSETGRKFLGES

SEQ ID NO: 82922 - protein, 347 aa, Unknown
  Obtained from environmental sample
  DOMAIN (35)...(330): Aldo/keto reductase family
  misc_feature (1)..(347): Xaa is any amino acid
MAEAALAAVGGCGGKSPHAIGGEVPTGKMTYRRNPQNGDLLSILSYGMMRLPRVPRARKESLPDVNDLDQEAVNELVDYAIAHGVNYFDTSPVYCKGFSERATGTALSRHPRDKYFIATKMSNQRARSREESLGIYRKSFEELRVDYIDYYLLHSVSSRDNFKERYLDNGMLEFLLKEREAGRIRNLGWSFHGEGDLFEYLMSEYKWDFTMIQVNYFDWRMSAGTNRSDMSARRQYEILAEKGVPAVIMEPLLGGGLAMPHYKARAKMVQADPDASAASWAFRFAGSLPNVLTVLSGMTFMDHLQEHIRTYSPLVPLSDQDNAMLDDVAKVMLEYRNPYLTSANTAC

SEQ ID NO: 82923 - protein, 101 aa, Unknown
  Obtained from environmental sample
  misc_feature (1)..(101): Xaa is any amino acid
LVPHVRLAEIVSWSEFSSLRADGTGKQKTIKGEQRTKGLEKQAKLYGEYFKVYLEFSDIIERVSFWGVTDDKSWRSAGLPLLFDSDGKAKDAYYKVIESLK

SEQ ID NO: 82924 - protein, 270 aa, Unknown
  Obtained from environmental sample
  DOMAIN (1)...(225): Pyridoxal-phosphate dependent enzyme
  misc_feature (1)..(270): Xaa is any amino acid
VRERAPQGKLTQLVIFGAAVVSVKGDYEATFRLSAQAIEKYGWYNRNAAINPYLSEGKKTVSMEIAEQLGLATGKFRAPDFAAVSVGDGCTIAGVWKGFKDLYATGLIDKLPRLISVQAEGCCPINRAIENNTAIEKMEENTIADSIAVGVPRNGDKALTAIRESKGIIVNVSDDEILAAMQLLGKSAGVFGEPAGVAGTAGLVKAAANGLIPHDALVVSIVTGNGLKDVASAQKAAGINAGAANLIRIEPDMNCYKRISKLLGHHPGKK

SEQ ID NO: 82925 - protein, 107 aa, Unknown
  Obtained from environmental sample
  misc_feature (1)..(107): Xaa is any amino acid
MNLFKNASISKKLIMLLVVFILGYSIFGLVAFSTLITLRIHGKLYNQIIMSKDLIADVLPPPSYIIESYLDVLQVVDETDPLPQLDYFFKELNRLKPIKLANNGGKY

SEQ ID NO: 82926 - protein, 88 aa, Unknown
  Obtained from environmental sample
  misc_feature (1)..(88): Xaa is any amino acid
LIGEMGLPVKVPASSEAAAMGGAIQALWCLQKNSPDKAKGSTIEALADEHVVLEGGKVVKPEKKDVAAYDKAYADYSRYLGALSPLYK

SEQ ID NO: 82927 - protein, 298 aa, Unknown
  Obtained from environmental sample
  misc_feature (1)..(298): Xaa is any amino acid
MYTLQAIESGIDPTKDVQEYESVTYIRMHKDFDPLESALGVADVLVEAFACDIPEKVFRVALNQSKLIINLEYLSAEEWVEEYHLFESLLGGGTARKFFFMPGFRETTGGLIINSKLKALREGGGLDRFAVINGVVGDFGISIDPSGDTMVGTVFTYERGFDTLISDLVEFGRDTLLIVFGEKSRLGMAATFGRLLGGASSCEGGVDCRKDPCRVYKNVRVLYAPFLPQHGYDALLCCTDFNFVRGEDSLARAVLSGKPFVWHAYIQGEKHQRVQAQGASLNHASLLPRERIQRRFPP

SEQ ID NO: 82928 - protein, 83 aa, Unknown
  Obtained from environmental sample
  misc_feature (1)..(83): Xaa is any amino acid
MIEHNLDVLLQADYIIDLGPEGGDKGGQVVATGTPEQIAANTASYTGTYIREMLERAQKRARKYTHKCGKSSSGVAQRRRSSG

SEQ ID NO: 82929 - protein, 64 aa, Unknown
  Obtained from environmental sample
  misc_feature (1)..(64): Xaa is any amino acid
MGITPLKGFVWGTRSGDVDAALPFYVMRKTGMSDTEMENILNKKSGLLGIPENTPTGGISRLRQ

SEQ ID NO: 82930 - protein, 329 aa, Unknown
  Obtained from environmental sample
  DOMAIN (1)...(261): Iron only hydrogenase large subunit, C-terminal domain
  misc_feature (1)..(329): Xaa is any amino acid
LADGRKVVVSLAPSFVSEFTDWKPEKLIAALKKLGFTAVSETALGADFLSARSAGDLASGAALCTTSGNPPLLMISSACPVIVDYIKLYNPRLAPFISPHASPLLTHARFLRSRYETDGKIAVVFIGPCIAKKHEADLYREEIDAAITFAELREWLHKERITPQTISISVSPSALANCAFEPRRSAKGAFFPVEGGEITAFSAYIAEAAAEEGKRIHTLSASGFHAVGDLLKGFDPATLETPLFLELLACPGGCLNGPGMSGASPGVVRHVRLRDYVRSRRHTLDGEALSLSPRLTPVSSGPAARFRTPETGITGALLRVGNTALADGF

SEQ ID NO: 82931 - protein, 222 aa, Unknown
  Obtained from environmental sample
  misc_feature (1)..(222): Xaa is any amino acid
MTASVIKNDERFGNDMNAIYDSIVDIKEEHITQIAAISDKELGEGFLKYNDIMDKILDKASHICKAALTDKIVLGFCLSKIVTQSEICDYLRVDRTNLPEYVNRADKIGVLKTIAVSNDVHRHGVGYALTFAACNDLITRGIQTLSSIAWKNGEQINAGQLLSAAGLHPHIEIKSYWESDGIKNTIIVQPARPPPCKCSGGAVFFGRFEDILYDWLKRLNRP

SEQ ID NO: 82932 - protein, 360 aa, Unknown
  Obtained from environmental sample
  DOMAIN (3)...(232): Cellulase (glycosyl hydrolase family 5)
  misc_feature (1)..(360): Xaa is any amino acid
MMADLVGRRLEGNVVRAAMGINETWGEGYLTGGKDANKQRVVTVVDAAIAKGIYVIIDWHSHNAHTHTADAKAFFEEMALKYKDVPNVLYEIYNEPTGTTAAAWTGDIKPYAQKVVDAIRAIDPQNVIIIGTPTWCASPEMATASPVDGDNLVYTVHFYSAYAPHKEPLRTKVKTSLNTHNKAVFVSEFGVCMNTGKEPLDLNEATTWLNFLDENKVSWVNWSVTYKNEGASALKSTVRKYDGNWTPDDLTTSGEYIRGKLIAAAQKEDNEWNTSTLVTDLVIPNAQQTGGSAAIAPVSAQSNSFSVRPIFRSKSQGGIKFFWQGRARTARSLFIYDALGNTRKNIPYNQISANHPSKAT

SEQ ID NO: 82933 - protein, 268 aa, Unknown
  Obtained from environmental sample
  DOMAIN (97)...(213): Histidine kinase-, DNA gyrase B-, and HSP90-like ATPase
  misc_feature (1)..(268): Xaa is any amino acid
MNAIIGMTTIGKSALNIERKDYCFMKIEDASNHLLGVINDILDMSKIEANKFELAPVEFELEKMLRRIVNVINFRIDEKHQELSVHIDRSIPHVLIGDDQRIAQVITNLLGNAVKFTPEKGSITLTVRLAGKVNDLCTVEFSVSDSGIGITPEQQKKIFNSFEQAESSTTRKYGGTGLGLAISKSIVEMMGGKIWVQSEPGKGSVFAFTIHAQRGTEEKHELLSADVNLNNIRIMVVDDDPDVLTYFMEIAQGFGRMCDTAISGRKGA

SEQ ID NO: 82934 - protein, 155 aa, Unknown
  Obtained from environmental sample
  DOMAIN (1)...(121): Dihydrodipicolinate reductase, N-terminus
  misc_feature (1)..(155): Xaa is any amino acid
MKVILTGYGKMGRLLEAKLHEKGHDVLAAVDPLFAGSGVQASLPIYPSLKDALGGTQGKSLKDADVVIEFSLPNAALENLLFLVNEKIPVVTGTTGWYGKLPEISKAVDSAGSSLLWSSNFSLGVNLFYRIACYTARLTDPLRSRWASADLIPGW

SEQ ID NO: 82935 - protein, 346 aa, Unknown
  Obtained from environmental sample
  DOMAIN (108)...(330): Methyl-accepting chemotaxis protein (MCP) signaling domain
  misc_feature (1)..(346): Xaa is any amino acid
KIFPPGYDGRAYRTRIVPKSDKDKLSYAIEHMLENSKAQVAVMERLASNDLTAAVVPRSDLDSMNIAIKKMLGNLNAAMSEINDASARFKDVSNQISSGSQSLAETSNEQASSLEEISSSLEETSSMTKQNAGNSDQAKKLVDQVVYDLSEVSTAMDRMAEAIRQIKKSSDNTAMIIKTIDSIAFQTNLLALNAAVEAARAGDAGKGFAVVAGEVRNLAKRSADAAKDTANLIKVSAEHAENGVAITRDVERALSQSVEHAGKVGGLIAEIASACNDQALGIEQVNKALAQMNIVTQQNAANSEEVGSAAAEMSDRAADLANLVGAFKFDKGALRRPVSEIPKLRA

SEQ ID NO: 82936 - protein, 173 aa, Unknown
  Obtained from environmental sample
  misc_feature (1)..(173): Xaa is any amino acid
MIRSAEDCLTKLWALILASVLASMGLATLLPRRRRHNHGGDSGNGRPNGYRQQVRTESGNNDNNPSVRVNFGAVNRVLRADNLESAQLSCNFGALKVFFDQVEISPSGAEVTLNCSFGGIELFIPKHWRVIDKLNCTLGEVGIDKCFTAPAENAPKLTLAGSVSLGGVDVRYV

SEQ ID NO: 82937 - protein, 336 aa, Unknown
  Obtained from environmental sample
  misc_feature (1)..(336): Xaa is any amino acid
VFPDDGEKARRKLTHGLDKTVSQLETQDEAFIAEVKNFIYGLISHYVFDDGRLVVAHAGLKEKYHGRGSGRVREFCLYGDTTGEVDEYGLPVRLPWANEYRGKALVVYGHTPVPEAQMVNKTICIDTGCVFGGKLTAYRYPEGEIVQVSAKQEYYPPVKPFLNAQTGNYDDMLSIDDVLGQNYLNTRLRHSIKINAENSAAALELMSRFAADPHWLIYLPPTMSPCETSKLPAYLEYPSEAFDYYKSRGIGKVVCEQKHMGSRAVIVLCRDAETAAKRFGVADNSFGIIYTRTGGRFFDDAETEKQLLARLQKGVGESRFWDDFDTGWVCVDTELM

SEQ ID NO: 82938 - protein, 322 aa, Unknown
  Obtained from environmental sample
  DOMAIN (8)...(320): DNA topoisomerase
  misc_feature (1)..(322): Xaa is any amino acid
DAFEPLRSNEEMKNLQEPLFSRSKADWLVGINGSRGLTAYNSRFGGFQLTRCGRVQTPTLALIVKREESRMAFVSQTFWTLIADFEDSSAHYTGKWLNQKENSQKIWKKEEAENIFKKCEGKRGEVSEESKQVSQKCPPLYDLTFLQRDANNRFGFSAKTTLQIAQSLYEKHKLTTYPRTDSKFLPDDYVATVKKTMGALTGKIAKHAEFALKNNYVYKTPRVFNTAKVSDHHAIIPTGNVPASLSEAEQKIFNLICQRFVAVFYPAAEFLHTTRITTVEGETFISEGKILKEPGWKAVYGKESEDEDVMPQCLAESSSICS

SEQ ID NO: 82939 - protein, 110 aa, Unknown
  Obtained from environmental sample
  misc_feature (1)..(110): Xaa is any amino acid
MEAGINRQQAWELLRQYNKDSFHLQHALTVEGVMKWFAADQGFAGEEDFWGIVGLLHDIDFEQYPDQHCVKAPELLRNGGASEEIIHAVCSHGYGLTAVDVKPEHLMEKI

SEQ ID NO: 82940 - protein, 229 aa, Unknown
  Obtained from environmental sample
  misc_feature (1)..(229): Xaa is any amino acid
MKSISGTITFDPEEGKAPETKVIPPSTVITLTVIPLSETDKMDLDLAAKFPNTPATAYSYKLTIDQDEFWDALGIIYKYENKYVKLDLSESTLESFAAWGCKTLVGIIFPNTMTGFFEGWSFMDCINLTSVTLPNSLKIIKDGTFAGCTSLTSITIPDSVTIIEELAFLNTGLTSITIPDSVTSIENMVFFECKNLARVTIANGVIEIGEGAFSRCKHLTSVTFKSAGI

SEQ ID NO: 82941 - protein, 130 aa, Unknown
  Obtained from environmental sample
  DOMAIN (13)...(102): Cyclic nucleotide-binding domain
  misc_feature (1)..(130): Xaa is any amino acid
LFLSEKGKLQKYSHSYPENAVIFSKGDEGNDIFYLLEGEVNIFMSDENPDEKPVTLQQGAFFGEMGHLLSENRTATAKAKTAVTVLVLPPPLFDEMLKYDTSMDRTLMELMSQRLKERNEQLANQIINNK

SEQ ID NO: 82942 - protein, 309 aa, Unknown
  Obtained from environmental sample
  misc_feature (1)..(309): Xaa is any amino acid
MLKFFLRQNPRLLWWTMARKKPEYIHELILAASKSTEECVCVIIGNSEGFEEFFSKNTEDRQRVTQDFNFQDLSLDNLSLILMKKLRERGLLFDPALKKNFSSYIQERKNDPSCEYKNGWLIEKDVIPSIDKNQQARLERLDSASVTDEDFKTIKAEDLPLKNKSKTIDEILAELDEMTGMTEVKKTVREIANKIQIQKEQEEKDGTKSAGEGNNIVITGNPGTGKTTIVRTLGALFNAIGLLDSDAVIEVNGNDLKGSYLGQSKDKVNEKCDEAMGGILFVDEAYVLADTQRGSGAADEYAKEASRPI

SEQ ID NO: 82943 - protein, 337 aa, Unknown
  Obtained from environmental sample
  misc_feature (1)..(337): Xaa is any amino acid
FFRFDGRGGRRAEDIYGTDEESPYSVDAVKAKPRPYLPDLMNSIGEERKQIKEKEAAYTREISRIEGWGDFDPSIVEDISKTIPIYLYEMPVDAFARLNKDFQYIKVKGDKSVIRILVPEKTIPGMTPFQLPQKSLNEYKKEIEEFNVDLQEIDKELESFADRRHALQKEMELVEYDLEFESAVAGLSKVEDIPSDFGLSWLTGYVPAEDLGLVKKVASENGWALSAEEPPETDEFVPTKLKNSKFVQLLTPITGFLDINPGYREVDISPVFLTFFCIFFAMLFGDAAYGLIITTMALIGVILSLKNRKPGGTPVKMLLLLGYLIQYGACLHVHGSL

SEQ ID NO: 82944 - protein, 342 aa, Unknown
  Obtained from environmental sample
  misc_feature (1)..(342): Xaa is any amino acid
SLSPSENPQYRALRDEIFNCELDIQLLRLKHFKYERDERNETLRRRTADRDRIRQQMEEESKALDAHMDEVNSMEARLVEMQRNIYGLALEKNAKENEARLLGERRNEGKTKIEQGEVREKQINNKIEELNDDAAGQDEVVSELRQKSASIEDNIKSFEENIQLASTRIGDNDKAIHKAESEIHSFEKEQAQFEVQLAQITDDIVAELDAGLKKAGYSASERRNIEAALNETLNRLRTVLTGRGTLIRDLSTAASVEAAELQRIAGTLATELTSAAADAKKAIALFESYRSHSPLFLDEFLAPQGIITKSGDWTLKSGARKRYRGRRPKNQTLQSNTAFWRQ

SEQ ID NO: 82945 - protein, 63 aa, Unknown
  Obtained from environmental sample
  misc_feature (1)..(63): Xaa is any amino acid
RDVKYSPEARFIVAFTGEIMTMPGLPPVPSAEKIDIDSTEKFPGFSSVNNAALFVRLSQKRNY

SEQ ID NO: 82946 - protein, 312 aa, Unknown
  Obtained from environmental sample
  misc_feature (1)..(312): Xaa is any amino acid
MPRYRIVIIDESHNLRNREGRRYRAIAEYLALNNSKVIMLTATPYNKSYLDLSNQLRLFLNENQNLGITPERYIKEIGGNVQFAAKHQVKETSLAAFEKSEYSDDWAELMRLFLVRRTRSFIKANYSKKDEKTGRMYIEFAPNDDGVKEKSFFPDRIPAKVEYSFNKGDNDDQYARLYSADVVSTINELLLPRYGIGQDIYENKTNIKNIKPEEVKIKNNLAKAGKQLRGFARTNLFKRLESSGYSFLLSISRHILRNYLFIGMDVHKASVHMAVFEEKGDELLYERRLNYDTQLLCQERPGSAKTEKRSRL

SEQ ID NO: 82947 - protein, 299 aa, Unknown
  Obtained from environmental sample
  DOMAIN (17)...(273): Protein tyrosine kinase
  misc_feature (1)..(299): Xaa is any amino acid
MSKNKYVDMWPAKIGPYRILGKIGKGGMGDIYKAMQESLNRVVAIKVLPLQLSRDDEFTQRFEIEAKAISMLQHQNIVTIHEYGEDEGYRYIAMQYIDGMDLGNYIAETKVIAISDIIDFSKQICRGLLYAHHHNVVHRDIKPQNILLDKENVIHITDFGIAKIVANTDLTKTGSTVGTPEYMSPEQAQGKKIDAQSDIYSLGIVMYEMLTRKPPFVAPNSMAIAIKHIHEQPMPPSVKRKDTPKQLELIIIKALKKNKLDRYQSVEELLTHLDLVDPNERVDRQTSSPPQATAITGGT

SEQ ID NO: 82948 - protein, 330 aa, Unknown
  Obtained from environmental sample
  DOMAIN (84)...(240): Domain of Unknown Function (DUF748)
  misc_feature (1)..(330): Xaa is any amino acid
VEHGARTIVRLGGISLHDLSVTLPEGRTPQLAARHLAASDILANVSAQSITVGNLSGTGVSAGPVRGKDGNFVLNLPATQDASSAWQTTISNVQLSSTNITLTDHSLRETVALPFSDIRISASNISTRPGAQWTADVSAKPGRQGLVRLEAKGAINPMDISFRIRADRADIVFLSPYLKTAVPLSLSEGVLNADVSGQVKSGRGERIRIDAAGDAGLHGVSLTEGGKEVLGWGRLRAEKFRYRTAPRDSGMFSAKNLILNGPRVSMTIGEDGVSNIHRMLFTSGAPSARKPSAGPGISLSRDGARITSGEIRLRDESFAAAASSQGGKHQ

SEQ ID NO: 82949 - protein, 52 aa, Unknown
  Obtained from environmental sample
  misc_feature (1)..(52): Xaa is any amino acid
MMAETRPYHRGVELASNVADSGNSVILDQVTNGVAVRMAVLYLLGAGGSEST

SEQ ID NO: 82950 - protein, 296 aa, Unknown
  Obtained from environmental sample
  misc_feature (1)..(296): Xaa is any amino acid
VNKQSLAKRVLQTAPLMILSVFAALAILEVLVRVIGMGHLPERRPDPLLGVRSVPNAVYENVNEGYSRGRFNSLGLRDREIPYEKPKDSKRVLILGDSFMEALQVSMDSGFSGQLQTFIGKALPWHDIKVINAGRGGMGTAEEYLWYVTEGVKYTPDLVLLAFYVGNDFRDNSKTLTGQAVFKPYITFDADTFWVDASFTESRSYKLKTLFWPLFSRSVLAAETARRIEKFKIGREQPDTAPCPKDIGVFNIEQDSVWANAYTVTGNIVALLGEAVKRNSSTLCIMIISDSSPVND

SEQ ID NO: 82951 - protein, 245 aa, Unknown
  Obtained from environmental sample
  DOMAIN (3)...(121): Queuosine biosynthesis protein
  misc_feature (1)..(245): Xaa is any amino acid
ETAQDGQRLYFFDNMGAEMPRAEIIGGEGDFKYLAFDRVVDDDWLDRYGHIPLPPYIKRQEDFSDSERYQTVYASACGSSAAPTAGLHFTNELLSQINAAGIENVFITLHVGLGTFLPVRSGNIEDHVMHRELFSIDEQAASKIESAKRAGRKVIAVGTTSVRTMESAWDSGTIKRGENATSIFIYPGYKFNTADALFTNFHTPESTLLMLVSAFAGRELILESYAEAIAQGYRFFSYGDAMLIV

SEQ ID NO: 82952 - protein, 115 aa, Unknown
  Obtained from environmental sample
  misc_feature (1)..(115): Xaa is any amino acid
MKIRLTLIIIASLLLFQGASPWEGSAAVAPNGELPITGFYIATNAFPKNTVVDITNIENGKKTRVIVSNTLTSPGLLAVVSREAAELIGMRAGSISRIRMIQPPILSAIMRGGKT

SEQ ID NO: 82953 - protein, 273 aa, Unknown
  Obtained from environmental sample
  misc_feature (1)..(273): Xaa is any amino acid
LGTYRGQSTWQKATYNIPTTNNGTTKRLVFSWRNDGSGGIQPPIAVDNIVIDISDPFANVSSGTGGTSATYTTPAATMAMSGYGYRCIVTDEFGQSTTSNIATLTVVKANPTFPTTATITYGQTLADAVFTGQSGEGIFAYTAGATKPTVAQSGTAYPVTFTPTDAANYNTLTQTVAITVNKATGTFVSTSALSTTYTPTLKLSDLSLPNGYAWTTQSTALNAGSGQSFPATYTDPSGNYNAASGNITVNVAQATGTFVSTSALSTTYTPTLK

SEQ ID NO: 82954 - protein, 319 aa, Unknown
  Obtained from environmental sample
  misc_feature (1)..(319): Xaa is any amino acid
VYRRVVYKGLSDTLSYTNGNLLSGDIGFDGYIKGGDSWVELTNWARNERNLRESFGITKRVETNGPTDQHIDYAAPAYFREFADYLQAENANAYAWNVSQFRRAEASSDWLIGKLISQNQKNIPIAGWVEMKNDTAPVFKTFSDGEDFRAAWRTALNYVWHGNPRYSWDPVNHAVVNSRANTYQRDAGQRFAKFLWDRRQTPWNDTCEKIIGEGSWWGPSMLKYHYSPDGKALTVYPLNWIHGTGSPSAVTAQNIDLMAEMYRQAELEWDVEEPGDRYLTSTPHYFHGFFRLLGMNVLTGQHHAPMNMKRSANMKVYLD

SEQ ID NO: 82955 - protein, 184 aa, Unknown
  Obtained from environmental sample
  misc_feature (1)..(184): Xaa is any amino acid
ALFSAPFSATAAKISMENKDNLNLFYQITAAGFDRELPTKETKNGIEVYREFFDGEGKAVSSFKAGDVVTVKLNFRSLSNNEYRDVAIVDLCPAGLETEIESVRQAGSQASDQSSRDAWKADYVDVREDRLVIYGTVSGKIASFSYRARAINTGSFTTPPLFAEALYDKSVWALRPQASIKIVK

SEQ ID NO: 82956 - protein, 133 aa, Unknown
  Obtained from environmental sample
  misc_feature (1)..(133): Xaa is any amino acid
MNWSGKAINEIYRQANSGGVLLSSMGNPENYPVYFDRLLINASQVTNPSIDPLREPMETRVFLGAKPRDIERDAKGRIINNLPPQLTLSMPIMFSAMSYGSISYNAHESLARAAEELGIFYNLVPNADPRGDP

SEQ ID NO: 82957 - protein, 355 aa, Unknown
  Obtained from environmental sample
  DOMAIN (33)...(355): Glycosyl hydrolases family 38 C-terminal domain
  misc_feature (1)..(355): Xaa is any amino acid
MIRSAEHIEADLIELSKATLQKLSGSKEAAVSGSIRLYNDLGWERKDPANFPADLIKGATAIKASAGNGEEIYPVQCYTSLDGKETAIACPRLPSLGWITLSPAELKQDSPSFAFKGNSLKTPFYEVGFDEAGRIRSLFDIKRGRELVAPGGVLNGLVSAQDVPVQWEAWDIDQDWIRYLTEETRLLSTEVAASGPVCFRIRRKYKIGEASLLSQDTVFYTKSPRIDFETLVDWREKQRLLKVQFDTAIYTTQIRCEVQFGHLLRNTHKNLPQDRARFEICAHKWVSLEEEGGSIALLHDCNYGHDAERSRVRLNLLRSPVAPDPDADTGEHRFTYALLPFTGWLWRILRCSAQA

SEQ ID NO: 82958 - protein, 236 aa, Unknown
  Obtained from environmental sample
  misc_feature (1)..(236): Xaa is any amino acid
MKIKIKLSIVVIAIMAVVVAGIATLLLLQASKNTLQLSLRSQENLANSRAEFWKGREDGYIRALTTLANVMGDFETVKPEERRDWYDAMLKSALDEEPQMVVLYTVWKPNALDGMDEQYIGRTGSSPTGQYAMAWSKETGKTTKRLSTDIDNVMERITGPNAFKEHISEPVLRKINGIDKYTLRMIVPITNNNKNNEEVVGALGCVMTIDAIQQVMEATKKQTRNDIWICDNPGKS

SEQ ID NO: 82959 - protein, 66 aa, Unknown
  Obtained from environmental sample
  misc_feature (1)..(66): Xaa is any amino acid
MASCRSARLRSLIPSGILTVADSGIKSPEDVRAISGIGIDAALVGESLMRATDKKRFLAELKAGEN

SEQ ID NO: 82960 - protein, 224 aa, Unknown
  Obtained from environmental sample
  DOMAIN (1)...(143): E1-E2 ATPase
  misc_feature (1)..(224): Xaa is any amino acid
VDKKPGDHVYGATINANGLIRFKAEKVGGDTALAQIIKLVEDAQSSKAPIAKIADVVCGYFVPIVCVIALAAGIAWFAASSAGLTTPPAGKTTLEFALTIFISVLVIACPCALGLATPTAIMVGTGKGAENGILIKGGEALEITHKIQTIVFDKTGTITEGKPEVTDIVGSREWGVGSREEGPDKKEQREEKKESGTDCVVKGGAARKKGGEQPVGPGRESAGP

SEQ ID NO: 82961 - protein, 53 aa, Unknown
  Obtained from environmental sample
  misc_feature (1)..(53): Xaa is any amino acid
VLAGEGSGISRLLRECCDGLVGIPSRGKIDSLNVSVAAGVLLYEVRRQLVNMV

SEQ ID NO: 82962 - protein, 290 aa, Unknown
  Obtained from environmental sample
  DOMAIN (1)...(279): Putative modulator of DNA gyrase
  misc_feature (1)..(290): Xaa is any amino acid
MNSQNSIGGVSARVYRGGTYGFASSAEYTDESIKKVLTAATSNAAFMNTHVNKGLGPLPTVAPGKVGLKKDYSTDVQQSVLIEFVKALDSLIVERYKNLSSRVVRVNCLDIEKILAVSNGADSHFYQPRSFVYVQMSVETDDKIPVELFIPIGGFGRFGELFSDPALLTEKLDSLYEQLMQKREGVYSSAGLRKCVLGPELAGMLAHEAIGHTVEADIVQGGSIAGNYMDKEVASELVSMVDFAHTAFGKPCPLPVYVDDEGTIAEDVTLIEKRNLKSYMHSKESARHFW

SEQ ID NO: 82963 - protein, 341 aa, Unknown
  Obtained from environmental sample
  DOMAIN (165)...(251): PPIC-type PPIASE domain
  misc_feature (1)..(341): Xaa is any amino acid
GGAPDYREVSVQTNMDSENYGYMGYQIWREAYEAAAVHTAVLQEMKKAGYTAPVKKVDRDVAALPQFQENGRFSSTLYNRMDNNSRLSLWRQVQEEIAEKHFRSDVTGLLKPGAEAEFVGKMESPQRSFRMTVFDVDAYPEEEYEAYARDHSDLFRSVQLSMVTVSSSEREARQVLNTIKNGETTFEDAARAHSKDMYADRGGDMGMKMFHELSVDIPEEETRDIVISLAKGDYSDVIKTAAGWFFFRCEEAAQEADISDPVIMEKVKSYLRNFERGRMENWAIGKANDFIALVKEHGFDEALSLQSLESRTFGPVPINYGMWSSLPPFHPNPAPSFQVSA

SEQ ID NO: 82964 - protein, 317 aa, Unknown
  Obtained from environmental sample
  DOMAIN (32)...(173): Homoserine dehydrogenase, NAD binding domain
  misc_feature (1)..(317): Xaa is any amino acid
VITQQDETKALNAIHEAFFLSGVRSVNLFLLGTGLIGGTLLDQIAEHKKILAEDYKIKINLAGVGDFGRMILQPEGLDPKTAKALLLNAAEKKDGTAVLDLAAFVSEMKAMNLPNTCFCDCTASEEVADLYAEILQSSIPVVTPNKRANSASLDYYKTLTGFSRARGIPYLYETTVCAGLPVISTLRDLFLSGDKVRRIEAVLSGTLSYIFNNFDGSKSFSALLREAKNKGFTEPDPRDDLNAVDAARKAVILARECGINMEFSEVEIEPILPLACFKADGVEAFFKSWKNPTGILKTPKRNRCRRKNPALCAGNRK

SEQ ID NO: 82965 - protein, 286 aa, Unknown
  Obtained from environmental sample
  misc_feature (1)..(286): Xaa is any amino acid
MNSLANERKNLEDRITFLAREHTRIKAWGEFNPDDIKALVSSGVAVYPYEISPEIFKNIPKDIRYIKTGEDKSAVRLLVLDREIPDTPPFKLPEKSLSKIEMELAELTNKLNALNERIKNFADRRPILEKEMAEINSKINFELARAELEKIEGIPDEHSLSCISGYVPAEDMGKLKVAAAENNWAIAARDPGPDDYVPTKLRNNPLANLISPLTGFLEVVPGYSEVDISGWFLLFFTIYFGMIFGDAAYGAIVLIAAIIGIFKTAKKGVPAVLKLMSVGHKAGGKN

SEQ ID NO: 82966 - protein, 268 aa, Unknown
  Obtained from environmental sample
  misc_feature (1)..(268): Xaa is any amino acid
MALSDEQAKWLRKVVSGMNIQKVPEELLTEEFYLAVVQNHGNALEYVPEEMKTEAFCLAAVQRHGYLLEHVPEEMKTEAFYLAAVQRNGSALKYVPEALKTGDMCFAAVQQNGCALEYVPEATKTDAICLIAVQQNGSALEYVPEALKTEAICLVAVQKNGSALEYVPEATKTEAICLAAVQRDGRTLEYVLEALKTKALCLLADVQIGRSLKSVSKALKTEAMCLAPVQRYGGALELEYVPQALKTEAVCLAAGQEDGMPLNTSLKP

SEQ ID NO: 82967 - protein, 321 aa, Unknown
  Obtained from environmental sample
  DOMAIN (158)...(223): His Kinase A (phosphoacceptor) domain
  misc_feature (1)..(321): Xaa is any amino acid
AEGRYFEAILCGGMIFMAMVTFVLARTKIRQAVPAALLIISYALLCVLLNWTGEDEGANFLFIYMYPLMTIMLLGMRFGIFLSVILGVLISLEMFIPGIVKEHQYNFDFSIRMLANYFLVFAVMVVIESTRRTKDRRIETQNRKLQELTEEAQTANRIKSNFLASVSHEIRTPMNAIIGMAELLMREKLSDEAYGYAHDIKQAGGSLVSVVNDILDFSKIEAGKLEIVPKKYLLASLVNDSISIIRIRFMEKPLRFYTRIDSSLPNGLVGDETRLRQIFLNLLTNALKYTNKGQISLSIYQAKRESSQIWLTIKVSDTGIG

SEQ ID NO: 82968 - protein, 333 aa, Unknown
  Obtained from environmental sample
  misc_feature (1)..(333): Xaa is any amino acid
GFPKYQIGRETAVYAIDFENSAKAGWLNGGRPGVNFSYAHEGTAASDGSHTFMLRAFNDAHEAYIDYGNYRISYFMFDNNYKGLGANGWNVRTDILYVPNAEKSKFKLLHENITPGEDENGKWNQRLILQIADVLDPARSDTNWGTMAAPTQFLINYSGLDQRVHRGISTPFKGVWAVYAGNYANRNWGGDWSYNSKAKGTISNDAMSSWGYPVTHDFTDNPSPDNPGKPVKRLHRKLCGSDASTTINNVLIEEWDGYTWRRVFGNGPLPGREVVNVVIRDTLPPGVTFLNFIEPYPLGKAPKITGRVITWEIDKLLIGEKASIKYTVRADTV

SEQ ID NO: 82969 - protein, 72 aa, Unknown
  Obtained from environmental sample
  misc_feature (1)..(72): Xaa is any amino acid
GPNTHQIGRDTKLGRDVEKGIFILQSEEEIVREQRLFIENLNGIDSLYINEHIVNLLMEVHGKLPSAKKNML

SEQ ID NO: 82970 - protein, 299 aa, Unknown
  Obtained from environmental sample
  DOMAIN (70)...(281): SMF family
  misc_feature (1)..(299): Xaa is any amino acid
MTERGLLDLSISLLPDLKITDKLLLSQAFDNEEKLFVQSRENIEEILNRALPAFWDITEIHEKAGRIDTMCRMRSINWVSWADADYPPLLRESYDPPVVLFYKGKLPNPEKSLLGMVGTRHPSPQAAEQAYKIAGNIGKAGISVISGLALGIDAMSHRGNLIGNAPGYAVLGSGIDEVYPSVNRPLAKRILDSGGALISEYPPGVHPTKWTFPARNRIIAAMSRGVLIVEAPEKSGALITAAFALDLGRDLWVASGGLLENAQFDKRGAMKLASDGAEVFDRRVIYWKKGYGKQKVLCK

SEQ ID NO: 82971 - protein, 61 aa, Unknown
  Obtained from environmental sample
  misc_feature (1)..(61): Xaa is any amino acid
AELTIDFKGVTYISSMGLRVLLQAKKAIKAKGGRMSIINMRDSVREIFEMTGFLNVMEQDE

SEQ ID NO: 82972 - protein, 279 aa, Unknown
  Obtained from environmental sample
  DOMAIN (39)...(239): Stage II sporulation protein E (SpoIIE)
  misc_feature (1)..(279): Xaa is any amino acid
MLPAAFPPLRGGKNEFDLFARVYPAKEVGGDFYDLFFIDDDHFAMVIADVSGKGVPAALFMAIAKTIIKNRLQSGEDPEHAMEIINRDLCDNNIMDMFVTAWICVLEISSGLLVFVNAGHNPPLVMRHGNDFRFLVSPPDLVLAGMDDTRYHSRQFRLKPGDILFLYTDGITEAATAEATAETGSGDEFYGKDRLKAFLDANAGRPLREMIDLFRDDIAAFANGAEQSDDITMMALRMCGPDSGSSITPEAGLEDLEKLISFIGKELTPPPAPAGNGAR

SEQ ID NO: 82973 - protein, 94 aa, Unknown
  Obtained from environmental sample
  DOMAIN (4)...(74): ACT domain
  misc_feature (1)..(94): Xaa is any amino acid
MGMKQISVFIENTTGRLCEVTKTLAKAGINLRAINIADTAEWGILRLYCDKTDEAAKVLNEAGFTIKLTMVAAVEIDDKPGSFDKLVMKFKSPE

SEQ ID NO: 82974 - protein, 259 aa, Unknown
  Obtained from environmental sample
  misc_feature (1)..(259): Xaa is any amino acid
VGESLRFVWFGERVRWGKLSYLARPAYTISLIDFFNQKMPMLGLRNIAFRSLGAKLSGDYHEKRLVSREASMKMRQEKLAELKKQGTGVLLDTGYAYAVPWADFITNMAVDDQSFGITDASVPFYQMVLHGLVPYTGPAINLAEDYTKNLLKTIESGAGLYFSFMSEESSVLQETKFRQFYANEFDKWSPDANALYQQFTADFARLYDQAIVNHAIIEEGLTWTEYEDGTVVMVNYTENAASYGGVDIGARSYVVVRWG

SEQ ID NO: 82975 - protein, 318 aa, Unknown
  Obtained from environmental sample
  misc_feature (1)..(318): Xaa is any amino acid
LNVSTYNAVVLAKETAESNGWKITAVPKGFVYQSAEHIFNPVKGQNPEMLITLPPAAYLADWTPTIATFAVVEKPSTSIANSDVQNMNAKNVALSWSLRPNVTKYEVYRDGELLGETSGNLIEDYDLKIGQTYEYIVAGYAGTNKILSTSVQATPFVAAAAPGTWRYMNRNSEGGSSETTVTATTGGGSPGGVAGADNKRYEFQVTGDGTLRTFQYRTSTNGTSWSNWTNLPSSPGGSNALTVGSWAGDLNGTKTTINPAAFVSSGTTWNGASGQTGINLEGVHWYRVQDKGLRIGEFQKENTCLAVTASRVAIITSP

SEQ ID NO: 82976 - protein, 280 aa, Unknown
  Obtained from environmental sample
  DOMAIN (51)...(278): Methyl-accepting chemotaxis protein (MCP) signaling domain
  misc_feature (1)..(280): Xaa is any amino acid
MGKTSTALQQISSNIDNMENVMVKQEKSAEEAGKAVGDIKLNIDSLNKMIEEQTESVNRSSSAIEEMTANINSVTRTLVENSKNVTVLTEASENGKSGLQLVAQEIQEIAHDSEGLLEINALMDNIAAQTNLLSMNAAIEAAHAGEAGKGFAVVAGEIRKLAESSSQQSKTTSEMLKKIKASIDNITKSSDEVLARFGAIDSSVKTVSEHEQNILNAMEEQETGGKQILESISHLRDITASVKKGSDDMGESGKTLVKETDEFIRTSQEAATSADLIIGF

SEQ ID NO: 82977 - protein, 310 aa, Unknown
  Obtained from environmental sample
  DOMAIN (1)...(223): Pyridine nucleotide-disulphide oxidoreductase
  misc_feature (1)..(310): Xaa is any amino acid
FGHVSDRPRRRFLQDYNCKLLADTTVTAIEAAEKKVVLQDGRKISYDKLLVATGSSPFVPPFEGLDTVTNKHTFMSLDDADGLDAVLAEDKRVLIIGAGLIGLKCAEGILKHVKHITVVDLAPRILSSILDDEGAKLVQGHLESKGIEFRLAANIKKFSFNEAHLESGETIGFDILVLAVGVRPNTALLNGIAKIERGIVVNEKSETTAPDIYAAGDCTQTLDVSSGQNKVMALLPNAYMQGECAGINMTGSAAGGASFDKAIPMNAIGFLGLHVITAGNYDGQVYSESNNPKASQSSYKRLFFSNNKLN

SEQ ID NO: 82978 - protein, 167 aa, Unknown
  Obtained from environmental sample
  misc_feature (1)..(167): Xaa is any amino acid
MSDRFKSIYFLFLPAGIVLLALAAIMAGRRHPQPMSMPPQVVVLAETQARNLIETWEYAAQLEADRIVDLKARVSGFLLHKNFTAGDQVKKDQILFQIEPDNYQALLDMAQAEVLSARAQFDRATLDFNRISDLYRKNTSHQSDFHIPRPPLKWPPAQLKNAEPREN

SEQ ID NO: 82979 - protein, 96 aa, Unknown
  Obtained from environmental sample
  DOMAIN (1)...(64): Putative carbohydrate binding domain
  misc_feature (1)..(96): Xaa is any amino acid
MHYGFFDSHKREYVITRPDTPAPWANYLGSPAYGAIISNNAGGYSFVKSGAAGRLIRYRFNEQDRPGRYIYLRDDNTGDYWSASWKPVARPILTML

SEQ ID NO: 82980 - protein, 184 aa, Unknown
  Obtained from environmental sample
  misc_feature (1)..(184): Xaa is any amino acid
MDKLIIKGAREHNLKNIDLELPRDKLIVVSGLSGSGKSSLAFDTIFAEGQRRYVESLSAYARQFLGRMDKPDLDYIEGLSPAISIEQKTTHRNPRSTVGTVTEIYDYYRLLYARIGIPHCPICGREIREQPGLIIIRSILQMGEGNRVQLLAPVIRGKKGEHQKIIEDARKPGFPGRESTGFLW

SEQ ID NO: 82981 - protein, 240 aa, Unknown
  Obtained from environmental sample
  misc_feature (1)..(240): Xaa is any amino acid
VDGRDSIDEFRKQGYLPEALINYVALLGSSYEEGRDIFSLRELEQLFSIDKLNKAPAIFDYKKLEWFNGQYIRMKSDEELAALCLPSAVEAGLFGAPGAVPDLNQKNIFTAAMPLIRERLIYTHEAAGKIAYLFAPPALPAKEEFIPKKADLAETVRLLQLSRDMVQPLAEAADDAAAEAYIKEQAEKAAVKLGDLMMPLRVAITGSRVSPPLFGSLKILGSQESLQRVDKALQYLNLGK

SEQ ID NO: 82982 - protein, 328 aa, Unknown
  Obtained from environmental sample
  DOMAIN (10)...(310): Glycosyl hydrolases family 28
  misc_feature (1)..(328): Xaa is any amino acid
GATQCTLAFCQGAGRYYFKGKGVIDGNGQYWWDAVHEKKVSDQLGPKTPEEQALAALNPGYLSHPSGGDGRNVQFLRPPLVQFFNCSKIRLEGITLRNSPFWTLHPVYCTGVVISALSIINPPDAPNTDGVDIDSCEDVLVEKCHVTVGDDGIALKSGSGEDGIRAGKPTRRITVRDCTIENGHGGIVMGSETAGGIREVLAENCLFRGTDRGIRIKTRRGRGGTVQDLEFRKITMENNLCPLAVNMFYRCGASLEDGYFSTSALPVNSTTPSIRNIRISDIKATGCRASAGFIAGLPESPVENISVNRCEFSTKKIAASVPRPILTM

SEQ ID NO: 82983 - protein, 235 aa, Unknown
  Obtained from environmental sample
  misc_feature (1)..(235): Xaa is any amino acid
VGRVLSYRQRLVVLIEHQSTINENLPYRLLEYVTQIYKKIVDKEKKYQKQLMKIPKPDFIVLYNGTDDYPDYTELNLSDAFMDTEGLKSKGINKKLLELIVPVYNINHGRNPEILKKCDSLYGYSFFINKIREYQAKGLTLEDSINPVIEYCIKNNILKEYLEAHASEVINMIFGEYDREMDIAVNRKEAREEGREEGLKESKLIIAKNLLAKGSTPEFVREITGLSPEEIEEIL

SEQ ID NO: 82984 - protein, 332 aa, Unknown
  Obtained from environmental sample
  misc_feature (1)..(332): Xaa is any amino acid
GERFGIVLPIPDRVYDNIGLRSIRVQFVNVKNRNVQRSFNIAPKDEKDEDIHVIQRQEDVAAFPDGDYTLKIVLIDQSGNETSVIRNVNLLKARAASEVALINPLPGIVHSGPLVVSGKITGAVIPETVSLMLNKIVHADIEVNRYGIFSYDLPEDAVDIDEPVIFSASFRTPGGEQIVSYENFVKLNKDGPVLVIESHRDGDVIARRPYISGQAFYVLPEEEPAEEDAAETAAEAPADETAAEEEAAPVDEKTRKAAEKAAREAEKAAEKAALEAAKNTPQVRIVEVSLDNGRTFVSAKGGGQWRFRLETGELPPGPLPVSRPPAKTRGKK

SEQ ID NO: 82985 - protein, 240 aa, Unknown
  Obtained from environmental sample
  DOMAIN (15)...(214): Glycosyl transferase family 8
  misc_feature (1)..(240): Xaa is any amino acid
SSGLIWKNRRRKFPHCVVDFIDPRPALPDIPLVAVNHVSIDAYSRLFIPYWLDEYEKAVYLDSDMIARADIAELYDLNIEPFCIAVAVNDTAASCVESRKYGYFMKRSSVFMLLENWSRYISSGVLVFDIKKFTERFPYRNFFRFAIYFTNRYAKRLNDQDVLALLLKDDYFILPSVWNYNWSKRTGGNKYRIAGPGVKIVHFTGSLKPWKNNIRINNNVDALEYRKFASGVPLFRDTVN

SEQ ID NO: 82986 - protein, 244 aa, Unknown
  Obtained from environmental sample
  misc_feature (1)..(244): Xaa is any amino acid
FFRYGEGGFRYNAEWKKWLVWNSKYWEIDKGGVMIHEKGLEMVRNIYDELLKTADYRERIDIEKAAMMSESVRRRKAFVEAATWISALRVNTEELDNNPWLLNVKNGTVDLLSGEFREHRQEDLITKIANVEYNPKADCPLWKKFIREIMDYKADLIRFIQTAAGWSLSGDVSEQTMFILYGTGANGKSTFLNVIMYLLGDYAISTFTDTFLKKSGDNNTNDVARLRGTRFVATTRVEQGRALF

SEQ ID NO: 82987 - protein, 215 aa, Unknown
  Obtained from environmental sample
  misc_feature (1)..(215): Xaa is any amino acid
MRHIPKAAFLIPVLIKLFRLLTHSHKIYLIILFVMTVGFALVETLGMSVIMPFISLAADPGLLASGWYKKAFDFFRAASEESFIIGLGIGIICFYILRAVYSFLVTYSLNRFSFGLYKHFSKKVLATVLSVPYKLYAVKNSAELMRTITNEASEVGRIILNILQLCTELFTVIMVYAVIILLNWKMTLIVSAVLLFIVLLCLAISRADSDPSARG

SEQ ID NO: 82988 - protein, 56 aa, Unknown
  Obtained from environmental sample
  misc_feature (1)..(56): Xaa is any amino acid
MIRSAEIILCLEGCFAAIGGIILLNEPAGIRTIIGFAFMLCGMLISQLELIRARHD

SEQ ID NO: 82989 - protein, 313 aa, Unknown
  Obtained from environmental sample
  DOMAIN (3)...(312): UvrD/REP helicase
  misc_feature (1)..(313): Xaa is any amino acid
MRRALGMGVIELSSALDLLLNFPEKASKRWSDEEFGLLAKIEHDFYNMRKAYGLWDFVDLICGGLELFSKYPDIADDWGRRFDVVLVDEFQDTNPMQIDMLDVLLRSGASLYAVGDDDQAIYGFRGADIRPIRNFTTRFRDAEIVKLQINYRSVNSILNCANKLWADKPAEYRKTLVSGLNPQPSGCRKPKTMRFGTQSQALEWILARARYIERWEKIPIGSMAVLFRINDTLASVGDHYKSIGLTDGKIPRLLTVHASKGLEYPVVFLCDLEEGVFPHYRLREEKRISTWLELLKAIVKPKPNREPTKPGMP

SEQ ID NO: 82990 - protein, 272 aa, Unknown
  Obtained from environmental sample
  DOMAIN (41)...(272): Poxvirus D5 protein-like
  misc_feature (1)..(272): Xaa is any amino acid
MEKYGILSESIRRREAFVKSAQYIKELNVKSEDLDTNPWLLNVRNGTVNVLTGEFGGHRQEEMITKIANVDYDPAADCPLWKQFIREIMNYKTDLVNFLQTAAGWALTGNIEEQTMFILYGSGANGKTTFLNTVMHLLGDYAIATPTESFMKKNGDQNTNDIARLRGTRFVTTTEAEQGRRLSEPLIKKITGNDQMTARFLYGEYFNFTPTFKIFMATNHKPVIKGTDHGIWRRIKLIPFTTTIPEERQDKNLEERLKQEASGILNWWTLPR

SEQ ID NO: 82991 - protein, 123 aa, Unknown
  Obtained from environmental sample
  misc_feature (1)..(123): Xaa is any amino acid
MCLTAKTIQKNLEILDKYRKYTDLAELRVDCLDPDERLHIRRFPELAELPVILTIRRDSDGGYFSGGEGARVKLLARGLAFAEADRRKNFAYVDIEEDIEVPSPARNRQELSEQKLYARITIQ

SEQ ID NO: 82992 - protein, 336 aa, Unknown
  Obtained from environmental sample
  DOMAIN (2)...(336): TraG/TraD family
  misc_feature (1)..(336): Xaa is any amino acid
MAENSASFPGSNDTLRFNILDELSPESAYRDASMIADILTSPADGKTDGNSKHWVDTAKDLLTGVILHIKCSNLRDKSLYGCLDFLSQADKGEDKGAALLDGMINSIHCDNKIHEIIANVARRNKSRPDDERGSVFSTAVTALQVFEDPMVRNCSSSSDFCLNDFKVFENPLSLYITVPFPDLDRLSSFIRIIVTFILRKFSQDEVQFGEQKLKHPILFLIDEFPTLGTFTALETMMGILAGYGITFYLICQSPSQIYKLYGEHTAIFDHCKFMMTYAMSDPKGAEMFSKMMGVESVTFSNVSNSGNKHETGTNNYSISEQTQQRNLMNPDEIQHL

SEQ ID NO: 82993 - protein, 253 aa, Unknown
  Obtained from environmental sample
  misc_feature (1)..(253): Xaa is any amino acid
MLIQKLHDNWKMRKLPSGPFLPAKVPGSVYNDLLLNKQMEDPFYRDNEDKAFALMENDYEYRTAFSVSRKMFSMDKVLLRCEGLDTVADIILNNKTIANTKNMHRIWEFDVSGILKEENELKIIFHSPVKYVREAHKKLFVDGASQCLDGFPQLRKAHCMFGWDWRPRLPDAGIWRDISLAGIRAARIDNVYVTHIHKEETVELDISVMIDASEMQKNVRRSRTSDYSIKGIITNPNGKSVFYLKSPDEKKIK

SEQ ID NO: 82994 - protein, 312 aa, Unknown
  Obtained from environmental sample
  misc_feature (1)..(312): Xaa is any amino acid
VIRLDDPVCKIISGWRTPNGLLIQQTAVPLGTVSIIYESRPNVTVDAFSLAYKAGCAILLRGSSAALESNRALVKAIKKGLEESGVPGAVELADSGSRDEVDEILKARGWIDAVLPRGGKELIRRVVDNARVPVIETGEGNCHIYVEPSADIGKALEIIANAKLQKPGACNAMETLLVHRDIAGALLPLIAQRLAGKAELRCDKDSLAAIGPLPADLVVKDAVPEDWATEFLDYIMAIKTVASLDEAINHINAYGTKHSEAILTNDLHSAEEFCRRVDAACVYANASTRFTDGWVFRFGAELGISTQKFHAR

SEQ ID NO: 82995 - protein, 73 aa, Unknown
  Obtained from environmental sample
  misc_feature (1)..(73): Xaa is any amino acid
MGKIIGIDLRTHPFCVAVLEGGEPVVIQSSEGGRTTPSIVGFTQQGERIVGAPCKNQMITHPHIPVYSSTFHG

SEQ ID NO: 82996 - protein, 118 aa, Unknown
  Obtained from environmental sample
  misc_feature (1)..(118): Xaa is any amino acid
MEQDSNRTMKEAAGKAAVDALVKSGMKLGLGTGSTAIHAVRRVGELLADGTLRDISAFATSFQTEIECEKLGIPFYSLNSKELASGLDLTIDGADEVDPRNRVIRAGDSPNLNLAGGG

SEQ ID NO: 82997 - protein, 61 aa, Unknown
  Obtained from environmental sample
  misc_feature (1)..(61): Xaa is any amino acid
MPKDLKEYLIERGIKEISKEAGLGEDFIEKVADETVGTTEESILPFLQEKGHPALKMDPLM

SEQ ID NO: 82998 - protein, 126 aa, Unknown
  Obtained from environmental sample
  misc_feature (1)..(126): Xaa is any amino acid
MDSVLTAMVEEKIGPGERNRLLIQTAKEQLHFDYALALRSPAVALFTALKALNNTQSGQDNSAEGQAACKAAVISALSPRYYLQVLQDLNITPLYCDVSYDFPCMSRELIENAIAKKHSADLTCPT

SEQ ID NO: 82999 - protein, 327 aa, Unknown
  Obtained from environmental sample
  DOMAIN (189)...(327): Glycosyl hydrolases family 31
  misc_feature (1)..(327): Xaa is any amino acid
ASFLRALFRPVRNVIRVRITRFDGTVDRGPHFPLETDPAFKPVIRITDKEAALESGELSVNIKQDQDWNNTFSGGGKFLTGNTVKSTGYMAVKDRGPFVKDELILSVGELIYGLGERFGPLVKNGQTVDIWNADSGTASELAYKNIPFYMTSRGYGIFINDPGNVSLEIGSEKTSRVQFCVSGEALEYFIIYGPEPKTIFERYTAITGRPAMPPEWSFGLWLSTSFTTSYDEKTVMSFINGMEERKIPLSVFHFDCYWMRGFNWCDFTWDKATFPDPKGMLSRIKAKGIKICVWINPYIAQRSPLFTEGKESGYFLQRTDGAVYQND

SEQ ID NO: 83000 - protein, 89 aa, Unknown
  Obtained from environmental sample
  misc_feature (1)..(89): Xaa is any amino acid
FFRFDGRAARERLTHLPVIIDPSHAAGDAALVYPLSMAAAAAGADGLIIEVHNDPAHALCDGPQSIKPDAFASLAHDVEKVLAIVNKKG

SEQ ID NO: 83001 - protein, 265 aa, Unknown
  Obtained from environmental sample
  DOMAIN (165)...(255): GMP synthase C terminal domain
  misc_feature (1)..(265): Xaa is any amino acid
MRLNEGDEIERVFSKRNLSFIRVNAQKRFLARLEGVTEPEKKRKIIGEEFIRVFEEESAKLGDIPFLAQGTIYPDVVESGGKHGAVIKSHHNVGGLPENLKFTGIIEPLSRLFKDEVRELGKKLKLPASLVNRQPFPGPGLAIRVMGEVTEEKLDVLRRADAILREELDAVKRRPNQYFCVMTDTRSVGVKGDDRTYNFVIALRAVITDDFMTCEYAPLPHSVLSRISSRITGEIPQASRVVYDITSKPPPTVEWGVDYDQICFC

SEQ ID NO: 83002 - protein, 309 aa, Unknown
  Obtained from environmental sample
  DOMAIN (16)...(95): Toprim domain
  misc_feature (1)..(309): Xaa is any amino acid
VLYGVHKARDSIRERGYVMIVEGYMDYLTLYQAGVRNAAAVSGTAFTEEHAGLIKRFAPKAALVFDGDRAGLSAAQRAAVIIAPYGLQVSILALPGDDDPDSFVKREGAGAFLDLLAKARPAAEFLIEKLVSESDGSPHGKSRVMDELMPYARALSDEVVREDFLDKLAQRLSIERRLVANRFAGGGNYGPSSGGARPEAVRKGRGEALAMGALEEGFLGILMAAPDLITSARQYLSPEILTDPLAENIYSIMLETYDRDGCLKGLLDACGEDGSLANFVSMLSVKPVLLEHIEGELSSPNLSVAGKKK

SEQ ID NO: 83003 - protein, 113 aa, Unknown
  Obtained from environmental sample
  DOMAIN (5)...(102): CHC2 zinc finger
  misc_feature (1)..(113): Xaa is any amino acid
MKSRYNDDAQERVRQRVDIVAVVSRYVGLKRRGRAMVGLCPFHREKTPSFSVNPDIGAYYCFGCHESGDVFRFVQEMEGVGFPEALEMLAEEVGVELPRYERREPFGGGGSPC

SEQ ID NO: 83004 - protein, 147 aa, Unknown
  Obtained from environmental sample
  DOMAIN (9)...(147): Cytidylyltransferase
  misc_feature (1)..(147): Xaa is any amino acid
MSCDLRIGILGGVFDPVHCGHLAVALLAKEHFGLSEVVFVPSGAPPHKSAVVVSPEDRLNMLRLALTGLDWCGVWDGELRRSGYSYTIDTLNELGALHGGAKFYFIIGTDNLPEIAKWRSYEEIISQVTLCVAFVRATRPTALERSR

SEQ ID NO: 83005 - protein, 328 aa, Unknown
  Obtained from environmental sample
  DOMAIN (5)...(121): PAS fold
  misc_feature (1)..(328): Xaa is any amino acid
MNLVFDNSPDIILLLDKDACLVHCAKIFRQKLKINELDEIYKASFNEIFDVFTDFETTNQITAHFEKSIKEKKPAIFEQIMNFDDDGNDRHYEIHFTPMYNNNGEFQGAFIFFHDMTEILDAMNRAEQASRAKSTFLANMSHEIRTPMNAIIGMTAIAKDTNDSERKDYCLSKIEGASVHLLGVINDILDMSKIEEDKFELSYAEFELIAMIQRVTNIFEFRFGEKKLIFTMNLAPDLPRRIITDDQRLAQVITNLLSNAVKFTPEGGSITLSARRLEDKEQGFCTLEIAVTDTGIGIPKEQQGKLFDSFCHVDSSISRRFGGTGLGL

SEQ ID NO: 83006 - protein, 341 aa, Unknown
  Obtained from environmental sample
  DOMAIN (61)...(311): RNA polymerase Rpb1, domain 5
  misc_feature (1)..(341): Xaa is any amino acid
VRVLSLIISYEDGQYILEPLRDRIVGRYTLERVKHPITGDIIVNVNQEITKEIAAQIEEAGIESVYIRAVLTCEAEHGICRMCYGRNLATNRTVDIGEAVGTIAAQSIGQPGTQLTMRTFHTGGVAFNISEENRIFLKHPVYIKDITGAHVDKVDEETGEPTGVMLFTRKGHATVSRIMERHQLDSRDELLVENDQRVIRGVPIIKRGREQILSKENALAMVIKNGKETTLYLIGQDQKIEIRNGSEVIIKKGDVVEAEKTIATFDTFSDPIIAEVGGTVRYEDIIPGTTLKEEIDEERGIERRITDLPAAWKAAKDNLWLINRKATLLPTSRPGGGDFSG

SEQ ID NO: 83007 - protein, 267 aa, Unknown
  Obtained from environmental sample
  DOMAIN (174)...(262): CarD-like/TRCF domain
  misc_feature (1)..(267): Xaa is any amino acid
MYSQSVREKKSEYPLPERLLLDFGELIKNRKKTVSFITIKSAPKDGVCRIDLPCEPSRSFFGNIDYMKDEFASLLSGGWHITVAAESEAQAQRIKMIFLPRQDTETETSVSKWPADGSPLLNNLSIMANPLTAGFSLPDIKLMLIQENEIFGRRKRPVRSLVTARSKPIDTFIELNPGDYIVHVNYGIGLFKGIERITALGHERDYIRLEYADEETVFVPVEQVNLVQRYIGSEGNPPRLDVMGSKSWESRKNKEKTLPIYHVRADQ

SEQ ID NO: 83008 - protein, 112 aa, Unknown
  Obtained from environmental sample
  misc_feature (1)..(112): Xaa is any amino acid
MAVNTQLIYKMVDTCGGEFEAKTPYFYSIENGTENEALPFIQKSTKERIVVLGSGPIRIGQGIEFDYACVHCVWTLKSMGYEVIVINTTPKPYRQTSTQPTGSTLSRFALTM

SEQ ID NO: 83009 - protein, 303 aa, Unknown
  Obtained from environmental sample
  misc_feature (1)..(303): Xaa is any amino acid
LAHCTGAINRAHTDRATTAIALPFGTHFLQQEILNALKELQIPCITLPQQSKDPSQQESLLMELFQKDMPRLVLSVNAKGIDSEGILLSVCNRFSVPVHIWFVDDPRPIACLFSKEQCKNIVAWTWEKAYIPWLLEKNFAKAEWLPLAGDTHLFYPQNKKPIHDLMFTGSAIAGNFLDDIWKHIQYNKDEALPIAQNAAEQILSREIFAQQIPADTKAEAWFASYCIHLASAEKRRLCLEPLLALGLVFAGDPNGWKNLFGNNIKTLPDIDYRNGLCSHYSNGSIHINITSCQMPSGRFCPWG

SEQ ID NO: 83010 - protein, 189 aa, Unknown
  Obtained from environmental sample
  DOMAIN (14)...(129): MGS-like domain
  misc_feature (1)..(189): Xaa is any amino acid
MKKRALISVYDKDGILDLAAFLVQSDWEILSTGGTSKHLQENKVPVTDLSSITGFPECLDGRVKTLHPTVHAGILARRDETSHMDTLKNLGIETIDLVCVNLYPFFEKVQAAGLTQEETIEFIDIGGSSMLRSAATNFNDVIVLTDTADYPEVYGGLKERSVSPGDRKRLAGKVLPSLRHTTPQLPDIY

SEQ ID NO: 83011 - protein, 93 aa, Unknown
  Obtained from environmental sample
  misc_feature (1)..(93): Xaa is any amino acid
MGIVLIILAFVLLIIGIIGAVVPALPGPPLSFIGLMLVQWSGYGGFTPEFLWVWAGITVFITVMDYVLPSLLARRFGGSRSAAARADTDRLWT

SEQ ID NO: 83012 - protein, 81 aa, Unknown
  Obtained from environmental sample
  misc_feature (1)..(81): Xaa is any amino acid
MGVAVVPYDSGGVGECFSSGVSGYLVSRGDKTGAATRAVSLLIKPELRENIAANAKKYLDEKFTQESYINGVLTVYEKMFY

SEQ ID NO: 83013 - protein, 57 aa, Unknown
  Obtained from environmental sample
  misc_feature (1)..(57): Xaa is any amino acid
ALKAVGLPAVEVHLSNIHEREAFRKISYPAQACEKTFSGMGGEGYAHAIRYLAGKEE

SEQ ID NO: 83014 - protein, 189 aa, Unknown
  Obtained from environmental sample
  misc_feature (1)..(189): Xaa is any amino acid
DRPEGPFIPEKEPIKGSYSIDPCAFEDNGAYYLYFGGSGSHPAGESYSLARVAKLSEDMLQFAEEPRPIVLLDKKGKPIRGNYEFFEAAWMHKYNGKYYFSYSTGHSHFLCYAIGDNPYGPFTYGGIILTPVVGWTTHHSIVEFKGKWWLFFHDSRPSGDVTWLRSIKVIEMRYNEDGTIQTIKGGGYW

SEQ ID NO: 83015 - protein, 129 aa, Unknown
  Obtained from environmental sample
  misc_feature (1)..(129): Xaa is any amino acid
GRVSFRAGRGWILSSTLTTTTGLFHTTRGGLSEQFVLQELISANYKLPVYYWAAEKNTAEIEFVIQYNNKIIPIEVKSGKNVKSESLNVYRKEYSPACAVRASLKNYGVKDGLYSIPLYLTGSLSAILQ

SEQ ID NO: 83016 - protein, 175 aa, Unknown
  Obtained from environmental sample
  misc_feature (1)..(175): Xaa is any amino acid
MRFVFSAVILILLGSFPAAAQSPGGTETPSVSAMENYRLGRDLESLSRMNEANTHYNEAVRQCLEEVTGNTASRTTYTVLTWTLQRQRKYNEVVTWGERGLRLFPDEYRIMETMGEAFFYLEDYKRSLSYMQRYTNALPQGDRVSVAFFFSGEIYRLTQKYLHADMPLGRSDPSR

SEQ ID NO: 83017 - protein, 179 aa, Unknown
  Obtained from environmental sample
  DOMAIN (46)...(177): CDP-alcohol phosphatidyltransferase
  misc_feature (1)..(179): Xaa is any amino acid
MKKTALKDRPIGKGIYIIPSLFTCGNMAFGILSIISSIDGHFIQAAWLLIGALACDILDGRIARMTNTTSEFGMQLDSLSDLVSFGVAPGIMMYLLVLNSMGKIGIAIAILYMLCCALRLARFNVLAQSGELYKHFVGLPTPASAGVIISFVLSYELLGPAEKYALNFKTIPILRRSAD

SEQ ID NO: 83018 - protein, 336 aa, Unknown
  Obtained from environmental sample
  DOMAIN (49)...(259): ATP synthase alpha/beta family, nucleotide-binding domain
  misc_feature (1)..(336): Xaa is any amino acid
AKKLLGRVLNHLEKPVTGKGAIESPVRYPALADAPDPYRRPRIRDRICTGIRAIDGLLAAGKGQRLGIFAGSGVGKSTLLGMIARNTSADVNVVALIGERGREVNEFIENDLGKEGLVRSILVVTPSNSPPLARLRGAYVATAIAEYFRDQGLDVMLLFDSLTRFARAYREIGLASGEPPATRGYPPSMFDSMPKLLERSGTSEKGSITGFYTILVDGDDLDEPVSDTVRGILDGHIVLSRSLAQRFHYPAIDVLASISRLATKVSGSETKKAVGIVRRLMADYAGAEDLINVGAYKLGTNPMIDEAIAKRESLEGFLIQAVKKNRLGHKSGGKNR

SEQ ID NO: 83019 - protein, 140 aa, Unknown
  Obtained from environmental sample
  misc_feature (1)..(140): Xaa is any amino acid
MKTWWKDSIVYQIYPRSFQDSSQTEFPNDGIGDIPGIISRLDEIKELGANVIWLSPVYKSPDADNGYDISDYCSINPKFGTMADMEKLFSEAEKRSIKIIMDLVINHTSDEHEWFKRAANLKVLIVIITSGGPLADQPKK

SEQ ID NO: 83020 - protein, 97 aa, Unknown
  Obtained from environmental sample
  misc_feature (1)..(97): Xaa is any amino acid
MLHLEIHPQTPQARHIKTIADMLRGDALLLYPSDSGYAIACSAVSSKAINKLYALKKPMKKAFMALLLPDISMATEYAKVNNFVFQILKNYTPGPYT

SEQ ID NO: 83021 - protein, 167 aa, Unknown
  Obtained from environmental sample
  DOMAIN (109)...(132): 4Fe-4S binding domain
  misc_feature (1)..(167): Xaa is any amino acid
WFPKTDWPRVTLLLSGMSTQAQLDENIALAERIDAPNFLSEAELGVIDKVIEVVNESNRIPCTGCGYCIPCPVGVNIPGCFASYNDSYKGGRFAALKPYVMATAALTTKSGLASSCKSCGKCETHCPQGIKVGKSLKKVARRLEPFWFRAGISAVRWFTGFKAKKGR

SEQ ID NO: 83022 - protein, 97 aa, Unknown
  Obtained from environmental sample
  misc_feature (1)..(97): Xaa is any amino acid
MNQHKIRNIAIIAHVDHGKTTLVDELFRQSGMFRENQHVAERLMDSMDLERERGITIAAKNGSFRYRGTWSRDRHAGHADSAGSWSACSKWLTDRSW

SEQ ID NO: 83023 - protein, 77 aa, Unknown
  Obtained from environmental sample
  misc_feature (1)..(77): Xaa is any amino acid
MCTALNIFGKFTNKDIAVKAMRGQIKPGGLPKHGTIFFSDIREFTAKSENFTKFFGAEASDKIVYWLNQYSRKSRPI

SEQ ID NO: 83024 - protein, 268 aa, Unknown
  Obtained from environmental sample
  DOMAIN (36)...(262): Iron only hydrogenase large subunit, C-terminal domain
  misc_feature (1)..(268): Xaa is any amino acid
MDGSEDILQINHDLCIGCGNCINVCTHKARTLIDDTDRFMNDLKQGQKIIAVAAPAVASFFSGQFLNLNGWLKSLGVEAFFDVSLGAELTVITYLDYIKEKKPKTVISQPCPAIVTFIEMYHPELLPALAPADSPILHTIKLAKEYYPQYKNHKVAVISPCIAKRREYDETGIGDYNVTMIALKNLLDEQKINLSSFPRVEYTGVTAERAVGFPIPGGLLDTAERFVPGIRRDTLKIEGVHSIYPYLKECKNCWTAMSNYAFDRLPEL

SEQ ID NO: 83025 - protein, 331 aa, Unknown
  Obtained from environmental sample
  misc_feature (1)..(331): Xaa is any amino acid
VLILDDTKQATADAIEHITYLLGNQCGKGRMNIKLAAAPTKVFCNLIWSTGETGLDFELRRKLRPVDGGLDVRITGISAERWKYGAFNDLHGMASGADFAESIKRNACANHGWAGRHFLERLCSELEKDSEAFLAGLRERHRAWIEAHCPDGCDGQVRRVASRFALVSVAGGLAAEWGILPYGPNETTIAAVDIFMAWLRDKGGMGSHETRAAVDAVRDFINAEGPIYFPAPNDTAPRHTKTLGMRVQREQCVDDKGEVICLRCPGGDLHTIGEDGHSHYCEKPMACPRAETSQCFDWWLRGKRALETVSGRPLAQAKRRSSPRHHGASAM

SEQ ID NO: 83026 - protein, 207 aa, Unknown
  Obtained from environmental sample
  DOMAIN (14)...(140): GTPase of unknown function
  misc_feature (1)..(207): Xaa is any amino acid
LAFPRVYRQRPSLLHIGTIGHVDHGKTTLTAAICTTLAAKGLASAKKFDDIDNAPEEKARGITINTSHVEYQSEARHYAHVDCPGHADYVKNMVTGAAQMDGAILVVAATDGPMPQTREHILLARQVGVPAIVVFMNKVDMVDDPEILDLVEMEIRDLLSKYEFPGDTTPTIRGSAFEALEAMPMPREKIWNSSKPAMNFIHSPSAT

SEQ ID NO: 83027 - protein, 222 aa, Unknown
  Obtained from environmental sample
  DOMAIN (10)...(217): Domain of unknown function (DUF323)
  misc_feature (1)..(222): Xaa is any amino acid
MGNPPFTQIRVAGLMFAGLNGGSLAQAEPFPHLAPIEPFMICSTPVPSPAFSDFLDANPQWGPDQREALESRGLVTSEYLADYEAGTGRVITGINAVSWFAARAFCEWLETKLPDSLSGYTVRMPTEAEWEYAVKSTEKWNQQGLLVRGSAWEWCGNPYSHLPFISAPPEAIAAVGSPEYPLRGGSLLNAVTPGNPETRASLPPESCSPFVSFRPVIALKGR

SEQ ID NO: 83028 - protein, 294 aa, Unknown
  Obtained from environmental sample
  DOMAIN (193)...(291): Phosphoribosylglycinamide synthetase, C domain
  misc_feature (1)..(294): Xaa is any amino acid
LVVKADGLAAGKGVVVAADFAEAKQTLSAFMKEGSLGEAGKSVILEEYLEGLEVSVLAAVSVSPGKKGVIKPFISARDHKRRFEGGRGPNTGGMGAIAPVPDFTAVARNDFDKAILAPTLKGMEAEKLDYRGFIFFGLMVREECCYLLEYNVRLGDPETQAVLPLMDSDLTELCTAILEGKLQSFPLEWKKGAVCAPVAVTEGYPGPYRKDDPIAINHADFERTGAKLFVAGASRGTGGPLGSGLRTHGGRVLSVSALGSDANDAFTKAYHALRFISFEGMGYRNDIRREHENI

SEQ ID NO: 83029 - protein, 118 aa, Unknown
  Obtained from environmental sample
  misc_feature (1)..(118): Xaa is any amino acid
WVPQGSDRPRPFSLEEAEEHFRKLKKTGTNSFKLTVPWTAIEHEGAGIYDEAYLAYLRKILLIADKEGISVFIEPNKDLQSVPSWAVKDENKDNYIAAFKHAQRRLKNCKAVTGWGDI

SEQ ID NO: 83030 - protein, 301 aa, Unknown
  Obtained from environmental sample
  DOMAIN (203)...(240): RHS Repeat
  misc_feature (1)..(301): Xaa is any amino acid
GFPRVIGGGEIAQRQWKTGTSKKYTENYAYQWQGWNEKRMVTIIGAGTTAYLLDPWGQVTEVTNAVGESSSRTLNGAGNVLREQASSGGFYEYRYDALGRLYQAGREGGPAIQARYNLDGSIAEKTDRLGKITQYAYDGRGLLTKETTALGEQRYFYDDAGRLTRQEIASRNSVTYRSDWNYNDSQRTVTVTAGGIYSETLYHNAWGEVIIKTDGEGNEIKYEYDKAGKLIKSIDAYGRATSYSYNELGKIAKVIFADNIAEAYEYDHMGNLQEIRDAIGVSWAGEYDQAGRLTKETEGRE

SEQ ID NO: 83031 - protein, 198 aa, Unknown
  Obtained from environmental sample
  misc_feature (1)..(198): Xaa is any amino acid
MRKLILTTAAVAAAIAGAFAAETAFGTFTDTRDGQTYKTVKIGKQTWMAENLNYQTKGGSWCYDNADSNCVKYGRLYDWDAAITACPAGYHLPSEKDLDRLGHDVGGKRRDYKGPSTDWFGAGKVLKAKRGWNDHKGKNGNGTDEFGFSALPGGYRNNNGDFHGAGGYGHWWTARIFRHDDKGAVWFIDCTGSKGISG

SEQ ID NO: 83032 - protein, 339 aa, Unknown
  Obtained from environmental sample
  misc_feature (1)..(339): Xaa is any amino acid
MTGTQYSERERVRYEAKYEYSGQSGMVSSSVISHVEKIHSQNSYAYDALGRRTLTENTTGQTLRTLYDGKGCEAIREGETFSDGSFTTRFAPAEAASAAPSNQATGERYRWVSDNESARTRNSSDEYVIQNSRYSGRGVTLYGNGEAVAVIYSSSGISRSMYMGKDIMGSVRSITVDTGSLDDRYEYDAFGQPYKGDLSGGMNLGYASKSYDTATGLYNYGYRDYKPQAARFTTVDPIRDGNNWFAYVNNDPVNWVDLWGLDIMRSTYIQGSGKITTVYIPTKSDGSMDVDNVKTYKFDAANDVTTNPNMTIPKTGTPEYYYPQSFPTGSSWPILYLPK

SEQ ID NO: 83033 - protein, 299 aa, Unknown
  Obtained from environmental sample
  DOMAIN (1)...(192): PEP-utilising enzyme, TIM barrel domain
  misc_feature (1)..(299): Xaa is any amino acid
MQVEAIALAAVECVKEKIPVHPEIMIPIVVTARELRLLRPNVEKIFEKVLSAAGVKVPVTVGTMIEVPRAAIRSAHIAHYADFFSFGTNDLTQMTFAFSRDDVASFLPFYLEKNVLDVDPFKTIDQDGVGGLMELAIKEGRSVKPDLKLGICGEHGGDPATIDFCYRVGLSYVSCSPFRVPLARLAGAQAVINNSGKNITGGGSEKTKPTTAKVKGSKKPAKARGKKKMAVTSAKKKPCANKKTAKKTGAKKTGAKKTAKKKPQPKKPAPKKPAPKRLRRNNPQPKRNCGEEKTAAKKQ

SEQ ID NO: 83034 - protein, 304 aa, Unknown
  Obtained from environmental sample
  misc_feature (1)..(304): Xaa is any amino acid
VTSEQEVRARDQSLAANDAHRLYEEIRARIERIQHDLANKKEQAEKYQNLKSQCEALLNRKLTEDFDGEEAALAGEAKKYHNEWYIAELKKKEAADLLRDIRSELADLERGILRYPDAPRELRAALEKAGIEAFFLAEAAEITAQDWVDAVEGWLNTRRFAILVDPVHFQKAIEVYNRLPRSVAGAFIPNIEKMRDAVVRQGSLAEIIKAEGYARIYIDYTLGKVMRSDLASLKTYDSAVTKECMTYMNHTASRIKEEVYRRHYLGRAALEERRKFLVAEAERVEAEFVNAEREEREARGREDC

SEQ ID NO: 83035 - protein, 74 aa, Unknown
  Obtained from environmental sample
  misc_feature (1)..(74): Xaa is any amino acid
MEASIEKSIKDYIKNMPSLPTSVTKVLEICNNPQTSPTDLNHVISLDPVLVGRVLKLINSAYYGIGQPVTSLAR

SEQ ID NO: 83036 - protein, 161 aa, Unknown
  Obtained from environmental sample
  DOMAIN (46)...(150): Hsp20/alpha crystallin family
  misc_feature (1)..(161): Xaa is any amino acid
MKALTMYRPNTIQNALSDFDRYFESFFGDSVLSPSTRILNRLPAVDVRETEKAYIVDMELPGYDEKDIEIHIDGASLSIASKQEEAANKEADNGTWLLRERHVSSFSRSFKLPDNANPEEVNAEFKNGILKMEIGKKAGGAEKGDTDQCEEEETRPSTGKK

SEQ ID NO: 83037 - protein, 332 aa, Unknown
  Obtained from environmental sample
  misc_feature (1)..(332): Xaa is any amino acid
ARTALERAADLRMFHRIYLSAGLASFYTNESRLSVLQAVENALRVGRWTRYSEVQARLLEAQQLIAIRRYSAALDSLAIFRPPVETADAAMLRLAALKGLVNGGAASYSAEFRLRMSEAMNRYPRDTRSVRLFFSYANYAYSDGREPNSDDIRIIELALERLPYLLPTDPELAWIAAPFINDIERARQLLANYRAGSSKPNPASLVPSLNLGLLNDIDAIEELFAAGNPAAASAQPAAVFVVDKDILVNVWKLLRSEEGRNHLARKLKTFSGTITEDEDHDGYVESRVVYKQGVIEEYHFDADQDRIEDMTIIFNSGNPQSRRNLYMGPPKK

SEQ ID NO: 83038 - protein, 325 aa, Unknown
  Obtained from environmental sample
  misc_feature (1)..(325): Xaa is any amino acid
AEFQKKRQSAGVGGVIGSKLFVFRGKTGAGKTLVAKHFIEELRREDCLSSDRITSKEARELSKIYGDEYAIAKFLSETKPAALVVDNATEKPEYIHELILAASKSTEECVCVIIGNSEGFDEFFSKNTEDRQRVTQDFNFQDLSLDDLSLILMKKLRERGLVFDPALRKHFSSYIQEHKNDPSCEYKNGWLIEKDVIPSIDKNQQARLERSTSVSDEDFKTIKIEDLPLKNKPKTVDEILAELDAMIGLAKVKNAVREVAQEIKRPKELEEKGGAKAGGLEFILCFTETQAQAKPPLPASSDRCFRQWDCFPATVLARLTRTVWL

SEQ ID NO: 83039 - protein, 337 aa, Unknown
  Obtained from environmental sample
  DOMAIN (54)...(224): Type III restriction enzyme, res subunit
  misc_feature (1)..(337): Xaa is any amino acid
GVPQGQIGRGKEALERKKAKPSPLIAHSSLTPTPYSLLPTPYSPLQQRLIERLPFSLTPGQQKAIAEINVDMACNDSQYSMARLLQGDVGSGKTLVSFMAALRAADNGGQTALLAPTELLARQHAENAARLLEPLGLRIAFLTGNIKASGRKDLLKHLAAGEIDIVVGTHALFSKDVNYKNLQLVIIDEQHRFGVTQRALIMAKGVNGAAAGPHLLMMSATPIPRTLAMTVFGDMDVSVISDMPPGRKPVITHLARESNEQKVYDFVRDKLKAGSQAYFVYPLIESDDEKDTLLKDAVSMAERLAAKVFPKFAVALIHSKLDEQEKRPTMDRFRQAK

SEQ ID NO: 83040 - protein, 128 aa, Unknown
  Obtained from environmental sample
  DOMAIN (14)...(64): Clp amino terminal domain
  misc_feature (1)..(128): Xaa is any amino acid
MRISSHVQAIIDAAYNEAKLRSHEYVTPEHILYAALAFEEVQEVLFSCGADLAQIKSGMENFFDQKVPSSKAAEPAKTVGFHSIMERAIIQSRSAQKDKIDVADILVSLYDEKPLLQFLYLRNSADLT

SEQ ID NO: 83041 - protein, 70 aa, Unknown
  Obtained from environmental sample
  misc_feature (1)..(70): Xaa is any amino acid
ALPPGYRGFVRGTQSLGVDVQVAAWGIGIDRMALMALGLNDLRDLFSGNIEDVRLRRLAETNKLKEKANA

SEQ ID NO: 83042 - protein, 205 aa, Unknown
  Obtained from environmental sample
  misc_feature (1)..(205): Xaa is any amino acid
LGDFYYFTGNTLYRVLSPELFTRTIYGDFLSIGTVIAVLPFDFEPGFDKYWLAPNSGSVLINKKGKSLFLFLLGENQYNNSALPHIMLPQGAGTLNVLWPSSGPLTIVSSLKKELTVWRFEITGKTVRTLTPSSIPLSSNGALSHDGTKAVFWGDKGLELWDYSSWALVQKSARTKRFPACGFITGKKFTGNSRFIEAGNIGNAE

SEQ ID NO: 83043 - protein, 144 aa, Unknown
  Obtained from environmental sample
  DOMAIN (11)...(137): Integral membrane protein DUF6
  misc_feature (1)..(144): Xaa is any amino acid
MWVIYALLSAVFAALTSILAKIGIQNINSNLAVAIRTVVVLFMAWVIVFFTGKHNDIVNIGQKNMLFLILSGLATGLSWLFYYKALQIGEASKVIPIDKFSLVIGMVLAFIVLKETITIKTIIGGALITIGTFVLIFLIKLKLY

SEQ ID NO: 83044 - protein, 116 aa, Unknown
  Obtained from environmental sample
  DOMAIN (6)...(109): Response regulator receiver domain
  misc_feature (1)..(116): Xaa is any amino acid
MPEIRKKAIMVDDNPLNLKVARNTLMGKYDVFTVPSAEKLFELLEKTLADVIVLDVMMPGMSGYEAIKILKTNPRTADIPVIFLTSKADANSDLEGFIYGAVDYIPSCRSDQWPDP

SEQ ID NO: 83045 - protein, 160 aa, Unknown
  Obtained from environmental sample
  misc_feature (1)..(160): Xaa is any amino acid
MRKLPELDKVSDIRLGQDADFDAWLYNMMTDNNIAYYMNPELIAPPEQIRFMVALEADQVYFPCSDATVKLLMNNDAVELERQYNRAWRILMRLARATCPDRKIRERVLRFCAYRFRQSVKQRTLIPARLVKRMTGMLFFWTMTTIPGPPGARGNAQPPH

SEQ ID NO: 83046 - protein, 150 aa, Unknown
  Obtained from environmental sample
  misc_feature (1)..(150): Xaa is any amino acid
MKKRIMLAAVMTFFVTLIACKHIDSLAQAAANADIIDHDTANMISLSARAFGSAADNATPEQEYFLGRAVAANILSNYKIWDKDPELTAYLNYICGVIVINSPEPHIFNGYHVAILDSNDINAFTTSARHISLTRGLVNIAKTKTLLPRS

SEQ ID NO: 83047 - protein, 333 aa, Unknown
  Obtained from environmental sample
  DOMAIN (13)...(331): Bacterial extracellular solute-binding proteins, family 5 Middle
  misc_feature (1)..(333): Xaa is any amino acid
MTELAERHETSRGFRPISVDEENGTMQVIFTLRDNVYWSYYNSDKKIKVTSDDVIFWYNEIEGDTDFQSSGYYGQFLTMPDGSEAHIDISKLDDLRFVFHFPRIIAEPYLMTNMHFGPRHIYEPAKKQDGVEGVRNLFSVAVNPQTIPSMGEWFLIEYTPGQRLVYKRNTDYWRNDANGVTLPYLEEMVMRIIPDENTKLLLFKNGEIESYGLRPEDIDGLINKSDASYTVFNSEGSLSAAFWTFNQNPVNKKKPQLEWFTKKEFRQAMSCLLNRDRISAQVYRGLAQPKLNIFPEPNPYFNPSLVFAYLYDTERSIELLSLGRIHKDKRRIM

SEQ ID NO: 83048 - protein, 301 aa, Unknown
  Obtained from environmental sample
  misc_feature (1)..(301): Xaa is any amino acid
VFSDFPFHIPRKYGGHVSRDQIFNINESDFRFTENELSRYFRRIGISFQPDSLREIMQDTEGWAFAINLIARSCQKAPGYGGYVRNAMKQNIFRLLETEIWDGLPEQMQNFLVRLSLIDHLSVDLIAQLAGGEDLIAGLEKQNAYVRRDNFINAYFIHPLFLEFLSTKQEILSEEQKRETYAISGDWCARNGFKIDALFYHEKTGNYQSILLTLTGLTTQIPQDIAKYAADILDRAPEDAFDKVEFLADMHLRTYICQGFLQKSLELVKYYEAKFLKLPEHDPIKKRTLTRLSCRSDPCPT

SEQ ID NO: 83049 - protein, 247 aa, Unknown
  Obtained from environmental sample
  misc_feature (1)..(247): Xaa is any amino acid
MKFTDGYWLIKEGIQAHFAACPAEIEQQGDELVVYAPEKPIRHRGDTLNMQLLTVRYSSPMKNVIRVRISHFEGGLDNRPKFQLESEPSFKPSICIQEKEAVMKSGDLSVSVERGDRWNITFLGGGKAITKNLFRSTGYMVNSEKQPYIKDELSLSVGELVYGLGERFGPFITNGQTVDIWNADGGTASEQAYKNIPFYMTNKGYGVFINDPGESSLEVGSEKTARVQFCVTGEYLEYFVIYGPQQK

SEQ ID NO: 83050 - protein, 316 aa, Unknown
  Obtained from environmental sample
  DOMAIN (36)...(300): tRNA (Uracil-5-)-methyltransferase
  misc_feature (1)..(316): Xaa is any amino acid
LGEAKMLEILDASQDRVRPVCGLYGICGGCNLQHLGYNAQLAAKTDILKDAFARIGGFSPPEPMVIPSEPWEYRNRMQFHAIREAGKKSSGVLWGLKSEKSASIVPVPDCPVADPEIRKLLREGKKTLLTPLEKDRFTVYARGDLFLIECPPAGRGKTRILDQELALDASLFFQSNGAMLEKLAEDLLAIAAEADRSMPMADLFCGVGTFTAFLGKLFPKSALVEENKAAVALARENVAARADFFAQRSEDWVKHNNPHDFGFIIADPPRQGLCQDLSRRLAAEGPPMLAYVSCDPATRQGQQDMQAVCDNPGGNP

SEQ ID NO: 83051 - protein, 341 aa, Unknown
  Obtained from environmental sample
  DOMAIN (7)...(145): tRNA synthetase class II core domain (G, H, P, S and T)
  misc_feature (1)..(341): Xaa is any amino acid
LGPAVGQNRPRRLNPARQGGGETEKQIYRFKDNGERDVALRFDLTVPFARFTAMHSAELTFPFKRYHIGKVWRGENTQRGRYREFMQCDFDIIGSDSVPADFEIILLIYSTMKNLGVDVTIHVNHRGLFNRFLSHIGQSEKSVEVLRTVDKLAKVGEDETLKSLTELAGEVNAKKIIEFINAKGSFSQVLDRLTELSGGSCPESERLASLRQYMLDSLGGDSSAEPFVLSPSITRGLDYYTGVVFETFLNDLPDIGSVCSGGRYDNLAGLYSKDKNSISGVGASIGLDRLIAGLESLNKLPAADTCDVAIACVEIEKSGQYQRLAERLPQAGIPCEVFLER

SEQ ID NO: 83052 - protein, 166 aa, Unknown
  Obtained from environmental sample
  DOMAIN (16)...(166): ATP-dependent protease La (LON) domain
  misc_feature (1)..(166): Xaa is any amino acid
MADNSVIPIDQILPNKLPLVALMGRPIFPGIFTPIMIGNPTDVKVVDHAVSGDALIGLVMLHNETETPSIGDLYKVGTVAKIVKKINLPDGGVNIFISTLKRFQVKKTLHPADPIIAAVEYLEDEEDNTDEVKALTRALVSEMKQISENNPALFREMRLNMINIDH

SEQ ID NO: 83053 - protein, 227 aa, Unknown
  Obtained from environmental sample
  misc_feature (1)..(227): Xaa is any amino acid
MYIHDLNVPWLEHGFVRNRFMLRDESEVERIIQAGIHEVLIDTLKGLDAVNAPTAKEADKVLMNNMISIATAPGSGPAFHYSESRWAESKQIHDDAVKVVGNVLKDIRFGKQVDVRRASSVVSHITDAILGNDGTLVSLCRIKQRDTYTFQHSVSISALMVTFCISIGGFSEGDLLDIGLGGLFHDVGKLSIPDKILKQPGKLTEEEFAIMRTHVSEGLQFLDSRGA

SEQ ID NO: 83054 - protein, 189 aa, Unknown
  Obtained from environmental sample
  DOMAIN (1)...(188): Histidine biosynthesis protein
  misc_feature (1)..(189): Xaa is any amino acid
MVIASIDIQNGKVVQLKQGEELVLQRDNHLELAEEFDRYGEVAVIDLDAAMGKGSNLEMIKPLLRKAECRVGGGVKTPVQAQELVSLGARKIIVGSGAFRDPAKKGAGAAGGEFAVNIPFLETMSKKIGRQRLIAAVDARAGEIVVDGWKTPTGLDLIEAAKLVEPFAGELLFTCVEREGTMPSAIKPG

SEQ ID NO: 83055 - protein, 77 aa, Unknown
  Obtained from environmental sample
  misc_feature (1)..(77): Xaa is any amino acid
MKRIFRWIFAGIVAIPVMAALFGAVVMLLWNALMPQLFAMATIKYWQGARLLILTQLLVGGISGQGHGGRRGRVTEF

SEQ ID NO: 83056 - protein, 320 aa, Unknown
  Obtained from environmental sample
  misc_feature (1)..(320): Xaa is any amino acid
VFQAERVQFSPKYPKVDATVSGSRIDSTQRDFYALDMEDRALDLLEGDEVTLKCLDISEAESNEDFAMTASTFNREDDRLEPGIGRPGLRVINFAPILKYDLFPFAEVLDAVLNIASKSMGLPVEIEFAVSRHKEKLIFYLLQVKPLIQNTGRQETNIDLQDIDKCFVISGRSMGNGRDTTISDIVWVDPETFSPTHTAAIAKEIEALNAMLKAKGLRYVLVGPGRWGTRDYSLGIPVNFPQISFSRVIVETNLPNFNVESSQGSHFFHNVTSMNIGYLSVSPGHDKDHIDWEWLKSLHCEERTQFADELCRSERGGPNQ

SEQ ID NO: 83057 - protein, 231 aa, Unknown
  Obtained from environmental sample
  DOMAIN (27)...(172): ExsB
  misc_feature (1)..(231): Xaa is any amino acid
VIAINTDTSIAAEKHERLKEYLRSLGSVAVAFSGGVDSTFLLKTAYDVLRDRAIAVTARSSTFPRRELTAASAFCEGEGIRHIICDSDELSVDGFSQNPVNRCYLCKSELFTKIRAIAKEAGVEHVAEGSNVDDDGDYRPGLEAVREQGIKSPLRHVGLAKAEIRALAKEMGLSVWDKPPFACLASRFPYGETITPEKLGMIDRAEQFLLDIGLKQVRCGSRLSNLSWGGG

SEQ ID NO: 83058 - protein, 317 aa, Unknown
  Obtained from environmental sample
  DOMAIN (80)...(230): HD domain
  misc_feature (1)..(317): Xaa is any amino acid
MAGEIEVGIHKILLDDEERLSPFAKRSDESLGRCRPIDRDPFRLEFARDETRILHSRPFRRLKHKTQVFLSPDDDHICTRMEHVLHVSSIAAVIGRCLNLNTDLINAIAKGHDLGHPPFGHAGERVLNKIIVNKEKNDDKESDKKVSGGFKHEIHGLRVVDKLTNYGAGLNLTYEVRDGIATHCGENFDRVLQPDRSRDLHALDTLTDRNCMPATLEGCLVRLVDRIAYLGRDMEDAIKARLINKDDIPTEVVNGLGADNGRIIGVFVNDTIANSAGKDQIEMSEEIFDLMKDTEEFHYERIYNHQEREACDRPGGQ

SEQ ID NO: 83059 - protein, 43 aa, Unknown
  Obtained from environmental sample
  misc_feature (1)..(43): Xaa is any amino acid
MTKYVFVTGGVVSGLGKGITAASLGKLLKQRGLKVAAQNSTRI

SEQ ID NO: 83060 - protein, 325 aa, Unknown
  Obtained from environmental sample
  DOMAIN (164)...(325): Glutamine amidotransferase class-I
  misc_feature (1)..(325): Xaa is any amino acid
IITEMGGTTGDIEAQPFLEPFRQISLERGRENCLFIHVTLIPFLKCSGEHKSKPRQHSVKELRSMGISPNVIIARADEPLSGGIKEKISLFCNVKIDCVIENITIQSLYEAPLMLHQNGLDKVVCRELGLDVPEPDLNEWQKMVQKIGERKQEVNISIVGKYIQLHDAYLSIIESLNHAGFETGVRINISWVDSAEVTAESAVGLLGGTDGMIIPGGFGDRGIEGKINACRYARENNIPYLGICLGMQIAVIEFSRNICGLERANSSEFDETSPYRVIDIMPDQTGLLGSGGTMRLGAYPCKITKGTLLSALYDTDEVSCRILSI

SEQ ID NO: 83061 - protein, 97 aa, Unknown
  Obtained from environmental sample
  misc_feature (1)..(97): Xaa is any amino acid
AFRLIWIQRGSGRTTAYLFESGRANYTYATDAERWGASKLLCEAEGIIPALESSHAVAYAVKNVPKMAVGSIVVVNLSGRGDKDMDSVAKFLEGRAK

SEQ ID NO: 83062 - protein, 106 aa, Unknown
  Obtained from environmental sample
  misc_feature (1)..(106): Xaa is any amino acid
MNTKSARTRSAKAKSAKVKGARSKPSGPGYFGRFGGTFAPETLMPALAEVREAYGAFRERRAWQAEYGRLLSHYCGRATPLYEAVNLGRRLGGQSRIFLQREDLNH

SEQ ID NO: 83063 - protein, 304 aa, Unknown
  Obtained from environmental sample
  DOMAIN (73)...(194): Response regulator receiver domain
  misc_feature (1)..(304): Xaa is any amino acid
MEQDNAVFRGGKRPPLALMTEWSTESFIPNVRFISIPIQSLSIANTLNGKSDRQDYFKVSGSTGAVRCTFPYARLLVVDDIATNLKVAEGLLSPYKVKVDTCLSGTEAIELVKQNKYDLIFMDHMMPEMDGIEATAAIRKLETKEESGKSGKQIPIIALTANAVVGMREMFIENGFNDFLSKPIDISKLDEILDHWISEKKQIANDKEQISNNKEQVINNKEQNLDFSIPGVNTAKGMLYTGGTLAGYKQILALFCKDAQDRLSLLQTMPAEGNFSRVTTHVHALKSASKSLGANDVSAKAPPL

SEQ ID NO: 83064 - protein, 323 aa, Unknown
  Obtained from environmental sample
  misc_feature (1)..(323): Xaa is any amino acid
FWPGIRSAESRTWLSLFTSQGIRVIAVKDIASFRFTDEKINADLDRALDLIMASRDESARNLLVTLNGTGSRDVSLSYVIPTPVWKVSYRLDISGKEPFLQGWAIVDNDSDADWKGVELSLVTGRPVSFIQRLYPPYRLSRPVVPLAIAGFAESRTYESGYNFGARAPEAAPMPSAAMRTQSMADTAAKAEMDYYYEKESAAVGSVAGGAMDTASGRAAGDQFEFTLKNPVTLDRRQSAMLPLVEGSIKAEKILIFSGARALGGATINPAISAELVNTSGMKLPAGPITVYEGGTYAGDALIEFFPENEKRLISYGGDLSGSG

SEQ ID NO: 83065 - protein, 247 aa, Unknown
  Obtained from environmental sample
  misc_feature (1)..(247): Xaa is any amino acid
LKIIADIHIHSPWSRATSSRLSPASLERWAGIKGIGLLGTGDCTHPRWIEELRDKLEDTEGGFYRLKEKARAEFDSGPALAEGLPKPGHSFQQKPDVHFVLTGEISTIYKKTGKTRKVHHVIVLPDFKAAAVFNAKLERLGNIRSDGRPILGLDSEDLLSLLLEADDRAMLIPAHIWTPWFSVLGAQSGFDSIDECYGSLTSHIPAIETGLSSNPPMNWALSGLDRYAIISIPTPIPGQTWQGSDHF

SEQ ID NO: 83066 - protein, 326 aa, Unknown
  Obtained from environmental sample
  misc_feature (1)..(326): Xaa is any amino acid
MLHTAGILPRINPPLDLKRLSFGELNTLPDEIRDLIVSTVAKNGGHLSSNLGVVELSIALHRVFNSPEDKIIWDVGHQCYAHKLLTGRYGSFSTLRKAGGIAGFPKKEESPHDAFNTGHASTSISAALGILAAQRLQNKKGHAIAVIGDGALTGGLAYEALSHAGQIGLPLIVILNDNKMSIDRNVGGLSKYLSRLSMKKYYQTFRRNFDAMARRIPFFGEMFFALVLRLKRAVKAVFYTDNFFVDLGFEYVGPIRGHQIKTLIEVLSDARKLGRPVVIHVITRKGKGYGYAEDDPGSYHGVGAFSVDDGIDETENFVESVMGGKS

SEQ ID NO: 83067 - protein, 200 aa, Unknown
  Obtained from environmental sample
  misc_feature (1)..(200): Xaa is any amino acid
MGKNQQDKVRFSIGNKLIIIISIIVILSLGSITALVSWMVREDLKIAAEESNFEANRRAAEEAEEMLTNMRAASAMLMYTINVLSSQQAAAQQVAAQQAAADFFFAQNTRAAAFTYTLKGAQQVAAQQTSVRNVLVNRDYFLSRDIEQSLAETYFNNNEKIMLRAAQGETSLLNATPVLTKPASALFFPYHPTGGQNRTG

SEQ ID NO: 83068 - protein, 106 aa, Unknown
  Obtained from environmental sample
  misc_feature (1)..(106): Xaa is any amino acid
MNNNKIQLFENKKVRSVWDAEKGEWFFSVVDVCGALTDQPTHNRARKYWSVLKTRLKSEGSELATNCSQLKNASIDGKPMKPTSSTPKASYALCNPFQPQSEHLNM

SEQ ID NO: 83069 - protein, 292 aa, Unknown
  Obtained from environmental sample
  misc_feature (1)..(292): Xaa is any amino acid
MGREVKAKPGTVLNAAAGNDGMALQISEGEAVIAEENQNLEISAGEAIAMDQSGSIRSGPAAFVIQPKPNALYRKSTDDPLNISFSWNRINLQPDETLRLEIAEDQSFSRSVRTFDELNDSAQAALNAGIWNWRLTYNGAVLDSGRFTITDSSGVELLSPARNRQFFYENELPKLYFQWSQVDDALHYIAEIDVTPEFRNPVIKRQTTAASFSDSSLGEGIWYWRVTPVFSQTGESGVNPHTAAFRIVKSNEPHTPSLLTFAEEPAPAPARPATTKRITLVSPSHGTILPGT

SEQ ID NO: 83070 - protein, 118 aa, Unknown
  Obtained from environmental sample
  DOMAIN (5)...(70): GHMP kinases C terminal
  misc_feature (1)..(118): Xaa is any amino acid
SRDIAFPESLRDLYEVSCPEIDWLVKRAQEQPGVLASRMTGQGFGGCTYTFIREDSVEEFKKRLEDYERIFGFHPVIYEMKLASGCRLVSGSVREKSEKKRPVHRPLEKTAAKRSAVR

SEQ ID NO: 83071 - protein, 166 aa, Unknown
  Obtained from environmental sample
  DOMAIN (25)...(160): ABC transporter
  misc_feature (1)..(166): Xaa is any amino acid
MLEVKALKKSYGDFSVSVDLSVGAGETLALVGPSGCGKTTTLNLIAGLIEPESGSTLIDGKDITRLPAWKRNISVVFQDLALFPHLDVGGNIAYGLFIRGVPKKERRLIVEQTLEIVRLQGYAVRRIDTLSGGERQRVAIARALASTPRRLYWMILFQVGPAPAKK

SEQ ID NO: 83072 - protein, 93 aa, Unknown
  Obtained from environmental sample
  misc_feature (1)..(93): Xaa is any amino acid
MPVIEMRGIKREYRMEGKKGSSSKDDADVVVVRALRGVDFSAEAGEFVSVMGPSGSGKSTLMNILGCLDKPKRGTYTLDGIETPNPILIPCLY

SEQ ID NO: 83073 - protein, 244 aa, Unknown
  Obtained from environmental sample
  DOMAIN (2)...(244): Prokaryotic protein of unknown function (DUF849)
  misc_feature (1)..(244): Xaa is any amino acid
MSNKLMLTCAITGAETTREQQPALPITPEEIAAGAFEAWEAGASILHLHVRLDDGTPTQDKAVFKKAIDLVRSKCDMVIETTTGGAVGMTPEERLQPVTLKPEMASLDCGTVNFGDDYIVNTLPIMREFAKAMKDNGVRPTLECFDLGHVYASQMLIKEGLLEEPYHYGLVLNVPGAAKYEVDVLDFMVRKLPKGAFWTAMGIGGKANLDAIYGALSLEGNVRVGFEDNIWYSKGRPRPNLSLV

SEQ ID NO: 83074 - protein, 328 aa, Unknown
  Obtained from environmental sample
  DOMAIN (199)...(320): Phosphoenolpyruvate-dependent sugar phosphotransferase system, EIIA 2
  misc_feature (1)..(328): Xaa is any amino acid
IASLPADGFYARGALRIGAGMVPRGEVALIIAGIGLASGILDQQIFAAVILMTLMTTLAAPPLLSATLKIAGVGTRRPVKGDDSVLLKWEFSSAEIADIVINTLLNDLRGEGFYVQVMNLDEGISQARKDDIVLSINEKDNFVTIETARADVPFVKTLVYEVIVELHDSIQKLKDSSDPKAMKKELLNKDGRTNEDLLALVCPECTSIELKGQTKPEIITELVDLLAIRHKLLDRDVVLADMFDREKTMSTGMTHGIALPHAKTEGVDELVVAVGIKKTGIDFESVDGEKSRLFIMAASQKRPQGRTCNSLRASALFWRYRDLRSGNY

SEQ ID NO: 83075 - protein, 328 aa, Unknown
  Obtained from environmental sample
  DOMAIN (74)...(97): 4Fe-4S binding domain
  misc_feature (1)..(328): Xaa is any amino acid
ESNLAAEFGVREAPFLKIKNDLPVDDSNPAIVLCPEKCIRCGRCVKVCQDVQNVWALEFLGRGIHGKIASAADAPLGESPCIKCGQCAAHCPVGAIYERDDTVKVWNALQDKEKHPVVQIAPAVRVALAEEFGLKPGTVFTKKIYAALRRLGFKTVFDTNFSADLTIMEEGSELVKRLTEKNSVIPLITSCCPAWVDYMEKYYNDMIPNFSTAKSPQQMMGAMIKAYWAEKAGVDPDKVYSVSVMPCTAKKWETKRNDDMKSAGHGYDVDIVITTRELARMIKQAGIEVLKLDEEEADNPLGPYTGSRNNFRGDGRSNGSRSPHAYYL

SEQ ID NO: 83076 - protein, 340 aa, Unknown
  Obtained from environmental sample
  DOMAIN (62)...(222): ATPase family associated with various cellular activities (AAA)
  misc_feature (1)..(340): Xaa is any amino acid
TAIQVGIPAFADQISQEEKPETDEADRQESPQSADAAEAGDPPASGTREKFRAMLREGKLEERTVELLVSQNPQFPPFEMMGVSMEDMESSLSGFANFFGGGKKKKVVTIARAREIIKAEELEKLIDRDRVSDEARQRVEETGIIFIDEIDKIAVKGERSGGPDVSREGVQRDILPIVEGATVSTKWGPVNTDHILFIAAGAFTVSKPSDLIPELQGRFPLRVELDSLGKDDFLRILTEPKNALTRQYTELLATEGIELKFAPEAIEQLAALAAEVNSKLENIGARRLHTIMEALLEELSFEAPDIAPAKVPITVEYVNKNLADIGKIRIGLGRSDHWGT

SEQ ID NO: 83077 - protein, 204 aa, Unknown
  Obtained from environmental sample
  misc_feature (1)..(204): Xaa is any amino acid
VETIQKGGGFNRWTKMGIGRSPYKQGDIKKTAYAITKQVGIKRVIEEVMPHDKYAEVKKLQETDLGTPHGEQRKQFSQETKRQRRFVAMVGDGINDAPALAQADIGIAIGSGTDVAMESADIVLMRSDLIDVPTAVNLSKRTIRTIKQNLFWAFGYNVMGIPIAAGILYLFGGPLLNPVFAAAAMSLSSVSVLTNALRLKRFRA

SEQ ID NO: 83078 - protein, 314 aa, Unknown
  Obtained from environmental sample
  misc_feature (1)..(314): Xaa is any amino acid
MREADERARVMLDATPICANLWSRDLHIVDCNQESVRLFELSDKQEYIDKFYALSTEYQPDGRLSSDKAMEYVKKAFEEGYYRFEWMHRKLNGDLIPCEITLVRVKYKDSYIVMGYTRDLREQKTMLANTEMMIKKQADAEAQMNQSKQSLNILTNILNGIDAQIYVVVPHTCEILFINDYMKKQFNLEGDCTGKLCYKLFLKDQNEICDFCPCYKLDKDPQGTVVWEMRNPLTNRIYRNTDRYIEWTDGKIAQIQHTVDITEIIEAKENAEKSSRFKSQFLSHMSHEIRTPMNGILGITEIQLPDETISNDMQ

SEQ ID NO: 83079 - protein, 188 aa, Unknown
  Obtained from environmental sample
  misc_feature (1)..(188): Xaa is any amino acid
MLSLHSKIRDVYAHPLGRDIVDKLLLEMGKPAWLVDNPIVGGLTLGTVKKLLPKSIGSGFLTTVLDLLNTEADTPDNNPVASQPAWWKEAVFYQIYPRSFGNNGTSCVLRGILSKLDYLRALGIDAVWLSPVYDSPYDDHGYDIRDYYKILPEYGTMGDMDALIAGLHERGMKLVMDLAVITHPTNTR

SEQ ID NO: 83080 - protein, 334 aa, Unknown
  Obtained from environmental sample
  DOMAIN (61)...(331): Bacterial DNA polymerase III alpha subunit
  misc_feature (1)..(334): Xaa is any amino acid
LLGPTRQIRESFSANGIPLVATNDVHYLNREDYIAHDILLCIGTAKFRTDEKRKKYYGDQFYFKTADEMTKLFADCPEAIENTVRIARRCVADVPKIGVKELTQYLPDFDIPPDFENADLYLRHLAGEGLAKRYAQEKTDGGIAWREITERCEYELDVIIQMGFTGYFLIVMDFINWAKEHNISVGPGRGSGAGSIVAYSLRITDIDPLKYGLLFERFLNPDRISMPDFDIDFANEGRDDVIDYVTTKYGEDRVGQIITFGTLGAKAVIKDVARTCRISLMKPKNRPAYPFQSGITLSRRLKETAICRDEVDPRYTSFLPCPATERMNRHSSLE

SEQ ID NO: 83081 - protein, 278 aa, Unknown
  Obtained from environmental sample
  misc_feature (1)..(278): Xaa is any amino acid
MTNKRVHFLSVPESLRGKIEGISQDCGFSINPDIPIPVEIPENDEKLNLEELNWEMIVSGMLHVISGGPGVYVPAENGEWIDYYRDFVLALRPNILGELMEAAILKARNYDFDPALEILEGLRGLFPASVVVKLNRALAMEERASLFERRGRPEAEAAFREAQAAYEEVLSIQPPFPEACFNAGFFYLGRKDFRSARECLSLYIEYSEDEEKQKQAHAIVKNITKTALKTRTPRGISVDLPGEKETGMLRIREFIEKHPFGMERLGYPRMGIAPAWPL

SEQ ID NO: 83082 - protein, 62 aa, Unknown
  Obtained from environmental sample
  misc_feature (1)..(62): Xaa is any amino acid
MERHPKGALSRIFDPFYSTFDAGTGLGLAVSHRIITAHDGLMHVESEEGKGTTVRLRLRAAE

SEQ ID NO: 83083 - protein, 277 aa, Unknown
  Obtained from environmental sample
  DOMAIN (84)...(277): RNB-like protein
  misc_feature (1)..(277): Xaa is any amino acid
MRKRSPLQEDRRFIQDIEALALGKSAKSRTMKEIGLGETPEEAHALLLECGFWNEQNNPHPARFGVSLQPAEHKPEAPPPEERRDLTRLAAYAIDSPWSSDPDDAISIELEEDRQILYVHVADPGSSIRMESPVEKEARDRGATLYIPETSIRMLADDSLPLFALGLAEMSPALTFKMTLNDTGEIEKTEIFPSTVKVKRLTYKEADEYLNNTHTDLQSLNVLAERNLKRRVALGAINIDMPETHISLNDGQVEIEPITRYKSADLVRECMLLAGGS

SEQ ID NO: 83084 - protein, 149 aa, Unknown
  Obtained from environmental sample
  misc_feature (1)..(149): Xaa is any amino acid
MRHKSKSLFSASESLLFAAIALILSFAHIAPVTAQQHEDRAAVRAILDKNGMKDMKVDDVVEFSRDGRVIVLNLNRRGISGVGIGVFPPEIFRLTALRGLFLRGNSLKEIPQEIGSLTELIELNIADNTDLGKLPPGSSADLINGGGEA

SEQ ID NO: 83085 - protein, 280 aa, Unknown
  Obtained from environmental sample
  DOMAIN (139)...(216): Mur ligase family, glutamate ligase domain
  misc_feature (1)..(280): Xaa is any amino acid
MKDHQDKYGGMEAYVDDKRVIYRGQDENDVTVAADDAWGRSFLSESRGRSVPYSAKPLVGGTPGGWIADPQGPGLARLWEIPGKGKMAEKGRVVEVVPARPLIPGFHQKQNLLIAALSLLDLGLNADFIRESLGRFPGIEHRLEYFHESGGVRFYNDSAATIPEAAAAALSAFEKPPVLVTGGTDKELDFTPLALAVVKARALVLLAGTGSEKLKTLLDSGGVKYRGPFDSLAGAISAAGEAAAPGDAVVLSPGCASFGNVSHEFDRGRKWKEGVKKIFP

SEQ ID NO: 83086 - protein, 89 aa, Unknown
  Obtained from environmental sample
  misc_feature (1)..(89): Xaa is any amino acid
AYGRGNELGNCYSEKTSAEEVRAFFESEKAIKEKEALVPHKTDDDYWKICSSKEKPFPECSGAALGLDRLIMLLTGHQTIDGVLPFPAF

SEQ ID NO: 83087 - protein, 288 aa, Unknown
  Obtained from environmental sample
  DOMAIN (47)...(288): Glycosyl hydrolase family 10
  misc_feature (1)..(288): Xaa is any amino acid
MDIALEYGFSYEQAYILSVRREFGFTPGDLRRNRHLVKTTPSLLPFVKKAINKNDFLVGNIINDKYMDGTYFDMIKNNFNVITPEDGLKPISLTSNRGGAYNWTYADQMVSRMLENGIPVHGHVLVWHDWTPEWMTRGTKTEVEDNLKNHITNVLTHYHGRINSWDVVNEAMRDGLSPAETAGDWRKCLRTDAPWYRALGAGYIETAFRTAREADPGITLYYNDYGLEFPQKAEATRKMINDINNRYKKETGQDRNLIEGLGIQAHYQIKSFEKIDLGRSDACPPRRQ

SEQ ID NO: 83088 - protein, 321 aa, Unknown
  Obtained from environmental sample
  misc_feature (1)..(321): Xaa is any amino acid
VVWPTALRLLPADRGQSAGVSGGDAKILPTAYLREYDPITVFFDKDAVPGETGPIDAPGQLLSITPAHPGEFVKIDGRTLEFRPAAPWEPLKRYKVVSRKNTRELFTLLPDPESVFCGQVGGGDDIPIGKTKRSASEEEYEESYDSYDSDDDDDGYRSYRRYSGNDDDGRWKPKVNLASTRHLADAEPVKWVGFVFSSKVDAGGLSRLISVETCPLPGVDSRGCRVLRQSEYRVREDILGAKSFAYRVMFNEPIGYGQRVKIKLGFADKAEFKGAQETYIIETKPEFTLEKAGAPGQMYTINTNGAAYDARQAVKLDENRF

SEQ ID NO: 83089 - protein, 90 aa, Unknown
  Obtained from environmental sample
  DOMAIN (4)...(79): Bacterial export proteins, family 3
  misc_feature (1)..(90): Xaa is any amino acid
MSIGEVTALLRQGILEVLIIAAPLLLSALTVGLIVAILQATTSIQEQTLTFVPKIIAILLVLAFLGGWMFSSLREYTTELFGRVRTWRGN

SEQ ID NO: 83090 - protein, 66 aa, Unknown
  Obtained from environmental sample
  DOMAIN (7)...(63): Phd_YefM
  misc_feature (1)..(66): Xaa is any amino acid
MAVNLAADIKPISYIKTNAADMMKYVTDRRNPIIITQNGEAKAVLVDIQTYQETQDAFAYSRPICP

SEQ ID NO: 83091 - protein, 127 aa, Unknown
  Obtained from environmental sample
  DOMAIN (5)...(76): Preprotein translocase SecG subunit
  misc_feature (1)..(127): Xaa is any amino acid
MAILSTVLLVFFVIIAVLLVLLVLVQNEEGDSLGGIFAGGSGSAFGSRSGNVLTRATTVLGSLFLIVSLGLALLNRTPGGSGVEAAGPELFGEAAASNWLDDELNTQSPSVQENLLFIQNLKTKPRK

SEQ ID NO: 83092 - protein, 85 aa, Unknown
  Obtained from environmental sample
  misc_feature (1)..(85): Xaa is any amino acid
MIIYHGSDTPVKIPKILISNRLLDFGEGFYTTSSLEQAQRWAKRVREVRKTEEQIVSIYEFDRDKAEKLLKIIKFDSPGREWLQF

SEQ ID NO: 83093 - protein, 147 aa, Unknown
  Obtained from environmental sample
  DOMAIN (100)...(116): KWG Leptospira
  misc_feature (1)..(147): Xaa is any amino acid
LVDKDGNEVIPLIYEFSYGYSEGLIGMMLNGKWGFLDGGGKVVIPFEWDDAEHFSEGLAYVGLDGKCGYIDKTGKVVIPLIYDFAGAFSEGLANVELDGEYGFIDKSGKEVIPLMYDFAQGFPAAKPASCWTASGSAAVHQGGGETG

SEQ ID NO: 83094 - protein, 87 aa, Unknown
  Obtained from environmental sample
  misc_feature (1)..(87): Xaa is any amino acid
MPAIRPSADLRNKYNEISELCHEYSEPVFITKNGTGDLAVMSIDTYEALAGRLELYTLIDEGLTQVKARTSQTYERDNKVYSRKNKK

SEQ ID NO: 83095 - protein, 306 aa, Unknown
  Obtained from environmental sample
  DOMAIN (3)...(306): tRNA synthetases class II (D, K and N)
  misc_feature (1)..(306): Xaa is any amino acid
LRTIAHLRPRTNKYGAAFRIRSEAAWAVHDFFRGEGFHYVHTPILTGSDCEGAGEMFRVSTLPPDAGLTPSGNRFAGDFFGKECSLTVSGQLEAEAMAMGLGKVYTFGPTFRAEHSNTPRHAAEFWMIEPEAAFADLVDNMDLGEGLVRHVTRHILSRCGPDVELFDRFVSPGLIADLQTLESKAFVRIPYREAVDVLGKCGKQFEYPAAFGADLQTEHERFLTEEHFHAPVTVYDYPKTIKAFYMYLNDDHETVSAMDLLAPRIGELIGGSRREDRLDVLEKRLAELGRNLEDYWWYLDLRRFGS

SEQ ID NO: 83096 - protein, 62 aa, Unknown
  Obtained from environmental sample
  misc_feature (1)..(62): Xaa is any amino acid
MALFTWVKSAAQSVYQGVILEDICKMALFTVSIDPKAKRLPEHIIRKHWERKHGPNAYYGQK

SEQ ID NO: 83097 - protein, 273 aa, Unknown
  Obtained from environmental sample
  misc_feature (1)..(273): Xaa is any amino acid
SIVFHSRQEKNGNSPRIAQTASEQENGIYALGKTRRTLNFLRTGEYEDGTLGEIFLDMHKEGAAFRSLLNSFAITVSLGLQYGVPLEEYVDAFTFSRFEPNGMVQGHDYVKMATSVIDYVFRDLAISYLKRSDLGQVKPEDLVATATKNEIDVPEGKQRAEKQEKQAAGFRPNATVVASPAPAPQAGRQIKGGNQGSVTKAAVFSSPAYAEQPQTQTAVLEESYPEESEVIKIVQARIKGYEGDPCSSCGSFTLVRNGTCMKCDTCGGTTGCS

SEQ ID NO: 83098 - protein, 64 aa, Unknown
  Obtained from environmental sample
  misc_feature (1)..(64): Xaa is any amino acid
MGIINVKKINGGVCAPKGFVSGGVHCGIRAKSKKLDLALLYSEKPCVAAAMFTTNIVKIRLRLW

SEQ ID NO: 83099 - protein, 280 aa, Unknown
  Obtained from environmental sample
  misc_feature (1)..(280): Xaa is any amino acid
VDILPALPGFALTAEGAGFTNVEIDIDGTRRRIDLAQNIHDHWYLQLAFSPLVHFLGNPEIELNNRKLLMKNAKIPGGIVKDISIPLDGHGRMLLDWPKEDYAESYSHISFYDFSLLEDIEAELDYYGRAISSFDIYDFARIDNSLMRIPFIANDLSDLFEAVGNYRNAALENCSDDYFEAFVDFRREARELIRELLDIDPITKISNAAQEMIALFPGSADLILDEAEYEISVLNNISINLEDMKQLERGLKHSKDRFCIWGRVIRGVTTMAQTHFMASI

SEQ ID NO: 83100 - protein, 135 aa, Unknown
  Obtained from environmental sample
  misc_feature (1)..(135): Xaa is any amino acid
MAVSTAKPVSNKKKSEEISDAELSQRVAVIKRFKELLKTQRDRFQTYLEALDKQKDVIQSGTTDDLLRHVELEDKIVADIFSIQRVIDPLEEMYQSVRVKVPPRLIKPTRKGHLTNVRGRESISLREPWTSKAEA

SEQ ID NO: 83101 - protein, 169 aa, Unknown
  Obtained from environmental sample
  misc_feature (1)..(169): Xaa is any amino acid
RFGRVAVVAEEIRKLAESSSDQSKTISAVLKKIKTSIDKVSASTGTTLTRFEVIDSGVKTVSEQEENIRSAMEEQNEGSKYILEAVGKLNEITRQVKEESSEMLNGSREVIQESRNLDHVTQEITGGINEMAAGAEQVNKAVNRINEISAQNRENINHLVKEVSLFKVD

SEQ ID NO: 83102 - protein, 306 aa, Unknown
  Obtained from environmental sample
  DOMAIN (163)...(306): Domain of unknown function (DUF323)
  misc_feature (1)..(306): Xaa is any amino acid
MLDELNDAGNALNVVVLDACRDNPFSWKRSGSRGLTVVANQPADSIIVYATSAGSTAADGTGRNGLFTSHLLNNLKTPGLEVKEVFNRTGADVARASNRTQIPAIYSQYFDTAYLGSKPQVATVHTTQPSQTTQPQQTTTQPAQTTQPQQTTQTTTTQQTASVPANMVRIQGGTFTMGSPSNEPGRFSAEGPQHQVTVSSFYMGKYEVTQKEYQEIMGTNPSYSKGDNLPVERVSWFDAIEYCNKRSQTGGLTPAYSISGTGDNRTVTWNRNAHGYRLPTEAEWEYACRAGSTTPFSTGNTSQQVR

SEQ ID NO: 83103 - protein, 93 aa, Unknown
  Obtained from environmental sample
  DOMAIN (8)...(71): Bacterial flagellin C-terminus
  misc_feature (1)..(93): Xaa is any amino acid
VGRRHGDRDCEHALQKVSHQRSLLGALQNRLEHTIKNLDTAAENLQAAESRIRDVDMAKEVMEFTRTNILQQASQAMLAQANQQPQSVLQLLR

SEQ ID NO: 83104 - protein, 318 aa, Unknown
  Obtained from environmental sample
  DOMAIN (109)...(318): Domain of unknown function (DUF323)
  misc_feature (1)..(318): Xaa is any amino acid
KSHNKKFVEEARECKRRNRYTGNSVINSNIIKVDPFVDWPAGLRGISGQKLKTVTMPCNHTDTVNGEFTWTKPDTLLGNLKKQSCNLTFTPDDTLHYNIVTKDVEISVIALNMARIPAGTFLMGTTVNDRFYTDDEGPQHQVTLDGFYMSEYLVTQELYEVVMNNNPSEHTSPVIGENKTPAQFPVESVRWYDALMFCNKLSKMMGLTPAYRIPAFNNSTDPLDWGKAPIKSTDPNLPLWDAVEIVPGSNGYRLPTEAQWEYACRAGTTTAYYTGDVIDYDITGWCNDGIWGRPPRDIILHRVGMLPASADSDHGGPG

SEQ ID NO: 83105 - protein, 179 aa, Unknown
  Obtained from environmental sample
  DOMAIN (17)...(140): Uncharacterized BCR, COG1699
  misc_feature (1)..(179): Xaa is any amino acid
MKVDTKAFGLIEVDDRQKIKIPEGLYGFEDYIEYVLLDAEQQPYFLLQSVKERDIAFILINPFLFRPDYEVNIPNEDLEDIGLKTPENALIFSIVTIPPDGSAMTANLQGPLIINRDNMTGKQWIQSDVRWKTRHDIVAELKKRGEIIMLILSRKVNEKVVSWRRYNHSKSGDKGGGGR

SEQ ID NO: 83106 - protein, 329 aa, Unknown
  Obtained from environmental sample
  misc_feature (1)..(329): Xaa is any amino acid
LQKTKSSLYQSSGIKDKLEDWIKKASIDGFWAHNAIQMTQAWMRDGLKERAITRDLKWGIPVPKPGYENKVFYVWFDAPIGYISITGTLGEEKGNWRDFVNYWWKSPNDVELFQFIGKDNIPFHTVIFPSSLLGSGEKWTMLHHMSSTEYLNYENGKFSKSRGIGVFGTDAKETGIPADVWRFYVYYNRPEKSDAMFTWSDFQEKVNGELIGNLGNLVNRTLSFVTRYYDGVIPEGKSDGAFWAEAVKREKSITEKLDRAELRDAFREIFELSSFANKYFQDNEPWRLRNDDPEKAKAVIRDLTYIVRDFSVLIEPICRKRLGHHPGEK

SEQ ID NO: 83107 - protein, 282 aa, Unknown
  Obtained from environmental sample
  DOMAIN (211)...(281): OB-fold nucleic acid binding domain
  misc_feature (1)..(282): Xaa is any amino acid
MEKAIEYAQKGKEDKLLGQSNLFGDSNEADMPDFIFTEFPPISRAERLNQEKQLIGFYFSGHPLDEYRQLWEKAVKADLAHPETIQPGNHILIGIIKNIRTINSKSGKMAYATLEDYNGEIDVTFFSKTWDACENKAENDKVAILKGKIEYQRNKDKYGFIVDSWIDVKEAQTAIEEEKALQKKREKFRNVWLYMADLKSGGLAKTEKGSYTVIGQLISLRESQDKNGDDMAFGTLQDFEGNIDLVFWAKTWKESRELLNPGEFVALKGSLDPQRLGRSVVS

SEQ ID NO: 83108 - protein, 314 aa, Unknown
  Obtained from environmental sample
  DOMAIN (16)...(294): Type II/IV secretion system protein
  misc_feature (1)..(314): Xaa is any amino acid
MDRIGRALEAAKTVSEASANYIVPIQQLLKAMVEFGGTDLHITTDSPPLVRIDGSLVPLKLPPLDAAQSRWLCYGVMTDMQRLRFESDMEVDFSFSINGVSRFRANVYSQRGSTAGTFRAIPEKIRTMDELGLPQAVQALCDRPRGLVLVTGVTGSGKSTTLAAMIDKINSSEHGHILTIEDPVEYVHQHKKSLVNQREIHSDTSSFKKALRSALRQDPDVVMIGEMRDLETVESALTIAETGHLAFATLHTNSAIQTINRIIDVFPAHQQQQIRAQLSLVLEGIICQNLVPKSSGKGRVVAMEILVPTPAIRN

SEQ ID NO: 83109 - protein, 268 aa, Unknown
  Obtained from environmental sample
  DOMAIN (16)...(236): Methyl-accepting chemotaxis protein (MCP) signaling domain
  misc_feature (1)..(268): Xaa is any amino acid
MEQVINNINKLNGHVENQSRNVSQASSAIEEMVANISSVTNTLINNSANVKTLREASDVRKNGLQAVATDIQEISRESEGLLEINSLMENIASQTNLLSMNAAIEAAHAGESRKGFAVVADEIRKLAESSTAQSKTIGTVLKKISQSIKKITVSTENVLKKFDAIDSSVRTVSDQEENIRNAMEEQGEGSKQVLNAHSSLSELTQQVKSTSEEMLEGITEVMKETRNLEKVTQEITSGMNQMASGPKQVNIAVHQVNENKRPKTAKSI

SEQ ID NO: 83110 - protein, 325 aa, Unknown
  Obtained from environmental sample
  misc_feature (1)..(325): Xaa is any amino acid
ETHDRLAEGYRVPQTGYGSPSSYNPGSNFQVVNEASGAEMFSGAPAAFNGGQTDTASGDKIWHFDFSSVKTPGRYYILDKTNNLRSFSFSIANDVYNNVLKAAIKMLYYQRAGTDKPSQYAGQSWADGLNFQQDKQTRDFFKKNDASTERDLSGGWFDAGDYNKYTKWTTDYVENLLLAYEENPEAFADDYGIPESSNGVPDILDEVKWGIAWLLKMQNTDGSVLSVQGLSDGSPPSSVTKASYYGPANAVASYGTAKAFAIASRIFGKRGETEYASNLKNAAIKAWTWAEAHKDSIFHNNCGESWKQSDCPNYAIRGLAARDKR

SEQ ID NO: 83111 - protein, 94 aa, Unknown
  Obtained from environmental sample
  misc_feature (1)..(94): Xaa is any amino acid
MIVMKFGGSSVADATRLRHVAEIIKLYIKRKPVLILSAMGDTTDHLLDAGDMALKQGKVDIKNVEKLHLATIKTLKLPIQKEIKVSLGRSDLDF

SEQ ID NO: 83112 - protein, 297 aa, Unknown
  Obtained from environmental sample
  DOMAIN (19)...(96): Helicase conserved C-terminal domain
  misc_feature (1)..(297): Xaa is any amino acid
VFFLHNRIETLRETRQKLERLVPEMLIETAHGQMDAFELEDIMRRFIHGGFHVLVSTTIIENGIDIPNVNTIIIDRADKYGVSQLYQLRGRVGRSDRTAYAYLFYPESKSLSEIAMKRLQTISDFTELGSGFKIAMKDMEIRGAGNILGKEQSGDIYSVGFDLYVKLLDEAVRRLEDSSYEAETETLMELEYSGFIPDSYIDSPQRKMEIYKMIAAVREKDELERVYSELIDRFGPLPNEAASLLALAEIRIICRELAVSSIKERSGIVRIEFAKVARVKVKPFTPRPLGRSDQWAS

SEQ ID NO: 83113 - protein, 297 aa, Unknown
  Obtained from environmental sample
  DOMAIN (68)...(272): Lon protease (S16) C-terminal proteolytic domain
  misc_feature (1)..(297): Xaa is any amino acid
GPEKGLCQGKNNFQRRGILGDHRALDKESGVRSLEREIARCVRRVAKAAVNKEYGKSADKPIENFRKNIDREDLEKLLGRRKYKNDVVFKEARIGVSYGLAWTETGGTMLPVETICFEGRGESIITGNLGDVMKESARIAISYLRSVRDRCKFLVKDMSATDFHIHVPEGAIPKDGPSAGITLAVSLLSTLCQVPPKPGYAMTGELTLTGRILPIGGLKEKLLAAIRNGMEEVLLPADNKEDWEELNEDIKKSLKVNFVDNAWEAFGILFPKEILRRARKKPVIKKKVSKSASGKKK

SEQ ID NO: 83114 - protein, 264 aa, Unknown
  Obtained from environmental sample
  DOMAIN (1)...(189): ATP-dependent protease La (LON) domain
  misc_feature (1)..(264): Xaa is any amino acid
MISIFITYKSGIAAIEEALKRDLRLFAVCLKSAETAASDQKTEETWDAGTVVRIVQNLRLPDNTFRVVLQGEYRALLTSLHPKNDFNLASIDPIKAENPDPPAREKSEERTQEIAGLMRAVQKSFAQYAEFTKKIGTEILSAVEKTENPEKLVNIIANAMSIKAERKISLIRIADPASRLEKLLETLELENEIFGIQKNISGKVKSRMDKNQRDYILHEQLKEINRELGKDTTEDEFGDLEHSIEERRPSEGVLTKGRKGNGRA

SEQ ID NO: 83115 - protein, 76 aa, Unknown
  Obtained from environmental sample
  DOMAIN (7)...(76): Domain of unknown function DUF143
  misc_feature (1)..(76): Xaa is any amino acid
MEGMSPETEALALGDLLRDHRGADVLVLDLREMNAWTDFFVIATSSSDTHMDGLDRHIKDFAMSAESISRRPRHNG

SEQ ID NO: 83116 - protein, 144 aa, Unknown
  Obtained from environmental sample
  DOMAIN (10)...(64): Helix-turn-helix
  misc_feature (1)..(144): Xaa is any amino acid
MEAHTPGDRIAEIRKTYSISKEDLAERSGVSVELISKIEDSGHIPDLAPLIKISRGLGVRLGTLLDDEEQLGPVICRAGQAASAIRFKTGLPEGASEGDHHGVNFNALAADKGGRHMEPFVVTIDADAKQEKSSHEGEEFIFCL

SEQ ID NO: 83117 - protein, 209 aa, Unknown
  Obtained from environmental sample
  DOMAIN (23)...(162): AzlC protein
  misc_feature (1)..(209): Xaa is any amino acid
MKDNTSPGFSCKSILFDAFKYSIPVLLGYLTLGIAFGLVATGTGYPWWLAFSMSLWMYAGAGQFFAIGLFAAGTTIWEACLIQLVLNIRHAAYSFSMLNKFSASFKPYLIFSLSDETFALFSSMADLPEEKKRLFMAYVAVLDQSYWVGGTLLGAIAGAVIPFDMKGISFALTALFVVLMMEQIKRVKRPGVFIVSAAAALLGVFLLPG

SEQ ID NO: 83118 - protein, 140 aa, Unknown
  Obtained from environmental sample
  misc_feature (1)..(140): Xaa is any amino acid
MKNDVRSALYEGYTDPIRDALWGHIYLTPALSALTESPPFMRLQRIMQLGPTLRVYPGATHNRASHSIGVYHLARRLLVHLAEEGADSWLSPEGIKSFLCAALLHDLGHFPYTHSLKELPSEDHEILTGRLILSEPGKSL

SEQ ID NO: 83119 - protein, 97 aa, Unknown
  Obtained from environmental sample
  misc_feature (1)..(97): Xaa is any amino acid
IGEVAKGSKDIARMAGQANLGAKRVSEAVGEIAKGSKDIAKNAASAAKGTADASNGAASVNQIANDSTKGAHQVDKYAGELAKVAGSLKGVVNQFRV

SEQ ID NO: 83120 - protein, 116 aa, Unknown
  Obtained from environmental sample
  DOMAIN (34)...(115): Imidazoleglycerol-phosphate dehydratase
  misc_feature (1)..(116): Xaa is any amino acid
MSRTAEIGRKTKETEILIKLNIDGKGDAKLEYPVGFMSHMLNTFARHGLFDIEVTAKGDLEVDQHHLVEDTGIVLGQCFAKALGEKRGIKRSGDCLFPMDEALARRALIFQAALFC

SEQ ID NO: 83121 - protein, 201 aa, Unknown
  Obtained from environmental sample
  misc_feature (1)..(201): Xaa is any amino acid
MKGIYAFQGKEPLVGKDVFIAPGARVIGEVELSDDVSIFHNAVLRGDINSIKVGKNSNIQDNSTVHLASDKGVVIGEGVTVGHNAIIHACTVEDYCIIGMGACVMDGAVIGHHSIVGACALVTSGKEFPPYSLITGSPARKVRDLTEDEIKHCEWSAKKYVEVKNNFLEKNSIIFKNLHSCLPSHKLQLGRFCTWGGGGLG

SEQ ID NO: 83122 - protein, 103 aa, Unknown
  Obtained from environmental sample
  DOMAIN (2)...(94): Biopolymer transport protein ExbD/TolR
  misc_feature (1)..(103): Xaa is any amino acid
MSQGIKVDLPNAEAPTIEQKKMLKISIDKREKISIEDMEVPINDFDEIFKSLWKDEMPVVINADSSVHYGIVMKVVSLVQVAGVKQLGFLTLDKDEKKQKRKR

SEQ ID NO: 83123 - protein, 280 aa, Unknown
  Obtained from environmental sample
  DOMAIN (11)...(76): His Kinase A (phosphoacceptor) domain
  misc_feature (1)..(280): Xaa is any amino acid
MEEQALSASRAKSAFLANMSHEIRTPINAIIGMTTIGKSAAALERKNYCFTKIENASQHLLGVINDILDMSKIEANKFELSPEKFDFEKIIKSVVNVVNFRVDEKRQKLTVNIDDAIPRVLIADDQRLMQVITNILGNAVKFTPEKGSIRLDAKFAGEENGLCTIEVSISDTGIGISREQQELLFSSFQQAEITTSRRFGGTGLGLSISKNIIEMMGGKISVKSSPGKGSVFIFTIQAKNGVPANNPTENLQGAEYTAKEEKQVLAALFAGRRILLAEDM

SEQ ID NO: 83124 - protein, 312 aa, Unknown
  Obtained from environmental sample
  DOMAIN (11)...(227): Amidohydrolase family
  misc_feature (1)..(312): Xaa is any amino acid
MDKFDFEKDRGVIENREVLSQFKGNLSASSKGDGRLILDAGIHAEYTSGPQAWQKCAAFAAENNLRIHIHLSETETEHEACIKKYGKTPAAILHENGVFSRKVTAAHCCWISDDDMDILAANGATVAHCPVSNLKLSAGLARVTKMRERGINVALGTDGVCSNNNHDLFEEIKTAALLQKYLTKDPTALPAYEAIKLATVNGAIGQGRENETGKIAPGYDADMIMLNLDAPHLFPLNEPCSAVAYSARGGDVCLTMVQGKILYENGEFKHSTLKKSLTKVTLRHPPAEIGNHGKKYITAGKHRIHRHWRSGR

SEQ ID NO: 83125 - protein, 229 aa, Unknown
  Obtained from environmental sample
  DOMAIN (5)...(217): Bacitracin resistance protein BacA
  misc_feature (1)..(229): Xaa is any amino acid
MNIINAIILGIVQGLTEFLPVSSSGHLVLLQKIFKIDEPSLFFDTMLHVGTLIAVMTVLWKDIFEILKKPIQKLTGFIILATIPAVIAALLFKDAIEDIFKSGKLLGVCFLITATLLVAAEILSRRNKNENHAGEGRDGNGVKMNWLHALFIGVMQALAIPPGISRSGATISGSLFCKLDRDFAARFSFLMSIPAILGAVVMQTKDLVNMARRKVPVWDSASADLIIGW

SEQ ID NO: 83126 - protein, 182 aa, Unknown
  Obtained from environmental sample
  misc_feature (1)..(182): Xaa is any amino acid
MVFILNSNAPKEKIDKFISDWESKGFSTIYSVGTEHTAVCLIGNTAEVDMDHIVQTNEIVSYGKRITEQYKAVNRSVHEASTIIRVGGAVVGEGHFTVISGPCSVESNEQISEIARSVKESGAKILRGGAFKPRTSPYAFQGRQEEGLEMLRAAKKETGLPVSQKLEPDADRSSADLIIGGP

SEQ ID NO: 83127 - protein, 103 aa, Unknown
  Obtained from environmental sample
  misc_feature (1)..(103): Xaa is any amino acid
MGMAVAQQMVQSMNYAMQDMHIPGAGNRMLPPQKPDRVYYAVLENKQAGPFSETELVRLINDKKVSKETYVWHVGLSEWKTVENVPEILRLVALAPPLIGETI

SEQ ID NO: 83128 - protein, 303 aa, Unknown
  Obtained from environmental sample
  DOMAIN (97)...(280): Binding-protein-dependent transport system inner membrane component
  misc_feature (1)..(303): Xaa is any amino acid
LGGKDLAIEVFRFNDIFKRYSEEEFGDNYEKLPEKLGEVISSTPGIIAFIPQQYMPSSMPKVKKLQDEKIGVADFFGGTEWIPTSVPSPQFGVLPLVLGTLWVSLIAILIALPLGLGVAVYLSELANEGTRKILKPAVELLAGIPSVVYGFFGLVVLVPLVQRAFNLPVGETAFTGSLVLAIMALPTIITVAEDAMRSTPSAMREASLALGATHWQTIYKVIIPYASSGISAAVILGIGRAVGETMAVLMVTGNAAVIPTSLVCANSHHSGSHSRRTRRSTRRRGALSGFVMLGCLLFKIPLG

SEQ ID NO: 83129 - protein, 142 aa, Unknown
  Obtained from environmental sample
  misc_feature (1)..(142): Xaa is any amino acid
MISLIEDLYQNKDLPDTQLKKIIESNENEQELFKKADSVRREYYGTDVYIRGLIEFTNYCKNNCYYCGIRKDNKKVKRYRLNKDEILSCCEQGYALGFRTFVLQGGEDSAFSDDLICDIVSEIKKLYPLMRATLSLGEKSFD

SEQ ID NO: 83130 - protein, 192 aa, Unknown
  Obtained from environmental sample
  DOMAIN (13)...(191): Binding-protein-dependent transport system inner membrane component
  misc_feature (1)..(192): Xaa is any amino acid
KEFPPPLWPRTIFRRHNRHNTNGALTRKLSWLVPLYAARVTLSAIIGQRFSNIIIILGLTSWPGTARLVRSQTLTIKQRNYVERARSLGASSAYIMFRHILPNIFPLIFSEIILLVQNAIIAESTLAFLGIGDPSIPTWGQLLRSAREQGSILVGSWWLFVPAGICIFLLASSFVFISYGFDEILNPKLRKR

SEQ ID NO: 83131 - protein, 80 aa, Unknown
  Obtained from environmental sample
  DOMAIN (26)...(80): ANTAR domain
  misc_feature (1)..(80): Xaa is any amino acid
MAMKIFWHILKLAIDTQIILQEMQKENRELRLKIEDIRIIDRAKCVLISRLNLSEEEAHRAIEKQAMDMRTPKRAIAEGI

SEQ ID NO: 83132 - protein, 294 aa, Unknown
  Obtained from environmental sample
  misc_feature (1)..(294): Xaa is any amino acid
MPKIEVNEKVFYALASPNGKPWADKDAFEEALTCAKAELDEDSDKSLPESERVLKIELNDTNRPDLWGTAGCARQLRVYNGGKMPEYPFFSRVGNIQKAAHKVKVEQSVQKVRPYLAGFIASGKAISDPALRDMIQTQEKLAWNFGRKRRTISMGLYRIARINWPIIYKGVDPDSVSFVPLQWETSLTLREILKQHPKGKEYAFIQEHEPIHPLLTDSKGGVLSYPPIINSADLGAVQVGDTDIFVELTGTDISLVTLAASIVACDLADNGFKMSRWKVNMNLTRPFGRNVVYP

SEQ ID NO: 83133 - protein, 314 aa, Unknown
  Obtained from environmental sample
  DOMAIN (3)...(305): Protein of unknown function (DUF1015)
  misc_feature (1)..(314): Xaa is any amino acid
LDSGVFAAPRRGFVYLERDTPFNRGRRGLVAAVDLERYSWSPGARPLIRPTEGTVPERLPPRMDIRRNAPLETPHILLLIDDDTDSLLRGLGERAKKATPAYQGELMLNSGSVNGWFLDKEDDWSFLAGGLEELARRALTRYSAGEQPESAAQPGFVTQPFLFAVGDGNHSLASAKGIWEEHRSGANLSAPRSDKIRSRYALVEIENIYDPAIQFEPIHRVVFGVDFDGALNLLSALPAYSSRIISGREELVRLTAEPVKGNRFGIVCGSRYAIVETSAGGIATASLQPLLDGAVTGDGLSIDYIHGEEDCSAL

SEQ ID NO: 83134 - protein, 298 aa, Unknown
  Obtained from environmental sample
  DOMAIN (15)...(149): FtsH Extracellular
  misc_feature (1)..(298): Xaa is any amino acid
LFIAFFFKGSSAQVREIPYSDFNRFLEQNQIESVVIHENSVMDIFLKGASAKDGAQLRTRIPYDDPNLLPGLREKNIVFSGAPVKFTPLRLLFDILPWIIVFAILILILRNMQGAGARTFHFGKSRAKRYHDEGKKVSFTDVAGQKDAKFELEEVVEFLKNPQKFTKMGARIPKGVLLVGMPGTGKTLMARSVAGEAGVAFFHMSGSDFVEMFVGVGASRVRDLFEQGRKNAPCIIFIDELDAVGRTRGAGYGGGHDEREQTLNQLLVEMDGFDSKDGVIILAATKPSGRTGSGPYSA

SEQ ID NO: 83135 - protein, 182 aa, Unknown
  Obtained from environmental sample
  DOMAIN (1)...(182): Fumarase C-terminus
  misc_feature (1)..(182): Xaa is any amino acid
MRLDFNEQRKGRIMQSKPPIKLTFPLANKEMLAPLRAGDRIRLSGTVYTARDAAHKRFMTLLEKGRPLPVNLENQALYYCGPTPPTKTSVIGSAGPTTSSRMDIYTPDILRKTGLAAMIGKGDRGPAVIEAIKECGAVYMAAIGGAGALISSCITSSKVICYEELGTEAVYKFLGHQSGGEK

SEQ ID NO: 83136 - protein, 296 aa, Unknown
  Obtained from environmental sample
  misc_feature (1)..(296): Xaa is any amino acid
VRYLLDYPYGCLEQKTAQLLPLVAFADRLETFELDSPVTNPRKVIEDELALLAKSQLPDGSFPYWPGGQYGDQYVTLRVAHIAALAKQKGYEFPAAMNTQTLTKYITENDFSSTVFKEDPFLKGYSLWVRAMYGARIGTEISAFLRRGDELGISGWGFAGLAAMELGLRDLAVSTRDRVRRFIRPGTRTLDLSDTYERVGNFWGYDSDRYAIALMLYYALSPADDMTTRLVNSLIERQRRGIWNNTSSSFWAVLAFSKIADGEENEFSAEPERRGSLRHKPARSIPGFSLGGTMLS

SEQ ID NO: 83137 - protein, 183 aa, Unknown
  Obtained from environmental sample
  DOMAIN (25)...(179): ABC transporter
  misc_feature (1)..(183): Xaa is any amino acid
MLEVNTLKKTYGDFSISLDLSVGAGETLTLAGPSGCGKTTALNLIAGLIEPESGSINIDGEDITRLPAWKRNISVVFQDPALFPHLDVGGNIAYGLFIKGVPKKERRLIVEQTLEIVRLQGYAQRRIDTLSGGERQRVAIARALASNPRLLLLDEPFSSLERAFAKNSPPDFSRPSDHGGGEK

SEQ ID NO: 83138 - protein, 311 aa, Unknown
  Obtained from environmental sample
  DOMAIN (77)...(120): LysM domain
  misc_feature (1)..(311): Xaa is any amino acid
MRPDALCKALGINEDEFKTLNPSIRPVLFSQKKPIPAGYNVNVPNRITSETALAALNRAPLPMRATQKEAAESEGYYTIVSGDNLAGIAKRLGVQMSDLAAVNNITKSSKLQVGQVLLIPSGGESGSALGATITASKSAPKAGAADTVKAAAVIASKPASKQTKAAAVDTVKKVALIDTASVAPVDTAKKAAGVADTSKATVASKSVSMTVSVNTASTVSVDTAKKVSAVADTTKSTEPALLNNLRVTIKSPTFERRVAPPVSTPPAVSTTPPVSTPPAVVATPVPAPAPRQHSDGQTGQDQPQVKPHPDP

SEQ ID NO: 83139 - protein, 128 aa, Unknown
  Obtained from environmental sample
  misc_feature (1)..(128): Xaa is any amino acid
MSEIKIACIGSGNMGFALMKGIAAMSKRTNKPVSIVFTDAYAEKAKTAADALGAGVFVSNTEAAEKAGFIFLAVKPQALSDVLAEIAPVIQKRLTTGGAPLLVSWRQAGQSKKFRPRFPAARRQKFLS

SEQ ID NO: 83140 - protein, 166 aa, Unknown
  Obtained from environmental sample
  misc_feature (1)..(166): Xaa is any amino acid
MIRWPSQTVVIGGKRWMAENLNYQPQPGNGRCYKDDNYNCSKYGRLYDWNTAKTACMTGWHLPSRQEWNDLVTTAGGDKKAGKKLKARNGWDKKGNGTDDFGFSALPGGNYLGSRFYGVSNYGYWWTATESNSGNAYYRNVYCSYANVDEYGSSKSSGFSVRCVQE

SEQ ID NO: 83141 - protein, 152 aa, Unknown
  Obtained from environmental sample
  misc_feature (1)..(152): Xaa is any amino acid
MRLISWNVNGIRSVEKKDFASWLKNESADFVCIQETKAKPDQLSSGLLEIQDKDGKPYHVCWACAKRPGYSGVGIYSKTEPLNVTNLGIEEFDNEGRVLQAGYRDFTLISAYFSNSQDERKRLDYKLRFLRRYSGTPAKNTAKKNRHFRSLR

SEQ ID NO: 83142 - protein, 76 aa, Unknown
  Obtained from environmental sample
  misc_feature (1)..(76): Xaa is any amino acid
MRLLTRSDFDGLACGALLVYLGLIDEWKFVHPKDIQDGLIEASDNDILANIPYIKGCKLWFDHHSANPTDWEKHIF

SEQ ID NO: 83143 - protein, 63 aa, Unknown
  Obtained from environmental sample
  misc_feature (1)..(63): Xaa is any amino acid
MNLTSDNIIAYFQPIFSADSNDVYAYEVLGRYVDDNGDVKSLGPFFNNTGISHDEALRLDRIV

SEQ ID NO: 83144 - protein, 86 aa, Unknown
  Obtained from environmental sample
  misc_feature (1)..(86): Xaa is any amino acid
GSPNDRFGRGLHLRDELGKLWQQLGLTVILVTHDIEEAVFFGDRIYMLNEGKLEGEIPILLKHPRDYRSAEFQEHCREIEARLVPR

SEQ ID NO: 83145 - protein, 129 aa, Unknown
  Obtained from environmental sample
  misc_feature (1)..(129): Xaa is any amino acid
MNIGDYAVKRPVTIVILYALAMGIAVTMVLNLAVDLYPSTARPVLSIFTRFPGSGPADVEKNVTEPLERALSTSVGLVNMTSNSQFETSFINLAFAYGTDMDKAANNAQLLGNRAFQLPARRRADPDVR

SEQ ID NO: 83146 - protein, 87 aa, Unknown
  Obtained from environmental sample
  misc_feature (1)..(87): Xaa is any amino acid
MYNLDMQSRKSLPKTALPRLYFIDREIASGKYPNAPALAKKYETSLSSINRDIAYMRDMMNAPIAYDFFKKGFYYTEKTFRLPAAYA

SEQ ID NO: 83147 - protein, 67 aa, Unknown
  Obtained from environmental sample
  misc_feature (1)..(67): Xaa is any amino acid
EGAGKIVEELQALIAKKNLGDKVDLIGAFCMGKCATGVSVTVDGEYHSLQPENTKTFFEEQVVKKLA

SEQ ID NO: 83148 - protein, 91 aa, Unknown
  Obtained from environmental sample
  DOMAIN (6)...(91): Carbamoyl-phosphate synthase L chain, N-terminal domain
  misc_feature (1)..(91): Xaa is any amino acid
MPLDKNIKKTMVIGSGPIVIGQAAEFDYAGTQACRVLRQDGIEIVLVNSNPATIMTDNNIADKIYIEPLTLATVKRISKRTPRPADKPGEK

SEQ ID NO: 83149 - protein, 212 aa, Unknown
  Obtained from environmental sample
  misc_feature (1)..(212): Xaa is any amino acid
MLEIRDIEITPQMLSAISELDAFKANWTGFSSMQPEQLKKLKKISTIESVGSSNRIEGNKLSDKEVEELMSRIQKKSFKNRDEEEVAGYTELMNLIFDSYEVIPLTENYIKHLHKILLQFCENDASHRGKYKKLSNSVSAFDANGKEIGIVFETASPFETPILMEELVEWTRKNFDDNFYHPLLTIGIFIVHFLAIHPFKTEWSANLSWGGG

SEQ ID NO: 83150 - protein, 191 aa, Unknown
  Obtained from environmental sample
  misc_feature (1)..(191): Xaa is any amino acid
MIRKPYKLFLFSLLLSLALSYLPALDFFWEEPARFTNRPGDFPVSASSENLSGDNFSVLAWQESSANRNQINVYLAVKLPGEEWKERGMIAGPYAYSGTEPSILSLVIDKKNRILIAIAASGSRTEILISEDRGLTFSRQVINTEAEGSVAPRIFVRADGGYFLFVTRGAYAVYSDSYSRPGLGHLITGDP

SEQ ID NO: 83151 - protein, 121 aa, Unknown
  Obtained from environmental sample
  DOMAIN (10)...(119): TIR domain
  misc_feature (1)..(121): Xaa is any amino acid
MPIIDKRHDVFISYAHKDNPPPESPITKLVALLKETYRDRYNGEEIDVFFDEDELEPSDLWENKLLESLRQSAVMIVILSSEYYNSEYCYKEWRHFSDVEITIRFRKRNYTDKYGDDSSRR

SEQ ID NO: 83152 - protein, 213 aa, Unknown
  Obtained from environmental sample
  misc_feature (1)..(213): Xaa is any amino acid
KGLWRESYSTGSTRYGWLGVSLMEPTKEAIASMGLENKRGALAAQVFLGSPADKGGIRPGDFITHVNGKEARNTQQLQMIVGDLKPGDNAKFTVIRDKQTKEIQVRIETRTDQVASDNKKLWPGLVVVPLNDQLKQNMELDKDAKGLVVVQVVDGSPANVIGIKQGDRITAVNGVAVADIAAFYKVLRENTNTELWFGLLRGDAVVESMKFKR

SEQ ID NO: 83153 - protein, 334 aa, Unknown
  Obtained from environmental sample
  DOMAIN (262)...(310): Regulator of chromosome condensation (RCC1)
  misc_feature (1)..(334): Xaa is any amino acid
VRATNQADTTKSGTATVTVTGGGPVPIVSGGATCRAGVACSFEIKADGSLWAWGRNYSGELGIGDTNSRNTPTRVGTDANWAAVSVCLYHTLAIKTDGSLWAWGSNTSGQLGLGDSGSGSGTNRNTPTRVGTDTNWAAVSAGTAHSLALKTDGSLWAWGSNYKGQLGLGTSDDNPHPTPTRVGTDSWKAVAADGMSALPSYGHSLAIKADGSLWAWGDNSLGCLGLGAFDGSAHPTPARVGTDSNWAAVSAGTCTSLALKTDGSLWAWGYNYYGQLGLGSGGTATDRHTPTRVGTDSWKVVSASYHTLAIRTDGSLWAGGTTNTAALSIIREKK

SEQ ID NO: 83154 - protein, 302 aa, Unknown
  Obtained from environmental sample
  DOMAIN (1)...(131): Glyceraldehyde 3-phosphate dehydrogenase, NAD binding domain
  misc_feature (1)..(302): Xaa is any amino acid
VRIGRAFTDAKYFAYQLKYDSTQGQMKADIGTDGDDVLVVNGHKIKCLSGKGLTPDQFPWKDLGIDYVVESTGIYTNEKAYGHIAAGAKKVIISAPGKSGDDSKPIKTIVMGVNQEEYDASKHHVLSNASCTTNCLAPVVHVILKEGFGIETGLMTTIHSYTATQKTVDGVSQKDWRGGRAAAVNIIPSTTGAAKAVGEVLPSTKGKLTGMSFRVPTPTGSVVDLTFRATKDTSIEEIDAAMKKAASSYMKGVLSYCNEEIVSSDIVHNTNTSIYDSLATLQNTLKGEKRFFKSYHGTTTSG

SEQ ID NO: 83155 - protein, 111 aa, Unknown
  Obtained from environmental sample
  DOMAIN (2)...(111): Glutamine amidotransferases class-II
  misc_feature (1)..(111): Xaa is any amino acid
MCGIFGYVGDQDAVPIIVEGLKKLEYRGYDSAGIAVYGKDGLGVVKQKGRLAALEARLSEQLLSGPSLTNPPLAGRIGIGHTRWATHGESSDVNSHPHVGSKNKIAVVHTV

SEQ ID NO: 83156 - protein, 195 aa, Unknown
  Obtained from environmental sample
  misc_feature (1)..(195): Xaa is any amino acid
APAKTEAAIDRLSVENEKTLIAVKEASARSDKAIAEIHAALDRMEYNFGGVSKRLGDLAEIIVVPKIKMDINKLGGHNFQEAVADKTVVAVVDGVKDPVAEVDMFLFGDGEAMAVEIKAHLKKTKVDTHLRRLRKLRTHENEAGIVGKKLYGAVVGVIVDDEARAHAKKNGLYVIEIREEENKLNIEKPDTCQTW

SEQ ID NO: 83157 - protein, 190 aa, Unknown
  Obtained from environmental sample
  misc_feature (1)..(190): Xaa is any amino acid
MDFSKIKKSPFDIKSESSYNAYLSKGFFLMGLKKPKCIAWTEIPNREYHDHIIEARIRLDSMGGYAAAGLTFHIRDDEAYYIVLFSNKGYFRLDVVRDGSPKPLIAWTDIYEFNGKDINLCLITYGTFLIFLVNGKWVGETSDDSYNSGMVGFALASYESSDFMSADETSGDEADNDQYACKAFLDYLSI

SEQ ID NO: 83158 - protein, 277 aa, Unknown
  Obtained from environmental sample
  misc_feature (1)..(277): Xaa is any amino acid
MDTSISSIICIADMNIIPALDQVLTELAIPEVFVQRAKQIFLQDKRGFLGLRPVTKLEESRALIYRMYVPAMYEESVMRRIIEATDLGIGGRGSIFSHYISLSRGTPPSFDMEKLDKLCVKSDKMIHEEHALITCTVSRGSGDALARAVLELGIGVPVVFYGTGAGLRDRLGLMRITIPIEKEIIWFVVPRSDAELVEKNLIPRAKLDVPGNGFLYQCYVHAPVVNLRIRHGERVHAATMEQVIAALDEVEAQANGGVSDRISMNTKAGRRSPFTQG

SEQ ID NO: 83159 - protein, 301 aa, Unknown
  Obtained from environmental sample
  misc_feature (1)..(301): Xaa is any amino acid
MLIVGTPGSGKTTFSVSLLDRLWKDHKIPFLVIEPAKNEYRALVRSIPDLQVFTPGKNFISPFVFNPFMPPKNVKLETYKSTLKTAFAAAVSMSTPLDKIFEESVNNCYSDFRWLDTYTSDDKGRIFNITDFIKCFEKTFAAIGYTGEANNIGRAGLVRLQSLVNLFDNYYSIPIEDLLAKPTVIELAAIENSYQKALIISLLLLSILAYVNSNYIGEGKLRNVILLEEAHVLLDADTNAEEGEANPSAVAQGLVKRMLAEIRSYGVRIVIADQSPRKVTADRVALTDIQLAFRLVEANDK

SEQ ID NO: 83160 - protein, 58 aa, Unknown
  Obtained from environmental sample
  misc_feature (1)..(58): Xaa is any amino acid
VQVCYLLHDSKTVEREFGNLERIKDNYPKFVVSMDEFSGNSRNGIKHFNLLKFLESDL

SEQ ID NO: 83161 - protein, 310 aa, Unknown
  Obtained from environmental sample
  DOMAIN (1)...(309): tRNA synthetases class I (I, L, M and V)
  misc_feature (1)..(310): Xaa is any amino acid
LAEKYLDQKGGELLGVEYEPLFPYFKDAAAQNAFRTYPGDFVSTEDGTGIVHTAPGFGEDDARVLKNTGIPVICPIDAECKFTDEVKDFAGQFVKDADKAIMEKLKAEGKLFKREQILHAYPHCWKCEHPLIYRAIGSWFVNVEKIKKDMLKANSEIRWVPDHIRDGRFGKWLEGARDWAISRNRFWGNPLPIWRCEECGKVICVGSRKELKELSGVYPEDLHKHFVDDITIPCEDCLGTMRRIPEVLDCWFESRSMPYAQSHYPFENRDYFESRFPADFINEGLDQTRGWFYTLTILAAALFKKPAFKN

SEQ ID NO: 83162 - protein, 189 aa, Unknown
  Obtained from environmental sample
  DOMAIN (3)...(189): Glycosyl hydrolase family 20, catalytic domain
  misc_feature (1)..(189): Xaa is any amino acid
LSGEFSGGFYTKAEIRDIVSFAAERHIEVVPEIDLPGHASAILAAYPGLGCTGGPYRVEDRFGVFEDVLCSGNDGIFTLAEAVFDTLADLFPSRYVHIGGDEVPFIRWAECPKCRKRMAELGLDKAPQLQSWITSRLAQMLLKYGKTAIGWDEVLENTEKFPLPADMIVQSWRGEEGGNKATSLGHRVS

SEQ ID NO: 83163 - protein, 347 aa, Unknown
  Obtained from environmental sample
  misc_feature (1)..(347): Xaa is any amino acid
VYHYAGRDDYAKETITLGIELFSAPNRISFETINMLTRTVRKGLISTGRAEAWGLNWPAQSLNNAVSLFRRFQIITPVAVELVNAVGKSVGRQSANLQLGGWFMPDGGALSGTTAPYLRPPVKIEFSGVDVKDIDGLTIRVVSVNSIPAERAASQMGLRILPQDEYDSIPSITDNGLQIANLQLFDIQFEQGKNLLKGYKGSTYAAIPYGVTYINYSSGLVKKGLTSVKIPSSVTVIESSAFSENLLTSVTIPDSVTSIGEGVFRDNRSLTSVFMGNSVIFIGERAFESNRLNTLTIPDSVTSIARFAFIYNDTRSITIGANINWDELWSPNGFSDLVPNTVRWGDH

SEQ ID NO: 83164 - protein, 140 aa, Unknown
  Obtained from environmental sample
  misc_feature (1)..(140): Xaa is any amino acid
VAWGQNTYAQIGDGTTTSANNKLTPVRIGDGWASVSGGVAHTLGTKTDGTLWAWGQNNAGQLGDGATSTASGYCTAPKWIGSEYDWAFVKGASANIDAATSYGIKEDGSLWVWGRNNYGQVGNGATGNATRPVRIMSLSE

SEQ ID NO: 83165 - protein, 156 aa, Unknown
  Obtained from environmental sample
  misc_feature (1)..(156): Xaa is any amino acid
MVRKKKVEDDDKELKLTYLSKKEFTCHACNTQFRKEELFSGGGRLIAGKLTEELHRLYEPSKKYGVIFPLVYESIVCPECWFASMENDFHLLPKENEDAAKADMENRMKDTLAIFPGVDFHENRTLMDGAASLYLTLRCYDFYNKSNFPTIKQGAA

SEQ ID NO: 83166 - protein, 291 aa, Unknown
  Obtained from environmental sample
  misc_feature (1)..(291): Xaa is any amino acid
KNRRIRLGTRTPTPREVRQAVEILGIADAIFDSKGNKIPFEVIPTNAITAGFFTGAVRLNITLPPLGYTSLKLQNHRNSMDLREYQNYQYTRTASNRIRSGNWEAVINRESGVITSLKNTNTNTEFLGPEGIVPLIVDDESDTWTHIIPSYRGAIRKMNLESFTMVSQGEISAEYELVYKLLNSMVILRVILNGELGTLDIKTRVIWNEQHRLLKLRINSAFKNETFVSEIPYGAISRAADGREWPVQRWACLGGGTCLGIVNDGIYSASAEDGSLDLTLLRSPIYSHHEI

SEQ ID NO: 83167 - protein, 317 aa, Unknown
  Obtained from environmental sample
  misc_feature (1)..(317): Xaa is any amino acid
CKALENNDLVKENLNLKTEIDKLRADFQKIISESTVIKDENKSLKNALYEHVFNEKNNIVSNTNQRLDIFFHAEKNGELNRLTVIEQNVKARIKHIKDFLAQNNTGIRDEFEYKLDELSDLLDQKVTEAREKAAQSEAFSADEREQLNALKEEEVTDEQIRAVSKKNNLERFIGLNVLNVIGIFLLFAGAVAAMRYTYLKLSDLFKGIAIFILGGIMLVTGEILNRKKPNVFSLGISAGGIAILYAALAISYFVLQILGMYPAIIICVLLTVGAFVLSSRYNSQIIAAFALIGGYLPIITIDENIKFVYGAMVFSRF

SEQ ID NO: 83168 - protein, 288 aa, Unknown
  Obtained from environmental sample
  DOMAIN (8)...(284): Pyridoxal-phosphate dependent enzyme
  misc_feature (1)..(288): Xaa is any amino acid
MAKYAKKLTELIGKTPLLQLTDFSAERKLEARLIAKLEYFNPLSSVKDRIALAMVEDAEKNGKLDKDTVIIEPTSGNTGIGLAFVAASRGYKLILTMPDTMSVERRNLLKALNAELVLTPGKDGMKGAIKKAEELSVAFEKSFIPQQFNNPANVRVHRETTAVEIWNDLDGGIDVFVAGVGTGGTITGVGEVLKEKKSNIKIVAVEPFDSPVLSGGAPGPHKIQGIGAGFVPNVLNTKVIDEVFKVRAEQAFETARDLARTEGLLVGISSRAPAFPRRKSRNGRDTKA

SEQ ID NO: 83169 - protein, 282 aa, Unknown
  Obtained from environmental sample
  misc_feature (1)..(282): Xaa is any amino acid
VLVVLAAIAVIKMQKLTPLGALSFTGAVKVMFSYRDLQAISLLDRLDKTADSHQEQELLGALYNNPSQLSTKGLLEKARSPSLVTRQEAIRALEKLDSLNEDAEAALVYDIVNNPFTTAYISARTLGDHGCISAIPILRELASSEDYMLAGEAMIALARLRDLAFCPHIENIILYTQNPRLKIMGVEALGIYALPDSLNTFINIIRNTDPPPYLLNEVILAMSAILGTQNQFYRILVRFVAEPSLAPALALDEAEAAAAYYKSNIGWRKSGKKTRPILSLSG

SEQ ID NO: 83170 - protein, 263 aa, Unknown
  Obtained from environmental sample
  misc_feature (1)..(263): Xaa is any amino acid
LNTACNEKKLVLIIDETDKTSNNLVFLRFIGMLRDKYLLRGKSGATFQSVILCGVYDIKNLKVKLVQKGLYQLKDGEKRINSPWNIAVNFNVDMSFSPPEIATMLLEYEKDHKTGMDIDLISKELRAYTNGYPFLVSRLCQIIDEDLGKDWTAYGVQKAVKELLNERNTLFDDLSYNIESNRDLFNLLHNIIVDGKKVTYNNLNSTMNLALTFWILQETDNILAVSHKIFETAICDYFISLTSADPRKSIEILDSRVIENGKF

SEQ ID NO: 83171 - protein, 126 aa, Unknown
  Obtained from environmental sample
  misc_feature (1)..(126): Xaa is any amino acid
MNNGRFGEYGGQYIPETLMNEIINLEKAYNHYKDDGAFKAELDSLLKNYAGRPSLLYYAGKMTRDLGGAKIYLKREDLNHTGSHKIHNVSGTDPARQKNGQDKKYSRKPGPAQHGLPAATSGGSSW

SEQ ID NO: 83172 - protein, 305 aa, Unknown
  Obtained from environmental sample
  misc_feature (1)..(305): Xaa is any amino acid
VVLRAVFVIAPIAWIYARADAGSISATLASASVPAIACAAALTVVVMVLQGVKWWVLIRRFAPDLGVGKAVSVHMESVFYSIVLPSALAQDVVKSVMLSKDHDPAVVWASSWLGRLIGFFALLSYSLAGVAYLGDSALPPGFRVPLFSAAGVIALLCALSFSKRFTRPLGAVAEKIVGPKTLTTVKKLRDGIYAFRHERGTLALTLLVSAAIQFLVVLGASITVYAVSGRYFFAECLAFVPLVEVMAISLPLTPGGVGIREALMALLFTRLGFSEGQTASYVTISLMLSMTRLVGGIPVIMPRRK

SEQ ID NO: 83173 - protein, 277 aa, Unknown
  Obtained from environmental sample
  DOMAIN (168)...(195): NAD-dependent DNA ligase C4 zinc finger domain
  misc_feature (1)..(277): Xaa is any amino acid
VHDNAEFLAELGFPVVERSGVLSGVGEIMSLCGGWESKRHALPFPVDGVVIKVDSFEQQERLGSTSKSPRWVIAYKYAPERAATVVEGVDWSVGRTGVVTPVARLRPVLLGGTVVKNASLHNYDEIKRLGLRESDTVEVEKGGEIIPKVIRVCAEERFAGSAPYEPPLTCPSCGSLLAKLEDEAAIRCINRSCSAQLAASIEHFVSRAAMDVRGMGPAVVKQLLDGALIRDAADLYGLTVEKRADAWNASRGEVRRPNIVEALEKSKARPLTSAINS

SEQ ID NO: 83174 - protein, 145 aa, Unknown
  Obtained from environmental sample
  DOMAIN (5)...(142): Histidine biosynthesis protein
  misc_feature (1)..(145): Xaa is any amino acid
MLTKRLIACFDIIGGMVTKAVQFQDNINVAPAEELAETMYNEQIDELIFYDIMASAEKRGIDIETVKKVARRLFIPFTVGGGIKKLQDMYEALKAGAEKISVDSMAVRNPPIITEGIQSLWRTMHRAFHPGKAHRAYSKRVRGIH

SEQ ID NO: 83175 - protein, 310 aa, Unknown
  Obtained from environmental sample
  DOMAIN (50)...(308): Endonuclease/Exonuclease/phosphatase family
  misc_feature (1)..(310): Xaa is any amino acid
MEIDMKRNYVYQNSVQGLLCGVVLLALVTGCTGCNVSGTEEKTPEKSDSIAIMTWNVQALFDGVDEGIEYDDYRESAGWTPEKYRGRLNIIAGAIGGMGRKPDIIAMQELESAVVVNDLAAALSSQGYGWTYFAHIPGMSLGVGLLSRYPVTGAKSHSVNINGDIAPRPMLEVRINTAVHASEDEPGAGGSSLTLFVCHWKSKLGSEEATEKTRRASARIILRRLRELKETDPDLPVIIMGDLNENYDEFYRRNGTAISALLPDDPRAAEFANLYGLDDDDPDTAAIIGERQKDFIILSKSKPSETRYFS

SEQ ID NO: 83176 - protein, 94 aa, Unknown
  Obtained from environmental sample
  misc_feature (1)..(94): Xaa is any amino acid
GVPTWDRIRHETPLFIFVGTVPQTSLVAGDDFKAKLDESGYIVTNQKMLTSISGFFAAGDIRSGAFRQVVTAAADGAVAAHSAAAYIDAIKDKK

SEQ ID NO: 83177 - protein, 249 aa, Unknown
  Obtained from environmental sample
  DOMAIN (100)...(248): Glycosyl hydrolase family 3 N terminal domain
  misc_feature (1)..(249): Xaa is any amino acid
MKLSALAFLGIIGLFIVTPLFSLNFNDAGTPEQLAASIENAMTDEQALAQVFMLGWVGEEPSPIIMDWIRNRNIGGVKIFGWNTADTTRLAKTVGELQKASLEGPFKIPLLIATDQEGGWIRHVKGSTSETPGNMAIGAASYPRDAYLAGFYIGKELALLGINMNFAPTVDVFSNHDSSLIGPRAFGSDPVKAGILGSAFMKGQLAAGVIPTAQHIRGTGIPILTRTEYCPKSTLRLKFCGTRDLSRTK

SEQ ID NO: 83178 - protein, 309 aa, Unknown
  Obtained from environmental sample
  DOMAIN (171)...(242): HAMP domain
  misc_feature (1)..(309): Xaa is any amino acid
MAYFNGPNAKNDRVEHPIPRTIEGKDTHLLRIMVPVINPRTNEVVGGVGCLYIIDAIQQGVTDTIKANDVIAAMVIYSSNGLIIGHLVPERIGKMLIDVETIYGQYIQEADQAVKNGKEFSCSTYSPVLDSKVQIVMLPFQIGSSDKTWSVMMVVTDEYIMKDVNAITGFTVILTAIAIVIAAVIVYFVLNSTTKPIVKVADNLKDISEGEGDLTRSITVNSKDEIGDLALYFNKTLEKIKNLIINIKKEATDLGSTGNDLATNMAETASAINQITANIQSIRSRIINQSASVNGINATMEQVIAHINK

SEQ ID NO: 83179 - protein, 112 aa, Unknown
  Obtained from environmental sample
  misc_feature (1)..(112): Xaa is any amino acid
MTRFREILRLHSQGISNRIIAASLECSRNTIRSVLERAKELDVHWPLPDNMSDRALEEALFGKRPISKKCKIPDFEFIHQELAKNESEPQPAVERVLRNMPEEGSRLGRICH

SEQ ID NO: 83180 - protein, 161 aa, Unknown
  Obtained from environmental sample
  misc_feature (1)..(161): Xaa is any amino acid
MKTILKKNYIFVAAAILIVSAYFISGVLVFANKQYNAINEENMKATVNIIKEFTPSEVFTDRELAAEWVSNLDISNEYRITLIHRSGRVVFDTEADSSGFENHLDRPEFQMAVKDGIGSAIRRSATLGQYYLYTARAINDSSENSTASLVFQNDTRFFTRL

SEQ ID NO: 83181 - protein, 76 aa, Unknown
  Obtained from environmental sample
  misc_feature (1)..(76): Xaa is any amino acid
NKIGWRGCGFTAEQITNLKRAYKILFRDGLHLNDALTKIDAEFPGDASVKILTDFVRGSEKGFLRMATEAPTAPAA

SEQ ID NO: 83182 - protein, 64 aa, Unknown
  Obtained from environmental sample
  misc_feature (1)..(64): Xaa is any amino acid
MQPGLPTIALSGHASLNTACINDIDGNITFAQQVYGYGKEGHVLLGNSTSGKSKNGLESRGLPS

SEQ ID NO: 83183 - protein, 286 aa, Unknown
  Obtained from environmental sample
  DOMAIN (38)...(286): Respiratory-chain NADH dehydrogenase 51 Kd subunit
  misc_feature (1)..(286): Xaa is any amino acid
MSKLTDLLTESVADTEPNPVDSPNLEGSLSVEHYMRSGGFNALKKAVLMTSEEIIAEIKKAKLLGRGGAAYPAGSKWEHLLHIPETPKYIVCNADEGEPGTFKDRLIMEKLPMKLLEGIIIAGFVFRAKAGYIYVRGEYRKIQKRLLTAIDNLKAAGLLGKNIIRPGFNFDIHVVSGAGAYVCGENSALLNSTEGKVGRPRIKPPHLAEVGLFLQPTLVNNVESFANIPVIVNMGGDAYLAAGHPDSGGSKLICLSGHCKNRGVFEIPLGKVSLRDAIYDPELGGG

SEQ ID NO: 83184 - protein, 141 aa, Unknown
  Obtained from environmental sample
  misc_feature (1)..(141): Xaa is any amino acid
MEQATVMLENTPLKYPIILVHGIIMHDRPSFNKFWGRIPETIQETGTKVYFGNTDSWGDFDSHAKILKTTIDEVLDKTKSEKVNILAHSKGGLDSRYFIWKYDYGGQVASLTTLITPHHGAELSDFLLQQKIFHTWIAKKA

SEQ ID NO: 83185 - protein, 88 aa, Unknown
  Obtained from environmental sample
  misc_feature (1)..(88): Xaa is any amino acid
MSKLNDGLQVRLLTENADCADPLSVSEYEKSGGFTAFKKAAASSPEEIIDEVKKAKLLGRGGAAYPAGSKWEHLLHIPETPRPICVFS

SEQ ID NO: 83186 - protein, 253 aa, Unknown
  Obtained from environmental sample
  DOMAIN (11)...(185): Protein of unknown function (DUF327)
  misc_feature (1)..(253): Xaa is any amino acid
LAKVDTDVQSFYMNPSAYTHVKDESKKTKVSRTMPGAKTGFSRIFDEIRGRTAGEIGPLQEMPVSEETVNLLIDEVRSTGDALRERPFPDEILRYKQAVRNFMHYIVENAYGKSVEAGIPNFLKPGFKGPRGTPEAMKQKAHTKIQVIDTKLEELAKRLLTSQMPQMEIASRLEEIKGLLVDLMQYRYYMSDFEDEDISLLEDRPGEREAVSSVSEGGKSSVAEAITPDTPVFRLRLSYSPETFLAIYRDDSL

SEQ ID NO: 83187 - protein, 68 aa, Unknown
  Obtained from environmental sample
  misc_feature (1)..(68): Xaa is any amino acid
MPDDEQAENFIKAEAEKRNVKLGDLMMPLRVAVTGSRVSPPLFGSLRILGAEHSQERIQKALDKLSSA

SEQ ID NO: 83188 - protein, 195 aa, Unknown
  Obtained from environmental sample
  DOMAIN (122)...(157): Adenylate kinase, active site lid
  misc_feature (1)..(195): Xaa is any amino acid
MKLIFLGPPGAGKGTLADRAVEFLKLPHISTGAIFRSAIAAKSPLGLKVKAIIDAGKLVDDETTIALVKEYLSKDDVKGGYILDGFPRTIPQAEALAEFSDIDKVVNFDIPDSLVLERLGGRRVCRKCGHNFHMVFDKPKEEGLCDHCGGEVYTRDDDKAEAIQKRLEVYRAQTAPLIDYYRGKALLGHSDHGKK

SEQ ID NO: 83189 - protein, 197 aa, Unknown
  Obtained from environmental sample
  DOMAIN (158)...(193): Bacterial regulatory protein, Fis family
  misc_feature (1)..(197): Xaa is any amino acid
LEGVGGAFARNSEEPFTHPARGNRHSRGCQREIKVDFRLICATHRDLRILMKKGLFRQDLYFRLAALPVKIPPVRERNDLRSIAQSLWRGQEPLDEHHFKTLQSYLWPGNIRQLKNVLERYALLKKHGYKLESIIKTEFEQCKFSLHEPPPPKYKPNICEISEEIRNCSGNKSRAAKKLGISRGSLYYRMRSDFSGT

SEQ ID NO: 83190 - protein, 134 aa, Unknown
  Obtained from environmental sample
  DOMAIN (1)...(133): Uncharacterised protein family (UPF0081)
  misc_feature (1)..(134): Xaa is any amino acid
MKLMGVDYGRRRIGIAVSDADGTLARSIGIVDRKTHPNYIDELTKIISQENPAAIVFGLPLSADDEETAMSKEVREFATLIEQRVKLPIHFVDESFTSKKAAELMMYRKKKARMDKSLSDRISADLILAGGESG

SEQ ID NO: 83191 - protein, 287 aa, Unknown
  Obtained from environmental sample
  DOMAIN (209)...(273): 5'-3' exonuclease, C-terminal SAM fold
  misc_feature (1)..(287): Xaa is any amino acid
MKNPLYLIDAYGLIYRSYFAFMSFPLKNNAGKNVSALFGFARTVISLLNDGAPLLRENGKSALTNGYFKETPKLLAAVFDSRTPTFRHKMYSEYKATRQKAPDDLHAQVPLVEEFLAALNIPCLQADGFEADDIIATLAKKCQEEKRQCYILSSDKDLLQLVGNGTFELRPAKNTATGGGTPHGVAQKQNTGPVWEIIGPAEVKAEWGIPPEKILDFLSLTGDSSDNIPGVKGIGEKSAVEYIARYGSLDQIFKKHRRSWKLQRPKDRPRKRERLFFTSLIRLETNV

SEQ ID NO: 83192 - protein, 314 aa, Unknown
  Obtained from environmental sample
  DOMAIN (20)...(314): Borrelia P83/100 protein
  misc_feature (1)..(314): Xaa is any amino acid
VYRLGGVFWPLSPLFAQVNQSELENLGPVEFINYEGPYSRIETRAQIRNIGYGLGEIVKGGAARTGASGRYFVIHSVSEQDGSRLDADIFGLGPDVGVDHIRNLRLIIQGYLEAAYGYTERDAALIAEYVTIYNAVYRGDMNYFSSRYKNPVMANLTAEKAGLAIRYDEWPGQTLIVIPLGSGTGLSSIDTSAISDERVIEQLRQDPDMGLDQRRDMVDLKEREADQASQQAAINRDAIRQEEERIAREREAAQQQQQQAQADQRTIEQERQQPGADQQALDASQHEAERQGEEARQKHEELDQSQQAMDAQKL

SEQ ID NO: 83193 - protein, 215 aa, Unknown
  Obtained from environmental sample
  DOMAIN (47)...(214): Pyridoxal-phosphate dependent enzyme
  misc_feature (1)..(215): Xaa is any amino acid
MSKGRFGDYGGQYIPETLMNEIINLEKAYNHYKNDGAFRAELDELLKNYAGRPSPLYYAEKMSRDLGGAKIYLKREDMNHTGSHKINNVLGQTLLAKKMGKTRIIAETGAGQHGVAAATAAALMGMECEIFMGKEDTERQALNVYRMELLGVTVHPVTSGTQTLKDAVNETMREWVGRVHDTHYVLGSVMGPHPFPVIVRVSKRHGPSINGGGNP

SEQ ID NO: 83194 - protein, 97 aa, Unknown
  Obtained from environmental sample
  misc_feature (1)..(97): Xaa is any amino acid
MFDYIFKVRRCYCPSWTDADYYLLIQGAGSGKTFNWICLNPEEIDKPWFLAGGITVENIEQAMARNPFCVDVSSGAETDGVKDREKMVALTTIIRKA

SEQ ID NO: 83195 - protein, 330 aa, Unknown
  Obtained from environmental sample
  misc_feature (1)..(330): Xaa is any amino acid
NLQKGWILLLNFYDATFSLNEMACALGHRLGLEFTPTSQLVDLSINNQYKGIYQLTEKIQSNKGRVDLREKHRGWLVEFDYHSPASDERSSYFTTDKYNLTTFIKFPELDDTIPNRPTSYLDYVKTDLNNLVNKMAENGFPENGYRDLIDLDSYAKYVLIQLFLDNSDFNSKFQNGALPGSNYAYRIDSSSCSKIKAGPLWDFDLAIVTKSSHPRHDYNSYREAITPTQAFYKRLWEDPVFKAKYKRIWIENKSHFQAMSSFIDSIKTVAEGSVDNNTWNSGTLNAQTFNTEIQNLKGWLTNRINWVDQQIGSNLNGVDVNWNAAIRGGK

SEQ ID NO: 83196 - protein, 70 aa, Unknown
  Obtained from environmental sample
  misc_feature (1)..(70): Xaa is any amino acid
MGSYLALTDKDRQEMLAVLGIKKVDDLFSQVPEKVKVKELEIPSGLSEMEVSRKLSGLGLGHSENWGGNW

SEQ ID NO: 83197 - protein, 100 aa, Unknown
  Obtained from environmental sample
  DOMAIN (1)...(94): Glycine cleavage T-protein C-terminal barrel domain
  misc_feature (1)..(100): Xaa is any amino acid
GRFLGKAALERYLQADKLRRIRTGLKVRGKGIIREQCPIYYQGSSIGITTSGTFGPHLKQAIAMAMLKTELASPGTKVEADVRGRMIEAETCTLPFYKKQ

SEQ ID NO: 83198 - protein, 302 aa, Unknown
  Obtained from environmental sample
  misc_feature (1)..(302): Xaa is any amino acid
MSYYNSVYGSIVKPKAGESTPEEKSLRLNFFDMSSGDTVTVRRLQGSNPQNISSYDSVSVMVYPKESYGEELKFVFRFGSDDSTYYEYSAPLPNGGRWHRFAFSLQDFSDLKLSADQEGKPINVSSGNLRVAAPAGKRPNFTAITFMAIGAASGGGREGEIWVNELIATGGRVLSGLAARVNIATQWADFLTLGAGVSFMDGDFKTMTDETLGGSDRSELSANLNAVMKLDKFMPEEWGVSIPVGGSISGTLSRPTVKPQSDIRLLHDDGSSNGLWTWWTTLSYDARRRNWRRLDAGAALQT

SEQ ID NO: 83199 - protein, 176 aa, Unknown
  Obtained from environmental sample
  misc_feature (1)..(176): Xaa is any amino acid
MKTNDEKTTEQSQMFANRLQKRFRHLKKWAQRKNIGAFRLYDRDIPEIPLVLDFYGDVSQVGEAAISGALYKRPYEKDEEDETQWLSEMKNAASAALGMSPERIFLKQRQRQRGDAQYEKTGDTRFEKVVSEGDLVFKVNLSDYLDTGLFPDRRLLRVMVKDEAKEMKVLIFSYTA

SEQ ID NO: 83200 - protein, 312 aa, Unknown
  Obtained from environmental sample
  misc_feature (1)..(312): Xaa is any amino acid
GIRQRLIRLYDGERKLADLRQVTDYCVSHLYSQNLSLERLIKHLERLYSGEEGARNDKNIHTLATEKSSVKILTMHAAKGLEFPVVFLMNTNTLKTPNGPNTLRWTDANKKRHITPYLSVPDDLREGKGKNQKDRESLICYTESQEREYRRLLYVAMTRPQAMLFAPMRVGEDATADNDITPRLNELLGHDANIEEFDTAIYDNDNRRASGININEAASIQLDDIPTLSLQKFISVETSYSQISRELKAASYNDDLPLSTTDDGSDVIRSDEHHVEDIDTDVDTDAGINTDEIGINVDNAIDTDLGQSAMVR

SEQ ID NO: 83201 - protein, 132 aa, Unknown
  Obtained from environmental sample
  DOMAIN (1)...(123): N-(5'phosphoribosyl)anthranilate (PRA) isomerase
  misc_feature (1)..(132): Xaa is any amino acid
KGSPGLIDELKSLLRCSGKKVIKSAELVSLTEAGKTIAPDANYYLVDSGAGSGKAFDWDLLRAGMPCASWLQSSGKQWFLAGGITPENIERAMELNPFAIDVSGGAETDGIKDRNKIVQLTAMVRKLKEKAV

SEQ ID NO: 83202 - protein, 68 aa, Unknown
  Obtained from environmental sample
  misc_feature (1)..(68): Xaa is any amino acid
FSDYGEQHGRFMLVIGSAAGVAAMGIDRNLSFGWYLKRIAPLALLGYLAGAGIYLLMNMNGNWSMVGG

SEQ ID NO: 83203 - protein, 160 aa, Unknown
  Obtained from environmental sample
  misc_feature (1)..(160): Xaa is any amino acid
MGIAKFLVSLAVFAMFLACGEVESGFEYKSSSSGSQICTEENCPSSSSNANSSSSFFDIGLEWKLAPENSYVHGATSITLDAFYVSKNLITQSQYKAVMGGENPSKGVKNDTLPIRGVNWFQAVEFCKKLSRLMGLDSNAVKLPTEAEWEYVAFARAIQR

SEQ ID NO: 83204 - protein, 84 aa, Unknown
  Obtained from environmental sample
  misc_feature (1)..(84): Xaa is any amino acid
DQTFAHWDISRLNRVDLAILRMSVYTLMYQSEIAPSIVIDEAIGISKEFGTDDSYRFVNGVLDSIHHTLLAQTEKGAVLSQNAF

SEQ ID NO: 83205 - protein, 212 aa, Unknown
  Obtained from environmental sample
  DOMAIN (30)...(212): recA bacterial DNA recombination protein
  misc_feature (1)..(212): Xaa is any amino acid
MGKKGASSADDKDSKEGKEGKDGGHKQRNAAIEQAVSQIEKQHGKGSIMRLGTAALQTDIQAIPSGSLSLDTALGVGGFPKGRIVEIYGPESSGKTTVALHAIANIQKQGGVAVLIDAEYAFDATYAKGLGVDVDNLLVSQPDTGEQALEIADTLVRSGAIDLIVIDSVAALVPAAEIEGDMGESLRGPAGPVDVAGVAETDRLSAILSFAS

SEQ ID NO: 83206 - protein, 308 aa, Unknown
  Obtained from environmental sample
  DOMAIN (17)...(83): His Kinase A (phosphoacceptor) domain
  misc_feature (1)..(308): Xaa is any amino acid
MASLELARNEAEMANRSKSNFLATMSHEIRTPMNAIIGIAQIQLQRKDLPEDYATALEKIYSSANSQLGIVNDLLDMSKIETGKMVLSPVEYNTPSLINDAVQLNVVRIGSKQIEFTIDIDENLPSKLYGDELRIKQILNNLLSNAIKYTGKGSVKLSVGYSRENDDVTLRFAVEDTGQGMKQEDKERLFSEYTRFNAQANRATEGTGLGLNITKKLVEMMGGTIGVESEYGKGSVFTVTVRQKAVECSAIGASIVEQLSKFAFAGDRHAANLQISAERMPYGNVLVVDDVSTNLYVAEGLLPLYELK

SEQ ID NO: 83207 - protein, 92 aa, Unknown
  Obtained from environmental sample
  misc_feature (1)..(92): Xaa is any amino acid
MRIMRHKRFALHRHREGESKRTLFRVEGATTEQVGKHLADRGIAVRAGHHCAQPILRHYGLESTVRPTLAFYNTAGEVDELVRAVREIAPKF

SEQ ID NO: 83208 - protein, 258 aa, Unknown
  Obtained from environmental sample
  misc_feature (1)..(258): Xaa is any amino acid
MSAGAERIILCDTNGGAFPDMIEKAVKEAVKIVNGSSCVLGIHAHNDADMASANTITAVLAGCRHIQGTLVGFGERCGNTSLAAVIPSLELKLGFRCLPEGKMELLSEITRIVAETANVAVPGNMPYVGSHAFTHKAGMHADGILKVSKSFEHIDPSLVGNDRHFLMSEVGGRSAIAERAKKIDASITRDHPVTIALSQKLKSLEAEGWQFEGADGSFDLMVRRELGRYKPLFKIEAYRCKRAPREQSPFRGTQSQGG

SEQ ID NO: 83209 - protein, 80 aa, Unknown
  Obtained from environmental sample
  misc_feature (1)..(80): Xaa is any amino acid
KPDCDLGSETGCSVTEVLEIARRVSGKPIPAKIVGRRPGDPAKLTASSALAHELLGWSAKYSDMETLIRTSWEVYKNEDA

SEQ ID NO: 83210 - protein, 333 aa, Unknown
  Obtained from environmental sample
  DOMAIN (1)...(333): Phosphoenolpyruvate carboxykinase
  misc_feature (1)..(333): Xaa is any amino acid
VDAGIGIPLNPEKRPGSYWFHSDPSDVARAESRTFIASKSKDDAGPTNNWTDPAKLKDEMKALYKGCMKGRVMYVIPFSMGPVGSDIAKIGVQITDSPYVVFNMHIMTRVGTKVLDVLGKDGFFVPCLHSIAKPLKPGEKDTSWPCEPDVNKKYISHFPDTYEIWSYGSGYGGNALLGKKCLALRIASVLARDEGWLAEHMLILKLTNPQGKVKYVTGALPSACGKTNLAMLIPTLPGWKVETIGDDIAWMKFGKDGRLYAINPEAGFFGVAPGTSDKSNKSAMDQSGRIRSLQTQAFTKTATSGGKIFGIPPRVEQSPIGKAKRSPLPSRKI

SEQ ID NO: 83211 - protein, 138 aa, Unknown
  Obtained from environmental sample
  DOMAIN (44)...(137): Protein of unknown function (DUF820)
  misc_feature (1)..(138): Xaa is any amino acid
MALLKEAVPKYNNTYVDFLEWDEDFRAELHDGEVVMMAPPLTKHQRVSGELFFQIRSYLDGKPCKVFPAPFGVRLFPKNDRSDDTVFEPDIVVICDQEKLDERGCNGPPDFVIEVISSSTARYDRIYKLRSANLILGK

SEQ ID NO: 83212 - protein, 312 aa, Unknown
  Obtained from environmental sample
  DOMAIN (1)...(299): Protein of unknown function (DUF935)
  misc_feature (1)..(312): Xaa is any amino acid
ALVTFGRDGALRLRSSPGDLHGTPVDPYKFLLTQHRASVGNPYGESKFSGCFWPVTFKKGGLKFWAVFLEKFGMPHAVGKAPRGASDKDRNELLRSLNLMVRDACAAIPDDQSIEFLDTNVSGSTDAYERFAAYHDSEISTAILGHSAGATATPGRLGGDDLALQVRTDIIDNDAAMAADTMNTLIRYIYEINPSLGEKRPEFILYDPKDIDKARAERDSMLLNTNKIRLTKKYFVDNYDFGEEDIEVVEDAVQPVQAEFAAAAGRPHGAAPTTSPDTDGRTHGAAPTTSPDTDGRTHGAARQHPRIRTGRS

SEQ ID NO: 83213 - protein, 295 aa, Unknown
  Obtained from environmental sample
  DOMAIN (33)...(102): RNA polymerase Rpb2, domain 3
  misc_feature (1)..(295): Xaa is any amino acid
LGGTETVTPQDVINARTVSTVVQAFFGSSQLSQFLDQTNPLSELTHKRRVSALGPGGLTRERAGFEVRDVHHTHYGRLCPIETPEGPNIGLIASLSTFARVNEFGFIETPYQKIENGVATGKIDYLTADQEDDYIIAQANTPTDKTGKITQKMLFARCRGDFPVVSPQEVTYMDVSPMQLVSIAAGLIPFLGHDDAHRALMGPTCSVRRCGYCGRRRRLWGRGLRGARRSTRLYGQSQKPRRDPKGPTPPRVIIPKNPPGTQKEISGSPQGSKPHKMAQIFKGFHPGKPREKTKR

SEQ ID NO: 83214 - protein, 279 aa, Unknown
  Obtained from environmental sample
  DOMAIN (1)...(205): MutS domain V
  misc_feature (1)..(279): Xaa is any amino acid
MIAHAVPIDLSMTGGIRTLIITGPNTGGKTVALKTLGLFALMNQSGLALPADEGSVLPVFDGIYADIGDEQSIKQSLSTFSAHISNIAAITACATENSLVLLDELGSGTDPQEGGAIAMAVLDFLIEKSSRMIITTHHGILKNYGYTRQGVENASVEFDAQTLSPTYKIINGIPGESRALDIAARNGLAENIVEKARNYLDGEKADVSALISGLKEKHRELNGLEQKTRVEELQLRETRRNADLKETALRHKEAELSGTPRENFVLLCRKARRPWRILY

SEQ ID NO: 83215 - protein, 299 aa, Unknown
  Obtained from environmental sample
  DOMAIN (194)...(227): Tetratricopeptide repeat
  misc_feature (1)..(299): Xaa is any amino acid
PRHISARGFDAASQERPLEAETLSELGGYLLDKQLEEVRGVPNEYVALIDDVRKILLRAVQQDPSLPEPHYHLARYYKNLGNDHEERVTLEIALDRFGKAEESNLRRLTSRIDAYQRYADNLINSREFLHAEEQLQKGIELYEDAMSRRLLSSSPQYGRLYAGLGDLEYFVKTGDMEAALRYYNMAQQNGWAPPDMQYRMGAAYYQLGDWRNALENFFTASSKLPQNRRILFALGNSALKRGDYFAAQGYYSRLLDMLERHRTRLPLLLPNDRPQNLDLAKRLMNARNNGGGAKRKLAA

SEQ ID NO: 83216 - protein, 244 aa, Unknown
  Obtained from environmental sample
  DOMAIN (4)...(157): Glycosyl transferase family 2
  misc_feature (1)..(244): Xaa is any amino acid
MLISLAMIVKNEEETLAHCLESAKPIVDEMIIVDTGSTDRTIEIAKGFGASVHRFQWCDDYSAARNESLKHCNGEWVLIIDADEAIDPLDYEKIKNACTSPFADAYELIHRHYLFSSLTGVQDAAAVPNKSAYAEGHHLPFYADATAARLVKRFDLLSFVGRVHESFGNSLEANGKTIKLLDAVLHHYGKLLKEREETQTQYYLMLAQRDADADPENLVAQFNLQQQALKAGQWEWHCKPHKMA

SEQ ID NO: 83217 - protein, 257 aa, Unknown
  Obtained from environmental sample
  misc_feature (1)..(257): Xaa is any amino acid
MSGSFSLTDGGHANGRQIDVPPTLVSFAVSTAKIENIITPEFKKTDSYVYLLKLPFSIYEKRDFAVLREYFDTVEKLIKDGKILSAWASGNGGTAEAVVKMCMGNKIGFTAENELFIGDGFCGFVIETNTPLQADAVLLGRTKSDYILKTKTYEIPIDKLQDAWEKTLEPVYPYLIKQEGKVENFIFDREVTIKPTNRQSKPKFLIPVFPGTNSEYDSATAVERAGGQAQVFVIRKLTPAVIAESVKDFEKIIKKSQ

SEQ ID NO: 83218 - protein, 317 aa, Unknown
  Obtained from environmental sample
  misc_feature (1)..(317): Xaa is any amino acid
RLRKIKNACTSPFADAYELIHRHYSYDSTMLSQDYAAVPNTSPYSEGRHLPFYADNSALRLAKMFDGLAFSNSIHESLRQTLLDSGKTIKDLDAVLHHYGGLFKDRREHKTHYYLMLASKEAEKKPHSMDTQFNLMQQALAANMWDLALRSADECLRIGPKVDSHVLYSRAWALQELGKHGDALQQSEALLAHKPEHAPALLLKSISLVQLGDVDLGRRAAQDTIEMLPTFVPPYIYLAHLDIKDGNLDSARKILAEALKIAPSEPKIYDQLLHIELLEGNHLEATKIAERAIKECPGGGDGNWESCVYQYYSQRRT

SEQ ID NO: 83219 - protein, 312 aa, Unknown
  Obtained from environmental sample
  misc_feature (1)..(312): Xaa is any amino acid
MDGANITINWAAVPKAALYEISRGGSRLGEYTALGSVEETVFTDASPNKNKYENYYRITAKNNDGGIISQQLASFELKLFGANTLFYDQKYDKIDSIEKEINRIHDTEMLGSIEEEGGRKAEFSSKRYAMYFKPGEYRGFSEFRIGFYTHIAGLGRVPVQTRLFGSVVTPPHLPRNNATCTFWRSIENFQINGGALNWGVSQAAPVRRMKLQVPTQFDWEKGWASGGFLADCYFTADVGSWSQQQWYARNSHFVTAFYGVNWNKVIQGSTGKIDDDNWASGGCVTKEDTTPVIREKPFLYTDSGEYMLFVPA

SEQ ID NO: 83220 - protein, 313 aa, Unknown
  Obtained from environmental sample
  misc_feature (1)..(313): Xaa is any amino acid
FLPLYGREQRRRLRSNDTIFARWTLATYTITFLPNGGTVTPTTMIVSGDDGKLSLLPIPRLSLYAFDAWYTAPTGGEKVTLNTVFTGDAAVFARWIPLYIIRFNANGGTVSIAADTTGADGKLAALPTPVPANNGETFKGWFTALASGERVTASTVFTGDATLYAQWSPAAVSYTVTFNPNGGLVNPTSRVTTGDGTLAALPIPARENYAFTGWFTSATVGSTEVTTDYVFTGNTTIYARWTPIYTVTFNPNNGTVNPTSAKVNIEGLIEGTLPTPTRAGYKFDGWFTTSAATGGLEVTEDYVFSANTTIYAR

SEQ ID NO: 83221 - protein, 295 aa, Unknown
  Obtained from environmental sample
  misc_feature (1)..(295): Xaa is any amino acid
FPRLLLPYLGQGARNFDYTWFTKLDGEHYLLWLKKIGAVPIKRIALNVVSHAVFLGIVFSGGYLGIDPSIKGSLFLAALSFGMLVGTFVYVAGDGLVSRTLLAHNFTRYPPDCREKRQEAKAWIIPIMAILLTLFFTYSVTMLGIHKTGGTLDAMKGSALSSIWFPLVVFFISVSALAFTLKRNSGVIYTSVIAQLENLSSEQKDLTKRISICSVDELGTIAGMVNAFCEHLGGGIKNIRNETDVLSDIGIDLSSNMNDTAAAVNQITANVQSIKSRIINQSASVSETHATMEQL

SEQ ID NO: 83222 - protein, 258 aa, Unknown
  Obtained from environmental sample
  DOMAIN (77)...(258): Transposase DDE domain
  misc_feature (1)..(258): Xaa is any amino acid
MLYALISNCFSVREIEASMRANGNRLYHAGLKQIKRSTFCDALERRRHDLFKSVFHKLVDKAQNISGKTKKKFKDPLRIIDATVISLCLKRFNWAKYRKSKGAIKLHLNMDGDNCIPFDAYLTDGKVHEAKEMGNLAQEKGVIYVMDRGYVNYKSLYCIELQGSFFVTRMKSNCAFKRTHNKAHKEDGPVLSDVVIELTGAAAKKAYPKPLRKITYKDKETKKVYEFLTHDMEREASEIAAIYKERWEVELFFQWDKQ

SEQ ID NO: 83223 - protein, 336 aa, Unknown
  Obtained from environmental sample
  misc_feature (1)..(336): Xaa is any amino acid
ILGNGASFGSVASFGSVASSGSGASFGSGTDGDTEVENTAPATQKEIWNDRMLAALLSFVCREETFFKTEGVIRKRVMEAGKGCFGKMDLQLTLGSLQILGLFYADGDKLVPDKKRFEDFGLLSARERSEYCAAALIVYEEMKPTAPILPPLFKSRLREITNFIHIFLDSLGTGQMYYEKSLTRLAEILKAKTGIVISGDLADALEKTGLLASSQPKITQLGVIVQNTPLKNSEPVIAVDSGFSVIVYPEIVYTDAINLAAFMNVLEAGAVVRFELTKDSAVRAFNNNIGADEIIELLKRLSGGRLDDSQIWNLRDWEKRYAEVSLKAGHHPGGKS

SEQ ID NO: 83224 - protein, 317 aa, Unknown
  Obtained from environmental sample
  DOMAIN (1)...(276): 6-phosphogluconate dehydrogenase, C-terminal domain
  misc_feature (1)..(317): Xaa is any amino acid
MQLICETYDIMKNILGLSCDEMGNIFDEWNRGSLSSYLIEITRDILRYKDTDGQPLVERILDTAGQKGTGKWTGIAALDFGVPLTLIGEAVFSRCLSAVKDERVRASKVFSKPKPVTVADKAAFIKDLEKALYASKVVSYAQGYLLMREAAKEYKWNLNYGGIALMWRGGCIIRSVFLGKIKEAFDKNPGLDNLLMDPFFTKILEDAQDSWRRVVATAVQSGITTPAFSSALAYFDGYRSERLPANLLHAQRDYFGAHTYERVDQARGEFSHTNWTGHGGTTARPLCRIRYEDFSAPSRDLRVFPKRGKGTQPPKGK

SEQ ID NO: 83225 - protein, 289 aa, Unknown
  Obtained from environmental sample
  DOMAIN (141)...(207): Elongation factor Tu domain 2
  misc_feature (1)..(289): Xaa is any amino acid
MKAIYFDGDQGTDLRYAEIPSHLKADAEKHREELIDEVSVFSDELAEKFLSGEKIPEDLLRAAIHKGTLAEAFVPVMIGSAYKFKGIQPLLDAVNDFLPNPTEVKNYAYDIDNNEEQRELSPDEKSPTVALGFKLEDGQYGQLTYVRVYQGALKKGEELTNTRSRKRFKVGRLVRMHADSMEDINEGAPGDIVALFGIECASGDTFCGGGLNYAMSSMYVPEPVISLAVTPKDKKSADQLAKALGLFTKEDPTFRSYVDQESNQCIIQGMGGTAPGSVPRKNAKGIQSQ

SEQ ID NO: 83226 - protein, 170 aa, Unknown
  Obtained from environmental sample
  misc_feature (1)..(170): Xaa is any amino acid
MELIVVDSGSRDNTLDNLRSFSAHQHEKMPTIIINSQVCSPSLQRNLGIESASGDYIAFCDSDDCMKPEMLSTMLDTAAVANSDITVCDFDMAYPQKTIERFSQLLDGHFQPAGSRICDYYYKFGAAPKPNKYVWSRLYRRGILLNTGARFLDTRYSEDHLFNLSLLFQG

SEQ ID NO: 83227 - protein, 276 aa, Unknown
  Obtained from environmental sample
  DOMAIN (120)...(208): Glycosyltransferase 36 associated family
  misc_feature (1)..(276): Xaa is any amino acid
VPVDMGGRYFYINDNGHVWNPGWSPVKAALDSYECRHGLGYTIIKGSSQGITAELTFFVPQDFNGEVQKVSIKNSGGTVKKIKLFSFLEWCLWDANDDTTNFQRNFNTGEVEIEGSTIFHKTEYKERRDHFAFYSVNAPLAGFDTDRESFLGPYNGFGEAQAVKNGKANNSVADGWSPIASHYLEIELAPGAQKDFVFVLGYVENPFEEKFAPDLSGNEKIITTGNSRKNIINKKRAYEMIAQCDTRPKSDKLFNDLKAHWNALLGPYQANSPDEN

SEQ ID NO: 83228 - protein, 94 aa, Unknown
  Obtained from environmental sample
  misc_feature (1)..(94): Xaa is any amino acid
MLIDLFSNLVRYLNNEVPLMTILKISLYFIPKSFSYALPISLLFAAAYTLGDLYARNELTTIFSSGIPFWRLSVFPYIVGLAASVFSFFLDKLL

SEQ ID NO: 83229 - protein, 190 aa, Unknown
  Obtained from environmental sample
  DOMAIN (3)...(185): Methyl-accepting chemotaxis protein (MCP) signaling domain
  misc_feature (1)..(190): Xaa is any amino acid
MIEEQTESVDRSSSAIEEMTANINSVTKTLVDNSKNVSALTEASENGKTGVQTVAQEIQEIAHDSEGLQEINSLMNNIAAQTNLLSMNAAIEAAHAGEAGKGFAVVADEIRKLAESSSQQSKTTAAMLKNIKTSIDNITKSSNDVLNRFGAIDSSVKTDSLHEQNILHAMEEQQDGGKQILEFHKPVCGK

SEQ ID NO: 83230 - protein, 296 aa, Unknown
  Obtained from environmental sample
  misc_feature (1)..(296): Xaa is any amino acid
MLPREDRLIGAQLTRYIRDKLYWVLHAPRQTGKTTFLQNWMRQIKMSDEVAVCYTSLEACQGITERAEAMITMHKAICESARAWNMPVPELPINNPELLLYETMRKWAELIAPKPLVVLFDETDVLEGEALISFLRQLRSGFANRAVGTFPVSIALVGMRDLKDYITSAKGGVALNPDSPFNIKEDSAVLSNFSQADVEKLFAQRTEETGQAIDRDALEYIWEQSRGQPWIVNSLFKRATMRVLQNDDYSTVTLTHIKEAREQMILARETHLEALAYRMENPKYESQKLSAILSRS

SEQ ID NO: 83231 - protein, 110 aa, Unknown
  Obtained from environmental sample
  misc_feature (1)..(110): Xaa is any amino acid
MNGLVRIDETNIVSILNSAKRGLELGKPFSRQIFLISASIVGSYYVDDIDKLIEEMKVGAKLRFVREPDNQYDELAILVKDQNGNKLGYVPRKKNPIFCRLMDAGKLIYG

SEQ ID NO: 83232 - protein, 332 aa, Unknown
  Obtained from environmental sample
  DOMAIN (1)...(320): Protein of unknown function (DUF1703)
  misc_feature (1)..(332): Xaa is any amino acid
DKPLLATIDNTQLHARMRDELKGFYGVLKSYDKYLQFVFLTGATKFSHVSVFSDLNHLVDLTLDPRYADLCGITQEEMEQNCAPEIEAVLEDSGKSRGAYLDELRRFYNGYRFSRKLLSVYNPFGLLNHFDKGGEFLPYWYESGTPTFLINLIIKQKINIVDLTDMRVGYEDFRKYDIETMRAEPLLYQSGYLTIKDYDEESNQYILDYPNEEVRASFSKALLEQYLQPSVEASRGLNTRLITALLKGDVDSAMNSLKSFLASIPYEIIKERENYYETAIHLIFTMLGLNCRSEVRIASGRIDTLVETKQFVYCLNSSEWNSLGHSVMGLAS

SEQ ID NO: 83233 - protein, 136 aa, Unknown
  Obtained from environmental sample
  DOMAIN (74)...(111): Ankyrin repeat
  misc_feature (1)..(136): Xaa is any amino acid
PKPNDQIGRVKRLFDFTSDGFTELLKKTLKAGADVRCTDSYNGTGLIRAADRGHVEIIRELLKTDIRVNHINKIGWTALHEAIILGDGGERHTEVVRLLVDAGADINLPDKDGVTPLAHAKNKGFTDIIKILENNN

SEQ ID NO: 83234 - protein, 234 aa, Unknown
  Obtained from environmental sample
  misc_feature (1)..(234): Xaa is any amino acid
MTAYNDTLHFSLFTGFLPTLYLAYPNKRYATTFRCQAPYALTLDKKPCYNGNMGREENRIERLLKLLPEGWEAKAGELKAFQRAREIKSPRELLKMILLYLTKGKSFRGTSAVARLSGETEMSDVAILKRMRNSAAWLQWLSQNICRCAGLIVEKPEWLKDKSVLLVDGTEDVKCGVRRQCYMLHYSLDLFTLAAREFVMTDRPTRGKAGPFQESGGRATSSWEDGIYGTLARG

SEQ ID NO: 83235 - protein, 118 aa, Unknown
  Obtained from environmental sample
  DOMAIN (16)...(116): Tubulin/FtsZ family, GTPase domain
  misc_feature (1)..(118): Xaa is any amino acid
MNFELLSENVKKEKPVSIVVIGTGGCGSNAVDGMIECGIKGVKFIAVNTDMQSLRNSKAETKIQIGSELTEGMGAGGVPEIGEQAAHEDREELARALAGADMVFVAALVPMADPSGGP

SEQ ID NO: 83236 - protein, 88 aa, Unknown
  Obtained from environmental sample
  misc_feature (1)..(88): Xaa is any amino acid
IIVATSLGKSVSENRVFDLYRMRWQIELAFKRLKSLFQYNDLPMTNGESVKAWFYGKLLLAALCETLVNTGRFSPSGGNRRRERASAA

SEQ ID NO: 83237 - protein, 246 aa, Unknown
  Obtained from environmental sample
  misc_feature (1)..(246): Xaa is any amino acid
ATKPKRELHQIEAQLYPTHVAGGENTFLAKNLKEKTINVEAICAAMRNRGGYDGSHDEAVKTVNHFFKEMMYQLCDGFSVNTGWFTVNVHIGGLFHSVKEIFDPQKHRVTFKFHMLKAMKSLTSLIEVTINGHVEESAYISEFNDMEDPDGSNLFEPGHVCEILGRRIKIDGPADEVGLWMVPVAGGAKEVKITRIVSNTPSRIEFIPVDTGHPENRLEIRTRFSGSHTPLAALRVITSPFVISQA

SEQ ID NO: 83238 - protein, 215 aa, Unknown
  Obtained from environmental sample
  DOMAIN (50)...(160): PilZ domain
  misc_feature (1)..(215): Xaa is any amino acid
MQWDGLSISVYFWREDDAGYVFDTQVLDEVFSMGLSALKIAHNDALFRTQKRTSLRVKLNKAAFVYLVNDTDPHKMEKSPGLRCMMEDVSDTGCAFRVTGLAPVGQRLKVQFSLDHVPVCIPGTIRSVDYQKESNISVVHMEADELPIPTNNHILCEVFDMLPGDDDDELPYRVIEEETKTPTATPAAKAPAPKAAAPSTSSTDDIDGLKDFHEI

SEQ ID NO: 83239 - protein, 146 aa, Unknown
  Obtained from environmental sample
  misc_feature (1)..(146): Xaa is any amino acid
VLGAMRIVFSFCKKYGRLYVWDARKKACPAGWKLPDTADWNRWERAAGGEVAAEKLKSKSGWKKNGNGTDSYGFSALPGGYLYDEGTFAHDGYCGYWWTATETGSEHALGREIIYDYSNDIYIDEVLEDKDYKEQGRSVRCIAKTK

SEQ ID NO: 83240 - protein, 59 aa, Unknown
  Obtained from environmental sample
  misc_feature (1)..(59): Xaa is any amino acid
MGTISIEYSSNLYWLGRYAERAYTTLNTFFNYHDKSLDKDKNAYREFLDNLDMRSLGRF

SEQ ID NO: 83241 - protein, 115 aa, Unknown
  Obtained from environmental sample
  misc_feature (1)..(115): Xaa is any amino acid
MSCAETTPGGRVKLLCENGLGMDVYKTLREEAFEANLEIKRRNLAIYTWGNASAFDPDKGVFAIKPSGVEYDELKPDMMVLIDLEGSVVEGRLKPSSDTKTHQVYTGIRADLSWP

SEQ ID NO: 83242 - protein, 168 aa, Unknown
  Obtained from environmental sample
  misc_feature (1)..(168): Xaa is any amino acid
VIKILKYLKPKEWLMAALSLIFIVAQVWLELKLPDYMAEITRLTKTPGSAMSDIWLNGGYMLLCTLGSLAAAIIVGFFAARICASFSQRLRSLLFNKVESFSMEEINRFSTSSLITRSTNDIMQVQMLIVMALQLVIKAPIMAVWAVTKILEKARRSSTRRDQPGEKP

SEQ ID NO: 83243 - protein, 322 aa, Unknown
  Obtained from environmental sample
  DOMAIN (90)...(204): Histidine kinase-, DNA gyrase B-, and HSP90-like ATPase
  misc_feature (1)..(322): Xaa is any amino acid
GFVLEDDTLDKTVTENLTKITNAGDTLLSIVNDILDFSKIESGKLTISPVEYYISSVLNDVVTLVITRLGEKPVIFNLNIPDELPAKLLGDDLRVKQVLTNLLSNSIKYTHRGSIELKVNCTREGNVVWMYITVTDTGIGIKEDDVKKLFLDYFQADAKANRNIEGTGLGLPITKRLVEMMEGEITAESEYGKGTAFRLRIKQGFVEDTPLGAETAEKLRSFRYIDDKRSAAKRLVRLNLSYAKVLVVDDMQTNLDVAAGLLRIYNMHVDCLSSGEETVNRIYSENPVYDAIFMDHMMPGMDGMKPRTRSARGLVPICTWKT

SEQ ID NO: 83244 - protein, 211 aa, Unknown
  Obtained from environmental sample
  DOMAIN (2)...(211): Amidohydrolase
  misc_feature (1)..(211): Xaa is any amino acid
GAEPLCYDYVIEKVKQYPGKLTGFISVSPNAKGAEKEIERCYAAGLRGIGELYPDGQGFNIDNEKETRALTGACIERNIPLILHVNEPVGHDYIGKNDIPLKKIEKFVNNSQNLKIILAHFGGGIFFYETMKEIKEKFRNVYYDTAAAPFLYDSRIYSAVKALGLCEKIIFGSDFPLLPPSRYLPALEKSGLSPEEIQLILGANAEKLLKC

SEQ ID NO: 83245 - protein, 106 aa, Unknown
  Obtained from environmental sample
  misc_feature (1)..(106): Xaa is any amino acid
MDLKKYEYWFIVGSQDLYGDETLKQVADHAKIMAEDFNKDPLLSGAVVLKPTAITPQAIRGLFEEANASNNCAGLITWMHTFSPSKMGYRGWPRPILIIGGGGDGG

SEQ ID NO: 83246 - protein, 65 aa, Unknown
  Obtained from environmental sample
  DOMAIN (6)...(65): Carbamoyl-phosphate synthase L chain, N-terminal domain
  misc_feature (1)..(65): Xaa is any amino acid
MGLDKNIKKTMVIGSGPIVIGQAAEFDYAGTQACRMLREDGIEIVLVNSNPATIMTDNLGHLIQV

SEQ ID NO: 83247 - protein, 75 aa, Unknown
  Obtained from environmental sample
  misc_feature (1)..(75): Xaa is any amino acid
EDDIIVWQIASNSNSILDALSLNIVDFISGSLPVDSFIRPNKIFTADKNIILSVAGHLNENKIHDVLNEIITIIS

SEQ ID NO: 83248 - protein, 76 aa, Unknown
  Obtained from environmental sample
  misc_feature (1)..(76): Xaa is any amino acid
VPAAIEHCANYEKVFICGGESIYRQAFEFANKIELSVIHAQYDGDTFFPEIDGDCWTVTNKEDFDDFSFITYTKNG

SEQ ID NO: 83249 - protein, 173 aa, Unknown
  Obtained from environmental sample
  DOMAIN (3)...(134): FGGY family of carbohydrate kinases, C-terminal domain
  misc_feature (1)..(173): Xaa is any amino acid
FLPRQIAEGDARQPAHGRAGINGVTAANFKLENLARAALESAIFGMRIGLEGFNTLGFKAREIRLTGGGSKSPIWQSIAASVTGLPVKVPASSEAAAMGGAIQALWCLQKNSDDKLSEKAKDAKSNTIEALADEHVVLEGGKVVKPEKKDIAAYNKAYEAYSRYLGVLSPLYK

SEQ ID NO: 83250 - protein, 242 aa, Unknown
  Obtained from environmental sample
  misc_feature (1)..(242): Xaa is any amino acid
VRFFGPYELGKGAQKIETFDLPPYIGAVRIMVLAASATSESQTGRTLRGYGTAQTTVRVTSDLMVFASLPRVLSPGDEFEVPVYVNSQKGGKRSVKVNLSVPGAAIQGASTQDVSFDKIEEKLIRFKVKSPDNPGNLKFTVTAESSGLKTAQHVVDIEVRSTAVPVTKSLQSLLTAGETWKGNLDYPGRDGTNTLVASFSRLPPLNLESRLNYLIKYPHGCAEQTTSGSSLNSSSAIKRGSK

SEQ ID NO: 83251 - protein, 279 aa, Unknown
  Obtained from environmental sample
  DOMAIN (101)...(234): Response regulator receiver domain
  misc_feature (1)..(279): Xaa is any amino acid
MVTNQEDFAAALYREEWFYVFSSYGLYEKIKPVMEGGVFSYGKKPPLALMVEWGTEAYIPDVRFLSVPAQSLSIANVLNGWAENKDYIKTSGVIRFTFPRARILVVDDIATNLKVVEGLLAPYMADVDTCLNGLQAIELVRQNEYDIVFMDHMMPEMDGIETTAVIRLWEKQKQENNGIGFTFGDARKNINKQIPIIALTANAVSGMREMFIENGFNDFISKPIDISKLDEMLNRWIPREKRTMNSDQKGSNRQSAMNSGQFPDKNAPSCSRPICQWLK

SEQ ID NO: 83252 - protein, 83 aa, Unknown
  Obtained from environmental sample
  misc_feature (1)..(83): Xaa is any amino acid
LSIASTSIRRPVLTIVLSALIVLFGAIGLYQVGVREYPAIDPPIIDVRTTYTGANAEVVANQITEPLESAINGKISADLISVA

SEQ ID NO: 83253 - protein, 213 aa, Unknown
  Obtained from environmental sample
  misc_feature (1)..(213): Xaa is any amino acid
MRKGLSFCIIFLAAFVFIYAQDGPIRTSPTGGTGAAALTAAEEFRLGVQAYNRFSYNEAILSFERALSFRPGEAIVLDWLGKAYYRSGFEETALRQWRSALNIYGRNSGVGMLLSSRIETVSNRRFLLPVADDGVRYVEAGRYPGKYQDIVLYRQPSSILPNNDGSVWVVAYGSNEMGKIDVNGIVRDRKRGPLTGLTALMIWFEELTAGFIF

SEQ ID NO: 83254 - protein, 185 aa, Unknown
  Obtained from environmental sample
  misc_feature (1)..(185): Xaa is any amino acid
ENGHSKIVSVVSAGAQPRREQHEPSLKNAVRGANDSYSQRWRFDLGLRLAATDLLSAAPKRSVVYIGSGNVGELALEQYSLSELSSYLANNCIVFNAIIIGTGQASAAVEYLCRETGGKAMHLYRPQGIGPLIKSIADTPSGLYSFSFTSGLPTDFGRAWLPVEIEVHLMERSGRDNTGYFPPLE

SEQ ID NO: 83255 - protein, 306 aa, Unknown
  Obtained from environmental sample
  DOMAIN (83)...(186): Protein of unknown function DUF58
  misc_feature (1)..(306): Xaa is any amino acid
LFDITARIVSRRHAKNISIRLEPERIVCEGWTNAVYQGENIFQFPGILVRCRVLLNTKDGRHVTYDFKPENKTGTQPNTFQVKKRGAYFSTYDEFAVFDILGFFRFAYRIPSVDGARLLVSPKAAAEGISVRAKGGEANRQDALSLERTDYLIDHRPYVPGDDPRRINWKLYSHGGELIIRQGEREPPPSSNLTILIDTQYDSLYSSNSGGAAEAVDLLCESALAIINNAGKETSIQIGFTGRSETSGNSLTHAELGFFLSFPAAIPAEITAIENLTVVKPSTNVTSTLSACTEDRGIIILPVPRN

SEQ ID NO: 83256 - protein, 309 aa, Unknown
  Obtained from environmental sample
  misc_feature (1)..(309): Xaa is any amino acid
MLPGSTVIVISRSISLLNVAGMTYRDQIFNINENDLRFTDNELSGYFRRVGISFQTDSLREIMQDTEGWAFAINLIARSCQKAPGYGGYVRTAMKQNIFRLLEMEIWNGLSEPLKNFLVRLSLIDHLSVDLINQLAGEEEKFAAELEKQSAYVRLDSYINAYLIHPLFLEFLATKQKLLSEEQKRETYAVAGDWCAHNGFKIDAISYYEKAGNYQSIVLILDGLSAQMPRDIAQLAASILDRAPDDTFDKVEFLADMHLRTYFCQGLWQTSLELMKYYETKFPLTAENDIVRNRTLAQLYRCWSYIRSL

SEQ ID NO: 83257 - protein, 156 aa, Unknown
  Obtained from environmental sample
  DOMAIN (1)...(152): CheR methyltransferase, SAM binding domain
  misc_feature (1)..(156): Xaa is any amino acid
VWTLGCGKGSETISFACILKARYPTAHIKIWANDNDIMAVSQAPNMTYNLEDVPEYCKPYLVQGKNGYSFNQTIKDSIVFEYHDIINENTIPEVDMILVRDVISFLDAETQTRIIADFSEKLKNHGIVILGRNEELTGVIWEAIADDPVSAFSHNA

SEQ ID NO: 83258 - protein, 127 aa, Unknown
  Obtained from environmental sample
  misc_feature (1)..(127): Xaa is any amino acid
MPNVAIREDDIMIKLRNLRKSFGKQDVLLDVNLDIRRGETIVIIGQSGGGKSVILKHMIGLLQPDGGEVSVDNVTISTPKFFDTHIIRKRMGMLFQVGLCLIHEYRRKHSLCFERTPPRTNRKQVSD

SEQ ID NO: 83259 - protein, 69 aa, Unknown
  Obtained from environmental sample
  misc_feature (1)..(69): Xaa is any amino acid
MLRLDKRLAAGNSGAKILLQVHDELILECPKDAAAKTADLVRTEMEQAVELSVPLRVSVETGTRWGSFH

SEQ ID NO: 83260 - protein, 308 aa, Unknown
  Obtained from environmental sample
  DOMAIN (1)...(98): Response regulator receiver domain
  misc_feature (1)..(308): Xaa is any amino acid
MALSLKRARFICDQASSGEDALNMTRPGAFDAVVTDFRMTGMDGLQLTARLKALDPSLPVLLVTAFGSLDTAKEAMRLGAFDYLSKPFSPSELVTAVKKSLRTDEKLKAVAIAEAPIILTQDPALAETLALARRAADSRATILIQAESGTGKELFAKLIHSASPRRKGAFVAINCAAIPENLLESEFFGYEKGAFTGATSSKTGRFEQAEGGTIVLDEIGELPLALQGKLLRAIQERTIDRLGGSKPISIDVRIIALTNRDLAQEVKDGRFREDLFYRLNVIPLKLPPLRERKGDLRLRQLGLSDLGG

SEQ ID NO: 83261 - protein, 292 aa, Unknown
  Obtained from environmental sample
  misc_feature (1)..(292): Xaa is any amino acid
PSLFPVCQWNPVSGTTFTVTFDINGGSGTAPSAQTVDADSSITLPNGNGLSKTGYTFGGWNTEASGTGTNYDAGASYTVTDTITLYAKWNPVPGTTFTVTFDINGGSGTAPAAQTVDADSSITLPNGKGLSKTGYTFGGWSTTSSGTGGINYEAGASYTVTGAITLYAKWDAIPGTTFIVTFDGNGATVGTAPSAQTVTANTNITLPGDNGLSKTGYTFGGWNTNASGTGTDYAAGVSYTVTGAITLYAKWNPVPGVNFTVTLDGNGATGGPAPSPQTVAAKQTLPLPVITG

SEQ ID NO: 83262 - protein, 228 aa, Unknown
  Obtained from environmental sample
  DOMAIN (63)...(181): Response regulator receiver domain
  misc_feature (1)..(228): Xaa is any amino acid
MKRAINAQSEYGKGTAFIVRIKQGFVDNSILGPEVVKKLRSFKYAEDKRIAAKKILRLDLSYARALVVDDVLTNLDVTSGLLRKYRMQVDCLDNGPAAIERIKAGTPVYNAVFMDHMMPDMDGIETVDHIRALDSQYAKKIPIIALTANAIQGTDQLFFHHKFQAYLTKPIDMAELDMVVRKWVRDENATMCPFITAPVNEKLPEQMKFDLPGLKTKKGLGCTPGTQG

SEQ ID NO: 83263 - protein, 343 aa, Unknown
  Obtained from environmental sample
  DOMAIN (207)...(343): Peptidase family S41
  misc_feature (1)..(343): Xaa is any amino acid
MMAELLRGGLDPVRDKHYDPTLGGLDWQAVHDKYLPRIKKAASEEEGRGAMNEMLGLLGQSHIQVIPALAYGDMEGGPRGDHTPGLEVRALGGRALVTRVEARSPAAAAGVRPGWEILKVGGKPVRPVIERVEKTYSASTTKGLRGATVVNGSVAGPAGEAVEIEFNDGAAVRTLKLDRREPRGTTVAFGNMPSARFWVETEALPDGIRLIRFNIWLSPVEVADAFSKAMEDAGKAKGFIIDLRGNPGGIGGMAMGAAGWFTSQKGLKLGVMTMRGATLNFVVSPRPNATDAPLAILVDECSASTTEIFAGGLQDLRRARIFGARTAGAALPSALSRLPTATL

SEQ ID NO: 83264 - protein, 256 aa, Unknown
  Obtained from environmental sample
  misc_feature (1)..(256): Xaa is any amino acid
MEEGVPETIDDEVTNEKALDDEEDETISLTGDEMDNILNSADFTEESGTEETPEDDSSADVENIDIDIDTNETPEEQTEVDLASDDATLATDDLADISLDDTSSTDLAADDAALATDDLADISDTDLAADETALATDDLADISDTDLAADDAALATDDLADISDTDIAADDTALATDDLADISDTDLAADETALATDDLADVSDTDPAADDAYLAADDLADISDTDPAADDAALADDFADISLDDAALDTDDLADI

SEQ ID NO: 83265 - protein, 330 aa, Unknown
  Obtained from environmental sample
  misc_feature (1)..(330): Xaa is any amino acid
FGLSREPEPTRSGPENIYIDPESDLPRTTIINPLPYMRVQGNMNIVGIAFDDDGVKQVEIAVYRGTDGKGEELVRVKASGTDYWSYFLDTSDGEIWLDGDYTVKAWATDINDLSGIADVYTTGQKVPPKKKKVAVVYWRLDRKKPDAVITSHSVGALVSGNIKLGGTLYDGNGIASFSYSVDGGQKYIPAKFKVNKTGNGTWDINLNTKQFEDGPVVIWFKTVDGNDSVGTAAHLLFVNNIGPDVKVVYPEPNTTLNGVFNIAGYAKHPVGLKSITWKAGNSQGEFELLPGHQWWSAPVDARAFKGNSIESEVQAVDVSRNVTIAKQKYK

SEQ ID NO: 83266 - protein, 328 aa, Unknown
  Obtained from environmental sample
  DOMAIN (256)...(325): ATP synthase alpha/beta chain, C terminal domain
  misc_feature (1)..(328): Xaa is any amino acid
KPDDGRGFAPDEPLVTGRRVIDVFFPLSKGGAAAIPGGFGTGKTMTQHAVAKWCDANVIIYIGCGERGNEMTDVLTEFPELQDPRTGRSLMERTLLIANTSNMPVAAREVSIYTGVTLAEFYRDMGYHVAIMADSTSRWAEALRELSGRMEEMPAEEGFPAYLPTRLAEFYERAGRVRALCGEQGSISIIGAVSPPGGDFSEPVTQHTKRFIRCFWALDRDLANARHYPAISWIDSYSEYAEEVQSWWEKVSPYLSEVRRTSMDLLKQEQRLAEIVRLIGADALPDEQKLILLTAQIIKDGFLQQDSLDEIDMFCFPESRCVFWKNNG

SEQ ID NO: 83267 - protein, 123 aa, Unknown
  Obtained from environmental sample
  misc_feature (1)..(123): Xaa is any amino acid
MAVGYGVDVLGRIPWLHHARCIYWGDIDTHGFAILNRARTYLPSLETVLMDKPTLFAHRDLWVREKDQSASSELPLLTNEEQEIFLSLKNNVWGQQVRLEQERICWEVAWRAITHFPDAFFTT

SEQ ID NO: 83268 - protein, 82 aa, Unknown
  Obtained from environmental sample
  misc_feature (1)..(82): Xaa is any amino acid
FPPGYREADSALGGNMIFGEYDREMDIAVNRREAKEEGIEEGREEGRKEKLIIAKNLLTKGSTPEFVHEITGLPLEKIEELK

SEQ ID NO: 83269 - protein, 300 aa, Unknown
  Obtained from environmental sample
  misc_feature (1)..(300): Xaa is any amino acid
MTDVANEVAKGNLNVNINTSNKDETGILAESLLNIVNIINLLTINLKNLSKDINTDSDVDVKLDDACFSGAYGEVVESINTFAAALLNAQRSALLTVSTIFSSNPQINVLFDEHLKVIDCNPVAVKFFGFNTREEFLDGFYNRVSKSIPEIMSSGRRSLTLDEQLNMAVEEGEAKLETELHFEDDIRKLDVELRKIPYKKSFAIVAYVNDLTERINWEMQLMRNKDLKELIELTKLKLLVQASKIGLWDMEIVHDDPVNPNNTFIWSDELRNMLGYTDENDFPHLLSSWSDLLPPEDRKT

SEQ ID NO: 83270 - protein, 314 aa, Unknown
  Obtained from environmental sample
  misc_feature (1)..(314): Xaa is any amino acid
LFANDQIGREPEITESALESSPSITTNTLTLVATGDNLFHETIIDSSLKNGVYDFTPIYSEIKSIIEKADLAFINQETVMGGVKFGYSGYPAFNTPQSLAKTIADTGFDIVNQANNHAMDMGKTGLIATLDLWDTIEGITVIGARKAGDSARIITKNNISLGFLSYTYGLNGIALPADNPNLVSLINRSKMEAEIDALRPLCDFLIVSMHWGDEYKTEPGKTQTDLAIFLAEHGVDLIIGHHPHVLQRAQLITLEDGRKTVCFYSLGNFVSNQREKERIIGGMMAVTFTKREQEPETKEFINFRLRNDTCYMPF

SEQ ID NO: 83271 - protein, 232 aa, Unknown
  Obtained from environmental sample
  misc_feature (1)..(232): Xaa is any amino acid
VQAGKNSRFEYRLSDKTYYIAPYRNLLFITDNSRVFESRSFANSGNIKAFTAIKPSDYDAALMLSNEFISSLLSDQDAGIAAILNNIVFDSKVEAGISIYPKKIEFNLAAPLSSNQASLNRLLGQRSRVPGIAERIPANAQYATILSAGTLEELYQVALVFTSGLDNTLKTADNSSKMLLGLSLNDLLFSWSGNEFSAFGLEGRPHPIYMIHIADEKKRQGIFDRAFKINSA

SEQ ID NO: 83272 - protein, 247 aa, Unknown
  Obtained from environmental sample
  DOMAIN (23)...(240): RNA polymerase Rpb3/Rpb11 dimerisation domain
  misc_feature (1)..(247): Xaa is any amino acid
MARKNLIKGFKRPKGITFEHGELNSGYGRFSASPFEPGFGTTIGNTLRRILLSSIQGYAITGVKIYSYNTEGVSHSISSEFEMIPNIVEDTLEVINNLKQMRVKLPDDVETDTLLYEFSGRQEIKSGMFDRPGQVEVVNKDLHIMTLMDNARIELEIQIDLGRGYVPSEINERFIDVIGTIVLDAIYSPVKKVKFAVEPTRVGQRSDYDKLVLEIWTDGTIKPDDALAEAAKIAKDHFTPYHYFDES

SEQ ID NO: 83273 - protein, 324 aa, Unknown
  Obtained from environmental sample
  misc_feature (1)..(324): Xaa is any amino acid
KAALPLIILIMFSCKSSPPPEFDEAEWLSRVKSADIQSLYAAHVNPNGTFFNPWMERPENRGNWRSKDKKAFDDFPAENYSPVENSYSYLLDKNFDSISFAGHASTIIKMNGETIFTDPFFSKSALIVKKKVVVKFDFSNVPSRPVVLISHNHYDHLDKAAIKKMIKKDAVFLVPLKLKKFFTKLGAKEVYELDWWQSVQINQVRYTFLPAQHWSLRIGQKAGSTLWGGWLVQGSKTVFFSGDSGYFRGFEEFGNRFDIDYALVGAGAYEPRWFMHYSHMNVQEFLRASDELKAGLSIPIHLGIISLSDEPRFIRLGRSDHWPN

SEQ ID NO: 83274 - protein, 306 aa, Unknown
  Obtained from environmental sample
  misc_feature (1)..(306): Xaa is any amino acid
MIFGSPDRERIQLNEESIWSGPYRDRNNPAAKDALARVRRFINEKRFREAEELCLESFSGIPQNQRVYQSAGDLLVSFSPDGEFGHPWSGTRCGSLLNDIRNYRRELDIERAVHMLSFEYNGMVFIRECIISQPAGLFVLRFSAASLDGKPLTGKISFRADLDRGVFSDRKGNTEGGAFLSRDSDIPFIVMIKAVQKGGTQRRSGGFITVEQADEALLFLDIRTGFRDADYAAACAANINRAACAGDITQTWEKLLAEHVAEYALWYGRLKLEIDGGRNAARYFNFCRLLLISCTQPDTLPAIYRD

SEQ ID NO: 83275 - protein, 242 aa, Unknown
  Obtained from environmental sample
  DOMAIN (93)...(229): Thiamine pyrophosphate enzyme, C-terminal TPP binding domain
  misc_feature (1)..(242): Xaa is any amino acid
GQAGKRSFPWPQWSKGNKIPRTGELDPDNVRSALGLQSRPSTAVPGLDPSTLPARPPQLCKGCPHADSYESIKKAVEELDPRPGHPDVGINSDIGCYSLGAAPPYQVPESIVCMGASVGMAKGAADAGLPYSIAVIGDSTFIHSGITALIDTVASNTPMTLIILDNSIVAMTGCQPTMVPSESLRALLLGCGVKPEHLLELEARKQLVDENSSRLKAEIEYRGLSVVVFKRECLEAARKARK

SEQ ID NO: 83276 - protein, 341 aa, Unknown
  Obtained from environmental sample
  misc_feature (1)..(341): Xaa is any amino acid
WGPPGSESAERPSWDREVDTTDENYYKWTQWIFLKLFEKGLAYEAESPINWCPTCKTGIANEEVVEGLCERCKTRVTRKRIRQWILKITAYAQRLLEDLEGLDWPEPVKQMQRNWIGRSEGANVIFKVESSNLSFEIYTTRPDTLFGATYMVLSPEHSLVEKLTTPEQKAAVLAYIEEAAKKSDLERTDLAKTKTGVFTGSYAINPVNGEKIPIWIADYVLISYGTGAIMAVPAHDERDWEFAKAFNLPIIKVVAEEQPQSPVPSPQSPVQCTTADGFFRHSGPYNGLPTAETKKRITDCLEEKKLGQRAVNYKLRDWIFHRQRFWGEPSPWWIATAAGRP

SEQ ID NO: 83277 - protein, 337 aa, Unknown
  Obtained from environmental sample
  misc_feature (1)..(337): Xaa is any amino acid
LLFFDEIQSCQSALAKLRYFYEKYAELHVAAAGSLLEFALEEIPSFGVGRIRSLFMYPFGFDEFLTALNEEELSEAVKSASPEKPLADPIHQQLLGRMKTFLICGGMPEAVSQYVQKRDLLNGELVLNDLITVLKTDFARLVKAQYHKRIPFLLLNEVFESVMRQTEGKFVYERAAPGTASVAVRQALELLIMAGLVHPVTHTAANGIPLGAETNRKYRRMIPCDTGLFLHTLGLRSEILPAVDFSAVNRGSLAEIFTGLELLKAASCFTPHELFYWQRSANPGSSQGNAQVDFSCQKGSSIISIEIQSGNPGQHAKPPSFYEKNHIERGVRTSLEN

SEQ ID NO: 83278 - protein, 101 aa, Unknown
  Obtained from environmental sample
  misc_feature (1)..(101): Xaa is any amino acid
MKCAFRSLFYTGEKELFINRTMILLFEDAETVYVVDFKTDSQELPWEHIAQMACYYKAASDLFAIPSNKKCMTWLYYLRTGHAVDVTMKAKDFDFGNILKI

SEQ ID NO: 83279 - protein, 155 aa, Unknown
  Obtained from environmental sample
  DOMAIN (18)...(152): Transglycosylase
  misc_feature (1)..(155): Xaa is any amino acid
LLLPFPELKSFRNRSWGTVITDRNGIVLRVLPADNGVKREWAPLSAIPPGAARIFIRAEDRRFYFHLGIDLFSLAASLYRNLRAGRTVSGASTITMQLARLVRPHSGGMRGKIVEAWDAIRLEAKLSKKEILELYLNSIPFGSNMRTLGRSDQCR

SEQ ID NO: 83280 - protein, 102 aa, Unknown
  Obtained from environmental sample
  misc_feature (1)..(102): Xaa is any amino acid
RRTFVPWMPSPQEMRHWVCRLHDEIHVTSIFVTHDQDEALEVSDSIAIVNKGKVEQIGSPEEVCDYPANPFVTEFLSDVNRPLVKNKKKKLFDVINDGRQGI

SEQ ID NO: 83281 - protein, 232 aa, Unknown
  Obtained from environmental sample
  DOMAIN (59)...(217): Glycosyltransferase family 28 C-terminal domain
  misc_feature (1)..(232): Xaa is any amino acid
LCGAYKGKDFTAYEETGRFLNKSFHDHITVSGNPVRSVFHNADAEKGRALLGVDDDERILLVLGGSQGAVEINELIRATLPELTQIYTVVHQTGPNLTWDVPESKKYKPFPYIKDEMPHVMAAAELVMGRSGAGIWEWAVLGKPMLLIPLRGSGTRGDQVQNAEYFQKEGAAQVLGEKTTPWALINAVNSFAQDGEKRKNMSKASAKIGERDGSVIIARALADDARRFGGEK

SEQ ID NO: 83282 - protein, 304 aa, Unknown
  Obtained from environmental sample
  DOMAIN (212)...(303): ABC transporter
  misc_feature (1)..(304): Xaa is any amino acid
LFKTLVPPLFKIIPLPLITILILLFGSLVGKKFFAVQSAYSKVSDHAQETFAGISVIKSFVKEWWFIKKFADSNEDYQKANMELVRLFGFFFPFVSFLSGLTVLIMLGIGGLRVINGLMTAGSLVAMFRYLSMLIWPLMGAGFMVNMIQRGAVSLGRINEVLNTTPSIRDGENACAAQSTQGVPALEISNLEFAYRENESVLKGINLKVERGEWLGVMGRTGSGKSTLIKTFTRMTNPPHGAVRVFGLDVCDWQLEELRKLFAVSPQDSYLFSDTIANNIAYGLDGGNFSSPNEILGDLIFLGP

SEQ ID NO: 83283 - protein, 164 aa, Unknown
  Obtained from environmental sample
  misc_feature (1)..(164): Xaa is any amino acid
MSKKLSQSIAFWIFRILGVLVVGILLWILGFIIINGISAISFEFLFSEPKEGMTKGGIFPAIVGTSCLIVGSMLVAFPIGVMSAIYLNEYTTNGKIAKFIRTMTNNLGGVPSVIFGLFGMALFVNAMKWGDSIIAGSFTLGLLVLPLVIRTTEEAYSADLILAK

SEQ ID NO: 83284 - protein, 220 aa, Unknown
  Obtained from environmental sample
  DOMAIN (59)...(206): Methyltransferase small domain
  misc_feature (1)..(220): Xaa is any amino acid
MSLFQNSVSFGKGSEKNVQKDIFFVKSKVDFSKTEVLEKSHLISHFISKTVPFKFRGIDFNFDLSQGLFSSAGIDAGTQLLLKIFSRILDEDKAAGKPPPRRLLDSGCGCGVIGICAAKAITTNDVRIRCQDRDELARLLTLHNAVQNGIPPAVLEACTEPLLAGPDSGRWDMILTNIPAKAGTPVLERFCPPLPRYVEIPAARLSWWAVHPVADFFGEG

SEQ ID NO: 83285 - protein, 109 aa, Unknown
  Obtained from environmental sample
  misc_feature (1)..(109): Xaa is any amino acid
MSIVRDKSLAGAGIAKINWVKDFMPVLNRLEKKMIAEQPLKGLNVTVCVHLEAKTAYLGMVLNAAGAHVTLTGSNPLSTKDDVCAALDSLGLDVYAWHGATRAESVLVS

SEQ ID NO: 83286 - protein, 339 aa, Unknown
  Obtained from environmental sample
  misc_feature (1)..(339): Xaa is any amino acid
MGQNLGHDTNTGASNISLKLSLRGMNYLAREQAQYWQGREESYIKQLTGIADIMGEFEMLPAQDRRDQYDNMLKATLNNNPNFARIFSIWKPNAMDGMDSQYIGRPGSTPTGQYAMTWGRDTGPIEVKPNLIIDEINAWMNGPNALKTRVENPTPFKNNGKDTFIIRIGVPITRSTSDEVVGHLCVLLDIAPMQAAVEKTIKGYEEISGLTIYSGNGFIMGHTVAERVGKMLLDVDTIYGKYMQDADRAVREGKEFECSSFSPVLNGVMRITMIPLQIGDSHMYWTVMIATSETYIMKEVNAHTRFTHILATISHIAAAGNVYFGPHGTTSQSSSWRTR

SEQ ID NO: 83287 - protein, 318 aa, Unknown
  Obtained from environmental sample
  DOMAIN (30)...(251): Methyl-accepting chemotaxis protein (MCP) signaling domain
  misc_feature (1)..(318): Xaa is any amino acid
MVKQKNGAEEAGKAVGIIKINIDNLTKMIEEQTESVNMSSSAIEEMTANIHSVTQTLAENSKNVCVLTEASENGKTGLQTVAQEIQEIARDSEGLLEINSVMNNIASQTNLLSMNAAIEAAHAGEAGKGFAVVAGEIRKLAESSSQQSKTTAAMLKKIKASIDNITKSSDDVLNRFGAIDSSVKTVSEHEQNILNAMREQETGGKQILESISRLRDITRSVKKGSDDMAESGKTLVKETDEFIKTSQEAVEGMNEILNGVNQINISVSHVNDMSLENNRNFDALKKETEKFNDTVGNEKQKILIVDDDLVPNSDPWVK

SEQ ID NO: 83288 - protein, 304 aa, Unknown
  Obtained from environmental sample
  DOMAIN (92)...(156): 3' exoribonuclease family, domain 2
  misc_feature (1)..(304): Xaa is any amino acid
VPLTVDYLERFYAVGRIPGNFFRREIGRPSEKETLTSRFIDRPCRPLFNKNWTYETQVIVQAISVDDKYDPDLPAMLGASAALTISDIPFAGPIAGARVVRVDGGLVVNPTQAQLEAADLALIVAGSREAVVMVEGGAREASETDILDAVFLAHKAIGPLLELQLELQKACGQEKRRPPEVVRDEQLIQKVAENYRAPMMEALTTRVKQARQKKIASLKAEAAAALSPEHPSGQSDIHHALHNLEADLLRGLIVREGRRIDGRALDEVRPITCEISYLPRAHGFGPVHPGRDPEPGGGHFGTKY

SEQ ID NO: 83289 - protein, 111 aa, Unknown
  Obtained from environmental sample
  DOMAIN (41)...(108): ATPase family associated with various cellular activities (AAA)
  misc_feature (1)..(111): Xaa is any amino acid
MKDSQPIAEFARRIRENIETVFLGKTAVVDMLITAFLARGHILLEDVPGTGKTILARSFASSLNLRFARIQCTPDLLPADILGVSVWRHNEEFRTRKGVLVQASADLINGL

SEQ ID NO: 83290 - protein, 344 aa, Unknown
  Obtained from environmental sample
  DOMAIN (1)...(335): FHIPEP family
  misc_feature (1)..(344): Xaa is any amino acid
MVVATIIFIIIILVQVIGITKGPTRVSEVAARFTLDSMPVKMMAVDTEFSSGAITEEEAKNKKAQIQMESDFYGSMDGASKFISGNVKVGVFIIIIEMLGGFIVNSALAGQQSGIGTYIALAIGDGLVTQLPALLVSTAMAIIVTRAAATGVLADQIVDQILKRDSSLYWVCAAVVAVLGFLPGFPWYLLFPMAALIGFHAYTRGRDQKKAVVLGPKTGKAREQGEKPAEFPPIVPLDALSLELGYGLVPLVEKEKGAELLERVMNVRSQSAYDLGLVIPKVRIIDNSMLAPSEYCFKIKGVDSGRGKIRLGYYLCIKPQPPAMVLTEIEGEKTIARPICHGEP

SEQ ID NO: 83291 - protein, 318 aa, Unknown
  Obtained from environmental sample
  DOMAIN (147)...(180): Tetratricopeptide repeat
  misc_feature (1)..(318): Xaa is any amino acid
MMFLDEDWSDLPELLEKVQELLELGLIDDARDMLDKYRPVFQDYWEYHYLYSRVYAEQNMPREAVSCLIAGLRIERDNVDCLLGLFYAFSMMNMVRRGGRFLLEAHQLYPDNEPVYSALIWYYTEINEPETAVACFERAKALNSNNPDTYRNGGLAFDRLGRVEEAAACYKTALQISPNFDEVRDLYADHLIFTGKTNEAIALFEEALRESPKNVRHISKLIYCLSQYGDFNRAEALAVHAIALYPNSPTGYLDLAYVYLNTGRINEASENADQAISVAPIDAEGYRGKAIASSETRDHEARRVALRKSISLDPSNSD

SEQ ID NO: 83292 - protein, 327 aa, Unknown
  Obtained from environmental sample
  DOMAIN (149)...(317): Methyl-accepting chemotaxis protein (MCP) signaling domain
  misc_feature (1)..(327): Xaa is any amino acid
MTKFTILLAIVSIIIAAVIIFFTLQSTTNPIVKVADTLKDISEGEGDLTRSIAVSSKDEIGDLALYFNKTLEKIKNLVLIIKKEATSLQGIGTDLSSNMTETAAAVNQITANIQSIKGRVINQSASVTETNATMEQVIANINKLNGHVESQSRNVSQVSSAIEEMVANIGSVTNTLVNNSANVKTLREASEVGRNGLQEVATDIQEIARESEGLLEINSVMENIASQTNLLSMNAAIEAAHAGEAGKGFAVVADEIRKLAESSSEQSKTIGTVLKKIAESITKITNLTDNVLKRFEAIDAQRQTVSDHEKTSRTRWKSRSRKQTVLL

SEQ ID NO: 83293 - protein, 107 aa, Unknown
  Obtained from environmental sample
  misc_feature (1)..(107): Xaa is any amino acid
MRGFRHSSGMNKTVRTVVWSVMAAVLAVAGSGWLFGASAQTAQTGTFTDSRDGKKYKTVKIGKQTWMARNLDYAPDSGKSWCYNDSASYCAKYGRRTTLGRSDQRFG

SEQ ID NO: 83294 - protein, 78 aa, Unknown
  Obtained from environmental sample
  misc_feature (1)..(78): Xaa is any amino acid
MARPDLHPNRGSPFGTKVPVAIGFGIHTPDQAAQMARMADGVIVGSAIVKIAAEHGDAAGPYIYRYVKEMKETLVYEQ

SEQ ID NO: 83295 - protein, 214 aa, Unknown
  Obtained from environmental sample
  misc_feature (1)..(214): Xaa is any amino acid
LSVLQQNYPNLEYIIIDGGSVDSSVEIIKKYEDKLFYWVSEKDNGMYDAIQKGFEKSTGDIMAWINSDDLYHRKSFFVIAELFSKFTDINWLVGAATQWDEYGRGINIFSSVKFTRYDFLMGHYKWIQQESCFFRRTLWDKAGSYIDKTLRYAGDFELWLRFFRFDKLYVTNAIIGGFRIRSEPSLSLGGMPKYLEEADRMLNKEPLNKRERIK

SEQ ID NO: 83296 - protein, 75 aa, Unknown
  Obtained from environmental sample
  DOMAIN (5)...(69): Heavy-metal-associated domain
  misc_feature (1)..(75): Xaa is any amino acid
MNKETITVGGMHCAACSARVEKALRKLEGVQSAVVNLATEKATVVYDSKTLRISAIKEAIINAGYEVIEILKKRL

SEQ ID NO: 83297 - protein, 88 aa, Unknown
  Obtained from environmental sample
  DOMAIN (1)...(88): Stress responsive A/B Barrel Domain
  misc_feature (1)..(88): Xaa is any amino acid
EIHDRLAENAEILVQRLKALKSVIPCVVSLEVGLNYRDLPSAYDVGLCTTFNTKEDLETYQKHPAHVPVAEWSRSGIAESIAMADYEV

SEQ ID NO: 83298 - protein, 318 aa, Unknown
  Obtained from environmental sample
  misc_feature (1)..(318): Xaa is any amino acid
LIARRHRTRAIIGKIFFHAGQDWHHFNDLHLVPKDKDSSIPGITILDFVKKTKNLGAYALITLPMAGYVSNDGNGAVDKNDTAPSKRFVPVKDRKNGELSLKPNLSDGAVYSDELINYLISKLGNSRNGGIRGYSLDNEPALWYRTHPRIHPVKVTVAEILERSISLSSVVKDFDSAAEVFGPALYGVAAYVDFQSAPDWFKYSASYRWFIDAYLDGMRKAGAENGRRLLDVLDVHYYTEARSPLGHRVSEDRDTNEECIYTRFQSTRSLWDKTYREKSWIEQNFGKFLPILPSPYPSIEQYYPGTKIARSEYNSGRK

SEQ ID NO: 83299 - protein, 238 aa, Unknown
  Obtained from environmental sample
  DOMAIN (51)...(159): TonB-dependent Receptor Plug Domain
  misc_feature (1)..(238): Xaa is any amino acid
MRFGRKKAGKLFPALALFLFSLSFPNAVKGQSAENDAEISFYDEEGITVTGTVQTSQQMAIINKDEIERRNAPDIAALLRDTLALNITNYGAYGNMTLLNLRGLDSKRLAFLINGVPVNSSSDGKFDIEQIDLNSVERIEVIYGGSDTKFNVSGAMGGVINIVTVKNQKPGLRLGVSVSNTGAIPGEYRGRSGQTQGPNLEDLADTQKNDISAVYGGESVSVTANAFTTGRKPFFITD

SEQ ID NO: 83300 - protein, 214 aa, Unknown
  Obtained from environmental sample
  DOMAIN (8)...(95): Transposase
  misc_feature (1)..(214): Xaa is any amino acid
MGKKGTGRRVYTREFKAEAAALAGKKEKPISRIAVDLGINENMLRRWVQASRESAGSGLHRTIGSPFPGHGRPKDTELARLRKENKALREANEILKKAAAIFAQTDPPVMAYQFIKANHGRYAVKEMAVLFGASRSAYCRWARNGTSQRRKAGDAELVRLILEIAAKHRRRYGSHRLRRELRDVYGKRASLKKAARLMRKTALSQKKQEASPIN

SEQ ID NO: 83301 - protein, 275 aa, Unknown
  Obtained from environmental sample
  DOMAIN (47)...(191): GAF domain
  misc_feature (1)..(275): Xaa is any amino acid
MATKMDNTSPTNFSNKTHGSPAPVGADTYASALHKALEIFISYTERTFEDVMSNGLHTIADVTDIDRLLVFRARSRERAAPGEVYRWDRAEGGTRPIDEELKELPLTMPLRRWIAAMREDCCVSLRRSEFTGEEADFLGPRGVMSILIVPVFIEGEIWGVVTFHDNKYERDFDEGCTAMLRSVARLCVSTIIRDEKAKSLERAMGSLKRREMMTNALNMASLVFLSESERKFADMMHSGVSLIADMADIDRSVLYRNYAVHEKMYSSPVYRWTKN

SEQ ID NO: 83302 - protein, 211 aa, Unknown
  Obtained from environmental sample
  DOMAIN (72)...(202): FliP family
  misc_feature (1)..(211): Xaa is any amino acid
MRRRIIFSALLLLALVPQAAYTQATLFPGMATEGTMGIPDPPSMTPVPFIDLTIRNPESGQEVAFSLQLLLLLTALALAPSIFILMTSFLRIAIVLDFIKRALSLQQVPPNQVLMGIALFMTIFIMWPTFTIIYENSFRPLAAGELSVGGAYREAEAPLRIFMYSQMQARPQNIALFMEMRGLGKPNTLADVPTYVLISRLYLGRSDQRLR

SEQ ID NO: 83303 - protein, 324 aa, Unknown
  Obtained from environmental sample
  misc_feature (1)..(324): Xaa is any amino acid
MTDRPRSENGNNYSYFEGIVSGEGKSSDVELTTFEYKGASALKHEKALIYQLAESYRQMGITTTTIGVGVGFDLELMRTLAEEGGGSSRFISSREEMKKLFDTEFERMVALVATDLEMSLEFAPGVEILETWGYQNRLEGNRIFYKLPGLHLGDYETILVRYRLSSTQGQAAGGERELARFRVTAKDLLGRPLPPVEQSAGIVLSESAPDGISSGMVLHSGTMLHFAEALKEIGDLYYASQDDLSALSQLERDVGGKEPSAGQRERMETLKENFLKRLADALKMTRDSRLELENAKLRLDDTEAFNHELEIPVHYDTILGQGLV

SEQ ID NO: 83304 - protein, 314 aa, Unknown
  Obtained from environmental sample
  DOMAIN (2)...(300): UvrD/REP helicase
  misc_feature (1)..(314): Xaa is any amino acid
MAQIGNVDFGDLIKKPVEILRNQPEVAQRFRDRFKVIMVDEYQDANVAQFQLLKELCSPQTYICVVGDDDQSIYRFRGAEVKNILEFPDRFSGTDIIRLERNYRSTSPILKAASSVVDCNRGRLGKVLRAEKGNGMLPVLAYLPDQDEEAAFCAEKIESSVKKRETAWSDWAVLYRTNAQSLGFETLFLRRGIPYRVVGSLKFYEREEIKDALALLSFMVNPRDEVNFRRVVNKPARGVGSVTIDKIVDSSDQYSGDLLETGRNIELSCKARSGLNDFIKVIENARSPAAGVDLDNEKPVSQKRNCQRENQKTK

SEQ ID NO: 83305 - protein, 132 aa, Unknown
  Obtained from environmental sample
  DOMAIN (11)...(132): Pyruvate ferredoxin/flavodoxin oxidoreductase
  misc_feature (1)..(132): Xaa is any amino acid
MKYDVILAGVGGQGVLSVASIIAQTAMNDGFEVRQSEVHGMAHRGGAVLASLRIADKKIAGDLVPKGGADLIISMEPLESLRYVSYLKPDGILVTAAEPFKNIANYPDINGIHFTVKKLPKWRIIQAVTLAE

SEQ ID NO: 83306 - protein, 154 aa, Unknown
  Obtained from environmental sample
  misc_feature (1)..(154): Xaa is any amino acid
PPSVRFGRGAVVYTIALSPGFPPPPAFAAHAPSSENPLIIESYFRPFGPGRKLVRPVIEEGKKSREIAKDNGDFYRTEITGINGDIFSLRLKRGFRHQIRCHLCWVGFPIINDPLYPHPLETDNSVPALSLRASALFFTDPSTGKQREYKIDKF

SEQ ID NO: 83307 - protein, 139 aa, Unknown
  Obtained from environmental sample
  DOMAIN (12)...(114): Mur ligase family, catalytic domain
  misc_feature (1)..(139): Xaa is any amino acid
MNTENIFKPGAQFYFVGIKGTGVCALAELILNAGIKVRGSDTDEVFYTDEILKNLNIPYYENFDAAHITEDINTVIHSAAYGADTNPELAQAVKLGIPVIKYTDALGMWSARFDSTGVCGVHGKNTHTALARLCPREAR

SEQ ID NO: 83308 - protein, 276 aa, Unknown
  Obtained from environmental sample
  DOMAIN (12)...(275): RNA polymerase Rpb2, domain 6
  misc_feature (1)..(276): Xaa is any amino acid
MEAKCAYDSGVLVKARRGGTVLRVTSQEVVIKPEKTGNPKPAAQVTVDDSGNDVYQLLKFQRTNQDTCYNQRPIVKPGEKITSGQVIADGPATHNGELALGRNILVGFMPWNGYNYEDSILISQKVVKDDMFTSIHIKEFIVEVRETKLGPEKITRDIPNTSEKSLDNLDSEGIIRVGAKVRSGDILVGKVTPKNETETTPEFKLLNSIFGEKAKEVRDTSLKVQHGIEGTVIDIQRLKRTEHDSLSPGVDEVVKVLIATKRKLREGKEGSVITRE

SEQ ID NO: 83309 - protein, 313 aa, Unknown
  Obtained from environmental sample
  DOMAIN (3)...(310): Protein of unknown function (DUF1015)
  misc_feature (1)..(313): Xaa is any amino acid
MSRIRPFRAYHPKAELAAEVASVPYDVINAKEARQLAAGKPHSFLHVGRPEINLPEGVDEHSDEVYRAGVDALKGFIADGTLFQEGKPCFYIYQQRMGDHVQAGLVCLCSVKEYESGLIKKHEYTRKDKEDDRTRHVTEQGANAEPVFLTYPAAPYIDGLVNKARETKPVYDITSPDGIGHTVWVVDDESVIYSLTNLFGGVPALYIADGHHRTAAAIRYGQGRRAAAGADATGDEPFEYFMAALFPHSQLKVLDYNRRGEGPQRPLQKPVPCQSAGKVRPGAKPHPHAQDHPHLRHVPRRPVAHPYGQARHC

SEQ ID NO: 83310 - protein, 234 aa, Unknown
  Obtained from environmental sample
  DOMAIN (1)...(232): Branched-chain amino acid transport system / permease component
  misc_feature (1)..(234): Xaa is any amino acid
MPLILCGLSMGFSVRVGLFNIGAEGQYIAGLTAAQLIAVGFTNAAGEKLPVHFSLAVLGAMFFGALWGGISGFFKARYKVSEVVSTIMMNYIAFFLHRFISLSIPGSNTFRTPNFPDSASLSNPVLTAITNRSGLNNGLWFTIAAVVIYWLIMEKSAFGFSLKATGFNKEAAIYAGMRVKTNITAAMAISGAFAGLAGAMYRWACQLRTSITSFDNTAMTACRRSCGQCSALGI

SEQ ID NO: 83311 - protein, 156 aa, Unknown
  Obtained from environmental sample
  DOMAIN (2)...(137): Crossover junction endodeoxyribonuclease RuvC
  misc_feature (1)..(156): Xaa is any amino acid
KRYAGDVVDEESFSRYGTIKTKAGQPRAERLFFIFNFIRSIIEKYKPAQAAMETLYFGKNVTSAIPVAEARGVISVAIAEKGIPLFELTPNAIKQGVVGSARADKEQVQEMVRIILSLKETPKPDHAADALGAAICAANSASYNESSAKITRGSKG

SEQ ID NO: 83312 - protein, 268 aa, Unknown
  Obtained from environmental sample
  misc_feature (1)..(268): Xaa is any amino acid
VPVEKQLFVFIDKNFDSISFVGHASAIIKMNGETIFTDPFFSNSALVVKKKVALKFDYSNVPSKPIVLISHNHYDHLDKSTIKEMIKKDAIFLVPLKLKNFFTKLGAKEVYELDWWQSVNVNQVRYTFLPAQHWSRRIGQKAGATLWGGWLVQGSKTVFFSGDSGYFRGFEEFGNRFDIDYALVGAGAYEPRWFMHYSHMNVQEFLRAADELKAGVSIPIHFGIISLSDEPLVYPVYEIDKFLSMNGKYEGKLKPLRVGEYIILNKDG

SEQ ID NO: 83313 - protein, 316 aa, Unknown
  Obtained from environmental sample
  DOMAIN (1)...(293): tRNA synthetases class I (W and Y)
  misc_feature (1)..(316): Xaa is any amino acid
MNEGPVTFYEGTDPTGGSLHIGHMVPYFAFRHLRDAGHKGIALLGGGTARIGDPSGKSEMRKMLSYEQLDANTESIRAQLDRFVSFDGKTAWPVNNKDWLADLNYIDFLRDIGSHFSVNRMLSFEAYKMRMETGLSFIEFNYQLLQSYDFLELYRRHGCRLQIGGDDQWGNIVAGVELIRRVEGSEVFGITFPLVTTADGKKMGKTEKGALFLDPRITSPYDFFQYWRNVQDADIRRFLLMFTFLPIGECDALTAPGKNPNEAKERLAWEVTALIHGKEEADKALAGAQAALRATHGAASGGGQSAMPHADLSHAA

SEQ ID NO: 83314 - protein, 272 aa, Unknown
  Obtained from environmental sample
  misc_feature (1)..(272): Xaa is any amino acid
MEREMEERREAADKYDREMEEKLLHSDKQFEKILLEAIDRAGIRADKAEEAAVAKLRDQAQERLTLIKTSFEEKIKSVQDTIKVKLAEIQEQVKSNREEWKAETSAIETRQKTYSADWKKDMQELNLFAKQQQDIWNKDIEELNLFVKQQQDNWNKEIDVLNVLARQQKEQWNRDMQEFTARAQQQAENLGAAIQKQKEELGEAVKIQKEEWEAVSRDTGREIIACAEEIYQAEFGEIQEQGQSSHKEWSARIRAIEARQRAYSVYWRKRCR

SEQ ID NO: 83315 - protein, 336 aa, Unknown
  Obtained from environmental sample
  DOMAIN (161)...(333): Malic enzyme, NAD binding domain
  misc_feature (1)..(336): Xaa is any amino acid
MPTREESLSYHFAGRPGKIEVAATKPCRTQADLSLAYTPGVAEPCREIAKDPWTAYKYTARGNLVAVVTDGTAVLGLGDIGPLAGKPVMEGKGVLFKRFADIDVFDIELNTKTPDEFIRIVVAMEPTFGGINLEDIKAPECFYIEEELKKRMGIPVFHDDQHGTAIISGAALINAAKLQDKALSEMKIIFSGAGAAAISCAYLYVRLGVKMENITLVDSKGVIYKGRAEGMNKYKAPFAVDTPKRTLAEAMEGADAFAGLSAAGLVTPEMVKSMADRPIVFAMANPDPENSYDTGRVARNDLIMATGRSDSQPGKQRLRLPVHLPRRSRRKSVDHK

SEQ ID NO: 83316 - protein, 341 aa, Unknown
  Obtained from environmental sample
  DOMAIN (249)...(341): Histidine kinase-, DNA gyrase B-, and HSP90-like ATPase
  misc_feature (1)..(341): Xaa is any amino acid
GVSPRTDSAEGHREEIDKNGIKRVSLKRRIGDATSEGVLAAARNLAPGEMRALSVPHGNLVISTIPQLKWYAIAFMPYSIDDYKTSMSTLFLVVLVVILLIFIIFNVFVSDFLKSQHKTMASLEHARNEAEIANRSKSNFLATMSHEIRTPMNAIIGIAQIQLQRDDLPDDYAAAFRRIYSSANNQLGIVNDILDMSKIETGRMELNPVEYDVPNLINDAIQLNVVRIGEKLIEFIVDVDENLPSKLYGDELRIKQILNNLLSNAIKYTDEGCVRLSVGCLTDSDSVTLSIVVEDTGQGIKPDDNARLFSEYSASTRTQPRTEGTGLGLISQKSGGMMGVP

SEQ ID NO: 83317 - protein, 70 aa, Unknown
  Obtained from environmental sample
  misc_feature (1)..(70): Xaa is any amino acid
MLNKQEILREVKENILPFWQTLADKENGGFYGEADFYGKPNKTAAKGCILNSRILWTFSAAYRILGDEAL

SEQ ID NO: 83318 - protein, 190 aa, Unknown
  Obtained from environmental sample
  DOMAIN (12)...(190): Putative undecaprenyl diphosphate synthase
  misc_feature (1)..(190): Xaa is any amino acid
MGGGIPRHVGIIMDGNGRWANQRGMLRTQGHLEGLKAAKRIVKAASDMGIQYLTLYAFSTENWKRAAGEVSFIMGLVKQYLRNEIAFYRENHIRIRHAGDAVGLPADIAQELASAAFDTGGFDGMQVILALHYGGRDEIVRAIRRLAAKGQFAQGQAMAAITEKDIAGCLDNPDVPDPDPYIRSAGEYRM

SEQ ID NO: 83319 - protein, 201 aa, Unknown
  Obtained from environmental sample
  misc_feature (1)..(201): Xaa is any amino acid
MDEEFYKFTVNRFLKYVRFWTTSERHNTDTPSTPGQWDLAKALVEELKSVGAKDVTLTDHCYVIARLPASTGKENCPTVGFLAHLDTAADVSGKNVKAFLVENYNGKPIDLSFGQNLDPALDPMLAAHKGKAIIHTDGSTLLGADDKAGIAIIMGAAEYLLNTLKIAMALLSLFFLPTNKRERGCLSFHQRCPRKVMLHPG

SEQ ID NO: 83320 - protein, 105 aa, Unknown
  Obtained from environmental sample
  misc_feature (1)..(105): Xaa is any amino acid
MQQGYNKLENVPEAKRTAAVCLAAVEYDGTALELVPKALKTEAICLAAVQQDGRALEYVPEALKTEAICLTAVKKNGGALESVAEALNTTPSALSLCNIASRISK

SEQ ID NO: 83321 - protein, 123 aa, Unknown
  Obtained from environmental sample
  misc_feature (1)..(123): Xaa is any amino acid
MTLDRYLIRQFLPIFVVAIGMFMFVLSLIDLFAHLVRYLNYEVPFSQIMKISAFYLPKSFSYALPISLLFASAYTLGDLYARNELTSIFSSGIPFWRFSIPLVVIGLLASIFHFSAESDPHSP

SEQ ID NO: 83322 - protein, 240 aa, Unknown
  Obtained from environmental sample
  misc_feature (1)..(240): Xaa is any amino acid
VFIRFALCAFLLLPIFALAGEYWHVEPGAGSMKMLSMPTSPRSAALSGAGIASPRSESEAMRNPLATVSGNSPSLSFSKTEFSEYIGASKVSMLAHSMFGSWHLTAGMESLNFDEIEGYNDDGLTSDGSSFAAGTIATQLGIARTFNSLSAGLTVRYANQNVEDYNKSGILFDGGVKYDFQKYFAFGAIFNNFGWIEKETAPLIVQAGITGSYPLVLGFIGVLSADLYRRNDFSESELRS

SEQ ID NO: 83323 - protein, 337 aa, Unknown
  Obtained from environmental sample
  misc_feature (1)..(337): Xaa is any amino acid
DRQTGSGSKNSLEKSFRCTRKAYSPKAAIGPEWRGELYLELHRGTYTTQGAVKRYNRKLEFALRNAEFLSSLALLEKGTSYPHERLLKNWKLLLTNQFHDIIPGSSIGRVYDEAKETYKKIEADLADLTETTLKKLSGCADASVSDGLRFYNDLGWEREDPVSFPADLIKGAAALKAHGDDSETVFPIQRYINLDGNVIAVCCPRLPPLGWITLSPAEFTASSCFTFRGNNLKTPFYEVGFDEAGRITSLFDIEGDRELVAPGGVLNGFVSAQDVPVLWEAWDIEADWTRYLTEETRLLSTEIAASGPVCFRIRRKYKIGEASILSPGHLGRSDQWF

SEQ ID NO: 83324 - protein, 297 aa, Unknown
  Obtained from environmental sample
  DOMAIN (1)...(294): Glycosyl hydrolases family 31
  misc_feature (1)..(297): Xaa is any amino acid
MPPEWSFGLWLSTSFTTSYDEKTVMSFIDGMEERKIPLSVFHFDCFWMKGFNWCDFTWDSKTFPDPKGMLSRIKAKGIKICVWINPYIAQRSALFAEGKDGGYFLKQADGSPYQTDQWQAGMAIVDFTNPSAVKWYLSHLKKLLDMGVDCFKTDFGERIPEDVVYFDGGDPHRHHNFYSFLYNKAVFELLEKKRGKGEACLFARSATAGGQRFPLHWGGDCESTFEAMAETLRGGLSLSLSGFGFWSHDIGGFEGTPHASLFKRWLAFGLLSSHSRAHAQYFLPCFRGAWTKNPPKS

SEQ ID NO: 83325 - protein, 134 aa, Unknown
  Obtained from environmental sample
  misc_feature (1)..(134): Xaa is any amino acid
ARTGGITSLLGLCYLSVAGFSSDVDRVCTPYFPIHDNYCVEALYRNYQQRTLLIITNKPDVIFSVINEKTHHGATCFEGFGSYEKKSRTMLYSVVTASQVKALIPAIRQIDEEAFINVLKTDQLNGRFYQKPYD

SEQ ID NO: 83326 - protein, 72 aa, Unknown
  Obtained from environmental sample
  misc_feature (1)..(72): Xaa is any amino acid
MRRFIEKIVENILRLSGAVTTIIILLMVVFLFKEGFGLFSNPVVERGARLCVNASNKIEYLIAKNKMIFDGK

SEQ ID NO: 83327 - protein, 165 aa, Unknown
  Obtained from environmental sample
  DOMAIN (35)...(129): HD domain
  misc_feature (1)..(165): Xaa is any amino acid
MTTDEMMRLREIRLAPYIQLATFLIGKARSGGGNMFRHQLDTMAILIDYSYVDSVLIKASLVHDILEDIPDFNHNQLLSIDFESHAVYELVKEVTRNPGESKVDFLTRILQTGSPNAKILKVADRISNMISLGFVNDLEFVNRYTNETEKHITRGEQLGRSDQWL

SEQ ID NO: 83328 - protein, 215 aa, Unknown
  Obtained from environmental sample
  misc_feature (1)..(215): Xaa is any amino acid
GDASALAKAGDAGQAAIAGPDHRAVLRRSSLGAAVCEMAACKRADVVKGLILIDGCFRLNDKIDKELLKLMLPSVGKKWYRSFRNSHKAAWESLYPYYGDLDAMSAEDREFIRERVIARVESENQERGYLSTMRSMNIFFMFNGRSLTRGIKTYPGKIAILWGEKDSILPHGKAVSFRGLRPDAQMTLITGAGHLPHQEKHEETAVHMLRFLKEV

SEQ ID NO: 83329 - protein, 307 aa, Unknown
  Obtained from environmental sample
  DOMAIN (160)...(273): Transglycosylase SLT domain
  misc_feature (1)..(307): Xaa is any amino acid
LKPSPVRKFAAFLPFAVLILISAATVKTTAAESNLFPVPDVIKNNVAFWIRIYTEISLQEGLLHDRDYPQVVYEKIPNGDKTGKKLSEFIDQRRKVYIDAIIAVRDSAPAKWGATEKRVAELFKLAPEGSIAGAEERIRHQGGQRERFKLGLERSTMYLDTISAILKKNGVPDELKYLPHVESSFDAEAYSKVGAAGLWQFMRSTGKLYMKVDYMFDERRDPIISTNAAAKFLKSNYDMLGAWPLAITAYHHGPNGIRGAVQKLGTRDIAVILQKHESASFRSAQRTLQVLRRRTADVEKPEKYFKD

SEQ ID NO: 83330 - protein, 306 aa, Unknown
  Obtained from environmental sample
  DOMAIN (171)...(239): PET112 family, C terminal region
  misc_feature (1)..(306): Xaa is any amino acid
LPKAYQVSQLYMPICTDGHLEIEVEGKKKTINIREIHMEEDAGKLVHDANGAATFMDFNRCGVPLLEIVSQPDFRSAAEVIAYLEKMRETLLYLDICDCKMQEGSIRADINLSVRPFGGELGVRTETKNMNSFKAIARAIEYETERQIEILEDGGKIVQETRRWDDEKLESYGMRSKENAQDYRYFPEPDLLPMEIDDAWLASVKANLPELAHQKRERYCRDFKIPESEAVVLTVHKNICDIFETIAQKSGQPVEVAHLLTGEIMRLMNNANILPEDLSVNADKLSTLITLSSAKNQPSPINPGEK

SEQ ID NO: 83331 - protein, 308 aa, Unknown
  Obtained from environmental sample
  DOMAIN (14)...(257): Glycosyl hydrolase family 3 N terminal domain
  misc_feature (1)..(308): Xaa is any amino acid
MTLKKKVSQLSHQSAAVERLGIPEYNWWNECLHGVARAGVATIFPQAIALAATFDDNLVEQVMEAVSDEARAKNNEAIKQGNRGQYWGLTFWTPNINIFRDPRWGRGQETYGEDPCLTARMGTAVVRGLQGDDPENLKLAACAKHYAVHSGPEKDRHTFNAIVSKKDLWETYLPAFKALVDAGVESVMGAYNRTLDEACCASNLLLKDILRGRWGFKGHVVSDCWAIRDFHQYHKITNAPEESAALALNAGCDLNCGCTYPMLTVACKKGLVSEEAIDTALARLLRTRLNWMLSATGNRKLVSIDLIS

SEQ ID NO: 83332 - protein, 179 aa, Unknown
  Obtained from environmental sample
  misc_feature (1)..(179): Xaa is any amino acid
MKICCVDTARLPAEWTAGTAARAVDFFSFVSAADIRWVERSEAETNNAYKQIIPYIVVQQNSGHILCYPRHGAESRLHGFYSCGIGGHIDIEDARDTFEETVSAGMTRELKEELGAFRKDRVELVYRGIINETESSVGQVHLGLVYTCLCLGDYAPEASEETSGMEWKTPKNETVNCPK

SEQ ID NO: 83333 - protein, 218 aa, Unknown
  Obtained from environmental sample
  DOMAIN (20)...(140): FAD binding domain
  misc_feature (1)..(218): Xaa is any amino acid
LISQNVSLKKYSTFKIGGSAKLFAEPKSIAEIRELLMFCKQNNEKFLILGNGSNVLFSDNGYDGLVIKIGKNLEAGKSLHDVINTAANNGLGGIEKLEGIPGTIGGAIFMNAGAHGQQISDCIKSVVSVTTYGGIVTRTNEEMQFSYRNSVFRMLDEIIVSAEFDFCPCQKKFIAEQKRGFDLPARKATFEISTAGSVFKNQQAFALSDSIYLRAIKR

SEQ ID NO: 83334 - protein, 132 aa, Unknown
  Obtained from environmental sample
  DOMAIN (14)...(129): Cell division protein FtsA
  misc_feature (1)..(132): Xaa is any amino acid
MSLRRHILSNEELVVGLDIGTTKVCAVIGEIDGNGLLEITGVGTSPSTGLRKGVVVNIEATLRSVSQAIEAAEMMSGREVHEVWTGIGGSHIDGINSRGVVAVTGRGRETREIEATISGGSRSGLGRICPIW

SEQ ID NO: 83335 - protein, 314 aa, Unknown
  Obtained from environmental sample
  DOMAIN (79)...(270): Glycosyl transferase family 4
  misc_feature (1)..(314): Xaa is any amino acid
NYLGYRQGRFPLFTLLICYIFGPRIIEALKRLKVGQVIREDGPATHLAKGGTPTMGGIFIVLSVVISMVFWTDLDNGKVWLTLGALVAFGLVGFLDDYLKVTKRSSDGLPARVKLAFQFLIAFAVMLILYYTGEEGITSLYIPFFKNPVLDMGFLWVPFGVLLIVAESNAVNFSDGLDGLLAGLLIMVFITLAILTYLSGRSDFSSYLGIPYIPGAGELTVFCLAATGACIGFLWFNAHPADVIMGDVGSLSLGGVIAVISLIIKKEVLILIIGGVFVLEIASVIIQVFSFKLRRRGWLRWRPFLIILKYPAGR

SEQ ID NO: 83336 - protein, 114 aa, Unknown
  Obtained from environmental sample
  misc_feature (1)..(114): Xaa is any amino acid
VYPRAAERIGRNIRNAMEEQGEGSKQILNGISNLNEVTQNVRGGSAEMLNGSQEVMKESQHLERVTQEITGGMNEMALGAEQVNIAINSVNEISLRNRAGIESLTREVSKFKVN

SEQ ID NO: 83337 - protein, 309 aa, Unknown
  Obtained from environmental sample
  DOMAIN (32)...(248): Nicotinate phosphoribosyltransferase (NAPRTase) family
  misc_feature (1)..(309): Xaa is any amino acid
MSEIEAMLLNTINFQSLIATKSRRVWLASGKGSIMEFGLRRAQGPDGAMAASRAAFIGGAIGTSNTLAGKAYGIPVMGTMGHSWIMAFSDEEEAFNAYAELYPDRSVFLIDTYDTLKSGIVNAIKAGKKLKEQGKKFGVRLDSGDIEYLSTEVRKALDEAGFNDASITVSNELDETIVETMVRMGAPVDTWGVGTNMVTGGNDAALTGVYKMAACEDKNGNMTPVMKFSDNPEKTTNPGIKQVWRLKDEQGAPLADILALDGPDEVETFELGSRCCFWHTSGDYRHFFHEIGAEPKPLLKMRLNKALPI

SEQ ID NO: 83338 - protein, 264 aa, Unknown
  Obtained from environmental sample
  DOMAIN (193)...(255): Glycosyltransferase 36 associated family
  misc_feature (1)..(264): Xaa is any amino acid
MSNKSPEFAKNATFGRFDDSAREYVITDPQTPYPWINYLGNQDFFSLISNTAGGYCFYKDARLRRITRYRYNSVPVDTNGRYFYINDGGDVWSPGWKPVKADVSNYSCRHGMGYTVISGARNGITAEALFFVPLNFNGEVHRVKLTNTSKGAKKFTLFSMVEFCLWNAQDDSTNYQRNLNTGEVEIDGSTIYHKTEYRERRNHYAFYTVNRAVAGFDSDRDSFTGRYSGFERPEAVAEGSPRIFALTAGADQLSQSRYLPGRRR

SEQ ID NO: 83339 - protein, 318 aa, Unknown
  Obtained from environmental sample
  DOMAIN (135)...(318): AIR synthase related protein, C-terminal domain
  misc_feature (1)..(318): Xaa is any amino acid
MYSLKEFLSGVGAMEEPVLVSGTDGVGTKLDIAFKLKKFDTVGIDCVAMCVNDVLCVGARPLFFLDYLACGKLDADMAAEIVKGVAVGCRETGSVLLGGETAEMPGFYENGKYDIAGFSVGIVDRKKIIDGSKICEGDALLGISSSGPHSNGFSLIRKIIPDLNEDFGGMPIGMSLLEPTRLYAKAVLSLMGKIEIRGMAHITGGGFYENIPRIFGKQKYTAVIRKGSWDIPPIFARIAAGCYNAGCSGPLAQRQGAELLKVDAALQKQMFNTFNMGVGFVLALSPADVKAAKEHLDNCGFPSWEIGYVKKPPGISAI

SEQ ID NO: 83340 - protein, 66 aa, Unknown
  Obtained from environmental sample
  DOMAIN (1)...(54): Holliday junction DNA helicase ruvB C-terminus
  misc_feature (1)..(66): Xaa is any amino acid
GGPVGAENLAISIGESVKTLEDYYEPYLIQAGLLQRTPRGRVVTSLTYGHLGIAPNTASDEGRLFD

SEQ ID NO: 83341 - protein, 139 aa, Unknown
  Obtained from environmental sample
  DOMAIN (23)...(138): Protein of unknown function (DUF1016)
  misc_feature (1)..(139): Xaa is any amino acid
VAKINNNKKALALNNPQINENSLFTHISKIIEKRKNRAGMYANREVTLMYWEIGHYISSVLLGGERAEYGKKILATVSHNLIKRYGSSFELRNLRRMVHFAELFPNLSIVSPLATQLSWSHFIEILPLQTEKASCFYAM

SEQ ID NO: 83342 - protein, 194 aa, Unknown
  Obtained from environmental sample
  DOMAIN (3)...(194): tRNA synthetases class I (I, L, M and V)
  misc_feature (1)..(194): Xaa is any amino acid
MPGGPVLWVPGTDHPGIATQNMVAEKLLEERGISRRELGREKFLEETWKFKHEKHARITEQLARIGASVDWDRERFTLDEGLARAVKEVFVTLYERDLLYKGEYLINWCTKCGTALADDEVKHEDTPGKMYHLRYYFANAEGDAARNAVINGQTPPCAGAHEGAYVELATTRPRNSVRRHCRDGFPPRTNATRG

SEQ ID NO: 83343 - protein, 113 aa, Unknown
  Obtained from environmental sample
  misc_feature (1)..(113): Xaa is any amino acid
FLHCPAVPQTGISPLLNNRDSAVVLPGEDKVLALTREAGMEYLITLYSKQPLDVQAIMRRFVSTKGTLGERLATATGSNPVLSLSYNAKEAAFTATTDNSRAVAALVVAIEHR

SEQ ID NO: 83344 - protein, 90 aa, Unknown
  Obtained from environmental sample
  misc_feature (1)..(90): Xaa is any amino acid
TPDYRRPGCSRRTGRNHIVADASALRAFEILSRKEGIIPALESSHALAFVLDKPSAFAAGSHVVVNLSGRGDKDLGIVSQHLALLQGDAK

SEQ ID NO: 83345 - protein, 331 aa, Unknown
  Obtained from environmental sample
  DOMAIN (44)...(280): Glycosyl hydrolase family 3 N terminal domain
  misc_feature (1)..(331): Xaa is any amino acid
FSDVPPGGIILFRYTLTTDNDAIQNLIAETVTLIAEGNTIDLMMDEKESILIPPFIVVDHEGGKVNRFLPGAVDLPAAYSYWEKAQIEGSGSAIAQISTDSFNAGIKLRGLGVNFNLAPVAEFLNKDNTKFLEGRSYGPDSEFTVEAARAFITGMETAGVICALKHFPGSAGADPHYFPGKLNGSKEALEQLVFPFAALIQGNKARAIMVSHSAVPAWDAENIASLSPAVLGEWLRQELGFKGIIISDDFSMGAATGSGRTRPEDAAVQSLIAGADMVLVWPPDLRRTHRAIQAALADGRLSRQRLEESAGRIIYEKVMGLLNKTVMSYEK

SEQ ID NO: 83346 - protein, 118 aa, Unknown
  Obtained from environmental sample
  DOMAIN (27)...(118): Bacterial flagellin N-terminus
  misc_feature (1)..(118): Xaa is any amino acid
MIINHNLSAMFADRSLKVTQVSLEKNLEKLSSGLRVNRAGDDASGLAVSEKLRAQIRGLNMASFNAANGISFIQTAEGYLQETEDVLQRVRELAVQSANGIYTEEDRMTAARDKRGET

SEQ ID NO: 83347 - protein, 128 aa, Unknown
  Obtained from environmental sample
  misc_feature (1)..(128): Xaa is any amino acid
PLARDRIRHELAKINYHIHTDAIKHNLIPVKLTPQQTSVIYANEADVLNVALFGITAKQWRDKNNDLKGNIRDYASINELICLSNMENINAVLINDGIPQKERLIKLNGIAIQQMIILNEAKNKKLLR

SEQ ID NO: 83348 - protein, 332 aa, Unknown
  Obtained from environmental sample
  misc_feature (1)..(332): Xaa is any amino acid
GLSRVIAADTPLSREQASSAGPEERLNLYESRLEQIPKDQTGNDALIAQYMVEVHKKFAIPAACLIFVLIGAPLGIMARRGGLAVGASYSVFFFIMYWVFLITGENMADKMIISPAVGMWAGNAFLILCGIVLIVLMTRETTIGFGFLKTFFGKMSPAFKRFSSFRIFRLPGALFRFPRRLLNKAVGTLPGYLIWIFLSYAGGLLGALIVIFVTIDYVSNLRKFDNATFEQIILYYWYFLPFIVQTVLPIVLFLSSMFSVGRLAKLSELTAMKAAGVNVRQLTMPLLLIGLLLSGGVFYGGEMVLPRANEKRALLNASFGKPAASQQEACGA

SEQ ID NO: 83349 - protein, 340 aa, Unknown
  Obtained from environmental sample
  misc_feature (1)..(340): Xaa is any amino acid
VGVFVRNLGIEAASKCLRTKNLLTFLFLCSLFPVPCSLFSGCASIRAPSGPVVIPEDIAGIVHAGHTNTPQEYALLDRMGANWLLRTFNWNRIEETEGQWDFDHYDKYVDTAKAAGKKIIGILAYDVPWIHKDGKTRKYIPPDKTYLYLNYVRRTAEHFKGRVDAWCIWNEPNFGFWKGNRDEFLSLARQAADALREIDSEVILLGGAFNRGIFGLPIAYIKGLFESGVMDKADAVAFHPYELNPNRSTRLFLEFRAQAAKYGFEDRIWITEAGYPTGGWYPTAVSEKKFPAYIVKTFVGLAINGAKKILWYQLFDPQNRSKKNSENYLACRPPTSRGYS

SEQ ID NO: 83350 - protein, 248 aa, Unknown
  Obtained from environmental sample
  DOMAIN (158)...(236): BRCA1 C Terminus (BRCT) domain
  misc_feature (1)..(248): Xaa is any amino acid
MRVGQTPRARFEKWIPFLDIRELGDKLIRQLFDKERVRRIADLYTLTAQELADYERMGELSAAKVVRHIQARRELSLAAFVAGFDLEGVAETTMDKVASAGFNTLEKLRKAAVEDLAGVYGLGEITAKVIVEGLAETAAEMDAVLASGVISIAPPPSEESQPMRGLSFCFTGELASMKRSEAEEKIKALGASAKSSVVKGLSYLVTNDPGSGSSKNKKARELGIPIINEDEFLKLLAAPTEPAQGELF

SEQ ID NO: 83351 - protein, 62 aa, Unknown
  Obtained from environmental sample
  misc_feature (1)..(62): Xaa is any amino acid
MNEIVSRYCPRIDFESYEDFYAHYKCNVPEDFNFAYDVVDEWSRLQPEKLAFCGTTTQRNLI

SEQ ID NO: 83352 - protein, 333 aa, Unknown
  Obtained from environmental sample
  DOMAIN (216)...(299): Transposase IS116/IS110/IS902 family
  misc_feature (1)..(333): Xaa is any amino acid
MSESTCTPPVLLVFILVILKGEKQTERFNLTKEDLCRFFSPWDKETYVLVEATINTFAFISLFRDLVKEVIVANTYQLKSVGLPGKKTDKLDAFKLAEKLKAQVMSGVQQIVPVSVPSKEIRDLRALFATYQVIRKEIGRTKNRIHSLLKENLYPFTKEYIFGKKTRAYIRSISKDYLLSFQINMLMDTLERMEEQFDALVDEIKKAGSPFMRHIDILTSMSGISVITALAIIADIIDVSRFKNSKHFTSYLRSAPRVESSNEKTVIKSTTKAGRKLSITLLSQSLNHFRDENEKLNRWYNHIISYKKKGIIRMALCRKVLRDISADLIIGQP

SEQ ID NO: 83353 - protein, 325 aa, Unknown
  Obtained from environmental sample
  DOMAIN (215)...(325): ATPase family associated with various cellular activities (AAA)
  misc_feature (1)..(325): Xaa is any amino acid
MLDDQNDKQPGQPSDKPPKSPLQGGRPNGLALFFFFAMIALFIAYFYNRNSSPIREIRYSDFINYLEQNQIESVIINDNNTMDIFPKGQPQNGAVQLRTRIPYQDPNLLPSLREKGVNISGSASKLSFWRILIDLFPWIIGFGFIWFMFRSMPGGGGKAFQFGKSKAKRYHDEGKKVSFADVAGQKDAKFELEEVVAFLKNPQKFTKMGARIPKGVLLVGMPGTGKTLMARSVAGEAGVAFFHMSGSDFVEMFVGVGASRVRDLFEQGRRSASCIIFIDELDAVGRTRGAGYGGRHDERRATLEQLLGEMDGFDFKDGAIISAAT

SEQ ID NO: 83354 - protein, 339 aa, Unknown
  Obtained from environmental sample
  misc_feature (1)..(339): Xaa is any amino acid
ISPLPQPRADTGKLRRREKYFSWQRHLSNEDIAGWYTNLVSMAVSSQAHIWALDGEKAFLQSYTPTEYTEAIYRAQRLFNEGHYVEAGKEWNNVLRFNQMSVLAHNGLGKSYLYQEEYENARYEFFVAGNRGYYSQAFWETRNIWLLGNIPYILILFVLFFAGSFVLKLADKNQILKTAIKKNIHTLMNAKYIDTTLFSFSIARHPMDSFYYLKKKQKGSLPGAFVNFVFFFLAYMVYQTSKGFIVQFIEIEDMDFNVIIGGFIGIYILFVFCNYLVTSINDGEGNIDDIFKLVSYSMLPISVALLAVTLVSHATTENETFLLVFMLIGGFAWSGTSAI

SEQ ID NO: 83355 - protein, 159 aa, Unknown
  Obtained from environmental sample
  misc_feature (1)..(159): Xaa is any amino acid
LVRNTITSLWPIKQGEAARHARRATWRRFSFSQSVFAITIVFLFLPLLVLILYSFNDSAGMNWSGLSLRWYRRLIESRELWRAFRNSIIVAVSSAITATVLGTVGAVGVNWYRFRLRPYVQTISFLPMILPEIIIGVSLSFFRRHRNTLGIVTIFCRHT

SEQ ID NO: 83356 - protein, 85 aa, Unknown
  Obtained from environmental sample
  DOMAIN (1)...(82): Phosphoribosylglycinamide synthetase, N domain
  misc_feature (1)..(85): Xaa is any amino acid
MKILVVGSGGREHALAWKFAQSPKVEKIFVAPGNGGTADEAKCENIVMKADPTSAEGQEKLKQFSFEEKIDICVIGPETALCRRH

SEQ ID NO: 83357 - protein, 129 aa, Unknown
  Obtained from environmental sample
  misc_feature (1)..(129): Xaa is any amino acid
MITANGYGLPDPQELERWALSYFPEFQEKKPGTDFDAQTAYSPVVEPYKNAAAGGSSEGALYKDSPLGAGVFDVNRIRRDFPILNEKVSGGKPLIWLDNGATTHKPNAVIDRISYFYRHEKFKRPPRGA

SEQ ID NO: 83358 - protein, 246 aa, Unknown
  Obtained from environmental sample
  DOMAIN (37)...(127): Cyclic nucleotide-binding domain
  misc_feature (1)..(246): Xaa is any amino acid
MSRRMAKADIYPVLKKSPIFSNLSGLELEAVVSFLEPRRLKKGEVVFNEGARGEEMYIIVSGRIGAWVAQVDGTQRWSFELKAGDFFGEMSIIANETRSATIVAQEDLRLLTLYGVDFYRIVFEYPMIGSKLLNSIRKVQNMWFEQISKHLGDIMRWGEVARRRAVTDELTGLYNRRFLEESAGERFSRGALGLRSVSLMMMDLDNIHQINDIHGTKAGDLMFISMAGGFAFLLPPPEIYAPGLSG

SEQ ID NO: 83359 - protein, 326 aa, Unknown
  Obtained from environmental sample
  DOMAIN (1)...(111): Glycosyltransferase family 28 N-terminal domain
  misc_feature (1)..(326): Xaa is any amino acid
MFWIGSGNGMTGAIVDSAGIEFFGIPSGKLRRYFSLHNVLDVFKIAAGFFAARKILKREGASFLFSKGGFVSVPPCAAARLMKIPVFTHESDFSPGIATRLNTRFAERVFIPYKESVAFFTGKAAKKVSVSGNPVRTEFAAADPAKGRAFLGLGGGERILLVLGGSLGSREINNLVRACLKRLTEFFTVVHQTGENNIEDALKENARYKPHAYFRDEIPHIIAAADLVLCRSGAGTIWECKFLSKPMVLIPFRGSATRGDQVENARLFEEAGAAVCFIPDPTEDSSAESASAEKLSGLIVSLAQNPEKLKSMAEASADLIHGGGFG

SEQ ID NO: 83360 - protein, 327 aa, Unknown
  Obtained from environmental sample
  misc_feature (1)..(327): Xaa is any amino acid
GFFSRHDGRATEHKNAGTATVKASGLDAYEDQTAAVSFVINKKTLTSADFTWNTLNVAYTADTVSANVKSKDSTVTVATIGAIVVKYAGATALPVNAGIYALTVDVAGGSNYNPATGLVLGNFTINKAVIDTTWLAYTIPTGNTVGKPDPLGIGPVTMKKGTGVKSITVKYNGLTDLPTAAGRYIVTVDILADSNFFSAANLALGTYEVGIGVAAGNTTIPTAKKDAVVTVAPIKVAAASFTAGPSPVAKNGVIKFFSAKQVKSGSLYIFDANGNAVTKLSAKAGSGEIASWNLKDKNGVTVAEGTYVVKGALAGKDGRARGILVSA

SEQ ID NO: 83361 - protein, 306 aa, Unknown
  Obtained from environmental sample
  DOMAIN (52)...(246): Adenylate and Guanylate cyclase catalytic domain
  misc_feature (1)..(306): Xaa is any amino acid
MTEELNRAYSQIKRYAFDAVLAGKKEERIRQIFQKYVPNDVIERFFASPEKMLVGDNRKLSILFSDIRSFTTISEGMAPDDLVNSLNRYFSGQVDIIYNRKGIVDKYIGDAIMAIWGAPEKHEDDALQSVLSALEMSDAVLKFNENQRKLGKCEFKIGVGINYGEVTVGNIGSERKMDYTVIGDAVNLASRMEGLTKTYHSEILISESLFDELRQTAPNAGLFYRLLDTVAVKGKTKGVRIFTVKKSLTPHEQKGWQLHNQGMKLYYARSFAEPRKNSRKRLEHYPMILTLTICIKDAWNTHPRRR

SEQ ID NO: 83362 - protein, 327 aa, Unknown
  Obtained from environmental sample
  misc_feature (1)..(327): Xaa is any amino acid
MAELGLVQGRWTHLNDKASLITRGQAMGIDGHFMVEQAARSWNGWFMNFNGTAGMFRIAAIQSCGGWQHDTLTEDMDLSYRMQLDGWGTEYVPGLAVPAEIPEDMNAFKNQQFRWAKGSIQTAAKIIPLLVKQKIPPFKFIQAVLHLTHYVVHPLMLMLAILTMPVLFFVKITLAPLWMAIVIACMILATSGPSTMYMVSQHFLGKKVRKQLLLIPAMMLIGTGLAVNNGKAVIEALLKIDSPFHRTPKKGQAKMKAGYKPIKDVTCLFEIFLGLYCFTSLKIFMGYTNFLVSPFLALYASGFLFVGILSIVHFRRPEVIDMKLLAS

SEQ ID NO: 83363 - protein, 287 aa, Unknown
  Obtained from environmental sample
  misc_feature (1)..(287): Xaa is any amino acid
MPTWIPKPPESTEYFSLDLARQLSQDDSIATAQCAIEAVNGADYGAADMLVGDVAIDGTIVTQAVQGGIYGYRYRLIFTIETALGETLTLDGDFLVGNTGPGSRDLTTLQAVKDWLGLKNDVDNAMLQRLITSESMAIERYIGRPVLPETRTDTITGYGTITIVAPASPIQSIEKVLVDGAEVKAIHDRLAIWRADNRPWPQRARIQLTYTAGYDSIPSDIEQACIELVALRYKERDHIGRTSVSLGGETTAFATRAMPLSTKRAWPISQVAACNASARSPRRLGVW

SEQ ID NO: 83364 - protein, 224 aa, Unknown
  Obtained from environmental sample
  misc_feature (1)..(224): Xaa is any amino acid
MDIRRGAPLELPHVLLLINDEGDALLPALGEMAKKSAPVYNTPLMMDSGSIAGWFLDAQEGQPSPALDFIAGKLDAMHRRSVTRYDGNSSPFLFAVGDGNHSLASAKGIWEEYKQAHPDEPFHPCRYALVEIENIYDPAIQFEPIFRVVFDLGIEEICSILSPLPDFSRRSVDTAKELIRLCATPATANCFGIISRGRYELIETSASGISTACLSLGHKAGGKN

SEQ ID NO: 83365 - protein, 296 aa, Unknown
  Obtained from environmental sample
  misc_feature (1)..(296): Xaa is any amino acid
MPRLSALGLSPQECAGLLSQETSDIPAGNAQDGNMELVITASGRPESTSALSKIILPLNNGSIMPEDAGRLYSASAKKESVFVYNGKEAAALEVFRRPGADPLRLSKEIQKTVKEAASLFSRDAQIEIVSDASPSLLSRINGFLISAALGVLAVFCVLLFFIRRLKYSLLAALSIPVSAAAGICLLSITGRSLNSMSLSGLAMGIGLVSDISVIILDLLNRSFEKKDTVPTYTPPESEEIGNKVFSIAGSSAASTLTTALVFLPVIILPGPLGSLFGDTAVAISLHRSAESDPWIF

SEQ ID NO: 83366 - protein, 315 aa, Unknown
  Obtained from environmental sample
  misc_feature (1)..(315): Xaa is any amino acid
MTYFIHAIMIFLGLLAVVPIYFLLLNATRSTEQINSGFVIIPLKDSFFSSSKNIISDWTSDAESGTVRCFDLVMGKTLKEEVNNKTKEIERIAVKKFAENTTPRITIFDDEDQIIVNYNLENNTIIFVKDGQKVKKGETLARHMKSSNVSYNWGILTGRGFQIFQGFGNSAFIAICATVLSIYFSALTAYGLHVYRFRGRLALWTVILIIIMLPSTLSIIGFYQFMALLKLRDSYVPLIIPGIAAAGTVLFLRQYMMSVLSTDLIDAARIDGAGEYRIFNITYLPIMLPALAAQSIFTFVGSWNNFITPFRVLSS

SEQ ID NO: 83367 - protein, 300 aa, Unknown
  Obtained from environmental sample
  DOMAIN (1)...(246): Nucleotidyl transferase
  misc_feature (1)..(300): Xaa is any amino acid
FGVAGLGNITCLSVITACSRLNAIDKKRLVLIPEPEAKNTAPVIACAIEYAVKTGGWNRTMMVLTSDHVIKPPDVFLKDLYSAVQFINQNKLIVFGISPIRQETGYGYIEASEKLAENSYVVTAFHEKPNLGTAEHFIAAKNYFWNSGMFAFRCDFLSDEYRRLSPEVICPFEDLKPPDNKSFTKINDLCILDNWSGLDNAYNQANQISFDHAITEKCSEIIMIRASFDWIDIGSWDDYALLLSSNSSAAIDTGKDVYTAGTDSCFVDSDIPVALAGVENLIVCIRSGKDGSPPSALITP

SEQ ID NO: 83368 - protein, 70 aa, Unknown
  Obtained from environmental sample
  misc_feature (1)..(70): Xaa is any amino acid
MLDISEYGYEGDLDLCEKLAERVGVGAVPGSSFFREEVNHVIRFHFAKKNDTLNDALNRLEKMKERMRKA

SEQ ID NO: 83369 - protein, 100 aa, Unknown
  Obtained from environmental sample
  misc_feature (1)..(100): Xaa is any amino acid
MPDNTAAKEAWNSLLSHNILIVWQPSYNLGIPIVDEQHRGIVSTINSLCFAIQNRHGNEILKPIIGMVNEYTPLHFEIEEDFLEKCAYPHLKKHRILQKE

SEQ ID NO: 83370 - protein, 189 aa, Unknown
  Obtained from environmental sample
  DOMAIN (4)...(167): Glycosyl transferase family 2
  misc_feature (1)..(189): Xaa is any amino acid
MKQGFLIPVYRHGKTACPLAERLSASALTVIMVDDGNDEETRNLLADCAAKIPGVALVSLKKNSGKGEAVAVGFKKAAELGLTHVLQIDADGQHDEGKIAFFLEESAKHPDMLICGYPEFDETAPKSRVKGRKISNFWASVATLSTELKDVLCGFRVYPVDASLRITAVSFSGQTLLPNSDPMKWGKFP

SEQ ID NO: 83371 - protein, 313 aa, Unknown
  Obtained from environmental sample
  DOMAIN (1)...(95): Thiamine pyrophosphate enzyme, central domain
  misc_feature (1)..(313): Xaa is any amino acid
ALHGPIGMPGTVASNRATQKTDLLIAIGARFSDRVTSKADMFASTAKVIHFDIDPAEISKNIETHAWVIGNLKDTLKRLLSKLPSRLKTEWDGEIDKWKTHLPQTYTHEVTFAKNALHPRFIIEETAKALGSETIAVTDVGQHQMWAAQFFPAEKPRSFISSGGLGTMGFGLGAACGVKVANPKRPVVLFTGDGSFRMNCAEMATLTNNKLPLLIIVFNNGVLGMVRQWQSFFYEKRYSQTTLGTAPDFIKLCEAYGVTGFRANNRESFKKALHAAGEELSAGRAALIEADIDRDENVLPMVPSGKPIDEQIL

SEQ ID NO: 83372 - protein, 327 aa, Unknown
  Obtained from environmental sample
  DOMAIN (14)...(275): Pyruvate phosphate dikinase, PEP/pyruvate binding domain
  misc_feature (1)..(327): Xaa is any amino acid
MLLKVVISSNFAITNIRTLHNFGLVKPTIDVFAKWVGVDFAASELLFLINGMMAIEERIKELEGKTKEKEEISGKIKILKRLLGIKGPSNELHNEDKTPEPKKKTAKEYMEEYGKYFPKGFFDDAESQLLITLGEISKMLSIDEQNDNDTAILIQPMVYGNYGKDSCSGGFYTRNVVTGEKKLQGNFFRDKFNEIGAEGHEINKIDALHLKQLEKIAGTLEDKFKEIRYVRFTVENGKLWLIEQRLVDQKSTQADLKLLLDLQKRKIVDEAYVIKAIDPIRLNEILHPVINMSSVKSQKSWKGGIAGAPGAAIGQVTQHRFRDQPEK

SEQ ID NO: 83373 - protein, 309 aa, Unknown
  Obtained from environmental sample
  misc_feature (1)..(309): Xaa is any amino acid
EPSRIGFKDDQQQAPFGLPAARNWVLLANYYDISLMGTAFACELGKRLGLKYTCSYNYVEFYLNGEYQGLYIFTEHMRADPAGIGAPGRPKVDLDEGWLVEIDFHYDEEPLFRTERYNLPVMIKSPDFEPASMKNSLYYFVRNDWNELTNLMFSKDFPENGYRELIEMDTFIKYFMVQIITNNSDFNVLTYNSQTEPGSIFFYKDKGAKICAGPLWDFDRTFGFNIELAADTLPYPNYPFFKRFFEDPVFLARWKVVWNNYYNDILSMRNFIDDTASKIREAAIKDLRIWYNTEDLIPSCRYLHVKKNR

SEQ ID NO: 83374 - protein, 148 aa, Unknown
  Obtained from environmental sample
  misc_feature (1)..(148): Xaa is any amino acid
GSPLTDSDEEKALHGWKKNTSGFDYMINPYHLQPGLLLDVDITSIKRKKITLDAMANVLNEFLHGVSKGFSDAAFASFSRRRSTVREDINQSFSAPTEEEPAVASAAPKPKAIAAPGRAAAPAPKKKGVVDSKAKKRPSRGGSQLSEI

SEQ ID NO: 83375 - protein, 320 aa, Unknown
  Obtained from environmental sample
  misc_feature (1)..(320): Xaa is any amino acid
VGQYSAREVSARGNEVSVLAVQDRLAGDSSESLADVLIHNHPSGFLTPSDNDLIISSRAAEAGVGSYIVDNLVENVYVVAEPVKRRKVQKLDPTVISAALEPDGAISRRLSSYEIREAQLNLMQLIIRGFNDDALVAAEAGTGVGKSFAYLLPALSYAAVNDERIVVSTATITLQEQLYRKDIPMVADALNKKIKTVLVKGRGNYLCRRRLDDALRESTLFDEDKGQLEDIARWAETTGTRSRSDLAFLPEESLWSRVCSEADNCMGMRCGERERCFVMLLRREASDARVLVVTTTCFSRIWRPAEWAGKLGRGAPPYTG

SEQ ID NO: 83376 - protein, 207 aa, Unknown
  Obtained from environmental sample
  misc_feature (1)..(207): Xaa is any amino acid
VEDTIAILRGLQERYEVHHGVRIKDEALVAAATLSNRYITSRFLPDKAIDLVDEAASRLKMELDSRPTELDKLERKLLQLSIEKQALTREEDTASQSRLGKLEKEIADLSAERDAMNARWEKEKKDVQKIREIKQQIEELKIEETRYEREGDLAKAAEVKHGRVLEAQKKLKALTDHMEGKSERRGREAGFASRGSKRRRHCPCSYR

SEQ ID NO: 83377 - protein, 315 aa, Unknown
  Obtained from environmental sample
  DOMAIN (5)...(315): UvrD/REP helicase
  misc_feature (1)..(315): Xaa is any amino acid
LRRGIIIAGPGTGKTAVLAAKIARVISEGSNSASVLALSFTVKAAAELRDRVIHLTQKQKVEKQETDKPVVATFHSLCASILREQYTEAGLPSDFKILSETERDDLLAKICAAANNKTLSPRRLGEYIEEKKRYLLLPGEKPKDFSRILPASLVSLIPDDDSGDDSVNEHAYAEYRKQLHSLDAVDYDGLIAGTVRLLAMKEDILKKYCQKFNFIFVDEYQDINFAQYALIRLLVHNEKVTPSLWVIGDPNQAIYGFRGSDKAFIDRFLHDYPGAGRFELRKSFRCAEPIIKAASCLTPTELKGADEGSSLPVSL

SEQ ID NO: 83378 - protein, 84 aa, Unknown
  Obtained from environmental sample
  misc_feature (1)..(84): Xaa is any amino acid
MNLLAIDAACSVLSVAVARDRDYYYAQTEAGMKHSELVMEIINEQMEKAEMKPADLNGVLCMGGPGSFTGLRIGFSIAKGPRPI

SEQ ID NO: 83379 - protein, 313 aa, Unknown
  Obtained from environmental sample
  DOMAIN (20)...(209): ATPase family associated with various cellular activities (AAA)
  misc_feature (1)..(313): Xaa is any amino acid
VRGQAVYKRALEIAAAGGHNVLVFGPPGAGKTMLARRLTSIMAPLTPDEAVEVTRLYSLAGPFINNGDRYAQKFIDRLITNAPFRAPHHSASAEGILGGGRNPRPGEISLAHFGVLFLDEAPEFRINVLQALREPLEDRVISISRAEGPVRLPAEFQMLMAANACPCGRLGIQETDNVCCCSPEEINRYWRKFSGALLDRVEIRVAVLPPKVEEMNAAIGKRAKPEEKSAVIMQRVKAAVEIQRLRFNGTEIRRNALLPAGKTASLCPLSEKRKVLFTQPFQDGAFPQSISGDFTVTRNIADLGGREIIETEP

SEQ ID NO: 83380 - protein, 90 aa, Unknown
  Obtained from environmental sample
  misc_feature (1)..(90): Xaa is any amino acid
MVRIGRDPLGKPCARLEGGMYTGDGGCNVGIPQNTPLKPVSYLADVDYGMVVVFLFFGGADSHWFRILPAGYRYIHTLTAMKQSDYQAPR

SEQ ID NO: 83381 - protein, 270 aa, Unknown
  Obtained from environmental sample
  DOMAIN (1)...(267): Fibronectin-binding protein A N-terminus (FbpA)
  misc_feature (1)..(270): Xaa is any amino acid
MHETFKPFPKSDKPLRFAQFLNSRIVNGWIEEAEQLGTNRIIRLLVKKGEFRYNLYVRLWSNAANFIVTDEGGNVLDAMRRQPKKGEVTGGHYVPPAEQTENEKREYTIRELPDFDPAVDNNSFNAKIDAFYAEKGGALSLEALKEQARRNCEGSIGRLQAALEKLKAKEADYASADRLREYGDIILANIASISPGDEWLEADNFYSEGTGGKIRIKLDPHARPSAQAEIYYEQYTKAKSGLEHIRAEITAGRHELDEIEKNLRRFSPRT

SEQ ID NO: 83382 - protein, 299 aa, Unknown
  Obtained from environmental sample
  DOMAIN (230)...(259): Helix-hairpin-helix motif
  misc_feature (1)..(299): Xaa is any amino acid
MEKLIETARTLRTQSGYGGYIHLKIIPGTGERLIKEAGLWADRLSVNIELPTEKSLVRLAPDKSGQSILGAMGDFSDISCEFEEARRKPRFLPQGKTVVPAFAPAGQSTQLIVGASAEDDRQIINLSSSLYRKFSLRRVYYSAFIHPGIPARGYGSGGATVSGSASYSGDPRLPDIPGPPLVREHRLYQADWLLRFYHFKAGEILEKDDSFLDPHIDPKTAWALRHLDFFPVEINRADYETLLRVPGIGAKTARRVIETRRSRSLNFESLRRLGAVLKRARYFIICGGAFNERPDNPLR

SEQ ID NO: 83383 - protein, 192 aa, Unknown
  Obtained from environmental sample
  DOMAIN (25)...(146): Shikimate / quinate 5-dehydrogenase
  misc_feature (1)..(192): Xaa is any amino acid
NIKACNTLCRSPYGWLGANTETRGFSDSLLAFWGRSNLKRIMVTVIGAGSTARAVVSELHRLGAKTLILNRTVHKARNLASAYKFAWGGLDNRGIDMMDKYCDIIIQATPAGMEENDSGDPVAMYRFCGREDVMDLTYLPEKTAFLKRAADEGCRVQNGYDMFIRKAQYQYALFTGREFPEYLMARLQMDSD

SEQ ID NO: 83384 - protein, 161 aa, Unknown
  Obtained from environmental sample
  misc_feature (1)..(161): Xaa is any amino acid
MLPPADRLIDARLDWYIRDSLYWVLHAPRQTGKTTFLQSWAREMNSGDDVAACYTTIERCQLMSDPEQCFPNLCAAIKEHAHKSDLPVPDVKDAPAGSMLSQILRNFSEIVAPKPLVLLFDEVDALEGPALIGFLRQLRDGFMGRGVERSGVHPRPICPGG

SEQ ID NO: 83385 - protein, 164 aa, Unknown
  Obtained from environmental sample
  DOMAIN (17)...(151): Flagellar hook capping protein
  misc_feature (1)..(164): Xaa is any amino acid
MALEAVMSSQEKAATAQWVDAANKKLSLELNKSNITTGQNLGKDDFLKLLLAQLAHQDPSAPMEDKEFIAQMAQFSSLEQMTNMAADFAKMAQMLKVSEASGALGKAVEINLGDDTVQGVVRAVTREDAPRILVNSNFYDWEQVIAVWTSINVLLKARPICHGF

SEQ ID NO: 83386 - protein, 227 aa, Unknown
  Obtained from environmental sample
  DOMAIN (7)...(225): Dihydroorotate dehydrogenase
  misc_feature (1)..(227): Xaa is any amino acid
LKAKEPDLSVTIAGVKLRNPVIAASGTFGYGREYEGLLDIAGLGGICTKGLTLDPRPGNQGVRIYEVSSGMMNSIGLENPGIPAFIENELPGLRELGPAIIANLSGSTVSEYVQGASLLDETDVDMIELNISCPNVKSGGMTFGIDPETAASLTRQVRKAASKKPLMVKISPNAPDIAAVAKACVSAGADAFSLVNTFKAMAIDINSRKPVLKILARPSGLGAAITR

SEQ ID NO: 83387 - protein, 215 aa, Unknown
  Obtained from environmental sample
  DOMAIN (22)...(187): GAF domain
  misc_feature (1)..(215): Xaa is any amino acid
MDHENDFKNIIRLDSELNQIQDYDLLLERILYEARKVVHSDAGSIYITVPTEEGEEGTEKLAIKYSQNDTIQKKMPPGQKMIYSIFSVLINEKSISGYCALKRASINVPDMYNIPAEMPYKFNSSFDVITGYKTVSTLTIPLIAADNRLMGVIQVINPKDSNDNIVPFSNDDENMLTHFATNATMVLSRAYITRTMILRMIKMSELRDPKKQARM

SEQ ID NO: 83388 - protein, 217 aa, Unknown
  Obtained from environmental sample
  misc_feature (1)..(217): Xaa is any amino acid
MKANKHSQSIPADKLEQARTKISEAAELLKPYLIALTPAEKQEIPKMGPKTLNFVEKSHEYAHENPSLVPNYLQMDEFDIDFADAHGLWTLHNRVQQLQEAISDTQMTAGSEAYQAALVFYNSVKVAASQGIHGAKAVYEELKKRFPGKQRDHHQPSLPPKKHRNSHPKGRNFYLTGRSSYQKGGSSYPKGRNPTPTWKFYLKVEILPQSGNLPQRR

SEQ ID NO: 83389 - protein, 278 aa, Unknown
  Obtained from environmental sample
  misc_feature (1)..(278): Xaa is any amino acid
MSVTALEIEYGVLRSENPPVCLFYFRESPDYAVMPEELRPIYQDEAKSLEKLAKLKEEIRARFSQDIKTYTTEIHENELTVSKDWADMVASDIIARLRKEWGEPSETPPDWKEQEQDTQDSFRESRTAHFAGRAAAIADMAAFCLGGKTKPQLLMIQGEAGSGKSGLLCKVMDEIEPQCLLLPFSCGISSRSSLAENMLRYFIFLLCEKLKLKDDSEDITKFKDIKDRFTELLFAACEKNAGCGRLWMPLISLQAVTKARRMLWINGRLPENFRLPCS

SEQ ID NO: 83390 - protein, 158 aa, Unknown
  Obtained from environmental sample
  DOMAIN (11)...(154): metallopeptidase family M24
  misc_feature (1)..(158): Xaa is any amino acid
LIRLKNEKQIDGIRKSCKLLSAMYRELIPLVKPGVQTIEIDQWVQNWIKKSGGRAVFLGYTIKKKPYPAAICISINEEVIHGIPSKRRIREGDLVSLDCGIELDGFISDQALSIEAGKVSDDVKKINKITNEALYRGINAAKAGEQSSCRILSHGGDP

SEQ ID NO: 83391 - protein, 121 aa, Unknown
  Obtained from environmental sample
  misc_feature (1)..(121): Xaa is any amino acid
MAKYRTTDVGAGQGLFLSVHLKEQLIPDSFEYMLNEIIGTKIDLSIFDKKYKNDKTGASAVPPSVLLKLIIYGYHNGCISSRKIYELNKNNIIAKALTGDMEIHWTTIADSYREQKATGGE

SEQ ID NO: 83392 - protein, 167 aa, Unknown
  Obtained from environmental sample
  misc_feature (1)..(167): Xaa is any amino acid
MKLSQMSIKSKMLVFSGLFFMTVAVLGTAAFFFSMRQIVRSSAAQKLTQFVETKIFQLEKSAIKEIAIAVKMADSPLIKEHFLNPENQTLKQLAFREFEGYRRAFTGNNIFWVSDINKEFYFGEDNHYTVDAENPDHYWYKMTMYETENNISTSLQSRLQKTCCGST

SEQ ID NO: 83393 - protein, 323 aa, Unknown
  Obtained from environmental sample
  DOMAIN (4)...(240): Metallo-beta-lactamase superfamily
  misc_feature (1)..(323): Xaa is any amino acid
EEFTVPSIFGNGRGDLPYRLRRFQGQRADAERKNRDFGISTDRIENVILTHGHLDHCGLLPLLVKQGYKKNIYATPATRDLASLIMMDSARIQAHDAVFLKKQAEKKGEKFTWTPLYTEQDAIAAVGQTIGVSYNRPMPLDNGVSLEFYDAGHILGSAIAEIKIKKGGEELTILATGDLGRKGKPIIRNPDIPKNPPDYIILESTYGDRQHGSTDDALKKLAEIAKRTVEKRGRILIPSFAIERTQELVYYFHLLTDDGTIPEVPIFVDSPMATNATTIFQVHPECYGEDIKEAFIKHHKNPFGFNSLHFTTSVDESKARAEC

SEQ ID NO: 83394 - protein, 143 aa, Unknown
  Obtained from environmental sample
  misc_feature (1)..(143): Xaa is any amino acid
MVFRRCKYMLRKSAYAPEDAAQDVFVNLLTCKEKAGDMAKIKNVEGLLWTIATNVCLNKLKAKKWKPGEDLTVNEEEMYPAVGDDYKRVDSNLLLEAILEEESEEVRSYVYMHYNDGMGYVEIAKTVGKSKTWVGKKLALFRE

SEQ ID NO: 83395 - protein, 121 aa, Unknown
  Obtained from environmental sample
  misc_feature (1)..(121): Xaa is any amino acid
SYLNYYNLPYAAETIIDLYHDHGTSEQYHSELKHDMDIERLPSGKFNVNELYLMIGMNAYNVLRFVGQSAKAMKTALPIKSRSLRMQLGKVIQNIIGIAIKYINVSSTKRLNKYRQSLFIT

SEQ ID NO: 83396 - protein, 335 aa, Unknown
  Obtained from environmental sample
  DOMAIN (98)...(303): SRP54-type protein, GTPase domain
  misc_feature (1)..(335): Xaa is any amino acid
MAEDCPAGEEMKFTEKIKNFFAGRSSVSQEFFDDLADLLVEGDIGAQEAYDTVELLRQICKKDKISLPEEARERLALLLEKTLVDGIAADRLPPPLGPQTVILLLGVNGVGKTTTAAKIASIYKGQGQRPVLAAADTFRAAAIDQLKIHGERLGLRVVAHQQGGDPAAVVFDAIEACGLAINGGGGVVIADTAGRMHTKSALVEELRKIDRIVESKASGARYVKYLVLDATTGRNALAQAEIFSEAVSPRAAILTKYDSTAKGGVVFSLASVLHMPVAYLCTGEQYGDIRAFDPHDFAREFAGIYLKSCGGYFRLTRWHPGVFLLGFFLVAGFFA

SEQ ID NO: 83397 - protein, 135 aa, Unknown
  Obtained from environmental sample
  misc_feature (1)..(135): Xaa is any amino acid
MTWFQWLISIYEHIRPVLDIVLLAFILYKGYELLEKTQALPLVKGTGFLFLVYAIAWLLNLTTLRWVLTIIAPGLFIAIAIVFQPELRKIVLRLGQTEFFKPNAIANIGKLDAVEPRRNFSRKKKRNSANLSTRP

SEQ ID NO: 83398 - protein, 329 aa, Unknown
  Obtained from environmental sample
  DOMAIN (117)...(281): Radical SAM superfamily
  misc_feature (1)..(329): Xaa is any amino acid
MLDVSKIPLHCEERTSDHPIVIAGGPAVSNPLPYSPFIDAFWIGEAEDEFFNLAEELSALKKSGKGRAELLKKIADHPNVWVKGKGKVTRAITENFSQESNVYPIPSMKIVQHHGAVEIMRGCPNGCRFCHAGYWYRPCRQKNEQLIAAQVDEMVTKGGWQEISLSSLSSGDYSGIAELVENLNARFSGKHISFQLPSLKVSGFSLSILEKIAVTRKSGLTFAVETPKELWQMAINKEVTGDSVVSIIAEARKNGWKGAKFYFMIGLPVPDCGFNEEEEIVSFITDIGRRCRMLFSINVGIFILKPHTPYQWAQQITARPRKETEFIRS

SEQ ID NO: 83399 - protein, 80 aa, Unknown
  Obtained from environmental sample
  misc_feature (1)..(80): Xaa is any amino acid
MYETVFLEGVMNPVECEASLDKHWSIHTWFCTADDKETIIWANFHGEDPRNGNVEINVRPFVFWPEKNLINNITVNGVHP

SEQ ID NO: 83400 - protein, 311 aa, Unknown
  Obtained from environmental sample
  misc_feature (1)..(311): Xaa is any amino acid
VSTTTTALAKKKAPRLLCGLPVRVLEEIPNCVNLITAVLPSARAFCKRDFAVVMAEFYHRTAHYRAWETAEASDQAETEHNFSRSVWTIHCPDPGPGAKLFLDAQDIDGNIRRFTPCDAFEYFVRFSSEDGTTSYSFLFYLFKFLNLLCSASALIPYVLAKGKTLKIIWRPFETLPDVRKILDAIGAIECGMLNTVNGRSVVDLLASAFFNEWVYRRSLAFRKSFGRQSGGQEYLELLNLFFYETEIDVSTPARRSLPQAIDRWLAVLHIDFTAYRYSLTVKDAHAKRAFGTDFKFSLSMDVYRGTLTYGG

SEQ ID NO: 83401 - protein, 313 aa, Unknown
  Obtained from environmental sample
  misc_feature (1)..(313): Xaa is any amino acid
LGSPIDQIRHEIAPFYHYPPGQAAREILPGGLAPTLTKVLRPTGNETPFLLGDEAELTGRLKASGSEGLDLKNLAAEGLGQAARRLVASGQARPGWRLDLKTAGTRTEWWLAPASSPPASPRRLGPREEALWRLAREGPAKPLSYFAHYVPNPLPQARSLAAKGLIELTAREVYRDDPDRALAPAGPGPPPVLTEQQGRALAALEAALAAGSGREFLLFGVTGSGKTEVYLRAAAKTLAAGREVLWLTPEIGLTLGLEGLLKSRLGGERVAVLHSGLSSAQRHDQWRRIRRGLAPVVLGARSAVFAPLENPAW

SEQ ID NO: 83402 - protein, 326 aa, Unknown
  Obtained from environmental sample
  DOMAIN (43)...(326): UvrD/REP helicase
  misc_feature (1)..(326): Xaa is any amino acid
VFPPDDGERISPAMSLLLKNQGPEPPEPLKTQAVAPPDLAARLNPSQLAAVTYEGGPLLIVAGAGSGKTRTLVHRVAYLVGRGVPPPAILLLTFTRKAAREMLDRAMALAGHRAGEVSGGTFHSLANALLRPTAHLLGYPNGFTIMDQDDAEALLARIRGDLPEIKKYKRFPQKGALLSLLSQAVNKDRPLAEVVAESFAHFQEYTPLLEKIAKEYRDQKLKNALMDFDDLLTGLETVLREHEDIRGRLAGRYNYILVDEYQDTNPVQARPDPPFGPGPPAGHRRGARRPIHLRLSGEQLPKHHGISPNLPRPQVMNLKKTTHPGT

SEQ ID NO: 83403 - protein, 170 aa, Unknown
  Obtained from environmental sample
  misc_feature (1)..(170): Xaa is any amino acid
MLLAKIYSARPGRYFTIIPQEIDAAEFAADLDSLSGVPCLQFPGWGIAPYRELAPHSAVFGERIRALSELVTGKPGIVVIPQRAFLSPLPPPDYIKSLLVSIKPGAKIDTAGLSQKLVSYGYIRVPRVQVRGEFALRGEVLDIFMSGESGTEDETKPRPFASFSAIKPGG

SEQ ID NO: 83404 - protein, 91 aa, Unknown
  Obtained from environmental sample
  misc_feature (1)..(91): Xaa is any amino acid
MKTANKIPANIWGLLTIIVILGVMMPMKATAAEAVLNGGVDFNIRFFDRRVYYAQNDLINIQITITNNSPMTYRFQLADERVFSLDFEVRP

SEQ ID NO: 83405 - protein, 183 aa, Unknown
  Obtained from environmental sample
  misc_feature (1)..(183): Xaa is any amino acid
MEGKGIIIVVPAFKPRRGGGHLVRCMKLTADLRAAGKQAVIFVSSQTDPNLFFQSMNFNSQWRITEDDLLQTVPGTVEFVIIDRFQTPLDELLRWKNIAPVIGIDEGGVYRDNFDFLIDILSPKNFLTPPAHITSVSLLKFPDPLPVKPNADKKIRISISFGHEDQTELGIFTAQALDRQNKK

SEQ ID NO: 83406 - protein, 305 aa, Unknown
  Obtained from environmental sample
  DOMAIN (130)...(290): ATPase family associated with various cellular activities (AAA)
  misc_feature (1)..(305): Xaa is any amino acid
MVKQEMQETVTAEAERRAEEILLDLFSPGTGKSPKKPKNQVQPMVRPMGTFSINPNNGDGPGPAFMGAAIQVGIPIKGANSEDSEEDEAFEDSPTDTQSETIGDTPPRGSPPDATREKFRAMLREGKLEDRKVEITVNQNPQFPAIEMMGGGMEEIEASLSGIAGFFGGNKKKKVVTVSRAREILINEESERLIDRDRVSDEARQRVEETGIVFIDEIDKIAVKGDRGGGPDVSREGVQRDILPIVEGATVNTKWGPVNTDHILFIAAGAFNMAKPSDLIPELQGRFPLRVELDSRGLGQSNHFG

SEQ ID NO: 83407 - protein, 293 aa, Unknown
  Obtained from environmental sample
  DOMAIN (1)...(135): ATPase family associated with various cellular activities (AAA)
  misc_feature (1)..(293): Xaa is any amino acid
LSALPGVGKTSLGRSIARALKRRFQRLSLGGMRDEAEIRGHRRTYIGSMPGRIIQALKQAGTRNPVVVLDEVDKLGTDFRGDPSSALLEALDPEQNFSFSDHYLNVPFDLSKVMFICTANHLETIPSALRDRMEVIALPGYTMQEKLVIAQRHLLPKMLKDNGLQEKELSIHAKAIERIIREYTREAGLRNLERELGSLCRKIARRKAEGRQGPFRVGAAQAPKFLGVPRFLDTEKEKDFKPGLALGLAWTPFGGEVLYIEASNMKGKGRLTMTGQLGDVMQESPRRSVAIIP

SEQ ID NO: 83408 - protein, 225 aa, Unknown
  Obtained from environmental sample
  misc_feature (1)..(225): Xaa is any amino acid
MPRKTESYIEEVITIFLKYAGKENLKDYIVYSVLELAANAKKANTKRVYFIERGLDITKNLDYTIGMEYFKESTLGNISHFLKLQEEKGLYIRLALQLRENVIHIEIRNNAAVVRTELARINDRMARSRQYQSLDEVFSQILDDSEGAGLGLIILVLMMRKIGLDEDCFNISGDEQETIARLTIPMDKVNVENISGLSQAIVNNVKSLPQFPENVMEIQRLLNNP

SEQ ID NO: 83409 - protein, 212 aa, Unknown
  Obtained from environmental sample
  DOMAIN (1)...(209): Cys/Met metabolism PLP-dependent enzyme
  misc_feature (1)..(212): Xaa is any amino acid
TLGGVIVDGGNFDWARNDKFPGLSKPNPSYHGAIFSQVAGNLAYIIKARTTLLRDTGAAISPFNAFLLLQGLETLSLRVERHVSNTLKVVDFLKKHPQVESVSHPSLPEHRDHKLYTRYFPNGAASIFTFLLKGDAEKAKRFSEELKLFSLLANVADVKSLVIHPASTTHSQMSEAELLEGGIKPNTIRLSIGTEHVEDIIGDLMAGFEAVK

SEQ ID NO: 83410 - protein, 125 aa, Unknown
  Obtained from environmental sample
  misc_feature (1)..(125): Xaa is any amino acid
LRKKREFVENAFYHVTSRTNDKIRVFENRLGRKIILIALQDAKDKFHFQLTNFCIMPTHFHLLIKPIKHTSLSKIIHGLRHAPLSIGIVYMVHLTMFGALNKSTALSRVFPKMYHGVALEKTILF

SEQ ID NO: 83411 - protein, 109 aa, Unknown
  Obtained from environmental sample
  misc_feature (1)..(109): Xaa is any amino acid
LSATEKETALIEAVLYLESDPIDEGTISRISNLSNETVTSALENIKNRYADQDCGLELVRIGGGIMISAKREYWEPLKERYGKKSEGKISRAARKPSQCREAARDNREK

SEQ ID NO: 83412 - protein, 55 aa, Unknown
  Obtained from environmental sample
  misc_feature (1)..(55): Xaa is any amino acid
MSLEEKVKKIIVDQLGVSADDVHPEASFVEDLGADSLDLTELIMARRRISAINRG

SEQ ID NO: 83413 - protein, 269 aa, Unknown
  Obtained from environmental sample
  DOMAIN (1)...(265): Aminotransferase class I and II
  misc_feature (1)..(269): Xaa is any amino acid
VDDSVLPGAAGGWEGSGYAGILYLPCTPENDYFPNIDLIPQNSLIYFCSPNNPTGAVSTRTQLTALIKAAVDKSCLIVFDAAYSEFIRDSSLPKTIYEIDMADKCAVEVNSFSKPAGFTGVRLGWSVVPKALKYVGGESINADWNRIAGTIFNGASNIAQAGGLAALDDEGLKEIRRLTDFYLGNAKLIKDALKNLGINCIGGDNSPYIWAHFPGRDSWEVFSQILEKCYVVTTPGAGFGPAGQGFIRFSAFGHREDVEEACKRLSTLF

SEQ ID NO: 83414 - protein, 303 aa, Unknown
  Obtained from environmental sample
  DOMAIN (2)...(303): Hsp90 protein
  misc_feature (1)..(303): Xaa is any amino acid
MHSKAEGILEYSSLLFIPGQAPFDLFSSFERKHGVKLYVRRVFIMDNCKELLPEYLRFVRGVVDSEDLPLNVSREMLQKNAVIERMHKALVSKVLGKLTEMAESDPAAYKEFWKCFGTVLKEGLYNDYENREKLLELARFQSSMCDGDDFVSFKQYVGRMREDQKDIYYITAESRSVAEKSPHLEIFREKSIEVLYLVDPVDEWIIGMGGISDYNGKQLRSVAKGDLDLGDLGKEEAEKRKAAQAELTGLSGRIKEILAESVEDVRVTGRLKDSPACMDRGESVRGCASRKGDEGNGSGGACV

SEQ ID NO: 83415 - protein, 84 aa, Unknown
  Obtained from environmental sample
  misc_feature (1)..(84): Xaa is any amino acid
MADFDADLIIIGAGPAGLTAAQYGARANLKVLVVEQLSPGGQILVIDRLENYPGVTEGISGYEFSLALYKQTETFGASFLTEPV

SEQ ID NO: 83416 - protein, 129 aa, Unknown
  Obtained from environmental sample
  misc_feature (1)..(129): Xaa is any amino acid
MLIFLCTGRVMGVFAVIWQLSGKETISVNNIFEILGASILINVGITLRYKMKFRNFILENIVNVSYIIIVLLAFRAIFKWHSLSVWFFIVLGLFIYILSIILLYYQDFRNKEEINKLLKKRREKNNDAP

SEQ ID NO: 83417 - protein, 192 aa, Unknown
  Obtained from environmental sample
  misc_feature (1)..(192): Xaa is any amino acid
MKYKLLFFVIFISFVFSCYSNPETAEKSPATPPPVTINTLTLVATGDNLFHETIIDSSLKNGVYDFTPVYSEIKNIIEKADLAFINQETVMGGASFGYSGYPAFNTPQSLAKTIAETGFDIVNQANNHAMDMGQKGLIATLDLWDTIEGITVIGARKTGDSARIITKNNISLGFLSYTYGLNGMLSGSAESD

SEQ ID NO: 83418 - protein, 124 aa, Unknown
  Obtained from environmental sample
  misc_feature (1)..(124): Xaa is any amino acid
RTWSFNRQPNNALTDNIQSSWGFSLIVSNPPYIPTDEIKTLAPEVQNEPLIALDGGQSGLDIIERIIEGAPDYLSKNGALLMETAGKKQTEKIAVLLEKKGFTNINIYKDLSGQERVIEGLYEV

SEQ ID NO: 83419 - protein, 324 aa, Unknown
  Obtained from environmental sample
  DOMAIN (188)...(221): Tetratricopeptide repeat
  misc_feature (1)..(324): Xaa is any amino acid
LGLLSDSSADYSDSADRYRLAQDHFIIARDYERRGFHEAAFELYEIAHGFWPRSGFLRRLLADEYMQRGRYDRALALFSEVGLSDLTPDELRTLSSLHQRLGNVDKAAEAMEALGDERSDEEMYTLVLLYESMGRKDKALKSFRDFFAGGRRPAGAGIKMVQFSVGERRLTDAESLAVILRSVYPNDAEIAALLGTVKYLVRDTASAITLFNEALKLDPKNEEALRTMAHINLVKEQYPEAIALYERLTALTAVAPIYKRGLAILLYHAKKYPGGREDFNELILEKGDDGTEVIGKPELHLYGGLIYSQTKRTDRAASEIRAAL

SEQ ID NO: 83420 - protein, 213 aa, Unknown
  Obtained from environmental sample
  misc_feature (1)..(213): Xaa is any amino acid
MNHPGISLILATGGAGMVKSAYSAGKPALGVGPGNVPCYINKNVNVTRACTDLMISKTFDNGMICASEQAVIVDQDIAQEFERTMTENNCYFLNENEIKKLTDFVINREKMSANPAAVGQSADWVAEQSGVKVPPRTKILLAKLPEPSFNYPLSIETLMPVLAYFVVKDEEQGFAYAKKMLELGGLGHSAVIHSDNKDLCVRTRPIYQPGGKK

SEQ ID NO: 83421 - protein, 69 aa, Unknown
  Obtained from environmental sample
  misc_feature (1)..(69): Xaa is any amino acid
MNLKWIWFIASRYIFRKRKKSPAPVLSILGIAVGVLALIVILAVMNGFQLGFIESIRGDSSSADLMPEA

SEQ ID NO: 83422 - protein, 175 aa, Unknown
  Obtained from environmental sample
  misc_feature (1)..(175): Xaa is any amino acid
FFSPPADREFFSRLSIQKQGEILPEGKTGEIVITTLCKEGAPLIRYRTHDLTKAIHGKCECGLEYPRIGTIIGRSDDMVKVRGAIIYPSRVDELLATVDGVSSEYQIMIDHLNGKDILTLFFETRETGEAAHNLEKTVEHEFKERIGLTPKAKAVGMGELPRSEKKSTRVFDNRY

SEQ ID NO: 83423 - protein, 303 aa, Unknown
  Obtained from environmental sample
  DOMAIN (20)...(302): Aconitase family (aconitate hydratase)
  misc_feature (1)..(303): Xaa is any amino acid
MLPPISKNLYNAIRIKYGKTLTQKIFDTHTADQPFEDVFVLRLDRVFCHEITTPSAINDLVSKKLDKVFDPGKIKAVIDHVTPAKDSLTAQQGKTLRDWARRHNIRDFFDIGRNGVCHAIFPEKGFVRPGFTIIMGDSHTCTYGAFGAFAAGVGTTDLEVGILKGVCAFRKPETLRINLSGELPQGVFPKDVILAIIAKIGVSGASGKVMELRGPVISSMSMEGRMTICNMAVEAGATSGVCMPDMTTVNYLWPFIGPEGEKAYSTKEEALADFSKWTSDDDAIYSGVVDIDCSKLSRLRQSV

SEQ ID NO: 83424 - protein, 293 aa, Unknown
  Obtained from environmental sample
  misc_feature (1)..(293): Xaa is any amino acid
MKRAMPENKGRRKPYHLSFVIFYLLFFICSAAWARGKIETVTAEGTETWRHNFDIKGRRKGTYNFIVNAEDHAGNESVSGPFNIKIDPKSGLPAVKVIFPENGSVIRQNINVLGTAKGYFDIETVSVRLDGGETFEAEGKEYWSRMIEFNGTTDSKGKSRGITDGKHALYIRATDINGNGGPELRIDFIYDTSPPKVDILSHKIGDTISSNVNIKGRASDANGIRSVELSEDGKNYTRMDLRNLRGLFKSLKRNNTIDFEIPVKARELPDGPKVYHVRATDTTGLGRSDQWPG

SEQ ID NO: 83425 - protein, 315 aa, Unknown
  Obtained from environmental sample
  DOMAIN (88)...(292): Lon protease (S16) C-terminal proteolytic domain
  misc_feature (1)..(315): Xaa is any amino acid
ENEKAFHREAVSVPQGGKGKRPVGRENKITDDAIKSIIRYWTMESGVRGLEREIARCIRRVARQAVSGGYGAPVPGGEEKFVNAFRKTIKSDGLEKLLGRRKYKNDVMFREARIGVSCGLAWTETGGATLPVESARFEGSGEVLMTGNLGDVMKESARIALSYLRSVQHSYKYVVKNIGKTDFHIHVPEGAIPKDGPSAGLAIATSLLSTLCQKAPRPGIAMTGELTLTGRVLPIGGLKEKLLAAIRNGIEKVLLPADNRGEWDELDKDITTAINVEFVENALDAFAILFDKGIKMGFGVRGSGTRVKSRQQSKK

SEQ ID NO: 83426 - protein, 298 aa, Unknown
  Obtained from environmental sample
  misc_feature (1)..(298): Xaa is any amino acid
LYSPKRCKSNIDIVTTIDDKGNITAAEADIAVNLGAHGVNGEEILDQVCLGVIGYNKVENFKITARAYVSNIPPQGPFSGFGLAQGFFAMQRHIAQIADTVQVNPLEWRKTHYNPSMVLPSGINPKNHISVDKLISAVTNTSDFNRKWASYELLKQSRREKTLTYEKGENLRGIGLTVGFQGNGLLYHGEDKGIYSAEVTLTKDGFLEIKTSITSSEEDYVRIWAKIALNILSIEEGKIRLISQQTPDGGPACASRNITSLTKLIEKCCQAIRKQRFTTPCLLPCAVSADSDLGGGEK

SEQ ID NO: 83427 - protein, 333 aa, Unknown
  Obtained from environmental sample
  misc_feature (1)..(333): Xaa is any amino acid
GPRPYPGEMGAVGIAILTKREIIEHGYTSPHGISDHSRFIGFDALEDFDYTQQANLVCPFCSNNCNRTLVRFSNSLTWVTGNRCERGELVGDPDNPTVREEANKITQIMNSVPDMIKIRDQLLFKDYPFSQLLPQKNITIGIPRVLDFWRTLPFWKVFWATLGFKTKVSRKSSKRLYEKGLQYVASDTVCFPAKLIHGHIQDLIESKVDRIFMPQFNRLPPDNLEKFSTFTCPVLKSYPLSVKYSDNPEDKHGIPFDSPVFHWFSEKDQDYQLCRFMRETFNIPQNICRAAISQGEKALAEFNRELVENGKKIIEETEKKGGLRGLGQSVMAG

SEQ ID NO: 83428 - protein, 86 aa, Unknown
  Obtained from environmental sample
  misc_feature (1)..(86): Xaa is any amino acid
MYATVSLVTNSRRDVPVIPRVSVINTYGSWIVFTVDDRNIASRKVITLGLENENYVEVLGGLEVGDRVVSAGQNFLSDGDPVRIVE

SEQ ID NO: 83429 - protein, 221 aa, Unknown
  Obtained from environmental sample
  misc_feature (1)..(221): Xaa is any amino acid
MTIAEFSVKHPVTVIMLFALVIGMAITIVPNLAVDLFPTTQNPVISVSVRYAGAGPTDVEKNVTDRLERALAGSRNLVNMTSYSQFESSSVTLQFAFGTDMDRATSETQTIVSRLANSLPDGADTPVVRRYDMSTSSIMRLSVRGNYPPDQLRIFAEDDHSSQIERIDGVAIAEVTGGTTQVVRVAVSLNRLAAFTSPVGCKQRPRGQNILAGRGDLLRGT

SEQ ID NO: 83430 - protein, 310 aa, Unknown
  Obtained from environmental sample
  DOMAIN (1)...(191): Pyruvate flavodoxin/ferredoxin oxidoreductase, thiamine diP-binding domain
  misc_feature (1)..(310): Xaa is any amino acid
MAACIGASIAGLKSMSATSGPGFSLKQENIGYAVLAEIPCVIVNVQRSGPSTGMPTSPSQADVMQARWGTHGDHPVIALSPSSVRETFDLTVEAFNLSEKYRMPVILLMDEIIGHLREGVEFPDASELKIVNRKKPTVSPEEFLAYKVPKGAIVPPMPSFGEGYRYNITGLIHDETGFPTNNNAIAAKMMERLMKKIEDNVNDIIRYETSGVSGCDILIIAYGGTIRSVKAAVKLAAESGIKAGVFRPITIWPFPEKALRDCVLDNNIKKVLVAELNYGQISLEAERILKSDAEGRTSENDLGRSDTWER

SEQ ID NO: 83431 - protein, 70 aa, Unknown
  Obtained from environmental sample
  misc_feature (1)..(70): Xaa is any amino acid
VDFPKETPKATMGCQKGIPIVAMTANVFREDIEKCLDAGMNDHITKPIFPDDLYASLKKHLQQEREFNEQ

SEQ ID NO: 83432 - protein, 159 aa, Unknown
  Obtained from environmental sample
  misc_feature (1)..(159): Xaa is any amino acid
LLHLGIDVGSTTVKAVVIQPETKEKLFSCYERHHACQSEKVYAFLKDIFSRFPNEHFRLALCGSGGRTIAQMINAPYIQEVVANSIAVRTFYPQSRVAVELGGQDAKIVFFYHDTATKRLLAGDMRMNGSCAGGTGAFIDEVAALLRIPGEEIDAPAGQ

SEQ ID NO: 83433 - protein, 285 aa, Unknown
  Obtained from environmental sample
  misc_feature (1)..(285): Xaa is any amino acid
MLTGWKNAFFHDSFPWKDEHSFSNGIAINNLMALKLFLDSVHIKFCLLKPYFEKGEDYPLLDARELLPPFDYDGWEYSELPAFAMVAFARHLASFSEIFQYDILHAGEGGTPDNRVIASNTHTIAARLPKIFQEDFRKRFGHIDASMLEYYPLLLPYLLKMDRAHVLAFDAMNRFRLTGINASFPCDIDGELRRYGMRIGKFRPGNNDSYERNRMFVYQHLMGLYGFPVVAERRTYSALFARKLHRMGARFLLRVLGQVDRTLTTYTHLGDHTPLPPGEKDPAVS

SEQ ID NO: 83434 - protein, 173 aa, Unknown
  Obtained from environmental sample
  DOMAIN (1)...(173): Transposase, Mutator family
  misc_feature (1)..(173): Xaa is any amino acid
MARKREKKEKDIIDQLLDNIDFRGLTQGEVVGQNGLIKQLTGRILQKALEAEMTEHLGYEKNSNAGDNSGNSRNGHTEKTVLLENQSATIEVPRDRNGTFEPIIVPKHEKRLPLFNDQIISMYSFGMTDRDIKSHLEKIYNVEVSPDLISRVTNAVLEDAREWQSRPWKNHTR

SEQ ID NO: 83435 - protein, 109 aa, Unknown
  Obtained from environmental sample
  misc_feature (1)..(109): Xaa is any amino acid
MSYMGLYRVILSGDNGKQGGITKTGNGHIRKLLTEAAWHYTRPVKVSIRLAERRVGTPETVMSYADRALNRLHGKYVKLLFKGKSKQAAVTAVARELSGFLWGVMTTVA

SEQ ID NO: 83436 - protein, 328 aa, Unknown
  Obtained from environmental sample
  DOMAIN (8)...(176): ABC transporter
  misc_feature (1)..(328): Xaa is any amino acid
KFDDQIGRVLFGLYQAEKGSIKKNGKIIHINGPNDAAKSGIGMVHQHFKLVHNFTVLENIILGAETVKYGVLKFENARNQVIELSRRYKLDIDPDALISDITIGMQQRVEILKMLYRENEILIFDEPTAVLTPQEIEELMHIMKNLVAEGKSILFITHKLDEIKAVADRCTVLRKGKYIGTVDVAAVSKEELSEMMVGRKVNLSVEKAEQQPGETVLKTENLTVKSKTHGKALVNNVSFEVRSGEIVCIAGIDGNGQQELVYAITGMLQLDSGRVFLEGRGNTHNGIRSRGISHIPEDRHKHGLVLDTIMRIILFCKIFFSSLSENGF

SEQ ID NO: 83437 - protein, 163 aa, Unknown
  Obtained from environmental sample
  DOMAIN (11)...(132): Transglycosylase SLT domain
  misc_feature (1)..(163): Xaa is any amino acid
KVPPVRILNGGKIRAGIYSGASAPLRLIRTESAFKEAVVSRAERVGLMQLMPKTAKDMAERLKRAGGPDYFGEDGIVDSTNPSHNVHIGTYYFKYLQDYFKDTVLALLAYNGGQNRVRRLRAASKLPVDLFVETITNLENRDYGKRVPGIARVYQELYYKETQ

SEQ ID NO: 83438 - protein, 308 aa, Unknown
  Obtained from environmental sample
  misc_feature (1)..(308): Xaa is any amino acid
MAILKDLSIYYRESYKLEVRQKITQGMSAGEATPENIKKKMPSVMPGSPFYKELIDEIIKEDYSKDGQDMKDTILNSLKVPMAKQKAVKAPVNFKLILLDGIQVIGGASASLTEILTKLDENQTIMESHKKGFMQMVKELIRQITNAEPEEVIYTVEYLDQTKDVPVKERVSFHHLRDELEKKIRFLTSLMKGPAYQKLSAMSEEQIIGYLERNITEMQNYHRTLGALDDFFKAKVTPENRDKIKGIKPELSALKNSYVKANQLRYDYSAQKEEEEQLTRLGGNLSGSKKRPLAGAPPLAPLPEFRIN

SEQ ID NO: 83439 - protein, 70 aa, Unknown
  Obtained from environmental sample
  misc_feature (1)..(70): Xaa is any amino acid
LAESVDEEVTVVVQVNGKIRDKFSAVHNTASDELEKTAKALPGIQKWINSKTIAKVIVVQNKLVNIVLKN

SEQ ID NO: 83440 - protein, 226 aa, Unknown
  Obtained from environmental sample
  misc_feature (1)..(226): Xaa is any amino acid
MRKFYNYPWLIVAAIAIVTVFFGFQLPRAQLDNNNLRFVPKDDPALETSRRIDDMFGSSFFILIGLQRPYGTVFDREFLDRIQAYSAVVEVMPHVKEVTSLVSADYICSKGDAIVVEKLVGDNFSGTNEEIAELKRRLLSWDMYERALFSDDFTATQILIPLTITTEEAGLSAVTEVFMQIRDIARESFADYATVYVTGMPVISATANEAMNARPKLLVPLGVMVV

SEQ ID NO: 83441 - protein, 176 aa, Unknown
  Obtained from environmental sample
  DOMAIN (40)...(155): CBS domain pair
  misc_feature (1)..(176): Xaa is any amino acid
MKSPFSGIFKNREIKDLEEDKQEMIRGVVELSATTVKEVMVPRTDTVFLPVTASIEEVFSTIIESGHSRFPVYEETIDSVIGILHVKDVLKVLVDKTPLDIKSLVRKPFFVPVSKHIDDLLKELRRKKVHIAVVVDEYGGVSGIVCMEDIIEEIVGDIQDEFDHETEDESPLAQQG

SEQ ID NO: 83442 - protein, 100 aa, Unknown
  Obtained from environmental sample
  misc_feature (1)..(100): Xaa is any amino acid
MLVIFNHINFLEVPILVTHSYPLYVSGLVKSETWDNPVFAFIFNTYKAIPIDRRGAFNEAFKKALEAIEKGYYICVAAEGTRSKNGVLGKGKTGNYPTCP

SEQ ID NO: 83443 - protein, 296 aa, Unknown
  Obtained from environmental sample
  misc_feature (1)..(296): Xaa is any amino acid
LPALPARPEYTFDGWNTKPDGTGTIFNAGTPVTANINVYAKWKAIPKKMVAVAFSANGGSAPNPARKEIVAGSACGSLPPATTRTGYAFDGWNTKPDGSGTAFTANTPVDAPITVYAKWKGKTYTVTFHRNGAESSNPPIPQIQAAYNSRITLPTPPTRPNFTFEGWNTKADGTGTIFNAGTPVTADIGVYAKWKAAPPKVVAILFNANGGTPNATRQVTVGSSLGTLPTVSRNGYKFDGWYNAASGGGKINSTDPISGNYTTFYAHWTANTPAPTPSPQPAPQPASADLIRAETK

SEQ ID NO: 83444 - protein, 289 aa, Unknown
  Obtained from environmental sample
  DOMAIN (207)...(284): Response regulator receiver domain
  misc_feature (1)..(289): Xaa is any amino acid
MAIINDILDFSKVESGKLEIRNEPYEAASLFTDVLTIIQVRLVGKHVRFMHDISPDIPSIITGDQTRVREILLNLLSNAVKYTEKGFITFTVRCRREKGPGGLLLTFKVADSGIGIRREDLGRLFDDFSRVGEAGNIEGTGLGLYITRELCRAMGGEVEAQSEYGMGSSFTATIRQAAAADCPPMGDLGAKAAINEEVAVKFSAPDFRVLIVDDNEANLKVAAGYLLLYSINADICQSGAEALALAQDREYDLVLVDHMMPDMDGLEVLAAPSRPGRNFRETARGGFHG

SEQ ID NO: 83445 - protein, 133 aa, Unknown
  Obtained from environmental sample
  misc_feature (1)..(133): Xaa is any amino acid
DTGYESFFGYLVTEELLPIADYFGNKEGYSKDKMNVDVEIEKGHVLDVPVLTKSPWIFELEVNRTITLKNSNIFLCNIRNVLAEEYLCDETLSVEKCIKTILPVHTVSQKYYSWNGNEVCNWGEAMKEITNDS

SEQ ID NO: 83446 - protein, 123 aa, Unknown
  Obtained from environmental sample
  DOMAIN (2)...(112): CheW-like domain
  misc_feature (1)..(123): Xaa is any amino acid
EKFQPAHKDLTDIMGTQKMVMCHGQLLPLYSWAEVMGKKNTVTVENGIVMVVEDAGKRTGLLVDRIIGQQQTVIKKLGEGVGKIDGVSGGAIMPDGKVSLIIDVAETVKLAMRSGSMIADPKS

SEQ ID NO: 83447 - protein, 260 aa, Unknown
  Obtained from environmental sample
  DOMAIN (1)...(259): tRNA synthetases class II (A)
  misc_feature (1)..(260): Xaa is any amino acid
MQYNKNASGAYEPLARKCVDTGMGIERTVTVLNGKKSVYDTDIFAPVIAAIEKASNGHKYGQDNDKDYSIRIIADHVRSATFILGDPKAVSPSNVGAGYVLRRLIRRAVRHGRKLNSEKFSLSPIAQVVVEQLKGAYPELEQNCGFIMSELDKEEAKFLETLQKGEHEFEKLLPNLLKDPRKIMSGRLAFKLYDTYGFPIELTEELAAESGMKVNKEEFDEAFQNIRNFHDPQAALLGRARRSGRDGVKYLHATHLLHRR

SEQ ID NO: 83448 - protein, 328 aa, Unknown
  Obtained from environmental sample
  DOMAIN (2)...(75): Sigma-70 factor, region 1.1
  misc_feature (1)..(328): Xaa is any amino acid
GNPRSDGRGIGGIKLVEYAKEKKTLSFEEISDYLPEHISDTEKIEPVLALLEANNVQITVDDSTGEDDADADGGKRTGTGKKRSANNDKEASLVDDPIRMYLREIGRESLLTAEQEIELSRQMEEGENIIKNVIKKSGMIIPEFYRIVEEAFSKKDLRELNLTKKETTERMAERRRLSAFYRDSLRTIQGDLKNYIEIKQRVIDRGGDYLDDKDLTSLRKRISRSIKNAAIHPDEINLFSEKFIQASKKIKKYKKEQERIEQHLKVCSLKDLRTLGRNLTIKEERERLEQELGLSSDEIRERSRLSQVWKKSSGSWSMSLRSRLNISI

SEQ ID NO: 83449 - protein, 197 aa, Unknown
  Obtained from environmental sample
  DOMAIN (59)...(190): LeuA allosteric (dimerisation) domain
  misc_feature (1)..(197): Xaa is any amino acid
VMASLTPRHRHSAKSHGARQHSGRHAFEERLKDLGLTIEPSALEKIFADFKDLADKKKVVSDRDIEALVMDRAVSVPETWKLDHWAVNTGSALGAAGVIRLRHKDGEYKKLVCLGDGPIDSIFKAINQIIGKEPELELYEIGAITGGSSSQGETMVKIAMDGRRWNGRGVSTDVIESSIMAYLSAINAMEWDLSERE

SEQ ID NO: 83450 - protein, 162 aa, Unknown
  Obtained from environmental sample
  misc_feature (1)..(162): Xaa is any amino acid
MKRKVILALALFALMAVGVYAQTEADFRVKKSADGKSITITAYIGTVKAVNIPAKIQNLPVTSIGGSAFRDDIDITSVTIPNGVTSIGNMAFVGCTSLTSVTFAGSIPSSGFDVAAFDDGDIRDKYLAAGGRAGTYTRPNTDRRTAWTKGDQPILPRRRRYS

SEQ ID NO: 83451 - protein, 272 aa, Unknown
  Obtained from environmental sample
  misc_feature (1)..(272): Xaa is any amino acid
MELEAKEGGNVFTWIGKSAQGLVLKSFLSKAQESQEQLYHNIGERYINRDKESSGRDEGITEGEIASLKGEIDKMLEVSRAAMSELSSLKDERRMISAGFGLDGNPQKQIQNLKNRISEIRDNLRNLYRTFGAQAAGIMDAEILPERKYFIDTIVTAEDGEIIGRAVKMNQTVIEYETNIGKLAASLAIDEENAKIEKYQKSIEDKNNRIDELKRAINDLEENVRDSQTYIQELKKNYRMNYAGKKTKTKAKQTLGKSKAALNFVKQNCPKS

SEQ ID NO: 83452 - protein, 90 aa, Unknown
  Obtained from environmental sample
  misc_feature (1)..(90): Xaa is any amino acid
MLGLSYKEIIKRPKDSEPFLPSLNLTKKTQSGKTLTSPELYKIIWQGSFPRIITNKNASAARKLFYDSYIPTYIERDVKDFLHIEKRIDF

SEQ ID NO: 83453 - protein, 80 aa, Unknown
  Obtained from environmental sample
  misc_feature (1)..(80): Xaa is any amino acid
MTHNDIHELVNKARKAQSIWAELSYSERARRIKKAGHSLAERRDEITPNIHQENGKLKIDALAAEVIPAPMAIPLYIRLG

SEQ ID NO: 83454 - protein, 304 aa, Unknown
  Obtained from environmental sample
  misc_feature (1)..(304): Xaa is any amino acid
SPYPIPAEDSVVFKAIEENLGVKFTFDWRQATDYATQVAVLLASGELPDVLNPPGGLAGSINLHNEGAVLILDDLLQKYGQNILNAVGPDRMASWRQVDGHIYTITGIVDIEGSYSWMVRKDWLDKLGLKEPSTWNEWLTVWRAFRDNDVKGNRTPVIPVAFDRSGSRVAAPIMWAFGIQSSADGQFCVYNNKYIPVYEHPRYVEFLKATADLYKEGLLDREFSSRSQNELFTAMTSGLVGSTMTWAEYASIATTANRGAGEETALWKTLAPPIGPYGDQNIQSRDWRQTSLCITTAAEKSGKA

SEQ ID NO: 83455 - protein, 144 aa, Unknown
  Obtained from environmental sample
  misc_feature (1)..(144): Xaa is any amino acid
MREVTRGLECQDSRAWRKRHAHKRLILTGGEENDAPAGRLLLETVGKRENTVPALMDRAYADFKTRFTARSLCFTAVVPPKSNATHQWGYDKELYKKRNGIERFFRRLKEFRAVFTRYDKLDTIFASFVTFAAIIILLRCVNAP

SEQ ID NO: 83456 - protein, 264 aa, Unknown
  Obtained from environmental sample
  misc_feature (1)..(264): Xaa is any amino acid
MKTAIFILLCIICINGVWAEEKGEIQTQTDLSLVFSTLGEMQFGLEKRYIFPFLQGTSPMTADNNVTLKIGAEVTPISINILADIIWTPIAFFEVSLGSQAGSGWNYDMFGARMNGMGLYRRMESENPQEWADGSGFDGAVWDVHFGAALQFDLAAIFPGDWNHVVMKFENFLNYQNYTKARGNEQWYFKADDGVHQNSFGYYFSAFLGYQMPIFFNMAGVQFESSLPFYNPSSGESLTNRKPENVCSLATDFKLGHRFNIMAI

SEQ ID NO: 83457 - protein, 385 aa, Unknown
  Obtained from environmental sample
  DOMAIN (261)...(343): Mur ligase family, glutamate ligase domain
  misc_feature (1)..(385): Xaa is any amino acid
MVIKNPGVPPDSPFLQAARLASRRIETDISLFLDASPARLTAVTGSKGKSTTASALHWALAHSGEKKTGGKAYLGGNITVSPLTFLDELKEGDDVVLELSSWQLGDLRGRRKDSNHANSILLKPKTAVLTAIMPDHLDRYGSMEAYVADKRVIYQGQDATDFTVAGDDEWGKSFIAESKAVPLIYSHTPLPEGVSGGWIEGSDGPGLARLGDGVAVELVPARPLVPGRHQKQNLLAAGLALLGLGLPAEIIRKGLETFPGVEHRLELFHQAGGIKFYNDSAATIPEAAAAALEALGGDKGGGRLILVTGGTDKNLDFSPLVQAAGQAKALILLAGTGSEKLRSLFDDAGIAYHGPFDDLDKAVAAALSAAAPKDRIALSPGCASI

SEQ ID NO: 83458 - protein, 206 aa, Unknown
  Obtained from environmental sample
  misc_feature (1)..(206): Xaa is any amino acid
RPNHKEVASRAARACAYLYTTKYSHGPHQTDDGADEEYREQAMVSPVCFMRSPFAGVNGSGKHNNWSISTDTGINLLKPGKTPHDNAQFLLFLVAVIKAVDEYQDVLRVSTASAGNDHRLGANEAPPAIVSVFLGEELTEILESIEAGTNYQGKEKRHMEIGVRLCRISRRIQPTVTVHRLLRLPETSLSSVCLVLLFQLPDPILY

SEQ ID NO: 83459 - protein, 123 aa, Unknown
  Obtained from environmental sample
  misc_feature (1)..(123): Xaa is any amino acid
KGEERKKKKKKFGGGGGGGGGGGGGGGVGRVGGLFFGWFFFFWFFVLGGGGGGGGGGGGGGGGGEKKKKKKGVFCFFFFWGGKRGEEEKKGGGGEKKKKKKKKEGGGERGFFLIKKMFCGNLI

SEQ ID NO: 83460 - protein, 74 aa, Unknown
  Obtained from environmental sample
  misc_feature (1)..(74): Xaa is any amino acid
AGEAGSWGIALLAAFMREGGGSLEEFLTEKVFAGKTGTRIEPDPKDVESFGIFMERYTAGLKIERAAVENFKKG

SEQ ID NO: 83461 - protein, 342 aa, Unknown
  Obtained from environmental sample
  DOMAIN (1)...(327): Aminotransferase class I and II
  misc_feature (1)..(342): Xaa is any amino acid
NHDQMAEAGPARAAWHKKLVEEDPRMASVGMGQVAAGICHAISMGADLFFAEGDTLVLPDMYWDNYDQIFSIRLNGKMVTYPFYRQDGGFNYEGLAKALASVSGKVHTILNFPSNPTGFSPTPEDMQKIAGILVEAAKDRIVVVFCDDAYHGMVYEKTAATKSLFFELIEKAPNLIPLKCDGITKELAFFGGRVSFLHFGVAKDASDILVDKCKGLIRAGIGGTVSVSQVLLETELADPRHASEVKRVLAVLEERYQELKRALSKKSRHWEVLPFNGGCFCLLQMREGIDAEALRQKLINEESVGVVSMGKRHIRLAFCSMRKRDIAPPGGGTGKGLPYSGQ

SEQ ID NO: 83462 - protein, 321 aa, Unknown
  Obtained from environmental sample
  misc_feature (1)..(321): Xaa is any amino acid
PIDRFGRGRDNDIKPFYWNAIFGQSNITYNLKGLAVKSKFLDEKEKDIPSGITQEERIEFYEAWADNPEWELEWGDWDKEKINTHSLSASLAASIMEKTQTLSMTADLPPRDARLAWNTALNIWITNTTASWAMQRPEDEEEWKFDPFNFTERITIGNYATLSFNMTMDTEGWDSPETGTMEKRVSSITTRMELTKWGISAAFSASRMLGYEYLAGDIPSDTGWFQRKGDENLIFRPKDFSFNFRKDIAMKELRKNTAANNNIDFSININSGIYIDLQKYTSSTFNFTLGFTLGINKFLSLRIDADSSNARIFQYFHDWPV

SEQ ID NO: 83463 - protein, 502 aa, Unknown
  Obtained from environmental sample
  DOMAIN (1)...(469): TCP-1/cpn60 chaperonin family
  misc_feature (1)..(502): Xaa is any amino acid
VAKEIELEDQFENMGAQMVKEVASKTSDAAGDGTTTATVLAQVIARLGIKNVTAGADAMAVKRGIDKAVRVIVDRLKKDSKPISGKNEIAQVGAISANNDAEIGDLIADAMDKVGKDGVITVEEAKGIDTCLDVVEGMQFDRGYVSAYFVTNGDTLECVLDDAFILIYDKKISGMKDMLPILEKVAQMGRALLIIAEEVEGEALATLVLNKLRGTLKIAAVKAPGFGDRRKAMLEDIAVLTGGALVSEEAGYKLENATIDMLGKAKRIVIDKENTTIIEGGGKPADIKARVGSIKKQVDETKSDFDREKLQERLAKLAGGVAVINIGAATESEMKEKKARVEDALHATRAAVEEGIVAGGGVALIRAASDLDGLKLDGDEQIGVDIIRRACEEPLRMIVANAGLEASVVANDVKGGKGAYGFNAYTGKYEDLVKAGVIDPTKVTRTALENAASIAGLVLTTECVICDIPVETCSAHGGGGMPDMGGMGGMGGMGGMGGMGMM

SEQ ID NO: 83464 - protein, 113 aa, Unknown
  Obtained from environmental sample
  DOMAIN (54)...(113): SAF domain
  misc_feature (1)..(113): Xaa is any amino acid
DFTDRKDRKGNDIVCSMDGEELKTLLQASEEIFLMRGGEKKALAEEQITIDFAFATVVSIANIKKGEIFTKNNLWVKRPGTGEILAAEYEKILGKPALCDIETDTHITRKMIG

SEQ ID NO: 83465 - protein, 314 aa, Unknown
  Obtained from environmental sample
  DOMAIN (245)...(270): The GLUG motif
  misc_feature (1)..(314): Xaa is any amino acid
MATIPAKYSTAGISIGGIAGQNQSGSTVKDCVSLGARVTGTGDVGRIAGSSNGTLGNNYARSDIKIGASGAEAAVSPAGANTPNGGTVNLSTALTVVFSGWNTALWNISGNLTIGGALPTLKTNTQSPAPTVPEAYNPPANGTASSPFLVATEADLRKVGTGNDGWSLSAHYKQTANITLSNNFTRIGNSSTKFTGTYDGDGKNITGLNMSTSSPSFFLGLFGYIGAGGTVKNVNVINGTVTNNGNESTGGIAGANEGTIDNSSFSGTVSGSACDQVGGIVGYNYLGTVTNSRSIEFGTSRGATVSQHGGCPYG

SEQ ID NO: 83466 - protein, 80 aa, Unknown
  Obtained from environmental sample
  DOMAIN (14)...(60): Bacterial regulatory proteins, tetR family
  misc_feature (1)..(80): Xaa is any amino acid
MAVAVEHEKRRKQILEKALTVFITDGFEDATFPKIADRCGITRTILYLYFKNKKEIFNYSVKQLLKSVEENIDTIRHDKS

SEQ ID NO: 83467 - protein, 494 aa, Unknown
  Obtained from environmental sample
  DOMAIN (166)...(477): Poxvirus D5 protein-like
  misc_feature (1)..(494): Xaa is any amino acid
MNAEKLLGKTLLIYAFSIQDVRQNFGGREDTKMREAIVDESVFLRINEFKNGLIQFTDSTNAMRLIKLHGRDIRYNAAWKKWVVWNGKYWEMDEGNVLVHEKGLDMVRNIYDDLLKTADYRERIDIEKAAMMSESVRRRKAFVEAATWVKALRIKTEELDPNPWLLNVKNGTVDILSGEFREHKQEDMITKIANVEYDPTADCPMWKQFVREIMDYKADIIKFLQTAAGWSLSGDISEQTMFILYGTGANGKSTFLNTIMYLLGDYATATPTETFMKKSGDNYSNDVARLRGTRFVTTTEVEQGRRMSEPLIKKITGNDEMTARFLYGEFFNFKPTFKIFMATNHKPVIKGTDHGIWRRIKLIPFTQRIPEEKQGKHLELKLREEASGILNWLLEGMATWRQERLKTPKAVLFATDEYRGEMDVIGNFIKEKCDQKKEMTITIKKLYKAYSDWCEENNEHPVSERFFTLRLKEMGFEQSRNSAERFWVGVGLVE

SEQ ID NO: 83468 - protein, 93 aa, Unknown
  Obtained from environmental sample
  DOMAIN (17)...(88): Glu-tRNAGln amidotransferase C subunit
  misc_feature (1)..(93): Xaa is any amino acid
FLFFGGWVLEDLSCLTLSANEKTRLTHDLQEILDYMARLGEIDTNGVVERSHPFDNVNDFRDDEIGPSFDRVLILQNAPAKNDEAIIAPKTVE

SEQ ID NO: 83469 - protein, 79 aa, Unknown
  Obtained from environmental sample
  misc_feature (1)..(79): Xaa is any amino acid
MHIDTDKARRFCINLYQAYGFSKDESEIISDVIIRADLYGIESHGIHRLMRYHDEITSGKVVVNAKIDIVHDTGNFRLS

SEQ ID NO: 83470 - protein, 324 aa, Unknown
  Obtained from environmental sample
  DOMAIN (47)...(324): Aminopeptidase I zinc metalloprotease (M18)
  misc_feature (1)..(324): Xaa is any amino acid
LAREQEQKSSGQLLADKLFIALKNCWESIDAEAEKEVEDLAAAYRVMLDRGKTEREFTAESVALLEKQGFKAIDLFTGQSGKKKAFTPGTKVFEHIRGKALVCAVIGKKSVAEGINIVGAHVDSPRLDLKQNPVFEDNELALLDTHYYGGIKKYQWTAIPLAMHGVFIDSKGKKISVLIGEDDDDPVFTITDLLPHLAQDQMQKKAFEVVEGEDLDVLSGSRPYIDEKVKEKVKLRFLSILNEKYGLDEKDFASAEIEFVPAAKARDIGLDRSMIGAYGHDDRSCAYPALRALMEIAAQKKRLKNRALLSFDKEKMARSAHWRG

SEQ ID NO: 83471 - protein, 67 aa, Unknown
  Obtained from environmental sample
  misc_feature (1)..(67): Xaa is any amino acid
MSINAVTPVKEFADILTPEYKALAADGPYGKQTSVDDLGTFKEITEPHPHCAGCGVALGIRRPILTL

SEQ ID NO: 83472 - protein, 97 aa, Unknown
  Obtained from environmental sample
  misc_feature (1)..(97): Xaa is any amino acid
EPLSKMNYRREAVSLIEQYDSANEKVSQFTEEKQEAENLLKQMIGEYEMATAGDRIITWKSVSQERLDTKTLKAEHPTLYKKYVNQTSYRRFSIKAA

SEQ ID NO: 83473 - protein, 178 aa, Unknown
  Obtained from environmental sample
  DOMAIN (8)...(178): Bacterial export proteins, family 1
  misc_feature (1)..(178): Xaa is any amino acid
LIESAIINEILAAAPAFLLIAVRALAMIEVAPLFNSESVPQVAKISLAGFAAYASFSSALVKDWVIAPFGLSFVFLVIGEALIGIIIGFFIALIFAAFSTAGQFFSLQMGFGASETFDPLSQIENPLMGQYLNTVAMLVFVTVNGFQQLLLGGFWRSLQSTHQTNRCDRPEGTARHQL

SEQ ID NO: 83474 - protein, 200 aa, Unknown
  Obtained from environmental sample
  DOMAIN (8)...(195): Glycosyl hydrolase family 57
  misc_feature (1)..(200): Xaa is any amino acid
MAAKIRLILGSHAHVPYGSNNAEFENAYMSLMKPFVTSLYRYPGIQAVLHYSGVLLHWVERSHPELFMLINDMVARKQAEILGGGFYEPMLPIIPLQDKIGQIELLTTYIRRQFGKRPQGCWIPGFAWEQGLVSPLASCGMGFTFLGRRQFALAGGNDAPCICEDQGKLITIFPVFQSIQEDLSKKNITPILKILGRSDK

SEQ ID NO: 83475 - protein, 110 aa, Unknown
  Obtained from environmental sample
  misc_feature (1)..(110): Xaa is any amino acid
GLAVDIQPKSLDGKAIYWQWERGRNKDNWMLVPLESRWSPPDPVIKAFEKEGFIWGGKWPLYDNMHFEYRPELHEFTRLVAANPDKNDTAIGGPSRDLHHVAPDFLLRNK

SEQ ID NO: 83476 - protein, 295 aa, Unknown
  Obtained from environmental sample
  DOMAIN (24)...(237): Respiratory-chain NADH dehydrogenase 51 Kd subunit
  misc_feature (1)..(295): Xaa is any amino acid
VIASSAGGSFERLGKKEEKFPHDGIGHQELQRILTDCGIVEMEGSGLPLAEILSNFRGSGKRQTLVVRCVFDDPWLAADYVLCSERVQEVVEGAFIVAKAGGGIDRVLFAVSCHEKELGENMLSEAALYDIQSSLVLTGSKYPQRNYRELELVLRNYGKKEEIDLGPLLVLGPATLAAVHDAVKYRRPILERYVAVGGSAVAKPQVMRVRVGKRIGDLFEECGGFRGEPFRIAVGSPFSGRTVRDLDEPVTKNSYAIFAMLNPRRAFTRKGTAYAVGNAGAYALSGWIRKNCISG

SEQ ID NO: 83477 - protein, 266 aa, Unknown
  Obtained from environmental sample
  misc_feature (1)..(266): Xaa is any amino acid
VLSGRYIEIPIFPLSFSEFKNAYKELSKNDLYNKYITQGAMPYLINRENSYKEIRDYYGGIYNTVLLKDVVARKKISAPDVLEKVVKFLAGNIGSLNSTKKIADTLTSFGRKISVNTLESYISALIDSLLFYKVSRFDIKGKEYLKTIDKYYIADLGFRNYLLNNERNNFGFVLENIIYLELLHRGYKVSVGKIGQKEIDFVAISELGQVEYYQVALSIRENDVFEREISALMDIKDNYPKFLLHLDPDPDSVHKGISILNALEWL

SEQ ID NO: 83478 - protein, 165 aa, Unknown
  Obtained from environmental sample
  DOMAIN (1)...(141): eubacterial secY protein
  misc_feature (1)..(165): Xaa is any amino acid
SDGDPLACSAIAQTDGGNVAWFAKTAQLLSPRGTLYNILYVLLIIFFAYFYTQVTLNPIEIAKQIRENGGSIPGIRTERIEEYLTKILNRIVLPGSLYLALIAVIPTFIQWAFKFPTSISYLMGGTSLLILVGVDLYTMSQIEGLLKMHHHEGLVKRGRLRGRNL

SEQ ID NO: 83479 - protein, 100 aa, Unknown
  Obtained from environmental sample
  DOMAIN (3)...(89): Ribosomal protein S13/S18
  misc_feature (1)..(100): Xaa is any amino acid
MARLVGVDLPNKHVNIALTYIFGIGRPSAEKICQKAKLDPMRMINDLSQEELNELRQIIEGEYKVESRLRTEVALNIKRAYGYWLLPRTAAPQGPAASRP

SEQ ID NO: 83480 - protein, 83 aa, Unknown
  Obtained from environmental sample
  misc_feature (1)..(83): Xaa is any amino acid
MPAKPIKLRSATVTEGRRMAGARSLWRANGMTEAQIGKPIVAVVNSFTQFVPGHVHLHGIGQHIKKLIEAQGCFGGRVQHHRY

SEQ ID NO: 83481 - protein, 137 aa, Unknown
  Obtained from environmental sample
  DOMAIN (8)...(125): Endoribonuclease L-PSP
  misc_feature (1)..(137): Xaa is any amino acid
MSKQIISTESAPAAIGPYSQAILIDGLLFASGQIPLLPETGDVVPGGINEQAEQVMKNIAAVLSAAGSDFSQVVKATCFLTDMNNFAVFNEVYSRYFTGKPARSCVAVSALPRGVLVEVEVIAKITGKSLSADSDPV

SEQ ID NO: 83482 - protein, 320 aa, Unknown
  Obtained from environmental sample
  misc_feature (1)..(320): Xaa is any amino acid
EKVPLFSEREYFLSGLTAKKNKLYFFESSEAKMGVYDTFTGKAQTFNAASGVYDVDVSADGEVMLLSGYSYIEERAIAVVNEHRTDNGLKTGRTFNGLYKARYFRDGVIGIRSSLHNNCIAYENFNGESEVLFMGNENLMFSGPQVLDNERIVFIASREGKRELWLYNYVLQELFKIENTTYDNKYWEYMRGLNVSEGKLFFSYNSDDRMYKLGMIDLEKMQAVLNGRDFSGGVFNPVSADGYIYYLATFVSRNSLMRFPETADSLSGNRINLQLTKLDNQNYKTASEPPYAGPSKPYIGLRYMNPFKYWLPIPFDLVPI

SEQ ID NO: 83483 - protein, 63 aa, Unknown
  Obtained from environmental sample
  misc_feature (1)..(63): Xaa is any amino acid
MGIMAELARANLIDTSVRRLESAKLADTFEAFDVRSPKVTKEAVSLYKSAPGRLPELGVRVAG

SEQ ID NO: 83484 - protein, 280 aa, Unknown
  Obtained from environmental sample
  misc_feature (1)..(280): Xaa is any amino acid
MNEFIVCSTRSMHNYASRVISCLSQYLSFNKIADQINGIDLLGTDRFADGEMEVTVNSSIRGKDVIIFSSCTRNEAGISVEEAKIELYQAIDALKRAQAHKIIVFEPYISCSRSDRTTRRSSVGLWVHLKTLSGLGAKHIVTFQLHSDKSQTMVDPSVSSIDNIPALTLLEQYLCDTYIKTKEKLENEVHNNWAFCSADAGGEKLARTFANSFGAPLVVAHKQRDYSKPNTVESIHILSAEPVEGKSLWIIDDMIDTGGSVETLIRALAPLNQTRPILYV

SEQ ID NO: 83485 - protein, 324 aa, Unknown
  Obtained from environmental sample
  misc_feature (1)..(324): Xaa is any amino acid
VGEFCENPAYCGKWGISVFIDPHQDVWSRWTGGDGAPAWTLEKLGIDLDKLDKTGAAITRQHYGELHKGKPFPKMIWPSNYNRYAVATMFSLFFGGKTFAPDIQIDGKNVQDWLQGHYIAAFRHCYRRLKNCSAIKGWGVINEPHDGFIGCKDLVKNDNSMMPIGPRPSPWDTIRAASGYSVAVPVYSTGTFGMYSAKREIFNPGAISLFKEGFVCPWKQAGIWDDKDGVPRLLRKDHFSMFEKRHLNFMDDFHKPFVLNYIEAMKEADEKTIFFLEGMPSGTRAPSHPRWGKNDPQNVVNAFHWYDGFALFTNTSAGGLHNPV

SEQ ID NO: 83486 - protein, 134 aa, Unknown
  Obtained from environmental sample
  DOMAIN (8)...(134): Signal peptidase (SPase) II
  misc_feature (1)..(134): Xaa is any amino acid
MKFDKARFLPLMLTGIIILVDQCSKAFIATKWPIRTINPPIKDVFNNDFLLIIHVRNPVIAFSLGQNLPASVRPVLFIALPLLVLAVLLWYYFKSNDFTNMQRWAVAGILGGGIGNLIDRIFLVPNADPWNPPS

SEQ ID NO: 83487 - protein, 167 aa, Unknown
  Obtained from environmental sample
  misc_feature (1)..(167): Xaa is any amino acid
MIYTVLIFVGAAIAGALVSYSIVNIATKRNRSRIVAEAEQEAELIKKEKMLQAKEKFQELKLEHERVINERNSKMAQAEGRIQQKESSLNQRIEDVSRRTTELETQRESLNLQIEAAKSRIEELDKVRRQHNEKLQTIANMSAEEAKNVLMENMKAEARTQGMSYIN

SEQ ID NO: 83488 - protein, 110 aa, Unknown
  Obtained from environmental sample
  DOMAIN (15)...(54): RHS Repeat
  misc_feature (1)..(110): Xaa is any amino acid
VDLRSLSDGEIRYYYDAVGRVTRQEAASRNSVTYNTEWKYDDAQRTVTITTGGTYSVSVYLNAWGEVVRRVDGEGNEEKYEYDGAGKLVKSIDGYGRITGYEWNEIGKVR

SEQ ID NO: 83489 - protein, 316 aa, Unknown
  Obtained from environmental sample
  DOMAIN (1)...(123): Anticodon-binding domain
  misc_feature (1)..(316): Xaa is any amino acid
VIDLLNNWYIRRSRRRFWRSENDTDKLEAYGTLYDALKTLITVAAPFMPFTTDAIWRNLRLEASRESDPASVHLTDFPLPKTERRDKALEFRMATVRRAVSMGRSLRSQYNIKVRQPLRMAELVTRNSDEKNALFEMAEIIREELNVKDVAFRDNEEDLVEYEVKANFRVLGKELGKDMKAAAARIEALNHAEIQGVLEGAALSLDIETSDGGTRTVVITADKLDIRRNEKANLRVINEGTLTVGLDTEITRDLSREGDIRDLIRGVQNSRKEMGFSVTDRIRLTIYGSDKLKEAWDNLSDTAAAETLAMKLLGHN

SEQ ID NO: 83490 - protein, 124 aa, Unknown
  Obtained from environmental sample
  DOMAIN (10)...(123): Chorismate synthase
  misc_feature (1)..(124): Xaa is any amino acid
MSGNTFGELFKVTTFGESHGQAMGCVIDGCPAGLELSVNDIEKELVRRRPGGVYGSRDEKDTPDILSGVFEGKTLGNPIAIIVRNTHQNSRDYDELKTYTDPATPIFRGKLNTVFATIAAGAEV

SEQ ID NO: 83491 - protein, 296 aa, Unknown
  Obtained from environmental sample
  DOMAIN (20)...(181): MatE
  misc_feature (1)..(296): Xaa is any amino acid
MKTDLLSENITKSLLVFAVPHVISNIFQQLYNTADMVIVGHFLGETSLAAVGACAVIFELLIGFAMGIGRGFSIVAARNYGAGNQDMFKRTVAGSVAAGILITIFISVTVSLFMMPLLKLINVPAYIIDTAYSYISVLIAFSVVTFTYNLCAGLLHAIGNSTMPFLFLVISSILNILFDVIFITSFNMGVRGAAVATVAAQSISTALCLVYIFRKCPILIPGKKHFRYDNALYKEIVAQGLSMGFMLSIVSLGSVALQRAINGLGYLVIAGHIAARKINNFCMMPMSTISVAVLAV

SEQ ID NO: 83492 - protein, 311 aa, Unknown
  Obtained from environmental sample
  DOMAIN (1)...(186): CoA-transferase family III
  misc_feature (1)..(311): Xaa is any amino acid
KPEGRSRQRDIKKLVEKADILVENYKPGTMKKLGLDYETLKAINPGLIYASSSGFGQTGPYSSRPAYDLILQGMSGFMSITGFDAEHPVKAGSSIADVFAGVFTTIGILAALEYRSKNGKGQMVDIAMLDCMIATLENAIAAFDCTKKAPQPIGNVHRSIAPFATFPTLDGFVNVCVGNEELWRKFCETLGMAEYVMDARFANNKARVENFGTLSKIIAGYSSNRTTSEWMKSFEEVNVPCGPIMNIEQLVNDPQVKARNMIVELDHGEAGKFMAPGVPIRFSETPASIKSVAPFLGEHNLKYMRKNSRPD

SEQ ID NO: 83493 - protein, 308 aa, Unknown
  Obtained from environmental sample
  misc_feature (1)..(308): Xaa is any amino acid
MDSVSIRGVRLSLDTDSGKSPKPAWRLLSAAELANVNNGGNFLDEAKAVSALKNLRENLKVRPSDKVSICLSGKQTYSVQMDTRRLPPEEMSGMLKLELRKSIPFEATAATFDYQILPEDRSGPAADAAGVSVMIGVVANSYLERQVNIFEKAGLPPCHVNVLPVSVANAFWAAGEDENEMSDETVLLLHLGADVCTLVIDGRRTPFFNRTFSFNIAKAVSGSNAQESEEDMLSSMDILAAEVAKSATYYKNLQRIDNISSISVLGAYASHPALNELAKITGYPVRVVQTGVAGSGRKAAEPGKCSAI

SEQ ID NO: 83494 - protein, 110 aa, Unknown
  Obtained from environmental sample
  misc_feature (1)..(110): Xaa is any amino acid
LKLDKNIKEKIEHEISRIEKSLNDAKPLLDLCKLKEPDFIEITAAAQILHSFYNGVESVVILFLKSISEKVPNDRKWHKSLFEMMLVKIQKEYDSYNEIKKPLENICIFV

SEQ ID NO: 83495 - protein, 219 aa, Unknown
  Obtained from environmental sample
  misc_feature (1)..(219): Xaa is any amino acid
VLLLFQYIVDLPSVKIMRHRQYTPPTIAHQKGTFTDMRDGKIYKTTKIGEQVWMAENLNYETEGSRCYNDSTAYCDKYGKLYNLETAIKACPNGWHLPSRDEWEVLTKTIGERTACKYLKSTSGWDSYLRDSSNGDDKYGFSALPGGYLSSNGYFGDAGRFGGWWSATKSRNREYPGNVVIRIEEYMNGATSDYPYEKNYLFSVRCLQDTPVPPKRETK

SEQ ID NO: 83496 - protein, 198 aa, Unknown
  Obtained from environmental sample
  DOMAIN (8)...(188): HPr Serine kinase C-terminus
  misc_feature (1)..(198): Xaa is any amino acid
IKPPIIAGDFFPVDYSGVLVEVYGLGILIQGDSGVGKSETALELIHRGHRLVADDVVEINCNYGNTLMGAGANKIIGHHMEIRGPGIINITYLFGVRAIRDQKEVQLVVELEEWDAHKNYDRIGAEDHTIELLGVKIPKLTIPVKPGRNIPIIIETAAMNERLKSMGYHAAREFNKNILKWIESDAAKSVFFGHDNII

SEQ ID NO: 83497 - protein, 313 aa, Unknown
  Obtained from environmental sample
  misc_feature (1)..(313): Xaa is any amino acid
APSLALMAFGNDTGLEMKSGIFTNIPYGNDVNESSYQGSVLVEIDGEAFRDIPRIGEILGEAGCWEIAAVTIEEPVFRVTKEVDNDLQAAEAPLAVLRRAYEYPLMKVYPQTGTVEEIGSRETGFGKEQGTGNREQGRKESTALSRVSETCDSAGAPKNATVCQIMREGFSLSGGRRNSTHSSSPLVLLPVFPGTNCEWDMERAFREAGARTRIVIFKNRNRDDIAESKREFAKAIGECQILALSGGFSAGDEPDGSGKFIANVLRSPVISDAVNNLLENQGRTHSGDLQRFPGIDQAGSGSLWRYPLGQSVM

SEQ ID NO: 83498 - protein, 112 aa, Unknown
  Obtained from environmental sample
  DOMAIN (29)...(97): Peptidase S24-like
  misc_feature (1)..(112): Xaa is any amino acid
CDLDNDPIDKRAISSELVRFPMAEMYLVKARGDSMLPKISNGDIVFVRRTNTAENGDTVICVNDGEGLIKKYQKDKKQIVLSSLNSEKYAPFTAAGDFRVEGVVKGVLSYKF

SEQ ID NO: 83499 - protein, 74 aa, Unknown
  Obtained from environmental sample
  DOMAIN (1)...(74): YgbB family
  misc_feature (1)..(74): Xaa is any amino acid
IGRDAGWHLTNLDCVIICEKPKILPFRNVIRKSLAAALEVSEDCIFLKGKTAEGLGQVGKGNAVEVYAVCLLEK

SEQ ID NO: 83500 - protein, 262 aa, Unknown
  Obtained from environmental sample
  misc_feature (1)..(262): Xaa is any amino acid
APKWHPALGWSFHIYIPHKLLYGYAGGRNGEVEVGDGTYLNIRAFYYAYADYRGAFKDNPFVLRVSQETNKPLPPGAFMQETVSAFTQIAKDNTTSARGPDDMVSQITRILSKEKGKNVDIAVCLDVTGSMQAYFDAIRQKLIPMLKDMTADFASFRIGMVFYKDYYDEFMNKVFPFTRDFDALQKSISDVKVSGGGDIPEAVYEALYAGATKLSWEADKRIMLLIGDAPPHPRPRGAITKQMVEREAANRGIELHAMILPQ

SEQ ID NO: 83501 - protein, 307 aa, Unknown
  Obtained from environmental sample
  DOMAIN (16)...(296): Lyase
  misc_feature (1)..(307): Xaa is any amino acid
SPAKKTAKPLWAGRLAEIPQADAFAFQASINVDKRIVFDDITGSKAHAAMLGKQGIIPKDSASKIVKELDRIAADIKSGSLKIDASVEDIHSFLETVLTKRLGDDGKMVHAGRSRNDQVAAAFRLYLKRTVPELQNELSTAANVLLDAAQSHITTIMPGYTHLQRAQPVTLGFHLTAWCAALERDFSRFTDALARLDECPLGSGALAGSTLPLDRKATAHNLGFSRPSINAMDSVADRDFALELSSACAITMVHLSRFCEDIMLWSSEEFKYIELAESWSTGFSIMPQKKNSRFRGTYSGASRRELS

SEQ ID NO: 83502 - protein, 225 aa, Unknown
  Obtained from environmental sample
  misc_feature (1)..(225): Xaa is any amino acid
CLSARRTNRFGIGVSAEALPFAGELIEVKPDEVSWQGAIERVLRGFALSLLVDEHYYSALSNHINSTHLGQRLVYYRTGRAEPLQEKPVSTDSMVFKLNIKEGNYAEWLKVELRQRFNYTCVESVQAFRTADRAITREGQVKHSKTRHEKDDRRAVGDRSNWVLGFDNREKLTLFQQQAQDLADAISALTDKINALSEQGDLNAKRAPSMQTLVNMQWQENDVLP

SEQ ID NO: 83503 - protein, 146 aa, Unknown
  Obtained from environmental sample
  misc_feature (1)..(146): Xaa is any amino acid
ADATKTEKQKDLFAALFAESMGYSRYNITAGGGIILGGSLDGKGIGLRLLYVQDAENFIFLETVAQIRLYLSPEKDNTGIFLQAEGGIVLFSYEKFEITGYSSFVGGISAGWRFMMNNKWYIEPFIRGGYPYIFGAGFSTGFKFNF

SEQ ID NO: 83504 - protein, 307 aa, Unknown
  Obtained from environmental sample
  DOMAIN (1)...(125): Transposase IS66 family
  misc_feature (1)..(307): Xaa is any amino acid
GAEISRQDMATWQQQVYQKLKPLFDCLKKAVKNGPVIQMDETPVQVISDVKSADIKSAEVDNKETHNSYMWLTLGGSVGKKVTWYEYHPTRAGYHARTFLEGYSGYLQTDGYKGYDSALKDMPGIIHVGCFAHARRKFFEAAKINKNSKSAQEGIKHIRKLYDIENELREKFANNNNMFLTERKTRAGPVLDKFKAWLEKRKEEVPPSMLLGKAISYSIDQWDKMTAYLESPYLTPDNNACENAIRPFVLGRKNWLFCQSVGGVESSCGMYTLIETAKLNSLIPFKYLMALFEKAPLASSSDDWEKL

SEQ ID NO: 83505 - protein, 61 aa, Unknown
  Obtained from environmental sample
  misc_feature (1)..(61): Xaa is any amino acid
MMAEKRQDGIVLEPFSGSGTTIIACEQTGRRARAVEITPEYCDVAIRRFEEFTGKKAELII

SEQ ID NO: 83506 - protein, 180 aa, Unknown
  Obtained from environmental sample
  DOMAIN (39)...(175): Phosphoadenosine phosphosulfate reductase family
  misc_feature (1)..(180): Xaa is any amino acid
MENKYTLADLKALQALSWERKVLISQTRIMEWYHRNSGRVFISFSGGKDSTVLLHLVRQQFPDVPAVFINTGLEYPEVVAHVKTFDNVAQIRPKMSFRQVIEKCGYPVISKDVALTVAGFRRGAQWAKERMTGTERDGTVHHFRERLYKRWRFLLDAPFKISDDCCDHIKELPLADTARR

SEQ ID NO: 83507 - protein, 320 aa, Unknown
  Obtained from environmental sample
  DOMAIN (1)...(105): Thiamine pyrophosphate enzyme, N-terminal TPP binding domain
  misc_feature (1)..(320): Xaa is any amino acid
VCLATSGPGATNLITGIATAYMDSIPMVAITGNVPTGILGKDSFQEVDITGISMPIVKHNWIVKKVEDLAEVIREAFELAASGRQGPVLIDIPKDITALTAEWVPSNKKKGELKDKALSARAKRLDERTTRVSFTSEEIEEAAEMIMEAKRPLLYAGGGVISSGAEEELIALAERLNAPVALSLMGIGAIPKDHRLCTGLIGMHGTVASNKATQKTDLLLAIGARFSDRVTSKPDMFANTAEVIHFDIDPAEVGKNIETHAWVVGNLKDTLAALLKKLPARLETEWHGEIDKWKTHLPQTYTHEVHPKNAPRRSCLGFKM

SEQ ID NO: 83508 - protein, 173 aa, Unknown
  Obtained from environmental sample
  misc_feature (1)..(173): Xaa is any amino acid
GLSPRFGQGQNVIIDSDVARIYGTETREINKAIKNNPGKFPTGYIIEADKDELVENFHRFKNLKHSTVQPKAFTEKGLYMLATILKSPQATAATIAIIEAYAKLRELSQTIAKLADAKEKPEQQSLMQRSGEIFSELIANDMPVSGTETTLEINFAVMKFKHTIKKEKKKNEQ

SEQ ID NO: 83509 - protein, 116 aa, Unknown
  Obtained from environmental sample
  misc_feature (1)..(116): Xaa is any amino acid
MNISLEKSRKFAIRIYNLYKYLCGEKKEYVLAKQLLRSGTSIGANLTEAQYAVSKKEFVVKATISLKECAETEYWLDLLKETSILSQTVDDNIIKDCKDILRLLISIVKTTKQMNI

SEQ ID NO: 83510 - protein, 50 aa, Unknown
  Obtained from environmental sample
  misc_feature (1)..(50): Xaa is any amino acid
MIKTVKSVDLKGKRIIMRVDFNVPMKDGVVQDDTRITAALPTIHIFWSRE

SEQ ID NO: 83511 - protein, 261 aa, Unknown
  Obtained from environmental sample
  misc_feature (1)..(261): Xaa is any amino acid
MNDRTITYLIELRNTGHLQYLRNKLHKFLTEEERSYIKNHPVVPIAAEINNYPVSFFDTNTKQWQGIYFDALREIKNMTGLVFERVNGPQAQYPELIEMLENGKALILSELFHIEKYKGRFIWSDVPILKDNYAFITRSDYPNIEVSEIPYLRVGGRKDTPYLELFTKMFPNHKNYTVLDTQEEIWDALKHGKIDVLFASRRRLVVFTNYYEEAGFELSVMYDHEFGTYFGFYRDAAVLRSIIDKALRLVNIKKMSNQWMN

SEQ ID NO: 83512 - protein, 466 aa, Unknown
  Obtained from environmental sample
  misc_feature (1)..(466): Xaa is any amino acid
VVIASITHDGDDASLKMKWRGKTIVDLSRKFLDTNGAPRSARALLASFGGAASDDALPEDAHPAALLDSLERELASLRSGSRRGLQERFDGSIGSASVLFPWGGACQGTPECGMAALLPSLDKQSRTASILCFGYDPYLMERNPYDGAKGGIREALAKYACLGGDFRKARLSLQEYFQRPLSPESWGLPAAALLGALEAQIALGIPAIGGKDSMSGNYRDAIHGIDITVPPTLVAFAAGTAPARSIRSGALTGKTGNVIVLLAQAGSYPFKTANPGHTEWDIFKANMDALSSLGAISCGAASCVLSAYPVVSGGVATSLALMAFGNNAGLEIKSRALTLIDGASYQGSVLVEIDGATFRDNPRIGEILGISGCWEIAAVTIEEPVFRVTKEVDNELQAAEIPLDVLRRAYEYPLMKVYAQTSGNREQGTGNRDTSRDSFEGNKIKKRIAEWISQDNLGHLTMNPKC

SEQ ID NO: 83513 - protein, 152 aa, Unknown
  Obtained from environmental sample
  DOMAIN (62)...(129): GHMP kinases N terminal domain
  misc_feature (1)..(152): Xaa is any amino acid
VEKNEHFIIQNESTELAGMWVDFDCSMQNKELRAVAESDSYFSYASGVASYIKDHYSVEGVKITVKKMTLPMKKGLSSSAAICVLLARAFNRLYSLNLNTRGEMDIAFKGEQRTRSRCGRLDHACAFGTVPVCMYFDGDDINVEKMSVKGNF

SEQ ID NO: 83514 - protein, 253 aa, Unknown
  Obtained from environmental sample
  misc_feature (1)..(253): Xaa is any amino acid
MPWNDTAQIDFLNPEAREAVIRTIIGVCQQFSIVRFDAAMTLAKRHIQCLWFPVPGTGGAIASRAEHSISNDEFNFLIPNEFWREVVYRCAAEAPHTLLLAEAFWMMEGYFVRTLGMHRVYNSAFMNMLKNEDNAKYRATIKNTMEFDPEILKRFGKFMNNPDEETAVAQFGKGDKYFGIGTLQVTMPGLPMYGHGQTEGLEEKNGMEIPARLPRRKGRQKSGEQAGTGKFSPRRKRRGNGIPGSGKIQNGPK

SEQ ID NO: 83515 - protein, 296 aa, Unknown
  Obtained from environmental sample
  DOMAIN (102)...(280): Transposase DDE domain
  misc_feature (1)..(296): Xaa is any amino acid
MKHLPAGYEEASRETGAMRRRGRAIGGPSDLMWLVLTHLSQGQTLANMSALSEASGLGRLSDVAFMKRLINCDGWFEWILERLGPASVAGYLKPKGLDNYRVLAVDASVVRSGVSKFGRSWRLHFALDIFSLASHEFRVTDDKTGETLANFRAAEGDLFLGDRGYASKRGMSHCLSGGADFILRLRHEAFAMHSESGERLDLLKLLAQAETGEAVCMPATVDLGGHGLGARRVRVCALKKSGKDMEKTLKWMNNNDNKKQRRVSQGARRFSEYVALVTSLPDEVTPGGSAVRVQVQ

SEQ ID NO: 83516 - protein, 79 aa, Unknown
  Obtained from environmental sample
  misc_feature (1)..(79): Xaa is any amino acid
MEKLRILIPKGRIFDNVSRLFSEAGFPIALSDRTYRPALGADWLDAKIMKPQNVGELLELGSHDAGFTGVTDTESARPI

SEQ ID NO: 83517 - protein, 93 aa, Unknown
  Obtained from environmental sample
  DOMAIN (1)...(66): Glycosyl transferase family, helical bundle domain
  misc_feature (1)..(93): Xaa is any amino acid
MIKEAIIRAANRENLDYECAEAVMDEIMEGNASQIQMAAYLAAMSVKGETIDEITASAAGMRKHCVRILHDMDVLEIVGTGGDHSCRSDASVK

SEQ ID NO: 83518 - protein, 231 aa, Unknown
  Obtained from environmental sample
  misc_feature (1)..(231): Xaa is any amino acid
MEFESIQVGILSILPPLIAISLALITKEVIFSLILGILSGTFIYSLASGLSVFATFHVASGLMINKVGDNASMVIFLAVLGALVAIITKAGGSMAYGQWAAKRLKNAKGASLATAFLGILIFIDDYFNCLTVGTVMRPITDRHKISREKLAYLIDATAAPVCIIAPISSWAASVISYYPTQTGITGMQAFVSSIPMNLYALLTIFMIVWMSVRPNSDYGPMAKAQKSSPIN

SEQ ID NO: 83519 - protein, 452 aa, Unknown
  Obtained from environmental sample
  DOMAIN (185)...(306): Response regulator receiver domain
  misc_feature (1)..(452): Xaa is any amino acid
MCWVKENAENLQKFDIEKKIKQKKGAQIKREYMPYGKVLVVDDMEPNLYVAKGLLAPYGLSTDTASSGKAAIEKIKTGQKFDIIFMDHYMPEMDGMEATKIIRELGYKEPMIALTANALVGQDQIYLANGFDGFMSKPIDTRQLNSMLNRFIRDKYPPETVEAARKLKLKLEKGEDAGPPDFSKVKALVVDDFMPNLSVAQGMLQEYKMQVDGLSSGQEAVERIENGEPRYDIIFMDLMMPGMDGMEATRLIRSLSTEYGKTVPIVALTAIITSETSDQEKMLLEKGFQAVLYKPLSVAKVDAFLKDWINGKLKGIVSPNNKGIMSPNNKEEESDMEIDIPGVDVARVEELYGGNIKIYLPVLRSYLSVIPGELEIMSHVTAETLPEYVIKVHGVKSTSDSIGAERAHQMALELEMAGRDGDIATVMAKNETLIRYVKDLLVQYKARPNLSL

SEQ ID NO: 83520 - protein, 266 aa, Unknown
  Obtained from environmental sample
  misc_feature (1)..(266): Xaa is any amino acid
MIVCTLFNPVIDATYRVDGLELGTTRLDVVSRTVPAGKGMNVARVVKTLGEEVAVTGLIPKNDMRRFETFLSDHGIKALLYEAPGVTRVNVTLHDAQTRCVTHINSVSPPLPISLEEDFLRFLAGQAETGDSWCFSGSLPSGFDDDAYARLIRDFKARDVSCLLDTRGMALRTGARAAPQIITPNLTELGEFFQEEIKGVHHIALCGKRLIDMDVEYVFITLGQDGVIAIHEEQCLLCSPPDIKTVDTVGCGDAFAPGCWWRKNAA

SEQ ID NO: 83521 - protein, 198 aa, Unknown
  Obtained from environmental sample
  DOMAIN (4)...(159): Methyltransferase small domain
  misc_feature (1)..(198): Xaa is any amino acid
LLKVFSRILDEDRAAEKPPPRRLLDSGCGCGVIGICAAKAITTNDVKIRCQDRDELARLLTLHNAAHNGVSPAALEACTEPLLAGPDSEHWDMILTNIPAKAGTPVLEDFVRRSAALLNPGGRVIMVAVQPLADFFRERIAAEAELLLEHKGSGHTVFVYGGKAVQVPGVQAPTTTPGKCRAGIFLNGTRFYTRRRGY

SEQ ID NO: 83522 - protein, 325 aa, Unknown
  Obtained from environmental sample
  DOMAIN (119)...(262): GAF domain
  misc_feature (1)..(325): Xaa is any amino acid
GGPRSDSAEGHWIAVAMKGECVRMRESNYNKDQAAFLRGYGIKSILMMPIFTHGDLWGIVTFQDHTNDRYFDEDCSDLLYTAARIFSNAVIREEMKRHEKAEAALNRAAIMFLSQKEEAFEATMTAGIKEIADSFKLDRFSIWRNSPKPDAVHVSQIYRWDRESGGTTMPTKGLVDVTYAQLAPRWEKLLASGETINSPVRLLPEAAMLSTFGCVTAFITPIFINNVFWGFALLEDRHNERFFEKEDIDMLRSAAFLCANTVIRADMEREIANVNEFNNAILDASPLGFTIFDENAHVVDCNDFTLKILGTTKEYYLEHFHDFSP

SEQ ID NO: 83523 - protein, 132 aa, Unknown
  Obtained from environmental sample
  misc_feature (1)..(132): Xaa is any amino acid
MGASGENSFFGKVVNPAAPDRISGGSSSGSAATVAAGVVALAIGSDTGGSIRQPAACTGTVGIKPTHGRVSSHGVVAYAKSMDQVGVISNSVKDLVPILDLMCEPATNFGEHLGKGGKEKLSAAKGILGHHR

SEQ ID NO: 83524 - protein, 60 aa, Unknown
  Obtained from environmental sample
  misc_feature (1)..(60): Xaa is any amino acid
NYKTEFVYHRKFRDLTDVWRKSFEYIECYYNRKRIHGSLNYLTPVEFENQFYKKDVKRVG

SEQ ID NO: 83525 - protein, 289 aa, Unknown
  Obtained from environmental sample
  DOMAIN (128)...(193): HAMP domain
  misc_feature (1)..(289): Xaa is any amino acid
LGVFCAGLPFDNVLYTLFARYDTENVKGYVIDRDGIVQMDSTLSIISEEEHRNIPEADSDPALAAAIESHLKNINGYFGQDEELQVIRLTKGPYQYVSIKPIAGSDWSIVTFFSNKSLFSIWRLLPLLIFMLSAFVLYSLLGNIFISRIVITPLNHLTRSISAEQGSIFGNERNDEIGELARTIHDMRVKIHEADERVRLMMDTTPLCCSLIDKDINIIECNEAAVTLFNLKNKQEFMDRFFELSPERQSNGELSYVQAVRHIKKAHNEGKCVFEWMHQLPDGTPIPAL

SEQ ID NO: 83526 - protein, 55 aa, Unknown
  Obtained from environmental sample
  misc_feature (1)..(55): Xaa is any amino acid
AGRGDTLEIYPAYMEKPYRVDMDGDKVERIRRFNPVSGEMLEDLDRALIIPQSSL

SEQ ID NO: 83527 - protein, 333 aa, Unknown
  Obtained from environmental sample
  misc_feature (1)..(333): Xaa is any amino acid
GALGGGVDGRGNLQPDETLHIEIAEDQNFNRSVRTLNGLNDSAQAALTAGLWNWRITYNGDAKRAILASGRFTVTDAEELELLSPAKNRQFFTESEPPVLFFQWSQMEDVSHYIAEVDVTPEFRNPVIKKQTAAESFSDSSLGEGIWYWRVTPVFSQTNESGVTASRSSSFRIIKDNGQQTPSLVFAEETPQPPENPSPLPIQTQAPPVQFLPAPAERRPAEGYSIGIEELKQININFRWSAVQGANGYILTIYQETGDERQQIVQMGPEKRTSWSTAIKTLGRGNFIWRIEAVNVGRNNVIEQHGSPAESRFVIDIPRAGPVKIISGSGVKP

SEQ ID NO: 83528 - protein, 257 aa, Unknown
  Obtained from environmental sample
  DOMAIN (5)...(140): ThiF family
  misc_feature (1)..(257): Xaa is any amino acid
MERLGGAHVMVFGIGGVGSYASEALVRCGVGAITLVDHDLVGETNINRQAHALHSTIGQPKIDAMASRLLDINPAAKISKIAKFYSPGSADVFFQGPVDYVLDCIDTLACKIDLAIETSKRGTPIISCMGTGNKLDPSRFQVSDISKTRDCPLARNMRKELRRRGVNHLKVVYSQEAPVAPLDTEMHSAMLQELSPEAASRRAIPGSVSFVPARTGLLMARRNGQRHTESDRAFIICKQHFHRFSSLPVEPRNGIII

SEQ ID NO: 83529 - protein, 234 aa, Unknown
  Obtained from environmental sample
  misc_feature (1)..(234): Xaa is any amino acid
MINDKLIQQLKEYIKENYQLAEEPAEEQELLIGRTMLKKMPGLSSGKRLGKLTQGVQPSGRSFKDLTDTLAKFISKERESETFSAMLERLRKEKGMTAAQLYNGAWIKKQLYSKIMGERNYHPSKNTVFAFGFSLRLNRESMDKLLESAGYRFRNSSIADPCILFCLDYGHYYLHDVNPLLLSADQKSSARNESNASFINSKRLLFRNYLGGIHLGFGPKMAPFNWSPAVFYLP

SEQ ID NO: 83530 - protein, 345 aa, Unknown
  Obtained from environmental sample
  DOMAIN (180)...(340): Calcineurin-like phosphoesterase
  misc_feature (1)..(345): Xaa is any amino acid
MKIEIPELCLVALVGASGSGKSTFAKKHFKATEVLSSDYFRGLVSDDESDQSATEAAFDSLYYVAVKRLDRGRLTVIDATNVQPFARKKIIELARSQDLLAVAIVLDIPEELCLERNRLRPDRTIAPHVVKNHTRDLKRSLRSLQKEGFRYVHILQGQEEVDSVEITRTKLWSDKRDETGPFDIIGDIHGCYDELTELLEKLGYEVDRESCTARPPITSNRRAIFLGDFCDRGPANAAVLRMAINMTESGAALCVPGNHDVKLLRKLRGNDVTLTYGLDLTVKELEKEPQEFIDKAIQFLDGLVSHYVLDHGKLVVAHAGLSEKFHGRSSGRVRGSAYRQTPPQR

SEQ ID NO: 83531 - protein, 293 aa, Unknown
  Obtained from environmental sample
  misc_feature (1)..(293): Xaa is any amino acid
MQRFFPKRQSSYKLQKHIIVYNRTSRYKGEKMEAFDSARAADYARFVNDVLTLAKEKSKESEYGDPFAPSTGKRVILIAHAGANRLIDGGTLGTKGANTPGDFMDAYIDSTWCDESQCFWRGFEVKPADEFNRADSVFSVIVTSETASQDGLNWGISGTITSQIGRELGLPYSFDVVKGFSRLGYFDGMDFAGYNAGNGFFPSLPSAWMRAYNRWATVKEILPRLNGKETVEICAAGYACSGAAQVVKIPINNNEYILLENRQRTNRADGKVSVKMPGGKLVELPVDSLHTLL

SEQ ID NO: 83532 - protein, 266 aa, Unknown
  Obtained from environmental sample
  DOMAIN (28)...(238): SecA Wing and Scaffold domain
  misc_feature (1)..(266): Xaa is any amino acid
MDDELMRLFGGEKMKNVMSRIGMEGGEPIYHPWLNKSIENAQKKVEERNFEIRKHLLDYDDVLNQQRKFIYEQRDAILLDNNLKNRVNDATAGLVGEMLDEFNQLQKQDTTAALKNLKEQLRTKFGCQLTLDQNEAKNPELLEKKIIADLEKDINDKEALIGPDYLNMIIRDSYLHAIDNKWLDHLENMEALREAVYLRHYAQKNPLTEYKVEGFQIFDKMVDDIRQEIASRLHLVRIQVSPSGDSRRPSRTITSLVPNLSMSPPI

SEQ ID NO: 83533 - protein, 69 aa, Unknown
  Obtained from environmental sample
  misc_feature (1)..(69): Xaa is any amino acid
GLWPTAEPSGMFMGVALDTNEFLALNIYNTAFSYRELAQGQAKAIIFFIVIAVISMIQVRANKKREIEM

SEQ ID NO: 83534 - protein, 95 aa, Unknown
  Obtained from environmental sample
  misc_feature (1)..(95): Xaa is any amino acid
MDAQKLRGNRSFERRSKGLRFLTKLKAYPLLVVPLVLGAMRKAQAASVAMDSRAFGAFKTRTWLEKPVMKVHDYLSLAGFLIFSFIVLFVNYWNF

SEQ ID NO: 83535 - protein, 260 aa, Unknown
  Obtained from environmental sample
  DOMAIN (1)...(251): Aminotransferase class-V
  misc_feature (1)..(260): Xaa is any amino acid
APVDDSGQIILSEFARLFSRRTKFASVTHVSNALGTITPVHEMIQIAHGNGVRILVDGAQSVAHTPLNVSAMDADFFVFSGHKIFGPTGIGALYGKSDVLEEAQPYQGGGNMIKDVTFEHTVYNPPPSKFEAGTGNIADAVGLGAALDYVSCVGIANIGAYEHELLNYATGELKRINGLHLIGTATEKASVLSFILDGASVEQVGKHLASQGIAVRAGHHCAQPILRRFGLEATVRPTIAFYNTSEEIDKLVSAIRELAV

SEQ ID NO: 83536 - protein, 239 aa, Unknown
  Obtained from environmental sample
  DOMAIN (31)...(234): Binding-protein-dependent transport system inner membrane component
  misc_feature (1)..(239): Xaa is any amino acid
AHELSVCLSTVFPDSFLSGENFKTVFRIAPLMRFMLNSVSVSAMGSVLRLAFAMLAAYAFCYYDFRGKTILFMIILGTMMLPGDTLVVTNYITITRLNLLDNYFGICVTSLAGAAQMFMLRQNFKTVPRSYRDAAFMDGCGDLRYLFFVLAPLSAPVIFTLAVQSFIAFWNAYLWPLLVTNRVEMRTVQIGVAMLTNPLDTNYTTVLAAVTLLLIPSLFLFSLLRLVIKRAIEGGSLVG

SEQ ID NO: 83537 - protein, 185 aa, Unknown
  Obtained from environmental sample
  misc_feature (1)..(185): Xaa is any amino acid
ILGGDDGREPSEPVQIGIVYMRLRERIIQIPRLYLKLGEWFDFLRENGAYDNTRIIIIADHGGSIENLVSNKPLSIKGEIREYYNPVFLYKDFNAHGTLSINNDFMTNADVPFFAVNGLLENPANPFTGNPINTQPKENGILITTYHAPMAGNHGKYVFNIKKNQWMYLHDSIYEASNWENFELP

SEQ ID NO: 83538 - protein, 310 aa, Unknown
  Obtained from environmental sample
  DOMAIN (28)...(61): Tetratricopeptide repeat
  misc_feature (1)..(310): Xaa is any amino acid
MTDSAEQFAYEEAIRLSDMSIAKDRQNMDAWYLKGLSLIRLNRPQDAITVLSTALSVNEEAEFSRAILEDTLISSTPLEDPRRARWALWHFDNARNYRTRNLTDQALFEYRRGLRLNPFAQDRREYAELLRLSGYPSRYLEELLFLQDQGISDKPLNDAVEAYSSLLSNALFKQWNVNPVDLAERHWKVAVFSLAGQSSFIHADAGEIAASVIKDLLVHERNIAPVNLPLRQPSFSQAFRQARESGADYFMLVSVTENERDISIKGELFTARTGSPAANFYTYRTGTGRLRDASKGITEQLFAALPFRGR

SEQ ID NO: 83539 - protein, 321 aa, Unknown
  Obtained from environmental sample
  misc_feature (1)..(321): Xaa is any amino acid
VAEALKTHGICLAALKRYTGNGAIRHVPEHIRTSDFYAKYLTGAVSFTFDSIIPPEPMTEEVNREAVRRNGNALEAIPEEMRTFELCVEAMQNKNSLDSPLIFVPDKIKTPEFCLSCIRIDGTNLKGVPEDLKTYELCLEAVRKNGYALKFVPPHILTKEIILAAVSRYSDTIEYVPAAFKTDEVYIEAVKNQHFSSNGDVPEKYYTKENCLAMLSKHPLLLSSIVKNLPKSIKTEDFFIAAARVNGEMLEYVPEKLRTQELCFEAVKNNGSAIIFTPPEFITETLCLAAFESNAFALKFIPAKFKTREVCLSAVKRLVPI

SEQ ID NO: 83540 - protein, 406 aa, Unknown
  Obtained from environmental sample
  DOMAIN (9)...(403): UvrD/REP helicase
  misc_feature (1)..(406): Xaa is any amino acid
MNIKKGTQLNNEQQSAAFCEENAVVAAGAGSGKTMVLANRFAWLLTEKGYNVDEILTLTFTKKAAAQMFSRIHALLTEIAEGEDGENAARAQKALNNFVHSRIQTLDSYSSSIVKQYAPRYGISPDFMIDEERCRQIASEESLPFLITHRHHPAIERLFSDNRPNGIVNNIFAAVLFNHCRIDKPRDFTADVKTQFDIVCAEWEKQINKIGNLLNEMENLISENNVLLPDLVPLMKKNKKTTFPKTEELKKYFEYLLGLPVESSIEKSESHSLQKQMITLLGFLSEICSLNLARGKRSENIVKENIKEIRAIFGQFSSLAVSCMQAGLIISIMSLLSELQERYLERKRSEGVLTFNDVANLSKTILLEQHDIRQSEKESFKAIMIDEFQDNNDYKKTLGRSDAWLK

SEQ ID NO: 83541 - protein, 329 aa, Unknown
  Obtained from environmental sample
  DOMAIN (145)...(288): CBS domain pair
  misc_feature (1)..(329): Xaa is any amino acid
EYLSCIRGRRPKITIYDHHPLEHCDIEGAELAGKNWGPNTSYLGRLTMDQGLTLESEEATIALTGIYADTGRLIHESVRREDLEVAAWLLDMGASLRLVKSFLETIKEEEQLLILNKLLLLAQKKTVRGHEILFSYLEIEENIPGLAPVVEKIMDIENPDAYFAVFFIRKNKTILVIARSQKRRIGLHALLSPYGGGGHELAASLLLRNQEGSRFYGEFLEHLEQSMPPATRARDIMTTNVFTVNENSSVMNASIYMEEVNHAGVPVLDDKGNLSGFLGLRDIMKARKASQMHAPVKAYMAKQIVSSHPDSTMREVERLLTNTARARDK

SEQ ID NO: 83542 - protein, 242 aa, Unknown
  Obtained from environmental sample
  DOMAIN (123)...(242): SpoU rRNA Methylase family
  misc_feature (1)..(242): Xaa is any amino acid
MIPLYKLTQLPRSQRLRKAANLVRNAERRFVFLGHLDASETEYFEKLVKLLAEDEAFTASAIEALKTAHKNFADYRTDENEIRRALNTVYQILLAETGCYQADWDFFEPAGALDPLKRHIFSGMYVYLEDIRSPFNVGSMFRAADSFGTEKIWLSPLCASPLHKRALRTAMGCVEVIPWEFLSHDPFTIDPFDDHSTLPFFQGPFFALETGGTPLADFRFPTRGIIIAGSEELGVSPRALAA

SEQ ID NO: 83543 - protein, 292 aa, Unknown
  Obtained from environmental sample
  DOMAIN (1)...(282): Surface antigen
  misc_feature (1)..(292): Xaa is any amino acid
MPVQLNTKLYYTRFDKPKLYEGNFDGLRLSLGRQSNFDILYQVWSQWEEVHWIKAPSQDDAVTEVPNYPTQSIGGDIAYDDRNDLFSPTKGGFARLSVELAGVFGGKSNQFVKTTLDSRVYFTRHSRYHLSMAARSGYAVPYGKSGDVPPQSKFYGGGSTTVRGFPVDRLAVLPNNDPLLGNFYIFLNLADVRAPMFWWIRGDSFLTWFNAAAFIDAGNVWPNFTDISSVVGLFDDMRWSAGPGLRIDTPIKLVARLDFGFKLDRRPGESVVEIHFDLGQPFDFCLTRPSDH

SEQ ID NO: 83544 - protein, 67 aa, Unknown
  Obtained from environmental sample
  DOMAIN (1)...(67): Hsp20/alpha crystallin family
  misc_feature (1)..(67): Xaa is any amino acid
VSARKKEADNGTWLLRERHVSSFSRSFKLPDNANPEEVNAEFKNGILKMEINKRAEAQKRAIRINVK

SEQ ID NO: 83545 - protein, 146 aa, Unknown
  Obtained from environmental sample
  misc_feature (1)..(146): Xaa is any amino acid
VSGGRQNLLSGGTFGQINGTKSNPVLQADLFGDFREEVIFSNGTDALRIFTSTMATTKRLVTLMHDPVYRVAVAWQNSSYNQSPHPGYYIASDMDIPPPALNVAVVGGNPGSPTPVRFADAARPAAYSLRLVRNTRRRERSVSTIR

SEQ ID NO: 83546 - protein, 343 aa, Unknown
  Obtained from environmental sample
  DOMAIN (26)...(264): Amino acid kinase family
  misc_feature (1)..(343): Xaa is any amino acid
MNEISNNDRAAVLIHALPYIQKFRGKTIVVKYGGNAMINSELKTAVIQDVVLMSCVGIRVALVHGGGPEIEAMLKKTGKESRFVNGLRYTDAETMEIVQMVLCGKVNKDIVGLIQGQGGKAIGLCGIDGAMLKARKIQNEELGLVGEIEEVDSSVLHSLLDSGCIPVISSVARGIDDGQPLNINADTAAAKIAASLRAEKLMLMTDVRGILRDIQDPDSLIKTADREELARLKDQGIISKGMIPKVDCCTLALEGGVKNAHIIDGRLPHALLVELFTDEGIGHEIRGVRSGELPHSPPPVPSSPFSPFPPPRSRFFFPPFPPPPPFFPPLPLFAPGFPPAPSS

SEQ ID NO: 83547 - protein, 131 aa, Unknown
  Obtained from environmental sample
  DOMAIN (2)...(125): Protein of unknown function (DUF327)
  misc_feature (1)..(131): Xaa is any amino acid
VLRSEEPDSLDFAHALEEADLRLLTKDLERFMGEIMQQGERVRQSPTRQAFLRYKAMISRFLKRVLDLAVKTGKTRRRDREYVFADVIDERLLDLGHYLLLEEADSLAVAAAIDEIRGLLYDSLKMAKGEV

SEQ ID NO: 83548 - protein, 299 aa, Unknown
  Obtained from environmental sample
  DOMAIN (2)...(299): Protein of unknown function (DUF342)
  misc_feature (1)..(299): Xaa is any amino acid
TRKETFIIAQATQPVRGEDGRVEFCFNVDPSPAPTIAEDGSADYKNIDIVNLVSNGTVLAKLYPAQKGTPGKNVYGNVVAALNGIPARLPVGANTAIPNDDPNSLISVSDGIAIYDGTSVNVSAGYVISGDVDFKTGNIKYDNSIMINGDVKSGFEVDCGGDLQVKGIIEDCKITVKGNILCKFGFVGTGKGTITADGNVNLNFMKNQTIVAGGNVNIAKEALNCNITATKSINVYGHPLSVAGGTLVSNGSITVRTVGNISGAKTTLQINPEPELIAEMDGIKAAIAKNEENAKNWKI

SEQ ID NO: 83549 - protein, 263 aa, Unknown
  Obtained from environmental sample
  DOMAIN (212)...(245): Tetratricopeptide repeat
  misc_feature (1)..(263): Xaa is any amino acid
AYRGKRYYHELGHYIAGRGIDLAPTDQYKTASDLSEITADAFAMRYLGKSAYTAYLESTDLKYGYLDAVTKRAEEMEREERETLARLRAIANAPAAAPTPPAQKPSVNPAQALADSAIAAFGRKDYDKAIADYTQAIRLEPNYAGAYLNRGIVYDKKRDFEKAIADYNQAIRLNPNDPDAYKLRGAVYYEKGELDNAIAEYTQVIRLAPQDPAGYKLRGTAYFQKRDLDRTIADYEAALRLNPNDNSAKDILDMVKMLRQLKK

SEQ ID NO: 83550 - protein, 496 aa, Unknown
  Obtained from environmental sample
  DOMAIN (106)...(172): His Kinase A (phosphoacceptor) domain
  misc_feature (1)..(496): Xaa is any amino acid
MAFVCGGVLDVAKSLAPGETRALALPRGNIVIGTIPQLKWYSIVYKPDSIEDYKTSMTVLFLVVLVVMLLIFVIFNVFVASFLKSQLRTMASLEQARNEAEMANRSKSNFLTTMSHEIRTPMNAIIGIAQVLLQRKDLPDDYATALQTIYSSANSQLGIVNDLLDMSKIETGKMVLVPVEYDTPNLINDAVQLNVVRIGSKQIEFIVDIDENLPSKLYGDELRIKQILNNLLSNAIKYTNEGCVNLSVGYLTDGDGVTLRFTVEDTGQGIKPQDKERLFSEYMRFNAETNRATEGTGLGLNITKKLVEMMDGTIGAESEYGKGSVFTVTVRQKAVECPAIGARVAEQLRKFTFTGDRRMANLRINRELMPYGRVLVVDDVATNIYVAAGLLALYQLNIDTADSGFEAIEKVKSGGVYDDMFKQKGFDGFIAKPIEHRQLNEVLNKFVRDQHPEEAKKYATEATKTNPYKSVNIAMNPEYSNFSARRGKGDATLRET

SEQ ID NO: 83551 - protein, 54 aa, Unknown
  Obtained from environmental sample
  misc_feature (1)..(54): Xaa is any amino acid
VGICSIKGAPIFLIPDRDKFMGWDRQTRTKNIIYTMDAYVIGALPPYNYLLEEN

SEQ ID NO: 83552 - protein, 314 aa, Unknown
  Obtained from environmental sample
  misc_feature (1)..(314): Xaa is any amino acid
YRRACDKRRFINGLTNKTAYSVVVTANKAGFTSVDSVVQTVTPSSGINAAQPTISVQPQGGAFFKTGTLSVTAASKDGGTLGYQWYKNTVDSTTGGTVISGATASSYTLSDLGTSYYYVIITNTIADNGDGGSKTAQTTSNTADVTVELVLAEWARTISAGKSYSEFNAVTVDASGNVYAAGYQEGTENIFYGPGVSAQGTYSRRNVVLVKYDASGTAQWARTVSAGSSYSYFNAVAVDASGNVYAAGQQDGSGIYTYGSGVSAQGASTSSNVVLVKYDTSGTVQWVRTVSAGIYSSYFNAVAVDASSNVYATG

SEQ ID NO: 83553 - protein, 311 aa, Unknown
  Obtained from environmental sample
  misc_feature (1)..(311): Xaa is any amino acid
MDSYFDWEDLLSLLHFKGRYVELDISRVTGMGEFDPGKLPEGKHLIVSLVLPAASTGIVEGTQENPPFRYFKNLKEISGANIETLGSYSLFDLSKLTKAEFLALTAINNHAFAFCSGLTGITIPDSVTAIGDSAFYRCTGLTSITIPDSVTAIGDSAFYDCTGLTSITIGNSVTAIGDSAFYDCTGLTSITIPDSVTAIGDYAFYRCTSLTSITIGNSVTAIGDYAFYDCTGLTSITIPDSVTAIGDSAFYDCYNLTDITIGNSVTAIGNSAFYDCYNLTDITIGNSVTAIGNSAFRGVRPLPHHHWKRVT

SEQ ID NO: 83554 - protein, 217 aa, Unknown
  Obtained from environmental sample
  DOMAIN (15)...(191): ABC transporter
  misc_feature (1)..(217): Xaa is any amino acid
IFGRRICNISGAQAGSGKTTLLNTLGLLDKPTSGEYILDGKPTYKLKKDALATLRNRKIGFVFQSFNLLPRTSALEQVELPLLYNSEISSKKRRTMAMSCLERVGLANRSDHLPSQLSGGQQQRVAIARALVNNPVMILADEATGALDERTGYEIMVLFQELNQQGKTIVFVTHNPEITEFSNRTIKLKDGRLFSDTATENIKSAAEALAKLPAQQD

SEQ ID NO: 83555 - protein, 456 aa, Unknown
  Obtained from environmental sample
  misc_feature (1)..(456): Xaa is any amino acid
MLDTRKNGTGASYTGSLTVTEKIELWAQWKENVPTSKPAPTPTPTPTPAPAPAQTCIVSFRRNSGSDTIPAIAPIPAAYNSKVTLPTPSSRPNHTFVCWNTQENGTGASYTGSLTVTEKIELWAQWKENVPTSKPAPTPTPTPTPAPAPTPPPPQTYIVSFHRNSGSDVIPEVAPIRDVVHGRTVALPTPSRPNHTFVCWNTKENGSGASYSGSMTVTEKTELWAQWNAITPTPAPAPTPPPPQTYIVSFHRNSGSDTIPEVAPIRDVVHGRTVALPTPSRPNHAFVCWNTRENGSGASYSGSMTVTEKTELWAQWKENPPPPPQTYIVSFHRNSGSDTIPEVAPMRDIAHGSTVALPTPSRPNYAFVCWNTKENGSGASYSGSMTVTEKTELWAQWRENAPPPPQTYIVSFHRNSGSDVIPEVAPIRDVVHGRTVALPTPSRPNHDFNARAESVR

SEQ ID NO: 83556 - protein, 197 aa, Unknown
  Obtained from environmental sample
  DOMAIN (37)...(183): Mannitol dehydrogenase Rossmann domain
  misc_feature (1)..(197): Xaa is any amino acid
MKLNNNSLKNRAFWEKAGITLPRFDREAMIAATHAAPKWVHFGAGNIFRAFPAAMAQSLLEEGLEKTGIIVAEGYDGEIIDKSFTAIDNLTILVTLKSDGTTEKKVIASVAHSLRMDREMDALKKIFASPSLQMASFTITEKGYAVKNARRRTFSRHSGRYKKAAPRPLKVTLAESPRSAMNVTRTALRRSLGHSDP

SEQ ID NO: 83557 - protein, 487 aa, Unknown
  Obtained from environmental sample
  misc_feature (1)..(487): Xaa is any amino acid
MEFRTTRGGAPDFPLYLPVNRANTLPEITFMTPNSRFGPVERATTASGIVNYFVPLDEISYSTDGGETFKQIDFTRKYGRAWFNEFLDFSDINARGMELVVKVVDRAGNTVEASPDIEFDSNATAARIVHNVPDEGDVITRDFEISGLAYTDVGVSAVMWRILSPKNPWDPPEVTLAYGGDIEFKRIDTPQNYLINVSLSEVRDGENILEIYAEDIYGEPGEMVTKVFGVSTAVPVTTVVEPSRDIWNKGNIIIHGTSFDRNGIDEIKISMDNGISYQRADVIDNQDRPSLWTISLNTRVYMDGQYSIMIRATDGYGVQSFTSTTINIDNTAPMIDLSAPKNGAPIGRTLEVNGQIYDNLKVKLITILLTDTNNPDTFMVVEPPVEDVILQSLDVRSYRDGDYTLTVTAEDMSGNQTVVIRNIKFIKAKAASEVAIINPLAGTIHGGTAVVSGRNTGAVIPETVDLMLNRVKLTEVSVNKFGVFSIE

SEQ ID NO: 83558 - protein, 319 aa, Unknown
  Obtained from environmental sample
  misc_feature (1)..(319): Xaa is any amino acid
MLKRKFMQTLLEWKNSKGKKPLLVKGARQIGKTFIIREFGKQNYKSIVELNFSLFPQYKVFFEGNLSVDEICRKISINKKFEGVKFITGETLFIFDEVQDCGDARTALKSFAEDGRYDVIASGSMLGVAYKQIRSIPVGYESQVEMFAMDFEEFLWAKGFDDEKINIYKSYFEKKTNVEPFFNDKMFELLREYMIIGGMPAVVNKFLETNNYSEVHKLQTEIINSYLDDIAKYAPTAEKPKARNCYLSIAHTLGQENKKFQFAGVEKNGTAPKVDNSIEWLAKPWTNKPCHNGGTPTFSAWPNPPSRKLQIHARDLGLL

SEQ ID NO: 83559 - protein, 197 aa, Unknown
  Obtained from environmental sample
  misc_feature (1)..(197): Xaa is any amino acid
DDCESPDRARLSIELEKWANVALNILNDALLIKPNAPLGDDNEPTFTAPANVPDIACYYAGFGAICEVTMLTGRDQWYNEGQPVMRHLRSFEQANGKHKNYCLFVAPRLHPDTLNTFWTAVKHGYEGRRQKIVPITITGLINILQAVRNAKMTSRLFKKEDIQRLYDSCVKLKGVPDSTKWSEHINRAIDSWASTLT

SEQ ID NO: 83560 - protein, 276 aa, Unknown
  Obtained from environmental sample
  misc_feature (1)..(276): Xaa is any amino acid
MRIGGRNPAFFVHTKAGGRLPLPQFLFMLLVLMFVPSAFAAPHDGDRFDLAQPDGSMVPVRVFGDEFYQEVESLDGFTLIRGSDGWICYAELSADGSEYVSTGLRYTGGDRKSDGLRKGLRIGRGSALIKHRRNRDILGYDELTAPRPELRRPQSLSKSAATVRRVVGLTLLVEFPDQRSNIRQTDMYDFCNRAGGVNGSNVAGSVHDYYRDVSHGLLEYTNIVTSFIMLDSNFTYYDRGEDYQYVPQFLFHVLSKLKSGGFHISRGTAETLGGGV

SEQ ID NO: 83561 - protein, 82 aa, Unknown
  Obtained from environmental sample
  misc_feature (1)..(82): Xaa is any amino acid
GYREEDKTALFSRAEDLNIQAQNGIRIWVSNAQAAKFQIIGGGRSVPVEVGAAGEVVVSDFRWIRDEDSRYRLVLIRLETGS

SEQ ID NO: 83562 - protein, 72 aa, Unknown
  Obtained from environmental sample
  DOMAIN (1)...(70): Phd_YefM
  misc_feature (1)..(72): Xaa is any amino acid
MQKWQLQEAKAKLSKLVKQTTLAPQSITLRGEPVAVVVSIAKYKQLTKPKKSLFDMLRSAPESLNDLNLLSR

SEQ ID NO: 83563 - protein, 197 aa, Unknown
  Obtained from environmental sample
  DOMAIN (1)...(196): Fumble
  misc_feature (1)..(197): Xaa is any amino acid
MIIGIDIGSTTTKAVSLEDSRVIKKINTRAEDAITSASGAFGKIILENGIRMTDIQRIMITGAGATKIEGELFGIPTEKVNEITAIGIGGMYLSGKDNIIIANIGTGTAIIEAQRDRIIHLGGSGVGGGTILGLAKKLLSLSDFKDIMKLAGNGSLDPVDLLLEDIMVTDFSFLGKKSTASNFGKMLTQPARPILTI

SEQ ID NO: 83564 - protein, 464 aa, Unknown
  Obtained from environmental sample
  DOMAIN (38)...(461): Aminopeptidase I zinc metalloprotease (M18)
  misc_feature (1)..(464): Xaa is any amino acid
MDSDIKNKLIFPRKDASVFMNREEIKSADDYCKSYISFLNTAKTEREAVNAAITLAEKKGFIPWKKGMKIKSGDKIYSSRRGKTLVLCNIGKKNFAQGISIVASHIDSPRLDFKMRPIYEDSGMAFFDTHYYGNLKPYQWTGIPLALHGFFILKDGQELNIKIGEDHDDPRFFIADLLPHLAEKQMKKSVKNAVSAENLDILAGLNSAPGENGAGAVKLNILRLMYEKYGITEKDLVSAEVCAVPAFAASDIGLDRSMVGAYGQDDKACAYPGPTAFLSVNEPNYTSCLVLADKEETGSFGISGMKSAFFPGFINELIEAAGETATGSEVFSNSFCVSADVNTCWYPLYKEVFDEHGEAKLNHGIVLFRCWGEKGKENTNDADTQTVAALIKILEEADIIWQTGEGGKVDAGTSGTLSRFFTTLDIPTVDLGVPLLSMHSPFEGAAKADIYMAYLAFTAFFKRR

SEQ ID NO: 83565 - protein, 94 aa, Unknown
  Obtained from environmental sample
  misc_feature (1)..(94): Xaa is any amino acid
MIVLQQLINGVSLGSIYALIALGYTMVYGIVLLINFAHGDILMLGAYTAFFVLSVIGTGPEGMLFAFVVSMIICAVFGISIERLAYRPLRFRSA

SEQ ID NO: 83566 - protein, 97 aa, Unknown
  Obtained from environmental sample
  misc_feature (1)..(97): Xaa is any amino acid
MNKGDLRLRVQELSIDFGGLKAVSDFSCELYHGELVGLIGPNGAGKTTVFNMLSGIYTPTGGEIEFRDRGGNTCLVKNLNPAMMNRIGLPVLSANLS

SEQ ID NO: 83567 - protein, 278 aa, Unknown
  Obtained from environmental sample
  misc_feature (1)..(278): Xaa is any amino acid
AHTETRPTAIDPAAHQWGAWTQTKAPTITEEGEETRTCALDATHTETRPIARLESFTVTFHANGGTPQPPNQTVEKGNSASEPPAPTKANYTLEGWYKESALTTKWIFASGSGVAADTVSADIALYAKWILADTAFREYEDVLMFTDNAYGDKPYYANIADARTGAREKTLEEILDANNKNIVERLQSAVVAAFNSGTGPGATVTKGRFITVFGNAAGLGKVVITIENNTSYDSYKVGETYNDLRFSIEYLTTVSDADLQAAIVAAVREMYTIYGSLG

SEQ ID NO: 83568 - protein, 280 aa, Unknown
  Obtained from environmental sample
  misc_feature (1)..(280): Xaa is any amino acid
LLKNNLPANCELGAWWEITQPQVEAAGLRWRGEHSWVSTANIAFTTGYTQRERERLADVYMAKFKEIYGKYPAAVGSWFIDAYTLTYLYEKYGITVSCNCKDQVGTDGYTLWGGYWNQAYYPSRKNAYMPAQTEKGQIPVPVFRMLGSDPIYQYEEGLGTDGQGVVSLEPGYSHAGGNRQWVEYFLNSMIEQPCLAFAYMQAGQENSFTWDAMRNGLEMQFTMFDSLSRKGKIRLETLTQSGIWFKNKFTVTPATAVNAAFRYSSERITKRCWYNSPLLS

SEQ ID NO: 83569 - protein, 80 aa, Unknown
  Obtained from environmental sample
  DOMAIN (2)...(80): HRDC domain
  misc_feature (1)..(80): Xaa is any amino acid
GLPCQIGREVKELRKGIATKEGVPAYIVFSDASLRDMCRKKPASLVQFSAVNGVGSVKLEKYGEAFVEAINRIKGLGTGD

SEQ ID NO: 83570 - protein, 140 aa, Unknown
  Obtained from environmental sample
  DOMAIN (23)...(137): tRNA synthetase class II core domain (G, H, P, S and T)
  misc_feature (1)..(140): Xaa is any amino acid
MAALIEPKVLKGFRDFLPQAEMVRRNLTEKIEASFRSFGFAPIDTPALEYAEILLGKGGGETEKQIYRFKDNGDRDIALRFDLTVPFARFTALHQQELAFPFKRYHIGKVWRGENTQRGRYRESPSAILILSEATARLPI

SEQ ID NO: 83571 - protein, 96 aa, Unknown
  Obtained from environmental sample
  DOMAIN (1)...(93): Glycyl-tRNA synthetase alpha subunit
  misc_feature (1)..(96): Xaa is any amino acid
MHQIGRDTSNTQRRNVAGHVHAFEAEAGAVIERKLPWPAYDCCLKCSHLFNLLDARGAVSITERNGYIGRVRALASAVARLYVAQREELGHPLMQK

SEQ ID NO: 83572 - protein, 283 aa, Unknown
  Obtained from environmental sample
  misc_feature (1)..(283): Xaa is any amino acid
MYQGTALPPKTKERVRREVSGAWAAAFDVVEKKDKERALAFLLSFEQDAAIPIETGLFVLREYEKQGHVFSEIESAAIDGHFAVTRLRYNEALASFRKFMEDEKWTEKIPQMFLKYPDLINDLGKTFQYTSTGKEGLELYLQWESKLEKAPNEDNLRYRLLFFAARIARRRGLNKQADLLFEQARPLAPAGEQLDACIWYILDLAVSGPRDVFIKKLEQLVPYWHKDFYFDDVLEKFLQTLVAKKEWERIIRTYDIIKTSGASFTAGYAWVIARVNGEGYLSH

SEQ ID NO: 83573 - protein, 96 aa, Unknown
  Obtained from environmental sample
  misc_feature (1)..(96): Xaa is any amino acid
MAADSNKALIVQSDRTLLLDVHCETAQSARQAILPFAELEKSPEHIHTYRITPLSLWNAASAGLTPKDVVKTLCEHSRYDIPSGITGGFCHAKCPR

SEQ ID NO: 83574 - protein, 288 aa, Unknown
  Obtained from environmental sample
  DOMAIN (29)...(287): Aminotransferase class-V
  misc_feature (1)..(288): Xaa is any amino acid
LGAGSFDVNRIRSDFPILNEKIADGKPLIWLDNGATTQKPNAVIERLSYFYRHENSNVHRGAHELAARSTDAYEAARETTARFLGAPSKDNIVFVRGTTEGVNLAAQSYVKPLLSPGDEIILTILEHHANIVPWQLIAQETGAVIKVAPVDDTGQIILSEYARLFCSRTKFVSVTHVSNALGTITPIREMIQIAHGNGVRILIDGAQSVAHTPLNVSELDADFFVFSGHKIFGPTGIGALYGKADALEEAQPYQGGGNMIKDVTFERTVYNPGRLPNLKREPAILPTR

SEQ ID NO: 83575 - protein, 263 aa, Unknown
  Obtained from environmental sample
  DOMAIN (36)...(263): Gamma-glutamyltranspeptidase
  misc_feature (1)..(263): Xaa is any amino acid
MNFDPNFVPYPSIRYPVYAREGMVATSSPQASLAGLEALRQGGNAVDAAVAAAAALTVTEPASNGIGSDAFAIVWAGGKLYGLNASGKAPANISIEKLKEAQGGIGKMPFCGWAPTMVPGAPRAWACLAERFGRLPLKKSMERAIHYAREGYPIAATKAAAFIQAAERYKSAGRDCGQRIFDEWFKTFMPKGELPKAGDMIVLRNHAESLEAIAETNGEAFYKGRAWRIALWRTQGNWEGFSAKKIFRPMTQNGSIPFNNCDQ

SEQ ID NO: 83576 - protein, 326 aa, Unknown
  Obtained from environmental sample
  DOMAIN (164)...(227): Elongation factor Tu domain 2
  misc_feature (1)..(326): Xaa is any amino acid
VIAGESGGITQHIAAYEVQTSHGPVTFLDTPGHEAFTAMRARGSQITDVIVLVVAADSAVMPQTREAIDHAKAASVPLVVAINKIDLPTANPEKIKGELANHNVLVEEYGGQTSCVEISAKTGQGIEKLLEVLALETEILELKATPEGRAHGVVIEAELDKGKGPIATVLIQRGTLTKGNAFVTGIHSGRVRELHNERGSIVENAGPSQPVLIIGLSGTPQAGDSFRVLDDEKEAREISARRRLAQREREMRGINAVSLDNLYEQIQAGSVQNLNLIIKGDVDGSVEALATSLEKLSTPEIKVRVIHKSVGAVKETDIMLGGPPTP

SEQ ID NO: 83577 - protein, 210 aa, Unknown
  Obtained from environmental sample
  misc_feature (1)..(210): Xaa is any amino acid
MGSAPGWFLEKKAFFFHGSSLLLPEELPAGGASHSDGASHSDAMDWETPLCRAADFPHPESEAGYAGFPDGEIYYISIKPETPIPPRWQAIPVRQAVSLLSGNTANGNIQSSRMLRAFHIAQWREESRFCGSCGARNTDSPDELARLCPACGRMEYPRIAPAVITLIINDEDQALLCHNSKFTRRNVQPLLPGLPEAGENLEISVGPRKS

SEQ ID NO: 83578 - protein, 175 aa, Unknown
  Obtained from environmental sample
  DOMAIN (8)...(175): Glycosyl transferase family 2
  misc_feature (1)..(175): Xaa is any amino acid
LSSGAKISVVMPTLNSGRYIARALESLAAQTLEGAELIVVDSCSTDNTIDELHSHKLDSLPIKILSVPDCPYAPAINLGIDAAQGSFVAFCDSDDYMAPDMLSIMFDAAIKSNSDIVVCDFDMAYPDRTIKSFAQLSDGHFEPAGSSIVDYYYKFGAAPSPTTTSGQGSIGGISF

SEQ ID NO: 83579 - protein, 352 aa, Unknown
  Obtained from environmental sample
  misc_feature (1)..(352): Xaa is any amino acid
LQNVEEISHDDMRKMIDNDLVMAHRTRGLNPEHPRIRGTAQNPDTYFQGREGVNPYYSKVPGIVQAEMDKLAKIIGRQYHVFDYHGAKDAEKVIIIMGSGAETCEETVDYLNSKGEKTGLVKVHLFRPFDVSLFVKALPSTVKAIAVLDRTKDPGAIGEPLYEDVRTAIAEAKAAGKFSADPIVLGGRYGLGSKEFTPTMVKAVFDNLSGKKIASFIVGVNDDVEHKSLDYDPHFVLEEEGLNEALFYGLGADGTVGANKNSIKIISEAKPELNAQAYFSYDSKSQTASPFRTSASAKAVSEGPTLSTPRTSSPATNFPTWKRTICSKALRQAEPSSSTVRSRPPMYGRISP

SEQ ID NO: 83580 - protein, 196 aa, Unknown
  Obtained from environmental sample
  misc_feature (1)..(196): Xaa is any amino acid
MEQVLTDLAAKLGECFAESTSSVFSMLTGREFTVSSKPDEVASEGDLLAKLPPDSIFVKTSYTKGVTGIALFSLPLKESTILVDLMLGGDGTPSDSLAGDSKDALSETFNQVMGSANQTLSDLAGETLSISGLEIIDQGGIDAAAMTKLIGEANFLAIPLATAADTLNTDIFIVTSSLLNEQLKYKLGPGFSRSRS

SEQ ID NO: 83581 - protein, 325 aa, Unknown
  Obtained from environmental sample
  DOMAIN (83)...(304): DnaB-like helicase C terminal domain
  misc_feature (1)..(325): Xaa is any amino acid
VSGPAALADILIRKRRLRDLIKLGAQLVRKAASEEDMPETLVETAGRDLFGIAQGHERGGLEHIAQVAQDVHGRLIERLESGGSPGVRLGFQRLDALTRGLQPGNLVVLAARPGLGKTALALNWLLHSSRVYGCHAAFFSLEMSKEEVFNRLLASHSSLNVRALMNGDIDEQNDPDAPHAYGHMEEARERLLRARDELVQLPAYICDRASITVHEITAMVDRLCTQADRRLDLVIIDYLQLISSPADSRGAKQNEAVRIGEISRALKLLAKDRGIPVVVLSQLNREVEHRQSSRQSSRPQLSDLRDSGAIEQDADIVISAESVHG

SEQ ID NO: 83582 - protein, 209 aa, Unknown
  Obtained from environmental sample
  DOMAIN (8)...(108): tRNA pseudouridine synthase
  misc_feature (1)..(209): Xaa is any amino acid
MEGRNIRLLLAYDGTGFCGWQRQSEGNRTVQGVIEQALEKMHGFHVCLTGSGRTDTGVHAIGQAANFFTGINSIPCERFVPALNSLLPNDVRILESREEKKEFHARFSACARTYRYHFICRDLLPHERNYNLCLRRFPRLEILNAYGRLLLGETDCSIFAGAGDASLEKGKSRNRYIYRANFYVQGENLIFEICAHAFLRNMVRSIAGT

SEQ ID NO: 83583 - protein, 179 aa, Unknown
  Obtained from environmental sample
  DOMAIN (5)...(174): Amino acid kinase family
  misc_feature (1)..(179): Xaa is any amino acid
MLKFRRCLLKLSGEALAGSAGHGIDNSTISWVAQEIANSVKDGAQVALVIGGGNFVRGATASAGGMNRAAGDSIGMLATVMNAIAMQDALEKCGQKAEVMSAIRMEPLCGYFDRRKAIELMENKTVVLFAAGTGKPLFHHGYRRKFCEPLKSECNVMMKAPKGMASTPPTRLGKTCLRF

SEQ ID NO: 83584 - protein, 57 aa, Unknown
  Obtained from environmental sample
  DOMAIN (1)...(55): Cupin domain
  misc_feature (1)..(57): Xaa is any amino acid
MMAREFDYMLSGTMEFYFDNIVYELNEGDSVYFDSGVPHAMKTIGNQAAQFLAVVIK

SEQ ID NO: 83585 - protein, 127 aa, Unknown
  Obtained from environmental sample
  misc_feature (1)..(127): Xaa is any amino acid
MAGRSHDAPALDFPLRERQGLWELDTQAFISALIRARMSGRDTGMLARAFHTSLACGFADMALAAARRTGIWRIGLSGGVLQNATLAALLPSLLEARGLTPLTHRDLPAHDGGIAPGQAAWGRRLCK

SEQ ID NO: 83586 - protein, 317 aa, Unknown
  Obtained from environmental sample
  DOMAIN (127)...(253): MutS domain II
  misc_feature (1)..(317): Xaa is any amino acid
MNDDRFTPAMRQYMDLKARYPGAVIFFQMGDFYEMFFEDAEKVAPLLEITLTSRQRKGEDPIPMCGVPVSAGLAYANRLTEAGQRVVVANQVGDPSKIKGLVPRAVWQVGTPGLPLTAEGTAPGEAHYLAAVRPQAGRLGLAALEVSTGELVLGTFEDWENLRSEFSALNPRECLLPEDSPPEFLELLKQEHIFPTFRPARDPAEGLRELETLFGTSALAAWELDKWPEAAGAAGAVLAYARECGQGEFKHLAPPRLLWSQPHLVLDETALANLEILKTLRHGELSGSLLGLMDLTETAMGARLLRQWLGRPLRDPA

SEQ ID NO: 83587 - protein, 129 aa, Unknown
  Obtained from environmental sample
  DOMAIN (39)...(129): Flagellar motor switch protein FliM
  misc_feature (1)..(129): Xaa is any amino acid
MTEVLSQDEIDQLLTAINAGDTEPEDFKSTADSRKIKIYDFKRPDKFSKEQIRTISMMHETFARLSTTSLSAQLRSVVHVHVASVDQLTYEEFIRSIPTPTTLAGINMDPLKGTRYWKSTPPFVFRYGR

SEQ ID NO: 83588 - protein, 292 aa, Unknown
  Obtained from environmental sample
  DOMAIN (1)...(208): Binding-protein-dependent transport system inner membrane component
  misc_feature (1)..(292): Xaa is any amino acid
VLNSIYAAGTATIISIFFAWGFALCVVRSNLRFREVFSVFVTLPMLIPSISHGMGLILLLGANGIITRLFGLGGTIYGFHGIVLGAVFYAFPVAFLIFFYILKYEDGSPYEAAEVLGIPRINQFFSITFPDLRKPLISVVFAVFTLIFTDYGVPLMIGGRYITLPVLMYQEVIGLLNFSRGSVIGSFLLIPADIAFVIDLLNRDRAKQNFAISGKAQPENKLRDASAACYCEIKSQNNAPAVRVYATTLWSQLPRGNEIGPSVTLSKPMTWEGEENTGQTLDNDRKRFQSGK

SEQ ID NO: 83589 - protein, 314 aa, Unknown
  Obtained from environmental sample
  misc_feature (1)..(314): Xaa is any amino acid
AINELVFAKAKFLRGLYSQARRAERQKVWVSAIQAFARGLTKTGIFLAIGTTAKNNIHKVIIPWEAAAERIGQLFDAGQYVTPETLADALDNERRELADRLWNFYHDDMGSLPDEWKAEKGGHPEDTAKIKSLLDNPETRQTLINRVSADIAAYNPAEHERHWHNRTSLLYDVRVAGYAPSYPPQAEMDSKPFKYFITQDEVDAQLVNGSNVSDSKFRVLSFFLNHRDEAERVKFLKDEYGTGGGTWSEGNGHENHTPSDGITLQRGDIFTPTAEVNLKWNAVARRIDALIHGGQYMSRPELDYIERYERLIWR

SEQ ID NO: 83590 - protein, 469 aa, Unknown
  Obtained from environmental sample
  DOMAIN (57)...(200): ATPase family associated with various cellular activities (AAA)
  misc_feature (1)..(469): Xaa is any amino acid
ALKDEELKDTVINDEAIKDEAITEDAPIEMSKDVAIKSEPVKIDAKTPVPSSVKGPILCFVGPPGTGKTSLGKSVARALGRNFVRISLGGVRDEAEIRGHRKTYVGALPGKIIQSMCKAGTTNPVFLLDEIDKLSSDFRGDPASALLEVLDPEQNSTFVDHYLEVQYDLSKVMFLTTANSLHSIPYPLLDRMEIIEVPGYGENEKLSIAKQFLVPKELRENGLSSAKITFRDDTIKNIIRFWTMESGVRNLERETARCIRRIARDAVNKGYGKDKAVSEFNKIITPANLEKLLGKKKYKRDVVYREARVGVTYGLAWTETGGTILPVETIRYSGSGELLITGNLGDVMKESARIALSYLRSTSNKYNFIAKDLLKSDFHIHVPEGAIPKDGPSAGVTLASSLLSTLCKVPPRPCIAMTGELTLTGRILPIGGLKEKVLAAIRNGMETVLLPKDNTEDWNELKSLGQSIM

SEQ ID NO: 83591 - protein, 214 aa, Unknown
  Obtained from environmental sample
  DOMAIN (99)...(203): Shikimate / quinate 5-dehydrogenase
  misc_feature (1)..(214): Xaa is any amino acid
MKKSFGLLGEKLGHSFSPLIHGYLGEYDYLLYEVSAGDLDSFMTSNRFDGINVTIPYKQQVVPYCVTLSQEARTIGSVNTIIKDDSGALHGYNTDYHGFRVMLEHGGIDPKEKKALVLGDGGSARTVRAVLDGLGAREIVTISRRGENHYGNIKRHYDAQVIVNTTPVGMYPDNDNSPLSLAGFKQLTGVADLIYNPTRTKFLLKPNDRLPRDN

SEQ ID NO: 83592 - protein, 314 aa, Unknown
  Obtained from environmental sample
  DOMAIN (19)...(310): Initiation factor 2 subunit family
  misc_feature (1)..(314): Xaa is any amino acid
MDQIGREQALPFKFEILDLVTVDDVCKAIKDMYVRGAGLIGAAAAFGMYLAALKTNDAAFNDDMAAAARLLKNTRPTASNLAWAADRMALAGYSGTLEQKIEKARLEANAIADEDAEHCRRIGLHGLEIIKKIAQKKEGEPVRILTHCNAGWLAFVDHGSALSPVYAAFDQGINVHVWVDETRPRNQGAFLTAWELGQHGVSHDLIPDNAGGHLMQHGMVDMVITGADRVTRQGDAANKIGTYLKALAAKENNVPFYAALPSSTFDFAMRDGLKEIPIEERDSSEVRLIARKNRGRRNRNRTDMSRYNNGAELG

SEQ ID NO: 83593 - protein, 410 aa, Unknown
  Obtained from environmental sample
  misc_feature (1)..(410): Xaa is any amino acid
NAGSESAERQFINFPINPTFGGNVFAAKEIYPGMSLGAGFNFGFGEVSEETTLSGDLGIHYNMGKLGFLNNFTWAFMLRSMGLSYFPTWLTPAGGISFDLLTVNGKDGKPDPFIVTAAADLSVPSLFYPKYINLILKTGLNIKIAELITLSASWPGGSGLNYRELFKDKVDLQTFPSIGLSVNIILPSGEERIAGGRLPSDGDLKIAGAYKPLYEGVTAVGGGVSWYVGQRDTTPPVIAPTYPETIYFSPNNDGKADFLEFPNSITDNKYVVSWKMEIKDEDGSVVRVIENKEQRFTSFNFKDVFKRIFSKKKQIDIPVTLRWDGIRSSGELAPDGKYFFTITAADDSRNMSASQVYETVIKNTVPVISVNALTDAQRIFDPQAQAGNSFVTFTHRGSKEESWQKVNINS

SEQ ID NO: 83594 - protein, 161 aa, Unknown
  Obtained from environmental sample
  misc_feature (1)..(161): Xaa is any amino acid
VRFRLQSFLQNFGSRKVFVTLPSGQIPAQVYERILDLIFSIDSEWEEKGKSLADVIEYVEVVMKSEENPVDKIIPGDGEGGVRITSIHKSKGLEFPVVFIYDCGSAAIKKRSKKLISYHEKYGVILDIPQAEELSFGGNYFHRIMEEEERAKDTAELRRLL

SEQ ID NO: 83595 - protein, 154 aa, Unknown
  Obtained from environmental sample
  misc_feature (1)..(154): Xaa is any amino acid
GFWGGDDGREGQIESIIDWIFDAKYMELHRRYGYFFVPGGAYNAKAIIWKAHLIDFTKMAFDNGELGSLVFTCFVLSHFKSAKKSEWFKSAMMYMENYRTTEERYNFQKYMIVEKPDCYVIEGGHMNIGENKRSKKYAEIISTYWMNRIKENMK

SEQ ID NO: 83596 - protein, 87 aa, Unknown
  Obtained from environmental sample
  misc_feature (1)..(87): Xaa is any amino acid
DQDTIGSLWASDSKGIGIQYVEENKCICPNEYDVRRLTPLECERLQGFPDGWTEYGHDGKLISDNQRYKALGNSVAIPCVEFVLSGC

SEQ ID NO: 83597 - protein, 278 aa, Unknown
  Obtained from environmental sample
  misc_feature (1)..(278): Xaa is any amino acid
MKRFNLILLIVLFGFLFSCAGKPKVKTAENNEQAKENVVEKPDKQAEKIDELAVEEKTPVDLAAASPEKPADAPIDIAAEKPTEEPLNEETTQADSDKELIADAELVKTEPAAQEPAANTPSVSPAPPSQTQPPQTQAQPPQAQPTQTQPQTQPQTQPPRTQPPQTQPSQQAQAPQSTPPAQRQQPVTPPAQTPPEEKTDSSETASSGDDSQDKKEPSSSIAGGNSAPATRIESLTPMGTMPQDKEIIFSRIVRATVGQIVEISFRGNGWVYLGELTS

SEQ ID NO: 83598 - protein, 340 aa, Unknown
  Obtained from environmental sample
  DOMAIN (165)...(337): 7TM receptor with intracellular HD hydrolase
  misc_feature (1)..(340): Xaa is any amino acid
VIADATLFIAVGRSSFREYGIETLNILLNRGIFSFNRDDIRFFSPDIAELQHSSSAMEKEYISYNNIITPANVRGVLDDIIKSMDTPILFKSVASDLLEPFIRENTFFSFSETQKRIEDAKDTITPVYRTIEKGNRIIRKGFIITEEEMEDLTVLHKSMPKRDPRSIIGVILVMLTLYMLFNVLCGRIVIGRKINNSERYLLASFSGFYLIGAVLLFNFLPSQSNFPLSLLMPTALFVMLLAVLMGTRPAMIMALALPLGAYFTGAFDNYSYIFALISGIAASTVLHNAKDRMSLINAGLVIAAVNTAAAVIILLLKQAGLYDYPAMIFGAVLNGMSREC

SEQ ID NO: 83599 - protein, 80 aa, Unknown
  Obtained from environmental sample
  misc_feature (1)..(80): Xaa is any amino acid
VVMLADITEAQVRTLDKLSAARIDKFVQQLFGTKIEHGQLANSDLSFRELETIKNAFVKVLAGYYHSRIEYPKQKEEAPQ

SEQ ID NO: 83600 - protein, 228 aa, Unknown
  Obtained from environmental sample
  DOMAIN (66)...(132): Biotin-requiring enzyme
  misc_feature (1)..(228): Xaa is any amino acid
MIGEPSRCSKAAAAAPGQAARYSVNVNGSNYDVVVSPAGTVAAVPAASSAAPAASSLSALPTVGGATIPAPVAGTILRYVASEGAQVKSGDTVLIIESMKMELEIKATSSGPIHFLVPTGTQVAAQQPVAQIGGGAPAAAPAPAAAAPAPAAAPAPSGGGVTIPAPVAGTILRYAVNEGATVSAGDNVVIIESMKMELEIKATSSGKVHFLVPAGTQVASQQPIAEIM

SEQ ID NO: 83601 - protein, 328 aa, Unknown
  Obtained from environmental sample
  misc_feature (1)..(328): Xaa is any amino acid
VVPFSFGLFFLVAWFLWAGLGWLKCSEGLAPLFSMDLSFYALSVIPFAALHFFGGAVEGIRNPHSGMFITECAVFALAPFLSIMLNFADIPYALPAGLLIANILGCFIYIPLIKKSFPFSLKFFGNKIPRELLVYSVPRGFSEVVVSISMRIDVWMILLMLGPGDAGVYAVMSTISNGLRTIRQSYNPIILPVVAGMSKERLATDLKPVFSYCVNMVTLIQLAIGFFIVLFPDKILMIAGKDFIVQPETLGILLLSHLLGGFFLLSAAVLNGIGKSLYTLKMDIASLCLACIVKSSLIPIFGLSGCSKRHISVFMLQSVGIRSIGMPR

SEQ ID NO: 83602 - protein, 206 aa, Unknown
  Obtained from environmental sample
  misc_feature (1)..(206): Xaa is any amino acid
VGVMAYAPYGAGGVIIRVEADIRRGIPGIDISGLAEGAVREAKERVRAAFRNSGFTFPLDRILINLAPAGLRKDGAALDLPIALAVMAAAGLVPEPPNILVMGELELSGNIRPVRGVLAAIAGGLEEGITEFIVPAENKGEAAILYGAGENPVMRFQAVSSLREAADALFIRETTGALLVPEESPNVDELRGRYRCRNTRLCRTAG

SEQ ID NO: 83603 - protein, 327 aa, Unknown
  Obtained from environmental sample
  misc_feature (1)..(327): Xaa is any amino acid
LHDLYLRPHPSAANRIFDNGNTTVQRYYAPNCEITDISSKGGTTRSIKDYIFSPYGLVAIHTSENYTTSRIPPLSTLPIQHLNAVATDHLGSIVAEYNTCSNDYEFFGYDAWGRRYRYKYYASPKIPIYFYFDETPPTYFDIDELLTYFTRGYTGHEHLDMFGLINMNGRMYDPALGRMLSPDPYVQAPTFTQSYNRYSYVWNNPLKYTDRSGFNTSSSTTDYLLPTIEQMMRASAISDKLANSFERSMAGSSWRDNLIGTVIFQEDFWSNTGMNFAWFYGTGGGGWTGGGGGEQWWGSSSKELIERAEAIFNNPDALVPNSDQWIF

SEQ ID NO: 83604 - protein, 301 aa, Unknown
  Obtained from environmental sample
  misc_feature (1)..(301): Xaa is any amino acid
LSRGIRHAGSEGGAPSKLPEGVSWTEENGEGLTLTGISNLTIRGVTGSGEWPKIIVDPRNVYVLRFVNCNDIVIESLTAGHSEGGYCGGGVFEFKESSRITVNATAMYGSGTEGLTLRNVSDMKVTNSKIYECTEAIFSVDGGGKVAFENCLFIRNRGYHLVYVAGDGAQHLSITDCEFRDNWNEDGGGGMFFLTGEGISISRTKFIGNKINKINVGNNNVLFGEGCEFDDVFIDARDGMAYRFVKIGTQTWMADNLNYQTPNSYCYNNGDFACVQYGRLYRWDAAKEACPTGWRLPVRAE

SEQ ID NO: 83605 - protein, 136 aa, Unknown
  Obtained from environmental sample
  misc_feature (1)..(136): Xaa is any amino acid
MSKEQRAQRKRTRVKPYLNLLALICNLLIVVGCQPKPPLIYSIYPQIGNVGEPLTIKGVNFGGERDASYVTIAGAQPTGTSYLDWQDNEITIRVPEFSEAGLVYAHVKGRKSNGMLYANKATLPKQTFDTLGGQGP

SEQ ID NO: 83606 - protein, 189 aa, Unknown
  Obtained from environmental sample
  DOMAIN (11)...(188): Tetrapyrrole (Corrin/Porphyrin) Methylases
  misc_feature (1)..(189): Xaa is any amino acid
MSETEIGARGCLVLVPTPLGNLGDITRRAVEALGACDVVACEDTRRTGLLLKHLGIQKPLMRFDDNAGTGEASRLAGLLTTGKTVAYCSDAGMPGINDPGFELARLARELGADVCPLPGPSVVTLAVVASGLPTHAFSFIGYLPSRMEARRAFIRRLAGREETTVVFETPHRIGEALKDMRRYLGRSDP

SEQ ID NO: 83607 - protein, 330 aa, Unknown
  Obtained from environmental sample
  misc_feature (1)..(330): Xaa is any amino acid
AGQIGRDPFGGLWSNEALNEKPQQLHINGFIRGPEYIQTRNALVEALRVTTDDSTPGYVDFPFWGRFPVVVAEYKVSETADEKGQCAVTLAFKRAGASPAERAASVSGMAAANLSGTGMALEAAMEDLQAAAADSFEKALADNADASTAKTLSQGFGQIKTALLGALGRVQAAQTKLNAVSAEINGTLSLTAELVGAPRQLAQSLFNAAASIVGGLAEIKNGAASYLPKSNSASSPSSPPSYPAPAANNEQSVLLQFFSASSFALPTIPLTVRQEAASRAIENLYRTCAFTAAGAILPLLDAPFQKTEGYWKLFPKLEASIDKNNPAVYA

SEQ ID NO: 83608 - protein, 132 aa, Unknown
  Obtained from environmental sample
  misc_feature (1)..(132): Xaa is any amino acid
LPGRQFRQLRNTARAEGRPCIRPALEDGDAAVYTGEGSYIVLREKGGLEIYTRQKGDIKVICEGNARREIQGNSTETIGGNEDRFVDGDHCSLINGNGKQNVHGKYEWNIDGSLDINVGGNVRINGETIYLN

SEQ ID NO: 83609 - protein, 89 aa, Unknown
  Obtained from environmental sample
  misc_feature (1)..(89): Xaa is any amino acid
LKKRKLASAIGYDTGDFAPLLLASGRGREAEQIIAVAQDAGVAIVEDAALAALLDTSVKPGDFIPPWCWEAAAKILAFVIEAEEQTAGN

SEQ ID NO: 83610 - protein, 267 aa, Unknown
  Obtained from environmental sample
  DOMAIN (15)...(203): Metallo-beta-lactamase superfamily
  misc_feature (1)..(267): Xaa is any amino acid
FAELPPWLFGTVGGNSPCVTVDFGDPNEHIIFDCGSGIREFGMSQIKENRNSAQYYIFLSHFHWDHIQGLPFFGPSYIPSVAMNFYTPFANVEKLLSGQMVSPYFPIGLDVMVAKKTFNQLTDKVNISGRTVSYKKMNHPGDSYAYCVNDNGKRVIYSTDTELTSDDFQKTEENVSFFKDADMIIIDCQYTLGEAIEKYNWGHSAFSLAVDFAANWGIKHMVMFHHDPSYDDHKLYGILQSARWYLEKMNIKEIELTLAYEGLKISL

SEQ ID NO: 83611 - protein, 409 aa, Unknown
  Obtained from environmental sample
  misc_feature (1)..(409): Xaa is any amino acid
LCRYMLETFNIPKKTTLAAIEQGEKALEEFNRALTDNGKKIIADVEREKKIAVVIAGRHYQYDEHINHNLSHYFTSMGIPVLTLDSLPSHGKIPLSKSRIEITNNNHARLLGGAIAAAEHPSLEYVDIFSFGCGHDAVYSDEIIRVMDEISGKAPLILKMDESDIAGPLRIRIRSFIETVMIRRKIRTHNAKPLGDPYPVKFTKKEPKKLLLIPNVSRAFCLFLSGALANEGCLVEPLPMGGIEAIAMGKKYVHNDMCLPAQLVIGESILALKSGKYDPDKTMIGMAKVLCDCRLSNYMPLARKALDEAGFPQVPIITTDIRDSKNAHPGRRFTEITYMKGLWCMIQTDALEFLRRRIRPYELQKGETDKVVENAFLEIYEGLTKARHSRIERCFKKAITIWPRPNLTM

SEQ ID NO: 83612 - protein, 508 aa, Unknown
  Obtained from environmental sample
  DOMAIN (405)...(448): LysM domain
  misc_feature (1)..(508): Xaa is any amino acid
LQSSSISKFTALLLYVASILTGAAAVRPASADSNLFPVPDVITHNVAFWIRIYTEVSLQDGLLHDRDYPQVVYEKMSNGDRTGKKLGELIDQRRKVYVDAIAQVRDSAPAKWSAEAKRVAELFKLAPEGAITGAEERIRHQGGQRERFRLGLMRSTMYLDTISAILKKNGVPDELKYLPHVESSFDAEAYSKVGAAGLWQFMRSTGRLYMKVDYMFDERRDPIISTNAAAKFLKANYDMLGAWPLAITAYNHGPNGIRGAVEKLGTRDIAVILQKHESASFRFASKNFYSCFVAVLQIMEKPDKYFKDVKYYPKFSATGIKLPFAMRPDALCKALGINEDDFKALNPSLRPVVFSQKKPIPAGYNVNVPSNISAETAVAALNRTPLPMRTTPKEAAEAVETEGYYTIVSGDNLAGIAKRLGVQMSDLAAVNNITNSSKIQVGQVLLIPSGEFGAGWGATITASKHTPKAGAADTTKTFAVDTAKASAVASASKPDQRRSQSISADLIL

SEQ ID NO: 83613 - protein, 419 aa, Unknown
  Obtained from environmental sample
  misc_feature (1)..(419): Xaa is any amino acid
MNRKSAKKNLFITAPGGYGKTTAAQQWLSFVRGASARLRMGNEDNNTGVFYKELIYSLLKLVKKEKSAKSAEFMLDTFLETLKQMPFKNTRCYLLIDDLHVIKNNDILNSLPLIAGRLPSYVCLCLVSRSMPPQPLLDTGLFETLTKDDLLFSQEEVEWLGTEKKRELTAEQINDLLETTGGWAMYLSALLSGEQTYKTPQTLVQYLERQVWNIWDDETKKLLVRLAVPVEITPDLCERLTAEADGKSILDRLVKKEGVFLTHIGNGVYRFHDIFRDFLLERTALLETQEIRRLNNVTAEWYYERGDYHSGAQYYIRNNDHEGIIRCLAAASQYHENLGVMSVEAYINFTIRYVKDLPAEFISANPYLIYKLITTAYHNGDMNEYMRYSDMLYEKQAKSPQNIPPYTNIGLPGTRPICH

SEQ ID NO: 83614 - protein, 118 aa, Unknown
  Obtained from environmental sample
  misc_feature (1)..(118): Xaa is any amino acid
MNIFETKLAYNDGKLLKQEFVDAMHKQHCVLNDYAEYTKNSEIKKIIIENGNVYMTTDEDIVIRCNFIDKGSIPLINLSLGCYDKEERLCVMGLIERDDVVFDIGANYGWYSLNIAKK

SEQ ID NO: 83615 - protein, 102 aa, Unknown
  Obtained from environmental sample
  misc_feature (1)..(102): Xaa is any amino acid
MARLLEVRGLSVGIKKNDKYMKAVPQVSFTIDEGEKKKVAGGSGCGGALAALSVPGLVSGGGGVLAGEIIFDNRNLLIFSKKQMCAVRAEEISVIFRKFASL

SEQ ID NO: 83616 - protein, 286 aa, Unknown
  Obtained from environmental sample
  misc_feature (1)..(286): Xaa is any amino acid
DRYTSLILPRRGLPINPIKRTGLTLRRSNRGVYYYYKIQAIIDDIASGKALKSQFSSSDDLTESYILSPPDRVVAEKKSDNTVTVKWEPAIGSEGERLLYTYNVYADRSISGSFTTLVRSGFSSIVDGEGFISAEGLSVSSGAFFKVSTVNGDVESGKSAVVLPTPAAAVIQGATQRAYFTGASAVPNSGGVYPVKITWKKPADEEPEFYNVQRSTRSGGGFSTINETALSASGPYNDVYSYDSATGVYTYTDKNEIAKVGRKYYYRVLSLNELKQGNFYSSEAIG

SEQ ID NO: 83617 - protein, 254 aa, Unknown
  Obtained from environmental sample
  DOMAIN (17)...(96): Domain of unknown function DUF11
  misc_feature (1)..(254): Xaa is any amino acid
MKASSQAYVMWSVAQVTADGIEQTPGDNVATDILIVEPETDLSITVQPHEETLTPGEEVTLTAKVFNNGPSVAEGVRILQSLTDALSADFTDVTITTSDGSSASCKDMLQNANTARCRVDSLKVGASAEMVVKGRLSSGLNSPGRIVKTYAGVSSKTSEIDVSNNNTKSEIVLAQSEAGLNMGVDGPDSVAVGDKATWTFTIQNLGPSDSINTKLNLTLPKNLTNVLETSDHGPCTTKSCDKTPCYRRTIRRCR

SEQ ID NO: 83618 - protein, 246 aa, Unknown
  Obtained from environmental sample
  misc_feature (1)..(246): Xaa is any amino acid
WVRQDGTSRFFWLDENPDNDVTESNIELGIVTASPKTAKSMMKYTRQMVLQNVEAFEPILQKDLLENDALVIDSAALIGTGSDYQPRGLLETPGIGAVSLGANGARPTYANLTKLKTLIKKANALGLGAAGYLTTPEIEDLLQNTAKLSNTIAQAIWEDDKVAGYTAIAANQVPDNLHKGTAEQCHAIIFGIWSELFILEWGALEMVVDPYTAAGRDVVRITTSHLVDVFVRRPKAFAAIKDALAI

SEQ ID NO: 83619 - protein, 58 aa, Unknown
  Obtained from environmental sample
  misc_feature (1)..(58): Xaa is any amino acid
MIVLEDISKFYGSVTAVRHVDLTISKSSIFGIIGRSGAGKSSLLRIMSLLETPDTSEV

SEQ ID NO: 83620 - protein, 246 aa, Unknown
  Obtained from environmental sample
  DOMAIN (1)...(202): Methyl-accepting chemotaxis protein (MCP) signaling domain
  misc_feature (1)..(246): Xaa is any amino acid
NINWVTETIVKNNVNVKVLLDASEVGKTGLSEVFADIQEISSESEGLLHINSVMKGIASQTNLLSMNAAIEAAHAGEAGKGFAVVADEIRKLAESSAEQSKTIGNILKKIKGSIDKISGSTQNVLTKFEAIDSSIRIVAEQEENIRNAMQEQETGSRQLLQSASSLNELTEQVKGGSSEMLEGSKEVIQESNNLEKATQEITSGMNEMASGADQINVAVSRVNEISGKNRKGIETLMHEVSRFKVA

SEQ ID NO: 83621 - protein, 256 aa, Unknown
  Obtained from environmental sample
  DOMAIN (1)...(247): DNA topoisomerase
  misc_feature (1)..(256): Xaa is any amino acid
VWGLSTYKRTDSVRISIERAGRKPENEIGENFPAELPDYAQEYSVGKKAQDAHEAIRPTYISYTPDSVKEYLAKDQLKLYTIIWERFVSSQMKSAKTRTVSIDISVSSGTQCGIFRISGTKVIEKGFYRVMKLLASKDEKGSSYPSLKKGDKVKVEQFRPEQHFNQGPARFTDASIVKTLEEKGIGRPSTYVPIISVLLDRYYVVRSNKQLVPTVLGRMISDLLVENFPQPVDAGFTDSTLTMLDEVEDSHTSWPD

SEQ ID NO: 83622 - protein, 395 aa, Unknown
  Obtained from environmental sample
  DOMAIN (4)...(395): Hsp70 protein
  misc_feature (1)..(395): Xaa is any amino acid
MGINVGIDLGTTYSAVAVFDDAAGEVKILKNSDDKTCTPSVTHIENGKVKIGDEAQQLQASGDLNAAAFYKSMMGEKGYTLYLDGKEYSPEELSGLYLRELIRDVSQHNNVKVDGAVITCPAYFNESQRLATLNAGKAAGLKVLKVINEPTAAIIAYGLTGTGKKNVMVYDLGGGTFDVTIAEVDGTRVKVLTTNGNHQLGGKNWDAVIADDLKQRFFDEYNVNIEDIPEDYYQLKVQCEDLKKRLTNISSTTAVVQSQGYTGKYEVTREFFDSATYSLLNETSLLVDRCFSEIGGGFSWKSLNEVVLVGGSTRMPQVKEFIKREYGREPVTKNIDVDTIVAAGAAMQAKLCVENKLVLGGASSGTARRLWAEPRKKACNYRERYSGYNIAQSGD

SEQ ID NO: 83623 - protein, 320 aa, Unknown
  Obtained from environmental sample
  DOMAIN (2)...(122): Respiratory-chain NADH dehydrogenase 51 Kd subunit
  misc_feature (1)..(320): Xaa is any amino acid
VSARRVALSLYRGTPRYADIKAPFPAQKGLSGKPTAVNNVETLATIPLILQMGADNYAKLGTETAKGTKTFALTGQVANTGLIEVPFGATLREIIGEIGGGVTNDDGSLCGCDFKAVQIGGPSGGCLTQEHLDMPLDYDNLKKVGAMVGSGGLVVMNQSNCMVKIARYFMQFTQNESCGKCVVCREGTRQMLLLLDDIIEGRATGETITLLEELAQVVQTGSLCALGKSAPNPVLSTLKYFRDEYNAHVFDKRCPTGNCEALADFKIIPDKCKGCSLCAKKCPVQAITGEIKKPFTIDSKKCIKCGVCMQNCKFEAIVKG

SEQ ID NO: 83624 - protein, 56 aa, Unknown
  Obtained from environmental sample
  DOMAIN (5)...(56): DnaJ domain
  misc_feature (1)..(56): Xaa is any amino acid
MAKRDYYEVLGIQKNASKDDIKKAYRKLAIQYHPDKNPGDKQAEEKLKKPLGQSVI

SEQ ID NO: 83625 - protein, 319 aa, Unknown
  Obtained from environmental sample
  DOMAIN (3)...(319): Hsp70 protein
  misc_feature (1)..(319): Xaa is any amino acid
ILVMRRRLITTLASATKDAGKIAGLEVKRIINEPTAASLAFGFNKDSKKDKVIAVYDLGGGTFDISILELGDGVFEVKSTNGDTHLGGDDFDHRVMEWLIAEFKNDTGIDLGKDRMALQRLREAAEKAKIELSSMQTTEVNLPFITADQSGPKHLQKSLTRAKFEQMVEDLLARSKEPCKKALSDAGLTAEQIDEVILVGGSTRIPAVQQIVKELFKKEPNKGVNPDEAVAVGAAIQGGILGGDVKDVLLLDVTPLSLGIETLGGVMTKLITRNTTIPTRKSPNLLHRRGRTNSRLHSGLAGASVKWRTKTVYLGGSIL

SEQ ID NO: 83626 - protein, 325 aa, Unknown
  Obtained from environmental sample
  misc_feature (1)..(325): Xaa is any amino acid
DRDLGTVLPVYIKSSINKVWVVGMPEGWHTGKGGVDKIEIPFSRLELVGSKRKAKMQAEAFSQYALIYAENLQDGLPVRDTPDNNARRIYRLKTGEIIKILSVAEGSPAIGSTGDPLPGEWYKVLTEDGSTGYCFSYRLKLFEHSGGQLAAVKTVVTEKAEDPELEQLLSKTWSPELYLTMINSKKINLEDLSRQWRFDPGQETGLARIFVSGTDNSYAYTSIRPDGNRTWRFEGTNLSMQLRAETTLAVQFLEGGGSTRTLLFVSLPVSVDDLILQETARRERLYNEIYSQGAGLTSNNYGTITFKEVRRRRGAEPFHGVISIC

SEQ ID NO: 83627 - protein, 96 aa, Unknown
  Obtained from environmental sample
  misc_feature (1)..(96): Xaa is any amino acid
MRFGSEGRTGAGVGAGAGAGAGAGGGAGTGLGAGTGAGGGTEAGSSTKVRDGVCSSLLLTIRKADGFAAVTPPEFSPVREKTGVTRQYQIPSPRFE

SEQ ID NO: 83628 - protein, 329 aa, Unknown
  Obtained from environmental sample
  misc_feature (1)..(329): Xaa is any amino acid
MERGWEDLAEASGGGFEASYKLRAQSGWSEEFYDEDDEGMEMGDDSGFASMPGGLYAPESSEPFYGIGRFGFWWSASEDGGNAYSRSINCCGDDGVGEASPNTESFGYSVRCLLDDKSNERKEQRLREETRKKEIEARKKMEAEQKCMEEERQRKETAERETMEEGQERFGKTSAYFTDSRDGQKYRAVKIDGNTWMAQNLNYMPENGKSRCYKDSASYCGKYGRLYDWETAANACPAGWRLPSNKEWSGLMSAVGGKFKKYEHNPGWFGAGAALKTNAGWDCYKDRNGNGTDAYGFSALPGGEYFNEFRDDFRGVGKIGMWWVADSDT

SEQ ID NO: 83629 - protein, 255 aa, Unknown
  Obtained from environmental sample
  misc_feature (1)..(255): Xaa is any amino acid
IDKQLSSGPGTVIGAGARIGAKCRIGANCVIERGVSVGDSTRIDSGAIIRYGTWIGARVIIQSGAVLGSDGFGNARDKNGVFVRIPCFGNVVVEDDADIGAGTTIDRGNFEPTVIGKGVKLDNLIHIAHNVTIGENTAIAAQTGISGSTKVGKRVIIAGQAGFVGHINIGDDSFVGAKSGVSKDVAPGANITGYPARDLMTMRRIEASSSRLPDLLKEVKKLREEVEELKVLPFTHLAEVKRLREEVEELKKSKG

SEQ ID NO: 83630 - protein, 337 aa, Unknown
  Obtained from environmental sample
  DOMAIN (2)...(337): Phosphoglucose isomerase
  misc_feature (1)..(337): Xaa is any amino acid
KMRENFSQGKNKPYRKTSRFAHSPCYQVQEPILVDGKDVMPKVRAVLAHMKKFTAQIRSGAWKGHSGRPIKTIVNIGIGGSDLGPVMVCEALKHYAGENSPKIYFVSNVDGTHIAETLKEVDLEETLWVVASKTFTTQETMTNANTAKAAVLAKFNGDIASIAKHFIALSTNAAEVSKFGIDTANMFEFWDWVGGRYSLWSAIGLPIALRIGFENYMFLHAGAYDMDQHFKSAPIEKNIPVILGLLGVWYNNFMGADSYTILPYDQYMHRFAAYFQQADMESNGKSIDREGQKVDYQTGPILWGEPGTNGQHAFYQLIHQGTKMIPCDFIAPANSLN

SEQ ID NO: 83631 - protein, 138 aa, Unknown
  Obtained from environmental sample
  misc_feature (1)..(138): Xaa is any amino acid
MKDKLFSWIDSAIPLAVELETGLTKHPAISPESGGKGELDKCLFLENWLKAHGITNLERYDAPDKSAKGGIRPNLIATITGNSDKRLWIMSHLDVVPPGEKKLWESDPWTVIRKEDLPGARLSGAERKTTSSSAESVI

SEQ ID NO: 83632 - protein, 284 aa, Unknown
  Obtained from environmental sample
  misc_feature (1)..(284): Xaa is any amino acid
LLKNKAASSNGQDLEIIRALQLEITSFNPRFFYLDEDNVWEITLHGQNLLPNSEIYLVQNGSKIRPQKQTANGESARLVFSGMSLVIGEYSVYVKNPGGLDIALESFVITNKKPFDLNISLGYAPLVPLYGYFFKDSDDFNAPFTDSFYPLSAIVKISYIPFKRVWGYMGAELSGTLSFLKNEKEIYSTQAFFLNTHISLLYQKYFFKKAFAFNANIGAGFSTLLDFYYYYPSGHQTESIINIIPSITFDLSFLVFVFNPLYIRIGADFIHTLPQTTPCQGDPR

SEQ ID NO: 83633 - protein, 222 aa, Unknown
  Obtained from environmental sample
  misc_feature (1)..(222): Xaa is any amino acid
GRSVAYAPTAGVDKARTAWRDQMLQKNPSLDPAKISLPAVIAGLTAGLSCAADLFTGKGSSLIASDPCWDNYSLIFETRRQARIIPVPFFSQTQSSGRGLDIEAITAAVRQEAKSGAARIIFNFPNNPSGYSATTEEADALVRLLKETAENGADVLAICDDAYFGLFYEDNIAKESLFAKFADLHERVLAIILDGPTKEDYVWGLRTGFFTFGSKGLNETHY

SEQ ID NO: 83634 - protein, 117 aa, Unknown
  Obtained from environmental sample
  misc_feature (1)..(117): Xaa is any amino acid
DLIGQKATTLPKGRDADAAGMGYPSVCGELRAALDGTRYIARGAVNNAANIRKTRQYIKKAFEAQMSGVGFTMVEILSPCPTNWTMDPIQAVEWLEKNMVSVFPLGEVKNVLSGGAK

SEQ ID NO: 83635 - protein, 292 aa, Unknown
  Obtained from environmental sample
  DOMAIN (12)...(291): Protein of unknown function (DUF1015)
  misc_feature (1)..(292): Xaa is any amino acid
MNENKQRLNSLGLEIPSILLPQGVNMGKWPVIACDQFTQDRDYWEKVRTAAEDSPSTINLIFPEVFLSDSDAQKRITDIHSSMKRYLKDGVFGEPKQGFIYIERDTPYQKKRRGLIAAVDLEQYDWKPDSRPLIRCTEGTVAERLPPRMDIRRGAPLELPHILLLIDDNTESLLLALAERAQKQAPVYNTQLMMDSGNVSGWFLDKEEDFGFIADKLDELCRRSVSRYKSSNGNKNPFLFAVGDGNHSLAAAKGIWEEVKKADPVNSSAHPCRYALVEMKISMIRLYNLSLF

SEQ ID NO: 83636 - protein, 180 aa, Unknown
  Obtained from environmental sample
  misc_feature (1)..(180): Xaa is any amino acid
MVTLDVDHPDVEKYISWKAEEEHKVASMVTGSAIVKKHLDGIKKALASFRGPDADKFNIEKNHDLAAVLRAALGDKIPPSYLYQQLRRMEHGDDEVYSQTYSTAWDDEAYNTVSGQSSNNSLRINDEFMWAVMNDGDWNLTSRTAGYCHENYQGPHALDGYSPQQLAVRRSRSAIPHHHQ

SEQ ID NO: 83637 - protein, 290 aa, Unknown
  Obtained from environmental sample
  misc_feature (1)..(290): Xaa is any amino acid
METLNVCAPFVSGDFRLLESGLIYDSIGLTVLCNDIHENVILASGSTNSGDEVYLESANGSFLKALSKNKIELVSIYGELVGISKLSHSLLSAMCAYYGKKRIESPKLDYEHAIMACTASYPVFIRKIEYYAWREIDDESHLEMAQKEIMPRILENESLRQIRREVLLNPGPATTSDSVKYAQVCADICPREEEFGDVMKWICKELTAVVASPSEYETVFFGGSGTAADEVMISSCVPETGRILIVDNGSYGERLAKIASVYKINHIVLKVQPISNVGHPLNGPQAPTCP

SEQ ID NO: 83638 - protein, 91 aa, Unknown
  Obtained from environmental sample
  misc_feature (1)..(91): Xaa is any amino acid
MGSIFENAPFGSIISDKNAIIIECNLRVVKRFELFSKQEFVKRLLEFSPKYQPNGRLSRDAFSEQSAKAYPQGFHSSEWLPQNLTGVPFVP

SEQ ID NO: 83639 - protein, 213 aa, Unknown
  Obtained from environmental sample
  DOMAIN (38)...(118): Cache domain
  misc_feature (1)..(213): Xaa is any amino acid
GFEGKFHASVDRVPPDSYSPQSHLWYKAAVEANGGIAITVPYSDIVLDMPIITYSRRIMDDIGKSLGIICMDLKLDKIEEYVSNVHITDGTYGILFNKQFEIVAHPSPSYLGKSLRQLNDGLSIESDLRQGISISERKVMDYRGNQAIAFRRHLESGRSLSVIIPSNRVLPKLEWQGRIPFGARLHNGNYFKPAPIAHNSGEQQAGKTNGVNI

SEQ ID NO: 83640 - protein, 187 aa, Unknown
  Obtained from environmental sample
  DOMAIN (39)...(157): Response regulator receiver domain
  misc_feature (1)..(187): Xaa is any amino acid
MLFMPIHSISVANILNGITEVYSYNEGNVLFVNFIAPDARILVVDDIKTNLTVVEGLLIPYGMKVDLRKSGIEAIKAVQANHYDLIFMDHWMPEMDGVETVKRIRELDSENDYFKNVPIIALTANAISGVNDMFMQNGFNGVLVKPIDTVKLDAFLGKWIPREKQKSPEQAPGKAAEKNRRSNRGNG

SEQ ID NO: 83641 - protein, 331 aa, Unknown
  Obtained from environmental sample
  misc_feature (1)..(331): Xaa is any amino acid
IVEADRWVGEKVVYVERDSILPAKPEYEFLRKRCFSEKWNGHVIKGMKMAGLVSYGLVLTASHDWAMMPDGYDMTDVLGIRKKEDDVPDLPERLPRSRMEKAIDWIRWKLGLKKRKKVGVADGWLSFAHKTDETRIENLSYLFGDEFRGTPVYATVKMDGQSATFAAYKGYFYMASRNVILYREKIGKAAKELNPKKEKPNMDAFRKVASRYDIPAWLSKIKDSDTCGVVVQGELCGPGIQKNPMGLPRCRSVRLQRMLPEKRKGGTRSSCRGKRWNISAKCFNSGPSRYRAPGSSTGPTRRRLKDTPDGSPKTRKSEGLFLPSTAAVTQC

SEQ ID NO: 83642 - protein, 261 aa, Unknown
  Obtained from environmental sample
  DOMAIN (28)...(237): DNA methylase
  misc_feature (1)..(261): Xaa is any amino acid
MRRIEEYLNTIICGDCLTAMKKMPDNSIDLVVTSPPYNLKNSTGNGMKACTTSGKWANAALQNGYSHYDDNMPHDKYVKWQRNCLTEMFRLIKEDGAIFYNHKWRVQDGLLQDRQDILNGFPVRQIIIWRRKGGINFNPGYFLPTYEVIYLIAKPDFRLVPKANAVGDVWEFTQEMKNGHPAPFPIALIDRIISSTHAEIILDPFMGSGTTAVVAKNLKRNYIGIELSPDYCKMAEERIAQNKIKRETFKMENSLIVWRGR

SEQ ID NO: 83643 - protein, 171 aa, Unknown
  Obtained from environmental sample
  misc_feature (1)..(171): Xaa is any amino acid
MKKNYLENYLSTIEIQDIKDSVLSVTNEIFEVNLKDLDYRSRKIGLLLGEVQSGKTGQMLGIIAKAAEKGFEIFVIITSDNKYLHKQTYDCVFSALSDFQVCNIEEAIEFHGNKMQKPVVIVLKKNSSDLKRWRNEKLNSGFLKARPIFIKDDEADAASLNTKVKKVVPGR

SEQ ID NO: 83644 - protein, 275 aa, Unknown
  Obtained from environmental sample
  DOMAIN (162)...(264): HD domain
  misc_feature (1)..(275): Xaa is any amino acid
VVDDVELNVDMVEEILKTDYNVLKANNGRQALEILGHAEVLPKIILLDVQMPEMNGREMFEILKADEVFKRVPVIFITAENDSESELLAAGAMDFINKPFKHEIVQLRVRNQIALKNYSDSLEEMVAIKTAEVIKKTEEANKTLDNVLQGLANVIEHRDLESGEHVKRTQLYVGVLANYLIKSKSPYADELFEMQPDIIVKSMALHDVGKIAIPDRILQKPGRLDPEEYDIIKTHTIRGKEIVGELGEVNVSLYLKHCEDICYGHHGALGRERLS

SEQ ID NO: 83645 - protein, 260 aa, Unknown
  Obtained from environmental sample
  misc_feature (1)..(260): Xaa is any amino acid
GDGEVRIAFVVLLTAGCPAEPETPPPAQTQTAATPTATPAGGEVADNTAITLATATAEAAIHYTQDGTEPTAASPLYSADAKPVITAGRLTLKAVAVKSGMNNSATLTATYTLTPPNTVATPVAEPPAGTYATAQAVTLTSSTEGAAIHYTLDGSAPTASSPVYNTPLPISQSSLLQAIAVKEGMTASGTLIAQYTITPALTADAGEDFTHDIIKDGASFTLNGNAEKRDNRLGLHRLACSRDTARNRQPRDSPTDSKRL

SEQ ID NO: 83646 - protein, 231 aa, Unknown
  Obtained from environmental sample
  misc_feature (1)..(231): Xaa is any amino acid
MPRLSIGVSHTQKIFDGGKAGIQKAINEIASESSRKDALAEYFNVLDSADNAYYAVLEAMATLEAEESSLQTALTSLSIAEVRQASGMINQGDYLKAMADKQSRENSRNQARRNLTLSMMKLKAITGLSDLPGVQQIDFSGYEDLISRLGNISDNEADSLYGELWKTIVSSNPSLSKSALANQRAENNLSIAQRAYLPSLSASLSTGLNYSMKNGLELSGRKVISKFKHPR

SEQ ID NO: 83647 - protein, 366 aa, Unknown
  Obtained from environmental sample
  misc_feature (1)..(366): Xaa is any amino acid
DKRNPEELREISEDTIVPRIEQTQGVATASVNGGRERIVRVEIPQSRLEAYGLTITQMQQLLYAQNVQTAAGTITEGGLSYILTTMGEYRSLDEIRNTVISYKGGGYSGGQVEMPKQIYLRDIANVFDGYKDETSLVYVNGRAAVMLSVQKQSGKNSVQTAKDLRARLARMVKELPPDIKITEIFNTTDMVQNSLNQVTSSAFSGAMLAVLILFIFLRSIKPTLIIGISIPVSVIITMMTMYFAGLTLNLMTMAGLVLGIGMLVDNSIVILENIYHYREKGAKLKTAAVIGSSEMMSLSQPLQLQLSAFSLLLLCSKGFWKWRENFSQGLLLPLLYRLVFLFLQQSSLSPYYQAITCRLLHENKNR

SEQ ID NO: 83648 - protein, 76 aa, Unknown
  Obtained from environmental sample
  misc_feature (1)..(76): Xaa is any amino acid
MLLLQIKKGKTRIKEEKNKTAKFEYVNGPIELSFRNKLSDSILSEMGIKQHICDILEGGDEAFKLREQKYKEKLSI

SEQ ID NO: 83649 - protein, 178 aa, Unknown
  Obtained from environmental sample
  misc_feature (1)..(178): Xaa is any amino acid
MFVNLEDYGFTQNEFIAYQNLKTDKDTVNSIPGRIIEARREQFSVVCEYGEVSAELKGSFYHNLEEGDLFPAAGDFVLINYNNMGSSLITAVLPRRSEFSRVDFLGHAAGYVKNVREQVLAANFDYVFILSSLNFHLNLNRLARLSDSFFSERPDSLFFFLPNRIFVPISKKKPAEFA

SEQ ID NO: 83650 - protein, 233 aa, Unknown
  Obtained from environmental sample
  DOMAIN (28)...(63): Sel1 repeat
  misc_feature (1)..(233): Xaa is any amino acid
MYFRGQGVTQDEEKGIEWLLKAAKQGHAGAQCELGHIYLLDSSGYMDYANAARWLQKSADQGHADGQYWLGRMHLEGLCVPKNLALAVGLFQKSAEHGNRFATKDLGELDYKWRVGWIRSAAPQPGPELTLATFFCKIPCQLLACAVDSPVSYWQLKVVGGSGLGTIGGISWRKGCHPIGHFALKLTQTWPQMNIFIPHEKTSLLTDFYPQNLTLNGVLLGPLGKVNLPPIKI

SEQ ID NO: 83651 - protein, 131 aa, Unknown
  Obtained from environmental sample
  misc_feature (1)..(131): Xaa is any amino acid
VTVLGLFFFGKAGAIPKRKIPNAGNAASYGNAGKAFTIGKSGLPNAGNAVRYGNAGKAGATVKSTTPDAGNAVRYGNAGKAGATVKSTTPDAGNAVRYGNAGKAGATVKSTTPDAGNAVRYGYRSGYSARD

SEQ ID NO: 83652 - protein, 286 aa, Unknown
  Obtained from environmental sample
  misc_feature (1)..(286): Xaa is any amino acid
LPQAGTYRSLLQSVLNAGRPIFVSEYGIYDADGLGTINAAESDKWHAFLNEKKISSAAWHVGVGEVSGLWLNSPLLLDKIFDADISHWTDPKNMTRNGRYLYRLLTGNDTTTNGQEYVVQWPTFTGTTSSIPTSGYYGWTDEANGATYTIQDIANGGKFEVRLGGNIAYAGFGTWIESQSIGQGKCQYGIAYSYLGASHQFSIIPNDDELSSGRSLKKTTAWTQVTHQWNYFDEFSNTIKSISWAISVGDANKTKDSLLVKDVLCLDPSSLPSSSSTTPSSSSTTP

SEQ ID NO: 83653 - protein, 213 aa, Unknown
  Obtained from environmental sample
  DOMAIN (21)...(213): tRNA synthetases class I (C) catalytic domain
  misc_feature (1)..(213): Xaa is any amino acid
MSKKSLFLYNTASRSKEKFVLPQDVDEVRMYACGPTVYHYAHIGNLRTYLFEDLLRRSLEYFGFKVRHVINITDVGHMTSDQDDGEDKMEKGAERTGKSVWEVAEFYAEKFKEDLKLLNILPPVIWCKATDNIKEQIELIQRLEEKGYTYKTSDGIYFDTMKFPRYADFAHLDIAGLKSGARIDIGEKKFTTDFALWKFSPKDSKRAMEWDSP

SEQ ID NO: 83654 - protein, 219 aa, Unknown
  Obtained from environmental sample
  misc_feature (1)..(219): Xaa is any amino acid
MLSIRLGAMGANTKYKDSVFSLLFSDPDLLRELYCALEGVALPSDTPVTINTLRNVLFMGRINDISFEIGGKLVILVEHQSTINPNMALRLLIYIARVYEKIIDSKKTYTTKPVRLPRPEFFVLYNGVAPYPDEKTLRLSEAFESAASLGIPEKEIPPLELVARVININQGRNGEIVRRSKTLNGYCAFIGKVREYEGRRHSLEEPLGRREYTGATMTY

SEQ ID NO: 83655 - protein, 88 aa, Unknown
  Obtained from environmental sample
  DOMAIN (9)...(88): ParB-like nuclease domain
  misc_feature (1)..(88): Xaa is any amino acid
MNHPIDKIQWIPVDGLLSNDYNPNVVFTQELALLKYSLLISGWIQPILITSNNVIIDGFHRATLAKTDRDIKAMTKRLVLARSWNKRA

SEQ ID NO: 83656 - protein, 187 aa, Unknown
  Obtained from environmental sample
  DOMAIN (3)...(169): NAD-dependent glycerol-3-phosphate dehydrogenase N-terminus
  misc_feature (1)..(187): Xaa is any amino acid
MTAQTAVIGAGAWGTAVAKVIAEKGKDVIIWSLEEDNRDDINLRRENSRYLPGVKLPENLTATSDITEAVSGREYLILAVPSLYLLQTVKQILMTPSIREGETAIAVITKGFISTDKGPRLILETLEDYLPGFYRQSLVYIAGPSHAEEVSRGKITGLIAASENAKNFNPFPRLVEKPGDGWCFPRW

SEQ ID NO: 83657 - protein, 197 aa, Unknown
  Obtained from environmental sample
  misc_feature (1)..(197): Xaa is any amino acid
MKTTSIKPAILIGKDKLKNDMYFFTNRLSTEYGQLKLIDGELIGQEGISLKNNYKLVDEISSDYNIEATVFARNGNDFRLISTSIVDNTGQRAVDTFLERDNAAYQHIQNGNGYIGKDVILGKNYITKYRPIFTENEKEIIAILFIGFDMTAIEKVINSNIVNYFIRMTAITFIILLAFFSLFGLGNKYKFLRHRVK

SEQ ID NO: 83658 - protein, 236 aa, Unknown
  Obtained from environmental sample
  DOMAIN (10)...(33): 4Fe-4S binding domain
  misc_feature (1)..(236): Xaa is any amino acid
MAITPLTPVIRIDEEKCINCYACIVICPVKYCMDGSGKKLLINHDICIGCGNCINACTHKARTFIDDTSRFMEDLKQNNKIIAVAAPAVASFFPDKFLNLNGYLKSLGVEAFFDVSLGAELTVISYLDYIKEKKPRTVIAQPCPAIVTYIEIHHPELLPFLAPADSPILHTIKLIKSFYPQFKDHKIAVISPCIAKRREYDQTDLGDYNVTMNEIKKISGRSENKPLLISKIKNTE

SEQ ID NO: 83659 - protein, 304 aa, Unknown
  Obtained from environmental sample
  DOMAIN (1)...(209): Domain of unknown function (DUF404)
  misc_feature (1)..(304): Xaa is any amino acid
VDALNCFLRDIYSDAKIIAEKVVPEELVYISKGYLPQCSGIVPPEGVYSHISGIDLVQAKDGAWYILEDNLRIPSGASYPLMARELSRIADPDAYSNNNIVDNRNYSDLLRETMEFMNCGGLNVILTPGRYNAAYFEHSYLAERTGALLVKASELSVEDGVLYMNDYLGVKAKVGAVYRRISDEYLDPMTFLAESLIGVPHIMDAYRAGNVAIINAPGNGVADDKGVYYFVPKMVKYYLGEEPILQNAPTYLPYYENDLKFTLENIKRLVIKDVSEAGGYGVVFGRELSEEKLAEIKALGRFCT

SEQ ID NO: 83660 - protein, 110 aa, Unknown
  Obtained from environmental sample
  misc_feature (1)..(110): Xaa is any amino acid
MKQSRALVHTLREVPKDADVVSQQLMMRAGMILKVAAGIYDYLPLAYRSIQKLQQIVREELEKDGCQELLMPTVQPAELWQESGRWQFYRKELLRFKDRKDTDFCLGPTH

SEQ ID NO: 83661 - protein, 306 aa, Unknown
  Obtained from environmental sample
  DOMAIN (7)...(147): Aspartate/ornithine carbamoyltransferase, carbamoyl-P binding domain
  misc_feature (1)..(306): Xaa is any amino acid
VFWGLWRDFTGGALRWLRENTIPRVFDSGLGISLFRDNSTRTRFSFASACNLLGLVVQDLDEGKSQIAHGETVRETANMISFMADVIGIRDDMYIGKGNAYMREVAKAVREGHIDGNLEQCPTLVNLQCDIDHPTQIMADMNHIIRHFGGIDKLKGKKVAMTWAYSPSYGKPLSVPQGVIGLMTRFGMEVHLAHPEGYEVMPEVEAVAKKNAHLSGGKFSKSNSMHEAFHNADIVYPKSWAPFAAMEKRTNLYGNNDFDQIKALEKELLAQNAKHKDWECTEDLMKVTKEGQGPVPALPARPIYRR

SEQ ID NO: 83662 - protein, 110 aa, Unknown
  Obtained from environmental sample
  DOMAIN (10)...(110): tRNA pseudouridine synthase
  misc_feature (1)..(110): Xaa is any amino acid
MPPDGRNIKLIIAYDGTDFSGWQRQDSQRTVQGEIEKALEKIHEHAVPLTGSGRTDAGVHAAGQAANFYTSINSIPAKKFVPALKYILPKDVRIMEACENNPNSTHASAR

SEQ ID NO: 83663 - protein, 135 aa, Unknown
  Obtained from environmental sample
  misc_feature (1)..(135): Xaa is any amino acid
MSLLDAVEIPRKTMVLFFVVDTSGSMEGSKIGAVNTAIEEVIPAIKDISDENADAEIKIAALEFSSEARWVTNNGPVELSQFHWNGLQADGWTAFGEACQELNEQLAAQAFMKDATGYFAPAIFLLSDCEPTDGN

SEQ ID NO: 83664 - protein, 224 aa, Unknown
  Obtained from environmental sample
  DOMAIN (40)...(199): Peptidase C26
  misc_feature (1)..(224): Xaa is any amino acid
VVAHVSDGRDTIVTRVATVSSRDTVKPETVGAGSAAPGRPSRRVALFDFGAKRGIARALAARGCEVRYFSYNASADEILAFKPHGIMLSNGPGDPAEPANNGIIETLRVLQKSKVTIFGICLGHQLLALANGYTTKKLKFGHRGANQPVKDTSTGRVYITSQNHGYAVVTDNGSFVNVNDGTCEGMDYGNSFSVQFHPEACGGPLDTAFLFDRFIERMDKNVTR

SEQ ID NO: 83665 - protein, 330 aa, Unknown
  Obtained from environmental sample
  misc_feature (1)..(330): Xaa is any amino acid
VLDATFLLSEKDIVTLEKLLEIPNCEINLQVHFTPIKGDLRDKLFALCRKHRERISLEFGLQTIHKKEMEVLKRKNDIEHIKSVMAELNSLNIRYEISIIFGIPWQTVASFEDTIKFIEENGCKEFRAFPLRLPQNSKMKENIEELKIIESQSRDELYSLHVVTECCSFTYSDWEKMYSIANKYTKKKTVGEDSDKAVVAIIDKAVRYYFMGGLRNIIDSNAHINILSDNKIKRKLHLRIVEHLQNNTASNDIVLSGFGIDNYIEAIKNILSDNAILDICAKDPSLAAHITDDIFEFIDKTKRQILETDQHFGMNANSWTKFKQTEIENF

SEQ ID NO: 83666 - protein, 158 aa, Unknown
  Obtained from environmental sample
  misc_feature (1)..(158): Xaa is any amino acid
MISLEQVQELETKVAKAIEYVQRVNAENTALLSERAGLQQKLEANQKRLDELELLVMRFKEDQGRIEDGIVAALDRLSQFEEAFEKSLNEKSLKEKTAPKKTHAKKEKSAESESDSNEFFEISANKTKETPNFADSDSLDTDLDPQIKIWIFFREFYD

SEQ ID NO: 83667 - protein, 143 aa, Unknown
  Obtained from environmental sample
  misc_feature (1)..(143): Xaa is any amino acid
MINNIFIFEDDRYVNFLPLTYMRPVYDLICGISPLIAKIARLFPEANISLHCREYLKHSVKQNHAGIGVNHLNTGLGCLIINGRLLAGEKIRDNLILDGRDRLFVNEEDEVIAGYLNTDNLYILRDILDDGLSSRRIINACGI

SEQ ID NO: 83668 - protein, 326 aa, Unknown
  Obtained from environmental sample
  DOMAIN (55)...(240): Outer membrane efflux protein
  misc_feature (1)..(326): Xaa is any amino acid
GIIAASVPYTFLFLSIIYYKYRKGGFSLKSSVLVLIFLFTFFLFCAPVQAVELGLDDAVNRALEYNLSLKKSQIDLSASGYSEKNLWSEIFPSISASASAGYRNNLFSDIPLNNSGYNYSVGFGVTLGLNAGIPYAMRNIKLAHQGNILKYEDAKNQLSIQITKLFYSLTAEKNNLLLLEEIFNLAQRQYTRSEVSFRNGLVGELSLTQSSLALENARYNLNTAKTAHKNNISDFLAMLGMPSDEEITLSGDFNIVKIDADAEALIKDHLSNRPDIIRANQEIEKLTLAKRQTLLQAKAPSLNLSLDWRSSHFDPFSDTLSATRPR

SEQ ID NO: 83669 - protein, 178 aa, Unknown
  Obtained from environmental sample
  misc_feature (1)..(178): Xaa is any amino acid
MDEMDVLNAQGGILIHDHWKPYFTYDNKEHGLCNAHYLRELTAASEEGQKWPQRMTKLLTATNKQTIEAGGKLSEEEQHRVRKKYRRILTDAEKENPIPPLQGKQKRGRMARTKTRNLLDRMREHEEDILRFMTDVDVPFTNNQAERDIRMVKVQQKISGSFRSWEGAKLGRSDHRLP

SEQ ID NO: 83670 - protein, 179 aa, Unknown
  Obtained from environmental sample
  DOMAIN (1)...(54): Sigma-54 interaction domain
  misc_feature (1)..(179): Xaa is any amino acid
IDGRGQRLEDLPALIGHFLADACTRHGKPSMSLTLEAMDALMSYSFPGNVRELENLMERFAALGSGGILDRDVFPDNILQETESKRRDHPVSVATASRVDECEAGIPSGGLDLDAYLKSTKGYFVQKALELSGGNKTKAAHFLGMGYRPLKYFLEEAGGADALPKEHPAPQDFPLPKSP

SEQ ID NO: 83671 - protein, 210 aa, Unknown
  Obtained from environmental sample
  misc_feature (1)..(210): Xaa is any amino acid
VAIMKLVENGITRLDVPVGEILPQFNTPPYNGVTLFQLLTHTSGMHADDGCFENKYQSNYWKMIDDAYKLCDPDKKNEFDWLAAALGTIGNGFRVKPDTEWAYCSFGFVVLGAVIEKLTGIHAHKYIEDNICQPLGMKDTVFDITTEMAKRYIVSDERMEKDLNNIINGIAHEEDGPWGKFKIPSTAGGLNSTAYDLSRLGTWVSADLIL

SEQ ID NO: 83672 - protein, 221 aa, Unknown
  Obtained from environmental sample
  DOMAIN (3)...(221): Glycosyl hydrolase family 1
  misc_feature (1)..(221): Xaa is any amino acid
MGFRDDFIWGVASASYQVEGAANEDGKGASVWDMFCKQPGRIVDGSSGDVACDHYHRYKEDIAIMKQLGAKAYRFSIAWPRVIPDGDGKVNEKGLDFYERLTDALLEAGIAPCATLFHWDYPYDLFRTGGWMNPESPKWFLKFTEAVGKRLKGKLPIVFTFNEPACFIGICYDGTKHAPGIKLPLWDTLLMVHNVLLAHGLSVQALASLTPETKIGPAHNG

SEQ ID NO: 83673 - protein, 79 aa, Unknown
  Obtained from environmental sample
  DOMAIN (1)...(75): DnaJ C terminal region
  misc_feature (1)..(79): Xaa is any amino acid
MMAEGARLLEVINTLEDKVSLKIPGGTQSEKIFKLKSKGLTEYRGRNKGDLLVKIHVNTPEKLGREEKDLFEKLAKRGM

SEQ ID NO: 83674 - protein, 474 aa, Unknown
  Obtained from environmental sample
  DOMAIN (372)...(423): Translation initiation factor IF-2, N-terminal region
  misc_feature (1)..(474): Xaa is any amino acid
MSNELISIKAWAEKHSFDQGDTFDYLKGKTLDGVLVKSTNTKVSEVALDSFKGDVLSAQKRKPANKGVKKTKAEKSESSGGKSTLTTLKKIDKPKPASQAKAAPPKEPPAPPPVAEQEPAASVAPPSPPPVQKAERPKPAPEKKQAEKHVAAKPEIHKEEIYEEQEQEQEQEQIEPEQQSVASEPKKTVAFTADVSKVVDPAILARIQKSKQEKATMRNNRGDKNKGGKNQQNNNNNRNNGSKQTSATGYSGNLRIQPRQTENKAQAGLQTRRPGFGTTLQDVLSANAPAHKDFLDNRTRTGKGGHGDSRKRGKKGKDSLREREIQKENIEKAQKRVSDVLVSLSKTPVKKVYNKDKIQAEGTEASKVIYVSASVSVGELASLMEQPSASVIGKCMEMNEMLTINKRLDFDMVQIIASEFGFEARLQEEYQEETLGIQADAEENLRPRHPVVTVMGHVDHGKTSLLDYIRKTNV

SEQ ID NO: 83675 - protein, 347 aa, Unknown
  Obtained from environmental sample
  misc_feature (1)..(347): Xaa is any amino acid
VVLNPSKITDRAGRALTNKKPSSFYVYLPKIKPNAKWDRGYGIVERFGPQQFPITASGVSSLDFRVYKIDPLHTAFGDFPPAQIEVSETTMPPGPGEEPASLDSDYGKTRYGYSYENVKVVKHIRMLGSPHYSGIVDVGGEGGRKISSVDLKPMFAAISGKDKPGTYLVGFRLLDGTQNRYYAKVNVTDLCLSAVESKSKGNKVMFAVTSYSSDKPVADASIRIDGLIDGDMVTLAQGKTGSDGFFSFEHTKATMEKLNNSTVRRVVVSKGDDVLVINTENDRRGTLNVFSDNHWRKSDERWLNWPGSHEVFTTAKAEIRGIMRTERPIYRSEDSVFIKGYVRGIAL

SEQ ID NO: 83676 - protein, 337 aa, Unknown
  Obtained from environmental sample
  misc_feature (1)..(337): Xaa is any amino acid
VISTVLPVILVAVGSAYGIHVVTHYLNGRGTKEMTREEHTELVLSQIMKIRKPVFLAALTTFAGFLSFCFTSVAPCKEFGYFASLGVAVAFIVAITFIPALLIIRGPKKINTGKNSNDETSSFSAFIADNLVILAKREKTIVFLAVLVVAFSVYGLSKLIVDNIMVEYFRTDTDIYRSDEFIRRQFGGSKVVSVVAKTDSYEKTLRPDTLAAMDGLSTYLQEKVPGVGKVMGFTDLVKRINQVFNAEESPDGLRVTSSNTSGSFGDFGFGGFGFGFNDSPPAATEQNVSSAGDSSGEKIYTQSEMLELFERAASRFRGMNANELVWELKRQEICRPI

SEQ ID NO: 83677 - protein, 123 aa, Unknown
  Obtained from environmental sample
  misc_feature (1)..(123): Xaa is any amino acid
VQKGIKSSSVSSSAAAGHGASDLAGILAKANAAKDRAGISNPANIQIDKNDKLYQACLELETFLVKNLLTGMRNTVQKSGLIDEGFAGKIYEDMLYDEYAKDFTKTAGFGLAEQAYRQLKPYM

SEQ ID NO: 83678 - protein, 203 aa, Unknown
  Obtained from environmental sample
  DOMAIN (9)...(91): Quinolinate phosphoribosyl transferase, N-terminal domain
  misc_feature (1)..(203): Xaa is any amino acid
MYAQAIIQVYGPCQQGRFKQQNFIAKEDGVVAGLHIIELVFAELGGKVKIETYIQDGDLVKVGTQIASITGETKILLCGERGMLNFLQQLSGVATITNKFATVLKGKKTKVLDTRKTIPGFRTLQKYAVLAGGGSNHRMGLWDMVLVKDNHIAAAGGVLEAWEAVKKQNIQNLKVEIEVENLKQLKFLLGLGVNQHYARQHEH

SEQ ID NO: 83679 - protein, 209 aa, Unknown
  Obtained from environmental sample
  misc_feature (1)..(209): Xaa is any amino acid
MTRIRVKLTALENKTTRRDGSRKAQVSHKTPIMEFHIDREVRREYGLKDSLFAITGNVILADMRQTRELAAKFNAKQDPKTGRFIRAGQLYAMGLIDEILHYVISLYRKQVQPDAFDLCLPKAGNKAGRGQDWRLVRRFFGTISPKTGVYRAKGIPQLLLKKEEGSSCPFAFIEETLMLSLAHLNPALGLLKSFLKTNILPQVTVFPPL

SEQ ID NO: 83680 - protein, 194 aa, Unknown
  Obtained from environmental sample
  DOMAIN (7)...(84): Helicase conserved C-terminal domain
  misc_feature (1)..(194): Xaa is any amino acid
MAERLAKEVLPRFTVALIHSKLDDEEKRQTMECFRNGEITVLVATSVVEVGVDVPNANCMVIEHAERFGLSALHQLRGRVGRGQDQAYCFLVYSDDLTEDGKARLKVMLENTDGFVIAEEDLKLRGPGQIAGIEQSGYLNLGIANPIRDIDELARARTDAFFILKNDPGLVLDSHRIIARFCRSPALRGGRPSA

SEQ ID NO: 83681 - protein, 344 aa, Unknown
  Obtained from environmental sample
  misc_feature (1)..(344): Xaa is any amino acid
VTVFGGTGATGSGNYAQGATVSISAGTPPSGQKFKNWTTSSSGVTFANANSAATTFTMPGNDVTVAVIFEAVSTPTPTYAVTVSGGTGATGGGNYTQGATVSISAGTPPSGQTFKNWTTSNSGVTFANANSAATTFTMPGNAVTVTAVFVAVFVDDRDGKAYGKVVIGSQTWMAENLNYETAGGNGSWCYNNSVDSCSKYGRLYDWSTAMGGASSSNTTPSGVQGVCPSGWHLPSRAEWGALAIAAGGTGTYGSSGTAAVKLKSKSGWNNNGNGTDDFEFSALPGGVCYSDGSFSSGNYGGWWAATEYTSDLAYRRDMSSSKDHVEENYYTKRGYGYSVRCVED

SEQ ID NO: 83682 - protein, 282 aa, Unknown
  Obtained from environmental sample
  DOMAIN (186)...(219): Tetratricopeptide repeat
  misc_feature (1)..(282): Xaa is any amino acid
VVTGAPSGSIVMYSTSANSVAEDGNGQNGLFTSHLLNNLITPGLSVFEVFDKTMGDVIRATNGRQHPELSLRFSGAASAYLGSPPAVAMQPMPTPSPQPTPSPQPAPTPSPVPAPEPTPAPVSTPLAQTDAKEPFGKAQSSSFLSFLPYMMVLFLLLIFVIYRRKTAYGRSNTANSQTIKPNSNDAIDYNNRGNASARKGDYDQAIANYTQAIRLDPNFANAYNNRGDAYYKKKDYDRAIADCTQAIRLDPNFANAYNNRGCAYWSNNDYDSAIADFTEAIR

SEQ ID NO: 83683 - protein, 469 aa, Unknown
  Obtained from environmental sample
  DOMAIN (295)...(407): Pyruvate kinase, alpha/beta domain
  misc_feature (1)..(469): Xaa is any amino acid
MVENDGEVTINKGDDVVITTDDSFTTAAGNGKPAHIALSWKQAGEKLKPGHRVLIADGLLELEVTDTAGGIKCRADNTAVIGSKKNVNLIGVHAGLPIMAEQDKKDLEFGISMDLDYVAASFLSFPHEVTEIKKFLESHSSRMKIIAKIESGEGLENIKEIARLADGVMVARGDLGVQLPTEQIPLAQKHIINVCRRAGKPVITATQMLDSMIHNPRPTRAELTDVANAILDGTDAIMLSGETAQGSYPVEAVKTMDKIACVIEQSDEFRTRMKKLHQECHSEAHNQKENLGIIMSRSGVEIAMAVKAKAIVTPTQSGNTARILSVFRPNEPILAVTTDNRSERIMQLYWGVNTCISSKVDDSETMIHNTMKVVSETGTAGISDKIVLIAGLPLESPNMINTVRVLIIGTVLARSNAGGFANPAITRAQGKIIHAATPEEACRKITPSGGGEILICDVLTEEYASSHSR

SEQ ID NO: 83684 - protein, 314 aa, Unknown
  Obtained from environmental sample
  misc_feature (1)..(314): Xaa is any amino acid
MEKNKTQERETSIKGRFIAFSAVMFLVIFIGGSAAFALSLWQILHTNAGKELLQAMELERAKLESSVNSEIAIALKMATSPLIQRHFLNPSDLDLKRIAFEEINGYCRAFKSNSAFWASDIDKEFYFNEDNHYKVDTENPDNYWYKMTLYETERYNFNINYNPEIQKTLLWINAPVFDSRHTPIGLVGTGIDLTEFINNIYKNYKGGADLYIFNDLNEITGSKDVNLVTNKTTLDKALGDTGVEILKKIKSDDKSQFFTTPEGVATITNVPSLNWHIAAILPLTIIDALNSGMTLLFIVMMAAIAVLGQSVMAK

SEQ ID NO: 83685 - protein, 321 aa, Unknown
  Obtained from environmental sample
  DOMAIN (6)...(320): Beta-galactosidase
  misc_feature (1)..(321): Xaa is any amino acid
EQWLKWKDTVWKEDMRLAKLAGVNTLSFGIFAWAALEPSEGEYRFEWLDEIMDMLAENGMAAVLATPSGSRPAWMTQKYPEVLRVNRYRQKNLYGERHNHCMSSPVYREKTTAINTRLAERYKEHPALAVWHISNEYSGECHCPLCQENFRSYLKKRFGNLDALNEAWWNSFWSHTYTDWSQVESPGPLGEINVHGLNLEWKRFCTDQIIDFYLNETAPLKKITPNIPCTTNLMSGSSGVDNFRLARVLDVDAWDSYPEWTGTEKDIETGVLFSFYHDINRSAKDKPFMMIESCPTATSWRPVAKLCRPGVHMLRHQACSR

SEQ ID NO: 83686 - protein, 274 aa, Unknown
  Obtained from environmental sample
  DOMAIN (11)...(205): ATPase family associated with various cellular activities (AAA)
  misc_feature (1)..(274): Xaa is any amino acid
MQVLSRRTKNNPILIGEPGVGKTAIVEGLARRIVAGDVPEGLKDKKLLALDLGQLVAGTKFRGEFEERLKALIHEVQSAEGKIILFIDELHTLVGAGAAEGATDASNLLKPALARGELRCIGATTLDEYRKHIEKDAALERRFQQVYTAEPSVEDTIAILRGLKERYEVHHGVRIKDEALVAAATLSSRYITSRFMPDKAIDLVDEAASRLKMELDSRPTELDKLERKLLQFSIEKQAPFPRGRSRVKRTPRQTGKRNRRYFGGTQCHESPLGS

SEQ ID NO: 83687 - protein, 342 aa, Unknown
  Obtained from environmental sample
  misc_feature (1)..(342): Xaa is any amino acid
MKDLKDYITAAKDGVPPNPLSPFNIKEDSVLLGNFSKNETKRLFDQRTEETGQQITNEALEYVWEQSQGQPWIINSLFKRATMRVLKRNDYSTVTLEHIKQAREQMILARETHLDSLAVRIQEPAIRRVMESLITGTPDPELTTSEGFRICMDLGLVKKERNTPVVANPIYREVLARQMTTGPQDAIPEPEWQWEKPDGSLDMDALLREFQIFWRRNSELWEERMHYTEAFPHLLLMAFLQRVLNGGGHIDREYAAGRGRMDLAVEYNNKIYIIEIKLIYSYNSPAEVREEGLEQIARYRDKMDAAAPAYLVIFDRRPETKEKSWDERLSWGVENGITVIGC

SEQ ID NO: 83688 - protein, 442 aa, Unknown
  Obtained from environmental sample
  DOMAIN (163)...(228): His Kinase A (phosphoacceptor) domain
  misc_feature (1)..(442): Xaa is any amino acid
MMRSAILLCANTVIRADMEREIVNANEFNHAILDASPLGFTIFDENARVIDCNDFILKTFGTTRKYYLEHFYEFSPEYQGDGIKSADKAAEMVMRALRGESLVLEWTNCTARGEIIPYEVTLVRAMYKGKYAALAYQYDLRNSKIMERKLKEALHKANAASKAKSEFLSNMSHEMRTPLNAITGMTTIGKNAKDMERKDYALEKIEAASTHLLGVINDVLDMSKIEANMLELSPIEFNFEKMLQKVVSVVNFRVDEKKQKLAVHIDREIPKTMIADDQRLAQVVANLLSNAVKFTPEKGTITLEARFMGEERGFCTIQISVADTGIGINNEQQKRLFNSFQQAESSTTRKYGGTGLGLAISKSIVELMGGKIWVKSESQKGSNFAFTIKARRGTTKEKGALLAPGIKLENIRILVIDDDPDILAYFSDIMHEYGKISADTII

SEQ ID NO: 83689 - protein, 303 aa, Unknown
  Obtained from environmental sample
  misc_feature (1)..(303): Xaa is any amino acid
MHPLDEAETFKRQLDEGKSIEEIAKYYARTVSAIYHRIRLTNLIDGIKVMFRDEKINISGAALIASLPSEDQEKFLKKYENKKPNPWDISGFIHSVQKHTLKFIADKKCEKCKNRTHNTTPGLFDDFNSLEDVCFDGECYAKKWLGFIGESIVKQGIETENNLIIDRDIPDFIPKKTKTVTIGAIEYDLLSPNEYKWQETKKKSSSKTAWLLSKKWNGGTYSIEVTRVAYEKSEQQANHRTSYAEDPVKDFMVDQVPDIDDKEKKAIAKSPERQIRKQMAVQERNQGRYPDQIFFKRIEEGTY

SEQ ID NO: 83690 - protein, 142 aa, Unknown
  Obtained from environmental sample
  DOMAIN (1)...(109): ABC transporter
  misc_feature (1)..(142): Xaa is any amino acid
AFGGGDDGRDFSDGLISRYDIDGATGTNSAATLSGGNLQKLVLAREIDQFRDYFVFSEPTWSLDIIAGGFVWSEIAALREKGAAIILISTNLDEILALADRIIVMFRGGAIAEFDNFVDNDIKEKIGNCMQGLLPTGGQTEK

SEQ ID NO: 83691 - protein, 396 aa, Unknown
  Obtained from environmental sample
  DOMAIN (45)...(135): Glycosyltransferase 36 associated family
  misc_feature (1)..(396): Xaa is any amino acid
MEVDVVPVYEFSHFDALKQLTNADWVPQTMTLEAHKESSGHVILEQYAYMKKQYAVNYFTASKPADSFDGDRKAFLGLNEITGWACPYTLHKGKLTNSTALRGDNIAAQMFKFKLARNKSGRVATQLGQEKSIAAAKSSIKKYRDLRNVDKAFAELANFWSNYLTALQVTTPDASFNSMVNVHNPRQCHTTKYWSRYLSLYQLGFGSDRGIGYRDSSQDLLGVMSHMPEEACLLAENLLSVQLEDGNAMHQYFPSTMEANEGDSREKEDRPKYYGDDHLWIVLTVASYLKETGNLKFLSKPIPFYNKKKDIKHREKGSVLEHLKRSLAFTWKDRGRHGIPHLGFADWNDTVNLPTGAESIFSCSLFAKALLEMIDICEAIRDKKLVEQYKKWYEGN

SEQ ID NO: 83692 - protein, 167 aa, Unknown
  Obtained from environmental sample
  misc_feature (1)..(167): Xaa is any amino acid
MNATFDELTRSHPCFSTGAKPNKGRVHLPVSPGCNINCNFCDRALNDIDTRPGVTSSIISPPEALDVIRKALALCPDITVAGVAGPGDALATPWALETFRRVKEEFPGIIKCMSTNGLLLPEFADEIIEIGIDSLTVTVNAIDPEIQGHICESVIFHGKRYEGTEAA

SEQ ID NO: 83693 - protein, 63 aa, Unknown
  Obtained from environmental sample
  misc_feature (1)..(63): Xaa is any amino acid
LPSGRELASLKYQDIPEWDSVGHMELIAVLEEAFDIMMDTDDIIDLSSFEKGKEILKKYNVEL

SEQ ID NO: 83694 - protein, 136 aa, Unknown
  Obtained from environmental sample
  misc_feature (1)..(136): Xaa is any amino acid
VIVFLTVLTFTASRAESQDLNTVNALEEFRIGVHAYNRFSFNEAIFSLERALYYLPGEPVILDWLGRSYYRSGFEETALRQWQAAAAGYGYTSGQGLLIANRMETLMNVRNPSSSAGRNESRTKLVMLNPVDFPSE

SEQ ID NO: 83695 - protein, 113 aa, Unknown
  Obtained from environmental sample
  DOMAIN (33)...(113): Glycosyltransferase sugar-binding region containing DXD motif
  misc_feature (1)..(113): Xaa is any amino acid
MKDGSQAVNIPKTIHYCWLSGEKMPNDMKICVDSWKKHMPEYTFVLWDMNKFDINSHVFVKEACRVKKWAFASEYIRLYALYTEGGVYLDTDVYVKKVLTIFWETAFFTEFDT

SEQ ID NO: 83696 - protein, 304 aa, Unknown
  Obtained from environmental sample
  misc_feature (1)..(304): Xaa is any amino acid
VEISFDNGKTFIKTSKAMAKNVDYRYRLETGDMYEGIHYILLRATMANGETALTRMLVQVDKTPPVIRLISPEAGGVYNQELFYSASASDDVELVSLSYHLRKGDKNAYEVPGFLQGMYLEGTIPPLIKQFVWKDAPNMPFGGGATYFDGALGLSFFDDNVKVQVQYGLLTQDLYEAIGGVGPVRYGGDVAALKLLASLYTLPLGSVWGPDFDWLYASLSIGANFSYFNFLSKENEKYSTNPDDPKYYTQSGEPTWLSALILQIEFPKVTIPKTQQLRTFSLFTEGQLWFVPTDVKASQMGIKV

SEQ ID NO: 83697 - protein, 386 aa, Unknown
  Obtained from environmental sample
  DOMAIN (205)...(383): CDP-Glycerol:Poly(glycerophosphate) glycerophosphotransferase
  misc_feature (1)..(386): Xaa is any amino acid
GYDRLSWKEARCSHFIGAAAAIYFLGRALILKLKVVISGGKAANDVSVEYPYLIYCEGKQYWNVFKPVLDEFENRKTGILYLTSAQDDPVFDFSWSFVKPEYIGEGNRAFARLNMLRAGICLMTTPGLDVYQLKRSKMVKHYAHILHAPSDATMYRLFGTDYFDSVLLTGDYQAEDIRTLERQRNIPEKKLVTVGCSYLDVYAEKIKNLPAEENHPFTVLVSPSWGPSALLTRYGENLLDPLAASGWRIIIRPHPQSKKSEAPMLEHLQTRYKNKSNVEWDYERENIFSLNKADIMISDFSGIIFDYMFLRDKPVLYVSQNFDLRPYDADDINHELWQSKTVKEAGIELREEDYPRITEIIKNAGDNEILKTARKKARRAAWQYQG

SEQ ID NO: 83698 - protein, 569 aa, Unknown
  Obtained from environmental sample
  misc_feature (1)..(569): Xaa is any amino acid
GFTDSFDVSERKPGKYNFYIEAKDRAGNTTRSGPDNIYIDPESDLPRTTIINPLPYMRVQGNMNIVGIAFDDDGVKQVEIAVYRGTDGKGEELVRVKASGTDYWSYFLDTSDGEIWLDGDYTVKAWSTDINDLSGIADVYTTGQKVPAKKKKVAVVYWRLDRKKPDAVITSHSVGALVSGNIKLGGTLYDGNGISSFSYSVDGGQKYIPAKFKVNKTGNGTWDININTKQFEDGPVVIWFKTVDGNDSVGTAAHLLFVNNIGPDVKVVYPEPNTTLNGVFNIAGYAKHPVGLKSITWKAGNSQGEFELLPGNQWWSAPVDARAFKGNSIEVEVKAVDVSGNVTIAKQKYKFDPASDLPVVKLTLPVPGVLHSDLGLIVKGEATDDDGVASVLYSLDGAPAVEIQCNGYFQFYIPTPNEGTHTLDVWAKDTSGVAGNKTQVKGIIVSNGVIQPGIASVTYPEGRNKKTDPFNTGMKIKPVPQMTMLLSYNSGSAPASATVTFGDLQPTQVRLTGTKDVFTAAVPVPTDLPEGLLEIKLLGTDRQGREFKYSEFAYVVSPAAMIRLILSHL

SEQ ID NO: 83699 - protein, 308 aa, Unknown
  Obtained from environmental sample
  DOMAIN (93)...(297): Lon protease (S16) C-terminal proteolytic domain
  misc_feature (1)..(308): Xaa is any amino acid
MDIIEVSPLRGKMKKLTIAKQFLVPKELKENGLSNAKIIFRDDALRSIIRHWTMESGVRNLERETARCIRRIARGAVKTGYGKEKPVTSFKKIITPAVIEKLLGKKLYKRDLVFSEARIGVTYGLAWTETGGAILPVETIRYNGNGELLITGNLGDVMKESARIALSYLHSTCDRYNFSIKDLSKSNYHIHVPEGAIPKDGPSAGITLASSLLSTLCKIPPRPCVAMTGELTLTGRVLPIGGLKEKMLAAIRNNMETVLLPKNNEADWDELDKDIRDSIKIEFVETASDVFEKLLTRRYQENAQLGST

SEQ ID NO: 83700 - protein, 94 aa, Unknown
  Obtained from environmental sample
  DOMAIN (1)...(92): Ribosomal protein S10p/S20e
  misc_feature (1)..(94): Xaa is any amino acid
SVRFRFDGNSGPEFKSIVQTVQKGGAKVTGPIPLPTRINKVTVLRSPHVNKKSREQFEMRTHKRLIDIINPSAEVMESLMKLELPAGVDVEIKQ

SEQ ID NO: 83701 - protein, 66 aa, Unknown
  Obtained from environmental sample
  DOMAIN (4)...(66): Ribosomal protein L23
  misc_feature (1)..(66): Xaa is any amino acid
MTYEQILIEPVLSEKANILREEGKYVFKVDPRANKLQIKEAVRRIYNVHPVSCTVMTRANSVRSQK

SEQ ID NO: 83702 - protein, 345 aa, Unknown
  Obtained from environmental sample
  DOMAIN (148)...(227): Bacterial Ig-like domain (group 2)
  misc_feature (1)..(345): Xaa is any amino acid
GYRRGGCYNGNLLYANADGTVVVTARIPNGKAEGRDYTQDFIIVIGSGAPPITKEDQEYTIGIFMFDNESDDTVTVSPNKGKAGDTVMLSYTVANTAHYNQLDFGGINANIASVLEAGTGTRTYTIYAADSSNGVITITAVFTHTDLIIDPIAFEDPSGHITKNDGDEPFTNAITTEHKGTGLITYHSSNESVATVDSNGKVTIHAVGSTVISAEKAADTQYAHAITTYTLTVNHKPGSAENPFLVANEADLRKVGTGTDGWVLSAHYRQIANIMLTSSFTRIGNNTNKFTGSYDGGEHTITGLSMTISSTYIGLFGYIGASGTVKKYERYRHGIKRLTNRTCIG

SEQ ID NO: 83703 - protein, 323 aa, Unknown
  Obtained from environmental sample
  misc_feature (1)..(323): Xaa is any amino acid
VVSLVRRCRVSLDSAAAIDSSLSVLQKRIEDLYYEAEDIAGELRSYRDGLTYDPRRQQAIDERLALLYKLKRKYCETPADDAVSVEDAMLAYRASAEAEIEALSNIEENRENLKTAIAALEKDVASRAAALRQKRTAAAGVLGQQITGILKRLGMPNARFSSAINPRTQQAQDGRQTVICGPWGAEEVEFLISANTGEPLKDLSRIASGGELSRVMLAIKSVLSAADSVETLIFDEIDAGIGGEVALAVGEYLEKMGESRQIFCVTHLASIAVRAGNHFKVDKRTEDGRTFTGVGPLSADGRRKEIARMLAGDGSKASAESDR

SEQ ID NO: 83704 - protein, 144 aa, Unknown
  Obtained from environmental sample
  misc_feature (1)..(144): Xaa is any amino acid
MSNRNRIVAGAVISLLIIIAAASLGSSGIRLGDTVLIVLHKVFKLPLKEGIDPKNVSIVWLLRLPRVILAFLAGGSLAVGGAVCQSVLRNPLASPYILGVSSGASLGAGIIIISGISIPALGAFTLPLTGFFSACNRFWSPSHS

SEQ ID NO: 83705 - protein, 134 aa, Unknown
  Obtained from environmental sample
  misc_feature (1)..(134): Xaa is any amino acid
ESAHAGKRGRGFGVVAGEIRRLSDSTRENSRNISITLKNIINGIAVTEKQSDDTGSRINEMSKEINSFAETMSGLINTFNELSGHSGEITVALDSLQSQSSMVKTDYAEILSMTEQLRIAMYNLTMLSEGKAAG

SEQ ID NO: 83706 - protein, 174 aa, Unknown
  Obtained from environmental sample
  misc_feature (1)..(174): Xaa is any amino acid
MGNIVRHGIEMYKQTMSLPSENKAANVPAQRLPNNAPAVFFKEAKKQKPPVFVPENEISQESKYRRVAKFLILIGSEQAAGILAELDPDQVSEISKEIASINIIKPDERDQILAEFHSLFSRPYNFSGSSQGGIETARRILYAVKGPKEGEELLNRPIPKTKENLVDFLEEFPR

SEQ ID NO: 83707 - protein, 227 aa, Unknown
  Obtained from environmental sample
  misc_feature (1)..(227): Xaa is any amino acid
AGRWFIGVPGNIGLGGGHPQVPASTSSTYPQKGSIEAIRRAKKEGLPVTCEVTPHHFALLDAEMARFDADFKMNPPLRTQSDIDAILGAIADGTVDAIATDHAPHAYDDKEVELASAPFGIIGLETALPLAIELLVNRGVVSLARAIELFTAGPARTFQLDKKGLGTLAIGSPADFTLIDTSATITVDRAFIKSKSFNTPFKGRELHGQVLGTWVAGRRVYEAGVGG

SEQ ID NO: 83708 - protein, 105 aa, Unknown
  Obtained from environmental sample
  misc_feature (1)..(105): Xaa is any amino acid
MMGNYPYNENAKGEYRGKTHAVGSFAPNAWDLYDMHGNVWEWCWDRYGSYSSGSQTDPTGAVTGSNRVVRGGGWGEFGRDLRSACRFSRIPYYRNDIIGFRLARP

SEQ ID NO: 83709 - protein, 256 aa, Unknown
  Obtained from environmental sample
  DOMAIN (1)...(253): TatD related DNase
  misc_feature (1)..(256): Xaa is any amino acid
MEQERRKLGVIAAASSYNTEEFTHNEILAHNAAEENAAPLLLCFGVHPQLPAVKEKEGDPFTETDLNDSVTLLRTLAEAGKIAAIGECGFDLYNAEFKETEKTQDAVFAAHLEIAVKYGLPVVLHVRRAMHKIFAAEKELSKCKTVIFHSWSGTLEEALSLLRRGINAYFSFGNTIMLNHKQAIHCCSSLPAERLLTETDAPFQPRRGEKLSTWADLPLILMAAAELRSEGGGKIEAGELERRIEENFASFPLAIT

SEQ ID NO: 83710 - protein, 114 aa, Unknown
  Obtained from environmental sample
  misc_feature (1)..(114): Xaa is any amino acid
MASLRDVRLRMRAIEQTLKVTKAMNLISTAKLRKGRKMLADTVPYFSRIQKSMFDILSSQKDIGSAFFRKLDPSKPSLTVIIVITSLQGFAGGYNANVYRSCKTVMRKGGKIPG

SEQ ID NO: 83711 - protein, 183 aa, Unknown
  Obtained from environmental sample
  DOMAIN (7)...(169): Outer membrane protein (OmpH-like)
  misc_feature (1)..(183): Xaa is any amino acid
MKKRVLIFLLLNVSCIIYAQQLTRFAVVDMPKVYTAFFRDSRVVRQFEEKSAKVQSDIDKMTKEIQDLRSRHADALLRDDQSEVLRLENLIYRRSEYLREFYQTKTAELENEKKKLMQSGSFLEQVYDEIRYIAESESYSMVIDLKQNNGIFWYSNTVDITDKLIANLLTKADNKWIPRDGYI

SEQ ID NO: 83712 - protein, 341 aa, Unknown
  Obtained from environmental sample
  misc_feature (1)..(341): Xaa is any amino acid
ALGGGHASDGTGTFTPAAAPVSPTSAPVNDDGTVASMPTPTRAGYRFDGWFTAATGGAEIMADHVFTANTTVYARWTAVTYNITFDPNGGTRTAATSATTGTGGRLASLPATSNEGYVFEGWYTEPSGGVKVTTSTAFDGDATIYAQWTPIYVITFDPNGGAVTPTTAKTGSGGKLASLPTPSLKDYTFVGWYTEEEGGIRITTATAFDEDAVVFAHWSLLSNAAVTFTAGANGTLRAAVDGNPITAGASVGIGKDIVFTATPNEGYKVARWTINGIDMADTVYTYVHAGLSNTTTVSVTFERRAISIAESNREIPIGANTETAAITPVKPLSVGYLAIYR

SEQ ID NO: 83713 - protein, 395 aa, Unknown
  Obtained from environmental sample
  DOMAIN (137)...(383): Transposase DDE domain
  misc_feature (1)..(395): Xaa is any amino acid
GSKKLYQAGNFFRERNKDRERLSRVHVCGKKAAEKNDKKLDEKLRAYIRMVEKAWDDENGKYGNRDLEELGGKEKFTGTDIKKLAGLLRERIEGLEAGEDKKKLKKELKTIEKGYLPRKKKYEKTKRICGKRNSYSKTDPDATFMRMKEDHMGNGQLKPGYNVQIGTENGFVVGYDLFPNPTDTRTLKPHLRRQAKRLGVKPKAVIADAGYGGEENYQYLENRRTAAVIKYNTYQKEKSRKWKKDIFRTENWEYSKKEKYYICPDGRKLTFRGTRKKKTDFGYQMEIQRYECESCKYCRKKKQCTKAKKNRVIERNDRWLRLKKKAQRVLEDEHYKELRKQRSVEVETVFGQIKGNQGYRRFLLRGTAKVSTEWGLLALGYNIKQIFRLNRDNTA

SEQ ID NO: 83714 - protein, 58 aa, Unknown
  Obtained from environmental sample
  DOMAIN (1)...(54): Ribosomal protein S3, N-terminal domain
  misc_feature (1)..(58): Xaa is any amino acid
MGQKVNPTGLRIGINKTWGSRWYVDPKEYVDALHEDLLLRKLIMDMPETREPILPNLK

SEQ ID NO: 83715 - protein, 204 aa, Unknown
  Obtained from environmental sample
  DOMAIN (29)...(104): Mur ligase family, catalytic domain
  misc_feature (1)..(204): Xaa is any amino acid
MELRLSQFFTKYASERAGLISTNGSQDPLVNSLEYDSRKVKPGSLFFALRGLHTDGSLYIDDAINKGAVVIVHENDITDFKENIVYIKVKDARFAMSPISAAFYDFPSQHLLVTGVTGTEGKSTTVYLIWQLLTLLGKKAGFISTVQHCLGGEVLKHTEHQTTPEASVIQRMLREMADNGCEYAVLETSSHGLSAKTNAWATLI

SEQ ID NO: 83716 - protein, 94 aa, Unknown
  Obtained from environmental sample
  misc_feature (1)..(94): Xaa is any amino acid
DDQIGRATNKELQLLSALMSARPARILRLADRGSIAAGMRADIVIVDTQAAGKVDAARFKSWGKCSPFDGKELRGKVLMTLNGRRIVFEGDNIV

SEQ ID NO: 83717 - protein, 573 aa, Unknown
  Obtained from environmental sample
  DOMAIN (163)...(190): NHL repeat
  misc_feature (1)..(573): Xaa is any amino acid
KAYFRSGIENTAFRVWQAAVDATGFSSGQGMLISSRMETLRNRRILFPVADDDVRYVESGRYPGKSNELTYFRQPSSILALNDGSAWVVAYGSNEILRIDPNGIIRERKRGSVNGFDRPYDLVKGLEGNLYLSEFRGNRVSVLSPSGDWQYYIGSKGQGPGQFVGPQNLTVDEEGYLYVVDYGNSRICKFDPSGVFILSFGTKREGFQGFISPTGIAARNGKIYAADSLLKQIFVFDRNGAYLGSLLQESLNSPESLRFLSDGKLLVADSNRVLLIDPDTAIIRELGVFRNAASVRITGAEMDINGNVLLADFKTGEVAVMTRIDDMASGLFVEITRIISDEFPKVTVEMEVTDRLRRPVTGLDQRNFLLSEGGYAVSEQSFITSYFNSTNLDLSVLFERSPASLSLRDDFATALRDISAAGRIVSIISAGEQPVKENPATAAGATPEAKLATVARGTAASYSPRWRFDLGLRLAATDLLPGEKKRAVVFVGAGAAPGASGSLGAFDQYSLSELAAYLSSNNVVFYAVIAGGGSAGADVRFLCEQTGGQVLSLFRSEGITPEIRSLRERPSAR

SEQ ID NO: 83718 - protein, 100 aa, Unknown
  Obtained from environmental sample
  misc_feature (1)..(100): Xaa is any amino acid
VKTFEHGSGLRFWHHSGDYRHFLHEIWAEPQPLLKLRLNKGQRQGPRLSLAEICSFSGQELETFDSTYKRLLNPHVYKVSMTDKLRNLKLKLIDSFVNNM

SEQ ID NO: 83719 - protein, 80 aa, Unknown
  Obtained from environmental sample
  misc_feature (1)..(80): Xaa is any amino acid
MVRFCRAGCASANGHDFNEIDNAVEKAIACKGQPSIIILDTVKGKAFSFAEGNPAYHNGILTEETYQQAIRELDAVKAGM

SEQ ID NO: 83720 - protein, 77 aa, Unknown
  Obtained from environmental sample
  misc_feature (1)..(77): Xaa is any amino acid
MNGRSVDELQGLLLIDKPKNLTSHDVVARLRRMARQKKIGHTGTLDPLATGLMAVLLGAATRLAPYLTRWARLIRAR

SEQ ID NO: 83721 - protein, 191 aa, Unknown
  Obtained from environmental sample
  misc_feature (1)..(191): Xaa is any amino acid
LWVQIKRAGPRPPKSQTGGGNTPVFNPPRPGGEPKPYRAFWVSGRGPRVLKLTKKFPPPKVGGGDIPRGWGAPKFQKTFVFSPGGWFFFIFIRGGFPPQGGAPPPTKKKTPVGRGGIKKKNIFWGGEGEVFFFFFFSSPPPKKEEVFVKKKTPPPPPPLFWRGGGGPPLFFFLVGGGGEFFFFPPPPRERG

SEQ ID NO: 83722 - protein, 115 aa, Unknown
  Obtained from environmental sample
  DOMAIN (8)...(31): 4Fe-4S binding domain
  misc_feature (1)..(115): Xaa is any amino acid
MEKLPEVIKIDPSRCVNCHACIAVCPVHYCNNGSGDCVSINSDLCVACGRCLARCTHGARYGVDDFSDFLAASRAKKPMVAIVAPAVVASFPDQYLRVNGWLQSMGVKAVFDVSF

SEQ ID NO: 83723 - protein, 120 aa, Unknown
  Obtained from environmental sample
  DOMAIN (4)...(119): Glucose inhibited division protein A
  misc_feature (1)..(120): Xaa is any amino acid
LDYDCIVIGGGHAGIEASLAVSRLGFSTLLITQNPDRIGALSCNPAIGGLSKGNIVREIDALGGEMAKLTDATMIQYRVLNRSRGIAVQAPRAAGRQATVPSKPLAPVFEKQKNLFNIYG

SEQ ID NO: 83724 - protein, 94 aa, Unknown
  Obtained from environmental sample
  misc_feature (1)..(94): Xaa is any amino acid
MGTTVLFRPTAIQRKALALLKGGAKHILLFGGSRSGKTTVLVMAIIYRALRFAGSRHLICRYRAKDARSSVLRETLLPWLDNTVGKRRILLLGA

SEQ ID NO: 83725 - protein, 381 aa, Unknown
  Obtained from environmental sample
  misc_feature (1)..(381): Xaa is any amino acid
LQAYAGNAGADGVSHSFVELYNNTDKEIDLNGITLQYAGGTSDSAIKEVDDEWAVIELEGKIPAKGSYLILGPKQSAAARYQIPDGYGDIQLSDTFLNSRAFKAAIIHGTKTLAVQNPFDIDGKGGKVEGYIDMVGAANDYPKTDMIHGFETNPAKCSASESVRRATLTDTNDNSADFITTRYSATGEDAFTDEEIKVRRPRNSKAGAWDPFAAPASYTKLKLNEVSGVGNDPDKFYELINTGDKNIPLYNCKIYYNANGSTGGTLPTGKGNLTWTGLTSQTIEAGKLFSLIGRDNPSGTKPGSFTTGLTAARILIITLEDPEGNVIDTCVRTKDTGEYNISDKSYSRIPDGTGDFYFTAPTPNTTNGTSTAGLTKLPDEK

SEQ ID NO: 83726 - protein, 321 aa, Unknown
  Obtained from environmental sample
  DOMAIN (125)...(318): Methyl-accepting chemotaxis protein (MCP) signaling domain
  misc_feature (1)..(321): Xaa is any amino acid
RNSLVPAVTLEIPLLVSVSEDLSSVSGLLGKDSEQTLQQSNTATRTTEQMSININAMASGAEESSVSADEVAGAVVKVATNINAMASGAKEASANANEVAGAVVEVGSNINAMASGAEEASANANEVASAAEQMSANMNTVAAAIEMMSASISQISSNASDARKIAGDATNRSREATEAMTKLGAAAKEVGQVTDVIKKIADKTNLLALNATIEAASAGEAGKGFAVVAGEIKELANQSANSADDIARRIDGIQMSTSEAVTAINNVSGIIGKVNESVEAISNHVAQQTKASNEETSKVSQANTGAKRVTQSIGQVAQGNK

SEQ ID NO: 83727 - protein, 438 aa, Unknown
  Obtained from environmental sample
  DOMAIN (144)...(210): His Kinase A (phosphoacceptor) domain
  misc_feature (1)..(438): Xaa is any amino acid
MKMQETEERTQIMLDAAPFSVIFWDKDLKLIDCNQEAVKMFEMIDKADFIEHFYYLSPEYQPDGILSKDKGIDLVGKALREGYSRFEWTHQKMDGEMLPVEAICIRVKHRNEFTVTEYIRDLREQKKMIAEMRKAEAAEESSKAKSEFLAKMSHEIRTPMNAILGITEIQLQDESLSRGTKEALERIFNSADLLLGIINDILDLSKIEAGKFELIPAQYDIASLIHDTVQLNMMRYESKPIEFKLEIDEKIPVILFGDELRIKQILNNLLSNAFKYTHEGMISLTISTEPMDGDNVMIVFRISDTGQGMTAEQVQKLGSEYSRFNMEANRKTEGTGLGMNITRNLLRMMNASIEIESAPNKGSIFTIHLPQKFLDSDPIGRVMAENLMQLNFTNEQRIRNLQINREYMPYGRVLIVDDVKQIFICQRINGVLYLSAIK

SEQ ID NO: 83728 - protein, 237 aa, Unknown
  Obtained from environmental sample
  DOMAIN (78)...(167): GAD domain
  misc_feature (1)..(237): Xaa is any amino acid
LILKWPSRDREDVFHVAEAVMHSVLTAFSNKMVSPAPFIRIPYAEAMLKYGTDKPDIRNPLVIVDLTGFFADVDFQPFKNITVRGIVAPGEALQSKSFFEKMLVFATEIGMKGLGYISFMEDASLKGPIVKFLSVEKQETLKKDLRLKENDTLFFIADAPDRVNNLAGQIRTALGNQLNLIKKDRFEFCFIVDFPMYGINKASSASREAAASNKRDPLVLDPPASAAGSSFVPRVAQ

SEQ ID NO: 83729 - protein, 129 aa, Unknown
  Obtained from environmental sample
  DOMAIN (22)...(129): ThiF family
  misc_feature (1)..(129): Xaa is any amino acid
MANPLFQRLSLLIGAGAADAVEKSRAIVFGIGGVGSWCAEALVRSGVGGITLVDSDIVSVSDFNRQVQASGENMGRLKTEALKEHLNEINPACEVVSFPRFFSKESAELFGISEADYVIDAIDTLKSKL

SEQ ID NO: 83730 - protein, 504 aa, Unknown
  Obtained from environmental sample
  DOMAIN (330)...(500): Methyl-accepting chemotaxis protein (MCP) signaling domain
  misc_feature (1)..(504): Xaa is any amino acid
MAEKNPRMIISQPCPAIVTFIEIYLPKLLPYLAPADSPILHTIKMIKEYYPQYKNHKIAVISPCIAKRREYDETGMGNYNVTMLALKKLLEDQGKDLSSFSSVAYTGLSAERAAGFPIPGGLLDTAERFNPGIRRQTLKIEGVYSIYPYLEELPKVLDSNVKLPLLVDCLNCEKGCNGGPGTGNAEKPLAMLEDPVRKRIAKLEEDQHYPKGNNAYKKYHNALNKYWKKGLYNRSYRDISGNNTIKQPSEVELTRIFHSMKKYGKEDIYNCTCCGYGSCEAMATAIFNKLNKAENCAHYILALLTEKTNAEEQNRLQLQEHIGRASGFIEGINNLINKLNATISSQAETIAQSSVATEKMIGSLKETTALSQSKQETIKELIHNTEKSRESMRETIQSVEGISKSVEGIAQAIKIISTIAANTNLLSMNAAIESAHAGEAGRGFAVVAGEIRRLSESTRDNSINISRTLKNIIDGVAATEKQSDNTGTRIPAMSSAESVHGQPN

SEQ ID NO: 83731 - protein, 306 aa, Unknown
  Obtained from environmental sample
  DOMAIN (257)...(305): Putative peptidoglycan binding domain
  misc_feature (1)..(306): Xaa is any amino acid
TTPQGQITRREKDDNLRMALAVGTILRNCGVNVIYTRDSDVFIPLLDRADVSNRAGANLFVSFHRNSSINPAANGVETWVYLNPSRSAVNAAQAIYNGLVGVAAQSRRGVQSGDFSVLRNTRAPAVLIENGFISNAQDNILFDQYFTQYANATANAIMNTLGYTCVTPSPITPPAPITPTPPPGDYTANVRAIQTRLNTQWGQSVPTDGVWNNTYYRSLLRAYQTQLNRQYNAGLVVDGIWGPRTRAATRTLRSGATGDLVWLLQAALYVNGYSTRPDGIFGPNTDTQVRNFQRANGRQSLGQSVN

SEQ ID NO: 83732 - protein, 78 aa, Unknown
  Obtained from environmental sample
  DOMAIN (4)...(78): Cytidylyltransferase
  misc_feature (1)..(78): Xaa is any amino acid
VKAAFPGSFDPPTSGHINVIERAASLFGELVVVVAENKQKKYLFSAEERASMIRELVKNHKNVTVTVCDCLLVDLKVK

SEQ ID NO: 83733 - protein, 220 aa, Unknown
  Obtained from environmental sample
  DOMAIN (1)...(220): Glucuronate isomerase
  misc_feature (1)..(220): Xaa is any amino acid
GEIIDQIGRGALAGKRPDAREAESWKTFCLNFLGEEYADRDWAMQIHVSAIRSANSAMLAALGPDTGFDGVADYPVAEKLARFLDMLASRGKLPKTILYSLNFKDLYPMATIMGSFQGHPSEEAIPGRIQLGSGWWFLDHIDGMEAQMKLLGNTGLLSRFVGMLTDSRSFLSYPRHEYFRRILCNILGTWAENGEIPNDFELLGNMVKDISFRNARNYFK

SEQ ID NO: 83734 - protein, 347 aa, Unknown
  Obtained from environmental sample
  misc_feature (1)..(347): Xaa is any amino acid
VKGKTFDQFFEFTKNFKTGDPVLSIGNALGEGVVVRNGLILGTVPEEDSGRWNLLKSSADGNPGNSGGPLVTPEGKVVAVVSALRENILYSVPAEVVLGGSRTELPYRQKSRVGHLILANDMNTIFETKPKLPETYTAVRKTICEAYNAFYDNSMASLFKEAPEYLSGPNNVYLLNSSPSALFPELSFVDPDDNEWTLSNLNKAKKDYPLDDDGRLYHTAVSGFSFYKVKRPLTVAVDKISTDPKYIMDLILKNIRTDRNLWGNDKYRILSYGEPSSKGSFRDALGRTWITAYWVIGFEDEVQIMYILPLPNGPVVATTSRAARSLTSTNGICTRPATTFSRPTSAL

SEQ ID NO: 83735 - protein, 284 aa, Unknown
  Obtained from environmental sample
  DOMAIN (1)...(208): ATP synthase alpha/beta family, nucleotide-binding domain
  misc_feature (1)..(284): Xaa is any amino acid
LIAPYAKGGKIGLFGGAGVGKTVVIMELIRNIATEHSGFSVFSGVGERSREGADLWKEMGESGVIDKTALVFGQMNEPPGARMRVALAGLTMAEHFRDQEGQDVLLFIDNIFRFIQAGAEVSALLGRIPSAVGYQPTLANEMGVLQERIASTSKGSITSIQAVYVPADDLTDPAPATTFAHLDATTTLSRKIVELGIYPSVDPLASSSRILDAAVVGEDHYNVARQAQQILQRYKELQDIIAILGMDQLSAEGQLICFQGAKGTAFLQPAILCGGKIHRYFGPL

SEQ ID NO: 83736 - protein, 150 aa, Unknown
  Obtained from environmental sample
  DOMAIN (18)...(149): Alanine racemase, C-terminal domain
  misc_feature (1)..(150): Xaa is any amino acid
VRVLPKRRVRKQNPLKTGVKIVSVIIQIKEYEKGTPISYNRRFVAKRKSKIAVVSAGYSDGISRKLFNLKNKKNGCFAVNGQRAPIVGTVCMDLTMIDITDIKGDVNVGDEAAIFDNVNVTIEEMASICGTIGYEIISQIEDKADRVESF

SEQ ID NO: 83737 - protein, 299 aa, Unknown
  Obtained from environmental sample
  DOMAIN (100)...(180): Cache domain
  misc_feature (1)..(299): Xaa is any amino acid
VEANVRLGFSEGEVTLRNSYYVLTGMLDRKASRYDILSYLRTTTEWLTQREQGLLDFYGIYGYINGHFYDSIGLDPGADFIPQRQPWYQTAVRSGRSIGYTAPYPDPRTGNTIISIVQNIFHGADDIIGILAINVDSKKIGQYAAALTQLFGGYGILISQNMAIMAHPDNEVLGSQFQDLGGDFVKLARDLRSGEKVFDREITDRDGTDTLVFFRKIFNGWYVGSIIPKAKFYSDLYLAAFILMFLGMGLATLLCYILLRLTMARLRSRGRNKYQSNFSCRMSHEIRTPMNAISGMAEL

SEQ ID NO: 83738 - protein, 161 aa, Unknown
  Obtained from environmental sample
  DOMAIN (11)...(157): Phosphoglucomutase/phosphomannomutase, alpha/beta/alpha domain I
  misc_feature (1)..(161): Xaa is any amino acid
MCLRIKEALDKMILTASGWRSVFSADGDGESFSKDILPAHKIIVAAAAKVFSDFLSGNDGAILVGRDTRPTGVAIADAAIRSLLAAGRELKYAGITAAPEIMAFARETKAAGFVYISASHNPIGHNGIKFGLSDGGVLRADKNALLVSALKTFTASEEMTN

SEQ ID NO: 83739 - protein, 181 aa, Unknown
  Obtained from environmental sample
  DOMAIN (6)...(181): Aminotransferase class-V
  misc_feature (1)..(181): Xaa is any amino acid
MKDRRVYADYNATTPLRSEVKDAIISVLDIYGNASSLHTSGRQARARVEEARKAVGLLLGSDPASIIFTSGGSESNNAVFQTMRQLKSDRNEFITTQIEHPCVLNSAEFTKEQGFTVHFVPVDESRKIKMEALKAALSKKTLFVSVMMANNEIGTIQNIKEITRLVKRAGALCHTDAVQAL

SEQ ID NO: 83740 - protein, 259 aa, Unknown
  Obtained from environmental sample
  misc_feature (1)..(259): Xaa is any amino acid
MKYGVRHFHIEDDNLGMNPTRLGELLDALIAKKWGVTWDTPNGIRADRIDAKLVAKAKASGCTYLIFGVESGNQRVLDEVVNKKLDLSAVTKIARIAYRHKLDVHAFYVVGFPGETAKEIHDTFRYALRLLASYDVIPHLGLARPLAGTRLYDICEEGGYLTSPRRPQIGKGLRGEVFSRQMIETKDFNAEDLESWVKGFNRKMILWIIVKSSIFLLLHPIAALTVLKKFLKTPGGLRARMLRIFFRRLFFKFNYTRIK

SEQ ID NO: 83741 - protein, 314 aa, Unknown
  Obtained from environmental sample
  misc_feature (1)..(314): Xaa is any amino acid
MMAEGLPFSGGFDFTAQWAKRLSAMNNNAPFFKGDETYAYPDGFASRDEYNSAYKLPPREFLMEYNQFYLSLGFSTGYRWFTPVGNLSVGGGIRTGLIRNEYDDEIYRPFDPALRERHNDWTPKNSIWTTVSLDQRDLYYDPSKGYYIYERFGIYGLLGIEDEEPRIEREYYLRNDLKAEYYITLFNLPVTEKWHFKSVLAFHSGLSFIFKQPGRDINSLTPTIEEANQLSVDGMFIGRGWSSEYRYKGLVLWDNWIELRFPVVPGILAWDFFFDAAGVETVPGYYFGTNNLGNPNFTIDNMRFQFWRRSAFYM

SEQ ID NO: 83742 - protein, 188 aa, Unknown
  Obtained from environmental sample
  DOMAIN (2)...(188): LytB protein
  misc_feature (1)..(188): Xaa is any amino acid
PLSRDFWQARNTAEIAGIRGYAEDGWLQRNGAAGDKQFLRVVSCAGEAQTVAAKLSEDPELKTGPAKTALLAQTTISEDEYHAIGAVISQYFPMLEIIQTICAATRERQDSLRELLGKVDAVAIGGGKDSANTRRLLNIAQASGKPCVIVETTNDIPPDFFNFETVGLAAGASTPDSVIDSIEKGLAK

SEQ ID NO: 83743 - protein, 294 aa, Unknown
  Obtained from environmental sample
  misc_feature (1)..(294): Xaa is any amino acid
MTSAELKKTPSEFLHSLPACEVLMQLDNMLEGGLENVVIDLASAFEEWGYSVTILVLNETGEGALKALRRGLRVCVIPYHEQVLYRELERVRPAIVFAHYSFQGAHLYESLNIPFIQVIHNVYAWFDDAGKGIFAKAAAHTTLFAAVSETVKEYSVEHLDVPPEKCLVIPNGIDLSKFTPEVKQEAENLRRHLGFSEEDYIFVAVSSIRRIRRIMALVKSFRCICDLAPHARLLLLGYQYDKEYLTEILAYVEKNNLQPRVVYAEHSLQPVLYFLMADAFIHAAAFEGRQLVLL

SEQ ID NO: 83744 - protein, 211 aa, Unknown
  Obtained from environmental sample
  misc_feature (1)..(211): Xaa is any amino acid
DFDQAEKWFLACADIDPTEFSAMSGTKTTDSLYKSALYALTRNEREVGVERLRKSIALGQKLVQGSWFNVCGDCRMPVTFGMHDLTQIMENLTRCTYALHQVETWHDRPGLALSQSRGLFEWKSIDQQKHILDLRKHISEQQAHIDELQKYISELHNSKSWRLTAPLRGFRNYFRALQNTVNGYSRRRAIALRIWLSLKKLRTKFIQETTA

SEQ ID NO: 83745 - protein, 319 aa, Unknown
  Obtained from environmental sample
  DOMAIN (171)...(319): Peptidase family M41
  misc_feature (1)..(319): Xaa is any amino acid
LTDSAEERSGLCGMFVGVGAARVRDLFKQARTKAPCIVFIDELDAIGKSRINSISGGNDEREQTLNQLLVEMDGFDNTGGLIVLAATNRPDVLDPALLRPGRFDRQVLVDKPDVKGREAILKIHSKNIAGISTIDLEVVARITSGFSGADLANIVNEAALLAVRAGRKMVAQRDFDEAIEKTVAGLQKKTRVIKEEERRLTAYHEAGHAMVAAFTPNADPVQKISIIPRGFALGYTLQLPLEDRYTVTKSDLLGRIDILLGGRIAEEMISGEYSTGARSDLTKATDIAPQDDYRLRNERPFPQCRAYFARHEHDRAGAA

SEQ ID NO: 83746 - protein, 282 aa, Unknown
  Obtained from environmental sample
  DOMAIN (26)...(176): Anthranilate synthase component I, N terminal region
  misc_feature (1)..(282): Xaa is any amino acid
MIIKPTLEEARQIAKSNGGKYSVVPISAELFADTATPICVLRKLKTISRHCFILESAEDTKNWGRYTFLGFDPSSEITCIDGAMKITATDGTVKSFQTNDPNKHIQEILDQHRSVKIEGLPHFTGGLVGYFAYDYAKYAEPTLKLDSRDEEHFQDVDLMLFDKVIAFDHYRQKIVLIANIGTRDIDAEYGRGVEALEQLKGLIEGCAPERTAQASLKSELKALFTKEEFCAMVDKAKWHIKEGDIFQVVLSNRFEADFEGNLFDAYRVLRTINPSPYMFYFS

SEQ ID NO: 83747 - protein, 188 aa, Unknown
  Obtained from environmental sample
  DOMAIN (17)...(169): 3'-5' exonuclease
  misc_feature (1)..(188): Xaa is any amino acid
VEDGGRPVHSAGAHISRRQAKKECHAKDCLKKPGIPNALLDIIGDPEEYWQKLAPHLDSRNLPFTAVKAILAPLFADQRVAKYGQNLKYDIQVLARHGMLVNGIAHDSMVLSFLLGSASRHSLDHLSAVLLNIKPIEFESIVGKGKAQKAIRRGQFTRHTPNKPPNGILMKRASTARDSVSLCIQYTE

SEQ ID NO: 83748 - protein, 179 aa, Unknown
  Obtained from environmental sample
  DOMAIN (67)...(168): Nitrogen regulatory protein P-II
  misc_feature (1)..(179): Xaa is any amino acid
MRDGLAFPSRRIAGMDITEHNIESSYADFMVSTAIADSKTRDAEPVPANVAIPVVNNSKPGAKMTKITIITNQNKLTRLHTALDSIGITGLTVTNVLGHGMQKGHTEYYRGSPVTIKLLPKVQIDIIVCKIPPQTVIDAVKKVLYTGNVGDGKIFISDIENVVKVRTGEQGYDALQDNE

SEQ ID NO: 83749 - protein, 108 aa, Unknown
  Obtained from environmental sample
  misc_feature (1)..(108): Xaa is any amino acid
LAEKVALSVGDTLARIGKAGQIFCVTHLASIAVRADNHLKVEKKVVSSGGADSDAGERTVTLVSQLKGPERRQEIARMLAGDSGKVALAHADELLAKYSGVKNGESNN

SEQ ID NO: 83750 - protein, 417 aa, Unknown
  Obtained from environmental sample
  DOMAIN (1)...(396): UvrD/REP helicase
  misc_feature (1)..(417): Xaa is any amino acid
MALGTVHSICRKLITDRRFSKDASRRHPPVLLDDLSQYFKIYGRTFWTYLCLGAGFADLETAIADINAFFGNATKSGPSQSRHLAVTSVIAFFNRLSEESLDPGQCKLSMKLAEECGIHTETFDKLVEMYRLYLEGLKKPPEHVDFSLLQRAAFDQIQTYNGATKIYKHVIIDEYQDTNAIQEKIYFALAAGYKNICVVGDDDQALYRFRGATVENLVEFESRCEKYLGVRPARIDLDINYRSRQKIVEAYTGFINLINWKKYPPKTGFYRINDKNIKAYHQDHIPSVIVTDHTIADNVYSQVAHFIYDLKKSKKIEDYSQCAFLFPSLWDSYNNRENTRVMGFKKAFEDINHELNLFGSQDELKIYAPRAGRFLEGDEAKAIWGILLKVFGMPHYDEALGRSLTAYREWMSDCLET

SEQ ID NO: 83751 - protein, 64 aa, Unknown
  Obtained from environmental sample
  misc_feature (1)..(64): Xaa is any amino acid
MQYVDFGKTGIKVSRLGMGCMRLPSNMEDGKTVFDEDKSVALIHRAIELGVNYLTRTSVDLSWQ

SEQ ID NO: 83752 - protein, 84 aa, Unknown
  Obtained from environmental sample
  misc_feature (1)..(84): Xaa is any amino acid
MNGLFLLVISVVVLSLAYLLYGRFLARRWGIDPQKKTPAHEFEDGKEYVPTSPAVVFGYEFASIAGAGPINGPIIAAMYGWLPA

SEQ ID NO: 83753 - protein, 239 aa, Unknown
  Obtained from environmental sample
  DOMAIN (44)...(219): Semialdehyde dehydrogenase, dimerisation domain
  misc_feature (1)..(239): Xaa is any amino acid
NPICEGSPSDISAIIPVQRKKRGWDKGFIAVKPNCSIQSYTTALYALIKAGYEIRRLIVTTLQAVSGAGYPGVPSLDMIDNIVPYIGGEEEKSELEPLKILGSIDGGVFKNAELPRISAHCNRVPVTDGHTACVSVEFGEKKPSVDEVKKIWTNFRSLPQELKLPMAPERPIIIREENDRPQPRKDRDADKAMAVTIGRIRPCNVFDLRFVGLSHNTARGAAGGGILNAELLKHKGYLN

SEQ ID NO: 83754 - protein, 70 aa, Unknown
  Obtained from environmental sample
  misc_feature (1)..(70): Xaa is any amino acid
VASGILTLKRPLYIAGSTYEKQTALKRGARYLPLSFPVFDRVITTAGYAGYRGGLRLYEDLIGANMAMKG

SEQ ID NO: 83755 - protein, 318 aa, Unknown
  Obtained from environmental sample
  DOMAIN (9)...(298): Pyridoxal-phosphate dependent enzyme
  misc_feature (1)..(318): Xaa is any amino acid
MMIKAAGKLTDLIGNTPLLKASNFLEGAQAKADIYFKLEYFNPLGSVKDRIAYAMINEAEKEGRLKPGDTIIEPTSGNTGIGIAFVAAVKGYRTILTLPETMSVERRTLLKALGATIVLTPGADGMKGAVRRAEEISAQTGGVILQQFENPANPVIHQKTTAGEIWNDTEGAVDIFIAGVGTGGTVTGVGTYLKEKKPGIQVIAVEPFESPVLSGGAPGPHKIQGIGAGFIPKVFKREVVDEVYTVKGTEAIETSRELGRTEGLLVGISSGAAAFAALQISRRPENSGKNIVAILPDTGERYLSTVLYDYNVLQGGNT

SEQ ID NO: 83756 - protein, 438 aa, Unknown
  Obtained from environmental sample
  misc_feature (1)..(438): Xaa is any amino acid
MTKQSFTKTAYQNLDDFVFGKALYPVALKNGMAIGGGVVYPEINFTLPTMSIEKDTMSEVIANYREIIAGICDRAKELHIPGFVAEIETLPPMTFNPEWGIEVCKVVVDIIKEHEAKHGIKGAVRITPNDIREGKDLEHMWRGRHWEAILRTFGGCAKAGADFLAIESIGGKEVHDEAIMYCDIEKSIFALSVLGCTDMNRLWTEIVRIADETKTIASGDTACGFGNTAMVLADRNYIPKVFAATVRVVTAVRSLVALECGAKGPHKDCGYEGVFIKAITGTPISMEGRTAACAHLSPVGNIAACVADLWSNESIQNIKLLGGMAPTVSFEQLGYDCRLMNEATARGRGQALLLRDLHADSDSRFDPQAYVLRPDIVLEISKELVKVDGYYARSKKAASLALAYIREGYDNKELGLNDKELTWLDDLSDVVVKIPDDR

SEQ ID NO: 83757 - protein, 218 aa, Unknown
  Obtained from environmental sample
  DOMAIN (1)...(213): Peptidase family S58
  misc_feature (1)..(218): Xaa is any amino acid
FRQIARIGALPQPEHLKEAIKNLSAEVTEGAVGAGAGTCCFGYKGGIGTSSRKINMKFSDSEQTCTIGALVQTNFSGNLNIYGSPVPNGLREKPQGGSCMIVVATDAPLDARQLKRIAKRGIAGMIQCGSYLANGSGDFCIAFSNYPGNITPRDNQTLKKITVLPDERINPLFEATCEAVREAIYNSLTMAHGITGRDGRSVQGISVVKCFSLNKANN

SEQ ID NO: 83758 - protein, 80 aa, Unknown
  Obtained from environmental sample
  misc_feature (1)..(80): Xaa is any amino acid
IARGRFLESVSVLEIPHINSDIADYITISIGATTVKVQHNHQYRKYIERADEALYISKDSGRGRYTHLKYHDKEGGGNEV

SEQ ID NO: 83759 - protein, 160 aa, Unknown
  Obtained from environmental sample
  misc_feature (1)..(160): Xaa is any amino acid
LGGFPNLLTVHTLSNSGSLAGLRADFAVGNEELIKGLRRVRDSFNSYTIDRLALAGAAAALSDAVYYNEINGRVVRTRDRVTEALRIMGFTVLPSEANFIFMKSLNINGSDIFSALREKGILVRHFNKERISDFLRVSMGTDSDMDVFLGACEEIIRHRK

SEQ ID NO: 83760 - protein, 286 aa, Unknown
  Obtained from environmental sample
  DOMAIN (1)...(96): Bacterial flagellin N-terminus
  misc_feature (1)..(286): Xaa is any amino acid
MVNSKDGASLLQIAEGTCNEVQSILQRVRELSVQSANDTLTSTERKYLNDEVTELLKEVDRIAMNATFNSKQIFGNKGDAFSNEERDLRRPMSDEDKDIKYWQPLATKNANDIYFRNKEDNDLRYWKPFTTKDVNGDELRVGVLHIGPGATKPDEVKVSIPELSAKSLGLKDLIVPYDSINVPTLTYQGVNINSQNGATKAINDVDIAISSVGTIRTCMGVLVSRMERQVEDLESNNIGLNDYVTKVKDTDFAKESTTFAASQIQMQPAVSILAQSNSRVGRFCAP

SEQ ID NO: 83761 - protein, 313 aa, Unknown
  Obtained from environmental sample
  misc_feature (1)..(313): Xaa is any amino acid
MGLFDRNLLALSAHNPALCSQLSLAETTQGRYKFLESASGELIPALVDRSGAAHALHSTVDPVREAERLISTLSKDKNGLLAEGFVVFLGLGGGFAPLAALNSGVSHVLIIDYDINGIAELLCSRDYIALLGDPRCTLLADPPPDLIENVILELYRPALYGGIRALPLRARIEPDKQTFNLAADAIQRTIEKVSADYSVQAHFGMRWFANIIRNLEAAQRQNRSAPPIRHAAICAAGPSLDDQIPLLVRQKDKQELFVIAADTALPALLRRGIKPDAVVSIDCQHISYYHFMGINRADIPLFLDIASPSPAAG

SEQ ID NO: 83762 - protein, 185 aa, Unknown
  Obtained from environmental sample
  DOMAIN (15)...(185): Aminotransferase class-III
  misc_feature (1)..(185): Xaa is any amino acid
MNSVFMNTYHRLPVTFARGEGSWLFDIDGKKYLDLSSGIAVNILGHNYPPLVRAVTEQAGKFFHVCNYFQSDTTAAFAEKLVQATAPAGMKKVFLCNSGAEANEGACKLARKYSLVKYGPGRHTIVTLKGSFHGRTITTLSATGQEKFHKDFGPFTGRFYSYTVRRYRYAGKKHWIKIKVAGLLI

SEQ ID NO: 83763 - protein, 64 aa, Unknown
  Obtained from environmental sample
  misc_feature (1)..(64): Xaa is any amino acid
VFWDLWPRALSVGVGFGVLALSQFVIIAQLGSLIALNMMITAFVSLTVIPALLMVIKPKFIYKQ

SEQ ID NO: 83764 - protein, 341 aa, Unknown
  Obtained from environmental sample
  DOMAIN (109)...(327): Bacterial extracellular solute-binding proteins, family 3
  misc_feature (1)..(341): Xaa is any amino acid
GYREGEYRCAESGSADLYFFESPTESVFDRYGDLAVHDFLPFIISPVSLSARNGEYKAVISIVQKILQNGGSVYLTRLYSQGYRDYLKHKLRTRLTDKELAYIAACPAVPFGAERDNYPISFYNAYAGEWEGIALDVLKEIESLTGISFEVKNNRHAEWSEIERMLADGEIAVVSELLRSKEREGSFLWPSTPILINYYTLISKSDYPNININEILFSKIGLIKGTIYATAFKNWFPDAETAEYEGAGAAFAALDRGEVDLVMSRQSRLLDLTNFRELVGYKANIVFGQPIESAFGINRNETVLWSIYDKALQMIDVDRISGAWVQKTYDYQTKLVQLRRR

SEQ ID NO: 83765 - protein, 256 aa, Unknown
  Obtained from environmental sample
  misc_feature (1)..(256): Xaa is any amino acid
GAVTAAEAQSYTIAVGGSASVNPLMELFIGEYAKIRSSVKFTVSATGSGDGIKGVPAGTCEIGMSSRELTPAEIGTGIDELVIAIDGIAVIINNANPIASLTQEQIRNIYTGEITSWEQLGTAALGKTGRIAVVSREPGSGTRGAFEEILKFQDKLVRGAIEFDGTGAIKAEVSRNADAIGYISLGSLDNSIKALNVDGIAATTSNVVSGSYKIARPFILLTKKGVPLNAETKAFLDWIMSPAGQNIVKTSWINLR

SEQ ID NO: 83766 - protein, 180 aa, Unknown
  Obtained from environmental sample
  DOMAIN (45)...(77): Ankyrin repeat
  misc_feature (1)..(180): Xaa is any amino acid
LNRAIYSEQLTKEGLQLIIASEKSDIETVKLLLKKDVYIHAQDKEGRCALVAAAYKNYLEIVDVLIAAGADVNMKDNTLQSAYLISTSDGYTELLKKTLEAGADVHSTDSYNGTGLIRAADRGHVEIIRELLKTDIRVNHINKLGWTALLEAIILGDGRERHTEVVRMLVDAGADVILAE

SEQ ID NO: 83767 - protein, 80 aa, Unknown
  Obtained from environmental sample
  misc_feature (1)..(80): Xaa is any amino acid
GKLWSFSKEKAQRAQFATITKGVACWATGQWNANSTVSQIYVNRIADIKVWAKFKKVTAHSNDEWNDKADKLAKEALTGK

SEQ ID NO: 83768 - protein, 315 aa, Unknown
  Obtained from environmental sample
  DOMAIN (5)...(315): Polyphosphate kinase
  misc_feature (1)..(315): Xaa is any amino acid
MTDWPSSTLRPPELLEKINQRVRSIVSRQYEALVNEVFPGLARGGLTLRRPNEWTSSQRDYLESFFAREVFPLLTPLRVEETEDLPSIDSNSLYAGFFLKAETALDEEKPPEEHISIIRIPHVPERIIFLPGEREDHGDDEMGQTYWALIEDLVETWGHYLYPGYKVTESLVFKVNRDADFSVDEQRDEDFIEAMEEVLEGRERSMPVRMVYSPGSAKIRDCLAQKLSLAENDLFELKGPLSPGKIYDLFRGYDHLREKSWKIFSHPAFSEDQNLWDRISQGDILLHLPYQSFDHGDEGVFPVMIAAGSLAVAVH

SEQ ID NO: 83769 - protein, 566 aa, Unknown
  Obtained from environmental sample
  DOMAIN (121)...(564): Carbohydrate phosphorylase
  misc_feature (1)..(566): Xaa is any amino acid
EVDEWETSHKLVLMNISTYTVKPKLPAVLKPLEEIACNLWLSWNYDAIQLFIRLDYDTWLKSQQSPMRTLGMVSQERLAQTAKDDSYLAALKEIYDRFQRYKKGETWYRGSHKDVVAYFSMEYGMDVSLPIYSGGLGILSGDHMKTSSDMGLPLVGIGLLYRQGYFTQMLNADGYQQESYPENDWYNMPVERKNGKDGQPLKISVDLAGRQAIAQIWEAKVGRSSLYLLDTNIEENAPDFRNITASLYGGDKETRMQQEILLGIGGIRALRALGINPAATHMNEGHAAFLGIERIREIMEEKGFTFEEAREAVWPTNIFTTHTPVPAGNERFEIPMMEKYFRSWPQVLGINWKDFLGLGRIYPGDERETFCMTVLALKMAAYANGVAKLHGVVSRDMWKGIWPGLPLNEIPIGHVTNGVHSRTWISSGMIDLLDRYFGPSFLDKPTDLQIWERMDRISDEELWRTHERRREKLVAFVRERINAQYIRTGAARLKQAEDALSPYALTLCFARRFATYKRGNLLLRDPERLLRLVRDHDRPIQLIFAGKAHPHDMPGQRPYPRNSPLC

SEQ ID NO: 83770 - protein, 150 aa, Unknown
  Obtained from environmental sample
  DOMAIN (45)...(142): LytTr DNA-binding domain
  misc_feature (1)..(150): Xaa is any amino acid
INLEQNSSQKDIEILITYPVKNKVVERIVSLIKSVDMQIECYSDDEVKLVNASDIYYIESVDGKTIVCCEKENYFVKSRLYQIYEKLKDNGFIQVSKYCILNINKLDKFRPLGNNRLEAVLSNGTFLCITRKYIPDIKQILRDMKSDNAS

SEQ ID NO: 83771 - protein, 294 aa, Unknown
  Obtained from environmental sample
  misc_feature (1)..(294): Xaa is any amino acid
MLLNLDRNNFVSLFPYYWSAVTTFFAVRSRKFLRAVIIADVSILLFIFSIARTGGIEIYRWPIVMIVIFAGIVFFQVLALLFSMPPETKLQIKEKLLSVAALLIIIVTGGILFLKPIQEQAAQMGGGLLEPKFFSFDFSKLLKLDPEISVKNDLILIVKKENDDHILLRRAVLSGYSKRNGFYQIEELDEKTHPQKLPGKQVSYTPPVFKEARLSAQEYFLVNAESTAFIGMKEPVKVTPYENWDASSFKAAYAVDSLVSGADIPDLIISAVNRHSVSDLDKRERSRPNLSLAN

SEQ ID NO: 83772 - protein, 108 aa, Unknown
  Obtained from environmental sample
  misc_feature (1)..(108): Xaa is any amino acid
VTEVDEKGRSIRYADGVLGAKYRDSFETPSYLEKGKVYKLNIRTTKISKMFAAGNRIRFTVTSSAKNLVFPNSNTLAGYNSKETLVAQNTVHYSAQYPSRIILPVEAQ

SEQ ID NO: 83773 - protein, 115 aa, Unknown
  Obtained from environmental sample
  DOMAIN (1)...(44): Ribosomal prokaryotic L21 protein
  misc_feature (1)..(115): Xaa is any amino acid
DIAGTARQVEVLSHDKADKVLLVKKKRRTRYERRRGHRQGYTEVLVTEIKYGKSLAKVDPQVAVRQRARIAALAKLKEQGKPLTRKEKIAADIAAGKEPHPVRKKKFLKKAAKEG

SEQ ID NO: 83774 - protein, 58 aa, Unknown
  Obtained from environmental sample
  DOMAIN (4)...(58): Ribosomal protein L7/L12 C-terminal domain
  misc_feature (1)..(58): Xaa is any amino acid
SWRPSRSIVRSVDTGLGLKEAKDLVEGAPKPLKEGISKEEAAKIKDAVTAAGGTVEIQ

SEQ ID NO: 83775 - protein, 240 aa, Unknown
  Obtained from environmental sample
  DOMAIN (24)...(207): RNA polymerase beta subunit
  misc_feature (1)..(240): Xaa is any amino acid
MAKKTAEKRKYIGKDIQDVMELPDLVDIQLASYERFLQREKFRNREKPAVQGLEEVFRTTFPIESPNGGEMVLEYEYYTLDEESIKVSELDCKQKGITYAIPLKARVNLVFQQTGEIRQKDIYMGDIPIMTERGTFIIHGAERVVVSQIHRSPGRIFSHEKGIYSSRIILYRGSWLEFEIDHRRELNYAKIGPQEVKFWESIFLAVHWVFSRPGKKLIPPLLCLPKPFQDKKMTREPHGK

SEQ ID NO: 83776 - protein, 304 aa, Unknown
  Obtained from environmental sample
  misc_feature (1)..(304): Xaa is any amino acid
LKGRGSRWTRLTQLAIFINRAEVFRQWLLKPYRTLEGGEILREDLLTKNAKELPNCGDVAKEVFKILDLEGKLRDLPEFKELRRQIRTLQKNIESTASRYAGNEEKRRMLQSEIPSQRDGRMVLAVKANFRGRIKGIVHEVSSSGQTVFIEPEEVVEMNNELLIVNRRLDAEIRRVFRELTGRIFSRREDLRTFYRGIVFLETIRSKARYGYENKLIFSENMETEGEGKFVLNQARHPLLGRKAVPLDLFMGEGIRTVIITGPNTGGKTVALKTLGLLALMNQLGLPLPVGEGTLQPVFDCGLL

SEQ ID NO: 83777 - protein, 401 aa, Unknown
  Obtained from environmental sample
  misc_feature (1)..(401): Xaa is any amino acid
MTPSGTLYSATIPAQAAGSVVTYKVSATNNLGETATTVTQSYTVAVEPPPDGPPVISNFGRNIPSVTPSDTVTVSATVTTAAQSTITSVVLQWTLNSTDKDDIEMTASGNVYSATIPAQSLNSVVTYKVSATNNLGETATTATQNYTVAEVPVDPPAISGLSREPSSVTPTDTVTVSATVTTTTSTITTVVLQWTLNGAAQKDINMTTVSGNVYSAVIPAQDVDSVVTYKVSATNNLNKTKSTATQNYTVAEVPVGPPVISNLSREPTSVTPSDTVTVSATVTSNTASAISTVVLQWTLDNVAQTPDINMTKNGNVYSAVIPKQVLGAVVTYKVSATNTHGTNSTVAQTYTVGSVSGSTDYTKLKLNEVSGVGEDSEKFYELKNIGTQDIPLEGCKIYYNA

SEQ ID NO: 83778 - protein, 58 aa, Unknown
  Obtained from environmental sample
  misc_feature (1)..(58): Xaa is any amino acid
MGKKPRSDLLLSKLNSTQDLKKLNFHELNALAREIREHIVEVVSSNGGHLASNLGVGN

SEQ ID NO: 83779 - protein, 201 aa, Unknown
  Obtained from environmental sample
  misc_feature (1)..(201): Xaa is any amino acid
MSSSMVYESTNVYPSPEGEHLKCPPPLSTYGFQKLACEYFAKGGWEQYKLPYTIIRPFNCVGTGEQRAKNEKEIMSGNVKLAMSHVVPDLVQKVAKGQNPLHILGSGYQVRHYTYGGDLAKGIRLCIESDKAVNEDFNLSTPVSTTVKELAELIWKKINGDKPLSFVSDKAFEYDVQKRVPSVQPPKDILGFSADTDLSST

SEQ ID NO: 83780 - protein, 62 aa, Unknown
  Obtained from environmental sample
  misc_feature (1)..(62): Xaa is any amino acid
MNNFSKFGKVEKSYDHPPRLLFSPKGMFKDIDLMKKLISNCDQVVAIAPMMGGITYFPRICL

SEQ ID NO: 83781 - protein, 286 aa, Unknown
  Obtained from environmental sample
  DOMAIN (20)...(85): His Kinase A (phosphoacceptor) domain
  misc_feature (1)..(286): Xaa is any amino acid
MLLEKGAAKGEEAGSPLTAQKSTFLGTMSHEIRTPMNAIIGMVKIGKEAPGIERKDYCFMKIEDASNHLLGVINDILDMSKIEANKFELYPVEFELEKMLRRVVNVVNFRIDEKYQKFSAHIDRSIPRSLIGDDQRIAQIITNLLGNAIKFTPEKGSITLAVRLIQKHNNFCILQFSVSDTGIGITTEQKGKIFQSFEQAESSTTRKYGGTGLGLAISKNIVEMMGGRIWVESDPGKGSTFTFTIQAQCGTEEKHGLLADDINLKNVRILTVDDDPDILTYFLDIA

SEQ ID NO: 83782 - protein, 339 aa, Unknown
  Obtained from environmental sample
  misc_feature (1)..(339): Xaa is any amino acid
VITDDRGYTEIDIKREGGKIASPYVAVEVNGSYANEVSGKTSSDAITLKAVADVSGKDNMNVNVLTHLEYDKVIKLAKEGKSFGEAKKQAQKEVLTALGVSESVTRNSEDMGLFGGNSNDNVLLTVSVSLQGNRTTKDVSSLLSEFSSQINDNGALSGSVKSEVDKGLAGVDLGKVRNNILALEPSAKVPDTFPKTSGSGSGSGSGSGSGSGSGSGSGSGSGSGSGSGSGSGSGSGSGSGSGSGSGSGSGSGSGSGSGSGSGSGSGSGTTPTPTPIPSSSSAVVLTSSSSSSDNLPVCDANRTQNCVSICADRGQYDPKTEICEGGYLNQSQSICARVL

SEQ ID NO: 83783 - protein, 286 aa, Unknown
  Obtained from environmental sample
  DOMAIN (87)...(285): Domain of unknown function (DUF323)
  misc_feature (1)..(286): Xaa is any amino acid
MIGRTPVNAITENAQYSGTVTWNPNHSTFAASTMYTATINLKAKTGYTLQGVPANFFTVSGASSVSNSANSGVITALFPVTPYVTPTGIEMVWIPGGSFQMGDIRDEYYAKPVHMVTLTGFYMGKCEVTQDQYQNVIGKNPSYLNSNPARGEIQGNRPVEQISWYDAIEFCNALSKKEGLSPYYSIDKANQDPNNLGSYDMFKWTVTCNTSADGYRLPTEAQWEYAAKGGNGSTGNYTYSGSDNIDDVECYNKNDGRHQTHGVGKEASNAPVVYDMIRNVPKYCWY

SEQ ID NO: 83784 - protein, 321 aa, Unknown
  Obtained from environmental sample
  DOMAIN (88)...(200): Pyruvate kinase, alpha/beta domain
  misc_feature (1)..(321): Xaa is any amino acid
MLKSMIVNPRPTRAELTDVANAILDGTDAIMLSGETSAGAYPVESVKTMDRIACVIEQSDEFHLRMKDLHEECHSEVHNPKENLGIIMSRAGVEIAAEVNAKAIVTPTRSGNTARILSVFRPDEPILAVTTDARSERIMQLYWGVTTCIRPKVDDSESMINDTMKVVSETGAAGISDKVVLIAGLPLESPNMINNIRVVIIGTVLARSNAGGYANPDITRAQGKIIHAVTPDEARKKIMSSGGGDILICKELTEDYVSVISMVSGIICEGVSVIVEQKLRLFNPNLVWLTHIRDAAKKLEPGLTVTIDGKELLVTSADSVH

SEQ ID NO: 83785 - protein, 55 aa, Unknown
  Obtained from environmental sample
  misc_feature (1)..(55): Xaa is any amino acid
MSELVLARKKSRLFRELNTVLTVMAREITIFFRSPGTAIISIAMPIVLMGMIGGN

SEQ ID NO: 83786 - protein, 308 aa, Unknown
  Obtained from environmental sample
  DOMAIN (134)...(214): B12 binding domain
  misc_feature (1)..(308): Xaa is any amino acid
VIAAAAAHGIPGKDIIIDALTMTISTGANNARVTLDTVEYLRRKMRMHTVLGVSNVSFGLPGKENINAAFFSLAIRAGLSAGIVNPLNNAIMDAVYVSQALNGTDVNCARYIARFSSREQAAAYSVAAEKSARQEVSLHDAILRGLKEQSAKTAGRMGDDMLSMEIVNEHIIPALDKVGKDFESQKIFLPQLLMSAEAAKAAFEAVAARMTKHGGFQRKHGKILLATVKGDVHDIGKNIVKILLENYNFEIIDLGKNVDPALVLETVLKEKIILAGLSALMTTTVVYMEETIKLTQRKSTSADSVHGG

SEQ ID NO: 83787 - protein, 312 aa, Unknown
  Obtained from environmental sample
  DOMAIN (211)...(312): ATPase family associated with various cellular activities (AAA)
  misc_feature (1)..(312): Xaa is any amino acid
LKKDRALSRRFQKIDINEPSVETAIDILKGLKSRYEDYHHVHYSDEVVETAVRLSAQFITERRLPDKAIDVIDEAGAYARIEAYKHSQEDSGADEKTANETEEASTADLFAQDLFTTEKSAVDKTADDKMHKSSTVQEAQIEKIEITLPVIETVVSKIARIPQRSVGESEKDKLKDLEARLKQRVFGQNDAISAVVKAVKRSRAGFRADGKPVANFLFVGPTGVGKTELARQLAEILGITMLRFDMSEYQEKYTISRLIGSSPGYVGYEDGGQLTDAVRKQPHAVVLLDEIEKAHSDIFNILLQIMDTLADK

SEQ ID NO: 83788 - protein, 289 aa, Unknown
  Obtained from environmental sample
  DOMAIN (2)...(167): Peptidase family U32
  misc_feature (1)..(289): Xaa is any amino acid
MRAAGRLGADRVILPRELSIDEVREAAAACQGGPELEIFVHGALCWCVSGRCYWSSYLGGKSGLRGRCAQPCRRMYRQRGREGRFFSCLDLSLDVLVRSLLKIPRIRAWKIEGRKKGPHYVYHTVAAYRLLRDAGEDARARKDAESLLDMSLGRPTTRAGFLPQKAATPSSPDNQTGSGLLVGKVLLDAAGKPSFKPRQELLPQDYVRLGYEDERWHATLPVARHTPKGGTVTLRLPKHKTPKTGTPVFLIDRRDPEMMRQLAEWKERFASCKARPMPVARPILTLGNQ

SEQ ID NO: 83789 - protein, 250 aa, Unknown
  Obtained from environmental sample
  misc_feature (1)..(250): Xaa is any amino acid
MAVFLNIKGQYPGLGKLWFSFFMDEMEISSMTSAFKLDRHMFAYQAGLQGVVPFLPFTSVTLGYTKIEPYNYTHTRDFLPWYSGSEPMESAYVNSGVCLGYYLPPNSDEVKVRFDIRPLLKTASHVQYQLIRHGADYGIHQVDGSSLVSELDPSGRSEKASLKKNFLKDGAYQWMHIVKVGAEHTLKNSPLTFFGETGIAYSYFTDISDEEYAEYTPTPKGSRTKKTRTGRLPDLDRFYSDFRLQGIQIT

SEQ ID NO: 83790 - protein, 230 aa, Unknown
  Obtained from environmental sample
  DOMAIN (24)...(206): CobQ/CobB/MinD/ParA nucleotide binding domain
  misc_feature (1)..(230): Xaa is any amino acid
MTGAEMTEHWGAEMPGPFAGTRVLAITSGKGGVGKTNVVAGLAISLAKMGQRAVVLDADFGLANLDILLGLSPQYTLEHVLKGDKVLEEIIVEGPCGIRVIPASSGINELTRLDPAQELRLVQGLQRIAMDTDWLLIDTAAGIHDSVVKLLMAAQEIILVGTPEPTSLIDAYAMVKVVTSRDQAKPLWLLVNNAQGEEEAMETIEQIQAASKEFLGQDVWGMGAIPSDAH

SEQ ID NO: 83791 - protein, 226 aa, Unknown
  Obtained from environmental sample
  misc_feature (1)..(226): Xaa is any amino acid
MNNRQKTGDWGSISRSYHVQKTILDIVYKICRAVLLFGLCFLIVQPLLDKLSVSFMEQQDLYDSTVVSIPRHFTLGNYRLAGELLEFGPALLQSIIIILVSSLLQVSACTLAGYGFARYKFPLKNFWFMCVMLIIVVPPQTIMASLYLNFRFFDIFGLLRLITGDPANLLDSAASYWLLSATGMGLKSGPCIFLCSGSISAYAQEPSKRQRRAAAAIKLSEKYRPK

SEQ ID NO: 83792 - protein, 436 aa, Unknown
  Obtained from environmental sample
  misc_feature (1)..(436): Xaa is any amino acid
MGAGGLGDEGYLLVPDGSGALIYFNNGRQNQIAYNNNVYGWDDAMPRDAVINDNKAPFPAFGIQKNGNALLCVIEEGASYAGVRADVSGRNSSWNNVYPRFTIVHGAIIDISGRSDRAVYLYEKNLPAGEGITLRYTPCATDGYAGMANEYRSWLMRNYPSLGMRAENGVPIAIEIPGAVNKTQHRLGIPFDLPLKLTSHKESKGMIDDFAQWGWKNVRIKLSGWFNRSVDHSVPNKIKLIGELGSKKDFKNMLSAAEKNGYTIFPEADFLYMRDVKPFGGFNLYRDAARYVNRKRIEKYPYSFVWFGERIRWGKLSYIARPAYMMSLIDKFTRKAARLGLSNIAFRSMGAKLSGDYHEKRLVSREASMKMRQEKLAELSGKGTGILLNTGYAYAVPWAGFITDMAIDDQKFGITDASVPFYPMALHGLVPYTGPA

SEQ ID NO: 83793 - protein, 449 aa, Unknown
  Obtained from environmental sample
  misc_feature (1)..(449): Xaa is any amino acid
MSQLNKNAGRRARPPRKTAALAGKLLDKPITIPKGYEKRTGEELEAEHSSFAYIFVHNFLPVFRLLMAIALVALSAGYLCWRYIYMPIKAERIYKLGIERIEAGEYSRANERFVEAYKIHQKKPWFYTYARAFRDARQYTLAEEKYKELLNFTASKNKRGIPEKAAVLEYADLETNYIGDYQTADSIIRRNILDYFPMDKDGLLALGDNNLIWGEYDKDRLEDAREAYAKLIERYGRTDPLLERMLKYFIRTDDLGQVLALQNYFMFSEKRIISAATLAEMGGYLLDKRLEKVRGVPNEYLDQIGGIRQILLRAIKQDPMLPESYYHLARYYNYYENPTDERLTLEVAVRVFDFAKEESAKRIGYHINTLRRYAEVLINSKEFFPAEENLIKGINIYQNGLSRRLLTPSPEYGKLYADLGDLEFFVKDGGHADCSGLLQLQRTKRLGSS

SEQ ID NO: 83794 - protein, 320 aa, Unknown
  Obtained from environmental sample
  misc_feature (1)..(320): Xaa is any amino acid
MEVTFGNSFEGMGSGAQGYGRVQRFAQNGTQGTGEEETKLRPLGSDRAERPGQPRQLGRPEGADRIGAGGATDDTPSRAGRIDPSRARETREQDQTRGRTTATATIGRGKATQTDGANGTGKGTDKANGSPDAAGGKKAPSGDSMELSPEAKKMLEELKARDKLVRAHEAAHLAAGAGITKGGAQFTTQRGPDGNMYAVGGEVPIDAGAVPGDPRATLAKAQQISAAALAPADPSPQDRAVAAQARQMAAHASAEMMRNPEGASGTKGAETTEGATDTTDDATDGTEATITAGAASGPNGTNAPGGAETKNAANRLNELN

SEQ ID NO: 83795 - protein, 307 aa, Unknown
  Obtained from environmental sample
  misc_feature (1)..(307): Xaa is any amino acid
LSYRELSASEFPCGTLAFLARGSSGELPLLADFSPEILRFTDKGRVLGEVVIRYRFLGQEREAVRSVILAANNRNMVTEGDAAALAAFISPTSPETADYAKSIAGLARNDRRTGHNQNFQYAIWLLEGLRAGGVILGNTDKPEVQFPAETLSFRSGTSRDLALLFAGCLESVGISAAFVQMENDFLAAVSLNVNTSAAETLFNGTGKILIINDEVWLPLSMAAFNEGFTAAWTRGVKVLDETFKDGRQADFIMVEEAWAVYPPAPLPEQGGRVVRTDAAAAAKEVNRAIQLYIEQEIQPIIRQVQTQ

SEQ ID NO: 83796 - protein, 556 aa, Unknown
  Obtained from environmental sample
  DOMAIN (2)...(104): RNA polymerase Rpb1, domain 3
  misc_feature (1)..(556): Xaa is any amino acid
GVFGGIIDSGRAPETYLGQGGPYRRTGRKGNNRNIRGKACFYGEMPEDLPYINYELKDKELRALIEHVFKEKGSWVTVQMLDAIKATGYRYATVFGATIGVDDIVIPKEKAEMINKANKDVESIQKQRREGFITEEERYNRVVEIWTRANEELTSKTMQTLELDRDGFNSIYMMANSGARGSRNQIRQLAGMRGLMAKPSGDIIELPIRSNFKEGLSVIEFFISTNGARKGLADTALKTAEAGYLTRRLVDIAQDMVVNEEDCGTINGIAYSAVKQGEEIVEPLRDRIVGRFTLERVKHPITGELIIDVNEEINEELAAAIEDAGVESVRIRTVLTCEAKYGVCQKCYGRNLATNRTVEIGEAVGTIAAQSIGQPGTQLTMRTFHIGGVATKASEESRITLKYPVYIRNVAGTHLTLDNGHLLFTRRGHSIVNKVMNKYKIEKGDRLAAVDGKKINRGDVIIHRGGQDIVSSEIAYAMILKNNDEEETLYLIGPDQKIEIRNGSDFEAQIGTVVDAEKTIATFDPFSDPIIAEKGGTVKFEDIILGTTLISAESVM

SEQ ID NO: 83797 - protein, 326 aa, Unknown
  Obtained from environmental sample
  DOMAIN (1)...(69): Glycosyltransferase 36 associated family
  misc_feature (1)..(326): Xaa is any amino acid
VAGFDTDRQTFLGLYNGFDHPETVFAGKANNSVASGWAPIGSHHVKTRLAPGESKALVFVLGYCENPEDQKWASPGVINKAPANALLEKYGSPETADRALAALKDYWDSLLGKFSVEAEDKRMARMAGVWNQYQCMVTFNMSRSASYFESGIGRGMGFRDSNQDLLGFVHLVPERARARILDIAATQFPDGSAYHQYQPLTKRGNNEVGSGFNDDPLWLICGVAAYIKETSDFGILDEKVPFDNKEELAESLFIHLKRSFDYTVTHTGPHGLPLIGRADWNDCLNLNCFSKTPGESFQTTANFESGVAESVLIAAIFCYRPRFRHK

SEQ ID NO: 83798 - protein, 84 aa, Unknown
  Obtained from environmental sample
  misc_feature (1)..(84): Xaa is any amino acid
MITERAQVKSNYNRVRLIHCADGFGPPEVKRDSYNFNALASNMPIKAFKLFYNFGIPGAGYDSPLMTPKDVYKLNPRPYLIMYQ

SEQ ID NO: 83799 - protein, 292 aa, Unknown
  Obtained from environmental sample
  misc_feature (1)..(292): Xaa is any amino acid
MVVEEAGLFINGGGYREITLSSLSSADYQYLEDLLDHLNAKYSSHHVSFQLPSLRVSSFSLNLLEKISLVRKSGLTFAIETPTDFWQMAINKQVSGEDVVSILREAKKRGWKGAKFYFMVGLPLEGSSLKEESSSVEEEEISAFIEMVARQTRMNFNINIGTFVPKPHTPFQWARQISKEEAEGKLAYIRNRLKPQGHKVGIQDPLISIIEGIASRGDERAGAIFEEAYRTGCRLDSWTEFLKKEIWEELLKKNKNLIDDFLYKKETSALLPWSVFIQDYAKKFYFPEMEKS

SEQ ID NO: 83800 - protein, 179 aa, Unknown
  Obtained from environmental sample
  misc_feature (1)..(179): Xaa is any amino acid
VGPGEKRETLTLSTIHSAKGWEWKAVFLLSAVEGRFPPAYAARTEAELEEERRLMYVAVTRAEDLLYIMLPLGLIDRWSGALSAPSRFLADLPPGSGLAGLSENRRPPAPRRPWPDQLPVNTPAARKDFLTDLTAGQRVSHPVYGAGRVTEILGPRAVIDFDLFGKKNVIIQYAKLVKT

SEQ ID NO: 83801 - protein, 349 aa, Unknown
  Obtained from environmental sample
  DOMAIN (30)...(349): UvrD/REP helicase
  misc_feature (1)..(349): Xaa is any amino acid
MNSLFKDHEPEPPEPVKTQAAPPPDLAARLNPSQLAAATYEGGPLLIVAGAGSGKTRTLVHRVAYLVGRGVPPPAILLLTFTRKAAREMLDRAMALAGHRAGEVSGGTFHSLANALLRPTAHLLGYPDGFTIIDQDDAEALLARIRGDLSEIKKYKRFPQKGALFSLLSQAVNKDRPLAEIVAENFAHFQEYTPLLEKIAREYRDQKLKNALMDFDDLLTGLETVLRDHEDIRQRLAGRYDYILVDEYQDTNPVQARLTHLLGRDHQRVTAVGDEAQSIYAFRGASFRNIMDFPQIFPGARIMKLEENYRSREPIVTLGNHLIAQAGDATTRPWWPCPGPGQAPELKPA

SEQ ID NO: 83802 - protein, 350 aa, Unknown
  Obtained from environmental sample
  DOMAIN (1)...(115): Pyruvate kinase, barrel domain
  misc_feature (1)..(350): Xaa is any amino acid
VEIARLADGVMVAGGDLGVQLPHEQIPLAQKHIINVCRRAGKPVITATQMLESMIVNPRPTRAELTDVANAIFDGTDAVMLSGETSAGAYPVEAVKTMDKIACAVEQSNEFRKRMRNYHDECHSEVHNPKENLGIIMSRSGVEIAAAVKAKAIVTPTRSGNTARILSVFRPDEPIFAVTSDGRAERFMQLYWGVYTSISSKVDDSESMIQNTMKIVSETGVAGISDKVVLIAGLPLESPNMINNVRVVIIGTVLARSSAGGYANPDVVRAHGKIIHVTNPDEARKKIISSGGGEILICKTLTEDYTSIITMVSGIICEGVSEINEQKLRLINPTWSGYTHEGCRYKNSNR

SEQ ID NO: 83803 - protein, 303 aa, Unknown
  Obtained from environmental sample
  misc_feature (1)..(303): Xaa is any amino acid
VQEDGWALQCVPEALKTEALCIAAVQQDPRAFESVPDALKTEAVCLAAVQEDGYWLQLVPTARRTEAICLVAVLNDLSTQEYVPKNLKASVEAALKKAFATEALCLAEVQKYGMTLKFISAALKTEAVCLAAVQRSGGALEYVPEALKTEALCLAAVEDDWDALQDVPTALKTEAVCIAAVRQSSNANAFVPKRMWTEAVCLAAVSQDSRILEELPDSLKTEAFYLAAVQLNGDALFRVPEALKTEALCLAAVRQDGRALSYVPNALKTEALCVEAVKQDKYAMKYVPYRMKDAVKPLQKKGL

SEQ ID NO: 83804 - protein, 142 aa, Unknown
  Obtained from environmental sample
  misc_feature (1)..(142): Xaa is any amino acid
MGEHNIVSFGGVGDGVFDNSNAFRTALNTIKEAGGGILRVGEGIWRTGPLEIFSRTTLLLDEGAVISFIPEPARYPPVWTRWEGFECYAMHPCVFAVGQEDITIRGKGAIDGNGQAWVDAAREKKSGQQQRPQTLEKWPWPP

SEQ ID NO: 83805 - protein, 63 aa, Unknown
  Obtained from environmental sample
  misc_feature (1)..(63): Xaa is any amino acid
LICLDLYQAISEERPYHSARNHENTMSILYEMADMGKIDRDISKDLDTALAPYDRKDIPPPNQ

SEQ ID NO: 83806 - protein, 260 aa, Unknown
  Obtained from environmental sample
  misc_feature (1)..(260): Xaa is any amino acid
AAENPQEEPVVEEVTQESPVDDDEDIVIQEQLVIEDVSQEEPQVTPPDAGETPQEESVAEEVSEEESSPPAVEETPQEEPVVEEVTQESPVDDDEDIVIQEQLVIEDVSQEEPQVSPPDIGEPLQEGPVAEEAPEEESSPPVVEEAPQVPPPPVIEEVPKAPPPPVVEEAPKVPPVVKHTINRPRIVKELFKEILINNGRKEEDYKDLVLQGKLSAQMLKKYTFDRSDLSRRAGIENDILLPYTIITPEMYDWGLENIKL

SEQ ID NO: 83807 - protein, 280 aa, Unknown
  Obtained from environmental sample
  misc_feature (1)..(280): Xaa is any amino acid
VCGNNQKASQAEIEANQIVEIRKAEAFQKVGEKKAESEKNVGIAEEKSKQEVQEEAKLTKTKEMAVFEVATVRKAEIEKKAVVVNTEAQKETAIIKAEGERQSVIVKSEGDRQSVIVRSEGEKISAENISTAIKVKGFAEADVIQKTKTAEAEGIKATTLAQAEGEKAMQLASVTAQKELAAAIGENQGYQQYLITIRQVEAQQAIGVEQAKNIGHADIKIISNAGTIEEGISGATKLFGSQLGQNIAATLEGLAQTDTGRAMLDKILAKGGSDKGDKKG

SEQ ID NO: 83808 - protein, 131 aa, Unknown
  Obtained from environmental sample
  misc_feature (1)..(131): Xaa is any amino acid
EYVFKVLAQDILGNAAFRSLRVSLSQENEEGLSDVFNAPNPMKKNGTTFYFKDLSGDRRISSVRIKIFDQNGKLVKTIENAISGVTHWDGKDSRGRLLANGLYHYVVHSTVQSENGSRKTFEKKQKLVISR

SEQ ID NO: 83809 - protein, 163 aa, Unknown
  Obtained from environmental sample
  DOMAIN (44)...(118): HAMP domain
  misc_feature (1)..(163): Xaa is any amino acid
MRYRLRSKLALFTIALVLLVDLLISAPLFFMIIKTQQETLLKSLLVISAAALAFGVFGALLMSSLLLGTIRKLVKHVELIRDTENRASLANQEIKISGKDEVAILVKTINEMTQELARAAASVYDLNIGKEIQIKFIPLDADKEGNKLNSGLKTPKTPFFVPA

SEQ ID NO: 83810 - protein, 355 aa, Unknown
  Obtained from environmental sample
  DOMAIN (51)...(161): PCRF domain
  misc_feature (1)..(355): Xaa is any amino acid
MQLESRSAQDGFWDDAGAAQKVLKSIKELKRVVEPWDKANADANDIYELYGLASEEGDKATLADLCGQAAELEKEVARIEFIRKMSGEDDAADAIVTIHSGAGGTESCDWTEMLYRMYARYMERKGYSYNMLESSPGDEAGLKSVTLEVKGEYAYGHLKAETGVHRLVRISPFDSNARRHTSFSSVYAYPIMDEIEDYELDEKDIRVDTYRSSGAGGQHINKTDSAVRMTHIPTGIVVACQNERSQIKNRSTALKILKARVRQHYKEIEERERESKQTEKKKIEWGSQIRSYVLHPYNMVKDHRTEAETSNTATVLDGDIDMFIESVLVTKLKKRIRKLPTQTIPVDLILEFPQW

SEQ ID NO: 83811 - protein, 263 aa, Unknown
  Obtained from environmental sample
  DOMAIN (1)...(262): Phosphoglycerate kinase
  misc_feature (1)..(263): Xaa is any amino acid
MIKTVKTVDLKGKRVIMRVDFNVPMKDGVVQDDTRIVAALPTIKYILDQGAKTLTLMSHLGDPSKDAKKAKEKAEKDGKTFDEAAYIKGKHRMKPVAEYLAKKLGKPVIFAGEDGCYGKKAFIESQPDGSVIMLENTRFHKEETAKDAADLDKLAKELATYGDVFVNDAFGTAHRDHASTASIAKFSKVSVAGFLMEKEVNYLEPYCHQPPKTADCDYRRGESFLQNRGAGKPVEKFSRAGHWRRHGLYLPQSSGAQDWQIAC

SEQ ID NO: 83812 - protein, 69 aa, Unknown
  Obtained from environmental sample
  misc_feature (1)..(69): Xaa is any amino acid
MTQFRGAFTALITPMKETGEVDYEGFRKLIDFQITEGIDGIVPLGTTRGNPPPLDEDEEDILSRPILSL

SEQ ID NO: 83813 - protein, 329 aa, Unknown
  Obtained from environmental sample
  DOMAIN (147)...(223): Helicase conserved C-terminal domain
  misc_feature (1)..(329): Xaa is any amino acid
MTDSAETALLAPERLQRGDIFADGEASSAPPPLVVIDEAHCISQWGHDFRTSYLEIAGFIKSIKPRPITAAFTATATPKVKDDIERLLALKKPVLINTGFDRPNLYFEVQKPGDKKAALLECLSKRKKSSGIVYCATRKAVDELYITLPRYGFSVTRYHAGLEDGERRGNQDDFLCDRKTIMIATNAFGMGIDKPNVRFVIHYNMPKNIESYYQEAGRAGRDGVPADCVLLYSGKDVHINEYLITHNEEDAEPNPELQAHNRELLRQMTFYATGNECLRRRLLAYFGEGSPSYCGRCSVCLAEREDTDVTLEARKIISCVYRLKERGRS

SEQ ID NO: 83814 - protein, 96 aa, Unknown
  Obtained from environmental sample
  misc_feature (1)..(96): Xaa is any amino acid
MGTISVEYSSNLYWLGRYAERAYTTLNTFFNYHDKSLDKDKNAYKEFLENLDIRDKYGDHHRFIQGYLYDDADCFALSSTLRFAHDNSANLISGKP

SEQ ID NO: 83815 - protein, 314 aa, Unknown
  Obtained from environmental sample
  DOMAIN (11)...(313): DctM-like transporters
  misc_feature (1)..(314): Xaa is any amino acid
MLLEPPPHFHPILPCLAISALLYCYLGNVLPQGMSHRGFSVARIVNHMYLGTEGVFGTALEVSSTFVFMFILFGCVLEKTGIGRFIIDLSLALAGWASGGPAKVAVVASGIMGTVSGSSVANVCTTGMFTIPLMKSVGYRPHFAAAVEATASTGGQIMPPVMGAAAFIMAQFLGWPYIKVAIAAIIPALLYYTAVLIQVHFEAKRLGLSGIARENLPSVWHLLRTKGFLLLPLAAIIYFLVAGYTPLMAAFWGILVSIPLSYLSRETRLTPKKLLQALESGARSSLSVACACACVGFIVGTGTLTGLALRIAGG

SEQ ID NO: 83816 - protein, 79 aa, Unknown
  Obtained from environmental sample
  misc_feature (1)..(79): Xaa is any amino acid
MKYLLDTHTLIWSAQDTKKLSKKAKNIITDSNNEIYVSTVSFWEIALKTSINKFSFRDLNINDFPELSQKMRFQKYRIR

SEQ ID NO: 83817 - protein, 339 aa, Unknown
  Obtained from environmental sample
  misc_feature (1)..(339): Xaa is any amino acid
FQAPLGAYGQYNELYHELRLLGMFAADFGEALCKMSAYIPDDNPQNPADKERFRYSFRHNGEWGFVFFCNHVRHMHRPTFLQVAVTVPKLGLELPMFDVLPGQFGFYPFNMPVQNGYIKFAQATPLCVINKTTILYGADMDATGDVLLISRDEALCAYKITGEQDHLIISNNPIIQDGNEINIFATKDIRLKVFPSWKNTPHGLEYKGMDGVFAVYEKNIAHVEVKCNVKQMSETRYRLQFIGLSNNEHDCECHINYTAESAKAYVNGRFIMDDFYKDGKWQINLRRHNFPQELEIELNPLRINEGVYLEAWPPMSNGVECRLNGVSVKVASSFRFPLG

SEQ ID NO: 83818 - protein, 330 aa, Unknown
  Obtained from environmental sample
  DOMAIN (120)...(144): 4Fe-4S binding domain
  misc_feature (1)..(330): Xaa is any amino acid
AELVRMAVKNCAATRRFRKILAVNKRVLVIGSGVPGIQAALDCADGGIPVVMVEREATIGGKMAKLDKTFPTVDCSSCILGPKMVDVVQHNDITLHACSEVEDISGYVGNFTVRIRKRATYVDWKLCTGCGLCMEKCPSKKTPDTFNELVGTTTAINIPFPQAIPKRATINPEHCRHFTKGKCGVCEKVCPRGAIRHDMQDEIITEEVGAIVAATGYDLMDWKVYEEYGAGRYPDVITALQYERILSANGPYGGHIKRPSDGREPKIVVFIQCVGSRDRSVGRPHCSGFCCMYTAKQAVLTKDHIPDSKSYVFYMDIRAPGKGYLGRICQ

SEQ ID NO: 83819 - protein, 84 aa, Unknown
  Obtained from environmental sample
  misc_feature (1)..(84): Xaa is any amino acid
MKLDYVLPSDIGYMRFHGRNTKMWYQGNNETRYEYLYNENELMEFVEPIKYLLQRARVVQLFFNNHAKAYATINARKIALLLKE

SEQ ID NO: 83820 - protein, 81 aa, Unknown
  Obtained from environmental sample
  misc_feature (1)..(81): Xaa is any amino acid
MAASKGEAKSDLKGYEPRLKKIYREQIAPELIKELGYKTPMQTPKLEKIIVSMGVGEALQNKKLLDAAIDDLPDNRLAIVC

SEQ ID NO: 83821 - protein, 73 aa, Unknown
  Obtained from environmental sample
  DOMAIN (6)...(55): Ribosomal L29 protein
  misc_feature (1)..(73): Xaa is any amino acid
VQDSTFSELKPKRDELSRRYMDFRFQWVIGHVDNPLQKRELRRQIARLNTMIRQHELDEQRSVSQKSDGQKKA

SEQ ID NO: 83822 - protein, 318 aa, Unknown
  Obtained from environmental sample
  DOMAIN (29)...(318): Amino acid permease
  misc_feature (1)..(318): Xaa is any amino acid
NDRFGTRGGGEAAATAAPPDMKKFSTFEGVFLPTILTIFGLVIFMRATFVTGHAGIYQALGILIAAKSITTLTGLSISAIATNTEVKGGGVYYLISRSLGPEFGGAIALTIFISQSLSIPFYLIGFAEATVLTFPELDLYFDLIAYAIFAATAMLSLRGAAVVVKAQYVVMAILTLSILAFLTGAVIHFDLKTFAENAGPLEGSKYTFWLLFAIYFPAVTGILSGVNMSGDLKNPARSIPRGTLIAIGVAFLVYAAEIILCGGAGQRSDLTDRPYESLLHLWDPVTAFVVVPGVMAATLSSALGIILGAPRVLQSLPQ

SEQ ID NO: 83823 - protein, 136 aa, Unknown
  Obtained from environmental sample
  misc_feature (1)..(136): Xaa is any amino acid
VYNNAAGTVNISGGTVSAIGGRAVHNYGTGKITVSQDTATPTLVTSANTSDTQGTIVLSSSGTATAARLEMTGGTVENTSTTTGNAIRNSSTGAVTISGGTVRATGASTYSIYNSSTGVVTVDPTATIEGARYPAP

SEQ ID NO: 83824 - protein, 84 aa, Unknown
  Obtained from environmental sample
  DOMAIN (10)...(81): ACT domain
  misc_feature (1)..(84): Xaa is any amino acid
MEPAFTGEQDTLIIAHNDVPGMIALVSTHLALSGANIGNFRLYRPHKGFQAIMTIELDGGVKKPVVDSLRALPDVISVVYMRVN

SEQ ID NO: 83825 - protein, 75 aa, Unknown
  Obtained from environmental sample
  misc_feature (1)..(75): Xaa is any amino acid
EKGGGDDGRVQVRVINGNAATAAKVRVLITSSDGKQNWTTVGVSEDIIDASRAALVDSIEYKLIDDIERRFKAYL

SEQ ID NO: 83826 - protein, 141 aa, Unknown
  Obtained from environmental sample
  misc_feature (1)..(141): Xaa is any amino acid
MGANTKYKDSVFSFLFSDPELLRELYGALEGVSLPADIPITINTLRDMLFKDRINDISFAIGDKLVVLIEHQSTINPNIAFRLLIYIAKIYEKIIGKKNIYASRLVRIPRPEFFVLYNGVSPYPDEELLKLSDAFSADLSC

SEQ ID NO: 83827 - protein, 162 aa, Unknown
  Obtained from environmental sample
  misc_feature (1)..(162): Xaa is any amino acid
MKKRNSKNRMVTPQANGSTMKEPLPPALLSAPGQRPAVTTPAPAVRAKNSNTVMANEMTHPANREIAVQFDSVSFAYGDVPVLENVSFHIHRGEFAALVGPNGSGKTTVLKLILGLEQPAAGRITLFGAAQSAGNGQTVWRTGLGYVPQHPRLIIPSLFQCA

SEQ ID NO: 83828 - protein, 342 aa, Unknown
  Obtained from environmental sample
  misc_feature (1)..(342): Xaa is any amino acid
LDDKLQKKITIVSGNRVSLEDVKKLNIDKCTQVFLFGEPHEDDHDSKNVECLGIIKDIISESDPEKNIRCHVLFNHHLTFAAIQRHEIPGIRKNIDFVPFSFYDMWAQKVFVANSYNEGEVTYKPLDHEPITEGSDKRVHLVILGMSNMGVALAVQAAQICHFPNFITKGIKTKITLIDENADSEMAGLKFRLRHFFDEIDYSFQSFTKIKRYSNASMKKFTDLEFEFIEARFEDDEVQRLIEKAASDKTSFLTIAIAQENSSDALAAALCLPSSVYESEVSVLVRQENSYAIVSMLSSEERGYQYRKYRNLRPFGMNQNSYDYKYTDELLTMMVNTPIKYP

SEQ ID NO: 83829 - protein, 564 aa, Unknown
  Obtained from environmental sample
  misc_feature (1)..(564): Xaa is any amino acid
MIRVGDNSDADLYIGGNNITVNENTLLRLRYNKETGEFQIDLTSGSIGLVTDPEGNDVSLNILGRQVTAKPGTALNAAAGNTGMAVHVSEGAATIPEKNQNRESAGREPAARELGAGAAVTMDSGGSIRSAPAAFVIQPKPNALYRKSGNEPLNIAFSWNRINLQPNETLRLEIAEDQYFSNSVRTLNGLDDLAQTSLGAGLWNWRLTYNGAVLDSGHFTITDAGGIELLSPVRNSQFFYETEAPKLYFQWSQTDDVSYYIVEVDVSPEFRNPIIKRQTTAASFFDSSLKEGIWYWRVTPVFSQTHANADGVNPPPSAFRIVKSKEPQTPSLTFIEEPAPSSAPASVPAPAPVLTTAPTPAPEATPAPAPEPVPALEPALTPTPAPAPGSTPTSDPAPKPAPVSAPARPSQPKRITLESPSNETTLPGLTALRQQTVFRWTSDEAVAKSRFVLSHNSNPLTGRAVIEIIDPNRTIRIDSLEEGVWYWTVEAQTPEGINISAQTPRRLQVLPIPLLPAPSGLQPAERYRIGIEELKKITVNFKWAQVQGAKRLYLHPYQTRHKAG

SEQ ID NO: 83830 - protein, 308 aa, Unknown
  Obtained from environmental sample
  misc_feature (1)..(308): Xaa is any amino acid
SARTKHDYNYNYQNLPPFVKGELSLHTWNEDRRNEILELFRSEVYGRIPDESSLSVSQRVADTSPGFMDNRAARKIIEITVKRKDREFTFPLYLFIPNGADKKPVPVVLTIVNRELSDADPSRKSLSPFWPAEMMVSRGYAAAAVITHEIAPDYEENFTTKFHRLFPEYVTNHPADAWGSITAWAWGMSRAIDYLVTDPAINNKEIAIAGHSRGGKTSLWCGAQDKRAALVISSCSGCSGTAITRGKTGEHIKEITDRFPFWFCPNYRKYANNEDIMPFDQHLLLALIAPRMLCISDRSFDSWCDPRA

SEQ ID NO: 83831 - protein, 313 aa, Unknown
  Obtained from environmental sample
  misc_feature (1)..(313): Xaa is any amino acid
GHSQWYGVREFMRGKDFAGCKPIDFAKIKENPKLRILQEASPQETVALGLVIMDEAKKNGFVLNPKMGTLSQDLPKCREFIAKYQKCIAASDSYTIGRKTNGTVVVANNGKYGRSDTGNWRDIVTVAGSDSYIVGLKADGTALVFRFGIFFGFGQDTVTWQDITAITVNFFCTVGLKKGCTAVVVGNKEFGSDNSIDNWRNIAAIAVSGNRTAVGLKKDGTVVAIGYNIDGQCDTGSWLDIVAIAAGDHHTVGLKADGTVEAVGRNYDGQCDTGDWRDIVAITAPCSNHTVGLKADGTVVAVGDNINSANLTL

SEQ ID NO: 83832 - protein, 298 aa, Unknown
  Obtained from environmental sample
  misc_feature (1)..(298): Xaa is any amino acid
GYRENRRRADTQPTQVTQTTQITPSGQETQNTQITQDAQPAQTTENTQPSESGQLTQSSSPGESPQTVTTQESGSSGSAQDQASVHGASQTLSTQGSSGTNASSSGGNIPLPFIIGIGLLLLLLLIGIIIFVSRRLDKSPNRILAKAAAPGPSIPVQSAAKTGPVTASRKPEQVSKPVQASKTDQVLEYPPPKMKPLPKDKVYDENIYGNGGPLLLNLFVEDQNTAIGKRNIHSLKPGYSFTIGGGKSDFLIFLVPIPPRIADVSYDGRNCAFIPRKPQYFPDIRSQAIQNCIGKLSG

SEQ ID NO: 83833 - protein, 270 aa, Unknown
  Obtained from environmental sample
  DOMAIN (7)...(199): 7TM receptor with intracellular HD hydrolase
  misc_feature (1)..(270): Xaa is any amino acid
MPKKDLRNIIGTVLVMLLLYLLFVVLCGRIIIGKKLNNSERYLLASITGFYIIGSVLLFNFLPGQNNIPISLLVPTALFVMLLAVFMGTRPAIIMALALPLASYFSGGFDNYSYIFALISGIAASTVLHNAKDRMSLIKAGVLIAAANSTAIVVILLLQKASIYDYPAMIFGAVLNGIVSGMLTLGFLPPLEHALNAVTPFRLMELADLNAPILRKLFTAAPGTYSHSLMGANLAEQACQDIGANAMLARVGAYYHDLGKIDNPVYLKKT

SEQ ID NO: 83834 - protein, 111 aa, Unknown
  Obtained from environmental sample
  misc_feature (1)..(111): Xaa is any amino acid
MRGLNLNDFIHYLNSVVILGEIIVQQNYDVQLFDKQEKKYDGISCNKKIQIKTTFKNFLSFPYGKENIPDYYIGIKLFENGDFEEIYNGLGINIYKLIENRKKPKNVLAIN

SEQ ID NO: 83835 - protein, 152 aa, Unknown
  Obtained from environmental sample
  DOMAIN (69)...(106): PQQ enzyme repeat
  misc_feature (1)..(152): Xaa is any amino acid
MRQKLCLLACLVLLCGCSRNGDWVQFRGEGGRGVSSSRIAPPLGLRWKIKLQESGERLRSLNPPVVIGDTIYFGSDDGNFYALDVESGYMRWVFKSGAEINSIPYADKEQVYFGSKDGKLYALSRETGEEIGISDSKPDQFTGSAVSADLSA

SEQ ID NO: 83836 - protein, 214 aa, Unknown
  Obtained from environmental sample
  misc_feature (1)..(214): Xaa is any amino acid
MRLVIHNAKVYLERGCFAQAVLIHDDKIAAIGTNEEIFSKARGAEKIDAGGGLLLPGFNDSHMHLYAFGRNKNRIQANGVTSVEELIVRGRDLIDRIKPPKGSVIAGTGWNQDIFTGEKRPPNRHELDRISTEHAVIISRVCGHSLCCNSLAMKMAGITRDSARTESGYIELNENGEPLGIFGEGTALYKIRGIIPSWQPETIEDHLCTLCVMR

SEQ ID NO: 83837 - protein, 91 aa, Unknown
  Obtained from environmental sample
  misc_feature (1)..(91): Xaa is any amino acid
VDNPSHGKARVADRDDLFRAESVERPRLPTLSIRSSLKPLPYALSQIITGGIARAGVGAAVTLFVMIVPLVMFIFAQSNILQTMASSGIKE

SEQ ID NO: 83838 - protein, 142 aa, Unknown
  Obtained from environmental sample
  misc_feature (1)..(142): Xaa is any amino acid
MKFTPTIVSAEEAVKVVKTNNRIHLHSVACTPQKLIQALCERGRRKELANVRLQHLHTEGPAPYASAEFEGVFQLESFFVGHNVRKDTQEGYADYIPIFLSETQRLIREGYCRPNVVMVQVCPPDKHGYVSLGTSLTLLWRR

SEQ ID NO: 83839 - protein, 307 aa, Unknown
  Obtained from environmental sample
  DOMAIN (103)...(222): CBS domain pair
  misc_feature (1)..(307): Xaa is any amino acid
MAKIIDEVSRTFSEYLLIPRLSCADHQVGNVSLCTPVTRFRRGAGETPRFSLNIPFVSASMQSVSGPEMAIALARQGGLAFIYCSQTIEAQAAMVGKVKAHKAGFVPSDSNLRPDATLADAVALSKRTGHSTIPITDNGSGNGLFLGILTDKDYWEFDDDLSRPVREFMTGRENVILAHVGISLHDANVQLHKCKKECLPILDAKEHLHSLVFKKDYVDHINNPHELLDRQKRFAVGAAINTHDYKERVPALVEAGADVLCIDASDGYSEVQRDAALWVRERYGDAVGIGRGNIVHRDAFRYLAEEA

SEQ ID NO: 83840 - protein, 171 aa, Unknown
  Obtained from environmental sample
  DOMAIN (3)...(155): Fumarate hydratase (Fumerase)
  misc_feature (1)..(171): Xaa is any amino acid
VDRLGIYSRLKRDGNNSVLFRRWMQSSGAGESFKPSDGLEAIIPFVYDIVSGPGINACPPLLVGIGLGHNIENASVLSKKAILRPLGTKHPHLKGAELEKQLTDGLNSLGMGAQGLRGNQAVMGVHIESSTRHTATRACAVNVSCYTLRRGIIRLNSDLSYELTGFKGAKI

SEQ ID NO: 83841 - protein, 291 aa, Unknown
  Obtained from environmental sample
  misc_feature (1)..(291): Xaa is any amino acid
MIAKLFFKLALDLYPSIDQPIFTVFTRFPGAGPEDIERNVTARLERALSSSRRLVNMTSNSQFETSNIRLEFEYGTDMDKVVNDTQVLLNRLVNSLPDGVQTPVVRRFDASAMPIMRLVVRGNYPPDQLRIFAEDEIQPSIERIEGVAAAEVTGGTTQIVKVEVSLNRLAAFNLTLNDITNSLKGQSVLSSGGNLRRGTREYQIMTQEELVSIDQIKRLAVKTVNLSGAGQPPLYHSIRLEDIADVSLGYNDNASRVNVNGQSGVYLQVTSESGSNQVKVSDRVQAALADI

SEQ ID NO: 83842 - protein, 385 aa, Unknown
  Obtained from environmental sample
  DOMAIN (13)...(380): tRNA synthetases class I (I, L, M and V)
  misc_feature (1)..(385): Xaa is any amino acid
MEKQYNPAAVEDRLYADWLKKGRFRADPSSPKPKYSIVIPPPNVTGVLHMGHALNNAIQDILIRHKRMKGFEAMWMPGTDHAGIATQNVVERRLAKEKRNRHSLGREAFVQEVWKWKEEYHATITTQLKKLGSSCDWERERFTMDEGLSASVRKVFVQLYNEGLIYKGKYIINWCPRCQTALSDEEAEHKEIGGKLYHLRYPYEDGSGYAVVATTRPETMLGDVAVAVNPADERYKEIKNKKIKLPLTDRVIPFIEDGFVDREFGTGAVKVTPAHDPNDFGMGQRHNLTPLAVMDGAGKMSGDIPEKYRGMDRFDCRKAVIEDLTAAGLVEKIEEHSHAVGHCYRCHTIVEPYYSDQWFVRMKPLAEPASRGGGKDEGLSPSTQK

SEQ ID NO: 83843 - protein, 158 aa, Unknown
  Obtained from environmental sample
  misc_feature (1)..(158): Xaa is any amino acid
MGIRTAWSEAQGGFIPPGANVQGVRGKARPWPRGSLVDNQVAFFECNLVLAAAGTALRFLLPLAALHCRGPIRFRGDKRLFERPLAPLLAALTACGASWEAEDNGGILVPPAEVPSRLDLHIDGSLSSQFAFRLAMAMAGLPGGGSLNWTGHPASRGY

SEQ ID NO: 83844 - protein, 512 aa, Unknown
  Obtained from environmental sample
  DOMAIN (402)...(511): Response regulator receiver domain
  misc_feature (1)..(512): Xaa is any amino acid
MIAEEVVYGDTAVIAREKKKFEALAYWYESILDAIPFLISVTDMDMKWTFINAALEKDLKLKRKDIIGKHCSYWGFDHCNTNDCSIVRAKRGLSQTYFKKGNASYQADVQILMDINGERMGYIKLVQNITMLEQMTKQQAEAEAAVRAKSAFLATMSHEMRTPLNAIIGMTTIGKSAAALERKDYCFSKIEDASQHLLGVINDILDISKIEAGKFELSPEEFSFEKMIQRVVNVVNFRVDEKRQKLTAHIDKEIPQTLVADDQRLAQVIINLLGNAVKFTPEEGSISLDARFLGEKDGLYTIEIAISDTGIGISPEQQKRLFNSFQQAEISTARRFGGTGLGLAISKNIVEMMGGTIGVQSELGKGSVFTFTVQAKKIVHVHDAADNPPGVKKDIAGLFAERRVLLAEDMEINREIVLALLEPALLEIDCAENGAEAVRKFSEAPQKYDLIFMDVQMPEMDGYEATRRIRALNLPKAKSIPIVAMTANVFREDIEKCMEAGMNGHVGKRVEF

SEQ ID NO: 83845 - protein, 175 aa, Unknown
  Obtained from environmental sample
  misc_feature (1)..(175): Xaa is any amino acid
SIRAVGAKAGKVKTLPTHFLRARVKSLQDEIKKSPAVEKESLKQGIFDVLIPKITLPLLKDDIKRIETAAQGLSAIIESKRFAEISKQFVQIMNQFLDEAGHFEEAIKKQYATKLRQKEEELSRRMGRKIKLDPFQDPEFAAYFNQSIQALKANYQAAADQVREEAQNLFKANEA

SEQ ID NO: 83846 - protein, 380 aa, Unknown
  Obtained from environmental sample
  DOMAIN (282)...(315): Tetratricopeptide repeat
  misc_feature (1)..(380): Xaa is any amino acid
MYIEDDWSDLPELLERVQEFLELGLIDDARDLLDKYRTVFQDYWEYHYLYSRVYAEQNMPRKAVSCLIAGLRLERDNVDCLLGLFYAFAMMNMVRRGGHFLLEAHRLHPDNEPVYSTLIWYYTEINEPEKAVACFERAKALNSENPDTYRNGGLAFDRLGRFEEAAACYKAALQISPNFEEARDLYADHLIFTGKTDKAVALFEEALRASPKNVRYMSKLIYCLSQCGDFNKAEALAKHAIALYPNSATGYLDLAYVNLNTGRINEALENADRAISVAPIDAEGYRVKAIACSERGDHEAAEALFEKAVALDPGNADAMRDYYQHLRTARKHEQMIDAVNKVIKLEYPYCTEDYGFLADYYREKKANAQGFRFLRFSYDS

SEQ ID NO: 83847 - protein, 79 aa, Unknown
  Obtained from environmental sample
  misc_feature (1)..(79): Xaa is any amino acid
GYRRDRTYNAVRRVFPDVDAVEMEGAAIAHTCCLFSVPFLVIRALSDIAGTQSPVSFDEFLPIASKHSSKIVIRIIKKK

SEQ ID NO: 83848 - protein, 184 aa, Unknown
  Obtained from environmental sample
  DOMAIN (1)...(85): Response regulator receiver domain
  misc_feature (1)..(184): Xaa is any amino acid
LASNGEDAVEKVKAVEPVLAFLDIMMPIMDGFEAAEYLRSLGYKIPIIAVTATFLPEDEEKCKKSGINDVLTKPIKFMEIKMMLEKWLVPEREPQAFDPMPAVPKASAASGPEIFNAEEMLGAFLNEVKVVLPLLSRFIERTSSQLENFPVLKAARRMGNCPPQRAYNKRIGPYHGQRGTGQSA

SEQ ID NO: 83849 - protein, 300 aa, Unknown
  Obtained from environmental sample
  misc_feature (1)..(300): Xaa is any amino acid
GDGERYTIRLSYRDNALSYSISLGLSLSLNPSFYSSMKRIELAYRAQLLSYENASKQLEIQVIKRFLNLKTMGANVSNMQESLDLALQKMNNDRIARANGLLSELAWLNSQLSAETARYNLLTAQNSYKNSLGEFLALLGIDEGTNVILNGTVEIAQLNLEPEKLILEYLPKRPDIMAQRQVIERLELSKNITTNNSRSPSLSLSTQWRGSPGTGGLSAPFTDSLSGSLSLSIPIDSWIPGTRQNQNIKAANTEVEKAKLDLQNTETQAKTQIRSLVSTLTAPGRVWKSPAFVYRLHSAP

SEQ ID NO: 83850 - protein, 403 aa, Unknown
  Obtained from environmental sample
  DOMAIN (18)...(332): RecF/RecN/SMC N terminal domain
  misc_feature (1)..(403): Xaa is any amino acid
CGGGTCSKIRDELHADRKRLEETNERIADTHSEIAEIEQKGKALTAELEKLEKDIKKRSGDVAGKQEIIKKRTAELGKVQEALDKIHLELVQSETEIKNIQENFRETHSRDLMEFEERVFTITAHPADLREKLAQARSQMKDLGSVNLMAPEEFAETKERYEFLSSQMADVLKARKDLEDLTTEIRTESSELFIKTYNRIRKNFHNMFRRLFGGGRAELQLSDNNHVLESGIEIFAQPPGKKLEHISLLSGGERSMTAVALLFATYMVKPSPFCLLDEIDAALDEQNVGRFVHLLNEFSDSSQFIIITHNKKTTSGAGTLIGVTMQESGVTKVISARFKQGELDVADSPPPQTELWDADGKFEEEDVAPEAGRELPVGVNDPKKVTDAQLRPIRSRTTNETNQ

SEQ ID NO: 83851 - protein, 226 aa, Unknown
  Obtained from environmental sample
  DOMAIN (152)...(211): TOBE domain
  misc_feature (1)..(226): Xaa is any amino acid
GCCGAGLVPSQVFLFDEPLSNLDAKLRVQMRAELSGLHLRLNATIIYVTHDQVEAMTMASKIVVMKDGRIQQIGTPLYLYNNPTNKFVAGFIGSPPMNFLTVRVLEEGSSIVLDEGSFKVKADPSHVPHLKSYVGKEIFFGIRPEDMNYAESGGDNSFATKVTVVEPLGADIHLWLATGMQQPLVARTEPNHVFTVGETARFIPKMEKARYFNRENEEAILPGPSK

SEQ ID NO: 83852 - protein, 204 aa, Unknown
  Obtained from environmental sample
  DOMAIN (31)...(198): DEAD/DEAH box helicase
  misc_feature (1)..(204): Xaa is any amino acid
MIIDENHPFSSFGLSESVLKAIARKGWTAPSSIQSIALPRLLADEGHCIVKARTGTGKTAAFGIPLIERLTQAGQSPRALILAPTRELALQVSREIASLVTGHYPRVTAVYGGASIRNQILDLRRGTEIVVGTPGRVMDLMERKSLDVSAVDWFILDEADEMLDMGFFEDVEKILAALNDAKGNLHLPARSGQVPCELTEPAAQ

SEQ ID NO: 83853 - protein, 301 aa, Unknown
  Obtained from environmental sample
  DOMAIN (143)...(254): Domain of unknown function (DUF955)
  misc_feature (1)..(301): Xaa is any amino acid
MTDWPRRSIGRQVRLADKMQLEKDLQWLDMFPVNAMAKLGWIEKFRDKILKLDALLRFFAIASPQRWETIWGHELQAAFRKKDSSPKDAAIISAWLRKGEINAQQQSCEPFDKQKFRNSLAEIRSLTAIEESKVFVPKLKSICAASGIAVVFVRALPKLGIYGATRRLNDKYIMQLSLYRKSNDQLWFTFFHEVCHIIKHSHGELYIEGHGQEDEKENEANAFARDMLIPPKELSNFLASTFNPTLPQVKRFASQIGIAPGIVVGRLQHDKILPMSWGNDLKFDMSGQVEGVIYILFNESV

SEQ ID NO: 83854 - protein, 189 aa, Unknown
  Obtained from environmental sample
  misc_feature (1)..(189): Xaa is any amino acid
MTTEQMWQISGMHLAPYIQVATHLIGKSREGGGNMFRHQLDTMGILIDYGYVNSVLLKASLVHDVLEDIPDFNHNTLLSIDTESPAVYNLVLEVTRKQGETKPDFLTRIYETGSFDAKTLKVADRISNMISLGFVNNLAFVERYLNETEKYLFPLAAHVNNYMLIELTDLVKTKRKLLEDINTNDKTIR

SEQ ID NO: 83855 - protein, 307 aa, Unknown
  Obtained from environmental sample
  DOMAIN (14)...(303): Alpha amylase, catalytic domain
  misc_feature (1)..(307): Xaa is any amino acid
RLIARLVEDRVAYQIYPRSFQDTNNDGIGDIPGIISHLDGIKELGAGIIWLSPVYKSPDADNGYDISDYYSIDPKFGTMADMERLFTEAAKRDIKVIMDLVINHTSDEHEWFQRSREPSSPYRDYYIWRPGKTAPSGKRLPPNNWTGFFMGEVWEYDEKSGEYYLHLFDKKQPDLNYKNPRVIEEIKNILRFWLDKGAAGFRCDVINVLYKSNLEDGRKSMTVCGIEHYKSQEGNHAILRELRRDVLDHYDCFTVGETVMVDLDEAKLLCGESRKELDILFYFEHLEIDRRIARFIPKKFRARKLLE

SEQ ID NO: 83856 - protein, 507 aa, Unknown
  Obtained from environmental sample
  DOMAIN (18)...(236): Bacterial extracellular solute-binding proteins, family 3
  misc_feature (1)..(507): Xaa is any amino acid
MLTEEEHLYIQNTPIVPIVGEFNNYPVCFYDTYTRKWEGIYFEALNEISRLSSLTFELINDEKTKSPDLIQMLENGKALITPELFQIKEYEGRFLWSEIPILKDNFAFITKSDSRNILTDEVFFLKTGVRKNSVYSEVFNKIFPDHRNLSEYETMEELWGAFERGDFEVIFASQRRLLIYTNYYEETSFKLNIVFDQTFDTSFGFNRDARILKSIVDKALRIIDINNITNQWMYKAYDYQQKLEEAKRPFLIGALILFFIVLVLISAFLQRSRDAGKKLEELVKKRTGELAFQTSKLQAIFDSIPDMVFTKDLDLNYTQCNKIMEEYNGISEKDIIGKDDVAAFGFQADIVEKVKAADRTAITKGVKIVNEETIRYRDGRIRIFETIRAPFVQDGSIVGLVAIARDITRRKAAEDEAQEASRAKSAFLANMSHELRTPLNVVIGLTDLILEDEQLDKEVAGNLVKISNAGETLLNIVNDILDISKIESGKLERTTSSPDPAAITPPK

SEQ ID NO: 83857 - protein, 333 aa, Unknown
  Obtained from environmental sample
  misc_feature (1)..(333): Xaa is any amino acid
MAEKRIIVMDDFHCIEDTSVIRFVEEYVLRIIPPETTVFLVSRSTPRINIAGLIYRDQIFNISENELRFTENELIQYFNGLNISFQPDSIREIMQDTGGWAFAISLIARSIHKAPAYGGYVRDAMKTNIFQLMETEIWDGISGRLQNFLVRLSLIDHLSVDLIAQLAGDDKGLIDDLEKQSAYVRRDSYVNAYLIHPLFLEFLCKKQESIPEEQKRETYAIAGAWCGRNGFRIDALAYYEKIGDYQSIVNNFSELPSQIPDDIARFIAPIFDRIPGEAFDKVEFLAEMHIRAYMCQAHYQKSLELMKYYEKKFLKLSEDDIFRKRTLAGIYIC

SEQ ID NO: 83858 - protein, 66 aa, Unknown
  Obtained from environmental sample
  misc_feature (1)..(66): Xaa is any amino acid
MAATKEEILEAIASMTVLEVSELVKMMEEKFGVSAAAPVAVAVAGVGGGASLQRRKRKRVNVISKH

SEQ ID NO: 83859 - protein, 161 aa, Unknown
  Obtained from environmental sample
  misc_feature (1)..(161): Xaa is any amino acid
ILLHRGLSAIYYFFIPKTVIWACLYDLPYAILPLFSTIDKLDFSLLEAARDLGANQFVSIMKILIPNIRSRIFTAVLFTFIPMFGAYAVPLLVGGMDSYMLGNVIADQLSKSRNWPRAAAISMVLTLVTTLGVLIMMHIQKRDASRITEAKGSEGKLGSAE

SEQ ID NO: 83860 - protein, 485 aa, Unknown
  Obtained from environmental sample
  DOMAIN (187)...(252): His Kinase A (phosphoacceptor) domain
  misc_feature (1)..(485): Xaa is any amino acid
MSDHLIRYVLMNCIIIFGCIILGVFVVLNLSLKQYFTAAVCCGMIVMGMAAFILARTKVKQIVTATLLMIFYALLCVLITWTGESDGANFLFIYVYPSLTIMLLGMSYGITMSVILGVIISLEMFIPGVARFNYYFNLSIRMLVTYGLVFFVMVVIESTRKTKDRLIEKQKHRLQELKGEAEAANRTKSNFLASMSHEIRTPMNAITGMAELLLRGDLSDESRGYAQDIKQAGNNLISIINDILDFSKIEAGKLEIIPVNYLLSSLVNDSVNIIRMRIGEKPLRFFTNIDGNIPNSLIGDEVRLRQIILNLLSNAVKYSEKGHIGLSITAQKSEAGQVWLKITVTDTGKGIKPEDQEKLFGDFVQVDMKKNRGIEGTGLGLAITRRLCLIMGGDITVESEYGKGSTFTVIIPQGIGSPEPFAAVEDAANKKVLVYEGRVSYAKSVCWSLEKHEVPYTMVLNQDDFSRGAVPGKMVFLYFRVWSLR

SEQ ID NO: 83861 - protein, 490 aa, Unknown
  Obtained from environmental sample
  DOMAIN (60)...(93): Tetratricopeptide repeat
  misc_feature (1)..(490): Xaa is any amino acid
DIVVALKELAPHIPAVQCLPLNFLASSYLDMGEYAKAEICYLEAAAIEEKALGKEHPSYATSLHSLGVVYHRMGDYAKSKRYYLEAIAIEEKAQGKENPSYAVSLDTLGFLYYSMGDYAKAERCFLEARTIFEKKLGKEHSDYAVSLNNLGILYDSMGDYAKAERYYLESTAIKEKVFGKEHPSYAASLNNLGLLYWKMGDYTQAERYYLEATAIFEKALGKGHPNYAQSLNNLGALYHSMGDYSKVERYYLEATAIREKVLGKEHPDYAVSLNNLGGLYYFMGDYAKAERYYLEATAIREKALGKEHPDYAGSLGNLYLIYLSKKEFTKAFLYKQEQIKINTGIVNKNFSFQTEQQRDTYWNANSSSFEGSYSLSFFYPFPASNILNYNNALFSKGLLLRTTNAVRDAIYTSGNQALINQFEELGRLRQQINALRQSGGNEAYIKSLETQAEALDKSLTRSSAAFREFRADVNWQSIQKSLQRNEAAIE

SEQ ID NO: 83862 - protein, 268 aa, Unknown
  Obtained from environmental sample
  DOMAIN (1)...(268): FHIPEP family
  misc_feature (1)..(268): Xaa is any amino acid
MSGLIGFYAFHIGRVQKKQESFNEMMAKTGEAGKKQRDDRGDVPQMEPPDPLSLELGVGLIPLVDKDKGAELMERVKQMRRQIGLDMGILIPKVRIVDNILLGQSEYCFKIRGVDVGKGKIRMGNYLCINPGTVKEELSGEKTTDPAFGLPALWIGEEKRDEAERSGYTVVDPPTIIATHLTEIIKRHAAELLGRQETKAIVDSLQKDYSAVVDAIFTSKDEKGRDLLNLGDVQKVLQGLLKKQGFNKEHGSHSGSRLADFAPLAQHT

SEQ ID NO: 83863 - protein, 311 aa, Unknown
  Obtained from environmental sample
  DOMAIN (1)...(300): Iron only hydrogenase large subunit, C-terminal domain
  misc_feature (1)..(311): Xaa is any amino acid
MLLANGRKIIVSLAPSFVSEFTDWKPEELIAALKKLGFAAVSETALGADFLSARIAQDLASYAANRSDGDKPPLMISSACPVIIEYIKLYKPNLTPYISPHASPLLTHARFLRSRYAAQTDGKIAVVFIGPCIAKKHEADIYSEEIDAAITFAELREWLQKERVTPQTISFSLASQADKALEQRRNNKTIFFPWLHKERPASQTILFSLSSAYHTDNVFEPRRSAKGAFFPIEGGEITAFSAYITEKDPRIHTLSASGFHAVGDILDGFDPATFGAPMFLELLACPGGCLNGTRNAGPSPGVVRHVRLAGL

SEQ ID NO: 83864 - protein, 189 aa, Unknown
  Obtained from environmental sample
  DOMAIN (28)...(183): Pyridoxal-dependent decarboxylase, pyridoxal binding domain
  misc_feature (1)..(189): Xaa is any amino acid
MTQKNFPLDKSALEKIAQKYPTPFYIYDEKAIIENVRRIKSAFSVFPSYKNHFAVKALPNPYILKILAAEGFGADCSSYPELLLADMAGMKGEDIMLTSNETPASEYEAAKKFGAVINLDDYTHIEFLEKTAGLPELISFRYNPGPLKEGNAIIGKPEEAKYGFTRERLIKGYSVARKGVSANLIIGFS

SEQ ID NO: 83865 - protein, 224 aa, Unknown
  Obtained from environmental sample
  DOMAIN (5)...(218): Protein of unknown function (DUF558)
  misc_feature (1)..(224): Xaa is any amino acid
GYRGLLKAGDTFEAGLLDAGSGIGRIEKISIDGSISFSFELKAPPIPRLPVRVGVGFPRPIQIRRLLRDLSSLGVEAVDLFGTELGEKSYRDTKLLDDGGARAALIEGAAQSRDTTIPALGVFSGLADWLRERPWEKSTFPIRAVPLLVAADNVRPEGAMSRITPTMRPVVLAIGSERGWTDHERELLEDAGFLRLSLGNRALRTETACIAAAVLAIEKIGELG

SEQ ID NO: 83866 - protein, 116 aa, Unknown
  Obtained from environmental sample
  misc_feature (1)..(116): Xaa is any amino acid
MVDFVTLQKIMADRLETDRAVQSVETTGPTLEAAVADAAALLNLPSRKLEYEIIERGADGFWGMGRKDWRIRAYEKIGIARKKRQQAEIDEEVSGNVVVIEDKERRGVCPFQSGGE

SEQ ID NO: 83867 - protein, 493 aa, Unknown
  Obtained from environmental sample
  DOMAIN (92)...(208): Histidine kinase-, DNA gyrase B-, and HSP90-like ATPase
  misc_feature (1)..(493): Xaa is any amino acid
MASRFDGSRANIERKDYCFTKIEDASNHLLGVINDILDMSKIEANKFELVPEEFDLEKMLRRVVNVVNFRIDEKHQKFSVHIDRSIPRMLIGDDQRIAQVITNLLGNAVKFTPEHGSVTLAVRLAGKANDLCTLQFSVSDTGIGISPEQQAKLFQSFEQAESSTTRKYGGTGLGLAISKSIVEMMGGSIWIQSEPGKGSTFIFTIQAHCGTEEKRTLLSADINLKNLNILIVDDDPDILSYFLEITQGFGLFCDVATSGEKALELVDQKGGYHIYFIDWKMPVMDGIQLAREIKMRVSENSIVIMISAVEWSMVADEAKAAGVDKFLSKPLFPSTIAEVINECMGVDKRDVEKSHAADIAGIFAGRCILLAEDVEINREIVQTLLEPTKLEIDCAENGAEAVRMFSETPLKYDMIFMDIQMPEMDGYDATRCIRAMNIPQAKTIPIIAMTANVFREDVERCLKAGMDGHVGKPVDFNEVLAKLRSFWDTGLNK

SEQ ID NO: 83868 - protein, 575 aa, Unknown
  Obtained from environmental sample
  DOMAIN (30)...(139): Class II vitamin B12-dependent ribonucleotide reductase
  misc_feature (1)..(575): Xaa is any amino acid
TKDRIGRDCEGGPYADIVWERRKSEIRNPNGKPIFSEDTVIVPAFWSQIASDIIAQKYFRKAGIPKDRIYEWKKWAKAGSQSEDPGNSLPEDGAEHDARQVFHRLAYTWLEWGRQNKYFDTQEDENAFYDETCYMLAHQYAAPNSPQWFNTGLYSVYGLDGPAQGHYYYDIEKEKVVKSDSAYKRPQPHACFILSIDDNLVNEGGIMDLLTREARLFKYGSGTGSNFSRIRGINETLSGGGVSSGLLSFLKIGDRSASAIKSGGTTRRAAKMVTLDIDHPDVEKYISWKAGEEHKVASMVTGSLILKKHIDAVKRALAGFRGPEEDKFSAEKNHDLAMALRAALGDKIPPSYLYQQLRRLEQGDEEVDVSQYSTAWDDEAYNTVSGQSSNNSLRLSDDFMRAVLNDEDWQLKSRTGGEAIKTVKARKLWSDIAKTSWQCADPGLQYHTTINDWHTCPAGGEIRASNPCSEYMFLDDTACNLASINLSALYDKTNKAFNVDGYLHAIDIWTTILEISVVMAQFPSPRIAELSYPYRTLGLGYANLGTLLMIMGLAYDSDQGRAVAGALSALLSGEA

SEQ ID NO: 83869 - protein, 323 aa, Unknown
  Obtained from environmental sample
  misc_feature (1)..(323): Xaa is any amino acid
MDSKTLYGWYMGVVTPRANYYQSTKHLAIILSALGVIFAVLLGWMLLTISAGKAASDERIQLMSDSNPIGMSFWDGNLHIIDCNKTTLEMFGLSSKKEYFEMFEELSPECQPDGSISKIKCYELLREAMETGFLRFEWVHQKPDGEPIPCEMTLIRAKYKKDYTIMAYVRDLREQKRIMKMMEWRTHLLDMVNSAATVLLSSNNAGSFESSMMRSFELVGHCLDVDRVQIWRNEMIENEMHYVLRYEWLSEYGKKCKSVPMGLHFPYSMKKEWEELFLHGDNINMPLKDMSPEDQAFPWILRNEIHRYDPHVFGKRILGASSV

SEQ ID NO: 83870 - protein, 286 aa, Unknown
  Obtained from environmental sample
  DOMAIN (10)...(231): Sigma-54 interaction domain
  misc_feature (1)..(286): Xaa is any amino acid
MNLSEGYKPLITKSPAIQEQIEIVKKVAQTDSSVLLLGESGVGKEVFAELIHQNSRRNSLPFVKVNCAALPEGLLESELFGHVKGAFTNAVSNRQGRFEMADTGTILLDEIGDIPLPLQAKILRVIQEKKFEKVGSDITVTADVRILAATNKDIEELVQTGKFRADLYYRLNVLPIYIPPLRHRPEDIPELARHFLDIYMKQNNRQFDGFTQDALQALLSHSWPGNVRELQNCIERACVIGKNKLVGHERPFHKTRGFPPILEGKIRTAVLKRPLMYLKANLSEPG

SEQ ID NO: 83871 - protein, 216 aa, Unknown
  Obtained from environmental sample
  misc_feature (1)..(216): Xaa is any amino acid
MELNFRNIPYGGDTSQKFDITCKAGNDVHAIVFIHGGAFFTGNKDQYPLFLMDYSRNCLLASIDYRVVNDENTIHMGNILSDVKGALKKIQEFAKAKGVNIKDFILTGHSAGGQIALLYGYKYFQTNEHANIAACMSLAGPTDFSDDSGWSSMTMWGDTVEERLAFLSYMGSRLTCHPIALKQHNYTKTQDYPEFQKYIMGNFSIAHVSNGVTSPR

SEQ ID NO: 83872 - protein, 333 aa, Unknown
  Obtained from environmental sample
  DOMAIN (25)...(140): Nucleoside recognition
  misc_feature (1)..(333): Xaa is any amino acid
GYASSLERIIASTFDMSKLAVMNIALPLAGVMTLWLGLMNVGERAGATKLLARIIGPFFSKLFPEIPKNHPVHGQLLMNFSANMLGLDNAATPLGLKAMQSLQELNPTKDTASNAQIMFLALNTSGLTLIPVAIMALRATAGAANPTDVFIPLLLATAVSTLTAIVYVSLRQRIRLWNSTIILWLAGILLALALIVYGFGQLTPQMKTTLPAIIGNAILFIIIIAFIAAALYKKVNVYEAFIDGAKTGFETTVKIIPFMVAMLVGIGVFRACGAMDLLTRGIAEAIALLHLDTRFVDALPTRLHQPLSGSGAKAMMVETMTKYGRHSLRRGLS

SEQ ID NO: 83873 - protein, 326 aa, Unknown
  Obtained from environmental sample
  misc_feature (1)..(326): Xaa is any amino acid
KSDRIPQMMGNLCGRSRELKQELYKFERPAGMVRRNEASISSMVHREWEEAWRREPLPLLGPWLRYEGPISLSRVASVFGISLAEAEDAVNALAEVDEVICDARLAGTVSPLVCDSRNFEMLLRLSRRKQRPEISERPAVFLVPFLAMRQGLLSMSNAREQITGNREQSRFKEQSNEILLKKLNACCAPVKLWETEFFTARCAHYSPEIINSEINEGRLVWYGAGKERIGFCRPDDLELVNVNSVQKPKQKIHSEVELPGEAMSPGELLKKILARLIDNGFFDRPRDFWEIKDAINAGAKKNITGKECADAIGRKRGGKLVPNLYL

SEQ ID NO: 83874 - protein, 229 aa, Unknown
  Obtained from environmental sample
  DOMAIN (25)...(229): tRNA synthetases class I (W and Y)
  misc_feature (1)..(229): Xaa is any amino acid
MDFIKELRWRGMIHDVTPGLEEKIAAGAVSGYIGFDPTGKSLHIGHMIPIMLLMHFQRCGHKPIALVGGATGMVGDPSGKSAERNMLSAEAVAANAESIRKQLQKFLVFGGGAGGAEMANNHEWTKDVTILEFLREVGKHITVNYMVAKDSVKGRWEQGISFTEFSYQLLQAYDFYRLHTDRNCALQLGGSDQWGNITTGVEFIRRKSGGEPFALTWPAAHSFPTGRSS

SEQ ID NO: 83875 - protein, 248 aa, Unknown
  Obtained from environmental sample
  DOMAIN (32)...(239): Cytochrome C biogenesis protein transmembrane region
  misc_feature (1)..(248): Xaa is any amino acid
VVAACYADASFTTSELAAAFPLAQEGMSYAMLLLIGLLTSAHCIAMCGGINLSQTLRKTEKSAPANTYSMLLPGILYNGGRLAAYTAVGVIVGALGSVITLSGYFQGLVQLVAGVFMVIMGINMLGLFPVLRRFSLSMPKIFTQKIDEQKTGRGPLIVGFLNGFMPCGPLQAMQLYALSTGNPVRGGVAMFMFCAGTIPLMFALGAASSALSGVKGQVFSPRVMRIGAVMVAALGLVMFSNGWTVSGF

SEQ ID NO: 83876 - protein, 96 aa, Unknown
  Obtained from environmental sample
  misc_feature (1)..(96): Xaa is any amino acid
LNYIIKTRNLNKEYKRFEKEPGLKGSVKSLFNRKFISKSAIAGFDLSIEAGEFVGLIGPNGAGKTTLIKMLTGIIAPTSGEISVLGYYPNSWKTHS

SEQ ID NO: 83877 - protein, 141 aa, Unknown
  Obtained from environmental sample
  misc_feature (1)..(141): Xaa is any amino acid
MKYLGLCAIVKDEDPFLEEWVCHHALLGVEAFVIYDNASAHPVRERLRAFMNGSFLTVVDIRGKNRQIDAYNHCLRTFGRNFRWLGFLDLDEYAVPKRTKDLRVLLQDYEDAAAPRTHWQCFGTNGHKARPQGTQLENYVL

SEQ ID NO: 83878 - protein, 94 aa, Unknown
  Obtained from environmental sample
  misc_feature (1)..(94): Xaa is any amino acid
MEGAENFDFLRQPDFVKDPFLKGSYAVYKKETLVGEGTGKLCHIHRPEIIDAGGRRCWGELAVVGNELHIIIPEWWLSEAKYPVVVDPTLGDYT

SEQ ID NO: 83879 - protein, 494 aa, Unknown
  Obtained from environmental sample
  DOMAIN (8)...(276): HMGL-like
  misc_feature (1)..(494): Xaa is any amino acid
MIRWPSRARDQFFRSDKLAVVRALDDLGISWIEAGNPGSNPKDMEFFRLAADLRLKHAKLCAFGSTRKKGVKAGDDSGVLSLLDAQTQAVVIFGKSWDFHVTEVLRVTHEENLAMIAETITFLKEKGRKVFYDAEHFFDGWKANPDYALVTLKTAMEAGAERIILCDTNGGTFPDIIEKAVKEAAKTVNADGAPCVLGIHAHNDADMASANAITAVLAGCRHVQGTLVGFGERCGNTSLAAVIPSLELKLGFRCLPEGKMEMLSEITRFVAETANVAVPGNMPYVGSHAFTHKAGMHADGILKDRKSFEHIDPSLVGNDRHFLMSEVGGRSAIAERAKKIEPSITKDHPVTAALAQKLKTLEAEGWQFEGADGSFDLLVRRELGRYKPLFNIKAYRVVSEHPTGETIACSHAWVKVHVDGQEEVAAAEGDGPVNAMDGALRRALKHFYPELQEVRLTDYQVRVIDGNAATRAKVRVPITSSDGRQNWTTVGVSE

SEQ ID NO: 83880 - protein, 171 aa, Unknown
  Obtained from environmental sample
  DOMAIN (12)...(171): Shikimate kinase
  misc_feature (1)..(171): Xaa is any amino acid
MKDIILTGPKHCGKTTTGKELASLFSCDFIDIDELISQRTGKSPRQLFNEGLAVFQKAEAEALAALVDSGGGADSGAKRRVIAAGGGIIDNSEALSILKKSGAVMVYLDISAESAWDRIAAGELPPFLKTENPRETHRALHERRAAAYLQIADMLSKPRENPRRKSRSSIN

SEQ ID NO: 83881 - protein, 407 aa, Unknown
  Obtained from environmental sample
  DOMAIN (168)...(393): CagE, TrbE, VirB family, component of type IV transporter system
  misc_feature (1)..(407): Xaa is any amino acid
VSLSVAALHTILPWNFITKFHEGVVVQKDGLLQRSFAYRAPDADSLSGFEVNALSLRLNDFAKRLGAGWAIFVEAQRFSLQEYPKSLKFSSAFDALAPYLIEREREESFTTAGKHYDTSYYITLAWKPPVESAKKLAAMFVQSGKEEGAKAMKENVGYFVGETNSVMGLLANNMRVAPLDNGQTLAYLHSAVSFRRHPIRFPHTQILLDRVLPDSELVNDLTMRLGEFYIPIVGINDFPEETYPAIFEPLNRTGMEYRWVTRFLCLAKEDAKKEAQKKEKAHRGARKSFMQVFAESTAGPSGGGGSAAYNHGAGVKEADSIEAGIEIETDEASLAYYTSCVMVWDRSLTICEKKAEYVRNIINSAGFACKIESFNALQSWNPCCPGRCTPTTGRCQSCHTIFRTAVP

SEQ ID NO: 83882 - protein, 134 aa, Unknown
  Obtained from environmental sample
  DOMAIN (1)...(120): GXGXG motif
  misc_feature (1)..(134): Xaa is any amino acid
MGAYFNGGTILVNGNAQDAVGDTMNDGKIIIHGNAGDALGYAMRGGSIFVKGNSGYRTGIHMKEIQEKKPVIVIGGRTGSFLGEYLAGGLIIVLGINSEEAPVYNLQEPACMAGKSLSGTPRIFWGCPRSYPDR

SEQ ID NO: 83883 - protein, 45 aa, Unknown
  Obtained from environmental sample
  DOMAIN (1)...(45): Bacterial DNA-binding protein
  misc_feature (1)..(45): Xaa is any amino acid
NGQIRPRIVKRKARKGRNPRTGKEIRIPAKKAVKFTPGKALKEAI

SEQ ID NO: 83884 - protein, 328 aa, Unknown
  Obtained from environmental sample
  DOMAIN (270)...(325): His Kinase A (phosphoacceptor) domain
  misc_feature (1)..(328): Xaa is any amino acid
GLSREQFLRTNIIVTIFVFLTSLAVYFLIVYKLVAAPLRTLTVNVGRLSAGEVLPLVLTSRENEFSLLEDTFSDMSKRNAHSKKITDVLNKMAIIFLSHRDGAFDDTMTAGVRLIADIAEIDRLILCRNHIAADSLYMSEVYRWDRSSGGSTELTESLINVPYAQLIPDWEALLSDGNHINSPSKLLLERSANKLLSFGVLTAAVIPVHINNAFWGFALFGDTKNERYFEDDIIEMLRSATFLFANAFIRADMERDIKEALNKEMEASKAKSDFLSNMSHEMRTPMNAILGITEISLQDKTLPLGMLDDFDRIYISAIYCWVSSTTYW

SEQ ID NO: 83885 - protein, 383 aa, Unknown
  Obtained from environmental sample
  DOMAIN (148)...(380): Cation transport protein
  misc_feature (1)..(383): Xaa is any amino acid
VLAVPALIAFFETGGGGVARIAHSNLTGFTVAIAVSLAAGTIMVAAYRKNKGRIDVREGFAIVTFSWIAAALIGAIPFYVYFTAHGNAAPLNALTDAIFETMSGLTTMGSTVIADVESLPKSLIFWRILTHWIGGMGIVTLALAIFPAFGVVAYQMFRGEMTGPSKERLRPRLAQTAVILWGVYAFFTLVETILLMAGDMPFFDAVCHSFSTMATGGFSTRNASVASFDSAYIEWVIIAFMILGGTNFFIHYRIIFHNDWETLKSNREFRLYAAILVAASALCVIFLLLQGLHSSSWSQNNFKSQPLSLTEAAVKTAAEQDKISAPHDLIRRSIFHAVSIVTTTGFVVADWNMWPDFTRVMFFILMFVGRLRRLNIRRHQNDK

SEQ ID NO: 83886 - protein, 331 aa, Unknown
  Obtained from environmental sample
  misc_feature (1)..(331): Xaa is any amino acid
DLWQRQGLRPFSNRASQTATPPLFYYDETHAFGPNENIRSILLSPLATGNETRGILLADCTTANAYTQDDLEFLTNTAKLMGQAVYYTYLNTKHSLDYQRLAAMSSIEKDFWKDLDFDTVMDKMCETVADAVPCDRLTISLKLEDKMTAKVVRVYGANAGCFKDFEFAIGDNSPKTLVSLAYSTDIGFFRNFNEERYEFRYSEDEPQHHEFGSFMALPIGVDKRIGMILIESIMKDAFTSFNFSLLSRLSTSAGIALEKIFIIRKGEAMSTHDGLTGLYNRSHFMQKILTAQDHISKRSQTPISLVMCDIDFFQKAHDHYGHPFGDAVLKG

SEQ ID NO: 83887 - protein, 103 aa, Unknown
  Obtained from environmental sample
  DOMAIN (6)...(103): Quinolinate synthetase A protein
  misc_feature (1)..(103): Xaa is any amino acid
MTIKETQEEIARLKGEKDVCLLAHSYQAREIIEIADFSGDSYQLSVAAAKAPQKSVIMCGVKFMAETVKILSPEKSVLPRNPDAGCPMPEQIDKELVLACQED

SEQ ID NO: 83888 - protein, 378 aa, Unknown
  Obtained from environmental sample
  misc_feature (1)..(378): Xaa is any amino acid
MGDVITLRGRNFGAAREGAFVSIAGITPTNSSYYTWQDDLIILKIPESGDSGLVYVYVKGRRSNGVLFSNSASVPRLIEGEDIGMEPKITIVSPQTGVPGTLVAITGQNFGASKEGAGVFFSWDYAAHSINPYVVAEPEYIEVSDIEFGYETWNAREIRIRLPDGAVSGSLKIKTPNGESRPVFFDVAGKPGSKYFKDKRSYTISYSVDVKINEAVRPNNLYLWIPLPVTSASQRKVTLVSRSMEPFMENHRGVSLFKLDNLTAGAAHTINLSFNIEVYAVETSVRPVSVRQGKSPLYTAYTQSTNLIPADNSHIKSTVAGIVGKEQNPYIKARMLYEWIIKNIDIDEIPLYTSGAVSALGQKKADPYSGALLYPAWP

SEQ ID NO: 83889 - protein, 313 aa, Unknown
  Obtained from environmental sample
  DOMAIN (2)...(291): Beta-eliminating lyase
  misc_feature (1)..(313): Xaa is any amino acid
MNPTSDVFEQRIAALEGGVGALATSSGAAAVTYAIQNIATAGHNIVSDKRIYGGTYNLFAHTLPDLGITTTFVDGSDPKNFEKAINEKTRALFVESLGNPHSTIVDLDALAAIAHKNGIPLIVDNTFSPPNLFRPIEHGADVVVHSATKFIGGHGTVIGGVIVDSGKFNWAANDKFPGLSKPNPSYHGVVLTEAVGNLAYIIKIRVTLMRDTGATISPFHSFLFLQGLETLSLRVERHVENALKVVEYLRKHPQVESLNHPSLPEHPDNALYKSISQRVQVQFSPLKIRAVRNQRKKSLTSWSYSPSRQWCKF

SEQ ID NO: 83890 - protein, 77 aa, Unknown
  Obtained from environmental sample
  misc_feature (1)..(77): Xaa is any amino acid
MSDNTERRRPPRFGGGMGGPRGMMGGGEKAKDFKGTWVKLIRYCKRLYAHYRGCPCHRRFGNVASNCRPEHSAALPI

SEQ ID NO: 83891 - protein, 86 aa, Unknown
  Obtained from environmental sample
  misc_feature (1)..(86): Xaa is any amino acid
MSNYKLDNIIADRKTKKIYLDGDKVIKLMGEEYPAPDVLSEAHNLAAVGETGLKVPRLVEVTKIDGKWAVVWEYVRGTTPAPRPSN

SEQ ID NO: 83892 - protein, 94 aa, Unknown
  Obtained from environmental sample
  DOMAIN (2)...(94): AIR carboxylase
  misc_feature (1)..(94): Xaa is any amino acid
MKKVAVLMGSDSDLPVLEPLFKRLKDFNIPFEAHVMSAHRTPALGSDFALSARKNGFGVIIAAAGKAAHLGGVAAAHTTLPAIGIPVKLHSGRA

SEQ ID NO: 83893 - protein, 98 aa, Unknown
  Obtained from environmental sample
  misc_feature (1)..(98): Xaa is any amino acid
KDGYTNILNFVKNEDKQYNDTVSRALVSSLSLYPIGLYVLLSNGKKGQVINANPQTLQYPIVQVFGLKTPDGKNKIIQTSQDGITIVRPLTKEEAGTT

SEQ ID NO: 83894 - protein, 295 aa, Unknown
  Obtained from environmental sample
  DOMAIN (195)...(270): Acetyltransferase (GNAT) family
  misc_feature (1)..(295): Xaa is any amino acid
MAFCRARGIGVIDGVDTEHTGTVDKIYTDSLTRVLNLGMVPILPCIGWSPSGKPYNVPSDEIALAVSKALGAVKLFIVTAADGLNIARLTPKETEDLIKTGSIFLRELKLALKASQEGVHRVHIIDGRLEGAVLKEIYSNLGVGTMIYTDEYDSIRPLHSRDLPDILRLMEPLMQKGILIRRNPEQIQEKKNDYSVLEIDGSIRACGALIDWGEKQGEIAAVATDPNYTDLGLGRKIVGFLIEKANKSKMRRAFVLTTQSHDWFESLGFKRHPWTVCPRRNAKFMIKSEKSKSLR

SEQ ID NO: 83895 - protein, 132 aa, Unknown
  Obtained from environmental sample
  DOMAIN (66)...(125): Glycosyltransferase family 36
  misc_feature (1)..(132): Xaa is any amino acid
MQYGHFDDNAREYVITRPDTPYPWINYLGCEDFFGLFSNTSGGYCFYRDARMLRLTRYRYNNVPTDAGGRYFYIRDNGDVWTPSWMPMKSALDNYECRHGMGYSKISSSRNGLAFSQFRLCLYTTPARYTKL

SEQ ID NO: 83896 - protein, 287 aa, Unknown
  Obtained from environmental sample
  misc_feature (1)..(287): Xaa is any amino acid
MAARGSVEAALLSEPQAFVVAWDMGLFSPLLRIFPVFSGFFSVPNLYYVQAGKNSRFEYRLKDRTLFIGPYRNLLFISDSSEVFELRANLNANASHFTARETEALLIDKRGFDALKPSSYDAALLLSPGFFNNLLSEQDADIAAVLGKINFNSAIEAGFSVYPKKFELRITASLSSQQASLSRMLEERSQPPGMAERLPASSQYATILSAGTLDELFQATRVFAGEDFEDTVKSVDNSSRTILGLSLDELLFSWSGKEFCVFGLEGRPHPVYAIQIDDEQNGRQCLT

SEQ ID NO: 83897 - protein, 311 aa, Unknown
  Obtained from environmental sample
  misc_feature (1)..(311): Xaa is any amino acid
HAQDSAEWGGLTLPAYKILGVTNISVGIGLTRTIGLQNGTYTPFFPNYDGETDWNHSNLFSFDVPFRYRFKTANSISGKYGSFSWSIPYYSDPFVDGDFLKRSEEMDWINMIQQGAASMEAQDTSESRQSHEPWTFNGQLNPKFPNMTPYINSISIGTISSTITFREVNLRYNYSTNDIRYYSPSSFFFAPDTATLYQVNATISGAPLSLGGNKASRSSPSVDATEIGDPLKDIGVPRSPFEAKAEEKNINKDTTDKLVPPALTQRFDLPRVGNNSFNIDYRLAPHSSSTLGSTPTSGKNTRILIGVISAV

SEQ ID NO: 83898 - protein, 283 aa, Unknown
  Obtained from environmental sample
  misc_feature (1)..(283): Xaa is any amino acid
LDPFTFPGEASTFGSYGHLSFKHDKGYGRLGFRVKQVKWKKRLSSITTSLNLSKWGVSASYSASRMLGYEYKVGTSNADTGWFQRTGDENMILRPMNFNLSYSKNIAMKEIWKKNIDFTVNTRSSLNLNLQQYTSSSFSFTLGFTLGINRLLSMSVSAESNNSRIYQYFHDWPGFDDAPIELPPDTQTNIFLDLFDSFRFDNEELRKRSGFKMKYFRISATHHLGDWNAILNWSMSPYRPTGSRRYEINNEVSFLLQWIPISEIKSDISYNKSKSPEWVVKGL

SEQ ID NO: 83899 - protein, 178 aa, Unknown
  Obtained from environmental sample
  misc_feature (1)..(178): Xaa is any amino acid
MKKKNECVVFTLLLLISLIIPIKITASVDTGYDDRPYSGENKSGFDGAAILCYGGAGWEVVIPDGGGILPTESTTPPAPTASTNPPTPTDPPASTTPTNPPAPTTPTDPPVSTQPTGSTQPTGSTQPTVSTQPTGSTQPTGSTEATTPSGDGDTSSTGNTISTNQSTAPQTKPPEKKT

SEQ ID NO: 83900 - protein, 353 aa, Unknown
  Obtained from environmental sample
  DOMAIN (249)...(352): Histidine kinase-, DNA gyrase B-, and HSP90-like ATPase
  misc_feature (1)..(353): Xaa is any amino acid
LTEERKKIIVVDDNLEELTALKSTLKDLYGVYPCQSAVNMFDLLEHIKPDLILLDVEMPKMNGYEAARKLKNNAQYREIPIIFLTSMNDPTSEMEGLKLGAVDYISKPFLAPLLLQRIKTHLDLIEHKINALKASQAKGEFLSHMSHEIRSPLNAVIGMITIASETDDVQKIKHCLERADSATRFLLGLINDILDMSKIEANKLELAYGEFNFEKMITSIINVTSVRAVEKHQNIVVNVNADIPPFIVSDELRLSQVITNLLTNAIKFTPEFGRIILSAEKLDEKDGRPPQAAPQAAPQSGEITLKIKVEDNGIGISPEQQKRLFTSYNQADSSISGKFGGTGLVCHSNSADP

SEQ ID NO: 83901 - protein, 305 aa, Unknown
  Obtained from environmental sample
  misc_feature (1)..(305): Xaa is any amino acid
LLANSQDGDFAVVDYDIKPARLPIIVSGIAATYTAIFFVFLKEGWWPGGENAQDFSFERLKNDFGYSSNLDKFGHFYTGAVFSELFAMSYDWVGMSPFASALWAGITLGVTQIAVEFKDGFSPYGFSVYDAMAGTLGGFYAMGKRFVPAMQYVDYKWTYCPNYSGYWDAVRQRGGEMMGGKLTGGDGVFVDDYYGGNQTHWLSFKVAKMLPESAKTNYPRWLAFAFGWGIDEGYYIAERGRSSYEYYASLDYDLEAVFNPQKTWSKNLVKMLNFVKFPAPAVRFGGRNGTKFFPLHPWHGFYVIF

SEQ ID NO: 83902 - protein, 447 aa, Unknown
  Obtained from environmental sample
  DOMAIN (282)...(357): Hpt domain
  misc_feature (1)..(447): Xaa is any amino acid
MDVAVSDTGMGIPKDDIKSLFLDYYQVIANATRNIEGTGLGLPITKRLVEMMDGQISVESEQGKGSTFRFRIKQGFASDMTLGAEVSEKLRTFCYSDDKRIVSRKLSRVNLSYARVLVVDDMQTNLDVASGILRKYQMQVDVLNNGPAAIDRIREGKPVYNAIFMDHMMPGMDGIETVDNIRALDTEYAKKIPIIALTANAIQGTDKMFYAHDFQAFISKPIDVMELDAALRKWVRDGNREEVTVQTEPSSGEEKKLVIEIPGVDTKKGLSLYVGDTKVYLSLLRSYIKNTPNVLEKLRSVSAENLSDYVITVHGLKGTSAGIGAEEVRAQALELENLSRAGDLQGVLAKNDKLIADAEVIVANVKEWLEKNDVQDAKPLLKAPNKELLAKLRESCESYDIDGIEEIMSELEKTRLRRRRRSGKMDTGKSRNIKDGSADLILVPKQW

SEQ ID NO: 83903 - protein, 252 aa, Unknown
  Obtained from environmental sample
  DOMAIN (5)...(35): Flagella basal body rod protein
  misc_feature (1)..(252): Xaa is any amino acid
MVRSLWTGASGMIGQQANIDTISNNLANVNTHGFKKQRADFEDLIYQTVKTAGTPATEDTVVPVGIQMGHGVKLADTQRVFSQGSLQNTGVATDIAIVGEGFFKIQTYDGTMAYTRNGNFKVDSDGRMVTGNGYWLIPDIIMPENFLPEEINITKDGRVSVKVPRDGELAEVDVGRIELYRFPNPVGLTAIGENLFRTTQASGDPIPGRPGYEGMGQLEHKFWKCPMYAVVTENGQLDYRTAPHEVLRQWVP

SEQ ID NO: 83904 - protein, 128 aa, Unknown
  Obtained from environmental sample
  DOMAIN (21)...(119): Dinitrogenase iron-molybdenum cofactor
  misc_feature (1)..(128): Xaa is any amino acid
RFGRACRGKTETRRFAVATKTGAIVDLHFGHAQEFYIYESDGEQVKFIEKRGVLKYCNGPGREDDKDDRWESVINALRDCAAVLALRTGYAPEQRLKENGIDVITTYERVETAVLLAAKERSEVYGTA

SEQ ID NO: 83905 - protein, 99 aa, Unknown
  Obtained from environmental sample
  misc_feature (1)..(99): Xaa is any amino acid
FGGLWESFLPSFAYVMVMLILQVGRMLSLGFEKVLLLYTPANSRTSDILDTMVYRTGLAGGMPNYSYATAIGLFSSVIGLILVTSANFASKKLTGESVY

SEQ ID NO: 83906 - protein, 89 aa, Unknown
  Obtained from environmental sample
  misc_feature (1)..(89): Xaa is any amino acid
MFTTIITPRFGDIDALGHVNNIVSAGWFELARNHVIKIFNPAMEIKREAFPLILVHSDYDFMGQLYFNHDVEVRTWITKIGTKSLPIRP

SEQ ID NO: 83907 - protein, 321 aa, Unknown
  Obtained from environmental sample
  DOMAIN (1)...(302): Cell cycle protein
  misc_feature (1)..(321): Xaa is any amino acid
MINLNVLRKFLLPLVIIAASLCVLTFIPGIGVERYGASRWIEFGAFTYQPSEMVKFALPLYLAHLLDKKSDNLDNFYSGVLPPVLVTGIFFGLIYRQNNFSTAIFIVINALIIFFLAGIRFRYFFAAITMIIPVSALLVFTKEYRVRRLVSFLRPQWDPLGAGFQVNASKDAIVSSGLWGKGFGEGTRKLASIPEIHSDFVFSAYVEETGFIGVLLFFALFVIFAGFGYKAALDSKTLFGKLLAAGLTTSIVFQALLNTAVVSGALPATGIPLPFFSAGGSSLITTLICAGLITNVARNKYEVSSLKVKSNYDVSEGDNDY

SEQ ID NO: 83908 - protein, 128 aa, Unknown
  Obtained from environmental sample
  DOMAIN (52)...(120): POTRA domain, FtsQ-type
  misc_feature (1)..(128): Xaa is any amino acid
MITDYYYETSDTVITKKKSNEKIEKGLKRLLIIAVIILTAELIWLFGVSPFIPFSSVEVHEISSLSRRQILSIAGIDDNSSFFSTNVSVVKEKLSSNILVESAVVIKRFPDKLSIFINPRQAAAVTLA

SEQ ID NO: 83909 - protein, 105 aa, Unknown
  Obtained from environmental sample
  misc_feature (1)..(105): Xaa is any amino acid
VTGLFLLYIEFFKIGVFAVGGGLATLPFLFLMANDRFMFIRQTGWLSAEQLGNFIAIAQCSPGAVGLNISAQTGFLYGGISGGIIAVLGLISPAVSCRSAESEHV

SEQ ID NO: 83910 - protein, 492 aa, Unknown
  Obtained from environmental sample
  DOMAIN (412)...(483): Histidine kinase-, DNA gyrase B-, and HSP90-like ATPase
  misc_feature (1)..(492): Xaa is any amino acid
MASLVRRLTPGISAVPASVMFDSSPYINILFDDAFNVIDCNPEAVTFMGFKNKQDMLDGFIDFISKNIPSVLSNGQHSMSLISRLTTAAEEGMTKFETEMHLDGDIRRLSVDFRKIPYKGSFAILAYVFDMTEIFQREMQLARSKELNELQLAKLNLVVQASKIGLWDMEVVRDDPINPNNTFVWSDEFRHMLGYTDENDFPNILCSWSNLLHPEDKEVTLNAFAKHMLDKTGKTPYDVEYRLLRKTGEYAYYRASGESIRDSEGNAIRVAGALMDITDTKNMLLIKDRQREEAEAANRAKSTFLSTMSHEIRTPMNAIIGMTTIGKGAKEINQKDYALDKIGDASSHLLGVINDVLDMAKIEASKLELASVEYDFEKVLQKTLTIIHFRVDEKRQKLTANVDTNIPRFLVGDDQRLAQVITNLLSNAVKFTPEGGNIHLAASLLNETDGKCEVRIEVADSGIGISPAQQKRLLTLLNRLKAEQAAHTAGQD

SEQ ID NO: 83911 - protein, 381 aa, Unknown
  Obtained from environmental sample
  DOMAIN (123)...(350): Baseplate J-like protein
  misc_feature (1)..(381): Xaa is any amino acid
GYRDMISDSFHESGFIEFVTPADMAAKNEFSKNLHWLRLCLVSGGFEAQPVIMSIFNNAVYAQNKTSHVNEIAGSGTGAPGQSVSPAHGPLLPGIEIFVDEGSIPPTNEIEMMTAEGIKEPYQIDGESVWVRYKEVDNFYSSTPFSRHFVVDYREQKIHFGDGQRGINPPRRKFNIRIASYSTGGGADGNVAAGTLRTLTQSIAFIAGCDNQFPAEGGADMETVDNLKSRAAGVFKSLQRAVTSEDFQWLSREASASVGRAWCLKEKNKQGEIVIVIIPIIPSGETLAYKLIPSRELLRRVTSYLEERKLVGTKIHVQGPVYRVFNIQLNMVFRSDILDLERLKKNIENTLRSFCHALTGGEREGWEFGKSVTAGAVLNSW

SEQ ID NO: 83912 - protein, 131 aa, Unknown
  Obtained from environmental sample
  DOMAIN (3)...(116): HEPN domain
  misc_feature (1)..(131): Xaa is any amino acid
MVYFADADFDSAQILNNAYRKHSEIICYHCQQAVEKYLKAFLCYNGVIPPKIHVLEALCALCSEFDSSFNNLARDCAYLSTFAVKARYPLEMEITDLNIIKSLEITQKVKDFIPIAELKTKLLNEKENNNV

SEQ ID NO: 83913 - protein, 238 aa, Unknown
  Obtained from environmental sample
  misc_feature (1)..(238): Xaa is any amino acid
VPDTVETVLKKINSFTTTIAPLKNLLSALGMSSNSLNALSGLDRYRDSIKVALNRGAERAAPKSINVFKNAIFGMSFSDARETLLGDSVAATTYLHTTTYDDLKDAFYPIIEEPLKLLKLDRFWTPIASNYNSFAREYLRIKNTQFGSSALAQYDLPYNDLPDSISTYLSKYATGKALDGLFLMVGKQETKLRADPWGTVKALGGFITDTVGDLLGDVFSKAKDDCSEFPKCSLVVIT

SEQ ID NO: 83914 - protein, 87 aa, Unknown
  Obtained from environmental sample
  misc_feature (1)..(87): Xaa is any amino acid
MSHSMSREQLRLRVKDLSIDFGGLKAVSDFSCELYHGELVGLIGPNGAGKTTVFNMLSGIYVPTGGEIEFRDRGGHTCLVKTLILPG

SEQ ID NO: 83915 - protein, 186 aa, Unknown
  Obtained from environmental sample
  misc_feature (1)..(186): Xaa is any amino acid
MEALNRIPADLRVLACTEDSISSFKPLAAQTGFEIFAGPKDDVLERYCQVIRRFKINRVIRATGDNPFVFTDAAAAINAEALAINADYAGYSGLPYGAGVESVSAPALLRAGSETSSPYDREHVCPYLYTHPDLFNLHRPLAPLRWQGSNLRLTVDTQEDFDKAVCLYGALKNEALRYYGTTIIKK

SEQ ID NO: 83916 - protein, 321 aa, Unknown
  Obtained from environmental sample
  misc_feature (1)..(321): Xaa is any amino acid
MTVKYEKRALIQRHLELEQRGKTITGVLSARFNFNECMSVFKFLQTLLRVNYLRLRFQDCPCIIIEIIVEKYMNNILVCGLINIETTIKIDSFPIKYSPVEYNFFGVNSSVSGVGYNIAKALKTLGDAPIFFSIIGNDMYKEIISRELKKDKINSNYVLPLLERTVQSGILYDGNNRKILLDLKNIQEINFPMDLLKDVINKIDLGIVCNINFSRGFLQVLKENRKIIATDVHVLNDINDNYNNDYIKYSDILFLSNEGIIGNENDMIIQLSQKYNHEIIVITMGENGLLMYVKKKCETKHFHAIKTREVVNTIGAVLAIN

SEQ ID NO: 83917 - protein, 440 aa, Unknown
  Obtained from environmental sample
  DOMAIN (66)...(146): Cache domain
  misc_feature (1)..(440): Xaa is any amino acid
VDITNYLLSKDNDTFSSNGPFGYIENPPKDSFFINGIGWKMPDNFLPKERPWYIAAIKNPKNIAETIPYIDYVTGDIVFSYSRCIYNDDGSFLGVVAIDIKADRIGQKIVKNAIEKNDSYGVLVGQDLTIIGHTNPAYVGKKMSDPEVPLSVLVEELVREGKLSEVEWINWKGEPVIGFFRTLPNGWRLGLFPLKNIYYQPLYNMLMIMTLLGIVLASVLIIVLIRVDEAKNKSDAENRHKSAFLANMSHEIRTPMNAIIGMTTIGRSAFDTVRKDYCLSKIEVASNHLLGVRNDILDMSKIEANKSDLSPAEFDLEKMLRRVVNVVNFRIDEKQQKFSVHIDRSIPRTLIGDDQRIAQVITNLLGNAIKFTPENGSITLAVRLVNKVNGLCTLQISVSDTGIGVTPEQQEKLFQASRQAESITSRKSGDPECHGLPEIF

SEQ ID NO: 83918 - protein, 58 aa, Unknown
  Obtained from environmental sample
  misc_feature (1)..(58): Xaa is any amino acid
MPLTLIDKFSIQLYTVRDIMENDYTGTLKKLAAMGYTGVEFAGYGGLQAQEMKDLLES

SEQ ID NO: 83919 - protein, 64 aa, Unknown
  Obtained from environmental sample
  DOMAIN (7)...(61): Shikimate dehydrogenase substrate binding domain
  misc_feature (1)..(64): Xaa is any amino acid
MKKTFGLLGEKLGHSFSPLIHGYLGEYDYPLYEVSAADLDSFMTDRRFDGINITIPKTANLSIY

SEQ ID NO: 83920 - protein, 248 aa, Unknown
  Obtained from environmental sample
  DOMAIN (16)...(248): Beta-lactamase
  misc_feature (1)..(248): Xaa is any amino acid
MNGTGHGFSTARLKNVDAYLQRIVDQGKVAGAGGMIVRRGEEAYCSSFGMRDLEKKERLENNAIYRIWSMSKTFTIVAAMTFYEKGFFKLHDPIAEFLPSFKDVKVAEIDKRGIIKLVPAKNPITFEHLFAMTSGLPYPGENSFSALTMGKIYEKAIKDAKAGKPWNTARMIDEAAKTPLCFHPGEQWMYGFSHDVLGRLIEVISGKTLGEYMADTIFKPLGLKDTAFYVPQEKQNRVVTPYSLAQTG

SEQ ID NO: 83921 - protein, 355 aa, Unknown
  Obtained from environmental sample
  misc_feature (1)..(355): Xaa is any amino acid
YSRAGFPDYGSGESIELAGEEALENLAKSESDLPSFDLDLPEFGESESEGEPLSDEAFTDAFNDVSSGTAEEGAEEGAEEALDMSSFGLDMPDFGGDESQASFGEEEPEVEYPPFDAETTDTESDEEAFGFNEELPAGDEAILEEVPGDAFDRFSPESGSLGEDFDVGGGEAFGADEFGSLDDFPIPGLDIGIDDKAPGKGKKAGKKGKSSKGRESDDKEISLTLEELDLLQETLSFYPLNLRIACEELIAEQAVAPEQMSRLINLLVEGAPAEETAALAGKILDKTIPIPKGYERRTGEDMEAEQSSFPYIFVHTFLPMLARFMAIAIVVFCAGYLSWQYIYNPINAEKYTNLV

SEQ ID NO: 83922 - protein, 141 aa, Unknown
  Obtained from environmental sample
  misc_feature (1)..(141): Xaa is any amino acid
MAELRYKLTRDTLFKLFFVKHPDLLKNLVSRVLGISVDVITNFVIINPNIAPQSLGDKFCSLDINMEVNDQRVNIEVQVEDEGDYPARSLYYWARCYSSALLEGEDYVDLPRTIVINILAFELFGDTDDFHFEFAAVEGTR

SEQ ID NO: 83923 - protein, 266 aa, Unknown
  Obtained from environmental sample
  DOMAIN (15)...(264): Domain of unknown function DUF20
  misc_feature (1)..(266): Xaa is any amino acid
MSQNPTEVYWNSDRKMRFLFAASGLAAFFALLYYLSDVLTPFVVAFLLAYILNPLVNILQKKIKYRWVAALLVLLIVLVICVGAAFIFIPMMIDQGVNLGRLLQKYAHNSAWKETLIKYLPDEFLEKIQHIWEEKDFEPVLNQLQNMDLIKISQSILSKILPSAVGVFSGVGKVLIWCISIFMIVLCLVLMLLDFENMKKSLARQIPKEYSEKILRFFGSFDSIMSKYFRAQTSIAVIVGVIFAISFNIMGLPLGLPLGFIGSRDH

SEQ ID NO: 83924 - protein, 302 aa, Unknown
  Obtained from environmental sample
  misc_feature (1)..(302): Xaa is any amino acid
VTSGSFVTSSGSPASDSATATRVKLTVKLQDTLNYTLSSAATATSGGSLDFFKAAVITRATPDTSHFTFTRPDSLVHGYTGKARGIGDVTLKKTLSGMGKFRVLYGADTAKPVNVGSYPVTVSVDTLGANFTAGSVALGTYVISAPAVPVIDDVVWQTGLTVRQGVALALTVPATAPATGGTLSYQWYRDDVAVANNGRAATLNVNGLLQGNTYTFKVVVTNTKSAGTAGSEVGTAERVVVVNVIEPPVNLSTAAFSVKGNYTYTGSPIEPPSDSIVVTVPAPEVGGEPVALVRGTDYSVSF

SEQ ID NO: 83925 - protein, 324 aa, Unknown
  Obtained from environmental sample
  DOMAIN (273)...(311): WD domain, G-beta repeat
  misc_feature (1)..(324): Xaa is any amino acid
PCQIGRELWDTASGREIRNFTEHTHTSYVRSVAFSPDGKQALSGSNDGKTELWDAANGRLIRNFSASRSIYVNSVAFSPDGTQVLSGYADYDTPIEDAGPFANYMELWDTANGREIKTFKGHSNYINSVAFSPDGKWVLSSSTDDTVKLWDTASGRELRTFSGHTSTVLSATFSPDGKQVLSGSYDGTIKLWDTASGRELRTFSGHTEGVESVAFSPDGKQALSGSYDGTIKLWDTASGRELRTFNGYLALFSPDGKQILSGSGDYTMNLWDAASGRELRTFSGGGVSIAFSSDGKQALSGFKDGTIRLWDISTGKEIAQFVSL

SEQ ID NO: 83926 - protein, 512 aa, Unknown
  Obtained from environmental sample
  DOMAIN (95)...(152): Threonyl and Alanyl tRNA synthetase second additional domain
  misc_feature (1)..(512): Xaa is any amino acid
MAEAVTRLFPGTLVAIGPSIENGFYYDFKFPLREGSQVPISTDDLPKIEAEMKAIIDSRVDFVRVEVSREEALKRFADEPFKQELIKGLPEGEAISIYENRDAEGKARWADLCRGPHVQNTREIHSGAFKLMSIAGAYWRGDENQPMLTRIYGTAWENPKDLKAHLAFLEEEEKRDHRRLGKEMDIYSTHEEAGAGLIYWHPNGGRMRVAIEDFWRAEHYKNGYEILYSPHIGKGLAWETSGHLGFYKGNMYSPMQIDNQDYIIKPMNCPFHIMIYKNKGRSYRDLPLRWAELGTVYRYERSGVLHGLLRVRGFTQDDAHIFCTPEQMEDEIREVLRFSLWIWKQFGFKEIKAYLATKPAESVGEQSRWDAALESLRRAIDAEGLGYEIDEGGGAFYGPKIDLKIKDALGREWQMTTIQFDFNEPERFDMTFVDADGKQKRPYMIHRALLGSLERFFGVLIEHFGGSFPVWIAPEQIAVIPVSEGFNEYAKKITSELKNVNLRVRRVGTQLS

SEQ ID NO: 83927 - protein, 221 aa, Unknown
  Obtained from environmental sample
  misc_feature (1)..(221): Xaa is any amino acid
MAVVWNTQAFFDGIEDGYEYEEYTEAAGWTQEKYNARLLALSQAILQMESSEAVPDLIGLVEIENQGVLDDLSSGTLSKYAYNWTAFANLPGSSLGVGVLSRHPIKDIVAHSITMEKDTAPRPVLEVRVEPRGKPLVFFICHWKSKLGKDTEDLRRASARVVQRRLSEIASAEPETPVIIMGDLNEKHDEFYRTQELCALLPDDQSAASLASIGRQEFSRF

SEQ ID NO: 83928 - protein, 415 aa, Unknown
  Obtained from environmental sample
  DOMAIN (185)...(367): DNA / pantothenate metabolism flavoprotein
  misc_feature (1)..(415): Xaa is any amino acid
MKVLLGVTGGIAAYKACDLVRMLVRSCHQVRCCLTDAGARFITPLTLATLSGEPCFGANPEYHEWRSNPKVEHVDLARWADVLTVVPATADIMGKTANGLADDLLSTILLAATCKVLWAPAMNKAMWANLAVQKNKATLMGYGHAVVQPGSGLLACGEEGEGRLADVEDIFDAIVSLGGKPLAALTGKRVLVTAGPTREDLDPVRTLTNRSTGRMGIEMARAFRDAGANVSLVLGGELPAPWGVSTTRVRSASDMLDACLSLWPNMDGVCAAAAVADQRPEQCKPQKAKKGNAPETLTLVRTPDILLELGKTKGNRWMLGFAAESENLLENAAEKISNKGLDAILVNDVSWGGAFGEGDNALTPMTKSGAAKTIGPLPKDKLAAEAVKWFAGHWKTRMYFQAIFLRARCALPRDK

SEQ ID NO: 83929 - protein, 321 aa, Unknown
  Obtained from environmental sample
  DOMAIN (99)...(142): SWIM zinc finger
  misc_feature (1)..(321): Xaa is any amino acid
LKNRYGITPWGKWFIDILDSYEMGARLDRGRSYANTGKVYSMDFKDGQATAKVKGHYRPFYNVKITFPPLKNAERVYRMIEEDPMLLARIAAGELPENFLQKLKDKGIDLIPRKWKEMDRKCNCPDWGDPCKHMAALYYVIAREIDADPHVLFKLRGMDLADRFGKAAVHQIAPPFTITFAKKEKVTPLAEPLELAEIPNCGELISTLLPAAPPFCERDFAMVMAEFYHRVVLYETWESAEINEQNQAEIEHRFSHSHWTVLCKDAVIGAELELQAEDINGKTKNYSIHEAFTISCIFLLMTKRVQTFLFYLLSFSTWFVP

SEQ ID NO: 83930 - protein, 71 aa, Unknown
  Obtained from environmental sample
  misc_feature (1)..(71): Xaa is any amino acid
MRRVSTDMANTDMQYYLRRQEDSLHNLTTQIGTGSKLNQLRNDPLAASHAVRYESYLARLDVLSPIPFTPG

SEQ ID NO: 83931 - protein, 105 aa, Unknown
  Obtained from environmental sample
  DOMAIN (7)...(92): PhoU family
  misc_feature (1)..(105): Xaa is any amino acid
APPGVVTIDDGRTAVLMLKDTVYAYREQDPDSARKAAALDAAIDREHKALTNELLGFIKKQPNFVKAAARLLRLSGNMERLGDHITNICEGIIYMIEGNREELNY

SEQ ID NO: 83932 - protein, 349 aa, Unknown
  Obtained from environmental sample
  DOMAIN (108)...(324): RNB-like protein
  misc_feature (1)..(349): Xaa is any amino acid
MTDRPRKREEKSAANNEKELFFERMRKRSPLQEDRRFIQDIEALALGKSAKSRTMKEIGLGETPEEAHALLLECGFWNTQNNPHPARFAVVLQPAECKPEAPPPEERCDLTHLAAYAIDSPWSSDPDDAISIELKNDRQILYVHVADPASSIGADSSIEKEARDRGATLYIPETSIRMLADEALPIFALGLAETSPALTFKITLNNIGEIEKTEIFPSIVKVKRLTYKEADEFLNDTHSETPEAAALRALNVLAERNVKRRAALGAINIDMPETHIRLNGGQVEIEPITRYKSADMVRECMLLAGEGAGLWALHPHLPVPYITQETGDLPDEPLEGIAGYYQLRRCMRP

SEQ ID NO: 83933 - protein, 67 aa, Unknown
  Obtained from environmental sample
  misc_feature (1)..(67): Xaa is any amino acid
AQTYLLFWLAGNITMRDKYLELFCKKSDTAKQYVEKWLSIVAASQLPKAKPQEKEFLLHWANVVEYE

SEQ ID NO: 83934 - protein, 293 aa, Unknown
  Obtained from environmental sample
  DOMAIN (33)...(99): His Kinase A (phosphoacceptor) domain
  misc_feature (1)..(293): Xaa is any amino acid
MEWSNGRIVHIQHSVDVNELVIAKEQAIMANNAKSNFLAKMSHEIRTPMNAILGITEIQLQNKNIPDDIQAALGKINHSGYLLLGIINNILDMSKIESGKLELSIGSYDVPSLINDTVHLNVVLYDNKQIGLNLDVDENIPSRLLGDELRIKQILNNLLSNAFKYTEKGEISMSISAEYKEEDALTVTLVFRIADTGQGMKPEQLDKLFDEFTRFNTDVNSKVEGTGLGMSITKQLVLIMGGTIDVESEPGKGSVFTVRLPQKIDDFEVLGKKWPKDLKISVPLICHQWRRRH

SEQ ID NO: 83935 - protein, 326 aa, Unknown
  Obtained from environmental sample
  DOMAIN (127)...(272): HD domain
  misc_feature (1)..(326): Xaa is any amino acid
SPSAGRFLPGSFDTPSFVFAVISGVVAAYSLQGATKRMDLVKAGLIIAAAHLVVMTAVLLLQYAAAGVYPQALFWAAFNGVASGMLILGLLSPLEHLLNAATTFRLIELSDLNAPILRRLFTVAPGTYSHSIMVANLAEAACQDIGANSILARVGAYYHDIGKMENPGYFIENQTDYNPHDSMAPRLSATVIRSHVKLGVEKARQLGLPDEVIDIIAEHHGNSVITWFYSKALKQENSKNPTVNIEDYCYPGNPPHSRESAVVMLADLCEAAVRSISKPNAAKIEKFIKELIANKVEHGQLSKSELTFRDLEIIENSFVRVLVSYY

SEQ ID NO: 83936 - protein, 194 aa, Unknown
  Obtained from environmental sample
  DOMAIN (122)...(147): The GLUG motif
  misc_feature (1)..(194): Xaa is any amino acid
MTTSNFTRIGINTDTGNFSGVYDGGGYTITGLTITGTSYQGVFGAISGTVKNMNVTGTITQNGTGNNISTGGIVGVNMADGTIDNCSFSGTVSGTGCDQVGGIVGYNYGTVINSRSAATVSGRTNIGGIVGQNQGKIENSYNTGSVSGTNQVGGIVGINSGTGSNIRVRNSYNTGDIAASTASTAKSASADSVQ

SEQ ID NO: 83937 - protein, 225 aa, Unknown
  Obtained from environmental sample
  DOMAIN (43)...(70): The GLUG motif
  misc_feature (1)..(225): Xaa is any amino acid
EGRRYRPGRGRTESAVSPELSHNGANIKNCYNTGDITAAGATTASYAGGIAGSNETGSTVEYCYNTGNVTASTNNVGGIVGSNSGSTVRYCVSLGARVTGGNNTCRVVGIMSGTTTLTNNKARADMKVGASGSEALPTINIGANEREGADVSLGTAQNSVFSSFFTTTIWTLGSNLTVGGALPRLQMNTQSPAPTLPAAYSVPGSADNPFLVTNENRTPQSRNRH

SEQ ID NO: 83938 - protein, 197 aa, Unknown
  Obtained from environmental sample
  DOMAIN (3)...(174): Thiamine pyrophosphate enzyme, N-terminal TPP binding domain
  misc_feature (1)..(197): Xaa is any amino acid
MQYTGAQILVESLIEQGVDTIFGYPGGAVLNIYDELYKHSGKIRHILVSHEQHAAHAADGYARSTGKTGVCLATSGPGATNLITGIATAYMDSIPLVAITGNVPTGILGKDSFQEVDITGISMPVVKHNWIVKKVEDLAEVIREAFELAASGRQGPVLIDIPKDITALTAEWVPHANASASASNKKKSDSAALHNPK

SEQ ID NO: 83939 - protein, 301 aa, Unknown
  Obtained from environmental sample
  DOMAIN (164)...(232): His Kinase A (phosphoacceptor) domain
  misc_feature (1)..(301): Xaa is any amino acid
MYPGDDMKADGHLLAHVLEYTPIGIVIFQRDATAVFVNQYVLTLFDCAREDVLDNTFKELADKVAAKLMREVDLEPIMSGFTNGTLYDHKVELVFDSRPDIVCRFSVFDVVATGPYPDCTVLVIRDITHEQRVAELVEAKNIQMAKMNTELARSLAELKKVSDLKSNFLSIASHELNTPLTSIKGYSDIIIDNMRDKVDPSVYRMIETIGRAADRLHRVVNNILDVTKIERGRLRLRPEFMDIVAAMRDCAEEQTQIAQKRNITFRTNAPEALPQFYGDKHRIMQVSQTSELGQSVMAPKS

SEQ ID NO: 83940 - protein, 188 aa, Unknown
  Obtained from environmental sample
  misc_feature (1)..(188): Xaa is any amino acid
MRKETDRSLVNGYLKASERNIVNKKGDTVLLNGWGLGNWLLCEGYMWLSHSKRFDRPRIIENVIHELTGSVFSEYFWKEFRTRYISKEDICLMAELGYNSVRIPFNWRILLKDEPGLNWIDDGFALLDKCINWCEEYGLYAFLDMHGAPGGQTGANIDDSADDLPRLFMDKDSWDQAIAIWEKIPPLC

SEQ ID NO: 83941 - protein, 78 aa, Unknown
  Obtained from environmental sample
  misc_feature (1)..(78): Xaa is any amino acid
MAESFGRWLPLGVLGASLLFGFSSSLAVNVFNIKSLSFMPSEVFNMLPYLITLLTLVVFSGKEYAPRAVGQPYDISSN

SEQ ID NO: 83942 - protein, 284 aa, Unknown
  Obtained from environmental sample
  DOMAIN (2)...(27): Bacterial regulatory proteins, lacI family
  misc_feature (1)..(284): Xaa is any amino acid
MVTIKEIARLAKVSTATVSNVLNGKSGAASEAKAREITEMARSLHYTPNTLAKSLQRQRTNTIGIITEDLTVFNAPEIVDGIDACCEENGYETILENMRLFKRYNNDFTDTPKHHELLDSMLRNMIAKQVEGIVYVGYHCREIAYLPSRVQVPFVYAYCYPKEELYPSVMYDDEKAARDVTALLIAKGHSRIGVICGPASSYHTQARLRGYNAALAEHGVPPDPKLVVYRDWEPPSSYHLAAFLLDRKVSAIFFFNDFIGLRGLQTRPRAEVAKRGRYFTLGFG

SEQ ID NO: 83943 - protein, 75 aa, Unknown
  Obtained from environmental sample
  misc_feature (1)..(75): Xaa is any amino acid
EKDAANFAKELVQNVKNMKIYHPMSEISKYVTISVGMASVVPDENNSQTQLLDEADKALYDAKHSGRNRAVINLQ

SEQ ID NO: 83944 - protein, 579 aa, Unknown
  Obtained from environmental sample
  DOMAIN (134)...(296): Type III restriction enzyme, res subunit
  misc_feature (1)..(579): Xaa is any amino acid
AVRSAAFDTFVELNPGEYVVHVNYGIGLFKGMKGIKALGHERDYISVEYAGEETVFVPIEQVNLVQRYIGNEGSPPRLDILGSKSWENRKGRVKKSVEDIAEKLLALYSKRRQSQGFAFPKDTEWQTMFEAAFPFEETEDQLRCVEEIKADMESPHPMDRLICGDVGFGKTEVAVRACFKAIMGGKQVAFLAPTTILAEQHYENFQERFSQFPVKIAMLSRFVDKKSVRKILEELKNGEIDLLVGTHRIIQKDVAFKNLGFLVIDEEQRFGVKDKERLKELKHNVDCLTLSATPIPRTLHMSLLKIRDMSLLATPPQNRHPIETTIEEFNEERLARAIRQEAERGGQVFFLHNRIETLREIRIKIQRLLPEMLVETAHGQMDAQDLEDVMHRFIHGGFHVLVSTTIIENGIDIPNVNTIIIDRADMYGVSQLYQLRGRVGRSDRVAYAYLFYPKEKALSEVAMKRLQVISDFTELGSGFKIAMKDMEIRGAGNLLGREQSGDIYSVGFDLYIRLLDEAVKKLENTHYEAETETLMELEYSGFIPDTYIDSAQEKMEVYKKIAAVRQREELKAFPELAIT

SEQ ID NO: 83945 - protein, 311 aa, Unknown
  Obtained from environmental sample
  DOMAIN (1)...(119): Thiamine pyrophosphate enzyme, N-terminal TPP binding domain
  misc_feature (1)..(311): Xaa is any amino acid
MAEGYSRARAGNIGVCIGTSGPGGTDMVTAMYSASADSIPILCITGQAPKAKLHKEDFQCVDIVSIAKPVTKMAMTVLEPGQVPRVFQQAFHVMRSGRPGPVLIDLPFDVQVAEIEFDVDAYEPLPVYKPAASRKQLEKVFDMLMASKRPVIIAGGGIINADASDLLVKFAELTGVPVIPTLMGWGSIPDDHPLMIGRIGIQCSHRYANQSFLRSDFVLGIGNRWANRHTGTLEKYTEGRAFIHIDVEPTQIGRVFNPNLGIASCARAALKGLVAIAGERKASIPNYAAWAEECLNRKNDAALSADLIIGK

SEQ ID NO: 83946 - protein, 319 aa, Unknown
  Obtained from environmental sample
  DOMAIN (38)...(72): Sel1 repeat
  misc_feature (1)..(319): Xaa is any amino acid
GYGERRERARRSQDEKTAEQWYRKAAQGLPKLAEQGDGIAQYNLGNLYRRGMIVAKDEKKAAEWFSKAAAGLPKLAEQGNADAQYKLGLMYNTGRGVAKDEKKAAEWYRKAAEQGRADAQFNLGLMHYKGEGVAKDEKQAAEWIRKAAEQGHADAQKLLGMMDAAGEDPKQAAGRIRKAAEQGDAKAQMRLGVMYYKGEGVAKDEKQAVEWFRKAAEQGQAKAQYLLGTMYADGEGVAKDEKQAAEWYRKAAEQGDAAAQFNLGLMHYKGEGVAKDEKQTAEWFRKAAEQGNADAQYLLGTLYAKGRGRNPKDEEQAAG

SEQ ID NO: 83947 - protein, 122 aa, Unknown
  Obtained from environmental sample
  misc_feature (1)..(122): Xaa is any amino acid
FWGGYRQDARSGGPDYRNPAMNLKDPETSIHIGSYYLHYLIGQMGNPMLALLAYNGGMGRVRRWLAADRQRAGGALPYDLFLESIEISETRDYGRLVLSAASVYGYLYYGTSMEKTAADIYR

SEQ ID NO: 83948 - protein, 321 aa, Unknown
  Obtained from environmental sample
  misc_feature (1)..(321): Xaa is any amino acid
GDRETARSDSWADLMARCMYMVGVRRSDVFQNMSSYGLFTGGLGIHAGAERLGCMTIPAGAGNTLRQIRLIKDFKTTVIHIIPSYALVLANTLRESGEDPSALPPRIALIGAEPHSEQTRRRVEEALGVKAYNSYGLSEMNGPGVAFECREQNGLHVWEDAYIAEIVNPETGEHVAEGETGELTLTTLCRAGMPILRYRTRDLTRFLPGGCACGRMHRRIDRIQGRTDDMFIIKGVNIYPMQIEQVIMDRPEVGQNYLIVLENEGPREHLQVKVEIRDEYFVEDMRALHGLQQKIARRLHNEILVTPKVELVQSHSLPRSE

SEQ ID NO: 83949 - protein, 309 aa, Unknown
  Obtained from environmental sample
  misc_feature (1)..(309): Xaa is any amino acid
KSGTNRPSIVGSYDLFIAGGGCAGTGAAIAAGRSGIKTFAAERMFALGGTMTNALMSKIAISSCNHGIAEEFIKRLDAYQKSNFLASRHEVPVDPELCKWMLDRMVIDEAGTEVRFGTTICDVVSNNRRIEYVIIDSINGFEAVKADYFADCTGDGQLSFKAGSSYSIGNDEGYGSSPSLLFRVANVDIEKLISDMEAHPDAYVPERNTYSNHKLRPSQNRENIANGRYAHFADFVPFIRQKVKENTGFLTEWELEKILQRGLIFMNQPQGTHVLVNSTRIPFFKGNDNKELADAMVSGENKSKRPSVL

SEQ ID NO: 83950 - protein, 325 aa, Unknown
  Obtained from environmental sample
  misc_feature (1)..(325): Xaa is any amino acid
GANVSFTATGGTLGEGATGAIQGVIDAIKADAAGDPCGIQFGDGTTTLDIGSDSITFNGEWGMITLSGRITSSTFGPTIVLINGASITSTADITNTSTLSRPAIRNKGDGTVNISGGTVSSVGNSLNSDYGAVTSSGAVNISGGEISAIGIYAIRISTGKITVSGNAKVTSDSVSAIYLTNADNVDNKAERLLITGGTVENIASGPTIFSQRGVLNISGGKVLGNKSYAIRLNGGSLNISGGEVSSTNYNGSTVYNYGGGNITISGGEVSSKNGGTVYNAGGGNITISGGKVSSEKGYAVGCDAVGTSGSSILISGGIVHQTARP

SEQ ID NO: 83951 - protein, 343 aa, Unknown
  Obtained from environmental sample
  DOMAIN (41)...(169): Glycosyltransferase family 28 N-terminal domain
  misc_feature (1)..(343): Xaa is any amino acid
NRVDRRARAGASTSGYRKAGTDSGFSQNPKPRHRNGVSMKILLVTRGSQGDTFPYLRLALELKNRGHSVTINLPSVFEKEGKNIGVRVIPQVSDDVPGVLEESPGTRNLLEWTTRVIDSQFRELIPLLKENDIMIASNTEFAAGSIAEYCGKPLIRTAYAPLLPSRTIPPPVFPWPKPNPLIRPVILWWFINSGLNLMVKKTLNKKRKALGLTPVKDQGEHEPATAFNYLVYSKYLGTVDNKWKYQWKAGGYCFNDLLPYNKEELEKITGFIKGDGKDKRPTIFFSLGSIHVDRGDRFAEMLLDICTAHNYKLLVACGWWHCSAHLQKKEKSLPHGLRYSPIV

SEQ ID NO: 83952 - protein, 249 aa, Unknown
  Obtained from environmental sample
  DOMAIN (2)...(81): Arginyl tRNA synthetase N terminal domain
  misc_feature (1)..(249): Xaa is any amino acid
MYDYKEPWKLKIVEILKGFDDSIDPAQVIAEIPPKSEMGDLGFPMFGFAKLFKKAPAQIAQMVAAKLPASTADGPYVNIRLNRSELARDILSQLLDGANDTSGAPVGRPTTLAGKRVMVEFSSPNTNKPLHLGHLRNDVLGESISRILSACGAEVRRVCIINDRGIHICKSMLAYKEHGEGKTPESEGIKSDHFVGDWYVRFSQDLKEETEALEKEKGLGKKEAEAQAPLLLRAQELLRQWKPSADLII

SEQ ID NO: 83953 - protein, 514 aa, Unknown
  Obtained from environmental sample
  DOMAIN (427)...(513): Response regulator receiver domain
  misc_feature (1)..(514): Xaa is any amino acid
LISELSRGFISSGDSQTLVQEAVAKLGRFHHVSLVFVFAIDSQKKDTRLAYHWTFDDNPPRPAITNLYTYLTDIFPGTLPDCATLPIVACDDTKANTDAIFQALYAINIMAVIGAPLYVDGRLWGVMCVEQAGTPRKWTENEKGFVAMTASTIAGVIMRDIYTVKLKDAVNKANAASKAKSEFLSNMSHEMRTPLNAITGMTTIGKNAKDVERKDYALEKIEAASTHLLGVINDVLDMSKIEANMLELSPIEFNFEKMLQKVVSVVNFRVDERKQKLAVHIDREIPKTLIADDQRLAQVVANLLSNAVKFTPEKGAITLEARFMGEERGFCTIQISVADTGIGINNEQQKRLFNSFQQAESSTTRKYGGTGLGLAISKSIVELMGGKIWVKSESHKGSNFAFTIKARRGTAKEKSTLLDPGIKLEGIRILVIDDDPDILTYFRDIMREYGIKCDTASGGEEALRLVEKNGPYRLYFVDWKMPVMDGIQLTRELKKKAPENSVVIIFLGHSVMND

SEQ ID NO: 83954 - protein, 106 aa, Unknown
  Obtained from environmental sample
  misc_feature (1)..(106): Xaa is any amino acid
MMARNNAGVVNEALARQTGNREYRSKAMVLYAESSRAWDAITRNPETMTRSRMTESSGAPSINLGYLNANNALRPTSGYRPQIFVRIDKDALEPSRWEELAPLGGL

SEQ ID NO: 83955 - protein, 476 aa, Unknown
  Obtained from environmental sample
  misc_feature (1)..(476): Xaa is any amino acid
MLTLKLTIALACTLLCTTIFAQQKGTFTDTRDGKIYKTTKIGEQVWMAENLNYKVKGSKCYGEGRIIYKFIESDEIELSDAEIQANCEKYGSLYDFEIAKKVCPKGWNLPSPDEWDILFRYADTTSYTDDDAHNNYDNKIVGKFLKTTSGWDDYKDYDDKDEIKSGNGEDRYGFSALPGGRNSLRGHSRDIGNRAHWWTSSIYYPSLYIDRNYMNYDYNDVVVLFVGMPPDKDLYSVRCLQTNTQPQKITPPACPANDLQKGSFTDARDGKEYKTVKICEQTWMAENLNYEAEDSKCFGEGGKVYNPKTKKDITLSKAEIQANCKKYGRMYNWETAMKVCPDGWHLPNNAEWDKLYRFADGTSGTKRPYMSKTAGKFLKAKSGWKSEDGKSGNGEDKYGFSALPGGLGNASGSFSDFGAYWWSSSRYAYHRSIQHRSEYAYWGKGGSNQSLSVRCLQNTPAPPKGGAKSRQILYMF

SEQ ID NO: 83956 - protein, 218 aa, Unknown
  Obtained from environmental sample
  DOMAIN (76)...(138): Ribonuclease B OB domain
  misc_feature (1)..(218): Xaa is any amino acid
MPKRSTPPLDASAVLDMLRRLQRPARLDDALRALSLHRRKKNDLLILLGALAEEGRIIPFRGGKWAHADIIRMARGALAIQKNGCGFVTPEQPGLPDIFISRHDLGEAWPGDRVEVALLPGKTAHAAGAKPEGRVIRVLERRQTELPVLATRRATPRGIIALPADKRLALKLDVDIGMLAERPETGSLMLVRVGERWMRICGRRRPPHPLAVKRRRTQ

SEQ ID NO: 83957 - protein, 314 aa, Unknown
  Obtained from environmental sample
  DOMAIN (49)...(258): Transposase DDE domain
  misc_feature (1)..(314): Xaa is any amino acid
QGALSRSTWPEANESRDWRIYADFAQALIAQARPLYQNEGSGVELENAAYALDSTTIDLCLSLFPWARFRKAKGAVKLHTLLNLRGNIPEFVHISPGRVHDVNALDMLAVQPGAFYVMDRGYLDFARLYSLHDARAFFVTRAKRRMLHRRRRSRPVDKASGLRSDQTIALAGRATAKAYPAPLRRVSYADPETGKALVFLTNNFSLPALAIAKLYKARWQVELFFKWIKQHLRIKAFYGTSENAVKTQVWVAVSVYVLVAVIKKRLGLAHSLYTILQILSIALFEKKPILQVFSEREDTFLDDPLPNRLPLLDL

SEQ ID NO: 83958 - protein, 63 aa, Unknown
  Obtained from environmental sample
  misc_feature (1)..(63): Xaa is any amino acid
KSDSYALSLNIDDFISGSLPVDSYIRPNKIFTADKNIILSIAGHLNENKIRDTINNIIMIISS

SEQ ID NO: 83959 - protein, 338 aa, Unknown
  Obtained from environmental sample
  DOMAIN (202)...(324): GTPase of unknown function
  misc_feature (1)..(338): Xaa is any amino acid
MITGLLKMNISLIRILRLDKDTVNSIPGRIIEGRREKFSVVCEYGEVQAELKGSFYHNLEEGDLFPVAGDFVLVNYNSAGASLITAVLPRRSEFSRVDFMGHAAGYVKNVKEQVLAANFDYVFILSSLNFDLNLNRLARYLTASLQSGGFPVFILTKADLCTHYREKEAEVRKFAREVPVIPVSSKTGIGLDELAPFLEPAKTAVFLGSSGVGKSSLLNRLAGRRLMDVKDIREDDSKGRHTTTHRQLFRLSPDDDLLPDGLPVMFPGALIIDTPGIREVGLWDSREGISLAFASIEELFSKCRFSDCSHQTEPGCAVLAAMEDGSLPPEQWKQYQAQ

SEQ ID NO: 83960 - protein, 66 aa, Unknown
  Obtained from environmental sample
  DOMAIN (1)...(66): Elongation factor TS
  misc_feature (1)..(66): Xaa is any amino acid
MKGKPANVIDNIVKGKVSKFLKEICLMDQAYVKDDDKTVAQALADAGKKFGFKINIEDYVYYKVGN

SEQ ID NO: 83961 - protein, 84 aa, Unknown
  Obtained from environmental sample
  DOMAIN (13)...(83): Prokaryotic dksA/traR C4-type zinc finger
  misc_feature (1)..(84): Xaa is any amino acid
MGRYDSKDLADVASDDIDRKMIEAIGSQELKRLKLIESALTRIKQGKYGHCIKCSKRIPQDRLIAIPYALMCIECKSEEERRNR

SEQ ID NO: 83962 - protein, 113 aa, Unknown
  Obtained from environmental sample
  DOMAIN (1)...(91): Transcriptional regulator
  misc_feature (1)..(113): Xaa is any amino acid
ERQNISKLYLEQIVSLLHTSDILRANRGKQGGYMLAKDPAKCTVGQVLRITEGSLAPVVCLDNDVNMCDRIEVCKTLSMWTGLNKVITDYLNGVTLQDLLEQHQYQGADHYII

SEQ ID NO: 83963 - protein, 327 aa, Unknown
  Obtained from environmental sample
  misc_feature (1)..(327): Xaa is any amino acid
GAHRRTIPDSVTSIGGGAFSNNKLTGVTIPNSVISIGDDAFANNQLTSVTIPDSVTSIGEGAFSDNKLTSVTIPNSVTSIGDDAFANNRLTSVTIPDSVTSIGEGAFYENRLTSVTIGNGVTFIGEEAFAKNEITRITLPENAIGKFAGLGTEDDFKFDGKGTITGYKGRETWFVIPAQIRGKPVTSIGAKAFREKKLTSVVIPNSVKSIGDNAFRENRLTDVTIPNSVKSIGDNAFRENRLTDVTIPNSVKSIGECAFYSNRLTSVTIPNSVTSIGEWAFANNQLTSVTIPNSVTSIGEWAFRSNKLTSVTIPNGVTSIGKGVSAT

SEQ ID NO: 83964 - protein, 72 aa, Unknown
  Obtained from environmental sample
  misc_feature (1)..(72): Xaa is any amino acid
MQLGENKSRGGHLYLANNKEETYYDVEGKVGYPFFGQLILDCLNRTENAMTPGHAFKAAELCVKAQMKAGKI

SEQ ID NO: 83965 - protein, 152 aa, Unknown
  Obtained from environmental sample
  misc_feature (1)..(152): Xaa is any amino acid
GHGSESAEHREIARRAHHKIHVVAASDRAAVAFSLSGGNRHDAPEGGLLLGCFERLPERLFILMDRAHEGDKMRGKAAGMGFVPVVPPKRSRREPWEYDKERYKKRNEIERFFLRLKRFRKIFTRYDKLDVVFAGFIYFAMVADAIISVNRL

SEQ ID NO: 83966 - protein, 195 aa, Unknown
  Obtained from environmental sample
  DOMAIN (1)...(163): RecF/RecN/SMC N terminal domain
  misc_feature (1)..(195): Xaa is any amino acid
MLRELRIKNLALIENLTLDFASGFTVFTGETGAGKSILIGAIGLLLGERASSEMIRSGCEDAEVSGSLDIENIRSKLREFLREASIDAEDGSLIIRRNISKSGKNKIHVNQVPLPLSTLKALGDLLIDLHGQHDHQSLLNEDTHADIVDALPEAAAAKGGYISSYNAYTASTQELRDAQRAARNSPQSPIIPQKK

SEQ ID NO: 83967 - protein, 95 aa, Unknown
  Obtained from environmental sample
  misc_feature (1)..(95): Xaa is any amino acid
MIRSAEYLALAIRLDGQKELLGMWIEKNEGSKFWVGILNELKNRGVQDILLAAVDGLTGFPDAVNAVFPKAEVQLCIVHMVRNSVKYVPYKDRRR

SEQ ID NO: 83968 - protein, 96 aa, Unknown
  Obtained from environmental sample
  misc_feature (1)..(96): Xaa is any amino acid
MNIKDIVYGEIEIPDRFMLIIDTPEFQRLRRIKQLATANMVFPAANHTRFEHSIGVFHVMKRIGCHFFDFFKKLDTNIVFDEVDIDAVLMAALLHE

SEQ ID NO: 83969 - protein, 282 aa, Unknown
  Obtained from environmental sample
  misc_feature (1)..(282): Xaa is any amino acid
VTVPAVQTFTIKNTGSTGAVTLKPLPSSSKFEITGLTPANGVIAASGTATFTVQPKLRLGPGTHEESIQITGNNGASASVIVSFTVTEEPTWTISASPSELSFGAVLGPPPYTAPASKTVTITNTGTNEVALTVTKQTGSAYDVGPLSLNIAAGKFATFTVQPMAGLPIKKYNEKITITGSGASAEVDVSFEVVGEPQYAFSVKPEDVDFGSAREGYKTPPVAQTVTITNEGTIPLTLTPPVSTERENRSTKSGRCPRRPSRLDVRRRSRLAVRELYGASYP

SEQ ID NO: 83970 - protein, 94 aa, Unknown
  Obtained from environmental sample
  DOMAIN (1)...(87): Diaminopimelate epimerase
  misc_feature (1)..(94): Xaa is any amino acid
VWGGDDREDVEFVHIISNDEVRMRVYERGCGETQACGTGACAAVVAGVVSGLGGNDVTVRLLGGDLRISWDGDRGHPVFMSGPARAVFHGELMG

SEQ ID NO: 83971 - protein, 291 aa, Unknown
  Obtained from environmental sample
  DOMAIN (217)...(264): Flagellin hook IN motif
  misc_feature (1)..(291): Xaa is any amino acid
MRRISSDMPHIDTQYQLRRQEERLAKMQSQITSENRINELRDDPLAASHTVRYQSYLARLERFEKNTLYAKDHYNVVYGYMNEALSIMQRVRELAVQGANGTYTPEDQKLMGMEINELIKELAALSNTVGPDGKQVFAGDKAFTEPFRLVEGTIPGGGESMVVRVEYRGAGASRRTEISDNTYVDLDLGGGEAFWAEKMQIFSSVDASNYRVSASGSFFIDGNEIRVAPGDTLPAIVAKINDSPAPVQAYIDPDTRGLVLEGTNPHLIRMEDAVSKNGARADSAEGLTRYP

SEQ ID NO: 83972 - protein, 244 aa, Unknown
  Obtained from environmental sample
  misc_feature (1)..(244): Xaa is any amino acid
MRNGLMNAADQARIKEINAHLKSIVAYSINFLKGIIAKIQANEELGKGVRKTKVGAFDRIDVKEVAKKDVELKYDKKTGYMGTNVAGAKVAEVSPFDRILTIRKNGMYTVTDLPEKLFIGEDAWWIGVADKEKLSKTVFTIIYKEKETELACIKRCVIEGWIMNKDYFLVPDGALVLHIDTRPKFTFTLKYLPKPRLKVLAEDFKAHDYPVRGLKAGGMRLSNKQVSKADLSKMDIGRKKDGDA

SEQ ID NO: 83973 - protein, 322 aa, Unknown
  Obtained from environmental sample
  DOMAIN (3)...(284): HlyD family secretion protein
  misc_feature (1)..(322): Xaa is any amino acid
LTESAETYVHLVQEGQMVKEGDLLVEIDPRPYQVQLMQAEGNRAKNRAALHNAKLDLERYKSLFEQGVVSSQQLDTHTAAVEQLEAALMSDEGSVESSKLNLTYCRITAPISGRVGLRNVDPGNLVSTNDPNGIVVITPLSPIHVVFAIAGDSISKVYSPHESQRLNVEAWDKDLTKKLATGKVYALDNQVDLATGTLKIKALYENSDRSLFPNQFVNVRLFVDTLRNVILVPSASIQRGIQGDYVYVVKEDSTVELRVVGILAAQGDVTALNKGLQAGETVVTDGIERLRPGARSPYLAQSRTGGATARRPWIQEAQVLRP

SEQ ID NO: 83974 - protein, 310 aa, Unknown
  Obtained from environmental sample
  DOMAIN (1)...(310): AcrB/AcrD/AcrF family
  misc_feature (1)..(310): Xaa is any amino acid
MGANDQLLSSEQYQSVIVAYKNDSPVYLSDVATIIDGAENVKQAAWMNDTPAVILNIQRQPGANIIAVVDRVKRLLPQLTASLPSSVEVEILTDRTTTIRASVRDVEFELMLCIALVVMVIFVFLRTLSATVIPSIAVPLSIVGTFAAMYALGFSLNNLTLMALTISTGFVVDDAIVMIENIMRYIEEGENPLRAALKGSEQIAFTIISLTVSLIAVLIPLLFMGDVVGRLFREFAITLSITILVSAFVSLTLTPMMCAKLLKHKKPDEQNRFYRASEKVFQSIIDFYGRTLQWAVGRQPPLANHSVFVN

SEQ ID NO: 83975 - protein, 313 aa, Unknown
  Obtained from environmental sample
  DOMAIN (1)...(271): Domain of unknown function DUF20
  misc_feature (1)..(313): Xaa is any amino acid
VPRPIAFSFALLVIFGAMALASWIIMTNITHVAAVIPAYQYNLEQMSRRVLSMVPFTEPLTFKKLLADVDFSSMTRGAVREVTSAFGKGAYVIIYLIFLFMEQRSFDKKFKKLLPKSGGGDEVNAIIARINSDIRTYIGIKTLASLVTAAAGYIVFASVGLNFASFWTFLLFVLNYIPILGSIVATALPAVFALMQYESLAPFFVVLFGIVIIQQAVGSIIEPRFMGDKLNLSPLVILLSLATWNLIWGIPGMLMCVPLTAIVVIIFTYFPQTRPIAVALSRNGDIRGVGADEGTGRPKRTRERGQEPKPKPG

SEQ ID NO: 83976 - protein, 345 aa, Unknown
  Obtained from environmental sample
  DOMAIN (78)...(299): E1-E2 ATPase
  misc_feature (1)..(345): Xaa is any amino acid
MIVGAFLLIAGIVLEKVFHDNSYISFTLITAAYLLLGFDIIIKALSNLLKGQVFDENFLMCIAAIGAFAIGEYPEAAGVMLFYQIGEYFQDRAVDKSKKSITSLMDIRPDYANFLKNGEIIKTSPDNVCIGDIIIVKPGEKIPLDGIVTDGTSMLDMSALTGESVPKKADVKNEVLSGSVNLSGKLTIEVTKTFGESTVSKIINLVENAASKKAKTENFITRFARYYTPIVVILAVLLAVLPPLFFMFEWKLWIHRALVFLVISCPCALVLSVPMRFFAGIGAAAKNGILVKGGNFLEAFNKLDTVVFDKTGTLTQGVVRLHQFSRPTDLQRAKCFEWTLTPNIF

SEQ ID NO: 83977 - protein, 199 aa, Unknown
  Obtained from environmental sample
  DOMAIN (1)...(197): L-rhamnose isomerase (RhaA)
  misc_feature (1)..(199): Xaa is any amino acid
MVKDGLTLSSPDEKIRRFWIEHCKATRRIANNIGMVLKDKVLHNIWIPDGFKDVPADRLGPRLRLKTALDEIFTESFPNVIDSVESKVFAIGVESYTVGSNEFYMSYAASRPGVYNLLDNGHFHPTELVSDKIPALLPFFDKIPLHVTRSVRWDSDHVILYDDELREIMKEIVRNDALEKALIGLDFFDASSIVSLHGS

SEQ ID NO: 83978 - protein, 191 aa, Unknown
  Obtained from environmental sample
  DOMAIN (2)...(191): Acetokinase family
  misc_feature (1)..(191): Xaa is any amino acid
MIILTLNCGSSSAKYQVYDWENKDVLAVGIVEKVTIGGSFITHKAKGKEEVVINHDCPTHTDAIDLIIKTLTSKDMGVISDMSVIKAVGHRVLHGGMKFTKSVIVNDAAMAAFNEVKDLGPLHHPANIMGIEAAQKVLPNVPHCAVMDTAWHQTMPAESYMYAVPEEWYKNIRCARYGFTKQFPPYRKTPR

SEQ ID NO: 83979 - protein, 99 aa, Unknown
  Obtained from environmental sample
  misc_feature (1)..(99): Xaa is any amino acid
MLNRQEALREVRENILPFWQGMADEENGGFYGEADFYGNIDKTASKGCILNSRILWTFSGAYHILGDDDYKAYAQRARDFLSSAFLEQTHGGLYWLVRH

SEQ ID NO: 83980 - protein, 96 aa, Unknown
  Obtained from environmental sample
  misc_feature (1)..(96): Xaa is any amino acid
MTDREILERIDHTLLKAAASWQEVKTLCDEAVRFKTASVCVPPSYVKSIQNEYADSLNICTVIGFPLGYSITAAKTLEAERAVQSGADEIDMVINI

SEQ ID NO: 83981 - protein, 321 aa, Unknown
  Obtained from environmental sample
  misc_feature (1)..(321): Xaa is any amino acid
MVYYEGDLLNIFFHALIARPEIAFRGNRKDHYREWFVSSDEYKKILDELYLQNYVLVDIKEFYTVTYTNKTKTVKANKLLVPQGKRPLILSVDDLSYYDTNRKNGTVHKLVIDKNGSIAAWTDTPSGGEISYDLDIITITEDFIKKHPDFSIRGAKGIIALTGYEGILGYQTQAENSKTPGYQKEIENAVIIVNKLKELGWRMASHSWGHLNMPKVPMSWFTYDNKLWDREVKPILGETDLYIYPFGAGLENIEEKHKILRDRNFNLFFGVGSGFGYKIGPNSEYIFLSRRNIDGQYFRIFRNSDKKLFDIDKVMDKQNRR

SEQ ID NO: 83982 - protein, 272 aa, Unknown
  Obtained from environmental sample
  misc_feature (1)..(272): Xaa is any amino acid
CEYWTAIPAGTAAGASTFGTSGIFAIAYGSDRFVAVGGTGKMAYSDDGVSWTAVADSTFGTSGIFAIAYGGGRFVAVGNAGKMAYSDNNGASWTAVADSTFDTDAIYAIAYGGGRFVAGGVNAKMAYSDNNGASWTAIPEGTRPFSSTTVSSGANRIQAIAYGGGRFLVGCLVGHIAYSDNNGASWTFINQGSGYGYSMFTSEILGFAYGGNRFVAVGVSGKMAYALNGTNWLPVTDSTFGTYSTSAINAIAYGGGRFVAVGNAGKMAYGRY

SEQ ID NO: 83983 - protein, 321 aa, Unknown
  Obtained from environmental sample
  DOMAIN (172)...(253): Fibronectin type III domain
  misc_feature (1)..(321): Xaa is any amino acid
QGGGNWQPLYEVWLGTSDNATKAQKKGGDIPGGITETIISGLTNGTTYYVWVKAKNIVGTSGFSQPANAKPTAYTVLPKVPTLPTVTPGSRSLRVSWPAAEGALSYEVWVSVTNNPANAQKHGVDISGTTVTLTNLVNDTTYYLWVKAKNNIGTSEFSPQASGTPSAFASAPSAPQAAPTIIAGYTQLTVSWEAVEGTNVYEVWTGTSTNPTIAAKRGDDTEGLSMVITGLTNGTEYYVWIKAKNTVGVSSFSPMATGTPSAFTITPQAPATPSVSIGSGQITVTWAAVEGAAAYEVWMGTANNSASASKNSADISHPRPI

SEQ ID NO: 83984 - protein, 64 aa, Unknown
  Obtained from environmental sample
  misc_feature (1)..(64): Xaa is any amino acid
VILTPVVGWTTHHAIVEFKGKWYLFHHDCVPSGGKTWLRSLKVAELEYDSKGAIKTIDGGGPKS

SEQ ID NO: 83985 - protein, 243 aa, Unknown
  Obtained from environmental sample
  misc_feature (1)..(243): Xaa is any amino acid
MALPEGNFFELLRSVFGNIKTPFSKHKLLEDLFAFLSKKENRKTIAAFIGEQDHKVIAATALLNEPETGDLEKFFAGEMTEAELQAVIINLEERLILYRFRDEKNMRLALNPVLDEVLIPYIKDTRPLFPSYMKENNAETEATPQQNGRSSYISDPRIMAALFTFIIEEEELFKAETGTEPKGTKSSGTRFQAALIPELRTKVLDGARQFFPELDFELTVNKLIPLGLFSRTDRLLIPTGKKC

SEQ ID NO: 83986 - protein, 295 aa, Unknown
  Obtained from environmental sample
  DOMAIN (84)...(154): Sigma-70 region 2
  misc_feature (1)..(295): Xaa is any amino acid
LIDKITKHHEKVREGERRLRELNDRAANPVFASKKEKYKKEINAITDELNRFFDRYETDSETFHADYQKLKQAESASRAAKAELIEANLRLVVSIAKRYTNRGLQFLDLIQEGNIGLMKAVDKFEYSRGFKFSTYATWWIRQAITRAIADQARTIRIPVHMIETINKLIRTQREQVQRLGREPTSEEIAKAMDMPVAKVRKVMKIAQEPISLETPIGEEEDSHLGDFIEDRMIISPIEQVERQRLRETVDNVLKTLSEREEKVLRMRFGVGDESCEHTLEEVGSEFAVTRERITQ

SEQ ID NO: 83987 - protein, 146 aa, Unknown
  Obtained from environmental sample
  DOMAIN (12)...(35): 4Fe-4S binding domain
  misc_feature (1)..(146): Xaa is any amino acid
MSAALGTAKAPVYTELAECHDCYKCIRKCPVKSIKVEKGQASILFDRCVYCGRCVMSCPAHAKHYRNDVEKVKLLLADGRKTLVSLAPSFVSEFTDWKTEELIAVLKKLGFAAVSETALGADFLPPAAPVNLRQTLSAVLPKASRP

SEQ ID NO: 83988 - protein, 294 aa, Unknown
  Obtained from environmental sample
  misc_feature (1)..(294): Xaa is any amino acid
ELTPGYRRLCFPQDIFAELGINIPDTWDELIAILPIIQKNNMNVGVPSVATTVQANIDFSNFLAHLFQRGGRLYNDEGSRTLLDSETAVEAFDVYTKFFTHYKTPPVYDFVNRFRTGEMPLAFADYTNFNTLEVFAPELRGLWGFAHMPGLRKPDGGIDRSVPTGTLASMIFSNAKRPDLAWEFLKWWASADTQLRFGRELESVMGAAARYPTANYDAFTRLSWGSEQMAVLREQRSWTVGTPEVPGGYYVSRHITNAVRRILNEGEDTRETLLDYSITIDDELIKKRKEFGLE

SEQ ID NO: 83989 - protein, 339 aa, Unknown
  Obtained from environmental sample
  DOMAIN (1)...(66): His Kinase A (phosphoacceptor) domain
  misc_feature (1)..(339): Xaa is any amino acid
FVGEIHANISNEIRTPLDSIIGFADLALDDEISNKTKDYLTNIRVNADWLMQITNDIMDISKIESGELSLKKIPFDMHELFASCRTLVMPKAVDKGILLHFYAEPSVGKKPVGDPVRLRQIFVNLLSNAVKFTNTGMVKLVSDIIRIDDKSITIHFEIKDSGVGMTAEQIAVIFEPFSKMETTTANRYGDTGLSLPITKSIIEMMGGKLSVDSTPGVGSRFSFALTFDTIDVSMEEMFQSRIFPKELERPIFNGEVLICEDNFMKQEVIREHLTRVGLKTVIVENGLIGVELVKSRIRKGEKLFDLIFMDMNMPVMDGLEAAVEIVKLILKFHCSPDCQ

SEQ ID NO: 83990 - protein, 144 aa, Unknown
  Obtained from environmental sample
  DOMAIN (4)...(144): FGGY family of carbohydrate kinases, N-terminal domain
  misc_feature (1)..(144): Xaa is any amino acid
MAKYVLSLDQGTTSSRAILFDHEQNIVAVEQKEFTQIYPHEGWVEHDPLEIFSTQYTVMADLIRNNKINIKDIAAIGITNQRETTILWNKNTGEPIYNAIVWQCRRTSSVVDALVKDGLGDYIKKTTGLIPDAYFSGTKIKWIL

SEQ ID NO: 83991 - protein, 247 aa, Unknown
  Obtained from environmental sample
  misc_feature (1)..(247): Xaa is any amino acid
MVLIDGQTPCMELSAVPFTYNNKWKLTTFRDNEGDMLFPLEYGQHSLRLQVAMGGMGAMLSVMEESVYRLNWIYRKILVLTGTEPDIYRDYRVDVVYPEVIEAMDLESKILYKLVDDLTAYSGERSAQTAATLTLARQLELFVRRPDKIPRTMVNFKFNISALGDSLLALSQSQLDVDYIVVSAAERETAAGKGEFFCCRFPRDTLVPCFVFCGLQQPRQRVSQRRRCRKRVDACRARSKYDSEGDD

SEQ ID NO: 83992 - protein, 327 aa, Unknown
  Obtained from environmental sample
  DOMAIN (164)...(223): KH domain
  misc_feature (1)..(327): Xaa is any amino acid
RDPPPYRGCIRAEAKGRILLEAKEKVIQERNQQEKETRERRAELQRLERRVVQKEDALDKKVAQIERTEQSLADKEKVCQERENALIREEERYRAELERISGLSAEDAKALIIKDLESEARHDAQALINKIEQEANLAGEKKAKDILVATIQRFASEVTGDVTVTTVNLPNDEMKGRIIGREGRNIRTLETLTGVDIIIDDTPEAVVISCFDPVRREIAKVALERLILDGRIHPARIEEIVTKVSKDTSQKIFEEGEKVLFDLGIHNIKQDAIRALGRLYFRTSYGQNVLNHSREVAVIAGMLAAEIGCNRDPDQAGGPSARHRQGH

SEQ ID NO: 83993 - protein, 328 aa, Unknown
  Obtained from environmental sample
  misc_feature (1)..(328): Xaa is any amino acid
MNIIEYAGSMELQARGTKEVMVYAGRGSSTLRALVWNETAQGRGFIDTDISEQSAHLFSAGVKDFAVADFPYPMIWIVTKAGELISCTINIRAGILAYARHPTEGKVEAVGVAPQAIGDVIFLVVKRGEKRCIEHIILEDLVNSNFSESHYVDAGEKRSYSSPTKTITGLQRFAGKTIRVFADGAVEPPVKVNEEGIAEIQTAVTTLHIGLPYQAAFTPNNRQVPANGTSMGKKRRIEKITLKLYKSIGGHAGTNENKLTELITKRFGEYQLGTAPEPFTGEIDVTVSGNIDTEGELIILHKDPCPFTLLALAERVAIWRLISADSDL

SEQ ID NO: 83994 - protein, 199 aa, Unknown
  Obtained from environmental sample
  DOMAIN (7)...(195): Domain of unknown function (DUF323)
  misc_feature (1)..(199): Xaa is any amino acid
ALEKVYSIDESSIVLAEGSKWPPISSQNNNQGRGKDNWDANGYRLPTEAEWEYAARGGKGSPGNFDWAGSNTASEVAWYGGTGGTVTDRVTHPVGLLKPTILRTFDMSGNLCEWCWDEFASGYYTTSSPSITDPKGPDSSLTVVISNPGQDTPRVRRGGSWNHGVNNTRTFIRDSFQPTDTNMTNFWTIGFRVVRGPLQ

SEQ ID NO: 83995 - protein, 320 aa, Unknown
  Obtained from environmental sample
  misc_feature (1)..(320): Xaa is any amino acid
LIPGDCRHNPNSDTPTVNRNPGPNTYIVKFVTGTSVISIDDLHLTEGARIPKLPALTKDNDAFGGWYTDNGTWNELWNFDTPVTRDITLYAKWEPPPGIKVHFETNSGTPTVGDQNLTNGTLVVEPPPITRDGYAFDGWYKEAIFTNKWNFAADTVNAAPGSTITLYAKWHQVVDVYTVSFEPNGGSPAPNTQNITKDGKVFMPQAITKEGYGFGGWYKEAAFTNRWDFAIDTVTGDIILYAKWDPALYFVEFDPNFGDMPLAVEFIANGARIYEQIPIEFKQDYGFGGWYKDADCTDGNKWNFASDTITGKYHPLRQMG

SEQ ID NO: 83996 - protein, 138 aa, Unknown
  Obtained from environmental sample
  misc_feature (1)..(138): Xaa is any amino acid
LYNVFLGENSPLIAGRIDSQAHEMGARRMENFIPMMTGGLRKRPGTWYDGTTKGNKEARLIDWLLSDGTVLILELTAGAIRLWRDNREFSEDEDVTFRANNYADALLQVLRIEEPSKPYRKTPTIPPKQMETRIHYLK

SEQ ID NO: 83997 - protein, 349 aa, Unknown
  Obtained from environmental sample
  DOMAIN (1)...(349): ArgJ family
  misc_feature (1)..(349): Xaa is any amino acid
SLGGGMIRSAEHAVIANSGNANACTGEGGIAVARKMASLASGLFGISPKEVAVASTGVIGVQLPIEPIESSMEAIRNSLRGDEEGHLMALEAIMTTDTRKKGGAVEIEIGGKSVRIGGMIKGSGMIHPNMATMLCFITTDAAISKEALDASLRSAVRRSFNRVSVDGDTSTNDMVIVMANGEALNSPIEAGTPGYEIFSQALEDFCVSLARELARDGEGATKLVSVTAQGAKDEDNAEILAKSVVSSSLVKAACFGSDANWGRILCAMGYSGADFNPDEVDVSFASEGEEIAVCRGGEPLPFSEEDAKRILKREEIEIRIKAGKGSGRATAWGCDLTYDYVKINGDYRS

SEQ ID NO: 83998 - protein, 184 aa, Unknown
  Obtained from environmental sample
  misc_feature (1)..(184): Xaa is any amino acid
MDGNVYSARMEKVKERMAEAAFDAFFISPSSNLFYLSGYAPGSDERLLLLVLPSKGEPFLLANLLYKEQTKIIPTKDQVYWKDGEDPFELLKTEVEKRNIKLNKVAIEPYIPAFFSLPLGKTFPSAVFELGSSLIDPLRQYKDENELDLIRTACRESDRALGVLTEKGSYWIGKTETEFFTELS

SEQ ID NO: 83999 - protein, 308 aa, Unknown
  Obtained from environmental sample
  misc_feature (1)..(308): Xaa is any amino acid
AYVILEPENPVRREEFAEAVLRTHTNEEDKVDMFSLLEIQKFCLYSYTSCGWFFNDIEGLEPVQNMRYCLRAIELLSKYLPDESVLESEILTILSKITSNEHHKTGTEIWTEWVRPKIPVSCILIGAEAVKRHLELPAQPSPHIKINSLKSMDNQLILNATYTHPNTYENKSANVLVVTDSIGRVKIVLQTVNPNIKRIPIFVEKDAIDQTNFKNLYPNAFVFRLHEFPQDILAEINEMHSRVKLSSISKDLEDFYEKFNINLDCLADRTDSLAVPLRQCMIFNLTVKIRGLALEALYNDPATLALKK

SEQ ID NO: 84000 - protein, 95 aa, Unknown
  Obtained from environmental sample
  misc_feature (1)..(95): Xaa is any amino acid
MGINPLYLAIHGHFYQPPRENPWTGIVEMQESAAPSHDWNARIAEQCYSPNGSSRILSSNGRIEKIVNNYSYMSFNIGPTLMNWIRTQGQMFTTA

SEQ ID NO: 84001 - protein, 260 aa, Unknown
  Obtained from environmental sample
  misc_feature (1)..(260): Xaa is any amino acid
MSAFPKRKSNADPGERAYAYAKACGIIGKSFVGKRMAVLGKLNALAEFGRLVFPDASNELPGRELLVDLERRLLQRTIRHITAVINSYSNPPELLIRQLRSCEYADLKTCLHYITADKPVPNALCDIGKYGTVRFSAYPDLKAMVSGTEFEFILSRDLKADDFELTSLEAELDLQYYTLLMKSLQCLPAEDRLLAQRILAEEISLRNCVWALRLRTYFEKKAEETHKYLMNLEIPQGPPPEIPGDIPPRFSSGEARIPAK

SEQ ID NO: 84002 - protein, 320 aa, Unknown
  Obtained from environmental sample
  DOMAIN (25)...(320): Asparagine synthase
  misc_feature (1)..(320): Xaa is any amino acid
VDARMRIWDWTPAKPAISLPEALVQTEEILREAVNLRLTADVPLGAHLSGGVDSSLVTALMAERGPVKTFSIGFTQKDFNELGYANLVAKHLRTDHTEFTVTPDAIRIMPELIDSYDEPNADPSQIPMYYLCKLTKDKVTVALNGDGGDESFAGYERYLGMLYQSYFRKIPKALRLALYTAIRHLPENSAHRSFLRRLKWLCKVSLSSEAESYLQAELSFDEALKQQIYTGQMPRGRGAENFVETFTTAPADNLLDRLLYTDIKLYLNHDLLTKADRSAMHHALEGRSPLLDVRLMEVRRRSAGYYKIRNFQLNIYSKNR

SEQ ID NO: 84003 - protein, 88 aa, Unknown
  Obtained from environmental sample
  misc_feature (1)..(88): Xaa is any amino acid
VEINRADYETLLRVPGIGAKTARRVIETRRSRSINFESLRRLGAVLKRARYFINCGGAFIERPDDPLRIRRHLSDIDGAGLQLPLFEF

SEQ ID NO: 84004 - protein, 107 aa, Unknown
  Obtained from environmental sample
  misc_feature (1)..(107): Xaa is any amino acid
GGHDRSAESLSTRVQTSDEAILPKGTAVISDAGRTGSSESVGGCETASRIQEYLSGIPEWTKDSWDKPELQGVYIDIAPDGKAKTIERVRIRLGTGDQGSGIGECCS

SEQ ID NO: 84005 - protein, 424 aa, Unknown
  Obtained from environmental sample
  misc_feature (1)..(424): Xaa is any amino acid
VYARWKPVPANSITITFDTNGGTPKPAPKVLTVGSSYGTLPTVSKTGCKFLSWANDIGEVKSTTKISVAGNHTLYAIWDKPTPTPPPTLKCTVTFHRNGGTSAAIPQTQAPHNGRITLPTPPTREGYTFDGWNTKADGTGTAFTASTLVTADIAVYAKWKPVPKKMVTVTFSANGGSTPNPAKKELTAGSSCGSLPAATTRAGCVFEGWNTKADGSGTVFTASTPVDAAITVYAKWKGNTYTVTFHRNGATCDAIPQITATYNSKITLPAPPTRPEYTFEGWNTKADGSGTAFTAGTPVTADIGVYAKWKAVPKKIVAVTFNANGGSAPNPARKEVTAGSACGSLPAATTRAGYAFDGWNTKADGSGTAFNANTPVEAAITVYAKWTANAYTVTFHTNGATGDAIPQVTAALHSKITLPAPPHK

SEQ ID NO: 84006 - protein, 243 aa, Unknown
  Obtained from environmental sample
  DOMAIN (4)...(174): ubiE/COQ5 methyltransferase family
  misc_feature (1)..(243): Xaa is any amino acid
LTINTVGKFREVADSVTRLAGLKLYCASAVADSPRTLDLCCGMGRITTELARRGFAMTGVDITESLLETAREDALYEGLDIEYVQADARSFVRPAFFDMAVNLYISFGYFENPEDDLQMARNVHESLKPGGAFIVETLGKEIAVRDFTPGEWFERAGYAVLTEYEAVDSWAALKNRWILIPNAERPNGARIEKTFTQRLYAGTELRALLFEAGFAGVELYGGWDERPYDQDAEILIAVGRKKG

SEQ ID NO: 84007 - protein, 182 aa, Unknown
  Obtained from environmental sample
  DOMAIN (144)...(175): Rubredoxin
  misc_feature (1)..(182): Xaa is any amino acid
FQDRPRLKVQNRKNLEAAFAGESQAHVKYQYFASKAEKEGYQQIGAIFRETALNEKEHAKIWFKLLHKNDVPPTTENLKAAADGENFEWTDMYAGFAKTAKEEGFADIAALFEMVGKIEKEHEERYRKLLANVEGGLVFSRDGDQVWQCSNCGHIIVGKKAPEACPVCKHPKAYFQIRASNY

SEQ ID NO: 84008 - protein, 326 aa, Unknown
  Obtained from environmental sample
  DOMAIN (1)...(324): Protein of unknown function (DUF1015)
  misc_feature (1)..(326): Xaa is any amino acid
KPVARERIGVCALVKLVGLEEGIVLPHEYTLRGPSRDRYEQMETTLSNTGQIFGLAADDDGKFYGLIREIMAASPLLGEFTDDNGAKHSLYKCSYAGLIDRAKELMKTRSILIADGHHRYETALRFYRERGDEAFSHVMMTLVSMADPGLIIRPFHRLVRKTDQGRSVGNMLDELAKYFDVVPLGKASADGVYKALAGQSKAEMVYWDCAKEEIYDLRLNKGGEAFLAGVMPEQSDKWKRLDVSKINCIIINGILSLPLDGQVLHDIVHYANDAAVGAEKLLGAENGYYYGGIFIRPVSIGVVSDTVKGGERMPQKSTNFIPARHK

SEQ ID NO: 84009 - protein, 110 aa, Unknown
  Obtained from environmental sample
  DOMAIN (1)...(80): Imidazoleglycerol-phosphate dehydratase
  misc_feature (1)..(110): Xaa is any amino acid
NGGGDDREPFCTMTDSFPGSHLISVSEDGTEYKFQTDVVEDFWQGFVSAVGCNLHLEILRGRSDHHKIEAMFKAAARALRAACEIDERAKDSIPSTKGSLPGFDTPGVLV

SEQ ID NO: 84010 - protein, 138 aa, Unknown
  Obtained from environmental sample
  misc_feature (1)..(138): Xaa is any amino acid
SVTPLSDLTGELRRLRVPKIFIVMFELTYRYTGVLLNEAYCAGLAYSLRSPNRKGIKMNDMGSFAGVLLIRGFDRAERVYNAMKCRGYTSGQTVQNIPQNKRLSINDFIFLFIVCLLCATFRFIDVNALFAVILGRFI

SEQ ID NO: 84011 - protein, 478 aa, Unknown
  Obtained from environmental sample
  misc_feature (1)..(478): Xaa is any amino acid
MEIEYSFNADGKALRPVVSATLEIGGNSWALPFYEQTDIFHYAIPIQQAENFSIILPGKNDNNFIKIHSIEFKERWFGFFSRRDSGGVPKGTARFFASPFVTTRPVDSESSSVWEIDVPGGFSVPTGFYTVLSADLLPGKDAAFDAGKLHLDLSPALKRLNVPAGLVSPRPLALKGERVDSLRQSYAALPPFPEPITADPGLVLSWPAENWRDKRYEVFRWEQFPSLLIFDFADYAIQDKMLKRLAFFVEKKGFRGRLAPDSEIAELHAWNAHDYRAEDLARFFQAVRTSQFSLLAEERELERILFDAGIIGTTGGTITAGEGGIVSVSRESNASLRALFMAHEGFHGIFFIDADFRDFTRRRWQQFPAAAKRFIVSYFNYQQYDTVDEYLLVNEFMGHVLQQPVSQAGRYFGVTLPSRLETSWRKQDLPPKDEASGSWPVLAEAFTREAQAFSDYAANRWGLAAGRVSLVTVKRSEK

SEQ ID NO: 84012 - protein, 99 aa, Unknown
  Obtained from environmental sample
  DOMAIN (6)...(77): Bacterial flagellin C-terminus
  misc_feature (1)..(99): Xaa is any amino acid
GLWRAARIGNRSIGTLDAAIKIINKQRADLGAYQNRLEHVVRGLDVGAENLQATESKIRDTNMANQMVDYVRDQILNQSGVAMLAQANQRSTSVLQLLQ

SEQ ID NO: 84013 - protein, 325 aa, Unknown
  Obtained from environmental sample
  misc_feature (1)..(325): Xaa is any amino acid
ERELAKKSKSYFDEITASESSPEDSPSEKSNDDKKPPSNYNERYTSRTDPDARASQKKGKPLALNHLGIISVDTRSHVICGVAVDYADKKDSETTENIMEQTIGNLSESGLSVEEMLADTNYSSGQTYRYLASRGVTAYIPPCGSYKSGRDGFSYDGEADCYICSRGVKLTFRGITRLKDHKTTGRAYLSNARDCRNCHLKKQCCKSKGHKRIDHSSDKPYYDEAHERIGTALGKRKMRLRSATVEPVLGTLLTFRRMKKVYTIGQELARKQFLMAAAAYNLKKLMGAIGLKKAVAAVNAAKEAIRKNWNMAQFIFGGTRPILSL

SEQ ID NO: 84014 - protein, 81 aa, Unknown
  Obtained from environmental sample
  DOMAIN (12)...(48): CheC-like family
  misc_feature (1)..(81): Xaa is any amino acid
MLGDELQDVEQEVADTVGEIANMVSGQARASIAEKGVMLQGSTPTIVVGLGHRITHLSKSPVMCIPFTMPDGSFTIEFCLE

SEQ ID NO: 84015 - protein, 137 aa, Unknown
  Obtained from environmental sample
  misc_feature (1)..(137): Xaa is any amino acid
VQEEDFLITGMHCASCARLVERRTLVVSGVAEAFVNIATDTLRLRHDPQKFRYEQLEAAILGAGFGIARIPAAGTLMPGEAAPYGGFPIRLAFAAAFSLPLFYCAMAPMLNMAYPLSLPFPAALDPMHAPLPFALVS

SEQ ID NO: 84016 - protein, 227 aa, Unknown
  Obtained from environmental sample
  DOMAIN (1)...(127): haloacid dehalogenase-like hydrolase
  misc_feature (1)..(227): Xaa is any amino acid
DARELDRLAARADPGHTFLFAARGDRLLGCIAVADSIKPNAHTAVAELHAWGMDTVMLTGDTQNAARSIAGEAGIDTVIAELLPSGKTEEIARLQGLGRRVLMVGDGINDAPALALADVGMSVSSGTDTAMESADIVLMRGDLLAVPTALQLSRATFRIIRQNLFWAFCYNALGIPVAAGVLHAFFGGPLLNPMLAALAMAFSSVSVVSNALRLRTFRPRAVTPGRA

SEQ ID NO: 84017 - protein, 82 aa, Unknown
  Obtained from environmental sample
  misc_feature (1)..(82): Xaa is any amino acid
VTGIDQFLQYLVSALALGSLYALIAIGYTMVYGILRLINFAHGEVFMLGGYIAFYAVTVFLMPWWAGYIVALGLYRNLWRWP

SEQ ID NO: 84018 - protein, 317 aa, Unknown
  Obtained from environmental sample
  DOMAIN (105)...(239): DNA mismatch repair protein, C-terminal domain
  misc_feature (1)..(317): Xaa is any amino acid
ELPLHSVLGEKRWRRRRAVARLEIVCSTGAKEAWCLETGPGENFPPKTEQTRRTKGATVRALNLFESIPARKKFLKREGSEAALCRQAFIDKVLAFPNINFRFIQDGKLKDFFPAVSSRKERFAAVNGSENFLHEINVTGTGFSAAVVIGGPQLYRNDRRQLFVFANGRRVNDYSLIQAMEYGTQGWFPNGTHPIGAVFVEIDPALADFNIHPAKREVRFRDPGAIHHAVSGGLKSFFHLNAIQNSPHKYEHKFKEHKESPYENHHHASETFKEKQQTHEDQGQDFKFSYNTSVFDTARVKERFSEIKFTNERLGRI

SEQ ID NO: 84019 - protein, 515 aa, Unknown
  Obtained from environmental sample
  misc_feature (1)..(515): Xaa is any amino acid
LAGGIWLRQFGYDSIYVANVTLYAHTATHAFDTTWTADTSMSGFKPSGADSVKFVSVSEDTLGLQVYYKTQPVSGGGLTKITASAITGITAPVADSTPQAATSVTSTNVTGVDSLKVLNWGGNLVSGKFGYDSIYVANVTLYANTTTHAFDTTWTADTSMSGFTPSGADSVKFVSVSEDTLALQVYYKTQPVSGGGLTKITASAITGIIAPVADSTPQAATSVTSTNVTGVDSLKVLNWGGNLVSGKFGYDSIYVANVTLYANTATHAFDTTWTADTSMSGFKPSGADSVKFVSVSEDTLGLQVYYKTQPTPTTTDSVMVKFSVTPMGSSGELKAYVNDVEINTGDSVAINTEIVFVASVGADSTVDAWSGAVKVTAHPDSAKLTVTSRPTSGDTTVTVSFKPKTPILAVSPQTITADTTESNMGAWYRIIKVTNSGSAAYTVSGANIKLEGAYADSFSLAGSADSTTFGALSGTIPAKSAGVDGKYFLKVAFTGTAKVDTVYAANVTFAGQTDT

SEQ ID NO: 84020 - protein, 308 aa, Unknown
  Obtained from environmental sample
  DOMAIN (1)...(285): Amidohydrolase family
  misc_feature (1)..(308): Xaa is any amino acid
MTAIERAADFKASYDKSWILPNVRRACDLALHYGNTHIRAFADVDSKARLEGIKALLEARAEYSGRVELQVVAFPQDGVVRESEAAKYVEEALRLGADVVGGIPWIEFTQGDEQRHVDEMFGLAKKYGKDVSMLLDDVGDAGERTLEMCVQKAIEQGWQGRVTAQHCRAMALYEENYFRKIAALMRKANIGLVADPHTGPLHARVRDLAAAGVNVALGQDDIADAYYPYGRCNMQEIAFLASHLMWMTSFQDMELLYDMITTSAARVLGISGHVLEPGGNADLVVLKAEDVYHAIWGHQAPVYVIGKG

SEQ ID NO: 84021 - protein, 319 aa, Unknown
  Obtained from environmental sample
  DOMAIN (2)...(315): Aldehyde oxidase and xanthine dehydrogenase, molybdopterin binding domain
  misc_feature (1)..(319): Xaa is any amino acid
VAAEKLDIRPDKLREINLLQAGDVNGIGQIMREDSGNISKCASILREKLFDPPKPSAGLNKIIGRGMAAYMKTPCMPTNAQSGAFIKLNADGGVTVSVGAVDMGQGLHTTMAQIAAEALDLPLDKVGVNFIVDTLISPYDWQTVASRTTWGSGNAVLLAAQDLLQQLREQAALAFGVDPQQVEITRGEVRCKGKTLAWGEFATGLRSAVGSALTRPVMGHGYFVPSGLQNPDAETGQGNAAADWTFGCAGAEVAVDIRTGEITVLRLINVIDAGTIINPKNAREQVIGGMIMAAGSALSEKVVFDGKTGAIRNIPSSIN

SEQ ID NO: 84022 - protein, 117 aa, Unknown
  Obtained from environmental sample
  misc_feature (1)..(117): Xaa is any amino acid
MLAIILQARVDSSRLPGKALLPLGGKPMILRVMEALNRIPAELRVLACAEDSSSAFTELTKEAGFTLFAGPKEDVLGRFCHCLRNFNIRHLIRATGDNPFVLPTRLIPYLGRSVTPP

SEQ ID NO: 84023 - protein, 326 aa, Unknown
  Obtained from environmental sample
  DOMAIN (272)...(326): PUA domain
  misc_feature (1)..(326): Xaa is any amino acid
SKDQIGRGKVGSKIIAPQENDAHIARISSLAENICALINGGIKVILVSSGAVANGRAVLGLSQKPKTISLKQACAGVGQIEIMNLYRTQFDKRGKNIGQILLSWDDLRNKERYLNLRNTLFTMLENGIVPIINENDSVCVDEIKIGDNDTLAGQIALLSDADLFVALSDINGLYTDNPKTNPAAKHIAVFSFDETVNAGAAGSDVGTGGMATKLRAAETVCKAGITAVVGDGYNNDLLSVINDCTLGTLFCPQRKKMNSRHRFIAFTGDIVGAIHVDKGAMDAVISGKSLLPAGILEVDGVFDESDNVSIMSGGVIFAKGITELFK

SEQ ID NO: 84024 - protein, 173 aa, Unknown
  Obtained from environmental sample
  DOMAIN (1)...(62): RuvA N terminal domain
  misc_feature (1)..(173): Xaa is any amino acid
MFEFFKGKLFFSDTTAAVIDVNGVGYKLGISLNTSLALPKINEDVFLFAYFHVTENSQGLYGFISKEEREVFLKLIDISGIGPKVALGILSGISVEQIINAVENEDVSTFTSVSGVGKKTAERLILELTGKLTQIMPHTALRPKLQKSQPVAKSSRDDAFAGLIALGYTEKSV

SEQ ID NO: 84025 - protein, 95 aa, Unknown
  Obtained from environmental sample
  misc_feature (1)..(95): Xaa is any amino acid
KAWFRKVTVSSGSFPPNAWGIYDMHGNVWEWCWDYYSLPKETPLSDPIGPASGAHRINRGGGWTSPAKSMRSALRGSDLPETAGNNLGFRLARNK

SEQ ID NO: 84026 - protein, 306 aa, Unknown
  Obtained from environmental sample
  misc_feature (1)..(306): Xaa is any amino acid
SGEAIAGSSSSDATTSSSDNAVSSSSLESGAGSSSSVASTECASWGVWVTTTPATCDVDGLKTRSCTSGVTKTEIEAIPQLEWSDWSVTPATCETAGSRTRVCIGNTSQTQTETITKLTWGEWSVTPATCETAGSRTRVCIGNTSQIQTETITKLTWGEWVETIAPTCAEGVETRTCPNNAQPDQTRSVAAVIPYENTTHLCDARDGKLYKFVVIGNGTTAQTWMAENLNFNASGSKCGSVLTGSGTLGDANTSTCDTYGRLYNWSTAMGGVCPAGWHLPSDAEWTALTTFVGTNPGTKRKQFSLG

SEQ ID NO: 84027 - protein, 159 aa, Unknown
  Obtained from environmental sample
  DOMAIN (1)...(156): Conserved hypothetical protein 95
  misc_feature (1)..(159): Xaa is any amino acid
VKDKGVRPTSSKTREALFNIIGCVQGFKVLDLYAGTGSVGFEAISRGASSVAMVEISSNLLRAIKETADKWKIAEKVICHRNDVLRFAAQNSEFPEKYDLIFADPPFNKEYPDLRIFLPKLSENGFAVFEVPSRAMPAWAGEAKKVEAMGVQSLGRSVM

SEQ ID NO: 84028 - protein, 161 aa, Unknown
  Obtained from environmental sample
  misc_feature (1)..(161): Xaa is any amino acid
MELAGELVTGRFFGGVASLQFASPRIAAELEEAEDERGIYWMNAADPASPAGLAVEGILTRAEHTAHAIRRTASSRLCFRGTELLAVSNRSCQELEIFIPPDDSDIVEALEFVKISRTRKVHKENKIVIEKINGASAALSAYSEALAVHGFVKERGKMILW

SEQ ID NO: 84029 - protein, 186 aa, Unknown
  Obtained from environmental sample
  misc_feature (1)..(186): Xaa is any amino acid
MSLSKEQNEWLKKISSGYENFKKVPKELLTEEFCFAAVQKEGWALMHIPDTLKTETICLAAVQQRPGLLTSIPEAVKTEAICLAAVQKSCNALQYVPDALKTEAMCLASVEKNGLNLQYVPDTLKTEAVCLAAVQNNGCAMRYVPDALMTKTFCLAVVKKNSNALEYVPEALRPAFLQGQAVRDMA

SEQ ID NO: 84030 - protein, 289 aa, Unknown
  Obtained from environmental sample
  DOMAIN (51)...(244): ABC transporter
  misc_feature (1)..(289): Xaa is any amino acid
MMVGGVSVSLEIKRDKPAPRRKPLLEIHGLGSLGEEGEPVLDGVNFSLYGGEILGVAGIAGSGQKELCEIIAGLRKSDSGDILFQGDSICLLSPREISDRGVSMSFVPEDRLGMGLAGGMSISANILLRSYDKNPGLFVDYASGDLLAGKIVRDYDISTPSIRQIIRKLSGGNIQKVLLGREIHFSPKVLITAYPVRGLDVGASYFIYNLLNEQKKKGVAVLYIGEDLDVLMEICDRLMVIHHGKVMGVVDPRDTTKERIGLMMLGEKHTGGIGAGAVPEAVAAPKAAQ

SEQ ID NO: 84031 - protein, 132 aa, Unknown
  Obtained from environmental sample
  DOMAIN (38)...(131): Leucyl/phenylalanyl-tRNA protein transferase
  misc_feature (1)..(132): Xaa is any amino acid
MKSGPDPDFPYLTEQDYYSFRNPKEWTDDIVAVGGNLSPGMLLSAYEQGIFPWYNPEDPILWQSPDPRCVIFPDKLHISDSMRKILKKDVYKITFNEDFPGVMTGCANTKRRNQNGTWISGDISRQYEMPAT

SEQ ID NO: 84032 - protein, 407 aa, Unknown
  Obtained from environmental sample
  DOMAIN (175)...(297): HD domain
  misc_feature (1)..(407): Xaa is any amino acid
MARSRQYDSLEDALSQVLDDSEGAGLGLVILVLMLRKIGLDDDAFTIKTKNNCTIASISIPLDKTMIENMSALSAEIVENVNSLPQFPENVLLIQKLINDPASDMPMIARQISMDPALTADLLKIVNSAQYMLSKKTDNISDAVKMIGIKGIKNLLYSYGTQKILGDDTVEKKRLWEHSYKTAFYAFNLVKNFKNVSGLLDDVYIGGMLHDMGKIVFSNVHPELLNKIKGFCGEKSLPISTFEDLSAGMNHAELGALIAEKWNFPEKLVSAIRYHHDPDTAPFDCKDMVDTVYLGNMFCEYENKNISYDQLEQGPLENYGLKHRRRFDSLLQRLSTGFITEGQVSFVCLKQVSILGVRGSAHRTDVEVNDGRPSLCGPNGCGECAVDDAMRWIMREDDVGSGHEEEM

SEQ ID NO: 84033 - protein, 312 aa, Unknown
  Obtained from environmental sample
  DOMAIN (108)...(310): RmlD substrate binding domain
  misc_feature (1)..(312): Xaa is any amino acid
QVSESAERLDDIPVVGPIRDVARLLRLQSGDEAIIAIPGAGREYLKELYGILKSAGFKSIRILPGISQIIEGDAHLIQTRSIDPQDLLGRTPIAVNLRESLKYLRGKRVMVTGAGGSIGSEISRQLLSAGASRLYLFGHGENSIYQIDRELRLLQEEGVGEKAVLVPIIGDLKDRDYMDWLLSKMKADVIFHAAAYKHVPMMEDNPVAAIENNFFGTDNLIEATKKHKVKRFVHITTDKAVEPASVYGVSKFLCEGLVLEAAREPGSPSSSFMAVRFANVLGSRGSIIPLFQKQIQKRGPLTLTHPEMRRWF

SEQ ID NO: 84034 - protein, 77 aa, Unknown
  Obtained from environmental sample
  misc_feature (1)..(77): Xaa is any amino acid
MSEQIAGVKERVAAIVEDVDSLPSLPSIVMKLIEVVNAPESSAEDAAELIEKDPALTSKMIRLANSAFLRDLGHSVH

SEQ ID NO: 84035 - protein, 171 aa, Unknown
  Obtained from environmental sample
  DOMAIN (3)...(162): Putative transcriptional regulators (Ypuh-like)
  misc_feature (1)..(171): Xaa is any amino acid
LVGALEALLLATSEVLTLERLKELTGLGEGVLLQGLEALQERCRPPRGIRLLEAGGGWRMAIAAEYTDLAAKLVTTVRSGRLTPAQRDVLSLIAYRQPITVPEINEFRGVASSFSQVRSLLDRELIMPVGRRHVVGRPMMYATTTNFLLRFGFQDIQDLPKLADLGESSLE

SEQ ID NO: 84036 - protein, 164 aa, Unknown
  Obtained from environmental sample
  DOMAIN (45)...(159): Response regulator receiver domain
  misc_feature (1)..(164): Xaa is any amino acid
VLTGINHIKVSVSHVNDMSLENNKNFDALKQETQKFKDSSGNEKKKILVVDDDTIHLEMVENVLSKNYEVSTAKSGKEALGLFYQGLVPQLTLLDLIMPGMDGWNTYDRIRAISGLHDTPVAFFTASSDPKDIKHAKEMGAVDYFKKPFEAGDLIYRIEKIIGK

SEQ ID NO: 84037 - protein, 316 aa, Unknown
  Obtained from environmental sample
  DOMAIN (75)...(218): GAF domain
  misc_feature (1)..(316): Xaa is any amino acid
FWGIVTFQDHTNDRYFDKGCADLFHSAARVFTNAIIRAGMGQSNEETIKVLKHREKMLDTLNRAAVMFLSRNEKTFEETMTVGVKEIADVFDLDRLSIWRNLNRPDAMHVSQIYRWDREAGGTTEPTKGLEDVTYARFAPRWEKLFASGESINSPVRLLPEAPMLQSFGCISAFVTPIYINNAVWGFALLEDRHNERFFEDDSIEMMRSAILLCANTVIRADMEREIANTNDFNRALLDASPVGFSVFDEDARIIDSSDIIWKTLGTTKKYFLNHFHDFSPEFQSDGVRSQDKAIEIIKRAIRGERAGFSAESEQW

SEQ ID NO: 84038 - protein, 329 aa, Unknown
  Obtained from environmental sample
  misc_feature (1)..(329): Xaa is any amino acid
NKVRFGRAARADYVLAGYGTGAIMAVPAHDDRDYEFAVKFNIPIKQVVAPVDKSETPQGVAFTAKGVSVNSGFITGLSTDEAKRKMNAWLEEHRHGKAAVSYKLRDWIFSRQRYWGEPIPIVHCPQCGAVPVPDDALPVMLPEVDKYEPSGTGESPLANIYEWINTKCPKCGADAKRETNTMPQWAGSCWYYLRYIDPKNETEPWSKEVEKQWMNVDLYVGGAEHAVLHLLYARFWHKVLYDLGYVSTKEPFKKLRHQGIVLAATYRDAAGRYHEFSEVDFTEGGARLKSTGEKLTAEIEKMAKSKLNGVNPDEVVASTAPTCCASTRC

SEQ ID NO: 84039 - protein, 141 aa, Unknown
  Obtained from environmental sample
  misc_feature (1)..(141): Xaa is any amino acid
ADAPKETAQVLGDAAEMMGVGFQILDDVKNLTTGIPGKKRGDDVVEGKKSLPVLLFLHKYPEKRERIFYYFHEAKRNGTNAPEVEDFIDMLSSSGVFAEAEEKGRSFLKQTQDIFNSNVFSTCNIDKNVFALLDGFIELIS

SEQ ID NO: 84040 - protein, 316 aa, Unknown
  Obtained from environmental sample
  DOMAIN (13)...(230): Phosphofructokinase
  misc_feature (1)..(316): Xaa is any amino acid
GPHDRSPRVLPEYQYDVIELNPETVDDIHKLGGTFLGSARGGGREVVKIVDTLERLNLNMLFTIGGDGTQRGTLDIADEVEKRRLKIALIGIPKTVDNDFTIIDRSFGFNTAVAKAVEAVSSAHNEASSAINGIGLVKVMGRESGFIAAHTALASHEVNFVLIPEVPFNLEGSNGFLHHLEERLKKRKHAVIVIAEGAMQDMLIKDKKFDAGGNVKMVDVGVYLRNKIIEYFGEKKFEINLKYIDPSYVIRSAQADPDDSIYCERLGNAAAHAAMAGKTKLIIGLVNNEFVHLPIKTVITHRNKIDPESSLWRDTL

SEQ ID NO: 84041 - protein, 92 aa, Unknown
  Obtained from environmental sample
  misc_feature (1)..(92): Xaa is any amino acid
MAEGRMKVVTIKDIVRKDVPIYYRMLYTGVAVIEMSTAPADYRIDFSIETKPTGQREIIVSFLDDLDYPLVPVIKELKKYIETMHQNGALPD

SEQ ID NO: 84042 - protein, 84 aa, Unknown
  Obtained from environmental sample
  misc_feature (1)..(84): Xaa is any amino acid
MNLLAIDAATQKFSVALAVGGHTFVVEADVGMRHSELIMDSVDMLLKKVALKTEDLSGVVCMGGPGSFTGLRIGFSLAQSLALR

SEQ ID NO: 84043 - protein, 197 aa, Unknown
  Obtained from environmental sample
  DOMAIN (6)...(188): Glycosyl hydrolases family 11
  misc_feature (1)..(197): Xaa is any amino acid
ITLRFGRDGGGAAFRAEWNNPNDFLGRVGYFWNTGKPYTYYKNVFCDFEFTRSRNGTAGNYSYLGIYGWSRDPMIEWYIVEDWYGDGIIGPSNMGGSVRKKGECTVDGEKYIIYEGMRPAGSGNIEGRSVAFQQYFSVRQKRRQSGTISITEHFKEWEKIGMKLGKNMYEAKFLVEAAGGMGWFDASHISFYQKDSE

SEQ ID NO: 84044 - protein, 101 aa, Unknown
  Obtained from environmental sample
  misc_feature (1)..(101): Xaa is any amino acid
GKTESNGFACKRLNLALRWLVRKGPADLGLWKSIKPASLFIPLDVHVARTARKLGLLERKSNDKKAVIELTERLKTYCAEDPVKYDFALFGMGVGASKKNK

SEQ ID NO: 84045 - protein, 322 aa, Unknown
  Obtained from environmental sample
  DOMAIN (187)...(312): Dynamin family
  misc_feature (1)..(322): Xaa is any amino acid
NQGQNRPRAACGNDSSGKTGEKLDEVLVSVYRAPHSYTGEDSADISCHGGIAAVKAVMAALKRTGFREALKGEFTFRAFMNGKLDLTKSESVMELVAAKTNRGREQAVMRLSGVLQREISAIKETLVEVLAAAEIFLDYSEDEFLSPDEESSGALPNKALAEKAVEKLKLLSELWSRERLYTEGALAVLAGLPNAGKSSLFNYLIREDRSIVTDVPGTTRDWIEAVISIGDIPLRLADTAGLRKTDNNAPDSKAFDEAERIGVERSMELLEKADLVLYVVDGTKGFSEDDMDFLAKYSKTKSDRPLCILWNRRILRSQTSSQ

SEQ ID NO: 84046 - protein, 109 aa, Unknown
  Obtained from environmental sample
  misc_feature (1)..(109): Xaa is any amino acid
LDCFSQLGVNGVILGNTHPSEKLFYSLPILNAQGTSGGISGRPLYENTFRKSTLAKKHFPQLSIVACGGIDHGLKVRDLLDEGMDFVQVYSVLAFRWMAVQKMARELCP

SEQ ID NO: 84047 - protein, 176 aa, Unknown
  Obtained from environmental sample
  DOMAIN (31)...(176): Capsular polysaccharide synthesis protein
  misc_feature (1)..(176): Xaa is any amino acid
MSLSRHFTNFYVSIAVLAQRTVGRILSGGAKQINIKAKLLPNYFERKYLPLVADLTQKRISVEKPETIWQFWDNPPGRTTPAIVKASFRTVEKFKGDYEHKILDNSTIGNYSDLPGYVFDRLKNGQMRYAHFSDLLRLNLLKNHGGVWMDATCYMTDFIPERITDLDFFVFLTGEW

SEQ ID NO: 84048 - protein, 317 aa, Unknown
  Obtained from environmental sample
  misc_feature (1)..(317): Xaa is any amino acid
MTTETVMAQGSAVLEECFDENCVIKVGAAIGADYIVRGTVSKFGNMLTVSVDVYETNDGNLVASSELVRSENIVELLDMTAEASANMYRKFVNPRSPPQRAAPKEPPPNYQTPIQPPPPQYQAPAPTPAAAVKQQTYQPPAPAPTPQPVNNDRKTYKTVVIGGKTWMAENLNYQASSGSWCPGNDNSNCDKYGRLYDFQTARTVCPAGFHLPSRQEWESLTAAAGGKSAAGKKLKARSGWHDNGNGTDDYGFSALPGGRLSSDGSFYSVGIYGFWWTATESNSGYAYNRSMHYNSVRVDDEHDDEKSNGFLGSLRRR

SEQ ID NO: 84049 - protein, 157 aa, Unknown
  Obtained from environmental sample
  misc_feature (1)..(157): Xaa is any amino acid
DDQIGRGRFRKDWDDVLDTQLKYVFFMCQAVARHMRDNAIRGKIVNLASLTSVFGFRNIAPYVASKGGIAQLTKVLANEWAEYGINVNAIGPGYFETEMTKALFQDPATVKRFTERLPMRRTGLPSDLMGAAVFLASSASDYVTGQTVYVDGGWLTN

SEQ ID NO: 84050 - protein, 204 aa, Unknown
  Obtained from environmental sample
  DOMAIN (37)...(130): Divergent AAA domain
  misc_feature (1)..(204): Xaa is any amino acid
MNINIKQILQQGEGISVEFKKSAQKLPESLFETICAFLNRNGGVILLGVEDNKNIIGVNEKTAPALCKDIANLSNNPQKLFPSFLLDVQVVVYKKKTLIHVFVPASSQVHTCNGKIFDRSADGDFELKSSEQIKNLYTRKSTLYSENTIYPYLHETNFKPGIVDRVRKIIVYIGLTIRGMSLPIWNFIRWPVYTDKIWQAIRKV

SEQ ID NO: 84051 - protein, 303 aa, Unknown
  Obtained from environmental sample
  misc_feature (1)..(303): Xaa is any amino acid
LDYSELTDLGNIMNLKIARPLIHASYRIGSFSKIEALFVPTFEPLRFAEEGRWVPAQMKPLYQMNDQLKEAGKIYDIELPEISVNVPDISTVKYAQAGTRFTTTIGPADIGLQYYYGYLTRPAVTVTFTDTVINIPSIPITLPPIPLPTAINFDYNPYHQIGVDWAQVFFGFNVRAEFAANITYDFNGDDSSVYNPSLLWSLGFDRDLVWGINLNFQCNESIRLMNDKIKNDKLSFPIPIPMDIDLPLLDIEADTNVTSTQIIAAISKSFSVTRWKTEIAVMWGIEDNDFFAHTPHYLGQGHY

SEQ ID NO: 84052 - protein, 320 aa, Unknown
  Obtained from environmental sample
  DOMAIN (21)...(215): ATPase family associated with various cellular activities (AAA)
  misc_feature (1)..(320): Xaa is any amino acid
VFIGQKELVEHAFITLLAGGHLLVEGVPGLGKTLLVRALAKALGGDSRRIQFTPDLMPSDITGNIMLDVQAGKFITRKGPVFTNILIADEINRAPAKTQAALFEAMQEFQVSLDGTEYPLPKPFMVLATENPFEHEGTYPLPDAQKDRFLMKLLIDYPAMEEEREMVSRVLEGGTGAELSLEGIEKVLSIEEFIAIRDTASQIRAAPEIIEYAVRLVSATREGGTIETGAGPRGSLALIRCARSRALLERRDFVIPDDIKALAVPVLIHRITLSSESELERQNKKQVVKTLLSRVEPPRLKFDEAWTHAGHCCFALVPAW

SEQ ID NO: 84053 - protein, 73 aa, Unknown
  Obtained from environmental sample
  misc_feature (1)..(73): Xaa is any amino acid
LEFRGEPAGFEIAAAQGPYYAAQVRIDGNDIVIFSEKATRPCRARYAWTKFGPTPLYAKNGLPAMPFRTHNDE

SEQ ID NO: 84054 - protein, 216 aa, Unknown
  Obtained from environmental sample
  misc_feature (1)..(216): Xaa is any amino acid
MAIHIAIHIRLYNHLTYWLTQPQRRVALGAIIIDMPETHISLNDGQVEIELITRYKSADMVRECMLLAGEGAGLWCLHRNLPVPYIMQEIGDLPDETLEGMAGYYQLRRCMRPRALSTRPGQHSGLGLDTYIQVTSPLRRYTDLLAHLQIRAVLRGEPPLSADEISARMNAGEAAISAVNQAERASRGHWTMVYLAGKKDSVWDAISLEKKETAGH

SEQ ID NO: 84055 - protein, 291 aa, Unknown
  Obtained from environmental sample
  DOMAIN (1)...(291): Bacterial DNA polymerase III alpha subunit
  misc_feature (1)..(291): Xaa is any amino acid
MGSEKWGEVTRRAEYELGTIIQMGFTGYFLIVADFINWARENNISVGPGRGSGAGSIVAYALRITDIDPLKYGLLFERFLNPDRISMPDFDVDFANEGRDDVIKYVTGKYGQDKVGQIVTFGTLGAKAVIKDVARVLGISIPESDMITKLIPRDPKITLQKAIDGEPKLNELSQDARYTELFALAKKLEGLNRHSSIHASGVVIGKTALYNLAPLFKDPKTGAISTQYDMNHLEKCGLVKMDFLGLKTLDVIKRTEEIIRNKGGEFSNFSVEAVSEDDEATFKMLGDRFEF

SEQ ID NO: 84056 - protein, 85 aa, Unknown
  Obtained from environmental sample
  DOMAIN (1)...(61): Transposase IS200 like
  misc_feature (1)..(85): Xaa is any amino acid
MGLGPIPPKLAVAELMGILKGKTAIAVFQQQKSLRTKPYWGNHFWSRGYCVTTIGMDEERIRRYVKYQEDAERLSEDHELQEGLF

SEQ ID NO: 84057 - protein, 44 aa, Unknown
  Obtained from environmental sample
  misc_feature (1)..(44): Xaa is any amino acid
VVAEDKLGYKWARWVNGIELSDNQGYMGFWEMNGYNNEADAQLR

SEQ ID NO: 84058 - protein, 315 aa, Unknown
  Obtained from environmental sample
  DOMAIN (228)...(260): Ankyrin repeat
  misc_feature (1)..(315): Xaa is any amino acid
MADSDITREELKKANAQLYLYIEAGAGKDVAEQLHKNFGEYSPERALKLVYLKLQSDGGQSIKIGSKTYQNPEEVAAETDARQIVLIKEAILEEDSLFLVWLSDQAGSFTTTDGFYKLNPQDRFYLLSLFPFLSYKEFVKNNWEQAAINDLVILIHSNPGRFDLFEAYAAQGLPFSKQTDTSVVSWQPTPMSYLAMFFKELLNDEMAGLELVRFLHKKGADINEASGDGSFPLNIAVRCRNIALVKLLLELGADVNKTDGYSVPLLYAIGKNDDDDDEAVRIAIACMLLDYKANVRIIDSYERYALPLGRSDPCF

SEQ ID NO: 84059 - protein, 231 aa, Unknown
  Obtained from environmental sample
  DOMAIN (31)...(231): Nitrogenase component 1 type Oxidoreductase
  misc_feature (1)..(231): Xaa is any amino acid
VAVNTSILEERKTSISQKRGTGLYCERESVSGAVSQRACVYCGARVVLNPITDAYHIVHGPIGCASYTWDIRGSLTSGAETFRSSFSTDLRETDIVFGGVKKLSAAVDELMEKAHPAPKLIFVYATCIVGVIGDDVDAVCRAAEAKYGIRVIPVKAPGFSGTKSQGYKLACDAIMTLIKPHKDRAKRFGVNILGDYNLAGEMWIIKRVFGTDRHTRHLHNLGRICTCPPPC

SEQ ID NO: 84060 - protein, 278 aa, Unknown
  Obtained from environmental sample
  DOMAIN (160)...(272): GTPase of unknown function
  misc_feature (1)..(278): Xaa is any amino acid
VLVSVFRAPKSYTGEDSLDISCHGGSAAGKGVMAALRACGFRDALPGEFTFRAFMNGKLDLTQSEAVMELVSARTDKGGSHAISRLSGVLEQEINAIKQQLVEVLSGVEIFLDYSEDEISANADETAGYFSGQQPVREILARLRTLAQSWRWEHIYQDGILAVIAGRPNAGKSSLFNLLLKEERSIVTEVPGTTRDWIEAVISFDGIPVRLADTAGLRESLDPVEKIGVERSRDLLEAAELVLYLIDGAAGITAEDRAFIGECKQRGIRRCDSADLSW

SEQ ID NO: 84061 - protein, 249 aa, Unknown
  Obtained from environmental sample
  misc_feature (1)..(249): Xaa is any amino acid
VREKQKTERAGWPAEDREEPKEPQGAQSAEVRETENGDSANGRKLERSLLDAILDVDNMFKAQERVIANRGSAGIDGMTVGELNGYLIKHYLELCESIRGGWYKPKPVRRVEIPKPDGGKRLLGVPTVIDRMVQQAMVQVLQPIFEQTFSDSSFGFRPGRSAHQAIERAKKYYEEGHKYVVDLDLEKYFDTVNHDLLIKMVRETVKDEAVIGLIRKFLKSGVMADGLVSQTEQGVPQGGNRASMMRRRY

SEQ ID NO: 84062 - protein, 304 aa, Unknown
  Obtained from environmental sample
  misc_feature (1)..(304): Xaa is any amino acid
GPQFHAAVGTGDWKSRLETSQLAEGILPIIVKATFHNDDVAVRRILLIVDPREPSVNVIGPDENSGHRTTIRVFGSTVDDYDMDSVEVSLRPGDKLGYTVPGFIQGLYLDGSVLGSMNFCAGIGLSFFEDNVKVQANVSQAPSGRYSGWAFGGKILANVWTKNLGDWFGPDWSFWKTSFVLGAHFSYFLMEEGETPLWMGEFLGQWEVIKSDMSFFFPNWKYFKSLSFYVEPGIWIAPSDVTYDPNAWRIRATMAFGLRVNLFKRRQRVMPVRRYRNVCLKKFIGVLADKLASSPKAAMPAINL

SEQ ID NO: 84063 - protein, 334 aa, Unknown
  Obtained from environmental sample
  misc_feature (1)..(334): Xaa is any amino acid
TTAATKKSVLPFTKSFFKSVNGLFDMSGYAWDDLINDGFEILDFFLHGSRSSRANLSADFFEKLPEKRTARLVTRGEEPSFTLESELKRSEEHLFQPTITVKPIRNDNDYLKNLTGNLAEDYQLYLKSRADYANSPTFYFDMADWFYTRGDKETALRVLTSIADLDLENSLLYRLLGYRLKEYGEYVLEKFVCQKVVRWRPMEPQSYRDYALALADNGETQAALDSLYGLLKKLRSEDFDNRSTGIEEVLVTEINHLITKNTNLNKSKIDKRLIIDIPVDIRVVINWNMNNTDIDLHVKDPNNEVCSYNRRRTSIGGRINADNTDSTGRTSRHH

SEQ ID NO: 84064 - protein, 77 aa, Unknown
  Obtained from environmental sample
  misc_feature (1)..(77): Xaa is any amino acid
RNLNAIVTWGGGDVPEAVYEALYDGADKFPWAAESRLLILAGDAPPHPVQRGGISQEMALQKIAEKGLQLSAILLTQ

SEQ ID NO: 84065 - protein, 87 aa, Unknown
  Obtained from environmental sample
  misc_feature (1)..(87): Xaa is any amino acid
MNNGAILSSIRKAKAENRRAHWVLLDPDDFTTERAVEVARVSQESGVGALLVGGSLLQSNRIDTFVKSLREAVSIPRDTLPREPAIM

SEQ ID NO: 84066 - protein, 115 aa, Unknown
  Obtained from environmental sample
  misc_feature (1)..(115): Xaa is any amino acid
IASNASQANASIEHVSKSINEVAQGSKDIAQVASQANTSVEHVSKSISDVAQGSRDIARNASEAAKGANVVSQSMVSIAQGAKDGAQGAKQINQSADELAKIASDLKNVLSQFSV

SEQ ID NO: 84067 - protein, 312 aa, Unknown
  Obtained from environmental sample
  DOMAIN (162)...(307): ATPase family associated with various cellular activities (AAA)
  misc_feature (1)..(312): Xaa is any amino acid
WKFRLLIAEDEKNIREGLAAALELDGHEVATAANGNEAFKRFQKGDIDLVITDLWMPGLSGEELLEKILAESPGIPVIILTGHGTIEAAVKTMRAGAWDFLIKPVNLDYLSLLVKQALDNRELVLKHKRLLEELAHHKRFQTIIGTSAVMRKVYDTTSRAAPTKASILITGESGVGKELVADAIHELSPRKDKPLIKVHCAALAASLLESELFGHEKGAFTGAVARKRGRFELANEGTLFLDEIGEIDQNIQIKLLRVLQEKKFERVGGEETIETDVRIVAATNKDLKAEIEKGNFREDLYFRLNARAALRI

SEQ ID NO: 84068 - protein, 220 aa, Unknown
  Obtained from environmental sample
  misc_feature (1)..(220): Xaa is any amino acid
MNIETSLFYDLKILLPVILVSLGAIFSLVAESFLNPSKRHNALPLINLFFLVLAAYFTGIISGDFGDPWNLFSINYVKEVFLYATALCAAIGTAALQNTLKSSNTECGEAYTLLMLSTAGIMIMVLSADLIPLFLGMELASFPIYALIAMNRRSKQSNEAAFKYFISGAALSAVFLYGVAMFYGATGSTLIKSDVLAGRETIYPAGIFMLSLGLLFKVGG

SEQ ID NO: 84069 - protein, 204 aa, Unknown
  Obtained from environmental sample
  misc_feature (1)..(204): Xaa is any amino acid
MKKPFAYSATFICTIIGAGFASGREIALYFGKLSYPCLLLAVLILASLAFVFLEVGRLSKQNPSRFLVGKFAYILDGFIVLSNFVVIIAMIAGADFIVRDAFNIRYGGVLTALFCLLFATRLDSLKLVNTLLLPVIIVFIALLFFQTKPHYNGGISLISPLLYASLNISAGGLILSKYPPLPRKKSLLCALFIFIILAFLMSAE

SEQ ID NO: 84070 - protein, 333 aa, Unknown
  Obtained from environmental sample
  DOMAIN (125)...(205): Bacterial pre-peptidase C-terminal domain
  misc_feature (1)..(333): Xaa is any amino acid
TRSVSARDEVLANIPNKSFVVLSAGAAGADWTISGEIIDTPEGAVRFYTRLIRSEDRAVEASFHFDVERNEQIVALLASGSSQGGRSSSSVAPDASEPDSFENPVPYEIGADANAQTANRTLHGGDEDFFLLLPANDGQLTMETTGSTDTYMEFYNAETREKLGQNDDGGSGSNARIRYSVQAGKRYIAKVRGYDGSTGSYGFRAYMTIRTTSTGFENPVAYEIGSDEHAPVMNRTLDREDEEYFLLLPVSDGQLIMETTGSIDTFMEIYNAQTREKLADYDDGGRGENARIIYNVQAGKRYIAKVRGYDRASGSYRIRAHIPVQVKAYPRRI

SEQ ID NO: 84071 - protein, 309 aa, Unknown
  Obtained from environmental sample
  misc_feature (1)..(309): Xaa is any amino acid
FVRVRLAEVLRGCTFQEALTRSLNVPAVKILSDYGVEDFHFWLKNAGLAGLSRSSESYGLTLILGGGEASLQELVPLYSMLMNEGKRTELKWLEDSTAEKNEQLLQSITAYHIKEILTSVKRPDFEQYHLQFNNHIPVAWKTGTSYGSRDAWAIGVNEQWTIGVWVGNFAGGSVANLSGSASAAPLLFSLFNNLSDNKKRMWSEFPRDADFEEVEICTLSGYRAKDFCPHKKYMLLPINRMQSRACSFHKEIIISKSTRYEVCSLCWNAGDTLHIVEGHYSPSVRNELRKTGRETKAETLHNPRCLAKK

SEQ ID NO: 84072 - protein, 307 aa, Unknown
  Obtained from environmental sample
  DOMAIN (114)...(305): Bacterial sugar transferase
  misc_feature (1)..(307): Xaa is any amino acid
WEISEPAMYRALILDNDPESADEYRNIPIIHDTSIGPEIVSGYNIKMAMVAMPELDNRGLKHLMNTSVSAFRYSSYIPDFVSATNIWMSVRDLGGVLGLATSNKLKKAWNLWIKRFMDYSIVIFGGLLVLPFLLLIALLVKLGSPGPVLYGHKRLGTNGKYFIAYKFRSMVIDAQERLQKLFESDPEIKKEWDKNHKLQNDPRVTAIGRLLRRTSLDEFPQIINILKGEMSLVGPRPIVDAEVSRYGEDFNWIFSVKPGMTGMWQVSGRSETDYANRVLYDTYYLQSWSVWLDIWILFMTFGGSYTR

SEQ ID NO: 84073 - protein, 75 aa, Unknown
  Obtained from environmental sample
  misc_feature (1)..(75): Xaa is any amino acid
MTDWPRLDSPFIAFIASDGVIIEIKDMQPNDLNSVRSSRSVRYALEAPQGWFQRANVRHGDVVRIRSEELGIRNK

SEQ ID NO: 84074 - protein, 217 aa, Unknown
  Obtained from environmental sample
  DOMAIN (1)...(173): Prolipoprotein diacylglyceryl transferase
  misc_feature (1)..(217): Xaa is any amino acid
APSIPLGYTFGRLGHFINAELYGRVTTGPFGMIFPHARPLPASEEWVREAVEKTGAVVSGGLVNLPRHPSQLYEMLFEGIILWAIIWFFRNRKPFKGFLIGLYFLGYGVFRFFIEYFREPDSNLGYRIEFVKSNLPKDYLAYIHPPFSFSTGQILCFIMIVFGIVWIIVCSRLPNREPVRVYEEGAEGGEGPKIVKSEAEKASERNQRRKLRKKMRK

SEQ ID NO: 84075 - protein, 160 aa, Unknown
  Obtained from environmental sample
  misc_feature (1)..(160): Xaa is any amino acid
MAEMSVNLIVSNADRQVSILPIDITMYLIGGGFFLSFIFSSYEGSILKSVLNSCQNFISVILGVVNVFSDIMSYIRLWAVGLAGAAIAQTINGMAGPLLGGFLVFAGIVLLIFGHGLNMVLNVLSVLVHGVRLNTLEFSGHVGLTWSGTAYKPFKEKEIK

SEQ ID NO: 84076 - protein, 272 aa, Unknown
  Obtained from environmental sample
  misc_feature (1)..(272): Xaa is any amino acid
VQNYIDDRDVYCTLGAKIYKTTYEDCLEYATSEQLTAMGVTDCAGHALGCKKCPHEETCEIKAGRVKRRKSAKTVLLSLMYGKGVKSLAEDLKTSTEEAEGIIRSFYEAIPGFHDFNEQCKTLAHKNGYVQTMLGHRRWLPDIHLPQNQYLFKNMKTKRQYASYSGNSNWSFNPSLATLYQTKQKCTKERLEEFLDSSNDKIKVYSTNALVAACYRRVLNTMIQGSAAEQTKVSMLALWADKELQEYGCELIVQIHDEVLIECPTKYAEKAA

SEQ ID NO: 84077 - protein, 259 aa, Unknown
  Obtained from environmental sample
  misc_feature (1)..(259): Xaa is any amino acid
LLLILSEPKRFSIDVDVASDRTREEIEKVLDAIVPEYGVFTKWERRQHKTKPWLPLSSYYLYYNSVVTDAPDTNIMLDVQMRRSAYKTEFKPVRCGDLYVSEAKVELPLPSSIISDKLLTLGPATLGIPIGRGKEAQRLKHVYDVSRLSATLPDVGEMRESFRSCLKQENELQETNHSVDDIVKDTLKFLWTTALRGEQPASSDDPALNENTKGLAPFAAHLFEQGYNWQNLRKDMARAAVCMNAVGNDKSREKIFTTY

SEQ ID NO: 84078 - protein, 495 aa, Unknown
  Obtained from environmental sample
  DOMAIN (38)...(402): PEP-utilising enzyme, TIM barrel domain
  misc_feature (1)..(495): Xaa is any amino acid
MARGIGRIGGKKFNEGDWITIDGTSGEVYDGKLPLVAPSISKDVNTFLKWCDDVRASSVRGRIKGFAVRTNADQPDDAKRAFAFGAQGIGLCRTEHMFFDKEKLIHFRAMIVAETEAERKEQLKKILPLQQKDFYGIFKAMEGRPVTIRLLDPPLHEFVPHTKEEVEELAGHLNIGVDKLNAKIGTLIESNPMLGHRGCRLAVTYPEIYDMQVEAIALAAVECVKEKIPVHPEIMIPIVVTARELRLLRPNVEKIFEKVLSAAGVKVPVTVGTMIEVPRAAIRSAHIAQYADFFSFGTNDLTQMTFAFSRDDIASFLPTYLEKNVLDVDPFKTIDQDGVGNLIQFAIKESRSVKPDLKVGICGEHGGDPATIDFCYRAGLSYVSCSPFRVPLARLAGAQAVINNSGNNILGGGSGKTKPTAATVKGSKKPIRGGKKMAVTSAKKPAAKKAAKKPAKKAAAKKPAKKTAAKKPAKKTAAKKPAAKKPAAKKPKVVL

SEQ ID NO: 84079 - protein, 332 aa, Unknown
  Obtained from environmental sample
  DOMAIN (2)...(328): Phosphate acetyl/butaryl transferase
  misc_feature (1)..(332): Xaa is any amino acid
MDLITEIKEKAKSRQKKLVLPEGTDLRTLKAARLIVEAALASSVTVLGRESEVRKLAAAESIDLGGVNILEQAGSDDIERYAKEFYELRKHKGMTMEQARADILAPPALGSHDAPSGRCGRNGSGSENTTADVLRAGLAIVGTKPGIKTLSSHFIVPTEDPSWGANGNFVFSDCAVVPDPNAEQLADIAISSAQSCRDFLGAEPVVALLSFSTKGSGGNHPNVVKVREALAIVKARDPGLLIDGEIQADAALVDSVLDKKAPGSPIRGKVNTMVFPDLQSGNIGIKLIQRIGKINGFGPFLQGFAKPLSDLSRGTTVEEIVNTSAFLLAQVR

SEQ ID NO: 84080 - protein, 337 aa, Unknown
  Obtained from environmental sample
  DOMAIN (2)...(332): Bacterial extracellular solute-binding proteins, family 5 Middle
  misc_feature (1)..(337): Xaa is any amino acid
MTDRPSGAVNSIIDIKKIDSHTVEFTLDKPRADYLLMFVAEIVPEHQWNVNKTKDDFLKYENPNPVGTGAFILVEEVVDEFARYKANDNYWGGRPNVDELIFVFFANDDTKLQALEAGEIDMTSLTAAQLNYAGSLSNVSLVKFGTIRLTELGFNMWNDKASKGNPIIRDVKEIRQAIDHAINYDELIEFSKGGLANPEKGLIPHLSTPWSYWPDASKLREFSPQKAVQLLEKAGFTTVGADGIRSNARGQKLSFRASVIESSYKDQGLLIQKYLKDIGIEMVITFVDTGRQSAIIEEQDFDTDMYIWGWTADYEDPGFMLSGMTTEQVGGRNDCYF

SEQ ID NO: 84081 - protein, 247 aa, Unknown
  Obtained from environmental sample
  misc_feature (1)..(247): Xaa is any amino acid
MKADESGDDIAYVNTDTVTVKGKNGETADKFCYRLTLMTEDTNVTPTVRLVTATFKNTQEDREIARIHDDVISQDAIDSFIGTLDVKPYSQMIRDPQFSSGICSAVSSCMILDYKGVHILPEMAAMGVLDTYYDGYGNWPFNTAFIGSFGFESYVEYCDGLDDIKRELMMNNPVICSVRYKRDDSVDGNLPILSAAPIDRTPSHLIVVVGYERDGDDKTYVIVNDPAREDDSHVRRRYDEKQFMAAW

SEQ ID NO: 84082 - protein, 329 aa, Unknown
  Obtained from environmental sample
  misc_feature (1)..(329): Xaa is any amino acid
MTDSAEAGVTKPVATHMHEPPLLNQHRRNGGGKDIWGVNYVPTYETGNALLPEPNNFILKDIRQWRDVIKAPSLEGIGWEMMVKKNLEETKIDRKQTALALNLHFGYFEHLMSFMGFTEGLIAMSEEPDEVMELFTYICDFYMEVVKNVIDLYNPDVLTMMDDTAAWNASFISPKMYREMVYPFHDRYAKIGRDRGLKITMHNCGKCEEIVGCMVEMGVNLWDPAQTCNDLAAIKSKYGNKLVIAGGWDGRDRLLEPDVTDDEIVASAEETFKKYAPGGGFAWCGGFLGPVDDEEIRRKNILLHEAVDKWQAHSINNLPSSFEIGKYSL

SEQ ID NO: 84083 - protein, 91 aa, Unknown
  Obtained from environmental sample
  misc_feature (1)..(91): Xaa is any amino acid
VRLRGVAAKAWKKLLWKLSHSRIGELQRLAGSIKEHLRGILNAIKLKANNAAAEARNSCIQRVKYMACGYRDKKRFNQEILFQFGGLDLAL

SEQ ID NO: 84084 - protein, 314 aa, Unknown
  Obtained from environmental sample
  DOMAIN (1)...(314): Phosphoglucose isomerase
  misc_feature (1)..(314): Xaa is any amino acid
DERRESIGIGGSDLGPRAMYLALDNWAVSEGKKKLDAKFISNVDPDDASAVIASCNLEQCLFILVSKSGTTQETLANELFVKDKLNKAGLDPSKHMIAVTSETSPLARNSAYLDSFYIDDYVGGRYSSSSAVGGCVLSLAFGPETFREFLAGAAEADKLALETDVFKNAALLDALIGVWERNFLQYPYTAVLPYSQALSRFPAHLQQMDMESNGKRVNRDGQPVNYSTGPVIFGEPGTNGQHSFYQLLHQGTSVIPLQFIGFFESQRGDDVNVDGSVSQTKLKANLARSNCGFPERAGTAKDGNKEFKGGRPSS

SEQ ID NO: 84085 - protein, 450 aa, Unknown
  Obtained from environmental sample
  DOMAIN (177)...(437): Transposase DDE domain
  misc_feature (1)..(450): Xaa is any amino acid
RGGGGEGQNPPKHQAHRARAAAENITVKALAEGCQPDHGTIAAFISTNSEAVQGLFAQIVLQCAKLKLITGEMFAIDGCKLPSNASKEWSGTIEDLKKKRDKMEKYIERIIKQHRELDKDEKAKKIQKPYAKTMGKDKDRRERSIARLEKKLKKLNKFLKEAEPRKGVAAEEVQSNVTDNESALIKGPHGYIQGYNGIAIADSGSQIIVCAEVVGSGPESGSLPKMMDSLEENMRTVTGKEDPLKKSLLVGDTGYFSEANLQEAAEKGINVLIPDQQFRQRDPYYAEKKEEKVEKKKYKAEDFTYDEKNDRYICPRGKALEYKCDITLRNNSGKKYGAKRADCAKCPLIEKCIAGRGGKNPARVLYIVNKKYEDNLSEKMRKKIDNPAYRELYSRRMQIIEPTFSDITYCKGMNRFTLRTERKVGIQWKLYCTVHNIGKCIRPLGMKYGA

SEQ ID NO: 84086 - protein, 322 aa, Unknown
  Obtained from environmental sample
  DOMAIN (204)...(322): Magnesium chelatase, subunit ChlI
  misc_feature (1)..(322): Xaa is any amino acid
LSVMAYAPYGAGGVIIRVEADIRRGIPGIDITGLAQGAVREASERVRAAFRNSGFTFPLDRILINLAPAGLRKDGAELDLPIALAVMAAAGLAPVPPGILVMGELELSGNIRPVRGVLAAIAGGLEEGITEFIVPAENKGEAAILYGAGKNPAMRYRAVSSLREAVDALLFREETGELSVPRESNADNRVSPESTVAANADTADFADVRGQAVYKRALEISAAGGHNMLVFGPPGAGKTMLARRLTSIMAPLTPDEAVEVTRLYSLAGPYKTGTGLIDRLITQPPFRAPHHSASAEGILGGGRPPRPGEISLAHFGVYPRRP

SEQ ID NO: 84087 - protein, 108 aa, Unknown
  Obtained from environmental sample
  misc_feature (1)..(108): Xaa is any amino acid
MIEARNVTKFFSIINEDRTADGLTAVLSVSLTVEDGKIVSLLGPSGCGKSTFLEILGGLHAPTEGGVFIDGVQVLEPLPSTRKEMEAYLRKYKFLSPLAKRYVQKTAP

SEQ ID NO: 84088 - protein, 317 aa, Unknown
  Obtained from environmental sample
  misc_feature (1)..(317): Xaa is any amino acid
FYSRDASFGRFTKNDLDAVSPAVSTSITLSTLHGCPKEEIEKIAAYLITQKALHTYIKCNPTLLGYETARRLLDEMGYGYIVFDDHHFRNDLQFNDAVDMLKRLQERARERKLGFGVKITNTFPMEIKRKELPGNEMYMSGRALFPLSINVAKKLSQAFNGELPISYSGGADYFNLKEILETGIRPVTVATTILKPGGYERLLQLSELAAETVSVISVAAPINVNALSFFAESLPKLARYRKTYRRTGSRKPLPPTPHSPLPIPLFGCAKAPCMDGGCPIHQRIPEYLAAVAAGNYDEAFRIIAVDNTAPSITGDDL

SEQ ID NO: 84089 - protein, 317 aa, Unknown
  Obtained from environmental sample
  misc_feature (1)..(317): Xaa is any amino acid
VGDHIKKETNIQTLIENARKQMSNEPNLSAGMKALVEMLIAVIQLLAGKRLAKNSKNSSVPPSMDPNREKKPKPKRERKPGGQPGHAGVTLQQSENPDMIIKLNVDRESLPPGQWTYAGCEKRQIFDLKITTHVTEYQAEILVNERGEKVTAEFPGGLVQKAQYGNGVKAHSVYMSVQQLIPCERVGEHFASQMGLPLSAGTVHNFKEEAYNLLETYEIWVQERIRNSKIIHDDETGIVIEGRRAWLHVACTVLYTFYYPHEKRGKAAMDEMDVLNAQGGILIHDHWKPYFTYDNKEHGLCNAHYIRELTRPNLSCP

SEQ ID NO: 84090 - protein, 201 aa, Unknown
  Obtained from environmental sample
  misc_feature (1)..(201): Xaa is any amino acid
FDGEILIVTNQYKTISGINLHTISIYEKNPPGYLFVGEAPGYLGCTLTGIPFTDEYRLKLGGKSGCLPLLPSEYFIVSENPHIENSASVMWNVFSKLSFFPLLWNIVPFHPHERNNINSNRTPEPQEIKAYCYFVEDLLKLFPSVNRENGIYAVGRKAQKGLANIGLLTMYDESKYIRHPSHGGTEKCRKKIIEIADLSKK

SEQ ID NO: 84091 - protein, 248 aa, Unknown
  Obtained from environmental sample
  DOMAIN (145)...(209): 3' exoribonuclease family, domain 2
  misc_feature (1)..(248): Xaa is any amino acid
MGYETVEADVSGLKVSIETGRLAKQANGSAVVRLGDSMVLVTACCSQSESESDFFPLSVEYIEKTYAAGKIPGGYIKREGRPSEKEILSARIVDRPIRPLFPDGYKREVQIVCTVISADEKYDTDVLAVTAASTALCLSDMPFTEPVAAVRVGFANGQLKIFPTYAETESGELDMVVAGTAESIMMVEGGAMELSEDVLLEAILLGPRRDKELTAIQKDLVARCGRQTRNSRPRRKRELAAASRRYRL

SEQ ID NO: 84092 - protein, 137 aa, Unknown
  Obtained from environmental sample
  DOMAIN (53)...(136): Protein of unknown function (DUF933)
  misc_feature (1)..(137): Xaa is any amino acid
IDRFGRVCICGKFEAELSDITNIEEKLAFLEELGLKEPGLSSLIRSAYQLLNLRTFFTAGEDECRAWTIHKGDTAPKAAGVIHTDFEKGFIKAEVYTCDDIFNYGTEAKIKEAGKYRVEGKDYVVQDGDVMFFKFNV

SEQ ID NO: 84093 - protein, 215 aa, Unknown
  Obtained from environmental sample
  DOMAIN (1)...(215): Nitrogenase component 1 type Oxidoreductase
  misc_feature (1)..(215): Xaa is any amino acid
LNPITDAYHIVHGPIGCASYTWDIRGSLTSGAETFRSSFSTDLRETDIVFGGAKKLTDAIEELMEKARPAPKLIFVYATCIVGVIGDDVEAVCRSAEARYGIRVIPVKAPGFSGTKSQGYKLACDAIMTLIKKHRDQPKRFGVNILGDYNLAGEMWIIKGYLEQIGIPVISTITGDSSYEKLIDAPCAAMNIVQCAGSSAYLAELMSEEMDLAII

SEQ ID NO: 84094 - protein, 548 aa, Unknown
  Obtained from environmental sample
  DOMAIN (347)...(372): The GLUG motif
  misc_feature (1)..(548): Xaa is any amino acid
MTDRPSVGSGNYIKNSYNTGNVTSTAGTSSNVGGIVGYNQSNTAVDFCYNTGNVTGSTAVGGIVGNSSGSRVVDNVSLGLLITGTGSLGRVAGIANGGTMIDRNKSRADMKLGTSGSETTIPSGSTGANNVYGADVALNTSLATVFDTSRWDTTLWNINGNLTIGNELPTLIPNTQHPAPLLPGSNPSPGTAANPFLVTNETDLRKVGTGTDGWTLTAHYKQTQDITLTSNLSVIGTNINKFTGSYDGNEKIISGLTMTRTSVSYFGLFGYIGSDGVVKNVTVTNGSITGTASSYFGGIAGQNEGTIENCSFSGTVNGDTTSDDVGGIAGRNTGTIINSRNNATVSGRTRVGGIAGSNNGKIDNCYNTGAVTGSQQVGGIAGGSSNSGNYVKNCYNTGNVTATTTTTTANAGGIVGQSSALIEFCYNTGNVSGTNNIGGIVGYINPGCDVQNNVSLGLKVNGTTAGRIGGTNAGGNTTSNLARQDMKTGPVGSEAIVNTGAAGNMAGANVSLGTALSSVFNTNWLATIWTIPTGSLTTGGKSATLKTT

SEQ ID NO: 84095 - protein, 56 aa, Unknown
  Obtained from environmental sample
  misc_feature (1)..(56): Xaa is any amino acid
MIFNPEYECMDAQARKKLQLAALKNLVETLYARVPFYRKKMQDMKVTPKLGHSVMA

SEQ ID NO: 84096 - protein, 106 aa, Unknown
  Obtained from environmental sample
  DOMAIN (5)...(35): Flagella basal body rod protein
  misc_feature (1)..(106): Xaa is any amino acid
MVRSLWTGASGMIGQQANVDAISNNLANVNTHGYKKQRVDFEDLLYQTVKVAGTPATEDTVVPVGVQMGHGVKVADTQRVFMQGSLQETSVPTDMAMPRGSALAIK

SEQ ID NO: 84097 - protein, 147 aa, Unknown
  Obtained from environmental sample
  DOMAIN (5)...(35): Flagella basal body rod protein
  misc_feature (1)..(147): Xaa is any amino acid
LIRGWYTAASGMRAQQWRLDAVANNLANVNTDGYKRDVAAFKAFPELLIRRQDDDGVYQHPFGSADAAPIVGKMGTGVELNELYTAFEQGSFKETQNDFDIALDGKVFLPFPRPGASAIPAMALSSLAKKVTLKPKKVIRYLGNTVR

SEQ ID NO: 84098 - protein, 138 aa, Unknown
  Obtained from environmental sample
  misc_feature (1)..(138): Xaa is any amino acid
GFAHGSDSAENLPISIFILTAFMQGISKEMEEAAEIDGCGKFLTFFRILFPLSKSGLATLAIYNGVVIWNEFVFASVLTNSQASQTLPLAIYNYQGQYSINIPLIMTLLVLSSLPVIILYIFGQDKLVKGMMAGAVKG

SEQ ID NO: 84099 - protein, 97 aa, Unknown
  Obtained from environmental sample
  DOMAIN (5)...(87): NifU-like N terminal domain
  misc_feature (1)..(97): Xaa is any amino acid
MPDWLYSDTAKEHFTNPRNVLLESEDTFSYNARGQTGNIKCGDQMVMLLKIDNDVITDRALENLRLRQRHRVNKHAVRCNKGHENRGCLQSKARRPR

SEQ ID NO: 84100 - protein, 62 aa, Unknown
  Obtained from environmental sample
  misc_feature (1)..(62): Xaa is any amino acid
EICALAIAVGSSTHTDAVQALGKIPVNVVELGVDYVTASTHMILGQKALAHYMSGKASRCFS

SEQ ID NO: 84101 - protein, 90 aa, Unknown
  Obtained from environmental sample
  misc_feature (1)..(90): Xaa is any amino acid
MHYLAENGIASHWLYKKGSSHEQVQLSDISTVNKLRNWRHNETRQSTASTWLKEIKQEIFKNTIYVFTPQGKVIALPKGSTPIDFAYCAS

SEQ ID NO: 84102 - protein, 162 aa, Unknown
  Obtained from environmental sample
  misc_feature (1)..(162): Xaa is any amino acid
LQNTEVIEILTNANAHPHVNWLSIAKTTKARNKIRSWLNKNDDSIATEKNIAAKKKQTITEILPVPNTEIPPLQQVINAVPSDVLSVKIEQEKNILLHFARCCNPIVGDFITGYVSRGRGIIIHKKDCPNLANIPDLKAGKSRHSGKTPPPIPLNPQNGALP

SEQ ID NO: 84103 - protein, 96 aa, Unknown
  Obtained from environmental sample
  misc_feature (1)..(96): Xaa is any amino acid
MTNYVNYKKPWLQNPKAGDVIRGTKGLRKIRIAFEGQGKRGSGRVAYVDFTVYETVYLITAYPKNEKDNLSKAERNAIAMMIAKLEQGLKDQENIK

SEQ ID NO: 84104 - protein, 104 aa, Unknown
  Obtained from environmental sample
  misc_feature (1)..(104): Xaa is any amino acid
MIDIPDVIIIGAGPAGLVSGTVLNEGKRHYLILEKGNDLTVRNANNPKDVVTGIGGGGLFSDGKISFPPSASNLWLKFDFDTLEESYRYLYNYIFKISYFEQIF

SEQ ID NO: 84105 - protein, 140 aa, Unknown
  Obtained from environmental sample
  misc_feature (1)..(140): Xaa is any amino acid
MSEIMRPIPFPELIQWVRGEYKNHSSVFGVRKEKFFHPSSSVSIEFFGTKIKSPIGPAAGPNSQLAQNILAAFLAGARFMELKTVQTMDGEELRKCVARPCINTVDEGYNVEWSTELTVPQAREEYIKRVLGQSDHGPPK

SEQ ID NO: 84106 - protein, 529 aa, Unknown
  Obtained from environmental sample
  misc_feature (1)..(529): Xaa is any amino acid
VEFVNLADAAPRITSFRFSQSLNSGLTRDSEGEIHDDTAFIIINAYYGGTFPPEQITPEFGAEGLVQVMGSVQVSAASPQDFSRPIRYTVVHPVNSLLKRDYWVYTTLVQDASSHAVITGFSFHPDDNPGLRDEITARIDQAAGKISVFAPIGSGVTARTMYARFTAAGQVSVAGSTQTSGASGQIFNSPVVYTVVSANGLNRRDYTVEVRELTSTMYVNQNAAGSGDGTSWVNAFRFLQTACEAAAQFPEDVPKEIWIAKGTYKPANIDDYFSLTPNTSYIGGFAGHETAKSQRNVTANTVTITGNLGGGIYSRRLFAAVSELDGDLSFESLRMTGARGREGAVINAPLDPSSEISVTDCDFSDIQASGTGGTIYVRGGRAVVSDSAFSACNNVALYVHGAGAKITDVGFSACNNDDVVRLDCSGDTEITRVNIEDSSNYAFYLSGNGNKTIETLRASRVGQCLNVQNTTGYLRINGLVMRDIAGVGININGANGVKHFSGISGRNISGSAISCSASYGLYPRPILSL

SEQ ID NO: 84107 - protein, 309 aa, Unknown
  Obtained from environmental sample
  misc_feature (1)..(309): Xaa is any amino acid
GLWRDFPTGAFIFSPPDLDKFLENVRDEGFKHPLILVLFDVHESLVDQKVIALLKRMAADKLNRDKYKLTVFIISSRLFIPPELEKYITVLDVPVPEINEIASIIDEFGRANEIEIEKDLAGDLAISLKGLDRLPIQQILNLAYQDGGNIRHADKKLILREKKQIIKKVGMLEYIESADQFNSIGGLRVLKKYLEKKSLIFKNLSAAQEFGVDIPKGILILGMPGCGKSLAAKATASLFEVPLVRLDVGRLLGKYVGESEENMRRALKLAEAVSPCVLWIDEIEKGFFRSGKRKRRGFGCHDPPVRFFS

SEQ ID NO: 84108 - protein, 556 aa, Unknown
  Obtained from environmental sample
  DOMAIN (371)...(421): Flagellin hook IN motif
  misc_feature (1)..(556): Xaa is any amino acid
MGLEIGKRGMFAHQQAQAVIGHNLDNMATEGYSRQRIEIVQSEPIYMPGLNRALTPGQIGQGASVERIERIRDELLDKRIVAEASSEGYWTVRERYVKEMGQFYLETGPNSVRSKMDSFWVGWDELSQNAADMEARTAVLQRGKTLIDGIHNHFNNLKRLQTQADEDIQINVERVNDISRQIALLNKDITRIKALGDNPNDLMDRRDLLVDKLSSIIEVTVSQLDHDEFMVHTSGHILIQGQQARQFDMRKDMDTEGYAHIFWHDTKDQIIFTKGSLGALLELRDVTIEDEIQSLDNMTMNFTDLVNEIHYSAYGANGTTGNNFFSEYPFVTNVNGNYDRSGDGVFDSSYIYRINGQNKLESQAQPGFEGIITLSGADGDINVPYYPTDTVTDIITRINNSGAEVVARLNREGKLSLKGTPAETIEGRRENPDFVIRHVEDSGHFLVGYAGVLLASGAEGAFSWDRADAVASLRGGAEDYALAPVAHPSGWIEVNPALLKDQSSVAAGFGYNGRAANPGNGDAAEEIALIRNSPVMVGKLATFDDYFADSVARIGY

SEQ ID NO: 84109 - protein, 147 aa, Unknown
  Obtained from environmental sample
  DOMAIN (6)...(92): Ribosomal L25p family
  misc_feature (1)..(147): Xaa is any amino acid
MEKIALAGKIRNESGKNSSRRIRAAGRIPAVVYGGPKHLSLSIDRHAFESKFKHISVNILIDLDIEGEGTHEVLIREYQRDKVRGTLIHLDFYEVMKGHKLRTRVPLHFEGTPVGVRVDKGPLENKLYAIEIECDPKDIPAKIGVDI

SEQ ID NO: 84110 - protein, 153 aa, Unknown
  Obtained from environmental sample
  DOMAIN (8)...(126): Peptidase family M41
  misc_feature (1)..(153): Xaa is any amino acid
ARFAYSWGADGEELIFEHQTTGASNDIKRATSLVRKMVCDYGMTDELGPVSYGDKDDSIFLGREMNRHRDYSESTAEAIDRHVRRIIDEQSARAKEILTGHRDELERLAKALLEHELLDREEIIKVVGGATLESAKKNRVLPQKIEVVVGDVN

SEQ ID NO: 84111 - protein, 168 aa, Unknown
  Obtained from environmental sample
  misc_feature (1)..(168): Xaa is any amino acid
MELKSNVPDGPIEKKWDKRKFDMRLVNPANRRKYKVIVVGSGLAGASVAASLAELGYQVECFCYQDSPRRAHSIAAQGGINAAKNYHNDGDSVFCLFYDTVEGGDFRVREVHVYRLAQVSDHIIDQCVAQGVPYAREYGGLLGHRSFRGPLVAGLSTLRADWATVAAW

SEQ ID NO: 84112 - protein, 110 aa, Unknown
  Obtained from environmental sample
  misc_feature (1)..(110): Xaa is any amino acid
MLDTEILSRVDHTLLKMTASWSEIKTLCDEAVRFKTASVCIPPAYVKPVFKEFGKGLVICTVIGFPLGYTYASVKVNETSVALENGACEIDMVIKRGRRKNGNTSADLIL

SEQ ID NO: 84113 - protein, 106 aa, Unknown
  Obtained from environmental sample
  misc_feature (1)..(106): Xaa is any amino acid
MIFRFAVMQDKSIKGSLNEKSVAAYCRKVTYVWCGFFIINGSIAAWTIFSGSDTLWSVYNGGISYILIGVLFAGEFMVRKMVQKNMPQSIPLSALKIISADLIIGP

SEQ ID NO: 84114 - protein, 74 aa, Unknown
  Obtained from environmental sample
  misc_feature (1)..(74): Xaa is any amino acid
LGFEAKGVKETRVFGACGVIETTETSTHKGIQEFATARGVWLRPFLNVVYTMPPYIISEEELRKICGVMKAFFG

SEQ ID NO: 84115 - protein, 294 aa, Unknown
  Obtained from environmental sample
  DOMAIN (147)...(290): Phosphoribulokinase / Uridine kinase family
  misc_feature (1)..(294): Xaa is any amino acid
MKKRYSYSKKITKQTQCFFWNIEVLRFIKVNECKDYMDIYVQPLLPQTGLSNAFELMPYQDGFLLRFPGTGKGDTIEPFKDEPYLFNVYSDYKKWGKIIGVRVVGELNARIANRNFQEYIRIAETHQERRMGDIARLIYERRENIKMILIAGPSSSGKTTSAKRLEIELMVSGLKPIAISLDDYYKGTADTPRDENGEPDYECLEALDVEYLNKQLQALYRGEEISLPVYDFRTGTRKETGGRKIKLESNNVLIVEGIHGLNDALTYSIDRKTKFKVYISALTQYSAILSWAPM

SEQ ID NO: 84116 - protein, 334 aa, Unknown
  Obtained from environmental sample
  DOMAIN (61)...(154): Phosphoglucomutase/phosphomannomutase, alpha/beta/alpha domain II
  misc_feature (1)..(334): Xaa is any amino acid
ERQSNPPEDNGLKGFDNSGEKLSEDVEQAIEAAFDTEIGPSINELALGQEKKMEIQQKEMESYLDCLGGIVMPNTFPIVVDCAHGATAPWAKRLFSGAVQWLGVPSIGEKINVGIGSTHIDAMRQKVCSGKAALGAAFDGDGDRCLMVTGSGELIDGDQMAWLLALDRHKRGEKPEGLIGTQMSNGGLEQGLSELGIPFLRTPVGDKYMIREMKRTGWDLAAEASGHIIQRNLGPSGDGMATALSVLRALADKPETDRWGWRFSPWPLELINIKTKCRPALEECQAIQKAIKEIERDMGGTVRLVVRWSGTEPLLRLMAEAKDGRQDKRALDQL

SEQ ID NO: 84117 - protein, 90 aa, Unknown
  Obtained from environmental sample
  misc_feature (1)..(90): Xaa is any amino acid
MDKTASQAQMLANRLQKRFRHLKKWAQRTGVGAFRLYDRDIPEIPLVLDFYGDCGQPETSALCGALYKRPYEKDESEEDKWPSAMRESAS

SEQ ID NO: 84118 - protein, 152 aa, Unknown
  Obtained from environmental sample
  DOMAIN (34)...(152): Domain of unknown function (DUF955)
  misc_feature (1)..(152): Xaa is any amino acid
MSKNLERSMIQQRAVRILNEYQINKLPIDPKLIAKKANIQVEPNTDCEKGVSGMLLRKGENYYIIYATYLGNLGFENFSIAHELGHYFLDGHPETIFQNTNIHKSVADFVSDEALERQADIFAASLLMPENLFKDRLTEYEKRMTCIESMSK

SEQ ID NO: 84119 - protein, 289 aa, Unknown
  Obtained from environmental sample
  DOMAIN (16)...(282): 3-dehydroquinate synthase
  misc_feature (1)..(289): Xaa is any amino acid
MKTITVSASKIYDIKIGSGILDDAGSILQKIGSTAAIVTDDIVAPLYANRLEQALSRNKTRVVRYVIPNGEASKSSEQLVSLVNFLAKEKLSRTDTVIALGGGVVGDLAGFAAAVYMRGVGFVQIPTTLLAAVDSSVGGKTAINLEAGKNLAGAFYQPDAVLCDISLLSTLKPEVFKDGCAEVIKYGVIADSELFKSFEKPIKDRLEDIIARCVEIKRDIVAEDEFEKSVRKFLNFGHTIGHAIELSSGYEITPRKRSRRRNGDSYTSRGAHGNLRRLMAAGGYKTLKF

SEQ ID NO: 84120 - protein, 210 aa, Unknown
  Obtained from environmental sample
  DOMAIN (76)...(208): RNase H
  misc_feature (1)..(210): Xaa is any amino acid
NWGFDYRRGGGGFQIYYINSIMPKIYAAKFADGTHWVGNNWPDCEALVSGQTGVKYKSFATMDDAEAWISGKKQKMKGLYVYVDGSFMPHSEYAGWSWVAVDDGVEIAKASGTTPRPAFSRNIDGELYAAWQAMEFLAKKKRKGTICHDYEGVACWATGQWNANSTVSQIYVNRIADIKVWAKFKKVTAHSNDEWNDKADKLAKEALTGK

SEQ ID NO: 84121 - protein, 119 aa, Unknown
  Obtained from environmental sample
  misc_feature (1)..(119): Xaa is any amino acid
ASSESAEGQLFYVEFILDYSYPENTSKVSGIPEDWKRSDYNKGHRALKALNFIVENIKAKYVIISFNSEGFISAENMKDMLSKIGALEVLETKYNTFRGSRNLNNREIHVKEYLYLLEK

SEQ ID NO: 84122 - protein, 328 aa, Unknown
  Obtained from environmental sample
  DOMAIN (237)...(303): Oligopeptide/dipeptide transporter, C-terminal region
  misc_feature (1)..(328): Xaa is any amino acid
KDGESSSRSYGNFQVQRGRDFIAIQAVRGVSFNLQKGETLGIVGESGSGKSVSTLAVPGLLPKNAKITGSILYEGEELAGLDTEGLRKYRGKKIGMIFQEPGRSYDPLQNMGNVFWETFRNSEPEITKEEAEKRAVVLLEETGLDNGIERLSNFPHQFSGGQLQRIGIALALAQGCELLIADEPTTALDLTIQKQITELLKTLRRKRKLSIIFISHDIDLVAEISDRIMVMYGGFEMESADAKEITTNARHPYTKALLAASPQFGSHYSKERLISIPGKVTDPSSPEPGCPFAPRCTEATAECAKAVPALQTKTGMNCGAAGIIHFSR

SEQ ID NO: 84123 - protein, 326 aa, Unknown
  Obtained from environmental sample
  DOMAIN (63)...(275): SMF family
  misc_feature (1)..(326): Xaa is any amino acid
RDQIGRGAFPISLREKITLCESLGDESDLIHKSVSDIEALVGREIKTWNVDSSRRTAERVAEKARVRGINIVSWQSPLYPPLLREIYDPPVLLFFRGRLPDPGSPLAAIVGTRKPSPASSAQAFDIARGLGRGGISVVSGLAMGIDSFAHRGNMEGGAPTVAVLGSGVDEVYPSSNRVLALRVLETGGALLSEYPPGTGPRKWNFPARNRIISGISRGVLIAEAPQKSGALITARFALEQNRDLWVASAGVEQIPAAAAAPAPMPEKGKRLGPFDKRGTSKLADDGATIIKTASDILEAWNIHISRNRRPLPEHAPEHETLRPAMP

SEQ ID NO: 84124 - protein, 321 aa, Unknown
  Obtained from environmental sample
  DOMAIN (188)...(321): FGGY family of carbohydrate kinases, C-terminal domain
  misc_feature (1)..(321): Xaa is any amino acid
VSHDRLAEMAIGVSGHQHSFVPLDEKGKPVYNVKLWCDTSTANECEELTKLAGGEKKLISKTGLPMRPGYTAPKVQWLKNHKPKAFSKLRHIILPHNYINFLLTGVYCAEYGDASGTALFDITNRKWSSLVCKYISPDLEKMLPPLIASDEPAGKVSQAAASLYGIPEGALVASGGGDNMMSAIGTGTVQDGFLTMSLGTSGTLFGFSKKPVIDPTGNLAAFCSSSGGWLPLLCTMNCTVATEEFRTLFGMEVKPFDTEAAKAPVGANGIVVLPFFNGERTPNLPNGRASINGITSANFKRENLARAALESAIFRMRIGLE

SEQ ID NO: 84125 - protein, 195 aa, Unknown
  Obtained from environmental sample
  DOMAIN (1)...(194): Histidinol dehydrogenase
  misc_feature (1)..(195): Xaa is any amino acid
MIPAFCAGVEEVIFSSPPTQDGIPDKKILAAAVVAIEAANNNNVRIFSIGGAQAIAALALGTESVPRVDVIAGPGNKYVAEAKRQLFGEVGIDFIAGPTDVLIIADGKADDGIEKTADLIAADMLGQAEHDPDARARALVPNKELAEKIITAIEKRIKILPTEKTARASLEEGGLIVIYETREEAIRSQHIAVNM

SEQ ID NO: 84126 - protein, 206 aa, Unknown
  Obtained from environmental sample
  DOMAIN (1)...(89): Peptidase family S41
  misc_feature (1)..(206): Xaa is any amino acid
MARALTLVAPDIPVIVLINKGSASASEIVAGALKDRGRAYLVGENTFGKGSVQQVYPLNGAGFKITTARYYTPSDVNIDKIGIPPDREIKFPEYTEADAEKLNILINANKIPEFAEKNPKATPAQIDTFAQSLERDYKINLSLLKRLIRNELNRTTFAPVYDLEYDVQLQEAMKIFESKTYQNLMQNSKTLKELQEEAEKNLAIAS

SEQ ID NO: 84127 - protein, 70 aa, Unknown
  Obtained from environmental sample
  misc_feature (1)..(70): Xaa is any amino acid
VISNGYSFIESLVYALGVALGFMLSLLLLAGVRYRLRTSPVPPFLKGTPVLFAASALLSIAFMGFQGLVK

SEQ ID NO: 84128 - protein, 207 aa, Unknown
  Obtained from environmental sample
  DOMAIN (93)...(186): FMN-binding domain
  misc_feature (1)..(207): Xaa is any amino acid
FIERAELGLILAVFAAAACVMLAFVYTGTASIISRRQQADLEAALKDIFPDADSFETAEGVKSPDSAVTIEDAYMAIRGGKPVGAALRLTRASYGGPIKIMAGVSINGTITGVKIMEHSDTPGLGANAVSSKYFVDKAHEITFYGQFTGKSVNDPFEVKSDVIAITASTITSRAVASTVKAAAVAVTSWFAGHDIDAVSAATEGDVE

SEQ ID NO: 84129 - protein, 113 aa, Unknown
  Obtained from environmental sample
  DOMAIN (14)...(112): Rnf-Nqr subunit, membrane protein
  misc_feature (1)..(113): Xaa is any amino acid
MKTDSAVNRRQGGGRRLFRIFTNGLIRENPLLILMIGLCSSLAVTTSVDNGIGMGLSMTFVILMSEVVISIFRKLIPDSIRIPIFIIIIAAFTTVIDYVLKSVGFPICQRRWV

SEQ ID NO: 84130 - protein, 328 aa, Unknown
  Obtained from environmental sample
  DOMAIN (84)...(182): Flagellar hook-associated protein 2 C-terminus
  misc_feature (1)..(328): Xaa is any amino acid
IALWAQTAGQSGTEFAYTAVPSPVWKNGTFFRPVGALQRVRALNVRINLCSGKGFAMSSIATFSATGLGQGTSVSGGISFAGLGSGTDFQSMVEQLKKIEEIPKNRLELWKADWQRRVDAFDQLIDAIGTLSKKFSKMDTMSTFMTKLVGSTNSSAVSAVASSEAPLGAYKINVTQLAANAMLTTKDPVVASRNEVIAPGRDYTFSYTYGTGASAVTRDFTIPQGTSMQSFLNIINNDTRNPGVAASLIKSGDGYVFQLMGKDTGANKALVLNGVDLPKFEPTPTGDSDDPYVNWYSRDAQDAKFYLEGRQNQELSSASNSRPRPSIN

SEQ ID NO: 84131 - protein, 174 aa, Unknown
  Obtained from environmental sample
  DOMAIN (67)...(174): SMF family
  misc_feature (1)..(174): Xaa is any amino acid
MAERGLLDLIISCLPDLSYREKITLCESLGEESDLNQKSGVEALIGRALKVQDIDSSRRTAQRTAEKARLRGINIVSWQSPLYPPLLREIYDPPVLLFFKGKLPDPENPLVAIVGTRKPSPASSAQAFDIARGLGRGGISVVSGLALGIDACAHRGNIEGGAPTSRLGQSDHGE

SEQ ID NO: 84132 - protein, 70 aa, Unknown
  Obtained from environmental sample
  DOMAIN (3)...(70): dTDP-4-dehydrorhamnose 3,5-epimerase
  misc_feature (1)..(70): Xaa is any amino acid
DWGGYGEPVCHVPGVSDTAVFAYKCTDFYYPEDEGGIVWNDPVIGIKWPDLGMDYLLSEKDKQLPGYVNG

SEQ ID NO: 84133 - protein, 222 aa, Unknown
  Obtained from environmental sample
  misc_feature (1)..(222): Xaa is any amino acid
MKTEFSCIICVADMNITNALDQCLAELTLPEVFVQRAKQMSLEDRHGFLGRQITNLEESRAMIYRIYVPTEYETGLVNRIVDATDLKMGGRGCLIVQHIDSYRYNPLSFPSDITEKLDKLCGKLGKASQKQHALISCIVPRGEGDAIAEALLELGICVPIIFYGTGVRLRDRLGLLRITVPIEKEVIWFIVPATDAILVEKISFRARGWTFPGRVFVYDVYS

SEQ ID NO: 84134 - protein, 312 aa, Unknown
  Obtained from environmental sample
  misc_feature (1)..(312): Xaa is any amino acid
MRSKGVLHVECKPGYGLELEAESRLLQSYAELKERGWSLDVTLMPAHDIPPEYAGKPDEYIKIVSEEWQPELVRRHPDVASYCDIFVEKGVFTPEHGRKVFESGRSLGLKPRIHADEFVHTGGAELAAEVGAASADHLMFCSDEGMAAMAKAGVVPTLLPATTLFLGMRDFAPARKMIEAGCNVALASDFNPGSCACMDPLLILRLGCLQLRMTFEEALTAMTLHPAQSLSRSDLGHLHPSARASVLLWDIKSPLELVYWMGEAYRPVIIENEGSNENKRMSFRQLAGASKDAPLEEPNEIPGNRRAGTRDN

SEQ ID NO: 84135 - protein, 291 aa, Unknown
  Obtained from environmental sample
  DOMAIN (54)...(123): RNA polymerase Rpb2, domain 3
  misc_feature (1)..(291): Xaa is any amino acid
MANSMKVAFSRMERIAKERMSLKETDTIKPQDLISIKPLVAAIKEFFGSSQLSQFMDQVNPLAELTHKRRLNALGPGGLSRDRAGFEVRDVHYTHYGRMCPIETPEGPNIGLIVSLANYTRVNEYGFLETPYRKVDGGKVINDIEYLSAMDEDRYYIAQASAKLNDNGTFSDDQVSCRRQGDYTTRVPEDIQYMDVSPKQIISVSASLIPFLEHDDANRALMGSNMQRQAVPLVFPEAPRVGTGMEGKCAYDSGVLVKARRSGTVTRVSSSEVIVKPDSKNGGRPQIHRRV

SEQ ID NO: 84136 - protein, 328 aa, Unknown
  Obtained from environmental sample
  misc_feature (1)..(328): Xaa is any amino acid
FGKIVHVLPWRIWGGDRELSATRIGALIGTGSAPTAGGGYGDRPQRSGDGDRRPFERGGQRRPDNRSGERHSYNRGSERSDSFGERKSFDGGGQRRSYSRDDHTERKPYPRDGQRRSFESGAGERPNRGYGERPDRSSQGRSYDRNERPERHHRAERPQGESRPRRDSDRFGSGERGEPATYRNPGLPIDEDVEFRELPKEARQDLRGLTKEHAEQVGGLLIMSGRLLEEDPESAYQYAQEAVKRAGRISVAREALGIAAYVTERYDEALREFRTVRRLTGSNEHLPLMADAERGLGRPEKALELAASPEADTLDILGKVELAIVARA

SEQ ID NO: 84137 - protein, 129 aa, Unknown
  Obtained from environmental sample
  misc_feature (1)..(129): Xaa is any amino acid
MPVSAAFWIFLLIVMVIAFFMLLPKIKNVSLTQKTAETEQDERKEKKEEGKKEDEKKPQADKPAVPEQKEPEEKPHADKPAAPEQKEPEEKTPAEKTAAPAQPSTPPGPCFYTACQTVETLQASIYTES

SEQ ID NO: 84138 - protein, 292 aa, Unknown
  Obtained from environmental sample
  misc_feature (1)..(292): Xaa is any amino acid
LAFRPDGKQIVFYCGSKDSTVMLWDAVKGEEIRAFETKSNVRDYLRLRSIGVYLGLEFVGFNPKGTQIVTVEDDYTDEEGNPITSLTPSDKKKIAYLVKLWDIGSGKLLNTFEGTSPVAFSPDGKSLYTNGTTQKPNIRIYDTMNGQLIGEIEGSGRGMGFNLGKNQFARFHDGIQICDIATGKELAQFISLSGEDTQLTSASRGLTVETQTASSTIDGEWLSIRLTVTTKPPLAATATLTCGSTTPSPALTASAPSSTTPMWCRRGYRAGPTPPQSQVLPFKMPPNLYRRK

SEQ ID NO: 84139 - protein, 467 aa, Unknown
  Obtained from environmental sample
  DOMAIN (117)...(312): Mur ligase middle domain
  misc_feature (1)..(467): Xaa is any amino acid
MLSLSSILKPGSFIYFVGIKGTGVCALAELIHGMGVKTGGSDTNEVFYTDIILKELNIPFHETFEPAHITADIDLVIHSAAYSPENNPELAETQRKNIPLLTYPQALGAFSEDFDSTGIAGVHGKTTTTAMTGCLVKGLGLPGRVLVGSAAANFGGRSTLSQGSKFFIAETCEYRRHFLLFHPKRIVLTAVESDHQDYFPTYESIRDAFVEYVRLLPSGGELIYCADDPGASEVANIIKNEERNASERSAASGSAITLVPYGFTASGDFQITSYRIENEMAFFRVNVFNLELGLPVPGRHQALNAAAAIALVSSLLKKEIAEGAASRSGQSHSHRNELTQFSIKKALEEFKGSKRRSEILGAVSGILFMDDYGHHPTAIETTFEGLRGFYPTRRLVVSFMSHTYTRTAALLDEFAASLAGADVLFLHKIYASAREKFDGHINGRSIMEKIESLPAKRAEVLCRSVLP

SEQ ID NO: 84140 - protein, 110 aa, Unknown
  Obtained from environmental sample
  misc_feature (1)..(110): Xaa is any amino acid
MSLNWKEINLILEELDLPGSQIQKATQSAFDVIGLRVHKKGVTRQLLIGLSPGACRMHETFKPFPKSDKPLRFAQFLISRIRHGWIEEAEQVGSNRIIRLLVEKGDTAIP

SEQ ID NO: 84141 - protein, 286 aa, Unknown
  Obtained from environmental sample
  misc_feature (1)..(286): Xaa is any amino acid
VKVLFHSFVNDVIIENNHIKAVIIQTKSGPMAVCAQMVIDATGDGDVAFAAGVPFKQGRDKDGYCQPGTLNLRLAGVDPKFFCEGPMEKDKLKAIDKKFQNDYDTGKIHLDCKRRELIMGRLTSGGVIGSLNYPCSYMIDPTSSVDLSKGEMECRQYIKQIIHWMRVNLGGFERLELVSIAPELGFRDSRRIEGKYTLTTEDIESNRSFDDTICVFPRVYDMLAPDGNMGGNGALEGEGYKGHIFVIPEPNSTRSYNIPYRTMLPVSIDNLLISGRVFFTLGHLRK

SEQ ID NO: 84142 - protein, 113 aa, Unknown
  Obtained from environmental sample
  misc_feature (1)..(113): Xaa is any amino acid
MSLACIHTHTIFCDGKDDIETFCRVAYEKGLDSLGFSAHAPIFRKTGLHTDWHLKNERVEEYLDSVRSAKKRWEGKLPVYLGMEADFFSGITGPADKEYREMTWTTLSGRFII

SEQ ID NO: 84143 - protein, 291 aa, Unknown
  Obtained from environmental sample
  misc_feature (1)..(291): Xaa is any amino acid
MGGSYTLLLDGDVDTSSVFDLKVTPPLTLSLTIRGLDSNRVISNLSSRMDSFFTVSGGGSDNQLILSENITLRGGLQTFASLVTVDGGSFTMIAGSAIKDNTTINTKAKGGGVYVKQGTFEMNGGEISGNKALCNSDSSDAYAGGGGVFVDEYGLFYMRGGEISRNTCENSEEATGELNGGGVLIRGHFYMYGGQISGNTAEFGGGVCMDVEMDSVFENFIMYNGDAKISGNNAINGGGVFIWSGEFIMENGKISTNKTEYRSGGGLFVVSGGTFTMKKGENLPMKFKKAT

SEQ ID NO: 84144 - protein, 224 aa, Unknown
  Obtained from environmental sample
  misc_feature (1)..(224): Xaa is any amino acid
MNKPETIRSAAKFAASSLVRHAEEIIQQRAPELLGRDEVEAILDAAEEQYPVVTGEVKSLLSLGIIREILQNLVSEQVSIRHIAVILETLADWGSFGPVPSDLIIERIRQSLRRQICMEYTDDRLNLRVLTLEPKLEKKIADHSQDSPLLEDCTEAILSAVCGMKEKGFTPVILCSPRVRFPRKGSDPKAIARNWRCFSILEYPPDITGSREVKIPSKKKGNWG

SEQ ID NO: 84145 - protein, 51 aa, Unknown
  Obtained from environmental sample
  misc_feature (1)..(51): Xaa is any amino acid
MSQNKNFDLDAAVRKVPDFPKPGILFYDITSIFTNPPAYKYVIDELGQSIM

SEQ ID NO: 84146 - protein, 312 aa, Unknown
  Obtained from environmental sample
  misc_feature (1)..(312): Xaa is any amino acid
LNWFEDQIKNRLQNDEDDFSGAFCELGSVVMGEAAAKAALVTPRQKTQNAIQEILKFFGQVITPVPESITDTAEYINYCLKPSGIMKRRVELTGNWWRDACGPMLGVLQNGDAVALLPSREGYAYFDYESGKRVAVNAASAKNLEISAYQFYKPFPNRELSVLDLVKYMFATVTRSDIFFYLAVLALTTLMGLIQPKISLLLYSRIIPQGNASVLWALGVLMVSLGAASQVLSLSQSLIMQRLTMRLNNTIEPAAMMRLLNLPAGFFKKYASGELSQKFSLIPIICNTIFSVVTGTLLTSLFSLGYSRQSAT

SEQ ID NO: 84147 - protein, 288 aa, Unknown
  Obtained from environmental sample
  DOMAIN (107)...(190): Histidine kinase
  misc_feature (1)..(288): Xaa is any amino acid
MYFIIDKNNVYHRQNMYWLSQVMGMIGLALNSIEIIRHRKSLNRIETFALASYIILPIIAVAIQVSVYGYVSVYIASTLTILFIYIGMQAQFQKILKDKELQLTQSRIAIMLSQIQPHFLYNALAVISRLCDKDPAQAKKATIEFSSYLRGNMDSLEETKPISFEKELKHIEGFINLEKAMYGEALNVIYDIKTKDFFLPALTVQSIVENAIKHGIGKREGGGTVMICTDEADNEFLISVSEHGVRFDYDKAAHNGRLCIGIKHVRAKLARACGGSLEIKSETRTGTT

SEQ ID NO: 84148 - protein, 112 aa, Unknown
  Obtained from environmental sample
  misc_feature (1)..(112): Xaa is any amino acid
MVMARKREKKEKDIIDQMLDNIDFRGLTQDEVVGQNGLIKQLTGKILQRALEAEMTEHLGYVKNSNAGDNSGNSRNGHTEKTVLMENQSATIEVPRDRNGTFSCRILTHELS

SEQ ID NO: 84149 - protein, 231 aa, Unknown
  Obtained from environmental sample
  DOMAIN (13)...(231): Chorismate synthase
  misc_feature (1)..(231): Xaa is any amino acid
MLHASPNTFGRNIRVLTFGESHGAAVGVVIDGARPGLPFDLDAIQFELDRRRPGVVDTASPRREGDRVQLLSGVFEGLTTGHPIALVVFNEGQRPGDYDALKDVFRPGHADFTHERKYGLRDHRGGGRASGRETLARVAAGAWAKQQLAPLGVAVKSFNREIAGIVCKTLDWEFVPKNPLGVCDPLTFPAQLAAVEEAMAAGDSVGGVSELHITGLPGGPGDPVFFRLDAM

SEQ ID NO: 84150 - protein, 102 aa, Unknown
  Obtained from environmental sample
  misc_feature (1)..(102): Xaa is any amino acid
GHDRSAELPELAEIAGKDDYFIQRKLYPNVDFYSGIILKAIGIPLNMFTVMFAIGRMPGWIANWKEVHDNPKQKIYRPRQIYMGENLRHYEPIDVRTDLRLS

SEQ ID NO: 84151 - protein, 221 aa, Unknown
  Obtained from environmental sample
  DOMAIN (14)...(173): ABC transporter
  misc_feature (1)..(221): Xaa is any amino acid
GGGGDDYRQENAAGQVWLNRDAILPNVQITCDECGGKRFNDATLEVFYKGKNIYDILELSISEALEFFKALPKIAKPLNVLKDIGLGYVKLGQPSTTLSGGEAQRMKISTELRRPGTGKTLYLLDEPTTGLHFEDINRLLECLQKLIENGNSMVVIEHNLDVIKCADWIIDLGPEAGEEGGYVIAEGTPEKIVKNSKSQTGKFLYSHCAIFTRNKRSIKSL

SEQ ID NO: 84152 - protein, 84 aa, Unknown
  Obtained from environmental sample
  misc_feature (1)..(84): Xaa is any amino acid
MPELGPPNAGGGYGDDPKHKGLQDVKGRPRREAQRHQAVVENLQRISQLVTDFEDIAEIDINPLKVGLEGTGATLLDARIILTK

SEQ ID NO: 84153 - protein, 327 aa, Unknown
  Obtained from environmental sample
  misc_feature (1)..(327): Xaa is any amino acid
ATYARTHRLRYATSNNPLGPWKYRGILLDPVSSDTSHGSVVEYKGQWYLFYHTCDISGRGNLRSICFDKLYFNSDGAIQKVVPTIGLEASLRKTVIDAKWTDRAMLVGEAKGAQPEGRNNLWYHQPAKVWEEALPLGNGHLGAMVFGGIADERIQLNENTLWDGYPLESANPEGLKALPEIRRLLFENKNNEAVELAGKTMMGIPQRIKSYQSLGELWFDTPNMTADNYVRSLDLSTAVSTVKYTSDGVNYTREYFASAPDNVIVVRITADKKKKINLNLRMLREKDAGNGGNVLVDIDTDTDAVNSNTVSYRASSMLLDGKINTKR

SEQ ID NO: 84154 - protein, 71 aa, Unknown
  Obtained from environmental sample
  misc_feature (1)..(71): Xaa is any amino acid
MWLWPSPICPLPKGDRVAIVTNAGGPGIMMSDAIEMAGLKIRPFDDATTKKLVETLPAAGSAHTLWTFWAS

SEQ ID NO: 84155 - protein, 289 aa, Unknown
  Obtained from environmental sample
  DOMAIN (1)...(185): Queuosine biosynthesis protein
  misc_feature (1)..(289): Xaa is any amino acid
MVSELPAFLEKGTLLVFNNSRVRKARLLGTSENTGAEAEFLLLTQIDDLSWQALAKRSKRRKPGTRYIFEGGVRAVVSPGERADRGREASSPSGELVLCFDNPIDDEWLDRWGHIPLPPYIKRKDAPADGERYQTVYASQSGSVAAPTAGLHFTEETLRELDHAGMERVFITLHVGLGTFLPVRATHIEEHRMHEEAFSIGEEAAQKIEKAKREKRKVLAVGTTSLRTLESAWQDGLLKTGGKGHTSIFIYPGFEFHVADQLFTNFHTPMSTLLMLVSALLVPICTLRT

SEQ ID NO: 84156 - protein, 323 aa, Unknown
  Obtained from environmental sample
  DOMAIN (36)...(321): Sugar (and other) transporter
  misc_feature (1)..(323): Xaa is any amino acid
GITKLCTTESLWIRNCILEEDTWAQKDISVGYALFIACAAAIGGFLFGFDTSVINGTLDALRFKLGANDAQLGLAASIAVLGAAGGAFFAGALADKFGRRRVMITSSILFLISAIGSGNPYFFTTAGTAGNMIEFIVWRVIGGVGVGAASIIVPAYIAEIAPAPLRGRLATMQQFAIVIGIFSALLSNYFLGEIAGGGAVVMDHTTRLASDVTRIGSFETWQWMFWVECIPAALYGLLVLFIPESPRYLVARKQPKKAGEILGKILSPSVVAQKIEDIKKSLHSEVAPKFSDLLEKVAGKTRLAPIVWVGIGIAACLCRSDQC

SEQ ID NO: 84157 - protein, 167 aa, Unknown
  Obtained from environmental sample
  misc_feature (1)..(167): Xaa is any amino acid
MDGQGLIVTTGAQQAINLVAKVFVDPGDAVVTEYPSFIGALAAFKSYGAETVGVPMDNDGIIIPELLKTLDRLGKKAKILYLTPYFHNPAGIIYGTDRKRELLDALKGRDIILLEDDPYGELYFDAADKPLTTTMKSMPNHSVEICYTSSFAKIFAPVWSSAESVIA

SEQ ID NO: 84158 - protein, 163 aa, Unknown
  Obtained from environmental sample
  DOMAIN (2)...(163): Cobalamin-independent synthase, N-terminal domain
  misc_feature (1)..(163): Xaa is any amino acid
LNTSIIGYPRIGGNRELKFWTESYFKGNGDMSADTLLANVGQLRSAQWKKQWTSGVKFIPSNDFSFYDGVLDTAALLGVVPKRYRDLRLGELDTYFAMAKGYQSHFGDVKALSMRKWFNTNYHYIVPEIEDDTALSVVGSKPFDEFAEADEHGITTKPAYIGA

SEQ ID NO: 84159 - protein, 206 aa, Unknown
  Obtained from environmental sample
  DOMAIN (20)...(205): Bacterial extracellular solute-binding proteins, family 3
  misc_feature (1)..(206): Xaa is any amino acid
MLFMRLSEEEKAYIRDRRVVSVAAEYDNYPISFYNKYDGEWQGIAHDLLRGLEALTGLTFEVVNSKNTDFPVLLDMLSSGEASMLSELLHSPEREGFFIWSKTAILEDHYAFISKLDYPRLRINDVLSVSVGLIKETAYASLFKGWFPDHKNAVEYENTNAVFDALERGEVDLVMANLSQLLMLTNYYERAGYKANIVLDFVSGVH

SEQ ID NO: 84160 - protein, 307 aa, Unknown
  Obtained from environmental sample
  DOMAIN (35)...(142): TonB-dependent Receptor Plug Domain
  misc_feature (1)..(307): Xaa is any amino acid
GRLVIPLRGDAFSLGLRLGGAVQSRELVIEASRPGVSETKSGRSVAISGETMERSSQIGIIEDVMTSIKLLPGVGYSGMFNALPSIRGGDPGDLMAVLDGFYIENPYHWGGSFSIFDPHMVSSAQLSHGIFSTRYGHTISGLLEVSSRRAATDYAELELGISTSAVNMNAALPVGSGGGLMLMGKATYWDPFVWSLKQLSKVWDNETLQMVNAVTTAPYIRSSAASFFYRLNPDLEMNLHSFVGAAEMGAAYVNESPNVFSTTSLVESRSHMAFDWDNLADVPYFRPELQPAAFHGSRKQKLWGRLQ

SEQ ID NO: 84161 - protein, 275 aa, Unknown
  Obtained from environmental sample
  misc_feature (1)..(275): Xaa is any amino acid
MVINVQGLVVSPAFIDSHSHSDGWYIIDEKCESKIYQGVATEVVGQCGSTLFPRSQSQLSRLKKDGPDDKSDPSEYYQSKNFEQLRKKAAVDGKKMSTNLVQLVGHNAIRRGVVGFAGRPCNDEENKLSAFLLEESLEQGAWGLSLGLEYMPGVFADFNELKELGKVCEKYDVAVTSHMRDEGENVFKSVDEMVALSRETGAKVNISHLKTCAKKHWGKAGELYRKIEDANRGGARVTADMYPYNAWFTRNYEYPARLGQGRARRKSGKAPCRFR

SEQ ID NO: 84162 - protein, 345 aa, Unknown
  Obtained from environmental sample
  DOMAIN (115)...(209): Histidine kinase-, DNA gyrase B-, and HSP90-like ATPase
  misc_feature (1)..(345): Xaa is any amino acid
VYREIRRPPHLEESLRVPLDALLRQSIALDMHPLPDSARQTVRELVAAGRALTNIVSGLSRGGLTKPARETVKNALIDLPFLLRNAHASVAEKAEERNLAVSWYVAPHLGRRYLGPADRLAHILGLLMENAVRATTRGSVQIWVRRDQDSNDPGHLVFTVADTGSGMPPMRRNALLAARIWELAGETGGTVHLDSSPDGTSISFSVVLQPLPAHVSSRQDAVIADPESLTDDAGNLTLPSLRIILADDASSRRQLLVYMLEGLPHELLEARTAAEAVAQHSDIPARLIVFDGNMPEKDLVSAVAAIRALDGDRNLPPAALLGLVGHEPQNERLRRAGIDHILYKP

SEQ ID NO: 84163 - protein, 309 aa, Unknown
  Obtained from environmental sample
  DOMAIN (5)...(289): Beta-eliminating lyase
  misc_feature (1)..(309): Xaa is any amino acid
GDGEDLRPTPLRSEVKDAIVSDLDIYGNASSLHTSGRQARARVEEARRAVGLLLGADPASIIFTSGGSESNNAVFQTMRQLQSDRSEFITTQIEHPCVLNSAEFTKKQGFKVHFIPVDEYGKIKMEALKAALSEKTLLVSVMMANNEIGTIQDVKEITRLAKEAGAYCHTDAVQALGKIPVNVKDLGVDYLTVSAHKIYGPKGIGALYIKKGAPFLPLIHGGHQEEGLRAGTYNNLGILGFGKAAELAMRDLDEYRKKTSTLRVKLKDGLSNKIPDIKFNGHPVDVLPHTLKRFVCPERKERLYSFQWI

SEQ ID NO: 84164 - protein, 173 aa, Unknown
  Obtained from environmental sample
  DOMAIN (1)...(167): Survival protein SurE
  misc_feature (1)..(173): Xaa is any amino acid
MNILLTNDDGINSDGILKLAETLRSGKNHKVSIVAPDVNRSGVSHALSIFNNAVKLTCLEKDTWSCTGYPADCIIAGLNGLLSERPDLILSGINNGENLGTDIIYSGTAAAARPGGLAGFPSIALALAGNGPYYWDRAIPWIAGHLEELVALLAFKHIRHREYSQRSRTGPKR

SEQ ID NO: 84165 - protein, 143 aa, Unknown
  Obtained from environmental sample
  DOMAIN (18)...(142): NAD-dependent glycerol-3-phosphate dehydrogenase N-terminus
  misc_feature (1)..(143): Xaa is any amino acid
MYMVEKFPKVCNNYTMAAQTAVIGAGAWGTAVAKVIAEKGKDVVIWSLEEDTCDDINKRHQNSRFLPGVKLPENLRASSDPVETASGRDFLILAVPSLYLLQTAKQILDASSIREGITAIAVLTKGFFQQTRDPIKLIDAVVL

SEQ ID NO: 84166 - protein, 113 aa, Unknown
  Obtained from environmental sample
  misc_feature (1)..(113): Xaa is any amino acid
MNNPNKRMKENPFLNKEDLRRCLCDLLYPLKEHAVGGGFDLGSTAAHYSPRVALMEGWSRSLWGIAPFLAGGGKFPDIDIWLSILRDGINPESLNFWGMPGNYDQRHVEMAAI

SEQ ID NO: 84167 - protein, 454 aa, Unknown
  Obtained from environmental sample
  misc_feature (1)..(454): Xaa is any amino acid
DNQPKEDSFSIIDSCYKDEGWYADVPAGAYDLYNPWPFHFYGLVYARIAGNRDPERAARYVERASLFAPRFAQWFRDDGSSIPYGRSLTYRFSALSLFSACAFAGVEALPWGVMKRIVLQGMRHWFSRPILDKGGILSIGYGYPNLIMADRYNSPGSPYWALKMFLVLALSDDHPFWQAEETPLPNLSQVTADKIPGFIVSRNADDAQLLCSGRVAPFEMNHSAQKYCKFAYSARFGFCVAQGGANLEQAGGDSMLLLSDLDSETEAGGNHWRERKGTTEILSGENWISGVWQPWPDVKISTLLVSLGAWHLRIHRIESKRKLKTAEGAFAIKHYNGFDEALPLNNSAAEKWEALVVFPWGASRIVALEPSSARIGTLVVPAPNLNLLEPSAVIPTLTGTLEIGTSILVTAVRAGNKDTASEASLPFVAINKDGLKISYKKIEQVIPWAGGSIS

SEQ ID NO: 84168 - protein, 157 aa, Unknown
  Obtained from environmental sample
  DOMAIN (7)...(81): Shikimate dehydrogenase substrate binding domain
  misc_feature (1)..(157): Xaa is any amino acid
MKKTFGLLGEKLGHSFSPLIHGYLGEYDYSLYEVSAADLDSFMTDRRFDGINVTIPYKQQVMPYCVTLSHEAQTIGSVNTIIKDGDGALHGHNTDYHGFNQMMEHGGIDPKGKKVLVLGDGGSAKTVRAALDGLGVPGECNNLPPGKRTLRQHRASL

SEQ ID NO: 84169 - protein, 312 aa, Unknown
  Obtained from environmental sample
  misc_feature (1)..(312): Xaa is any amino acid
LEGRLFIRDEQGNLFAELNKIRGRQIELGMPVGKYSIQMEAPSKIWMAKEVQISEGKKNVLSMNDMQSIEREKAVARGNADSSGMTGLDSARAKPFKFNFNAYAYNKEPANEVQLGFFAHAKKALSGTQIAVFGNLATDDIAGTQISSFVNISTENIYGLQATSSFNIATNFNGVQASVYNIAGIGNGVQVGVMNIISDTLYGVQGGVINIASKVSTLQGGVMNIANDVGKVQGGVMNIAGDAGLVQGGVMNVAGKVEKLQGGVLNIGGHVGRQIGVINISAESDHTPIGLLNIVGNGIFDGTFYLDETGRT

SEQ ID NO: 84170 - protein, 173 aa, Unknown
  Obtained from environmental sample
  DOMAIN (5)...(168): Domain of unknown function DUF28
  misc_feature (1)..(173): Xaa is any amino acid
MSGHSKWATIKRKKAKTDVGRATAWNKLIKEISVAAKMGGGNPDANPRLRTAILKAKGQSLPAKNIESAIAKGIGGNSGANMEEPMYEGYGPAGCAILVQCLTDNRTRSVADIRNIFSKNGGNMGTEGSVSWNFKKERDCGGGLLCLPRRQNYGFGFGSWCKRPHNRRRSLRN

SEQ ID NO: 84171 - protein, 399 aa, Unknown
  Obtained from environmental sample
  misc_feature (1)..(399): Xaa is any amino acid
MAFDTMRRDYEARKAAAKNLTDGKFVRREDCVRLLETIIKPRDRVCLEGNNQKQADFLARALVSVDPAKINNLHMVQSSIVLPEHIQVFEKGIASNLDFAFSGPQMKELYELVVSRKAKIGAIHTYLEIYGRYFLDLFPNVALVVAEEADADGNLYTGFTTEDTPTIAEATHFSSGLVVAQVKKRSSALPRVDIPGGWVDYVIETGEDFWMQALFTRDPARVSDQQVLMAMMTIKGIYDEYSVASLNHGLGFPTAAVELLLPTYGKELGIEGRACTDWVLNPHPTLIPAIETGIARRVYAFGGEPGMEDYTRARPDVFAIGPDGHMRSNRCAAHIAGLYAIDAFVGATLQIDRFGNSSTAIKRRISGFGGAPTLGGTPPGRAHATEAFTQAGYQKTAFI

SEQ ID NO: 84172 - protein, 326 aa, Unknown
  Obtained from environmental sample
  DOMAIN (3)...(225): Queuosine biosynthesis protein
  misc_feature (1)..(326): Xaa is any amino acid
LTYNLQDYDFVFPNELVAQKTAGKGKTKILCCQKNGCALHILEGSKITDLFKAGDCIVVNNTRVIPARLLGKTKHGGKAEIFLLKQLEPAADNTAMWEAWVKPGKAFENGKEIFVSNIKCKSLGLATAHDSKTRIINFSISDSEFNSFLETNGQIPLPPYINRSACPSDKSDYQTIFAKHSGAVAAPTASLHFSEDMANELKAKGVLFAETTLHVGPGTFENIKETSDFRKHKMHEEMYELNEQNATIINECKKRGGRIICIGTTSTRVLETVANEDGFVKAESGTTNIFIYPGFKFKQQTPCSQIFMAPNLANLLVLLFRARKNV

SEQ ID NO: 84173 - protein, 71 aa, Unknown
  Obtained from environmental sample
  misc_feature (1)..(71): Xaa is any amino acid
LDADDRTALTNELSSLGLPFKLNGRIVVPYKDSAQEIISRIKTKLTVLKINEPSLEDAYIDFLTKPKEGAA

SEQ ID NO: 84174 - protein, 103 aa, Unknown
  Obtained from environmental sample
  misc_feature (1)..(103): Xaa is any amino acid
MGMDIGPRRRTLQGRAQGRQTVFWNGPMGVSSLPKFAVGTQAIAATLAELKGATTVIGGGDSVSAVKKAGVADKMSHISTGGGASLELVEGKELPGVVALNDK

SEQ ID NO: 84175 - protein, 320 aa, Unknown
  Obtained from environmental sample
  misc_feature (1)..(320): Xaa is any amino acid
ADTAPRIALLERGRPFIDSIHERCFALKNLRERADEDIRMTVSEINDLSRQIAGLNETIQRVRAQGDEPNDLYDRRDLLVDMLSSKINVTVDRRDPDEFMVHTNGIVLVQGRIGRQLDLVLNPETGYSDIVWSETRNKLEFLNGDHNGSLGALVDLRDYTINTEIQTLDNMTMNFVGLVNEIHEKAYGVNGETGLKFFNEHPFVTNVNGNYDRNGDGDEDSSYIFRVSGINILESHAQVGLEGVITLSAFGGERKIQYYPTDTGADIINRINKFRGGNLPPVWNCNGNLYYEGNPHPRAGKNPDFVIRHNRKIWGVFWKG

SEQ ID NO: 84176 - protein, 352 aa, Unknown
  Obtained from environmental sample
  DOMAIN (68)...(312): Iron only hydrogenase large subunit, C-terminal domain
  misc_feature (1)..(352): Xaa is any amino acid
MAKTPLSPVIRIDEEKCVNCYACIVNCPVKYCMNGSEDKLQINHATCIGCGNCINACTHKARTLIDDTSRFMEDLKQNKKTIAVAAPAVASFFPDKFLNLNGYLKSLGVEAFFDVSLGAELTVISYLDYIKEKNPRTVIAQPCPAIVTYIEIHHPELLPFLAPADSPILHTIKLIREFYPQYKDHKIAVISPCIAKRREYDETGMGDYNVTMVELKNLLDDQKINLSSFPKIEYTGLSAERAAGFPIPGGLLDTAERFKPGIRRLTEKIEGVHNIYPYLKEISEILNTKAQLPLLIDCLNCEKGCIGGPGTGNAEKPLAMLKEPVRKTPWPNLKKNNIPKSEMTHTKNPSRS

SEQ ID NO: 84177 - protein, 230 aa, Unknown
  Obtained from environmental sample
  DOMAIN (18)...(179): KR domain
  misc_feature (1)..(230): Xaa is any amino acid
MENKKYLKFKEKYGPYALVAGGSNGLGAAYAEALARRALNLVLIAREKERLEKTSSRLREQYGVEVIALTADMADYEKVKNLLASLNVSIGLLIYNAAYAPIGLFENISEEQLSQAAAVNVRAPLLLAKFLSARMIHNKRGGIVLMSSLAGAQGSPKLAAYAATKAFNAVLAEGLWNELKPHGIDVIGCCAGAILTPRYQQAEKSKNAPGTMTAACVAKRTLKALARGRC

SEQ ID NO: 84178 - protein, 271 aa, Unknown
  Obtained from environmental sample
  misc_feature (1)..(271): Xaa is any amino acid
LIISQRKRFQDLFDYLLSDKIVNAPEEDRFCIWEILDLTVHKHRKFKKAQWAFNKKTIDKLQDVANKIKPNNPKYLYRNLFSNNDHFYFYKDDNWENYLKKIEKARTKALQEVYHNNGVNGILELAFSVEDKYKIGFSLRVINENIRNAILPEYLDSTNISIKQLVKGFINGCFSNQKEAWINTYDFTAWKKTQICSLLLNIAYHEKIWNLAESLLGDSVNVFWEKIFESPYAMCGKKIIAIDKPRKYKQHSSSGSNSCIPGDPHVSARPR

SEQ ID NO: 84179 - protein, 68 aa, Unknown
  Obtained from environmental sample
  misc_feature (1)..(68): Xaa is any amino acid
MEMVNNINNNFTINYNNKIFRSIENTENGEAGKETVFIYRQNNEIVWAEYYGGTIKKVFFLDSQTNGE

SEQ ID NO: 84180 - protein, 150 aa, Unknown
  Obtained from environmental sample
  misc_feature (1)..(150): Xaa is any amino acid
LGGISGQQFHFANFMGTLLFYRQGNLKVRHRHPHGKRKGADRQPIGTRRTFKTKGVGQRYMAAVFNAPVSVMESAGEGGAWGIALLSAFMREGAKTLEKFLAEKVFAGKTGVRIDPDPKDVESFKKFMEQYTAGLKIEKSAVENFKRGKL

SEQ ID NO: 84181 - protein, 174 aa, Unknown
  Obtained from environmental sample
  DOMAIN (28)...(174): ABC transporter
  misc_feature (1)..(174): Xaa is any amino acid
LKIKVEDMNLYYDAFQALINVNLDVAENEITAFIGPSGCGKSTLLKSLNRMNDLVESCRITGKILFDGEDIYGKKMNVNVLRKRMGMVFQKPNPFPMSVYDNIAYGPRTHGIKKRRELDQIVEESLKNAAIWDELKDRLKKSALAISGRAAATFVHSAGARREAGGHTARRTDL

SEQ ID NO: 84182 - protein, 273 aa, Unknown
  Obtained from environmental sample
  DOMAIN (129)...(194): His Kinase A (phosphoacceptor) domain
  misc_feature (1)..(273): Xaa is any amino acid
NTAAAQGGCGVLISEDLVIFAHPKRDFIGKNIRERGISLSILADELLNSKDITEYPMISYKGEDSVAFFRRLPNGWYLGVDLPRLPYYKSETKLFFIFSILGMVLASILSFVLIRVDTARNKADMESKYKSAFLANMSHEIRTPMNAIIGMSELLTNERLSKRQMGFIDDMKVSAYSLLSIINNILDFSKMEAGKFSLTPVNYDFRALIDNIITMFRYMAQRKELEFKHESSGDLPEYLYGDRFKAQTKFKQISTKNAFKYTETGGTSSFKIS

SEQ ID NO: 84183 - protein, 339 aa, Unknown
  Obtained from environmental sample
  DOMAIN (140)...(227): PDZ domain (Also known as DHR or GLGF)
  misc_feature (1)..(339): Xaa is any amino acid
CQTVDGKEYTAELLGKDTDLDIALLKIKIQNAPYAKLGDSDSTKVGEWVVAIGNPLGLEHTVTQGIISAKGRSSSSVSGNPNAWVGGFLQTDAAINRGNSGGPLFNLRGEAVGINNSIRADGQNIGFAVPMSPVKKVLNELRTGKPLNRGWLGVSTGDLDKDFGEGLGISQGAMVGSVTKDSPAEKAGVKPLDVIVSVDGQPIKTSNELVESIASRREGDAVRLEIVRGGKKQTLSVTLGNRASLNDDDDSPSGRRRREEAPKDSSGSMDLGETYGVPTELRWTTRPEWPTASPKAYRAWALAKVVPRTSASEKGPSEGRVLVGRGYQRNQKTGPNSRA

SEQ ID NO: 84184 - protein, 204 aa, Unknown
  Obtained from environmental sample
  DOMAIN (29)...(198): Phage portal protein, lambda family
  misc_feature (1)..(204): Xaa is any amino acid
MKTPTIPTLLGPDGMTSLREYAGYHGGGSGFGGQLRSWNPPSESADAALLPNFTRGNARADDLVRNNGYAANAIQLHQDHIVGSFFGLSHRPSWRYLGMAEEEARAFSREVEAARKDFAEDDCCSTDVDRKRTYTMMIREGEATHACNGELLRSGRPGYQIVAAFPDTVSEVLPEAHHQPEQCQRHPELQFLLQSIQQCGAVPV

SEQ ID NO: 84185 - protein, 199 aa, Unknown
  Obtained from environmental sample
  misc_feature (1)..(199): Xaa is any amino acid
MSNDSDYPTEVIATDARAARSKSKKLVAYFSATGTTKAAAQEIAQVLLADRYEIKPKVPYTEADLDWRDENSRSYVEMHDQTFRPEIVNDPVDIQAYDFILLGYPIWWGVAPTVVNTFLEANDFRGKTVIPFATAGGSDIGDFTNYLGRSLPGDRTEQGVSEYWVSNDGGIVKGQQTTLSPAKWARAQTPLWTKRIRQS

SEQ ID NO: 84186 - protein, 122 aa, Unknown
  Obtained from environmental sample
  misc_feature (1)..(122): Xaa is any amino acid
MSDNPDNNVAESRQKDDIPISTDDSSSIVLELIYQMKIKDVMATPVITGRKEQTMRHMQAMMRENNITSIPITEGEKLVGIISIYDIVTALDMSLINCPVEERMTTNVVTSGDSAINPPPKS

SEQ ID NO: 84187 - protein, 318 aa, Unknown
  Obtained from environmental sample
  DOMAIN (2)...(180): 3'-5' exonuclease
  misc_feature (1)..(318): Xaa is any amino acid
MIRWPRKLKTKLLALDFETDSLDAWNARPIGISLAVMPKEAFYAPVAAHQGAGEESPSPFLDGEKVKALLEPFLADPSMTIVAHNAKYDYKVSRGWGIDRWQCRIWDTMVAAWVIDPERGGYSLDSLAVFYFGVIPIAYNDIVPKGKTFDAVPLETASRYSAEDADFCLRLKYCLEKKLGDAEPLFKNLEMPLLPILAEMEGEGIRIEKDILKNYGAELGKELEDIQAKTYKIVGHEFNLASTQQLQKVLFEERKLKPDKKTKTGYSTDVAVLEELAREDEVPALILRHRTLSKLKSTYVDSLPVLADKDDRLHTNFV

SEQ ID NO: 84188 - protein, 120 aa, Unknown
  Obtained from environmental sample
  misc_feature (1)..(120): Xaa is any amino acid
MARKDPAREKRILMEAVVDAYGPEERAMGWYYYLKDRISFPFAARCIAVNKRSPLELGERTIVVQMAGEEDCEHDMYVEISWSSKVLTIPLFQIKPLDADDDTVEAIGDWHYWKKQGYTF

SEQ ID NO: 84189 - protein, 111 aa, Unknown
  Obtained from environmental sample
  DOMAIN (60)...(109): Ribose/Galactose Isomerase
  misc_feature (1)..(111): Xaa is any amino acid
MRIGFASDHAGYELKERLKQWAEGHGHCAVDFGAHGTESVDYPDFAHKAASLGESWDRLVLICGSGIGVSITANRHSGVRCALITDTEHARLAREHNNRKCDCNGPKIYWN

SEQ ID NO: 84190 - protein, 234 aa, Unknown
  Obtained from environmental sample
  DOMAIN (44)...(232): ABC transporter
  misc_feature (1)..(234): Xaa is any amino acid
MPVIEMKGIKREYRMAPPRGKKNEDAQAVVVRALRGVDFSAEEGEFISVMGPSGSGKSTLMNILGCLDKPDAGTYTLDGIETSSSNSDTFAYIRNRKIGFVFQSFNLLARTTAIENVELPLFYRRREKNEAKRNSSDRKERAITALGEVGLSGRMDHFPSQLSGGQQQRVAIARAMVNDPAFILADEPTGNLDTGMSLEIMGLFQQLNDKGKTIIMVTHEPELAAFTKLNHHPA

SEQ ID NO: 84191 - protein, 78 aa, Unknown
  Obtained from environmental sample
  misc_feature (1)..(78): Xaa is any amino acid
MIPTLIGISMLSFFIIQLPPGDYLTSKIAGMTEQGETIDVATLEVMRARYGLDQPKIVQYWKWISGIVLRGDFGESFE

SEQ ID NO: 84192 - protein, 334 aa, Unknown
  Obtained from environmental sample
  misc_feature (1)..(334): Xaa is any amino acid
LVKAAGGEKTAGAKLKAASGWNFFGNGWIRTGNGTDDYGFSALPGGKRSGDFYDVSREGYWWTATEDEKRDDRAHYRKMDVNSTEIKWGYYGENIKSNGLSVRCVIDEAAPYKLTLTAATGGSVSADPAKASYIAGETVSITAVPERGYLFAKWTGGKAADSAYVTTTVTMNSDMAITAVFNKSAAPPVAYDTLTDSRDGKKYKTTVIGGKTWMAENLNYQTPGGSWCYDRKTDNCAKYGRLYNWGMAREACPAGWHLPTRYEWNELVKAAGGGKAADKNLKSTSGWKRAGNGSDVYGFSALPGGSYDDHNIKFEDIGDDGYWWTATEEKRIVP

SEQ ID NO: 84193 - protein, 184 aa, Unknown
  Obtained from environmental sample
  DOMAIN (5)...(152): Metallo-beta-lactamase superfamily
  misc_feature (1)..(184): Xaa is any amino acid
MGQEDGPESILVDPGNMDKQILEYIEGNNFYPKAIFITHDHPGHVHGIRTLKRIYQSEVFAINRIVRDHKTTPVKDGDMIDIGPFTVKVISIPGHSADSAVYQIGRLLFTGDVLTAGMLGTTASAYGAATQLNTLRSRLFSLPGDYTVLPGHGPPSSLEAERRFNVGISQLALQSPGGRYLGHQ

SEQ ID NO: 84194 - protein, 90 aa, Unknown
  Obtained from environmental sample
  DOMAIN (2)...(90): Rnf-Nqr subunit, membrane protein
  misc_feature (1)..(90): Xaa is any amino acid
KGIYLVLITTNCAILAVTFDVISGGYTFVESLVYAAGVALGFLLSLLLLAGIRRRIRTSPIPSFLKGTPILFVAAALLSIAFMGFKGLVQ

SEQ ID NO: 84195 - protein, 121 aa, Unknown
  Obtained from environmental sample
  DOMAIN (32)...(119): Protein of unknown function (DUF497)
  misc_feature (1)..(121): Xaa is any amino acid
VGEWGVGLPTVPGMNFAARLTIWLNIHIIIHMTFEWDENKNLENIEKHKVSFETAQEAFFDKKRIIIKDKKHSKKEERFYCIGNDGNGILTVRFTVKNGNIRIFGAGYWREGRDKYEQKKN

SEQ ID NO: 84196 - protein, 289 aa, Unknown
  Obtained from environmental sample
  misc_feature (1)..(289): Xaa is any amino acid
MNIGINASALSAQKGGASFYILNIVKALAQTDTDDKYFIFTTKAAKDQFSDLPSNFTVVPCAPSKTIFRLFWEQSSLPLIICGKFKIKVLFSPNYTAPLIRFGFSSVVTIHDLSFFPLSKYYPRSRRFFKQIIHLSVKFSDKVIAVSEFTKNDILKYIGKKYENKIRVIYEAADVKFLNKPTIEQIANTKKRYKISKEYILFIGFSEPRKNLERLLSAYSMIKDNIDHDLVIVGGHGWWYEQTYLKVNDLGIAERVIFTGYVDDFEVPSFYGGAAVFPFPSLSEGIGNR

SEQ ID NO: 84197 - protein, 284 aa, Unknown
  Obtained from environmental sample
  DOMAIN (20)...(247): Caspase domain
  misc_feature (1)..(284): Xaa is any amino acid
LILFGLSLSVPAVSQTLGPRYALVIGNGAYRHVDNLPNTVNDASGIAKKLSGLGYTVDLLFDSDLAGMSRAVSAWIRQLSADRSSEGFFWYAGHGMQVSGENYLLPVDINAEDEAGIVYGSYPLGRLLLSLEQTARNKLNVVVLDACRDNPFKNLPGGSRGLSRGFVTVEHPPQDIFVMFSTSPGTTAADGDSGRNSPFAEAFLKYMDSDEILPVMAGLVTRETMRLTGGKQRPYQNGSIVSELYYSLSSGASAPAPARNTAAGNRRGISFRNALRRALGRVFG

SEQ ID NO: 84198 - protein, 195 aa, Unknown
  Obtained from environmental sample
  misc_feature (1)..(195): Xaa is any amino acid
MSTERMNNNQGTTKMDGGTDRMDAGTARMGGNEDSAVTAVGVVFSSGQAIVLNGKNCVIHSMISGSSGEAVVYKVIIDGKLYALKLYKQDTPLSDTAKKVIAKIKDNPKDRVVKIYDFGRYNEQDFEIMEYAEGGTLDQYLKSNGAIHDMTKIKNILKMITEGLEQLHGYYKVIYQDFKARKTSISGMRNKHLLF

SEQ ID NO: 84199 - protein, 279 aa, Unknown
  Obtained from environmental sample
  misc_feature (1)..(279): Xaa is any amino acid
LLELGADENQYRVYKERIEEQEQQEQKAREEQERKKAEAKREKILKKIIGILAAMIAVAALILFIAYRLTGSFFKFQQNDQGTITVTGYSGKKEVVIPSTEKGTSVTEIGDKAFYRKNIISVTIPDGVTSIGNSAFEDCAKFTNVNIPNSVTNIGDKAFYNCNSLTNVTIPNNVSSVANYSIIDGIMYNESKTEFIFRPSGIKGITGSVTIPNGVTSIGDYAFRGCTNLTSVTIPDSVTSIGNYAFGECTNLTSVTFQSKITFDYYSVPFRGLGRSCHA

SEQ ID NO: 84200 - protein, 89 aa, Unknown
  Obtained from environmental sample
  misc_feature (1)..(89): Xaa is any amino acid
LGLIAAPKARGAIRKNTEEIAKPGWHVLDTHMGSGSSAIACHRLGLGMTACEIDPHYFNAAKKRIDAETAQRELFLPELQRFRESHLFE

SEQ ID NO: 84201 - protein, 182 aa, Unknown
  Obtained from environmental sample
  misc_feature (1)..(182): Xaa is any amino acid
MLEVLYGARKQISFTFAPYVLILNYGANTSVISFLLAVSAAAGFIASPLIGKLIDKVGYKAIMVGDTLFLIVVCLLYGFSHRIFPMHIAFYVVCVNYIIDAIISVASMASNVYVQSIAANQEEITATISTGISVNHVISVLIALLGGLIWKIAGIELLFSLSAFLGLLNSLYAASIKTGSRE

SEQ ID NO: 84202 - protein, 104 aa, Unknown
  Obtained from environmental sample
  misc_feature (1)..(104): Xaa is any amino acid
KGAPCIDWHEVRNRKKTHLDVASAVSGGKADAAVGIEKIARQVDNIDFIPMKKERYDLVVKKEHINSHEVSAMMNIINSDAFKQEFANIGGYDTSGIGKIIAEI

SEQ ID NO: 84203 - protein, 340 aa, Unknown
  Obtained from environmental sample
  misc_feature (1)..(340): Xaa is any amino acid
MSQTNIKVSHSKSINEKIIVAYVVPPGVDPEKVVVLGIEKDHWLLKPGEEVIMRLVTNADETADRNVKDIVWGGNDISVASVDYNGNTALVTAKGKGSTVITVTHPKKAIDLKIYISVSDMPLINKEITLPGIVELIIGENKVVTAVARGLSDAEIKDIAWSIDDSGVAGISGEGVGLTGGKLFIQGKNRGQAWLTARQNGFGYMKKILVVCARTYDELMNTYVMASEESYYRMKVGDSRDIRLIFGSAGFPESEKKLITWRDEGNKVVNIYDGGGGDHAKIEAVAPGITSVTVNHEIVLKPVTIIFEAYNEPITGANYAFNSSTLMMGLLVKKLVRSRK

SEQ ID NO: 84204 - protein, 178 aa, Unknown
  Obtained from environmental sample
  misc_feature (1)..(178): Xaa is any amino acid
MVKFYRRALNKIDKLDAGQRKELLVSAIGEINLLETVMDSMDVGILVCDAKNNLVMANKFAQRLFPMNLGEGVELWSALKDEKIVGFFKNILLNREKVNGYEIDIEQSERKKLLSINVVPLVQEKRITGSLIYIEDITEKRRGEVRLRRAENLASLTTLAAGVAHEIKNPLVSAESVM

SEQ ID NO: 84205 - protein, 88 aa, Unknown
  Obtained from environmental sample
  misc_feature (1)..(88): Xaa is any amino acid
LAVSPKGTAVILPFGNPLCKKPGTGDVLGGIIVSLIAQGCSCFEAAILGAYLHGEAGRLASLDLTEYSVLASDLTRYIPEVIKSVVEP

SEQ ID NO: 84206 - protein, 75 aa, Unknown
  Obtained from environmental sample
  misc_feature (1)..(75): Xaa is any amino acid
MTILDEIAGKTRARVAKAKNAAPFEQTQRKALAIADKEGSEPFPFERALALPGLSFICEVKKASPLKGYYRGEIF

SEQ ID NO: 84207 - protein, 331 aa, Unknown
  Obtained from environmental sample
  DOMAIN (84)...(288): Glycosyl hydrolase family 3 N terminal domain
  misc_feature (1)..(331): Xaa is any amino acid
MAGPLWESRNHRFKRDPLENRIDSVMKLMNLAEKIAQMTQPELKIGFGNGVSTPNNGTSYLYGSVLNGGDGYSSTFLNNVTTTLNTWQRVKIPTSYGKDAVHGNAGVKGYTVFPHNIGLGATRDSALVRRIGEAPAKELWTAGIDLNFSPAISVVRDTRWGRSYESYGETAELAVQMGAAMVRGLQGERFNAPWRVTATAKHYVGDGGTTDGKDRGNTDITDDQLRAVHLPGYEAVVEQGVLSVMASFSQVRTVHQHIDSTRLTGWLKTELGFDGYIISDWQGIANSNQPGVTSPDGYRPRRQPRAYAYKGAVRKAITPYRLAMDPGTATL

SEQ ID NO: 84208 - protein, 295 aa, Unknown
  Obtained from environmental sample
  misc_feature (1)..(295): Xaa is any amino acid
VQMNVEDSRNGVAEYVIDKYGDKVAIELKWGQGAKNIGGEISVRDIEYAKFLHKRGYLLDPDPTTPDAAAAAKHGIHAHFARHSRLGYTNLDSYAAVRKDFLSAVRKLRKLGYKTITLKTGAYGMEALAMSIRLAADAELDLLSIDGAGGGTGMSPWDMMEHWGVPSLQLHAKAYEYASMLAARGIKPADMSFGGGFAKSSSIFKGLALGAPFTKFIIMGRCMMIPGFLGSNIEGVLRPANKAKVHGNWTELPQSVSQYGNTPEEIFTTYYALQEKLGKAEMQNLPLGAVAMWTL

SEQ ID NO: 84209 - protein, 197 aa, Unknown
  Obtained from environmental sample
  misc_feature (1)..(197): Xaa is any amino acid
MLVSYETASQLIESGRLLHIAGTEALLKKLPKGKWIGGSTEYFMAKEGGKVSGDLLFVTDFSKTKSVYEKFKIQSYDEKNICKVSSDAYENGFSILILPFDSAVHTEYAQNAASYENMFIRHIAGWISGLNPGQTGTNACCRSWVYRGIIFPTRRSRFILQLKKTKPFSVNIINIFEQDTDSPVIEITEKAFMLKNG

SEQ ID NO: 84210 - protein, 419 aa, Unknown
  Obtained from environmental sample
  DOMAIN (155)...(375): Methyl-accepting chemotaxis protein (MCP) signaling domain
  misc_feature (1)..(419): Xaa is any amino acid
MAPVYEMLTITVIISVVIMVLVVLAAIFLSRSISSPIVKVAETLKDISEGEGDLTRSITVNSKDEIGSLALYFNKTLEKIKKLVIIIKKETANLHNIGNDLAGNMTETAAAVNEITANIQSINGRVINQSAGVSETHATMEQVVANINKLNGHVENQSNNISQASSAIEQMAANINSVTATLIKNTENVKALKGASEIGRAGLNDVASDIKEIARESEGLMEINSVMQNIASQTNLLSMNAAIEAAHAGDAGRGFAVVAEEIRKLAENSGGQSKIIGAVLKKIKESIDTITKSTDNVLNKFEAIDSSINTVARQEENIRSAMEEQNEGSNLLLKNTGGLNEITRQVKRGSQEMLEGAKEVIQESNNLEKLSQEISGGMNEMSTGAGQINVAINHVNEISAKNREGIEALIREVSRFKVE

SEQ ID NO: 84211 - protein, 76 aa, Unknown
  Obtained from environmental sample
  misc_feature (1)..(76): Xaa is any amino acid
VPEKFGVKAEKVYTSISGYYEENNAGTVQLILTTRWLKENGFAFFDLGMPLEYKSALGAQNISREDYVALFRAAQC

SEQ ID NO: 84212 - protein, 73 aa, Unknown
  Obtained from environmental sample
  misc_feature (1)..(73): Xaa is any amino acid
TLKIVNLKTGKGNIAVFWIPVSEGADFETAKYDLARTPAWLDKAIDVIKQALLLDLEARMLKNSAEGLIVNCV

SEQ ID NO: 84213 - protein, 141 aa, Unknown
  Obtained from environmental sample
  misc_feature (1)..(141): Xaa is any amino acid
VPFLGALYLFARFAWKRYCRCVTGQDGRTLFVRGAGTRVTLRVIAVFLAVIFLITALMRPRWGARDTEETEHGIDVAVTLDISMSMLAGDILPSRLERVRSELSLLLRLLDGNRFSLVLFAGGALYPVSADIRFFAIYEFI

SEQ ID NO: 84214 - protein, 318 aa, Unknown
  Obtained from environmental sample
  misc_feature (1)..(318): Xaa is any amino acid
MRWIVCVLSASLESSAWAIETRLDPASVNVALDEYFYLQVQINDAEGADCQIDCPNQKEFEIVKAGISQSQSIQVIGAQIERTHTWIHNFRLRAKEVGDFVYGPARVTINGHSYTTGTSAIHVRSERFTPGQGRGGLMDFFSADPFVRNDGRIAVHVETVFDKGTAWVGEGVVQYVDMYASRPRITGVQFAQISRVGFWEILPENFNQGRPQRVTRDGKEWFRYRYPVAWLFPLTSGEKVISPFAVRVDYDQIWMRSQVFQTEPLRLMVLPLPTGAGKFFSGAVGNFEIKRASGGTCGRFVKDKPLRSSPLRNLSMIF

SEQ ID NO: 84215 - protein, 154 aa, Unknown
  Obtained from environmental sample
  misc_feature (1)..(154): Xaa is any amino acid
VVQMDETEVQVIGEENRSDIQKSRMWLARGGPPGKKVIWYEYHPTRVAYNAKAFLEGYSGYLQTDGYDGYDSAVKDMPGIVHVGCMAHVRRHFFEAEKIGGQGKTAGEALEYIRKLYRIERELREEKNNCKQSDEEFLIKRKKQAEPVLNDFKT

SEQ ID NO: 84216 - protein, 85 aa, Unknown
  Obtained from environmental sample
  misc_feature (1)..(85): Xaa is any amino acid
AVGLFPRADAGGLRCLKLREIFKHVGHCQLAAAPERNEPDTGELNYDYIFKAVDALGYAGYIGCEYNPANGTEAGLGWFAPYRNK

SEQ ID NO: 84217 - protein, 258 aa, Unknown
  Obtained from environmental sample
  DOMAIN (34)...(257): Methyl-accepting chemotaxis protein (MCP) signaling domain
  misc_feature (1)..(258): Xaa is any amino acid
MASGAETASANVNNVASAVEQVSENIHNMAAAAEEASVNANEVAGAAEQMSANMNTVAAAVDEMSASINEISRNAGDASTVAGEATVKSKDATEVMNKLGMAAKEIGQVTDVIKKIADKTNLLALNATIEAASAGEAGKGFAVVAGEIKELANQSAQSADDIAMRIDGIQSGTSKAVTVIKDVSQIIEKINEGVDAISKNVKQQTKASDEIARNVSQANSGAKRVAGAISEVASGSKDIAERCWSSERQCQARFRFHS

SEQ ID NO: 84218 - protein, 127 aa, Unknown
  Obtained from environmental sample
  misc_feature (1)..(127): Xaa is any amino acid
CQIRTRGFPDLVPVLAVAAASAEGTTVIRNAARLRTKESDRLAAVSAVLRALGADADETDDGLVIHGGKVFKGGQVSSCGDHRIAMSAAIAAAVCAGPVVIKGAQAVNKSYPGFFDDLRLLGGEVEE

SEQ ID NO: 84219 - protein, 100 aa, Unknown
  Obtained from environmental sample
  misc_feature (1)..(100): Xaa is any amino acid
LSNIHDFSTVITVNQSEKLRVLIPKGRIFEKVASLFADAGFPIAMADRTYRPVMDVDWLDVKIMKPQNVGELLELGSHDAGFTGIDWMKKLGHSVMIPPW

SEQ ID NO: 84220 - protein, 158 aa, Unknown
  Obtained from environmental sample
  DOMAIN (5)...(158): Rhodopirellula transposase
  misc_feature (1)..(158): Xaa is any amino acid
VWGGLSRITKHRKIQQILKEKKYEIGYDVIAKTLKELGYRLQLNQKMLQVGKGHPDRDTQFQFINNKAKRFLKAGVPVISIDAKKKEHIGNFINKGRTYRKKKDPAKVVDHDFPIKELGKVTPYGVYDIGRNEGFVNLGISSDTSEFAVESISRWWLT

SEQ ID NO: 84221 - protein, 314 aa, Unknown
  Obtained from environmental sample
  DOMAIN (86)...(311): Rhodopirellula transposase
  misc_feature (1)..(314): Xaa is any amino acid
VYEVLENKIKQIMPILNEKQLRQYLGSEAEVIGRGGIAIIARISGKSRNTIVAGIKENRSGENTAEGIRKAGGGRKSLKEKYPDITKEIERIVSDTTFGFFENPLSYTTKSTRNIQQILKEKKYEIGYDVVAKTLKELGYSLQLNQKMLQIGKGHPDRDKQFQFINGKAKRFLKTGLPVISIDAKKKENIGNFINNGRTYRKKKEPTKVVDHDFVIKELGKVTPYGVYDIGRNEGFVNLGISSDTSEFAVESISRWWLTLGKNTYRKPKNSLSIAMAAGTNGKQKQAFQIPISAIGEPEGALKIMYIHFPAGTQ

SEQ ID NO: 84222 - protein, 216 aa, Unknown
  Obtained from environmental sample
  misc_feature (1)..(216): Xaa is any amino acid
SLSPRLVGIGLLYRQGYFTQQLNADGFQQESYPENDWYNMPVERKNGKDGNALKISVDLAGRQAIAQIWEVKVGRSSLYLLDTNLEENAPDIRNVTASLYGGDKETRMQQEILLGIGGIRALRALGINPAATHMNEGHAAFLGLERVREIMTERNFTFEEAREAIWPTNIFITHTPVPPVMSVLTSAWLKIFPLLAAGSWHIMEGFSWPWKDKCQR

SEQ ID NO: 84223 - protein, 226 aa, Unknown
  Obtained from environmental sample
  misc_feature (1)..(226): Xaa is any amino acid
MPQWAGSCWYYLRYLDPNNDTAFAAQDKINYWLPVDLYVGGAEHAVLHLLYSRFWHKVLYDCGLVNTIEPFQRLINQGMILGEDNQKMSKSRGNVINPDDIIREYGADAMRVYEMFMGPLEVSKPWNTAGLVGVSRFLERLWAIGEKTITDSPPQPPEQLTKLLHRTIKKVTDDTASLNFNTAISQMMIYSGELARLTEIPRGFWEPLVVMISAYAPHLLRNSGKS

SEQ ID NO: 84224 - protein, 293 aa, Unknown
  Obtained from environmental sample
  misc_feature (1)..(293): Xaa is any amino acid
MIARDLHPSSQFCYEGTTVYSKCGGDKYEPSTQSCDGGKTIYTHSYCSDIKYNPATHFCSSNNTRIYSLCNGIEYDTRTEKCVNDVVQIPECKYDPKTQVCEKGIVKTFFTDERDGKKYKYVKIGDQVWMAENLNFDAEGSKCYGNDKANCDTYGRLYNWATAMGSSVSSNKNPSGVQGVCPSGWHLPSVAEWDELTVNVGGGSVAGTKLKADSPLWFYDSISSTATDDFGFAALPGGYGDAFIALGKYGNWWSATGSGNETAYHRDLYYNTEGIYISNNVKIFLFSVRCLKD

SEQ ID NO: 84225 - protein, 325 aa, Unknown
  Obtained from environmental sample
  DOMAIN (67)...(239): Radical SAM superfamily
  misc_feature (1)..(325): Xaa is any amino acid
MAERLGEKLKEKYPQVDYVMGTSAASVFPLILKAVENGVKAELDLNEKPVFSFSDSHMEEGQFRSFVPIMHGCNNFCSYCIVPYVRGREVSRDPQNIAQEIRLVGERGVREITLLGQNVNNYRWENIDFAALLKLAAAEAEKSGVKWIRFLSANPGNFSSAAIQVMAENPVFCRHLHLPVQHGSNSVLKAMNRGYTAQNFLERVREIRSAMPGITLSTDILVGFPGETEEDMEQTLQLMEEIKFLYSYMYHFNPREGTKAFDLGGRIDEKVKKERLARVIALQKKHTAQLLKARIGSTETVLIEGISRKNADELITRTELGRSVN

SEQ ID NO: 84226 - protein, 334 aa, Unknown
  Obtained from environmental sample
  misc_feature (1)..(334): Xaa is any amino acid
MTDRPRGPASTFFSPALNGAIPENFSAREVPKVNALLKLATTATILAGFSLAGVALELPAPAFLLPLLPEGPLAFGRVAAGFFAVLVSLLGVLAACRIGDGQGKEQPQRPKAVFPRFGPVDSFRHALECRRDDPLLFLALAGEAFFYGISSFVLLCLPNLGLRFGFSLTVTSLLSVALTAGICAGSVPAGRHEAGVWRRFMFPAGMGMALGITAAAFAPFFPSALRLPWLLTSFLLAGFCGGFYLIPLVSFIQIRPPAGEKGKILGISNFASFSAILLSGIVFAPLGFLRPTLLLAGAGLCVVVFLAWAGRRLRSLPETPWRNARRSSRTVPAP

SEQ ID NO: 84227 - protein, 351 aa, Unknown
  Obtained from environmental sample
  DOMAIN (243)...(331): PPIC-type PPIASE domain
  misc_feature (1)..(351): Xaa is any amino acid
VDREKSGNDEDSGFSDIVGKFKANPALYIGSVIILVLVVVTFVGGDFLSGGRRYVKGGGGDLTFGYYDKVPISWVPGNKFSQYYEQLVRRYRDRIDINNPQIAMSLWSQSFEATAVQTAILQEMKRSGYETPERIVDREVARLPQFQDEYGRFSPALYRQMSDTGRLALWRQVREELTVIQFYNDLFGLLIPAGEKEFIAQMGSGMRTFEMVSFSVDDFPDSEYLSYAQENSDLFRSIHLSRITVASNEREAKKILESIKNGTTTFEDAAKAHSRDSYSEKGGDMGVQYVYDLEMEITDKTVLENTLSLGKGELSSVIQLGSRWAFFRVEDELKPADFEDDVVMGRVRSYI

SEQ ID NO: 84228 - protein, 232 aa, Unknown
  Obtained from environmental sample
  DOMAIN (4)...(231): FAD dependent oxidoreductase
  misc_feature (1)..(232): Xaa is any amino acid
MDFDVAVIGCGVSGANIARRLSVYNIKTAILEKAADVSFGTSKANSGIIHGGFHHNKKYLKARLEIQGSLMFDQLRRELNFPFRRCGIIVAALHEEEMKAVEHLYMQGVENGVIGIELCSRYRILELEPKLSADVAGGLYAPGGGIIEPYRFVFALVESALKNGAELFTDFKVNEAVREGDFWRILSRRCREIKSRYAINAARSFADECQKFRPLRVTISARKANIFFESLT

SEQ ID NO: 84229 - protein, 314 aa, Unknown
  Obtained from environmental sample
  DOMAIN (1)...(211): Elongation factor Tu GTP binding domain
  misc_feature (1)..(314): Xaa is any amino acid
VEWNGKKINIFDTPGSSDFTGDVILAIRASEFVLLTVEGQTGVQIETIKLWRNLESRNKPRGVFITRLDGERADFNKALADVKEKCKIEPVPVTIPIGSGAGFKGVIDVINGKAWLAQGEAPEKEGPIPAEMQQAVDAAREKLFEAAAEGDDALMDQYLEKGSLTAEEMQKGLVLALAKNKYLPAFAGTALKNSGLIPFLNFMANIGPNPGTAKDVSVDKEGKEADVPIDSSNPLSAFVIKTSYDQFSGKLSWVKIIGGKLTADSEILNATEKQKERVGKFYTCQGKKLEEVRELFAGGRGNPHQVATLKTTTP

SEQ ID NO: 84230 - protein, 100 aa, Unknown
  Obtained from environmental sample
  misc_feature (1)..(100): Xaa is any amino acid
TGDHYIELVTGNGAVGEGRVLFTGTIKVGYDAELILLNLDSPHLFPLNEPCSAVAYSARGGDVDLTMVQGKILYENGEYKTLDIEKIRHEVDNYVIPRLK

SEQ ID NO: 84231 - protein, 343 aa, Unknown
  Obtained from environmental sample
  DOMAIN (29)...(94): His Kinase A (phosphoacceptor) domain
  misc_feature (1)..(343): Xaa is any amino acid
MGLAGIAGIGSLSFAINRKRLLAEHKEQMKSAFLANMSHDMRTPLTGIMGMAELLQDAADETKKRQACRYLHSAAAALLDMVTDITTHAALDAGKLQCARQAFPLRACLESCLDLFRPACAEKGLTLDLDMAAGLPPIVVGDAFRLRQALGNLVGNAVKFTQHGGIRVEVEGESDADGKECLLRLRIRDSGPGIAPEEQAHIFERFAQGRRGQMHYTPGTGLGLAITRELAGLMRGSLTLDSALGAGSCFTLSIRCALPAQAERCAPVRKRSQLGPPQTGSAAPGEHPKSLGALWVAEGQQGQRRIFSREVLQKGGPQVLYGLARVFKVLNLLREPPHKTSPF

SEQ ID NO: 84232 - protein, 90 aa, Unknown
  Obtained from environmental sample
  misc_feature (1)..(90): Xaa is any amino acid
GIDGRACYAKRRKTKKIGNLCNGPGKLTQAFGITKKHNNLSLIEGPLYVFDNKRKYEIATATRIGLSVGKELELRFFIKDNEFVSNRKGL

SEQ ID NO: 84233 - protein, 231 aa, Unknown
  Obtained from environmental sample
  DOMAIN (10)...(231): Formate--tetrahydrofolate ligase
  misc_feature (1)..(231): Xaa is any amino acid
MANLKKFSGTDIEIAQSVFPEHALHIKDVAKKAGISDEYIEYYGKYKAKVNYSFLQNNKDKKDGKLILVTAINPTPAGEGKTTTTVGVADSLSSIGKKAMLALREPSLGPIFGVKGGAAGGGWAQVIPMEDINLHFTGDFHAIAAVNNLLAAMIDNHIFQGNELNIDPRKVVWRRCIDMNDRQLRFITDGLGGRINGFPREDGFDITAASEVMAILCLPRALGRSDHCPTP

SEQ ID NO: 84234 - protein, 273 aa, Unknown
  Obtained from environmental sample
  misc_feature (1)..(273): Xaa is any amino acid
VAASGSNPTSPTSAAYGTNVTMPQNTFTRTGYSFAGWAVSGDGATTGTHAAGANVAVSALSTAINTGNAGIILTATWTANIYTVTFNKNNSDAGSTNASPATKTVTAPATTIDALPTPPTRTGYTFNGWKTESGTVFVQTTPVSGDINVYAQWTANTLTITYAPGGGSGSNPTSPTSAAYGTNVTMPQNTFTRTGYSFAGWAVSGDGATTGTHAAGASVAVTALSTTINTGNASIILPATWTANTYTVTYNEEYFRSQAARRLALYQAMPRGL

SEQ ID NO: 84235 - protein, 303 aa, Unknown
  Obtained from environmental sample
  misc_feature (1)..(303): Xaa is any amino acid
MVFGASDRLTKAIRDVSTILKKWIPKGIKVVFLNVKSDWPDLSEYILYGLSENGVNDRVFSVVDRQQIDVIRQELNFQWSGEVSDKSAQQIGEMLGAQTIVSGTVTKIGSVYRIQTRAIEVQSAAVQGQFSLNVDNKGLIVSLTKKVVPAASSPVMAVATSGASQQTPAAATAAQSAAPAAPPATAEPELPAYKIGDTGPAGGLIFYDKGNNNGGWRYLEAAPVEGEFQTCWSVRRTLVDGTQELIGSGKRNTQLIVEKFKQTPGEWDTAAQKADDLVFNGFDDWFLPSKAELDQMYGTSRPI

SEQ ID NO: 84236 - protein, 306 aa, Unknown
  Obtained from environmental sample
  DOMAIN (104)...(306): Carbohydrate kinase
  misc_feature (1)..(306): Xaa is any amino acid
DLIPRQKPFVVSVGLPSGNSDDWKSGMPIVKADLTLAVEPQSRCIYAPAARPYAGIIESVNGIFPKEVIDRYRDCGAEFLDWESARARIPSVKKHAHKYERGTVEIHAGATGTTGAALIAARGAQAVGAGLVRLVVDDDIYPILASGAGGIMVTPVSAYDIGFEGRFAPDAMLLGPGWGRAESRVRIFKKAVEMEKTGTPLILDADAIELSKNSKFNGNAILTPHTGELSRFSGIDKDDLLCRPVPALLKLSREYNAVIVYKCHVIHIAAPDGRLWIVDGMAANMASGGSGDLLAGICAAIAARMA

SEQ ID NO: 84237 - protein, 85 aa, Unknown
  Obtained from environmental sample
  misc_feature (1)..(85): Xaa is any amino acid
VPLIKNNTGAEVVGLVVSVDRMDAGQGSANALDELSEEFGLEAFPIVNLNEIMGYLHNKKIDGTVVLDDSIAARISEYRREYGCR

SEQ ID NO: 84238 - protein, 203 aa, Unknown
  Obtained from environmental sample
  misc_feature (1)..(203): Xaa is any amino acid
MVSGSTNKKAAADKHTAVKEKSGVLARRITILCLYLVITISVTFTVVNLVNLNNVTNRNLKSIAELTMRYINQSVDYAILPAIDLTNSVAAFAPDFQPIDDLSQILVDLLPTVESVFEIYYGTAVPRAEGGRFVTATGWDPYARSPDWDQTKRPWFITAMVNPGKTMITEPYEDSSTGEICVSIVRTAEKNGKIVGVVGNDVF

SEQ ID NO: 84239 - protein, 83 aa, Unknown
  Obtained from environmental sample
  misc_feature (1)..(83): Xaa is any amino acid
VKDEYARLINRDWKFLLGNPKGAEQEDYCDRTWKRVDLPHDWVIHQPFDKGEGTGWTSEVMQGFFVWKNSGWYRERIILADHS

SEQ ID NO: 84240 - protein, 321 aa, Unknown
  Obtained from environmental sample
  misc_feature (1)..(321): Xaa is any amino acid
GFDGRGTYYRFYVTSDTDYTFTSDMTIQARYELGDTSWFNTDWWWTTTTQTAGQTGWAYIKLGSSGSLMVKHPESGISGFSLNGYAGSISEEEKTVTVNVPCRTNLTALTPSVTPASGWASATSGAMNFTGPVEYSFTKGDVTQVYTVTVAAVIIDIAAIRNLTMPVLGGTPVTTITDNAQYSGTVTWSPDHSTFAAVTVYTATITLSPKTGCTLEGVAADFFTVSGATTTNAANSGLITAVFPQTDAQTPLGRFEYYWVDQHDSLVTTSGGKVTVNSGETLTITAQSTGYTVNQWLLNGVNTGQGENTYNFKSTVFGNHT

SEQ ID NO: 84241 - protein, 73 aa, Unknown
  Obtained from environmental sample
  misc_feature (1)..(73): Xaa is any amino acid
MKTEILSNMKGGWFIGNFEPSMLKTNDCEVAVKSYKKSDYEESHYHKIATEYTVIIAGRVKNDGVEYRASDIV

SEQ ID NO: 84242 - protein, 267 aa, Unknown
  Obtained from environmental sample
  misc_feature (1)..(267): Xaa is any amino acid
MEFDEARHYELGDDIRSIDWNASARFGVPFVKMFREERELTILILLDISPSMHRTHIAQQGLSPYEQALLCTALIAFSAEHTDQRVGAFLFDRDVEKVFPPRKGRKAIMSIVMSALQYQNNIMQRRSQYGSDIASALTGAQRLLKKRSLVVLISDFFSINWEREMGSLCRKHDVIAIKISDPQELPFHGLITLEDPETGVRIEAPTGLDSFKGSWANWLEENRLIGKRSAKKRSGILKIINGNGRPLGSDKIFRQPHLGAIPKTGKR

SEQ ID NO: 84243 - protein, 270 aa, Unknown
  Obtained from environmental sample
  DOMAIN (114)...(187): S1 RNA binding domain
  misc_feature (1)..(270): Xaa is any amino acid
LKEIKGFGQKAFGQAAGFLRIHGAENPLDNSAVHPENYGLVEKIAEKAGKPLNELIGNSEALHSIVANDFTDAENGVGKNTIADILAELEKPGRDPRKEFHYAKFNPKIKTMQDLITGSWLEGVVSNVTNFGAFVDIGVHQDGLVHISEMSDNFVKDAKTILTTGDVVKVRVVSVDAANKRISLFMKQESERRVGGGGFKGGGRDAKGGYQGKGSFQPKPLPQAATLADLKARFSGKAQKQAAQNIPKKPTAPAIECDRPGWAARHQAVL

SEQ ID NO: 84244 - protein, 91 aa, Unknown
  Obtained from environmental sample
  DOMAIN (18)...(87): Glu-tRNAGln amidotransferase C subunit
  misc_feature (1)..(91): Xaa is any amino acid
MIQSIDINKLAMLSRLTLSEGEAEQAKERLQEMLKLMESLRELDLKNVERMVAEAASSLREDTEFPGLSYEEAFANAPQEENHHFTIPKVI

SEQ ID NO: 84245 - protein, 259 aa, Unknown
  Obtained from environmental sample
  misc_feature (1)..(259): Xaa is any amino acid
MDPEINSKQGGRTGNTGEHLRSWDRRPVKKNDIKPWLQKEWCIATPSAEYVQRMEDVLEVYKRPYDEKQPVVCIDETNRQLIGEMHSPRPVKAGQTALYDYEYVRNGVVNLFMLFEPLVGMREVIVTERRTMKDFAHCLRYLAEERYPDAEKIIVVMDNLNTHSLASLYAAFEPEVALRLAQRFEIHYTPKHGSWLNMAELEIGVMSRQCLKRRIATIEKMASEVQTWVTERNNHKTTVHWQFTTADARIKLRHLYPCL

SEQ ID NO: 84246 - protein, 237 aa, Unknown
  Obtained from environmental sample
  DOMAIN (96)...(235): Glycosyl hydrolase family 3 N terminal domain
  misc_feature (1)..(237): Xaa is any amino acid
VKIKLLGFLFLLSFPLFSLSFNDPGDINELALRLTNEMSDEQALAQTFMLGWVGAEPSPLILDWIRNRNIGGVKIFGWNTEDTRKLAETVGNLQKNALASGLGIPLFVATDQEGGLVRHVKGDTSETPGNMAIGASGRPMDAYWSGYYIGRELSLLGINMNFAPSVDLYTNRDSTLIGPRSFGSDPVQAGILGAAFAKGHKETGVIATAKHYPGHGDTDRIPTGTAKNLRFVISPIN

SEQ ID NO: 84247 - protein, 295 aa, Unknown
  Obtained from environmental sample
  DOMAIN (167)...(295): AIR synthase related protein, C-terminal domain
  misc_feature (1)..(295): Xaa is any amino acid
MDMATIGAKALKKLGFLNNLDESEEINACSVKIKVDVDGAEQDWLLMFKNETHNHPTEIEPFGGAATCLGGAIRDPLSGRSFVYQSMRVTGAANPLQDSACTMKGKLPQRKICRTAAAGFSSYGNQIGLATGHVCEIYHPGYTAKRMEIGAVIGAAPAVNVIRNTPQPGDVVILLGGRTGRDGIGGAAGSSKSHTSSSLETCGADVQKGNAPEERKLQRLFRSHEATEMIKRCNDFGAGGVCVSVGELADGLEIDLSKVPKKYEGLDGTELCISESPGKNVCSNHKRNAEQFIAL

SEQ ID NO: 84248 - protein, 269 aa, Unknown
  Obtained from environmental sample
  DOMAIN (3)...(269): Amidohydrolase family
  misc_feature (1)..(269): Xaa is any amino acid
DSGFLEITPAEDALKPEDAYWCNLLSCLEMIKTGTTCFVDMHMFEHQSVRAVTESGMRAVISRGLIGKTVNDPAARTRLNEAFEEMKAARFPEAAGNSRITFMLGPHAIYTCGEGLLRELPAMALEKKIGLNTHISESRFEFDTSMQQHGCSPIAYLESLGFFSVPVLAAHCVHLAEGDIEILASRKVSVATNPISNMKLGNGFAPVTRLRAAGVNLCVGTDSASSNNALNMFRELSMLSYIHKGLTKNVLELPAHETLRCGILGGAKA

SEQ ID NO: 84249 - protein, 261 aa, Unknown
  Obtained from environmental sample
  DOMAIN (4)...(261): CorA-like Mg2+ transporter protein
  misc_feature (1)..(261): Xaa is any amino acid
KIIRENARAHKRQFFKFNSQKTKEQPEDVEEFVVEHISIIIMKNVLITIQEIPGDSFGDIRKRILGNIGRIRKMGTDYLAYSLIDTVVDEYFITLQHFEDDIEDLEDRATKTDNDTFISEIQDTKKYIFQIKRAMLPLRENLMIISRQDMLSVNEELRPFLQDLRENLSNAIVSVETYREWLTNIMDVNLSVLSYQLNKVMKILAVISAIFIPLTFIAGIYGMNFEFMPEIRHPLGYPIVLGCMVSIALAMLILFKTRKWF

SEQ ID NO: 84250 - protein, 92 aa, Unknown
  Obtained from environmental sample
  DOMAIN (1)...(92): Thiamine pyrophosphate enzyme, central domain
  misc_feature (1)..(92): Xaa is any amino acid
MIREAKRPLLYAGGGVISSGAEEELIALAEKLNAPVALSLMGIGAIPKDQLFMHPPCGNARHSGEQQSVAESDPVNRDGSQHVPQLLPPLST

SEQ ID NO: 84251 - protein, 418 aa, Unknown
  Obtained from environmental sample
  misc_feature (1)..(418): Xaa is any amino acid
MAAADILKGHSTGSGNFSLSVYPESQPTCLELVKNGAVETFMKAGALVREAFCGPCFGAGDTPANNELSIRHVTRNFPNREGSKPNDGQIASVALMDARSIAATAACGGKITSATDIDVKYGKYKFFFDKNIYDKRVYNGVGSPNPQTELTFGPNIKDWPKMPALPENLLIKVVSFITDPVTTTDELIPSGETSSYRSNPLKLAEFTLSRKDPSYVKRAKEVQNIEEQRGKGTAGGELEKVLNSIQKIAGCSGIGLANIGIGSAIFARKPGDGSAREQAASCQRVLGASANLALEYATKRYRSNLINWGILPFLVTDETTFSTGDYIFFPAIKSAIQEKKESIKGYVLGEKTGEISAALGELTDAERQILIDGCLINYYRAEIIGLFYIFLGGSFLTNINEKYRKVGSFCPTFFCCKK

SEQ ID NO: 84252 - protein, 505 aa, Unknown
  Obtained from environmental sample
  DOMAIN (143)...(503): Glycosyl hydrolase family 65 central catalytic domain
  misc_feature (1)..(505): Xaa is any amino acid
LGNFRFTTQHCSLGWRVLRLSCETLEQKIPLAVFSALVPASGTTVSWQREIVEGEEGIFSVYTIDTDGIKEIEFFVYGAIFTGLDTSQDRTDSPAQAAENQVNAALKEGWDGLLKRHKDHWDKIWRTVDVVIEGDEYAQRCLRYSLYHLWIIAPRHCEMTGRALSIPARGLSGQTYKGAVFWDTEMFIAPYFLVVRPELAAQFIRYRIHTLPGAKRKAAEYGYRGAFFAWESQETGDDACSDFNVTDVFTGRPVRTYFRDKQIDISADIVYSIQKYIDCTGDFSILTEGAMELILEVARFFLSYLYYSPEHKRYEALDVIGPDEYHERVHNNAFTNRMVFSVFETAQNFIEDLQKSNPEFIASLIKRVDFNDDQLFMETVMRQFYLPRPDGRGVIEQFDGYFRLEDCTLDAVRSRLKDPKEYWGGGGGVATATQIIKQADVVTMLALFGYDYPTEVKKANLDYYEPRTEHGSSLSSCMYALLSCETGNSDWAYPFHKLGQSVMQG

SEQ ID NO: 84253 - protein, 86 aa, Unknown
  Obtained from environmental sample
  misc_feature (1)..(86): Xaa is any amino acid
MSQTKLDILVDILKDAPDEVFIQPHNVPDPDAIASSLGLYYLLSQRGIKKLAIVYDQEIEKANSLKMLEMFNVPIMRLGHHPPLKN

SEQ ID NO: 84254 - protein, 88 aa, Unknown
  Obtained from environmental sample
  misc_feature (1)..(88): Xaa is any amino acid
MGAIISAVCSEGMLNIALLLYFRYIGDMQILTLENESLRQKANPIKKIGPEYVQIAKELVETLHAGEGIGLAGPQVGIQERIFATHVE

SEQ ID NO: 84255 - protein, 318 aa, Unknown
  Obtained from environmental sample
  DOMAIN (25)...(146): Oxidoreductase family, NAD-binding Rossmann fold
  misc_feature (1)..(318): Xaa is any amino acid
FSASGRAAEELENATVPVLPRKKDYAIGCIGSGFIMNDCHLVAYRNAGFNPTAITSRTAEKREAAAKRHSIPKVYDSWQKLIDDTEIEILDIAVPPDVQMEALRYAAGKKHIMGILVQKPAAMSLAEVREIAAIGKAMDIPIAVNSNMRYDQSMRALKHALDRGYLGKPVIATIEMRAIPHWQEFLRKYPVLEIYSMGIHHVDIFRYLFGDPEKITALCRPDPRTRFAHNDGIVQFTYKYPDGFMATSLDDVWAWPNEPCEKDIYIKWRVEGLEGMATGTIGWAGIPLAPSPAPLKLTTKQAPGLDRTVPGTQSGFPD

SEQ ID NO: 84256 - protein, 87 aa, Unknown
  Obtained from environmental sample
  DOMAIN (5)...(69): Preprotein translocase SecG subunit
  misc_feature (1)..(87): Xaa is any amino acid
MAILSTVLLVFFVIIAILLVLLVLVQNEEGDSLGGIFAGGSGSAFGSRSGNVLIPGYDGFRVFIQASQSDSVTPEGMLTSAALPRDH

SEQ ID NO: 84257 - protein, 213 aa, Unknown
  Obtained from environmental sample
  misc_feature (1)..(213): Xaa is any amino acid
VQEIHIEENFYRKKIDNYQPSLFAKIFKIDKKNLRKWEEALELGRSVDAKNTLSAKEQAEKDYESAINNYNKHCEELNKKYEDEYKEYTGLINLAKKINEGDLSSYAYIIQDLDPFSEISEFGSEVEFTICTKTKAKASIKVHDDTVIPKQSKSLLKSGKLNIKDIPIGKFNEIYQDYICSASIRIARDLFAILPLSEIIVTARGNCLNKSTG

SEQ ID NO: 84258 - protein, 294 aa, Unknown
  Obtained from environmental sample
  misc_feature (1)..(294): Xaa is any amino acid
MRTVNLLTVIATIGTFCLSNAAELEKTSASGTFTDTRDGKRYKTAAVGGKTWMAENLNYQPKTGNSWCYDGDKSFCDKYGRLYDWKTATKACPAGWHLPSRNEWDILGRAAGGEKRPGEEYVAVDWYGAGKALKAKSGWIDPVDKSGNGTDDYGWAALPGGYYRYYDSSFTAAEVDGYWWTATESWNDRAHSRNMYYGNGYLSENGFHKSVGLSVRCLQDERKYTVTVLSAGADAKGGGGYVPDETITVTAGTAPGKQFRNWTTANDGVTFADAFKSTTTFIMPANNVSANLYM

SEQ ID NO: 84259 - protein, 68 aa, Unknown
  Obtained from environmental sample
  DOMAIN (27)...(65): Domain of unknown function (DUF1078)
  misc_feature (1)..(68): Xaa is any amino acid
LGEQSQIALETQNLIMKQLHEMRQSVSGVDMDEELSNMIKYQHGYNAAARFITVVNSMLDTIINRMGV

SEQ ID NO: 84260 - protein, 373 aa, Unknown
  Obtained from environmental sample
  misc_feature (1)..(373): Xaa is any amino acid
NGRYNCVSSAVFYIILCKSAGLNASGVMTKDHAFAMVHINGQNFDVETTNQYGFDPGNRKEFHDSSGKITGFAYVPPQNYRDRQTISQIELVSLILNNRVGDFERTNNFSASVPLAVDRAALLLGNSYTKTAEAATSDFLFTDPRKDLMDRLLNYGASLLRSNKEEDGIRWAVFASSIYPDVNRWQEFLLTAVNNRISRYVREKKIQDARNFLESQKTHIPETDYAQFDMLIVDAEFFNRVNNFKTPDEGKEIVSNIEFARTSGKLPEKRASELLTYTIQKTAASLCAPPGKDWRAAIRYLENALSKYGQNRELEQSLRTYKANLVADYHNRFAAEWNKKNYAEAERILNEGLAEFPTDKQLLSDKQTIAKQK

SEQ ID NO: 84261 - protein, 113 aa, Unknown
  Obtained from environmental sample
  misc_feature (1)..(113): Xaa is any amino acid
TRGRYCNRGARSPDGCLPPGPAVGVGIKDDLKYREEKLTLQPGEMLLLYTDGVIEAKNEKGEFLQQKRFAELIERPYSSLDDVVDRVKDALKEHCAGADPYDDVTMVGIYRKG

SEQ ID NO: 84262 - protein, 101 aa, Unknown
  Obtained from environmental sample
  DOMAIN (5)...(35): Flagella basal body rod protein
  misc_feature (1)..(101): Xaa is any amino acid
MMRSLFSGVSGLQNHQTRMDVIGNNIANINTTGFKRNRVNFQDIIYQQLQGAARPTEDLGGVNPKEVGLGMSIAAIDTIHIQGSCRQQAFRLTCLGRSDPW

SEQ ID NO: 84263 - protein, 205 aa, Unknown
  Obtained from environmental sample
  misc_feature (1)..(205): Xaa is any amino acid
MKPVAELTAEEALGVRYFLMDIDDTLTRQGKLLSSSYSALWKLKEAGLKVIPVTGRPAGWCDLIAREWPVDGVVGENGALAFWEEPGSVLKAEYHPNAVKNNHSVLERIKEKAFAEFPEIRLARDQFGRLFDIALDFAEEEPVLPISAARRVKKIAEEERAICKISSIHVNILDGRITQAFPWSNTFLPDDSAGNPAQEIGKCCS

SEQ ID NO: 84264 - protein, 108 aa, Unknown
  Obtained from environmental sample
  misc_feature (1)..(108): Xaa is any amino acid
MPKMDGMETTKILRESGYTHPIVALTANALIGQAKIFMENGFDDFISKPIDIRQLNTVLNKFILNKQTPEVIAQAKETDSVKSEPEVPAENPVLLSFFAKMQKTHYLF

SEQ ID NO: 84265 - protein, 304 aa, Unknown
  Obtained from environmental sample
  DOMAIN (1)...(231): ABC transporter transmembrane region
  misc_feature (1)..(304): Xaa is any amino acid
VFWGEGAYGFIPLGRFLWRYFIHGSSRRIETAIRNRLFEHLQTLSWDFYQRNKIGDLMARSTNDLDAVRTAIGMGLVALVDFVVMTTAILIIIFVQDARSALFSVIPLPLVTILILLFGKSVGKKFTAYQEAYSKMSDTAQETFAGLRVIKSFVKEWWFIKKFAADNDEYRTASMDLIRLFGVFFPLVSFLSQFTVLLMLVTGGIRVINGLMSPGSLVAMFRYLNMLIWPLMGAGFTVNMIQRGAVSLGRVNEILNTVPSIRDKEFFTTEDTELHRVLIRKSSFPPCNSVSSVVIFLASNKTPR

SEQ ID NO: 84266 - protein, 139 aa, Unknown
  Obtained from environmental sample
  misc_feature (1)..(139): Xaa is any amino acid
LLLRAKAEFFSGDVEKAEKTCRRLLKKQPSFYEGKLYLARILREKGDSDTAVKMTESLLADYPQDVRALRFAAELAGESKKYDEAVVFLDKAAELSAESALVFLDRARLRWVAGKGQEALEDLSRAKAMLPGIPRCTSR

SEQ ID NO: 84267 - protein, 131 aa, Unknown
  Obtained from environmental sample
  misc_feature (1)..(131): Xaa is any amino acid
DDGRAELSTWELWNVVRTWAVANSYNMSAGQKGSSGNGSDQQPVTMVSWYDSIVWCNALTEYWNAKTGATLATVYNSGGSPIRDANNTSALNGVTPSVTARGFRLPTSNEWELATRWRNDDTNTADGYSDP

SEQ ID NO: 84268 - protein, 107 aa, Unknown
  Obtained from environmental sample
  DOMAIN (17)...(106): Uncharacterized BCR, COG1699
  misc_feature (1)..(107): Xaa is any amino acid
VKVLTKAYGTIEVNERQKITFPSGLFGFESLKDYVLLDAAQQPFYWLQSMDEENTAFILIDPFIFRPDYEMDISNEELLPIGITESEKAVIFQSLPSPRNSPRPGDN

SEQ ID NO: 84269 - protein, 403 aa, Unknown
  Obtained from environmental sample
  misc_feature (1)..(403): Xaa is any amino acid
MATPETVQVKTLSPEQLLLTAMEHIFERVSVAQDYEILTEALQRGRGETSHDDLKETLLALEAHGSILRSGSEIATKQSLDREREMIQLVNNGIGAAKAIDAKRLFIPDKGLNTEHKHAVEFALQSRDQATAIIGAAGAGKTTMLKELGRGIRESGHDMLAVAPTRSAVEELQKVGFTDAVTIQRLLQDPSAQKRNCVLIVDEAAMVSSSQMSELLKLSERQSCRVIFCGDTRQIQSVEAGDALRILQKESRLKSVSLTTEQRQTAKDYRQAIHQLREDPAKGLDKLERMGAVLEVEGKDRAEAVAKAFSDFTDRNLDTIIVCATHDEIGRVTDSIRRGQRAKGKLGADHNLERDVSLGWTEAHKSDISRLQPGHVLSFHKAVMGVKRMSRSKWSARPNLSLA

SEQ ID NO: 84270 - protein, 224 aa, Unknown
  Obtained from environmental sample
  DOMAIN (10)...(224): Ribosomal protein L11 methyltransferase (PrmA)
  misc_feature (1)..(224): Xaa is any amino acid
MNLCYYAIGSCKAECYELESFNLFEAGITTLEEIEAEKDSDVAFKFYANSKEEMSRIVAGFPHLNFECGEEEAKDWDLWWRERQTPVKVSESLWVRPPWINFSAPNSSDIVLALEAKTAFGTGEHSSTALAVQLMEGIDFKGKSLLDIGTGTGILSLFALKKGTKFAVQTEIDHFTISCLVENFEQNGEGEPNAFLGFLDSFNENAKFNIIVCNMLAPKVARHQ

SEQ ID NO: 84271 - protein, 141 aa, Unknown
  Obtained from environmental sample
  misc_feature (1)..(141): Xaa is any amino acid
MAYMGSRITSNAITDITVTEGLNAAQSLSEYIGLVISTARLDLSAVVLHPSLRPVVLGQAPSGELEEYMAALIKRYPIYNNMLVLNSSGIVMAGTSGSTGSNNSDREYFRASMRGENYISEVEVSRSTGSLVSLYPFSAIM

SEQ ID NO: 84272 - protein, 218 aa, Unknown
  Obtained from environmental sample
  misc_feature (1)..(218): Xaa is any amino acid
GSPKDQIGRDIHAGRGSAAKRIAAAADLGQKVSGILKRLGMPNARFAPSVTAKTREDGTQALVCGPWGAEDVEFLISANSGEPLKDLSRVASGGELSRVMLAIKSVLSSGDSIETLVFDEIDTGIGGEVALAVGEYLEKIGKYRQIFCVTHLASIAVRADNHFKVEKRTEGGRTFTGVGPLNAQGRRKEIARMLAGDSGEAALAHADDLILKYGKRGG

SEQ ID NO: 84273 - protein, 124 aa, Unknown
  Obtained from environmental sample
  misc_feature (1)..(124): Xaa is any amino acid
MASTQKSIAQTSTYRSAVEAILKDEQETLIAIRNNDPDSAFKRLNLVESMLNLASNYIVIDGVVQSVLKVKNEESLNEARKALYKSIIYLEENVSNYIDAPYSEYEDQLSQISRLLPLSVTAGA

SEQ ID NO: 84274 - protein, 361 aa, Unknown
  Obtained from environmental sample
  DOMAIN (181)...(289): Miro-like protein
  misc_feature (1)..(361): Xaa is any amino acid
LNDGETRPRPEASPGFTPRQQGGKPGFGGGFNRTPAGGRGGPNAAPSIPLPEGKTPGKRKFLAKKPAYNRKEKELEMEEKLLQTKKKITHIANPVPKSIEIMEVISVSELARKMNLKASDLIQKLMSMGQMVTINQQIDADTATILAAEFGADVKIVSLYDETVIETESDDNAIMLPRPPVVTVMGHVDHGKTKLLDAIRKSDVVSGEFGGITQHIGAYMVETPHGAITFLDTPGHEAFTRMRARGAQITDIVVLVVAADDGVMPQTVEAINHAKEADVPIIVAVNKIDKPEANPDRVKSQLSDLGLMPEDWGGQTMFVELSALQKTGIDKLIDTILLQSEILDLKANFQRSAEGKILNRR

SEQ ID NO: 84275 - protein, 323 aa, Unknown
  Obtained from environmental sample
  DOMAIN (1)...(316): Glycosyl hydrolase family 53
  misc_feature (1)..(323): Xaa is any amino acid
SPNDQIGRDRERAKKWGMKVLLDFHYSDFWAHPGQQAVPKSWKDFANVDELAGLIKAYTKNVLSDMYAAGAMPDMVQVGNETVSGFCGFADNDNVKANEKKLLSAGLSAVREVSAQYGYPVKTVLHVTNGMDTIKYWFGVMKFMDFDIIGISFYPQWHGTLSDFKNGLQDLANTFKKPICVMEYSISYTSQAGSPNGSNMYGNSNDKVKTFLNAGETDRTIQGQASVIRNLNNAIMNSTVSTGTRYGIGAFWWEPAWLPLNGTAWAFTASGEWYKMGLPGSDSGAVNNPGNNPRVTWANQAFFSFSGTVVPSLNAFLQMMGKQ

SEQ ID NO: 84276 - protein, 316 aa, Unknown
  Obtained from environmental sample
  DOMAIN (1)...(315): Glycosyl hydrolase family 53
  misc_feature (1)..(316): Xaa is any amino acid
VESFGGKFYDNDRYRVEDVIELFSYYGINWIRVRLWNDPFTADGLTYGGGGNDIQTAMAIGKRAKKWGMKFLLDFHYSDYWAHPGQQARPKAWVGYNTADELAPVLKNWTKDVLHIMYSEGGFLPDMVQIGNETVNGFCGFTDQGSLSATKPNEKKLLAAGLQAVREISEQYNFPILTMIHAANSMETIDKYIGIILQEPALDFDVIGFSYYPYSYGNRDDFENGLQNLADKYKKPLCMVEYQVNFTGVSPLDSSYWGGSDENTASFIDSGTDRTISGQAQVIRNMNNAIMNNTVSGGVRYGIGSFGGSGMLSAII

SEQ ID NO: 84277 - protein, 104 aa, Unknown
  Obtained from environmental sample
  misc_feature (1)..(104): Xaa is any amino acid
MQYRDYGKTGKKVSMLGFGAMRFSEVDNHDKCVEMIVHAARGGINYFDTAPGYFETRSETVCGKGFAELRRQGLPYYVSTKTFQSNESEIRREIEAFVEKAERA

SEQ ID NO: 84278 - protein, 207 aa, Unknown
  Obtained from environmental sample
  DOMAIN (4)...(193): Peptidyl-tRNA hydrolase
  misc_feature (1)..(207): Xaa is any amino acid
MIKLAAFLGNPGAEYSGNRHNAGRMLARSLPFYQSLSWQKKYKGLYSSHGDKHFIMPETYMNLSGESVQAVAAFYKIDVKEIIVIHDELELPLGVISLKFSGGLGGHNGLRSMKKSFNSADFWRIRIGIGRPDSRLPGEGGRAGSGEGVYDWVLSDFTKNEQETLMPALDAGANLLMQTFEGEPETLLKEWAKKKIIIQEREGEEQK

SEQ ID NO: 84279 - protein, 173 aa, Unknown
  Obtained from environmental sample
  misc_feature (1)..(173): Xaa is any amino acid
TLGQKNPYVRFTGRAEHRFMVRQDTADTRLTPKGRDVGLVDDIRWERFLEKIKMLDEVNELLAKRRQTNYSLDENDTELSRYPVELVESALLDKKYAGYIEKEIRFAAKAAKMDAIKLNPNLDYTSIMGLSTEAKEKLSSVKPLNVGQAARIPGVRQGDIAVLIILANKSSPK

SEQ ID NO: 84280 - protein, 190 aa, Unknown
  Obtained from environmental sample
  misc_feature (1)..(190): Xaa is any amino acid
VIAVTDILREHTVPPYYNWKNRVNYFCKGYNSAREEGKKLGLDVFFSLEYSDMGNDFLLYGIEPEFLLENPDMGGIGMTKLLRRVRDAGAFIIHAHPFLQAAYIDSIRLVPSLIDAVEVVHGGGGSGKEFTRRNMFYAEEYGLLKTGGTDTHHFDIEGKMTGIAVERRAENIADLAAQIKAGKSRVLEPV

SEQ ID NO: 84281 - protein, 102 aa, Unknown
  Obtained from environmental sample
  misc_feature (1)..(102): Xaa is any amino acid
MDKAELLIRLADIEREYYNVLIQRLRNYADNPFRMGDNGFAYEDDTQLAALREGLVNMLMHADYFGVMHSTIRVFSNRNVFQNPGRFDINIKEWHKTAVSNR

SEQ ID NO: 84282 - protein, 410 aa, Unknown
  Obtained from environmental sample
  DOMAIN (153)...(375): Methyl-accepting chemotaxis protein (MCP) signaling domain
  misc_feature (1)..(410): Xaa is any amino acid
FAIILGAIAIVVAVVIVYFTLNSTTKPIVKVAETLKDISEGEGDLTRSIVVRSKDEVGDLANCFNKTLEKIKGLIIIIKNEGQSLSSIGNDLASNMTETAAAINEITANIQSIKGRVINQSASVTETNATMEQVVANINKLNGHVETPSGSISQASSAIEEMVASISSVTSTLVNNAANVNTLKEASEVGRGGLQDVATDIQEIARESEGLLEINAVMENIASQTNLLSMNAAIEAAHAGELGKGFAVVADEIRKLAESSGEQSKTISTVLKKIKSSIDKIMQSTDNVLNKFEAIDTGVKTVSQQEENIRNAMEEQGEGSKQVLKSANSLNELTQQVKNGSEEMLSGSKEVITESRNLERVTQEITGSMNEMASGAEQVNVAVNHVNDISNKNHKAIENLMEEVSRFKVD

SEQ ID NO: 84283 - protein, 342 aa, Unknown
  Obtained from environmental sample
  DOMAIN (58)...(301): Methyl-accepting chemotaxis protein (MCP) signaling domain
  misc_feature (1)..(342): Xaa is any amino acid
SVEVTTTREQMAANIITWVSDAKQASVNASEVAGITEQMAANINAMASGAKQASTNASEVAGAAEQMSANMNTIASAIEEMSTSIKLISNNTVEVNKIAADAKDKATDATSVMNKLGIAAKEIGQVTDVIKKIADKTNLLALNATIEAASAGKAGKGFAVVAGEIKELANQSAESADNIARRIKSIQSETNTAVGVIQNVSDIIVKINHSVETIAGHIDQQTNASNEIANNVSQANASAKRVASAIGEVARGTNEIANNVAKANSRAKQVTDAITEVAKTATNVSGNASEAAKGADNVSNNTLSMNQAAKESAQGAGHVNQSSSDLAKIAEELKQTVAQFKV

SEQ ID NO: 84284 - protein, 188 aa, Unknown
  Obtained from environmental sample
  DOMAIN (25)...(152): Phosphoribosyl transferase domain
  misc_feature (1)..(188): Xaa is any amino acid
VFGGGFIGRGHFLLSSGRHSDKYFQCAKLLQYPDRAAEALAGAAEKIRKDMQAGKLEIHAVVGPAMGGIIVAYELGRQLGLPAFFTERDDTGKMALRRGFEIKPGQKILITEDVVTTGKSSGECAAVLEEHGAKIAALACLVDRRGAGIDIPWPLYPCCKVDAGNWEATACELCKKGIPAVKPGSRKT

SEQ ID NO: 84285 - protein, 177 aa, Unknown
  Obtained from environmental sample
  DOMAIN (1)...(177): Thymidylate synthase
  misc_feature (1)..(177): Xaa is any amino acid
GWQGANFGARYIAHDAPAQGQGIDQLRKLVQTLKTDADNRRMIVSAWTPIDLPRMALPPCHYAFQVTVIDGKVNLLWNQRSVDVALGLPFNIASYGCLLHLLAKEAGLGEGKLIGFLGDTHIYVNHVEGIRVQTERAPKALPRIKTENFTSIFDWHYGDTVIEGYDPHPAIKFEIAV

SEQ ID NO: 84286 - protein, 174 aa, Unknown
  Obtained from environmental sample
  DOMAIN (39)...(166): NUDIX domain
  misc_feature (1)..(174): Xaa is any amino acid
GRRTQTVLICNVSPFGKSLQAPAQKKIKLIFFDNNTKDWAIVVPVIENEHGKQFVMVRQWRHGSKSLSLEFPGGVFEEGEDPKDAAMRELREETGYIPKKIEKIGEFSPNPAIMSNRVHFFLAEELTNCGKLSLDEDEYVEVVLVNADEVIQGMGKEPYVHALMGSALALYNKK

SEQ ID NO: 84287 - protein, 67 aa, Unknown
  Obtained from environmental sample
  misc_feature (1)..(67): Xaa is any amino acid
VGQGQIRPREDLQYGINIKKQRKIIKTAKYFLSENRKYSNMAIRFDVVFIDKNSVTHLASAFTERVL

SEQ ID NO: 84288 - protein, 323 aa, Unknown
  Obtained from environmental sample
  misc_feature (1)..(323): Xaa is any amino acid
KDQIGRERREYFDGDRFQGGLDILKRTPVDGGDTAVFEFNIPDTADTYPPTAHYANGQVRGIESATDKVSFKSGLVGGPVTVLYTYPAGAKPYWDTAFVALPKDTTIAPRDAGVYTVKVRIPDSENFTGGTYTLGDYRIKAPAVAKFATDGDLTDTEVREGNSVTLTVNASSPNGSAGSLSYKWYRYTSPTDSVLIAGATGPSYTVSTGVEGDVLEYAVKITNNPGAAIQTAADVMSAHSLVTVKKAATSMSKAIIVINPEKTWIYKGDSIKPAGTDVTVWLPVTLADGTLDTVEIANQYYSLSYLNNLNVGTAPVRASGVDV

SEQ ID NO: 84289 - protein, 54 aa, Unknown
  Obtained from environmental sample
  misc_feature (1)..(54): Xaa is any amino acid
MNLKKYEYWFIVGSQDLYGDETLKQVADHARIMTDEFNRDNMLSGMVVLKPYGQ

SEQ ID NO: 84290 - protein, 218 aa, Unknown
  Obtained from environmental sample
  DOMAIN (13)...(170): Thiamine pyrophosphate enzyme, C-terminal TPP binding domain
  misc_feature (1)..(218): Xaa is any amino acid
NKDQIGRDFVIGTPGCAYFALSQSNLNYSCTAFGNQNSVASGLKRMLTLRHPGKNKDVLVMVGDGGVADIGLDYTLHSWFRGERITTVMLDNEVYGNTGGQESGMTVKGRVLNMAPKGKKFGKIPVFEMAKTAGCVYAVRVTVASPKRLGTAIRRAVLVAREIGPTYVQAYTPCPTNMKFQTNKTIETAKEGEKSYYQYEEYITESAKEYLDEKDKSF

SEQ ID NO: 84291 - protein, 248 aa, Unknown
  Obtained from environmental sample
  DOMAIN (24)...(248): Family 4 glycosyl hydrolase
  misc_feature (1)..(248): Xaa is any amino acid
MTLNVLFIFFLGLNLIFMNKEKLKICYIGGGSRNWAWVFMQDLAFEKCLYGNIELFDLKYEDAQTNEIIGNKLMEKHNPGRWKFHANPSLPDALGESDIVIISILPGDFEEMAVDVHAPEKYGIYQSVGDTAGAGGIMRALRTIPQFRQIAQEIRKNAPAAWVINYTNPMAICTRTLYREFPQIKAFGCCHEVFHTQKLLATVLEETNYAPPGSIKRGRIKVNVLGINHFTWIDKAYWKDTDIFPLYK

SEQ ID NO: 84292 - protein, 95 aa, Unknown
  Obtained from environmental sample
  misc_feature (1)..(95): Xaa is any amino acid
MKTKDFFFDLPDELIAQYPPEKRGQSRLMLLNRQTGKRSHRMVEELPEILCGPGFRSKDGGLAPAGFHNSKVRKARLVGVSQETGAKAEFLLIGL

SEQ ID NO: 84293 - protein, 327 aa, Unknown
  Obtained from environmental sample
  DOMAIN (50)...(191): Phosphoglucomutase/phosphomannomutase, alpha/beta/alpha domain I
  misc_feature (1)..(327): Xaa is any amino acid
MSVTTTNIPALAQKAQEYIGLEQDPHFRSQIEELLKKEDWVELNDRFYADLEFGTGGLRGVIGGGYNRMNPFTVRRATQGLANYVSKAVPTGASAVIAHDSRNFSDVFALQAALVFCASGIKTYLFTGLRPTPELSFAVRRLKATTGIVVTASHNPPEYNGYKVYWDDGAQVVEPHDKAIIKEVLSVGGAIKAMDKEEALKAGLLVMIDKEVDVPFVDMVKRCAVRPALLKEGGKSVKVVYTPLHGTGAVPVDTALKEMGVEVTFVEEQRKPDGNFPTSATPTPRGLRDEARFRLGEKIGADLVLGNRPRRRTPRHSRPRRGPLKLV

SEQ ID NO: 84294 - protein, 293 aa, Unknown
  Obtained from environmental sample
  DOMAIN (159)...(283): HD domain
  misc_feature (1)..(293): Xaa is any amino acid
MVNRLDVSSPGVRRQLIMTLIQSTPAAYAVLGKDYKVIFLNDFFMRARKMEGPVPVGETCYNIVNGGVICPQCAVHEAIDRGRPARMLRKDVLPDGTVTHSDDFAIPIRKGPGTDDFDCVLQVIVSRTEEMRLRDRNSRLFLEIVYSLMKRLGGTPPYASAHSKNVAAISAKLTRYLGMGSHAAFHSALGGLLHDLGMFFVPGEILGKRAALTDEEYSAVKGHTVYMGGFLDGLASFATLRDIAVSHHERWDGGGYPNGTGGEDIPWSPGGRSRGRLRRHDVRQAPPPRDVPP

SEQ ID NO: 84295 - protein, 265 aa, Unknown
  Obtained from environmental sample
  DOMAIN (1)...(250): recA bacterial DNA recombination protein
  misc_feature (1)..(265): Xaa is any amino acid
TSGGAKAGGVAAFIDAFFAFDANYARKLGVYIDSLLVSQPDSGEQALDICETLVRSSAFDLIVIDSVAALVPEAEIKGEMGDSHMGLQARLMSQALRKLTGILNKSNTALIFINQIRMKIGVMFGNPETTTGGNALKFYASQRMDIRRVSTIKEGENSIGNRTRVKVVKNKVAPPFTQCEFDILYGQGISREASILDLAVDLEFIQKSGSWFSYNGERIGQGRPNALQYLKENAEVSKEIEKKIREHRKEIEMFRGNSEDSKVEN

SEQ ID NO: 84296 - protein, 316 aa, Unknown
  Obtained from environmental sample
  DOMAIN (71)...(259): Adenylate and Guanylate cyclase catalytic domain
  misc_feature (1)..(316): Xaa is any amino acid
MTILQILALSVSVVFGILNSLLYRKKAIQIEEAHNKLQYFNNNMRQAFSTYLSEDVVEEIISDPARLQLGGVNRHMTALFSDIRGFTGIAEMLTPNHLVDLLNYYLSTMSDIILEQKGTIDKYQGDSIVSFFGAPMELEDHALRACTAGIIMKRIENDVNKYVLEKGISPSPLLTRIGVNTGEMVVGNMGTQKKMNYTIISNAVNLASRLEGVNKIYGTWILATDSTIQETKGKLLTRRLDRIRVVGINEVVRIHEVLEIKAEASDALFEQVYLFSQAFDLFEERNWEDAKIAFNQVLPAYPDDRPFKHFTERCRQ

SEQ ID NO: 84297 - protein, 90 aa, Unknown
  Obtained from environmental sample
  misc_feature (1)..(90): Xaa is any amino acid
MSLVDTNIILRYLLNDIPEQSEIARLELKKDNVKILTQVVAEVIYVLSKIYKINRKEISESLFKIFSLDGVIVENEEIVVFAVAEYGNSK

SEQ ID NO: 84298 - protein, 100 aa, Unknown
  Obtained from environmental sample
  misc_feature (1)..(100): Xaa is any amino acid
MGLSMQEKKALTREISKRYQKAEKKEKTKILDELVKTTSYNRKYILHVLANWGKTSIVRMDGKAVELKASPKKRRKGGGRKPKYTGNFMIVLRSSARPFS

SEQ ID NO: 84299 - protein, 64 aa, Unknown
  Obtained from environmental sample
  DOMAIN (29)...(52): 4Fe-4S binding domain
  misc_feature (1)..(64): Xaa is any amino acid
FVGRVPGVYQIKEFAKKAYAEIGKVPWRPYKNASACIECGVCETKCPQGIHIREQLKETHKALA

SEQ ID NO: 84300 - protein, 67 aa, Unknown
  Obtained from environmental sample
  misc_feature (1)..(67): Xaa is any amino acid
MKQENKQVIIAPSESEKLFFADISRILNEGRRKAHTAVNYAMVETYWNIGRRIVGQEQQGKERGKLR

SEQ ID NO: 84301 - protein, 271 aa, Unknown
  Obtained from environmental sample
  DOMAIN (10)...(271): Fumble
  misc_feature (1)..(271): Xaa is any amino acid
RELRFIIRNEHRGDDAQGVFIEDGKLIRKFKIKASDAVTAATALSAKIVLDNGIDINVIKEIRITGAGAAKIKSDIFGIHTERVGEIKAIGRGGMFLSGLDNIIIANIGTGTVIIEANERGISHFGGSGVGGGTIIGLAKKLLPTAEFNGIINLAQTGDLSHVDLLLEDIMETDLSFLNKETTVANFAKMSDRAGSEDIALAIINMVYQVIGVLSVFAAKAKGLKRVIVTGNGSGNKLGQKVLANITGMYGVEFIYPADAEYTTAVGAGLV

SEQ ID NO: 84302 - protein, 240 aa, Unknown
  Obtained from environmental sample
  DOMAIN (25)...(148): Acyltransferase
  misc_feature (1)..(240): Xaa is any amino acid
MGFRRFAVSYFMKGILSVICKIDCKEFIQALKNNKPMLVIFNHINFLEVPILVTHSYPLHVSGLVKEETWNSLLFSFVFNTYKAIPINRRGAFSEAFKKALDAINKGYYICVAPEGTRSKDGVLGKGKPGIIQLALEAKVPILPVAHFGGENIWKNMRRFRRTPFCFKAGRPFRINCEAMPGKEERDKIMTEVMSQMARLLPERMRGEYSEFTNSDYKYCGIYIMTENTARVPRAEFCPM

SEQ ID NO: 84303 - protein, 172 aa, Unknown
  Obtained from environmental sample
  DOMAIN (29)...(166): Cytidylate kinase
  misc_feature (1)..(172): Xaa is any amino acid
KPWSESAEAAGGNTTVCKIVADRLGLKFINFTFRSLAQEKGIDFKKVLELAAKDDSWDKEVDSRQVQLARESGGCVIGSRLAIWMLEEADLKVYLRAKPETRAARIVNREGGNLEEIAAFTAERDKRDNQRYIRIYNIDNYKYEFADLIIDADNLTPDEIANLIIEAAEKIV

SEQ ID NO: 84304 - protein, 292 aa, Unknown
  Obtained from environmental sample
  DOMAIN (10)...(292): Alpha amylase, catalytic domain
  misc_feature (1)..(292): Xaa is any amino acid
MNSPRRNPKTGDLLTNYWGYSTVAFFAPKESYAVDRTPGGQVRDFKLMVRELHKAGIEVILDIVFNHTAEGNEFGPTFSFRGLDNPIYYILNDNKRYYQNYSGCGNTVNCNNPVVRTFIMQCLHYWVVEMHVDGFRFDLGSILGRDQAGKLMESPPMLERIAEDAVLSSTKIIAEAWDAGGAYQVGWFPGGRWAEWNDRFRDEVRKYWRADPTETRHLATRLSGSSDLYLRDGRKPFHSINFITSHDGFTLRDMVSFNGKHNEDNGEDNRDGGDNNYSYNYGIEGITLDPIL

SEQ ID NO: 84305 - protein, 383 aa, Unknown
  Obtained from environmental sample
  DOMAIN (89)...(179): Glycosyl hydrolases family 2, immunoglobulin-like beta-sandwich domain
  misc_feature (1)..(383): Xaa is any amino acid
TCRRIGLTKRHLSSLRGVTGNAKVFINDKEAGGKPYGYIPFLVNTEGLLRYGEENVIGVIADNSRLPNSRWYSGSGIYRPVWLWVGHKTHIDIEGIKISTLSYSPARIKIETMSTGGDVEAEIFYNGEKVADCRGDALTLDIPNAKLWSDETPDLYQCRVRLRENGVIVDEAIQTFGVRLVEWSAKGLFINGKKTLLRGGCVHHDNGILGARSYAESEERRVKILKKAGFNAIRSAHNPAASAMLEACDKYGIYVMDETWDMWYVHKNKYDYASDFTENYKADIEAMVRRDFSHPSVVMYSLGNEVTEPHEKKGMALMKEMAEYVRSLDKTRAVTCGVNLALLLMASKGRSVYKGEGESIVEKKIATKPINSTMFNLMPSADL

SEQ ID NO: 84306 - protein, 324 aa, Unknown
  Obtained from environmental sample
  DOMAIN (23)...(303): Glycoprotease family
  misc_feature (1)..(324): Xaa is any amino acid
LIGEGFETSCDETAAAVVSTDGAIRANIIATQIDTHKDYGGVIPEIAARMHVEAINPVIEKALHTAAKTMDEISAVAVTQGPGLLGALLIGLQAAKTLCFIHKKPLIAVNHLEGHIFANSEIRYPFLCLLVSGGHTQIIISPQAGQYQTAGQTIDDAAGEAYDKAARVLQLGYPGGPLIDKLAQTGDSSAIKFSKARIRTPESEFDFSFSGLKTNVLNYCRKNPQARKEDVCTAFQKTVAETLTENTLSAAQKYGIEHIYLAGGVAANQGLRQMLMKEGQAQNKQIHLPDPALCTDNAAMIARAAIRKWHAKEFSPLNISALPS

SEQ ID NO: 84307 - protein, 195 aa, Unknown
  Obtained from environmental sample
  DOMAIN (1)...(195): Nucleotidyl transferase
  misc_feature (1)..(195): Xaa is any amino acid
LSLTSPGKLPKQFLALVGEKTMLQQTVERIPKGQIVVVPEERYAAAVQGQCKDLSGTPSDLSRAQTRQGASSREVEVLAEPFGCNTAAAVGLCALYALRQTRDKNTVLFFLPADHIVEKTVFGELFQRALVRAADGKIVTIGITPDRPETGYGYIKTAASGQGLAVEAFVEKPDLATAQKYLAERQYFWNAGMFV

SEQ ID NO: 84308 - protein, 235 aa, Unknown
  Obtained from environmental sample
  misc_feature (1)..(235): Xaa is any amino acid
MFTVAGVLLLLKSVDNEKVNRLTLFFACLCLALVFGCRPNMGLASLFVPVVLWKYRTWKLVAFAVLPYVIVAIPLCFYNYLRFKSIFDFGANYNLSYVNVKALGQLNILGEMFRVFISSANNLFCLNQYSLRFPFVKISPIFPRSTIRMVSVSSGVVWTYQDAVGMINFPVVFLLYYIFKNIFDKNKPKTFYILSTSLIIAAAIILLNSIAARGVASRYMVDYRGILVPILIPSA

SEQ ID NO: 84309 - protein, 118 aa, Unknown
  Obtained from environmental sample
  misc_feature (1)..(118): Xaa is any amino acid
MSLSEDVPGEETIDPLSGIESEQSEQNENGLFAGDIGELPLDTRRALVQLLSGPSIDGHRHSKLWSVLVRDEGVIRKRLADLFLELVIDRDLQVAFTRQFDSGDWKYQHTRRSANLSV

SEQ ID NO: 84310 - protein, 83 aa, Unknown
  Obtained from environmental sample
  misc_feature (1)..(83): Xaa is any amino acid
VFGPLCELSRLIGTNAVHQEEVLKREWYINVNITGLFAKVISRLHQKQSISSLLDNREIISRLMVGAKEQQTQHELPFSNESL

SEQ ID NO: 84311 - protein, 301 aa, Unknown
  Obtained from environmental sample
  misc_feature (1)..(301): Xaa is any amino acid
MEGYKSFAVTVQGGSHINSGTVCQDYSDWYEDESVSVAVVADGHGDSNCFRSDRGSQFAVTCAIEGIKQFVKEHEPLFKSSLIKKADPPTHRELEKLIREKLIKQTAASWNMLVMEDHNKDPFTESEMEGASDKYRKRYENGENVNKAYGTSLIAAAITPWYWFGFHIGDGRFSVLYQDSSGGQPVPWDPKCYLNVTTSICDDDILDREEEGVRSYLSIHTEQPPPAAIFLCTDGIDDNYPVDEKENAECLYSLYRKIALTFAEDGYESTFGADGKSGQLKDLAPSFATKGKGDDPSIPES

SEQ ID NO: 84312 - protein, 315 aa, Unknown
  Obtained from environmental sample
  DOMAIN (115)...(259): GAF domain
  misc_feature (1)..(315): Xaa is any amino acid
MSKGACVKKRESKYSEDEKALFGEYGVKSVLYIPIFTRGEIWGAVAFQDHANDRYFDEGCADLLQSAAHIFSNGIIREEFRRSAEKAIGSLKRREKMTAALNRAAVMFLSQSEESFEDTMTAGVNEIADVFNLDRFSLLRNLTIIDGLRYGGQIYRWDRKSGGTTAPVKGLESFSPDKYVPDWGKILASGGTISGPVRLMPEGAVLQSFGLVSICVTPVFINNIFWGIAFFEDLHAERFFEDDSVEMMRSAAFLCANTFIHADMERKLTNAHEFNRAVLDASPLGFTVFDENACVFDLHDFILSALGNDRNITLN

SEQ ID NO: 84313 - protein, 441 aa, Unknown
  Obtained from environmental sample
  DOMAIN (307)...(441): Beta-galactosidase trimerisation domain
  misc_feature (1)..(441): Xaa is any amino acid
MAQRYPEVVRVNANRQKNLTGERHNHCMSSPVYREKTTAINTRLAERYKEHPALAVWHISNEYSGECHCPLCQENFRSYLKKRFGSLDVLNEAWWNSFWSHTYTDWSQIESPGPLGDVNVHGLNLEWKRFNTEQIVDFYLNETVPFKKITPNVPCTTNLMSGATGVDNFRLARALDVDAWDSYPEWTGTEKDIETGAFFSFYHDMNRSAKGKPFMLMESSPSATNWRLVAKLHRPGVHMLQAMQAVAHGADTVQYFQFRKSRGSCEKFHGAVVDHEGSENTRVFSDVAEVGKRLATMQGIIGTSTPSAVAVIYDYQNQWILDDIKGLRRGNNRYKETVVNHYRAFWRMGVSVDVIDSAGDLEGYDLVAAPMLYMLRSGFAEKITAFVKAGGTFIATYITGYADENDLCFLGGFPGPLKEVFRIWCEEIDALYPEDGNSFNW

SEQ ID NO: 84314 - protein, 169 aa, Unknown
  Obtained from environmental sample
  DOMAIN (6)...(113): HD domain
  misc_feature (1)..(169): Xaa is any amino acid
LSPRRGFELLLPSAQLHDVGKIVISDTILNKPDKLTDEERTLINKHSAEGERIIDEIIAKSGMREGEYMTHAKKFAGYHHEKWDGNGYPHGLKGEKIPLEGRIMAVADVYDALVSERPYKKPFTHERAVDIIKKDSGTHFDPKIVEVFLVVEGDFWTERTILASNSQTE

SEQ ID NO: 84315 - protein, 362 aa, Unknown
  Obtained from environmental sample
  DOMAIN (73)...(139): His Kinase A (phosphoacceptor) domain
  misc_feature (1)..(362): Xaa is any amino acid
MDKNKNQFKGPASPGQSKIDMKSAVRVTLNNAKHRTRVATEALEKAEKAREEAEKAREKAEIAREEAEKANRSKSNFLATMSHEIRTPMNAIIGIAQVLLQRKDLPDYYATALQTIYSSANSQLGIVNDLLDMSKIETGKMVLVPVEYDTPSLINDAVQLNVVRIGSKQIEFTVDIDENLPSKLYGDELRIKQILNNLLSNAIKYTGRGSVKLSIGYSMDSDDVMLRFSIEDTGQGMKPEDKERLFSEYMRFNAQANRATEGTGLGLNITKRLVEMMDGTIDVKSEYGKGSVFTVAVRQKAVEGPAIGASVVKQLRKFAFAGDRHAANLQIAAEPMPYGSVLVVDDVATNLYVAEGLLGLYQ

SEQ ID NO: 84316 - protein, 212 aa, Unknown
  Obtained from environmental sample
  misc_feature (1)..(212): Xaa is any amino acid
MAEKKSWGIFGKILNTWENLGNAEEEKRKKTYSIYCVAEMFSTIAPFLCLAGMIYIGPCTYSFPVWIGILLGTLASFELLQELPSIALQSALSKSALERLAHPISYADTTLKAGMNLNLSSDFITLNKGDALILSAPSGTGKTLLANTIAGFLPSSEPIERTPNFVFLEQEPFLFTGTIKDNLLFANPYATEEEMLNVLQKRVSKGFPLIWG

SEQ ID NO: 84317 - protein, 89 aa, Unknown
  Obtained from environmental sample
  misc_feature (1)..(89): Xaa is any amino acid
IDAELHRERTAGALRDLGFTVLPSSANFLFVKPPDKSGAELFAALRSRGILVRHFNKDRIADFLRISIGTDADMDKVLEACKEIMKNED

SEQ ID NO: 84318 - protein, 245 aa, Unknown
  Obtained from environmental sample
  DOMAIN (13)...(241): Histidinol dehydrogenase
  misc_feature (1)..(245): Xaa is any amino acid
MKIIFSKEFDSYWKNETKRSEDTKTEKAVKKIIAEVRAKGDVAVRKFASKFDKSSPQRLEVPLSEAQRALEQLRANDAALVDALELAARHIKRFAEKQREQFADFEFAMEPGLLTGQRVIPVTKAAIYVPGGRFPLFSSVLMCMIPALCAGVEEVILSSPPTQDGLPDRKILAAAMIASKIANNNNIRIFSIGGAQAIAALALGTESVPRVDVIAGPAINLSPPPNGSLLARWGLILSPVPPMCW

SEQ ID NO: 84319 - protein, 155 aa, Unknown
  Obtained from environmental sample
  misc_feature (1)..(155): Xaa is any amino acid
MTSNALLWNNDNNGDNGNSGDNNVRCNLCAHRCRIAPGRRGRCAVRVNKNGVLRTRVYGRVIAQNIDPVEKKPLYHFLPGSVTFSVATVGCNFKCGFCQNHSISQAAEFDVDINDDSDCDASNDISNGIDNNVDKTINKNMDISDDLYGSADLIL

SEQ ID NO: 84320 - protein, 158 aa, Unknown
  Obtained from environmental sample
  misc_feature (1)..(158): Xaa is any amino acid
IGIVFHTGSATALKFAQSIRDKLVSLGHEVDLTALRTLGTVTAGLLPLARVNFTIKNPPELEDFDTVLIGGPVWGFKASPVIMRYLIEDVQNLKGKRALSFVTMAAGGGARAIRMMNGELEAAGAEVLEGEAVKSFFMPDALKLDGPTERICGRICGS

SEQ ID NO: 84321 - protein, 292 aa, Unknown
  Obtained from environmental sample
  DOMAIN (5)...(199): Amidohydrolase family
  misc_feature (1)..(292): Xaa is any amino acid
IIARAHLPTLPIRAIQGYGIAHECTSYDLKWGDGVEVEHERAVKNNWPFITHLSEGFDEESMRSVETLKKMNILDSHCLLIHCVAFSDEDIESAAKAGASVSWCGFSNMFMFNVTAKIRKMLKAGVNVTIGTDSSATGSANLLAEIKFDRELYRRLYGEDLPAEKLFEMTTINAAKAFRMQEQTGSLDEGKLGDILVLKAKDSDPYENFVNANMEDIELLVLAGTPLYGELRFLDIFNGKLPSGYTQIKVGNRAMFVKGDPSGLYSEVREKIGFKKALDYLPFEPEQEGNNA

SEQ ID NO: 84322 - protein, 260 aa, Unknown
  Obtained from environmental sample
  DOMAIN (49)...(260): Glycosyl hydrolase family 9
  misc_feature (1)..(260): Xaa is any amino acid
GLPTHQIGTRNSGESVRKADFSGIAKKGVYAAYVNGARISDNIIVQNDVYENVFKAALKWFYYQRSSTALPFEFAGKWMRAAGHPDTSVGFYPEAGKPAGWKISSPKGWYDAGDYGKYVVNSGISVFTLLELYEHFEKELKIISLNIPESKSKTPDILEEVRWNLDWMLTMQDPEDGGVYHKLTTARFSGHELPEGDIAKRYVVMKTSTAALNFAAVMAQASRIYKPFDANSPQQPLPPQKKPLNGQQKIHQFYSNNPKV

SEQ ID NO: 84323 - protein, 424 aa, Unknown
  Obtained from environmental sample
  misc_feature (1)..(424): Xaa is any amino acid
MNKNKPIVAMFKSIDKNNTSPRTLITTAFPENGGTVTVNPDKNLYSVGEEVTLTAAENPGYEFAGWSGSTASAKNTVSLKMDNSQTLVAVFKPKVKKLTVNAIPGDGGAVYVNGAALDGVANQDAGTEIVVWAREAPGWTFVNWSGSPSVEGRTDNPAVIPVADSDMTITANFRQGPGGGTEPPRSPAATYTLDVQVNGGGRVSLSPNDPDNAGYKIGTRVTATAIPEPGYKLGRWAGAESGTRNSVTITMNENKTLIATFIDENSTGGEDSIPAGNTYTLSTSVNPSNGGGVTRNPNKTNFTLNETVTVTATAANGFTFDGWSGAATGAANPMTITMNGNKTLTANFKSTGGTTPTYTITLDPNGGTLSTKIAAAVNGKIASLPTPTLDGHVYEGWFTGKTGGTKVTTSTTFSRDKTIYAQWT

SEQ ID NO: 84324 - protein, 119 aa, Unknown
  Obtained from environmental sample
  misc_feature (1)..(119): Xaa is any amino acid
MGTAVVFKPTLIQRKALALLKSGAKHILLFGGSRSGKTTVLVMAIIFRAVMYAGSRHLICRFRAKDARSSVLRETLIPWLDNSIGKNGYTYLAHESMITLYNGSEIWIGGLETENRLTR

SEQ ID NO: 84325 - protein, 294 aa, Unknown
  Obtained from environmental sample
  misc_feature (1)..(294): Xaa is any amino acid
VVAGFKYFHIDFGTGAIWPKRFELGYLFPLLDNFLNQNLVGKTDNMSAQLNLKGRYPGLGSIWVSFYADEMEISSMGKAFELDRHMFAFQAGLQGMIPLLPFASFTLSYTKVEPYNYTHQRNFVPWYDRANGPMEKAYINNGVSLGYYLPPNSDEIKFRFEALPLIKTSAFLQYQLIRHGADFGPHQVDGSALISELDSDGRGEKGSLRKSFLKDGAYQWMHIVKVGAEHRLGSLPITFFGETGIAYSYFTDISDAEYGKYNPTPAGETPRSPAAGEYRTTTAFILTLGIRIFR

SEQ ID NO: 84326 - protein, 329 aa, Unknown
  Obtained from environmental sample
  misc_feature (1)..(329): Xaa is any amino acid
MRWGLLFISTLLSMKTGVAYFGVRNPEWVRKDMQIIKGAGFDYVLHTFSEEDLQYYPQTMKDIIALSKKEGLGVYVNPWGVGRVFGGEAYTELAARNPEMAQVSQDGKKLVAACPNNPAFRSYMKKWIEAVCSCDIETVFWDEPHFYFEKNNPSLQACYCEHCSGTSRQQSLISFLSFLTEEVHKLGKRNSVCLLPPWFPAGLENWDEVAELPFVDEVGSDPYWEKGDTLEKVQKSYSEVSRRIADLAKKYGKEAQMWIKNYHIEAGTEHFITETTQIASGAGIKNIFAWSYLGSKYMDFVRSENPETVWKTQIKAFSLERARSLGSRV

SEQ ID NO: 84327 - protein, 421 aa, Unknown
  Obtained from environmental sample
  DOMAIN (1)...(365): Glycosyl hydrolases family 8
  misc_feature (1)..(421): Xaa is any amino acid
MPKVSTPYDTILKKTWEGIKKRNIDPYRTGMVHRPRSEFPGDAVSEGISYGMFLALYCNDQTYFNKIWNGAETYMWSGGAKLYNWRRDSQGNANPAMGPYNDGPASDAEQDIALLLIFADQLVKNNIWRPYTDPKNNATYAGRARDMLGTIRTTMIKDGKILLPGNWGGDGAGTINPSYFSPGSYEIFAEFDPENASAWKTLTDGVYEMLAKSPGYSRGLAPDWYTFEGRSTGGAGYNAYFAGDAMYMDAIRIFWKIGLHYLWYKDERAKSYLSKAINFLGSPEKANFFTMNGELLPDTAIDAISDGKGGKVERPRRMHNHLTVGMWSIAAMAAGGVEMAEEYSDEFLKFYDTGNDFFAHASDPEGGNDPLHCDMYYDQFLSWFGASVLGGSLYQRMGRFKKRRSRRAPPAWEKRPLPHTN

SEQ ID NO: 84328 - protein, 94 aa, Unknown
  Obtained from environmental sample
  DOMAIN (11)...(44): KOW motif
  misc_feature (1)..(94): Xaa is any amino acid
MIAEKPKKLKIKKGDEVIVITGRDKGMRGQVLKVDLDKCRVVIAGVNLRTKAVRPNPQTGEEGGHIKKEGTIHASNVMRIDPATNKPTRKRAAK

SEQ ID NO: 84329 - protein, 111 aa, Unknown
  Obtained from environmental sample
  DOMAIN (1)...(104): Ribosomal protein L16
  misc_feature (1)..(111): Xaa is any amino acid
LGDTVLKALKHAGITNRQIEAARIAMTRHIKRAGRIWIRMFRDKPTTSKPAETRMGSGKGAPDGWVAVVRPGKMLFEMEGVEEAIAREALRLAQMKLSVASMFVSRTPPEE

SEQ ID NO: 84330 - protein, 58 aa, Unknown
  Obtained from environmental sample
  misc_feature (1)..(58): Xaa is any amino acid
VIARKSDDMLFTLETVNCLGACGIAPVVVVNEDVYGSMDPAKTKALIEKIRKEESANA

SEQ ID NO: 84331 - protein, 51 aa, Unknown
  Obtained from environmental sample
  misc_feature (1)..(51): Xaa is any amino acid
GNKTSETIVSVNTDPDANIHQLADVAIVGDAFEVWGELKKRLKGMGNGGDE

SEQ ID NO: 84332 - protein, 443 aa, Unknown
  Obtained from environmental sample
  DOMAIN (179)...(399): Methyl-accepting chemotaxis protein (MCP) signaling domain
  misc_feature (1)..(443): Xaa is any amino acid
MASFKIGNSTNNWSVMIASTEKYIMRDVVAMRNFVIVMALVAIAAAVVIIYFALNSAIKPIVNVADTLKEISEGEGDLTRTVDIHSQDEVGDLANYFNKTLKKIRELISAIKYKINGLAHTSYELSVNTGKTSTAVRDISSNLDNMKSLMVKQETSTNEAGKAVNNIKENIDSLKKMIEEQTESVNVSSSAIEEMTANINSVTKTLVDNSRNVAALTEASENGKAGVQTVAQEIQEISRDSEGLLEINSVMANIASQTNLLSMNAAIEAAHAGEAGKGFAVVADEIRKLAENSSVQSKTVGAVLKKIKGSIDKIGRSTENVLNKFEAIDLSVRTVVRQEENIRNAMEEQGAGSKQILEGSGRLNEITGQVKGGSHEMHEGAQEVIHESENLEKATAEITAGINEMAAGAAHINSAVNYVNEISGRNREAIDVVIREVSRFKVG

SEQ ID NO: 84333 - protein, 305 aa, Unknown
  Obtained from environmental sample
  DOMAIN (2)...(208): Nucleotidyl transferase
  misc_feature (1)..(305): Xaa is any amino acid
VLMEVAFEPMLIWAVDAAKASGIGKIGVIIGNNAELIQKRLEKYDNCETFLQEERKGTGHAVMQAEKLLRERGGDALVLCGDAPFMDAETINGAYELHKSANNAVTVITAEIENPAGYGRVIRGENGGLIGIAEEKDCDAAQRLLKEVNSGAYWFNAERLLEVLPKLTSENKSGEYYLTDTVGLLRGSAGAYKTTNHMVTLGANDRKGLRRLNKIAAEMIIDGHLDNGVDIIGESSVIGRNAVIGRDSLIMPNTIIKGDTVIGKGCVIGPNTLVEDCVIGDGVFLTTLTLRGRSSGTASSRPRCS

SEQ ID NO: 84334 - protein, 309 aa, Unknown
  Obtained from environmental sample
  misc_feature (1)..(309): Xaa is any amino acid
GVDGENYHQGAREHNLKNIDLELPRDKLIVVSGLSGSGKSSLAFDTIFAEGQRRYVESLSAYARQFLGRMDKPDLDYIEGLSPAISIEQKTTHRNPRSTVGTVTEIYDYYRLLYARIGIPHCPICGREIREQPVDSIIESILQMGEGTRVQLLAPVIRGKKGEHQKIIEDARKAGFARARIDGVPVELDESIRLDKQKKHSVDIIVDRLVIGPDIRSRLAESVETALQTSDGLLLVLSQSQENSSKSGSDKSSARGVSAQRATENFFSQKNACPDCGVSIPELQPRLFSFNTPFGACPSCSGPWLQTGV

SEQ ID NO: 84335 - protein, 318 aa, Unknown
  Obtained from environmental sample
  DOMAIN (211)...(318): Stage II sporulation protein E (SpoIIE)
  misc_feature (1)..(318): Xaa is any amino acid
LCVPEKDYVISSTRANIDAGASIKSLPWDINADSFDLDGVNYLGFGRSMDNGWLLSVLIPKPEIFNEAEEQNNRFSLIIALAMAAMTILAYYLISKFVNAPIKRLTQDVSRLSLGHLDTQIEINSNDELGLLAKTFNKMTCDLKQSIEENARERAEKERISAELEVAAAIQASMLPNIFPPFPERTEFDLYASMIPAKEVGGDFYDFYLIDKDNLAVVIADVSGKGVPAALFMMITKTMIKDSSQGKNLKDVFESVNKKLCEGNEADMFVTAFMGIYNIPGGKFVFLNAGHNPPLIKKHGGAYESLGNGTGLCSGVDE

SEQ ID NO: 84336 - protein, 305 aa, Unknown
  Obtained from environmental sample
  misc_feature (1)..(305): Xaa is any amino acid
MINAMRYADSFSSIRKHYFAFRSSFFDMEKCLDETDLVLSRCITELGYLVEIENSYPDMHVPDPYAFFTGYLEDISYLAQQTSSGVAILPYRTAAPAPFDCHIVLGANQDSLSAVFSFLPFLPASKREELGISDNDASQAFITLHRFNSRLPAAFFCSEQTFTNYAIPHSALKTELKPRSRYCDDPELGVKFAADLYREENELYTSLYFPARRQVGLGLSVGLSKIHSNQKQGFGEWLLRRKRPNTTSDNETNHPFVEHIRNRFYIKEMTKNRKIITMVHPHRLNCISNARFNLFFRRVLRLKNE

SEQ ID NO: 84337 - protein, 163 aa, Unknown
  Obtained from environmental sample
  misc_feature (1)..(163): Xaa is any amino acid
VQILEAAHRAPTASNLQTVEFTLVTDPEKLKTIIEFTLNTFLSSVKKIDNAWLRPFFKRFFPELYNYVPRVRKIQRDYIEKGQDTGILRGATSVLFIHTPKESRFGREDCQLAYQNASLMAESLGVSQFYTGFVLRAVEQRSQKLEKLLGINGKIHARIALGL

SEQ ID NO: 84338 - protein, 251 aa, Unknown
  Obtained from environmental sample
  DOMAIN (21)...(155): FAD binding domain
  misc_feature (1)..(251): Xaa is any amino acid
LIIEKSISLKKHNTFGIDVTARYFCELHTIDELQTLVASEIFQTHPRLILGEGANILFTKDFDGLVIKPVFKGIEVVCETEHDVLVKACSGEVWADFVMHCCEKNWNGLENLAYIPGSVGASPIQNIGAYGVEIKDVLDSLEAFNLETKKLEFFKSADCQFGYRESVFKNAYKGKYVICSVTFRLSKLPQFNTNYAAVHEELKRLNVSELSAKAIATAITNIRKSKLPEPSELGSAGSFLKIRSYRSADLS

SEQ ID NO: 84339 - protein, 113 aa, Unknown
  Obtained from environmental sample
  DOMAIN (11)...(57): Bacterial regulatory helix-turn-helix proteins, AraC family
  misc_feature (1)..(113): Xaa is any amino acid
MMNGSKNVIYNSISFIESRLSDELCIGELAGQAFFSKTHYKRLFQAVVGEPVMEYITKRRMQRANMALRETDASVLEISLQCGYTSHEGFSRAFKEYFGMPPLQYRQRYAAVK

SEQ ID NO: 84340 - protein, 82 aa, Unknown
  Obtained from environmental sample
  misc_feature (1)..(82): Xaa is any amino acid
MGYAGVEFDPDMTAVSFKSKAGEIAVCSHGESIPFSEETAKTILSEEEIEILISAGEGTGSASAWGCDLTYDYVKINGDYRS

SEQ ID NO: 84341 - protein, 139 aa, Unknown
  Obtained from environmental sample
  DOMAIN (17)...(139): ArgJ family
  misc_feature (1)..(139): Xaa is any amino acid
MGNMKTISGGVCAPKGFKAGGIWCGIKATSRKRDLALIYSEKICTAAALFTTNRVQAASVLVSQKHIMGGKLHAIIANSGNANACTGEAGLVAARRMAELAADEFAISPRTVAVASTGVIGVPLPIAAIENSIEALVNS

SEQ ID NO: 84342 - protein, 190 aa, Unknown
  Obtained from environmental sample
  misc_feature (1)..(190): Xaa is any amino acid
MEIKRAIDLGDNIRERLSEVYVNAFYDDVLKYFSKNKAKLKKVFACGFLLEYFYVAVIDNEIVGMAACMGKDQYCFKYNIKTLIKYFGLFGGLIFNYGLNQFVKGFPKLDEKTAIIEYVATDTKHLRTGVASTLIKSLFTMSEYQSYVLEVKGQIRMPFICIKNWDLKRILKVIFPQDIYWHEIYQEGRD

SEQ ID NO: 84343 - protein, 126 aa, Unknown
  Obtained from environmental sample
  misc_feature (1)..(126): Xaa is any amino acid
GFTQGQYRPSDAEALHVNTSFITAFANDHAYEGAFARLVQAKGRRGDALVGISTSGKSRNVILALEEAGRLGMRRIVLTGVGGVMRDLADITLSVPSAITPRIQECHVLIGHILCELVEERLTAEL

SEQ ID NO: 84344 - protein, 412 aa, Unknown
  Obtained from environmental sample
  DOMAIN (34)...(405): Aminotransferase class I and II
  misc_feature (1)..(412): Xaa is any amino acid
MPIADKIKNALGSSSMIRKMFEEGNRLKKQHGADKVFDFSLGNPDLDPPQAFHDIFLKFAQEDSKGSHGYMPNAGYQNVRDSLAKKASKEQNVNIDGSYIVMAVGAAGGLNTVFKTICNPGDEVVVSRPYFMEYRAYTANHDAKLVEVDSLPDFSLDVKAIGSALSPKTSAVLINSPNNPTGRVYPAQALSALAELLREHGKKTGRLPYLVSDEPYREIAYNVQVPPVLCAYGEIIVVSSYSKSLSLPGERIGYIAVSPNATDKDELMNGLIYATRILGYVNAPALMQRIVAELTDAAVDVSIYARRRDAFTAILDQAGIEYAVPEGAFYLFCKVPSKKVPVPSKKVPVPSKKGSTEPGDDLEFVNHLKQHLILGVPGTGFGKPGWLRFAYCVDEKNIRASAEAFKRAMESW

SEQ ID NO: 84345 - protein, 295 aa, Unknown
  Obtained from environmental sample
  DOMAIN (230)...(263): Tetratricopeptide repeat
  misc_feature (1)..(295): Xaa is any amino acid
MLRSRIEIQKNINSYRAGLEKKEIDINDAMWDNKFDPRYISVVKARDNDALKLRELEQELEEAKARGEKGRSLAEIREEISKTQSELNEFCLQQNRAANQFIYIFLKHTINFLECSVYALQLELNEAIEEGNFKPQKKNSNQEKAAREKAEKERIVKEKSAREKAEKERIKKEKNEIAEIKRRYEQRIRKNPNDKNIYKIRAKEYYVKKYYDFAIDDYTKIIEDIDSNDKDSYVERAIMYSEKKEYKKTIDDFTKAIGLDPKDADNYALRGMAYSTIGEYDKAIADYDKAIKLAR

SEQ ID NO: 84346 - protein, 101 aa, Unknown
  Obtained from environmental sample
  misc_feature (1)..(101): Xaa is any amino acid
GGRDRSAEKRLWWIGTDRNDTRLGIFNKIRGRIADGLFSEGINFDNRHFNPHITLGTEIKHDSPIIIPKQEIIYPVNRISLMKSERVGGILTYTEIYGADL

SEQ ID NO: 84347 - protein, 495 aa, Unknown
  Obtained from environmental sample
  DOMAIN (408)...(491): Response regulator receiver domain
  misc_feature (1)..(495): Xaa is any amino acid
LIEANKKAESASRAKSDFLAKMSHEIRTPMNAITGMAELLLRGELSSEARGYVQDIKQAGNNLVSIINDILDLSKIEAGKLEIVSAKYMLSSLINDTVNIIRTKFKEKPIRFFTNIDGDIPNSLIGDEVRLRQILLNLLSNAVKYTDKGCIGLTITMEKQDDKNVLLRMDVSDTGKGIKPEHQEKLFDEFVRVDAKKNQGIEGTGLGLPITRRLCAAMDGKLSIKSEYGKGSVFTVIIPQGIESKEPFAAVDEPEKKRVLVYEGRVVYAKSICWTLENLKVPYAVVTNQDDFAAALYHGPQPSPRGVEPEVRGSPLAEWFYVFSGYGLYEKIKPLIGKDDSVFCGGKKPHLALMVEWGTEAYIPNVRFVSIPIQSLSIANTLNGKTDRRDYFESSVSSGMIRHTFPHARLLIVDDIATNLKVAEGLMAPYNVKIDTCLSGAEAIELVKRNKYDLIFMDHMMPEMDGIEATAAIRKLEMKNEASGNLGRSVIGPKI

SEQ ID NO: 84348 - protein, 140 aa, Unknown
  Obtained from environmental sample
  misc_feature (1)..(140): Xaa is any amino acid
VLWGLIARLQTEALISSIKGLGSVPVRGVKIGAPESAEVAEALSKCSLLVNCTSVGMRPNIGDTPLNKSFFHAGMTVFDAVYNPGETRFLREASEAGCRVKNGLLMLLYQGLESFRYWTGMEAPEDIFEEAWLQSLVDNG

SEQ ID NO: 84349 - protein, 339 aa, Unknown
  Obtained from environmental sample
  DOMAIN (3)...(337): Hsp70 protein
  misc_feature (1)..(339): Xaa is any amino acid
VYREGRRPRRRQIAGLEVERIINEPTAASLAFGFNKDQKKDKTIAVYDLGGGTFDISILELGDGVFEVKSTNGDTHLGGDDFDLKILEWLIGEFKNDTGIDLSKDRMALQRLREASEKAKIELSAMQTTEINLPFITADQSGPKHLQKSLTRAKFEQMVSDLLERSKEPCIKALRDAGLTAEQIDEVILVGGSTRIPAVQQIVKDLFKKEPNKGVNPDEAVAVGAAIQGGILGGDVKDVLLLDVTPLSLGIETLGGVMTKLIPRNTTIPTRKSQIFSTATDSQPAVSINVLQGEREMASQNRVLGRFDLVGIPPAPRGVPQIEVGFDINATALFMSARK

SEQ ID NO: 84350 - protein, 91 aa, Unknown
  Obtained from environmental sample
  misc_feature (1)..(91): Xaa is any amino acid
VGLSQVRLEADKEKPDLADIRESGCIDQDAHLVMFLTRDRELEKTRQDQERDISQKLQVMVAKNRNGPVGTVDLTFFKHLTKFVSFTDDRG

SEQ ID NO: 84351 - protein, 359 aa, Unknown
  Obtained from environmental sample
  misc_feature (1)..(359): Xaa is any amino acid
FTPKPGAKRDKVRGDIRGWLRNHGNVEVVDRPVTELGVKDENGNTRDWSEFEGEPTMVDDDFNPEWLDDEIADEIDSEDTSPETHENTSKIASDVEAEEVSTQPEESSPRTSEQAENKAEAPTPEARLIQKLEDLLTQAKAEIAQSTQKKQEATTKPENAKETAAPDESAALPSPKQAAPRFEAWRSHIEEALNRYKAWAGSQPKQLPAPEAKPKKKAQTPAQKAARDKALAEKQRRMEIERAEKEAAAKAKREAREAETRARVIEKQEWAERKAERNNSPAWQLYHTMKEIARKNGAVSAEARHKFWESVGNNPTPPDAWARKRAPHEVNKWIKRRTKAAGRIDEYLRENAESSCGDH

SEQ ID NO: 84352 - protein, 304 aa, Unknown
  Obtained from environmental sample
  DOMAIN (25)...(304): Penicillin binding protein transpeptidase domain
  misc_feature (1)..(304): Xaa is any amino acid
MAGRPNERFQDIVSKAQFEQKAKNVSALVMDIETGGIVASAAAPFYDLNEQPRDDVATLLGQIKNLPMINVLEPGSTFKILTLAAALEEGVVTEADRFTCHGSRTIDGENVKCWRSRGHGTQTLAEGVNNSCNCVFMDLALRLGVDKFYEYLAKFGIGQKTGVDFFGEPSGLVLAKKWVRPVDLARIGFGQAIAVSPIQFQSVVNAIVGDGILRAPRYVNSIDGMPEVGGVVEKRRILSQKTCDRVRELLYGVVMQGSGKLASVDGFQVGGKTGTAQKYKDGIIDQGKYISSFMGFISSADLII

SEQ ID NO: 84353 - protein, 330 aa, Unknown
  Obtained from environmental sample
  DOMAIN (1)...(330): Bacterial DNA polymerase III alpha subunit
  misc_feature (1)..(330): Xaa is any amino acid
LKSAAEMNRLFADCPSALTNTARIAERCNVNFDFGKMHLPNFPMPDSITDDEYLYQLCLNALPEKYPEKGNAPLERLNFEIDVIRKMGYSSYFLIVWDFIKYSVREGIAVGPGRGSAAGSIVAYLLGITNIEPMKYGLLFERFLNPERVSMPDIDIDFCYERRGEIIEYVVQRYGSDRVAQIITFGTMAARAAVRDVGRALDLPYGDVDKIAKLIPPELGITLKKALNAGNELKKNYEENPVIQKLIDTAMALEGLPRHASTHAAGLVISKEPLTHYVPLQLSAEGFLTTQFDKDRIEEIGLLKMDLLGLRTLTVITDAISLILGRSDTW

SEQ ID NO: 84354 - protein, 137 aa, Unknown
  Obtained from environmental sample
  misc_feature (1)..(137): Xaa is any amino acid
MKSILKRSYVFVAGAALIVSAYFIAGVLIFANNQYYEINTENMKEAARALKSFTSAEIFSDKDASNLRFAAEWASFANISGSYRITFISRNGQVIFDTEADSAVMENHLDRVEFQDAINDGIGTARRRSATWGLGRF

SEQ ID NO: 84355 - protein, 87 aa, Unknown
  Obtained from environmental sample
  misc_feature (1)..(87): Xaa is any amino acid
DNDRIGREMSPDEVLVELYYGAVSNQSNEITNAHRAEMKWVSNKDGLNQYHVRVECTDTGFQGHTVRILPKHDALVHPYRSGFIKWA

SEQ ID NO: 84356 - protein, 152 aa, Unknown
  Obtained from environmental sample
  misc_feature (1)..(152): Xaa is any amino acid
AGLDGEKLNYEADGSKCYNDSTAYCDKYGRLYNWETAMKACPSGWHLPSSEEWETLVDFVGGRKTAGKYLKSKSGWIENGNGEDKYDFSALPGGYGDSGGSFYDVGNYGYWWSSSERNSDYAYLSNIYYNYELVFNPIINKIKLLSVRCLQD

SEQ ID NO: 84357 - protein, 97 aa, Unknown
  Obtained from environmental sample
  misc_feature (1)..(97): Xaa is any amino acid
KKSEAGYKVIKSGEFSVLELELGTGRMHQIRRHLALSGNPVLGDDKYGDFSLNKELRKEKGLKRLLLHSSRLVIKSKYQIDVTSPLPDYFEAFISFS

SEQ ID NO: 84358 - protein, 78 aa, Unknown
  Obtained from environmental sample
  DOMAIN (1)...(72): SpoU rRNA Methylase family
  misc_feature (1)..(78): Xaa is any amino acid
AIGTDPRARRRISDLDSIVKNTKVKSVALVLGNEETGLPQEVKDQCLHLLRIPGTGNIDSLNVAQSAALFLHAVFELL

SEQ ID NO: 84359 - protein, 76 aa, Unknown
  Obtained from environmental sample
  misc_feature (1)..(76): Xaa is any amino acid
FISIGRGAYITDLGMTGITDSVIGMDLKICQERFNKQVQYQMKTAMSGKPAQINGIIAEIDTDTGKALTVQRIQKD

SEQ ID NO: 84360 - protein, 273 aa, Unknown
  Obtained from environmental sample
  misc_feature (1)..(273): Xaa is any amino acid
METPSRMWMAGGVEIVAGTKTALNMNDMKAMERKTGVARGSDGGVDGVDGNDIIDTADNIDIIDSIDIAAESTGSTESAISTVSKATDSSTQNPPTKVLTNPLLDSACRNPYRMNFNFFTSVSAKPESGTQLSVLANTAGAEFCGTQISGIANIAAKDMNGTQIASTLNIAAERFNGAQISTINMMNSGNAIQAGVVNIAKDAGYLQAGNINVAKGDAGYLQAGVFNIAGRVGYVPPGVFNIAGRVGYVQPRRLLYRPKRRLSSDKSDKHRRR

SEQ ID NO: 84361 - protein, 65 aa, Unknown
  Obtained from environmental sample
  misc_feature (1)..(65): Xaa is any amino acid
VYKPVTDSGEVRNYLSAAPAVALDFETAPDELYRNEEKAALDPHKAHIAGVSFSTGEGSGISRPI

SEQ ID NO: 84362 - protein, 284 aa, Unknown
  Obtained from environmental sample
  DOMAIN (2)...(281): Polyphosphate kinase
  misc_feature (1)..(284): Xaa is any amino acid
EGQNSARVPIIRALEQASLAGKHVTAVVELKARFDEGRNISWANRLEKAGVIVVYGLARLKIHAKITLVMRREYNRIKRYVHLSTGNYNDKTAKLYEDISLFTAREDIAFDAGLLFNMITGYSSVQAMNRLVIAPTALKRKLLELITREINRSSMEAPGRIMAKMNALADPEIINALYRASQAGVKVLLNVRGICTLVPGIKGLSENIRVVSIIDHYLEHSRIYYFSNGGAEELYLASADLMTRNLDRRVELMFPVLSEDLRRTIIEGLSSYFKDNTQALAFGF

SEQ ID NO: 84363 - protein, 281 aa, Unknown
  Obtained from environmental sample
  DOMAIN (3)...(273): Histidinol dehydrogenase
  misc_feature (1)..(281): Xaa is any amino acid
MLVYKNGGHRLFEEDEETAAVVSRMLLDLEKNGMDAVRKYSEKFDAWSPASFELSGAEIHKAVASLERQIIEDTDFCQKNVREFANKQKETMLPLETETMPGVILGHKHIPVNSVGSYIPGGRYPMFGSAQMSIIPAKVAGVKNITACTPPVKGEGFYPATINAMKKAGADRLFIVGGVPAFALMAFGMGVVEPADILCGAGNKFVAEAKRQLYGRCGVDLLAGPTEILVIADDEADPDIVACDLLGQAEHDPNSGICLICFSKNSPAPVRKDLRRSSRCF

SEQ ID NO: 84364 - protein, 327 aa, Unknown
  Obtained from environmental sample
  DOMAIN (1)...(326): Urocanase
  misc_feature (1)..(327): Xaa is any amino acid
EDAGEDETLLIQSGKPVGAWKSTPDSPRVLIANSNLVPKWANWEHFNELDRRGLFMYGQMTAGSWIYIGTQGIVQGTFETFAEAGRQHFGGDLGGRWILTAGLGGMGGAQPLAATFAGAVSLCVECQQASIDFRLRTRYVDVQAKDLDHAIELVKAHTAKRDAVSIALLGNAAEVLPRLVERVKAGSVGIPDIVTDQTSAHDLVHGYLPVGWSVEQWKDAQLDMARHAEIAREAGKSCALHVRAMLDFKAMGSKVVDYGNNIRQVAKDNGVSDAFDFPGFVPAYIRPLFCEGKGPFRWVALSGDPEDIYKTDAKLKELSPTRPNLTL

SEQ ID NO: 84365 - protein, 253 aa, Unknown
  Obtained from environmental sample
  DOMAIN (28)...(224): SPFH domain / Band 7 family
  misc_feature (1)..(253): Xaa is any amino acid
MYTFNAYAVAVVALVILVFTTMMFLASRYKRCPSDKILVVFGKVGAGQSAKCIHGGGVLVWPLIQDYSYMSLRPMTISIPLQKALSMQNIRINVPSTFTVGISTEQEIMTSAAERLLNLSGTNIEEMAKEIIFGQLRLTVASLTIEQINQDRESFLSSIRKNVEPELKKIGLYLINVNITDITDESGYIDSIGKKAAAEAINQAKIDVAEQEKFGAIGQAEALKVKEIRVAENTAGIREGSEEGRGRQARLRE

SEQ ID NO: 84366 - protein, 162 aa, Unknown
  Obtained from environmental sample
  DOMAIN (36)...(140): ATP synthase alpha/beta chain, C terminal domain
  misc_feature (1)..(162): Xaa is any amino acid
SLGGAMIRSARGIRPAIDVGLSVSRVGGSAQFKAIRKIAGRLRLDLAQYREMAAFAQFGSDLDKATQTKLAQGERLMEVLKQAQFNPYSTSDQYVILFIAVNGHLMDVETKNIAEFIKGFLDHLAINNQAILDNLNNSGESNVDTDQIIIEALESYKHMNQE

SEQ ID NO: 84367 - protein, 225 aa, Unknown
  Obtained from environmental sample
  misc_feature (1)..(225): Xaa is any amino acid
LILPSQYYEESLYPLQDGVMNILQHSGTNFFLTGGTALSRAYYNHRYSDDLDFFVNDDNDISEQIKEVYFKLKEDNFFWNSKVDFISNKNFTSFKVGWDKSDTLLKLDFVNDVASHFGDIDRTELFVRTDSIRNMLSNKLTALFRFAAKDVVDIREIALHEKVDWQQTINDARQKEAGLEIPIICDILQGMPQSELETIAWTKKPSWQEFRGDIDRIVHAMISGD

SEQ ID NO: 84368 - protein, 284 aa, Unknown
  Obtained from environmental sample
  DOMAIN (108)...(273): Integral membrane protein DUF6
  misc_feature (1)..(284): Xaa is any amino acid
IIAVVGEKSPSSFSFPYLLQTSFITGSCLFFAVILQQIGLIFTTAGNAGFITGLYVVITPIVGIFLGRKTGLPTWVGSVLTLTGLYFVSAAGRPSVNPGDLITIVSAFLWTVHVLLIDRFMHVDIQRKNSVDPIELSAGQFAVCGVLMLLGAFIAEPHVIPVIEKINPSLLDNGLFEWKPLPALITAVKNGTLRISFQSFIPILYGGLCSVGIAYTLQVVAQRDAPPAHAVIILSFEGCFAALGGVLLLSEKIGLWTLLGFVLMLAGMLATQWDVIVKTNRVNS

SEQ ID NO: 84369 - protein, 330 aa, Unknown
  Obtained from environmental sample
  DOMAIN (101)...(303): Adenylate and Guanylate cyclase catalytic domain
  misc_feature (1)..(330): Xaa is any amino acid
VVAVILLTLFSHRISISVGGIIFLTVIIIVGSFGAYHWSGLWLPMITFIAGILASFITATLYNYATEGSQKRFIKSAFSQYLSPKVIDQIIQDPSQLKLGGEKREMTAIFTDVRAFSTISEALGDPAKLVELLNFYLTRMSNIVLDNQGTIDKYEGDAIIAFFGAPVHMANHAALACRAAIMMKRTEREVNRDALSGGLITRKVMEALAGKGATKSVDDPYPLFTRLGINTGDMVVGNMGTPNKMDYTIMGNAVNLAARLEGVKQAVQHGRNSDKRIYPPAYRGRIYIKAVKQGAGCRYQYAASALRTSGHCKRSAAGFAQHGKKLGNGF

SEQ ID NO: 84370 - protein, 426 aa, Unknown
  Obtained from environmental sample
  DOMAIN (240)...(299): TGS domain
  misc_feature (1)..(426): Xaa is any amino acid
LEPAKIKAIATETLDIYSPLALRLGMAKIKCELEDLAFKHLHPEEYKEIVSKVVASRVEREAVIEAFSGPLRESLNADGINATITGRPKHFFSIYNKMKKRGKPYEEIYDVLAIRIIVNTVRECYCALGIIHSLWVPVQDRFKDYISSPKSNGYRSLHTTVAGGHGNVIEMQIRTWEMNKTAEEGVAAHWLYKNGERVAEIGEDDKALAWLRNIIEWQEHLTDSAEFYEFFKADLFDTEVFVFTPKGNLITLPKGATVLDFAFAVHTQLGIHCIGAKVNGQVEPIGTELTSGQTVEILHLHTKTPSADMLSYARTPKARSAIHHWLRTAERKESIDLGKKIIDRAYEQLGAHTPFGDHVPELLLHLGIGNVERLYELVGRGDLTESRVMRYFQVRKIKRRNVPSKMMSDIVKTITGQRPHSANLSM

SEQ ID NO: 84371 - protein, 328 aa, Unknown
  Obtained from environmental sample
  DOMAIN (77)...(322): Iron only hydrogenase large subunit, C-terminal domain
  misc_feature (1)..(328): Xaa is any amino acid
NLTDRPREMGNVAALAPVIRIDEEKCINCYACITACPVKYCMDGSGKRLIINKDLCIGCGNCIYVCSHGARKIIDDTKQFFEDLKRGLKIITVVAPAVASVFPGRHLNLNGYFKSIGVKESFDVSLGAELTVISYLDIIKQKNPKLVISQPCPAIVSFIELYHPELLPFLASADSPMLHTIKLVKEYYHQYDNCRVAVISPCIAKKREFEETRLGDYNVTMLALKEYLEEQKIRLSDYPADEYMGLLAERGVMFPTPGGLLDTAERFVPGIRRNTRKIEGVHTIYPYLREISEEMHNSETVFPLLVDCLNCEKSCIGGPGTGNSHKGL

SEQ ID NO: 84372 - protein, 216 aa, Unknown
  Obtained from environmental sample
  DOMAIN (4)...(178): Baseplate J-like protein
  misc_feature (1)..(216): Xaa is any amino acid
VYGRAQARAFACVVKIAGIESKATVIGDGIIGGADAESDEEYLARVLLWLRNPVRYGKTGHFAAWARDASPEVFNAWEYKNFGVFGSLLIQVINGSQLSGVFPVDNIAEVTNYINEVAPPIIFTVRTPEIIDLNPTASLLPLEDNHENRELAISRMKAFLQLVAMPGAQVTAGALRSAVIDGVAITDAAVKLNGDAAGIVGTTILQYPYLGEVSWE

SEQ ID NO: 84373 - protein, 208 aa, Unknown
  Obtained from environmental sample
  DOMAIN (38)...(115): Bacterial Ig-like domain (group 2)
  misc_feature (1)..(208): Xaa is any amino acid
MRPLIHALTKFFAALLVIALPFVSCSGGGGNDNGRVVNVTGVMLDRNTLELGVNEETKLIHTVIPSNATNQSVTWLSDNTGVATVTNGRVFGAGVGEARITVTTENGGYQAQCDVYVSNIPVQSVSLTPSSLTLIVGNTSTPAPNFYPANASNKNVSWTSSSPSVASVEGNGVVRAVSPSAATITVTTQDGGKQGTCAVAVLNESEAV

SEQ ID NO: 84374 - protein, 316 aa, Unknown
  Obtained from environmental sample
  misc_feature (1)..(316): Xaa is any amino acid
MNYRTKRGSWLYDGLCESDSLSYYKTYGRAFDKKYGRVYDWKRAKKVCPAGWKLPDTADWNMLVKTVGGKLAAKKLKAKNGWNNWEEGSDTNGTDDYGFSALPGGGCVPNGYFEIMDDFGRWWTATKYTNIPEADEWRRMNNFAYFRGMNEFDYIIKPTVGGYSYRDEITERIDEMSIGYSVRCIQKNRTERRDNIRKRVRTTAANRLDKRSPITYDTLTDKRDGKTYKTIAIGGKRWMAENLNYETDSSWCYNDTLSYCETYGRLYTWDAAKTACPAGYHLPSREEWDNLAKSVSGMFFPLDGDLHHWGLGGVEI

SEQ ID NO: 84375 - protein, 93 aa, Unknown
  Obtained from environmental sample
  misc_feature (1)..(93): Xaa is any amino acid
VLDLAARAGAWYVYQAIYDTSDYIKERVKRYHDHGIGVEGTILLGLDNQTEDDIKRLIDFLLQIKLDLAEFTVMTPFPPHQSLGRPCAAGAHF

SEQ ID NO: 84376 - protein, 92 aa, Unknown
  Obtained from environmental sample
  misc_feature (1)..(92): Xaa is any amino acid
MSALTDLIYKGANAVAGLTEEAVKKAIEKYGADKKISFPDTAYFFPTILSATGVKVDKLGVLNACVGVLKGLITNKEGSGDALTQGCPRGRR

SEQ ID NO: 84377 - protein, 431 aa, Unknown
  Obtained from environmental sample
  DOMAIN (6)...(118): Response regulator receiver domain
  misc_feature (1)..(431): Xaa is any amino acid
MFDVSKKILWVDDEIEFFRSHVVFLETRGYSVTTAADGDTAVRLVEENPAAYDLVLLDKQMPGKSGNATLEEIKVIRPNLPVVMLTGYQHSAEIAMGKRYEAYLTKPIDPGKLLIACQQILDAGQGASRKLADRYLRAYTDLSARASGTLGASDWMGLYHSLVKWDIELDGITSDAVSRMHTGLKSDCGKRFCDFAAENYTDWVRGGRDRPPMHVDVLGKVVAPELSLGHGVLMIVLNGMRLDQFLCMEPELKRNFSVSGIKLMSLLPSISNFSIAALASGYYPDEAAEAEPGIFEAEHPDPIVMKRLMRRGLERVGIGKMRTLYTSADGPNGRRHVRSAIEAMERAQTFGVVAIDIVEKVIGAESAARHVKSPVADEAEFRRRVELEFAGSTVLGVMKEVCSEARTVVLGLRTRPRSMPPRQRGVRNDHV

SEQ ID NO: 84378 - protein, 106 aa, Unknown
  Obtained from environmental sample
  misc_feature (1)..(106): Xaa is any amino acid
MEKSAVIERAKDYIAREKDANFRAEVEKLLEKEDFKELEDRFYRDLEFGTGGLRGVIGGGYNRMNTLVVKSATQGLASYLIKAFPEKAASGGLKAVSLSRPNLYMG

SEQ ID NO: 84379 - protein, 86 aa, Unknown
  Obtained from environmental sample
  DOMAIN (3)...(84): Bacitracin resistance protein BacA
  misc_feature (1)..(86): Xaa is any amino acid
MLEAIIIGLVEGITEFLPISSTGHMLIAENLLGKQYSDAFNVLIQVGPILAAALVFWRDIDGFIVNWGKKKSKICFKIFAALFSRG

SEQ ID NO: 84380 - protein, 322 aa, Unknown
  Obtained from environmental sample
  misc_feature (1)..(322): Xaa is any amino acid
ETTGDDSRRFSLIAETLAAVPRHGAINLYQAIQSFLLLWQVMCLEQTPNPYAFSVGNADRIFEPYRAMENTSREDAANLFKHFLVFFNIGSRSWAISQNVIVGGKDLSDKDLTNHTTYALLDAYYEMNLPQPILSVKLHRNTPETFYRELGRFFFTPGCLTPSLFNDDSLFKVLEASGIEKNDLPDYSVAGCQEPLIMGKDNGNTTNSWLNLGKILELSLNDGVSLISGKQILPSFGTQSPEERLRSIRENFYKNTEICMKEMADAANEASRAIALLPVPFISTFMGGRETGYDMRDPVHQGTRYNSSGFYSRLSERYSRDN

SEQ ID NO: 84381 - protein, 308 aa, Unknown
  Obtained from environmental sample
  misc_feature (1)..(308): Xaa is any amino acid
RESGRGRTDFAGETDVAIKDGKIARIAPDIDAADARELFALDGMTVTPGIIDPHVHVSAWLGGGIGHTMMARAGVTTALDMSGPGESVYDLVHSRGAGLNIATIEYVRPGHTVSSADPGDQEIAALLKKVLQQGSLGVKMLGGHYPLTPEATRRCIKMAAQHDAYIAFHAGTTNKGSSIEGFLEAVEIADGLPLHLAHINAYCRGLDKPPVEETEIAVKTLTDNPNILSESYLSPFNGTSAEIIDGAPGSNVTKRCLLTGGFTPDEKGMEEAILAGWAHVNYPYAGETLLITGKEAVAHWRSKAPTPP

SEQ ID NO: 84382 - protein, 96 aa, Unknown
  Obtained from environmental sample
  misc_feature (1)..(96): Xaa is any amino acid
MTTAQFPRCAACPFKANERLCWRAGGKHPEGCPSVAQAGILDACLEKVQNDPALLRFSQESAWTEGEGYAKQGQHAKTRHGLALWRSSSSAGAWAT

SEQ ID NO: 84383 - protein, 165 aa, Unknown
  Obtained from environmental sample
  DOMAIN (3)...(78): RNA 2'-O ribose methyltransferase substrate binding
  misc_feature (1)..(165): Xaa is any amino acid
MNYITGFHSIEERIKAGKNTGLACGPLLVAKAGPRAREIVTLAVDSKVRVDRVGVFELDRLAPDNRGIALQVEDVFQDNAILSLDDFLNGLEDRADALALILDEITDPHNYGAILRSCDQFGVDIVISRNRRNAKHARYISKTSARRYPGFRTRMSRILCAPQAQ

SEQ ID NO: 84384 - protein, 384 aa, Unknown
  Obtained from environmental sample
  DOMAIN (1)...(384): Carbohydrate phosphorylase
  misc_feature (1)..(384): Xaa is any amino acid
LVSAVIQDIIRRHKQNGNNIADLGAKTAIHLNGSRCALAIPEMMRILVDREGMEWKEAWKMTQSIFSYSSSAVHREHVETWPVYKITQLLPRVMQVIFDINLEHLDLVRARGCNDLDTLRNLSLIEEGEVKRIRFADMAVLGSNSVSGMSMEHTEMLKKHLFSSYYNQYPDKFNCKTSGVSHRRWLYCANRPLAALISRPIGDGWVRRPEEISKLEFHATSPEILRGFGNVKSRAKSELCAVLREKLGVAMDPSMLFDVHCRPIHTSKRQVLHILYILHSYLKIKKGGGLDCRRTHIFAGKASPSDFLAKQIVHLINITAGIVNGDAAAREQMRVVFIPQFQRRLGGGVWLPPPDLSETDIHGPLSRRSGTFNMKFAFNGAPNE

SEQ ID NO: 84385 - protein, 129 aa, Unknown
  Obtained from environmental sample
  misc_feature (1)..(129): Xaa is any amino acid
GGWAASVLKINTDTLAGCAVYTGQFIEVDDVERIRHDAPFKDDRSFVCSPDYHCKSVLTMPLINLDDEVVGVLQLINRKSDRSVTLTSADQVKAYACPFSTDDIGVIRFLSRYAALSIDRISLYNSADI

SEQ ID NO: 84386 - protein, 344 aa, Unknown
  Obtained from environmental sample
  misc_feature (1)..(344): Xaa is any amino acid
NAFSGAKSLISVTFNSTILSGNFSDDVSFNGDLRAKYLQGGTGTYTTRAPVSSSSVWTKDGGSSGGGGTADVYVAGTDYDNTTYHTIASFWKNGTQQILSYTSSSANSVYVSGNDVYVVGRVRNDSNSGDIATLWKNGTAQTLITSASSASASSVFVSGSDVYVAGQVFNSGSGYRATLWKNGTAQTLSASFSSYANSVYVSGSDVYVSGYACSGGDGSSIPENARATLWKNGTAQTLYSSASVAYSVYISGSDVYVAGIVGSGGTDAKATLWKNGIAQTLSNEFSTTNSVYVSGTDVYVVGGTKDAGYDNLTNPTLWKNGVAQKLNTSSSGAYSVLFRYLGHH

SEQ ID NO: 84387 - protein, 313 aa, Unknown
  Obtained from environmental sample
  DOMAIN (1)...(266): AMP-binding enzyme
  misc_feature (1)..(313): Xaa is any amino acid
FIASCGQDAADEKPPTINADATKILMYTSGTTGKPKVVIQRLTEFENDNRFILSKWGDEWLSRKVCATVSQHHIFGLLFNILLPFTAGVPFRRRRIETPEELENLRDTSYMLITVPAFLKRVAELKALEGGDWGLKNVWIYTSGGVLERDLAEKTHNFLGFWPLEVYGSTETSGIAWRISRNGLEWTPFDNATVWLNEEGCLVIRSPYIKAPEGFTTGDLAQILPDGRFLLKGRADSIVKIEQKRVSLAEVENRLLQSGLVRDVCVIAMDDRRQYLAAALVLNDRGQEQFRGCEKHEINRWFRDCLSRFLEPV

SEQ ID NO: 84388 - protein, 187 aa, Unknown
  Obtained from environmental sample
  misc_feature (1)..(187): Xaa is any amino acid
EKAAAFFAGLQKASELGLTHALQIDADGQHDAGRAGFFLEESAIHPDDMICSYPVYDDTVPASRRHGRIVANTWAKIVTLSPHIKESMLGFRVYPVKPVLSLYGNSRIDSRMGFDIEILVRLVWKNTPLIFQPVGVTYPADGISHFRPVRDNIRISWLFTRLCCGMIIRLPILLSRVIRHKHEKDRP

SEQ ID NO: 84389 - protein, 337 aa, Unknown
  Obtained from environmental sample
  DOMAIN (21)...(337): Serine hydroxymethyltransferase
  misc_feature (1)..(337): Xaa is any amino acid
IGSESARDAGMLAYICNLTEIAKVTPEIASSIVLELENQRKRVKLIASENYCSMAVQLAMGNLLTDKYAEGVPNHRFYAGNENVDAIETLAAQEACKLFGAQYANVQPHCGADANLLAYWAILSTRIENPALEKYGETNLYKLTDSQWNELRATFGNQRLLGLDYYSGGHLTHGYRHNLSGRMFDIYGYSVSAKDGMLDYDEIEKQAMQVRPLILLTGYSAYPRKINFKRMREIADKVGAVFMVDMAHFAGLVAGKVFTGEYDPVPWAHVVTSTTHKTLRGPRAGIVLSTSEFCETLDKGCPLTMGRTITRTLLPQKAGRPGPKPPLPKFKQLRAKN

SEQ ID NO: 84390 - protein, 145 aa, Unknown
  Obtained from environmental sample
  DOMAIN (1)...(143): Thiazole biosynthesis protein ThiG
  misc_feature (1)..(145): Xaa is any amino acid
MLQISNKTFSSRLFLGSGKFASPQEMVVALQESQSEMLTVALKRIGKNQKDDSILSALKDFKGQILPNTSGARTAKEAVFAAQMAREALGTNWVKLEIHPDQKYLLPESIETLNAAAELAKTALWFLHTFTQTLFRAKTGRLPLC

SEQ ID NO: 84391 - protein, 97 aa, Unknown
  Obtained from environmental sample
  misc_feature (1)..(97): Xaa is any amino acid
MTNGDGLIWLIGSKGMLGTELSLLLEKSGLSFVGTDREVDITDMAELNAARAKLAEQLPVKWIINCAAYTAVDKAEDDVETCRSLNKQERQISPHCG

SEQ ID NO: 84392 - protein, 209 aa, Unknown
  Obtained from environmental sample
  misc_feature (1)..(209): Xaa is any amino acid
NAATQRGYLKCSNNNNARAAATLTWNGNPRAPITTSNTWASAGSYTGITVSVTGATCGTVTGVSGSNIACGNITIQAASSSSVAPSSSSAPPPSSSSVAPSSSSSAGATCTDLDLSTSKTVISGKCYKITKINNGGQNGNSDCGEIKLDCAGDYDGGNCNKDCVVNDVTYKCNSSNNVIGVGINLLNTNLTTSGTNTKSWNIFCSYKAN

SEQ ID NO: 84393 - protein, 247 aa, Unknown
  Obtained from environmental sample
  DOMAIN (15)...(242): Aminotransferase class-III
  misc_feature (1)..(247): Xaa is any amino acid
MTDVFMKNFHRLPVTFAKGEGVWLFDTEGNKYLDLSSGIAVNSLGHGYAPLVKAIAEQAAKCNHVCNYYQNDTSLRFAQKLVAACAPGGMKNLFLGNSGAEANEAACKIARKYSLKKYGPGRHTIVTLQGSFHGRTITMLAATGQDSFHKDFGPFTEGFVYIPGNDVEALEKALDAKPWPDCLLRPCRAKAASGPSPRNLLKRRRGSAPSGTYSSCLTKSSAVLAGQGHSSPLNNTAITANPSKPIW

SEQ ID NO: 84394 - protein, 310 aa, Unknown
  Obtained from environmental sample
  DOMAIN (36)...(234): Electron transfer flavoprotein domain
  misc_feature (1)..(310): Xaa is any amino acid
ALWTGISSRRLNRECYRSGKQVPDTQNISGEAMTPEGTVNRAALPAIFNPDDLYALEAALQIKDANPDTKVTVITMGPPSASAVLKECLYRGADFTALVSDRGFAGADTLATSYALKCAIKKAGAFDLVLCGRQAIDGDTAQVGPQTAEKLGVNQITCVSKIEALDAAKKEIIAVRSIEGGWERVKAKLPVLVTFNAEGEMPRPASAIKSMTYKRAVPVSDAGSPSNPAGFVEKTDAEENGAANPMALWNIPAINADPLQCGLAGSPTKVKHINSVVLTAADIRYIDPGEAGICGADPRPHSGSYFRFGG

SEQ ID NO: 84395 - protein, 63 aa, Unknown
  Obtained from environmental sample
  misc_feature (1)..(63): Xaa is any amino acid
FIAEFSDAEIYGIIRSDLESRGEPISPYDMQLAAQALARDLILVSNNTGEFKRIKKLKLENWV

SEQ ID NO: 84396 - protein, 146 aa, Unknown
  Obtained from environmental sample
  misc_feature (1)..(146): Xaa is any amino acid
LDWYPLWNSVRIAAISCVIVFFLGIFAAYYIARLPRLVKGVLDVILTLPLVLPPTVMGYLLLLLFGVKRPLGGFFLQFGIKFVMTWYGGIITAAVAAFPLMYRTARGAFESLMTHWPMPVKRWAFRILIFLGVSVCRTAVRGYWPE

SEQ ID NO: 84397 - protein, 106 aa, Unknown
  Obtained from environmental sample
  misc_feature (1)..(106): Xaa is any amino acid
LAYAGQTLGLPNSYIFGRIRMPYCRQGILAGVVLGFARAMGEYGATSMLIGYTPGKTATISTTVYQMWRTGNDPGAFRWVLINILISMAVLLGVNLLERKNNKAVR

SEQ ID NO: 84398 - protein, 384 aa, Unknown
  Obtained from environmental sample
  DOMAIN (111)...(204): PPIC-type PPIASE domain
  misc_feature (1)..(384): Xaa is any amino acid
FDTTKYIQWLNTPQTYSMYPWMVDVERQVGGQVMPGQKLDALLKAGIFVSKAEAAYEFAQRNDKATFEYYKIQSRDHRNDSAAVTDKMISDYYAANQNRFRRDEQADLYFVKIPKIATEADLELNKNSLIDIKKKVLEGDSKFEDEAEFESDDEGSRSNGGDLGWFGKGAMVPEFEAAAFALQPGEISDPVKTAFGYHIIKLEEKGEPDSATGEYRIRARHILRKDEPSGETLDALSAKAEQVKMAVTSKGFTAAAAEGLSVSVDSTGFFKRGDMPAKIGYLSGAGQFAFNRKAGEVSDVLENQDAYYVLGLKEKAKKGLQPLSVVRDQIVEALRDTLAMKEAKVYAGQVLEKVKGGSTLQDVQNSDKKIVAGTAEDQTPGGYI

SEQ ID NO: 84399 - protein, 38 aa, Unknown
  Obtained from environmental sample
  misc_feature (1)..(38): Xaa is any amino acid
MQRLGREVWAINTVSFSNHTGYGAWKGKFWAENLPKNW

SEQ ID NO: 84400 - protein, 367 aa, Unknown
  Obtained from environmental sample
  DOMAIN (215)...(360): Glycosyl hydrolases family 2, sugar binding domain
  misc_feature (1)..(367): Xaa is any amino acid
MGQLAISPLFNNGMILQHGISVPVSGESSPMAMITLSFRGKTYKARADNGGKWLVLLDSVSPGGPYSMEISTETDAISIKDIYAGDVWLCSGQSNMELPMRRVKDDFPREWDRPNPLIRQFNVTQEWDFSGPRQRLSGGRWTAASADTLNEFSATAWFFARQIFNTYNYPIGIILAAWGGTPAEAWMSADALAVFPEKIALGKKFADAAFCDSFISEKQALIETWNNELTAADSGFAWQKPETDISAWNEIQLPGDFAQTGLASKNCLNNFCGVIWLCREFEVNDSFAMAAEKGRAKIWLGTITDADTVYINGVEVGNTTYRYPPRKYAIPAGALRKGKNRIVIRVICCNGDGGITHGKPSRAESDL

SEQ ID NO: 84401 - protein, 129 aa, Unknown
  Obtained from environmental sample
  misc_feature (1)..(129): Xaa is any amino acid
MTGVINYGAGNLGSVMNALKRLSAPARFVSDVEELALGSTPFERLIFPGDGHFATAMASLVKSGYDKAIKEWIQADRPFLGICIGLQLLFESSEEAPPVDGVETRGLSVIPGTVRRFPGRKLPQISAIK

SEQ ID NO: 84402 - protein, 106 aa, Unknown
  Obtained from environmental sample
  misc_feature (1)..(106): Xaa is any amino acid
MKISDILNTGKITVSCELFPPKHGSGLAGAQNIVRETASLRPSFISITYGAGGGTSDYTENLAVEAHKHGINALAHLTCISSDRQTIKDVLSKLAADKIEISCPKG

SEQ ID NO: 84403 - protein, 154 aa, Unknown
  Obtained from environmental sample
  misc_feature (1)..(154): Xaa is any amino acid
MPLFNKHVLDKHTKHIHINEGHIETLKKWAENLSAGVYDVETQSDSEFIQQILIGVLGYTGSSGGKQWTLAKNQPIGLGNADVVLGCFTQDSAAIVAPFELKGAKTRDLDAAIPTRDAKGHMRYRSPVQQAWEYAMDAKGTKWVRCLVQSVMGT

SEQ ID NO: 84404 - protein, 104 aa, Unknown
  Obtained from environmental sample
  DOMAIN (1)...(99): Aconitase C-terminal domain
  misc_feature (1)..(104): Xaa is any amino acid
MKIFGGEVLFLDRNDINTDEIIPAKYLTEDTRIALKPHLLEDLKIKGFDPLRDISGKGAVLTRANFGCGSSREHAPWALEANGITSLSLKVLPVSSVRICTTAA

SEQ ID NO: 84405 - protein, 288 aa, Unknown
  Obtained from environmental sample
  misc_feature (1)..(288): Xaa is any amino acid
KEGTDWPRIEFFYGGTSQIQARIATEQGTGRLGCDILLVAEPSYSLELKKKGLLHRHISAEAGNLAFGCDKEGYWHPVRVSAMVLAYNPQKNAANSVPHSFFDFANNSGLRGAVSMGNPLVSGAAMAAATALKDKYGYDYFEALGKQDISIESSSTALTKLEAGEYKAIMVLEESVLKKRQEESSVLEIIYPMDGAVIIPSVIMIIAGKWSANNNTKSAEIITDWFLSPQGQDAIVAGQMHSVRKDYKNPHGSVPTGRIQALPLNWEDAFRQREDIQVKFEELVISRR

SEQ ID NO: 84406 - protein, 330 aa, Unknown
  Obtained from environmental sample
  misc_feature (1)..(330): Xaa is any amino acid
LPRLVRLCDALVVFDNKIIIISVKDIKYKETEKIEIGWDRWNKTAIQKSIKQLKGAKRFLDDSNTVRSQDGRVTIQLPEKNDRIYFFLTISLGSQREVPVILPENEVIHFLDEYNLDILFSELDTVSDFIEYLQKKEDFLKKSKKIIGSEEDILAFYLHQNRVFPENADLLIFGDDLWKEVSNKKEYKIKKRIDKISIFWDSLIEEFINLRDPSIVKIPGYFDPTNKNIEFALRTLAKENRFSRRILSQTFFDFYNHPKIVSRIVESINGIIYVFLKAPISVERRVRIAELSLRCYIAKSKKLDKNIFIGFSTEDDISIGHSSDLVYRGF

SEQ ID NO: 84407 - protein, 345 aa, Unknown
  Obtained from environmental sample
  misc_feature (1)..(345): Xaa is any amino acid
MRVFLSVYPGFTLAIPMDAVASMMLYNQETEKIVQYDPKSRCTFISLPWLFNMRDLEVPHGVIMREWNSKENKVVLLTAEVKSVIEIPDEEFSSIPKALGDLRFSKIFSGIKFSDNPVLLLNVDQLLQIIQNDRWVLDKKTSPPEQPVPTAASEPSPPAASKVIEEPPVSPAVTSEPSPPATSEIIEEPATSPAMTSEPSSPATSEIIEEPATSLAMTSEPSPSVASEVIEEPPVSPAVTSEPSPPATSEVTEEPATSPAMISEPSPTVTNEVIEVCEVVEVCEVVEEPPTSPTEISEPSSLKLEPQPSPQGEGTPLEPHPSLEPSVREHRKVSPLDEVLEVVKL

SEQ ID NO: 84408 - protein, 277 aa, Unknown
  Obtained from environmental sample
  DOMAIN (1)...(276): Glycosyl hydrolase family 10
  misc_feature (1)..(277): Xaa is any amino acid
IIARRRNTLLWHSQIPGWQQNISSATALEDMKKYITDVVGHFKGKIYSWDVLNEAFPDGGYSAGSDWKKVMRSNNPWYNALGSDFVYAGFLAARLADPDAILYYNDYNTDQTAKATMIRDMVRDVNQKYLASADKPAGEPANRLLIEGIGMQEHHNTGVSANAIRNALNLFKPLGVKISVSELDVLIVTYQEFAPYGHGTGKENSITGDKKTNGLKRQAELYGEYFKVYLDFSDIIERVSFWGVTDDKSWRSAALPLLFNPGGYAKEAYFSVFGETK

SEQ ID NO: 84409 - protein, 206 aa, Unknown
  Obtained from environmental sample
  DOMAIN (50)...(147): Methyltransferase domain
  misc_feature (1)..(206): Xaa is any amino acid
MDTNEIKEQFNSIAEEYDNRRRCFIPCFDDFYGRSVSLLRYFKNRFANIVDLGAGTGLLTKMVYDIYPEANYTLIDVSTDMLEVAKKRFGGLNNFTFAECDYAEDIPVENCDLVCSALSIHHLDNDDKRRLYGNIYSKLNKNGCFINLDQFIVKSQKINDMYDAWWYDYINNSGITEAEKGTWLERRKLDKENTLSETLEFIRNAG

SEQ ID NO: 84410 - protein, 336 aa, Unknown
  Obtained from environmental sample
  DOMAIN (56)...(215): ATPase family associated with various cellular activities (AAA)
  misc_feature (1)..(336): Xaa is any amino acid
MDDLFSSTAAPGSGGNQSPLADRMRPRVLEDIIGQDHIVGPGRLLRRAIQADRLSSLIFYGPPGTGKTSLARVIANTTRAAFESLNAVLSGVKNIREAIDRADERFRLYSKRTILFVDEVHRWNKAQQDALLPWVENGTVILVGATTENPFFEVNRALVSRSRIFQLKSLDAQGLMKTARNAITDVERGYGKWKISFEPGALEHLVEVSSGDARSLLNALELAIETSSWSLPEGETPKRTVEDGSHWPPEPGALIHISMEAAEESIQRRAVLYDRDGDYHFDTISAFIKSVRGSDPDAALYWMANMLRAGEDPSFIFRRMIIPASEDIGLAESHAL

SEQ ID NO: 84411 - protein, 198 aa, Unknown
  Obtained from environmental sample
  misc_feature (1)..(198): Xaa is any amino acid
MDRINKSIDGLMETYGKYGMVNHSGEASLPGRESIARIVRGLDELIFPGFRENQGLDHSNLKLITAEKVNHLARELIHEVEKSLAYSERVGALSCGQGGCHAASELIVEGFFDELPAIRHALSLDMQASFRGDPAAKSEDEVILSYPGFQAITVHRLAHYFWDAQVPLIPRMMSELVHGSTGMTFIRSENRRSFLAIT

SEQ ID NO: 84412 - protein, 303 aa, Unknown
  Obtained from environmental sample
  DOMAIN (116)...(157): Putative Ig domain
  misc_feature (1)..(303): Xaa is any amino acid
PGYRECTSGTIIGTVGDSYWKELEATGGAIEWSIVSGAVPTGLDLHYDGYVYGTLEGAGTFTFKVKAENVAGFDTATFVVTVVAPSIPTITTASLPNGKIDRHYSKYLEATGGGVEWSKTTGTLPPGLQLDDDGEIRGYPTTAGTYTFTVKATNTLGSVTKQFSIKIDPAELPVIVVSAVPNGTVGREYSQYLVTSSLEDDVIWSKSSGTLPPGLQLDGDGEIRGTPTTAGTYTFTVKATNTAGSATKELTMKINATLQVPTITTTTLPNGKKDEEYLQLINATELAEWSVVDGDLPPGSLSI

SEQ ID NO: 84413 - protein, 124 aa, Unknown
  Obtained from environmental sample
  DOMAIN (2)...(113): Response regulator receiver domain
  misc_feature (1)..(124): Xaa is any amino acid
MIRILIVEDQTMLRESLALVIGGQDDMEVAGTTDDASRAPEMCRELRPDLVLMDVVTKNNASGITYTAQIRAEFPKIKIVIMTGFAEITFIDEARKAGAHSYVYKNSGYDHYLSCRSDTWPPQW

SEQ ID NO: 84414 - protein, 104 aa, Unknown
  Obtained from environmental sample
  DOMAIN (1)...(99): CheR methyltransferase, SAM binding domain
  misc_feature (1)..(104): Xaa is any amino acid
GFAKYQIGTRERRLQIKPEIQAKIKFDYHNLKNDSQQRNLDVVFCRNVIIYFDDVAQTNVISRFWDSMASKSFLFIGHSESLFGMKTKFEFVKTEWATLYRKNL

SEQ ID NO: 84415 - protein, 330 aa, Unknown
  Obtained from environmental sample
  DOMAIN (4)...(65): 3' exoribonuclease family, domain 2
  misc_feature (1)..(330): Xaa is any amino acid
MDQIGRGVCQVDGELVVNPTYEQIEKSTMEIVVAGTKDGITMVEGGAKEVSEDLMIQALDKAHNMIKELCAFQEKLRELAGKPKLPLTVPTHVLENSDAIRSGAYPKLEKACFLATKQERHEAIKSIQAEFAAQYAAQLEDEKQKKLFNALFEDMQYNILRSSILNNGRRVDGRGTEDIRNITCEVEILARTHGSALFTRGETQALVVTTLGTVFDEQVFDDIEGDKREHFMLHYNFPPYSVGEVGRLGTGRREIGHGNLARRSLEAVVPSKEEFPYTVRVVSEDMESTAHRQWPRFAAELFSCSTPVCLLKASGGYRMGLITKAPAGWP

SEQ ID NO: 84416 - protein, 165 aa, Unknown
  Obtained from environmental sample
  DOMAIN (59)...(164): Region found in RelA / SpoT proteins
  misc_feature (1)..(165): Xaa is any amino acid
MKKTRNDAKTANNFSPPAQEAMHKEYEKYNEIRHNIVNEIKERIENLLKEFNSNPVVSGRIKNFSSYYGKYLRLLKSDVKDPIITDLLGIRIICPFIEDLSVIEEIIKNNFNILETERKGHYNFKEFGYESTHLLIKIPKDIITQHGKSRNRLNRNTDTHHLAGR

SEQ ID NO: 84417 - protein, 300 aa, Unknown
  Obtained from environmental sample
  misc_feature (1)..(300): Xaa is any amino acid
MSASARKSGVSVQVTEGTAQITKSDNGRAAGSREAPARNITSGERIVMDTAGREVFEKTVAVMRPVINARYLKSANSPIPVSFEWKRINFSPEEKLRLEVAMDRNFRQIFRVINGLENQARVTLDTGMWYWRLSFGNSVLSDGRITVADGAGLQLISPAMNSLFRYRDSLPLMNFQWSREEDASSYIIEISRSSDFSSLQIRSQVASANYSDSSLGAGTWYWRVRPVFPNVFSGESSFSQPAFFRIEQSASTPAGAERTSLEKNAMERNSLEEWFADAAPSKSEVPKDVPPELSLVPICP

SEQ ID NO: 84418 - protein, 221 aa, Unknown
  Obtained from environmental sample
  misc_feature (1)..(221): Xaa is any amino acid
MEKNNKRRAIDNIKFSIGKKLIMIISIMVIISLGSITALASWLIYEDLRINAEENNFETNRRSAAEAETTFANVRSNSRILIQTITAMGANSDAINEMANFFFTENPHIAALSFITQGKTERLIINRRFFSSGEIDEALAVSFFNGRRDALGRSIRGETLVLNAAPHFSRPILALFFPWQDAGACCVLFSSHNFDNNFGSGNNQSFMLIIRAMFFLPPDLS

SEQ ID NO: 84419 - protein, 71 aa, Unknown
  Obtained from environmental sample
  DOMAIN (31)...(69): Domain of unknown function (DUF1078)
  misc_feature (1)..(71): Xaa is any amino acid
MAEVLGEQSQIALETQNLIMKQLDELRQSVSGVNMDEELSNMIKYQHGYAAAARFISIINSMLDTIIHLGT

SEQ ID NO: 84420 - protein, 331 aa, Unknown
  Obtained from environmental sample
  DOMAIN (23)...(184): tRNA synthetase class II core domain (G, H, P, S and T)
  misc_feature (1)..(331): Xaa is any amino acid
MAVFIEPRILKGFRDFLPSQEIARLNLLEKIESSFRLYGFLPIDTPALEYSEILLGKGGGETEKQIYRFKDHGDRDVALRFDLTVPFARFLAEHRRNLLFPFKRYHIGKVWRGENAQRGRYREFTQCDFDIIGSDSPAADFEILLMIRATLLNLGVGVTIHINHRGLFNRFLAHIGQREKSVDVLRTVDKIAKVGYDETAAALAAITGDTNAKKILDFTAAVSGETFEETLNRITELSGGPSPESERLGLLRRFMNDALSDNGGGENGSFTLDPSITRGLDYYTGVVFETFITELPDIGSICSGGRYDNLAGLSQKAIPQSAGSLGRSVMS

SEQ ID NO: 84421 - protein, 173 aa, Unknown
  Obtained from environmental sample
  DOMAIN (5)...(159): YicC-like family, N-terminal region
  misc_feature (1)..(173): Xaa is any amino acid
MGKNMVSMTGYAYREKSGQDFSVSVEIKGCNGRYLEISVNLPPWLSTLETKIREKISSNCGRGKADVFIRIREHNTPVSISVNKNAAKAYYNAISEMARELGIKEKPALSTILGMESVLEIEKNRDDERYWREIEPLLNEAVQGFCEEREREGQHTQDDILSHLGAIESSLKK

SEQ ID NO: 84422 - protein, 162 aa, Unknown
  Obtained from environmental sample
  misc_feature (1)..(162): Xaa is any amino acid
VLVDRERLDNAQESLNREYQGSYMKAHRDAQTREFPLPERLLLNFKNLIESRKERRTISFLSIKSEARPGIRRINIPCEPSRSFFGNINYMKDEFAALHASGWQIAVAAESEVQAERIESMLVPHKSLSIIASPLSSGFSLPEIKLMVIQESEICGSRPICL

SEQ ID NO: 84423 - protein, 181 aa, Unknown
  Obtained from environmental sample
  misc_feature (1)..(181): Xaa is any amino acid
MREIANVEYFYDRCNSLLGTDYTSNDWGGEVNKKKAINIEWAVNAVNKVYQKIHQPKNGCRLLLSTRFNAGISRMAVNEEVVNSVVSYLSKLNKKCDNDCACATDRNCNCVCASHCNCKGATECKAKGNCSSSSNCNCNCVCTCSVCNCTGTYQCNCNCASTDCGSDTKSMDLGRFCTWET

SEQ ID NO: 84424 - protein, 315 aa, Unknown
  Obtained from environmental sample
  misc_feature (1)..(315): Xaa is any amino acid
MLLAKIYSARPGRYFALIPQEIDAAELAADLASLEVPGLQFPGWGVAPYRELAPLSAVFGERIRVLSDLVTARPGIVIISQRAFLSPLPPPDYIKSLLISVKPGAKIDLTELSRKLVSYGYIRVPRVQVRGEFALRGEILDIFMGGDESGAEDEVEAFRVLFDFDRVESVKRFNPSTQGGGLGKDKIVELLIRPMRELVWTDDRIETLSANLAACKEFTDGGKAIIEELITHRNFAGEEMFYPLAINKGNSIPEYLGSEGTLVSIDRGRLDHAHESINRDYHGLYMRSRRDGEEPRIPFARTVTGEFPRSYPKPT

SEQ ID NO: 84425 - protein, 320 aa, Unknown
  Obtained from environmental sample
  DOMAIN (79)...(307): Binding-protein-dependent transport system inner membrane component
  misc_feature (1)..(320): Xaa is any amino acid
NNYSDKKDENTCKIQMVFFAAAFLILITIFAYLPLAGWRYAFFNYRPGLPLKLADFAGFKWFQSIISSQARRSEVVRVMKNTLAMSGLGILTSWIPVLFAILLTEFKNERYKKIVQTLTTVPNFISWVMVYSFAFMLFSVDAGLVNRLLIDLGLIEKGVNFLLSGNHIWLKMTAWGIWKGLGWGAIIYLAAIAGIDQELYEAATIDGAGRWGQIWHITVPGLLPTYFVLLMLSIANLINNGMDQYFVFRNAFNQETVEVLDLYVYYVGFGKGSTSGIPFATVISMLKSIISVILLFSVNGLSRLLRKESMSRADLIIGKT

SEQ ID NO: 84426 - protein, 97 aa, Unknown
  Obtained from environmental sample
  DOMAIN (4)...(90): ThiS family
  misc_feature (1)..(97): Xaa is any amino acid
MIKVLIPYALRAFTGRNAEVEVETGTAGEAINALADAYPALKTHLFTEDGQLRDFINLFVGGANINSLQGLNTPVADNGEVMIVPAIAGGDYMLGRI

SEQ ID NO: 84427 - protein, 298 aa, Unknown
  Obtained from environmental sample
  DOMAIN (125)...(213): Hpt domain
  misc_feature (1)..(298): Xaa is any amino acid
KEKSKDQIRHEIALTANAVMGMREMFIKNGFNDFLSKPIDVSKLDEMLNKWIPKDKREAGAGNSPTKLAQEQGTLRQAQEPNPEPRSRYPVIHSSEPCTPIPIIPGIDTAKGIVMTGGTVAAYTKVLSLLCKDIEERLPFLRKALDENLPLEDILPAFVTQVHALKSALASIGAQSISSLAAGLEAVGKAGDIDFIRESLPDFLGQLTALGKNIGDALEQGKPEYQDDPRSPFPVPAPTLLASSLLKELAEALKSQKISEIKRILNTLNQQAQDSRLREILEQISDQVLMTEFDRAVE

SEQ ID NO: 84428 - protein, 151 aa, Unknown
  Obtained from environmental sample
  DOMAIN (9)...(151): Protein of unknown function (DUF1016)
  misc_feature (1)..(151): Xaa is any amino acid
MTSPHYITEIKQIIISARSKAHTAINSAMIEAYWLIGKRIVEEEQNGKQRAEYGREVIKTLSEELPSEFGKGFAERCLREYRQFYLNFMDFEFGAQCAPNLTWSHYRLIMRLNDKNAVKYYLTEASEKQLGLSEPLDRKHFNPLLSTVNGP

SEQ ID NO: 84429 - protein, 368 aa, Unknown
  Obtained from environmental sample
  misc_feature (1)..(368): Xaa is any amino acid
KSIAYTPRFSNLTNLTTLILGNNIKSIGASAFSGCTKLTTLTVPDNVKTIGASAFSGCPRLQTASIGNGVDTVGVGAFRNCAGLTSVIIGNKVKSVGASAFSGCTGLASLTSLASDPPAVGVASGNGTFDGIDKTTCKLKVQQVDMGMYRNAAGWKDFTNIEAVQFPNVPVLDITGVPTSFKVGEVLTLTGTVTPTTATNKTIEWSVAGASISGTNFTGAVIEGGNKLSASAPGTVVVRAAIPSGAITGVDFERYFFITAEPDEDSAAVSVASRDRVIPSVKSAESAAIAPVARLSAEFAAGPNPAARFFFLAKFFRLGIFLTNATLTVYDASGYVVSAVKPGVWDLRVNKGLSVSAGTSLVSGVVYV

SEQ ID NO: 84430 - protein, 321 aa, Unknown
  Obtained from environmental sample
  misc_feature (1)..(321): Xaa is any amino acid
KIQGRGLREKGTAGGGYTWDQTGDGELLSWSAAAKGREGWFKRLESGRSALLLSDRDAIFKAASPGRQDRILVPLAGDGLLIWESLRRCPEGLSAALVANDSAREALFRYASVLDQIEQPEIAVLETGLLPSPQQAAEWFDTSVFDFILIREPWRRGFSGNTPETEFTNLAASAKTLLAPEGRVILLCSPPVMGQRISQLIMDEDQPLAEKLRLSEDAFFSRQQGPLTAWNWDAADLSASFESQGFKVKVEFLDQKEERLIGPKDISAWFDKTNSRWGAFMGKALDAGDFSRAEELLTKRIQSGPLPWKWKSLLITGRSEQ

SEQ ID NO: 84431 - protein, 64 aa, Unknown
  Obtained from environmental sample
  misc_feature (1)..(64): Xaa is any amino acid
MTDGIYEAILSGINPNAMPESVKDRPTKSHEYLFMFTKSERYYYNYEASKEMGLNGEYRNRRTV

SEQ ID NO: 84432 - protein, 169 aa, Unknown
  Obtained from environmental sample
  DOMAIN (73)...(155): Acetyltransferase (GNAT) family
  misc_feature (1)..(169): Xaa is any amino acid
VENIEFKELGTIDINNNVLDHYNRYQEIKKCYRKEDENWVIKNIEFIENWDKDKKERVIKDFLKTINDGGSVFGAYDNNKLIGFAVLYNKIFGSKKQYIQLGNLQVSYGYRHKGIGRKLSEMCIKQSRDIGIEKMYISANSSEENANFYLGIGCNDGEEIDQDCMTKSH

SEQ ID NO: 84433 - protein, 376 aa, Unknown
  Obtained from environmental sample
  misc_feature (1)..(376): Xaa is any amino acid
MTYPLYDTVLKEGVELRGTAFDRNGIKEVRASIDNGNTFNKVRGTFGTAAETIQWNYQFNTTILKDGPHVVFIKVLDRYDIPATYAFMINVDNTQPEIILDSPGDGSISVGNISVMGRVLDPNLKEVSLELRSLDGFTIPANLRSRKLDSGSMMRENIDISAMADGQYNVAVIALDRAGNMTRLSRNVQMARQTYRNYIEILYPLENEETSGEFNLYGYAGGSTPAGTVTIKINGADSQTAPVDDAGYYAFKLNSEFLKTGDNAITVTSNFGGPTLVSSRPYNIVFRDGGPWVTIDSFKFAEFSYDRAYLSGRTGYEISDADKELLADKKLDKEVRAAILAKTPDFTEISFDNGRSFMKTSKAAAKASRPICLGRQ

SEQ ID NO: 84434 - protein, 85 aa, Unknown
  Obtained from environmental sample
  DOMAIN (14)...(60): Bacterial regulatory proteins, tetR family
  misc_feature (1)..(85): Xaa is any amino acid
LAIVVEHDKRRTKILDSALTVFMDEGFENATFQKIADHCGIARTILYLYFKNKTEIFNYSIKHLLLEMKKASFHPFHNSLKSEEK

SEQ ID NO: 84435 - protein, 334 aa, Unknown
  Obtained from environmental sample
  DOMAIN (1)...(127): Pterin binding enzyme
  misc_feature (1)..(334): Xaa is any amino acid
LSTGRLRERAGYSINLKDGEAEFLRRASLIRRYGAAVVVMLIDEQGQAVSYERKIEIAGRAYRLLVESGFPPENIIFDPNVLAVATGISESDSCAIDFIRACAWIRDNCPRVQISGGISNLSYSFRGNNAVREAMHSVFLFHAGAAGLTMAIVNPAALIAYNDIEENLRNAVEDVIFNRSPGVADRLLKLAEKKNDTSTPSAPHSPLTNNWRNQPAEARIIHALVKGIDGFIEADVLELMENKGGSTGKTALEIVEGPLMDGMKEVGKRFDEGTMYLPQMIRSAQIMKKAAAALEPYMEKKLMRLRQKLFWQREKAMFTTLVKILGVGFWPCNG

SEQ ID NO: 84436 - protein, 142 aa, Unknown
  Obtained from environmental sample
  DOMAIN (1)...(141): Flagellar L-ring protein
  misc_feature (1)..(142): Xaa is any amino acid
AKDQIGRAWATKSLNVPFIGGVFNELNLKPNVGIDANYASTFSGSGTTARTESMNARLSARVIQVLPNGNLVLRGSQEILVNNERQYITIQGVVRPYDISNDNTVLSTYIADARIDYSGQGDLSRKQREGWLSRFFDTVWPF

SEQ ID NO: 84437 - protein, 348 aa, Unknown
  Obtained from environmental sample
  misc_feature (1)..(348): Xaa is any amino acid
INALPAGQIVADNNALLAAEIPGAKYGTAEKIAVSGMSFTQAGEVTITQQLKNYEYQLALPGLRSTDFNDGDSMLLVISMKTLSTTSEDGTGKIRLIVEQEASPNERTLQEIVYTLPGGGWFTAYLPFRAKNGCTRLCVWLGYDLQTVQFGGYQIINYEKKAELFQLPISSIMGEKPDGRELFDKDNTWRRDAWARIEQIRKGDFTVNVRDSSGNAVSGAQVRAAMYEHEFRWGTAINGNINSNTKYRAGVSLLFNAAVLENGHKWSNWESNSADTRSLFNAVVGLGLKYIRGHTLIWDKKFLARAAWPGSNYSIPKRVYDSFQADDKAGLDREIQAHSADLIMFPQK

SEQ ID NO: 84438 - protein, 267 aa, Unknown
  Obtained from environmental sample
  misc_feature (1)..(267): Xaa is any amino acid
VYREVREFAGYIFVTALFLILGKIGIGRKDYLGYQIVFGVFAALMTTGALVASALRETTIKAERRRFYFAKKFYKYYMLEVFYGSRKQIFLTFAPYVLILQYGADPSIMSILYAICAGFGMLCSTLIGRIIDKVGYKAVMVGDTLILIVVCLLYGFAHRLFPPNIAFYVVCCNFVLDSIISIASMASNIYVQRISSNQEEITATLSTGISVNHIISIFIALMGGWIWKVTGIEVLFSLSAFLGLLNSVYAVTIKKEEEVQSVSTTGK

SEQ ID NO: 84439 - protein, 195 aa, Unknown
  Obtained from environmental sample
  DOMAIN (1)...(194): N-(5'phosphoribosyl)anthranilate (PRA) isomerase
  misc_feature (1)..(195): Xaa is any amino acid
MKHSQNIIDLVKVQPDYIGFIFHEKSPRFCENELKNLDFISKKSKRVGVFVNEAPEKISDTVLKYGLDLIQLHGKETPDYCKKLKQKIHDIKIIKAINIANTLDLEQTEIYNNDCCDYLLFDTKTHLHGGSGVKFEWWMLDWYDGEIPFFLSGGISANDVAAIKEIQHPLLYGIDINSQFEIERGLKISRLLRII

SEQ ID NO: 84440 - protein, 221 aa, Unknown
  Obtained from environmental sample
  misc_feature (1)..(221): Xaa is any amino acid
GLPYRRDYKINEDLAKNVPGAKFVPVDAIDGPDKSYFKEISDKPGLRIFIPAASKNPEAALRYLNWLCKFENFNFLQIGEPGRNHDLVDGIPKAKAATGPWIMNSANNIDITMPINGIELLSAEKNARVLALNYGNTPPADIVNAYNISISKGKAPAVFVATETKLPPVSQTLKDKADALIAQSITAPTARFDSVWDTGYRDWLSSGGQDVINERSTLWKR

SEQ ID NO: 84441 - protein, 248 aa, Unknown
  Obtained from environmental sample
  misc_feature (1)..(248): Xaa is any amino acid
LGKFNFDKPVDRQTAYSYSIKHDPVSRKKPADVLPLWVADMDFPAPPCVLDVLSERVKHGVFGYSEPDAPYFAAVQGWFEKRFDWHIDREWLSITPGVVNAIYVAIRALTKPDGGVLIQQPVYYPFESAVKDTKRKLLVNQLVYGGDGRYGIDFADFEEKAEQAEMFILCNPHNPVGRVWTHDELLRMGEICLRNGVIVVSDEIHQDFIYEGRRHLVFSGLDERFAGVTITCTAPSKTFKLAGLQLAN

SEQ ID NO: 84442 - protein, 367 aa, Unknown
  Obtained from environmental sample
  DOMAIN (1)...(367): tRNA synthetases class I (I, L, M and V)
  misc_feature (1)..(367): Xaa is any amino acid
REGKSEFVFYDGLPLPTGLPHFGHFIPSTIKDIIPRYQTMKGKKVKRRFGWDCHGLPIETLIEEELKLNSKTDIEKYGVAKFNEACRASVLRYVKEWRQTITRLGRWVDFDNDYKTMNSDYMESIWWVMKSLWEKGLLYEGHYILPYCPRCSTVLSNHELNLGGYKDVNDPAITVRFKVLDASIPANTYLLAWTTTPWTLPSNLALTLGADIDYVLIEDKAEHYILAEARLSAYYKNDTEYKIVWRKKGAELKGIQYEPLFPYFKDAPNAFRTFLGDFVTTEDGTGIVHTAPGFGEDDARVLKGTGIPVICPVDEECKFTAEVTDYAGLFVKDADKAIMEKLNAEGKLVKRDQILHSYPHCWRCKSP

SEQ ID NO: 84443 - protein, 234 aa, Unknown
  Obtained from environmental sample
  misc_feature (1)..(234): Xaa is any amino acid
MAFINNITKADLKVCESAASFLQSAMWGEFKSRFGWTSRAFLIEWSGYAISPLLLLFRRLAPGFSFAYVPWGPNLPDNFPASDRTAALSELALKLKPLLSRNTAFIRFDPPWAVNDSEDALPFPENFKRAAADIQPPDTVIIDLSASENEILAAMKSKWRYNISLAGKKSVQLNSDGAQDIEKFYSLLKETAQRDGIAIHSIDYYKTLFDICGAYPGRDYLASIPHHLRYPPQK

SEQ ID NO: 84444 - protein, 188 aa, Unknown
  Obtained from environmental sample
  misc_feature (1)..(188): Xaa is any amino acid
LIFNLKNTWAAQSPYERFFDFIAPEADRFAVLLDHIQKMGLNSLVISIEDNRHFFIFPKGINLKLSSGSAFPFNGESPTVLTAHYDRVPGSPGANDNSAAVFQLLKTALKLDELDLGDWIIIFTDKEELQSGEGFMEQGSYSLAKKLRQMGLINAQIFNFDACGTGEVFVFSGTTDYLLDKNEKPGFR

SEQ ID NO: 84445 - protein, 306 aa, Unknown
  Obtained from environmental sample
  DOMAIN (2)...(121): Response regulator receiver domain
  misc_feature (1)..(306): Xaa is any amino acid
VGHIVTCSDDQPFLTLLRQILLKQFNLGNAVTMVTDAKQLMRVTQNRIDVNPVMLVFMERLMNGRAHDALVRQFKQAHPGLRIIILTNDVEREQLMLLHEIGADNFVTKPVSINTLVEKMAFTLKPQNKLGQLIDEAKAQLAKNDPKAALDISLHILDLKPNSAAAYLVRGDAYRQLGDMENARKSYEKASENAELFLEPLRRLGELHASMGDLEGCLKYLERMDQISPLNAERKVDMGEVHLKRGRSEQAQALFDMAVEITGEEISRISSRIASLYMDRDPALAEKYLRRGRKPRDVSLGQSDTW

SEQ ID NO: 84446 - protein, 301 aa, Unknown
  Obtained from environmental sample
  DOMAIN (1)...(284): Putative glycosyl hydrolase of unknown function (DUF1680)
  misc_feature (1)..(301): Xaa is any amino acid
MADIARLTGDAALMKACDDLWNNIVNRQMYITGSIGQSAYGESFSCDYDLPNDTAYAETCAAIGLAFFARRMASIAPKGTYGDVIEKALFNGIISGMSLDGKSFFYVNPLEAVPEASLKDHGKRHVKIERQKWFGCACCPPNLARIIASLGSYIHSLNENAVYTHLFIGSEAKVKISGADVTVKIETKYPWEEHIDIGFAMSAKTKYKYYFRIPGWCEKYSVRLNGVEQTCAVEEGYALIDREWSGGDKISLVFDMPVNFVRSNPHVRENIGKIAVMRGPVVYCAEEEDNGQELLASSDQP

SEQ ID NO: 84447 - protein, 78 aa, Unknown
  Obtained from environmental sample
  DOMAIN (6)...(73): Phosphopantetheine attachment site
  misc_feature (1)..(78): Xaa is any amino acid
MSAVEAKVKHVIASKLGVSEDKIKPESAFIGDLGADSLDLVELVMDLEEEFGVSIPDEDNDKLRTVQDAIDYIHKAKS

SEQ ID NO: 84448 - protein, 139 aa, Unknown
  Obtained from environmental sample
  DOMAIN (22)...(136): Response regulator receiver domain
  misc_feature (1)..(139): Xaa is any amino acid
MAIRHSIDLNSPCIARLWLPGCKVLVVDDLPANLQVTRGLLAPYGLQVYTAASGREAVEMVKTNDYNLILMDHMMPEMDGIQTAAVIRTIDGYAHTPIVALTANALKGMKELYLENGFQDYLSKPISSGRADDSAILSW

SEQ ID NO: 84449 - protein, 195 aa, Unknown
  Obtained from environmental sample
  DOMAIN (9)...(184): Pyruvate ferredoxin/flavodoxin oxidoreductase
  misc_feature (1)..(195): Xaa is any amino acid
VGDDQIGRGTGVLSVAAIIAQAAVNEGLQVRQSEVHGMAQRGGAVLAHLRISDAAIAGDLVPKGSADIIISMEPLESLRYTGWLAPSGALVTAAEPFVNIGNYPETETVIAAIKSYPHCRIIEAAALAKEAGLARAVNTVMVGAASAFLPIKVQTLEDTIAGVFAAKEAAVLTANTKAFQLGRQAAANASKGGNI

SEQ ID NO: 84450 - protein, 139 aa, Unknown
  Obtained from environmental sample
  misc_feature (1)..(139): Xaa is any amino acid
MENIPEIIPRILEQNESLEILVVDDGSPDGTGDFVENLSKENNRVHLLRRKKKMGLGTAYVAGFKWALEKNYDRVFEMDADGSHSPQALNTFLKEAESADLVLGRPLFERENFSCKLGLEKISFKLLCKPLHEICNGNA

SEQ ID NO: 84451 - protein, 101 aa, Unknown
  Obtained from environmental sample
  misc_feature (1)..(101): Xaa is any amino acid
TETAPYNCKGHPGKSWNVILDEATSSVDTRTERLIQKAMDNLMKGRTSFIIAHRLSTIRNADLILVLKNGAIVEQGKHRELLDRKGFYSELYNSQFAGQRI

SEQ ID NO: 84452 - protein, 333 aa, Unknown
  Obtained from environmental sample
  misc_feature (1)..(333): Xaa is any amino acid
DLDSQPSTSSIRLADIKIKITDNPVYALNLIYIYKEVYSSSQNRENNDLERVAQYENEAIKNLCLMQEKAIEQNKWEEAISLGRSISSIGIKTANTGMESAFLLADAKKKLSENNTLGAFLSAVKSHELRPLDLGSAMLFLEKAVEIKQRRTASFFLSAAESAGGRNIPAKLREYALGRDNPAEMIKGVATVLVDRGVRIERGMGIPDRVLGSAFFVDASGFLITNYHVIASEVDPKYKGYSRMYIRMGDSTSSRIPARVIGWDKAMDLALIKTEIECEYVFSVVDRVIPRVGDTVLAMGSPVGLEKTVTSGIVSALGRRLLQIGDVIQIDAA

SEQ ID NO: 84453 - protein, 350 aa, Unknown
  Obtained from environmental sample
  misc_feature (1)..(350): Xaa is any amino acid
MRACPEDEVAGIVGQTGPNQTPTAADYDISTNLIQTAGSVTPVTVTPKPGKSSGARTVKYNDSTTVPQEVGSYTVTFDVAAATGWDAANGLPAGTLVVNNLKTPVLDDYTIIGTWTQTAGSVTAVTVTKKDETKSPGAVTVKYNDSTTVPQTEGTYAVTFDVAAVAGSWNPATGLIAGTLFVDNPPKNFVSGADALSWGISSSASVLTLGLTPGKDTTEINLNWYSTGTSAGKVAKVRFSRGTFVAGTELIEKDDGEAKDAGTYTQHKATVTGLKPGASYEYAVSSDGTNWSDPYNFKVPAARRFQFAVIADPQLHNSTWDALKRYNPRTTRSKTAKGWLDTMAKLWLTA

SEQ ID NO: 84454 - protein, 287 aa, Unknown
  Obtained from environmental sample
  DOMAIN (107)...(174): Elongation factor Tu domain 2
  misc_feature (1)..(287): Xaa is any amino acid
MKGSDDPKLTELCGEEYIKEFKNRYDMVTQAMEPFHKNEYLAGKQCPVFFGSAVNNFGVRQLLNTFANIAPPPTPRESDVRIVMPTEDKFSAFVFKIQANMDPRHRDRTAFLRICSGSFERGNKVWHCRTGREIRLAAPTSFLAQDKEVIDKAYAGDIVGINDPGIFNIGDTLTEGEKFRFSGIPDFAPEFFARVTLMNPLKSKQMSKGLLQLSEEGATQLYTSLTSALPIIGVVGEFAIDVLTHRLENEYGAEVQLDKTHHLVQMDYGEQKNRKNFQRVQGRLYAR

SEQ ID NO: 84455 - protein, 113 aa, Unknown
  Obtained from environmental sample
  DOMAIN (1)...(112): Domain of unknown function (DUF323)
  misc_feature (1)..(113): Xaa is any amino acid
SPGNYTYSGGNSAGDVAWYRDNSGSKTHAVGTKKPNGLGLYDMSGNVWEWCWDWYGAYSSDAQTDPVGPSAGGDRVLRGGSWYYDASIARSVVRVDYYPGNGDNDNGFRLVRP

SEQ ID NO: 84456 - protein, 352 aa, Unknown
  Obtained from environmental sample
  DOMAIN (215)...(352): Predicted permease
  misc_feature (1)..(352): Xaa is any amino acid
MKGRSSFFIALRYLWGRAHEGGRYLRGAAAGIAVSLIPIIVTLIVADGMIRGIIDRYMELGTGHLQVFSFAGAEGLEGAVGIIRGIDGVRGVWLEQRGMGVLVGKKGKTGASIRAIEPSFWEEQEYLKLIDGTVGLETDRQMLLGESLAASIGAETGDTVRLMTILAGDNGRNIPRVTPFTVSGIVSSGYHELDALWCIITDGGGRRILQPENSSSSLIVKVENPYNNVDAMAWPLYANLDAGFSVYTWKDLMRSQYSSYESTRQLLLLIMALIVIVAAVNVSSATSMLVIERQRDIAVLKVTGASAKGITDIFLWGSFLTGLCGALIRIAAGLLLAILLIHYPLAGKSFSF

SEQ ID NO: 84457 - protein, 168 aa, Unknown
  Obtained from environmental sample
  DOMAIN (51)...(158): Response regulator receiver domain
  misc_feature (1)..(168): Xaa is any amino acid
MGGRIWLTPSWALTRHLALLSRQSGAMTVKTNRFQIIFTGPINARLLWTTPPIFLVYFRGEASRLSISCDVVLSGEAALELIEKNGLYDIYFIDWKMQGMNGIETAARIRELGAGKSPIVLMISAAERKLAEDDAKKAGIEHYVQKPLFRSDIIDCLNSCFVPDARKS

SEQ ID NO: 84458 - protein, 239 aa, Unknown
  Obtained from environmental sample
  DOMAIN (77)...(239): SPFH domain / Band 7 family
  misc_feature (1)..(239): Xaa is any amino acid
MNWDWDKLQEKRQRQPRPGGGGREPLPGGGDNEPPRRRDMGGLPPDPLRKVREFVTPGGKTLWWLAGGVCVLWLLSGIYIVEPDEEGVVLRFGEYNRSVPPGPHYRMPFPIESVDTPKVTQVQRVEVGFRSLAKTGGQTQVRAVPEEAYTLTGDENIVNVQFSVQYRIRDAVEYLFRVTNQASVVQSAAEAAMREVIGTSEIDSALTDGKLKIQDDAHALLQNILDRYEVGVQIIAVQL

SEQ ID NO: 84459 - protein, 241 aa, Unknown
  Obtained from environmental sample
  DOMAIN (33)...(116): Glycosyltransferase sugar-binding region containing DXD motif
  misc_feature (1)..(241): Xaa is any amino acid
MEDWSQAINIPKTIHYCWLSGDKMPNDMKICVDSWKKHMPEYAFVLWDMNKFDINSHVFVKEACQAKKWAFASDYIRLYALYTEGGVYFDTDVYVKKSFNDFLGNGFFTGIEYHEGFAKNGAHLLNDDGTLKNENNGEIFTHGIQMQAAILGGVKGHPFLRDCLDWYNGKHFILGDGAHYDKLISPYIYAHVATRYGFRYKNELQKLKNNMTVYPTSVFAGSLSQSGENTYAGSAYGFPAK

SEQ ID NO: 84460 - protein, 285 aa, Unknown
  Obtained from environmental sample
  DOMAIN (4)...(213): Amino acid kinase family
  misc_feature (1)..(285): Xaa is any amino acid
MKYKRILLKLSGEAMMGEQKGGIDPNVVKSIAAQIKELRDRNVDVGIVIGGGNIIRGMVAASMGMDRVTADHMGMLATVINALALQDAVEHLGIPVRVLSGIEMQKIAESFIRRRAMSHLSKGRVVIFGAGTGNPFFSTDTAAALRAIEINAEVILKATNVDGVYSEDPKKNPEAIRFEQITFQDVLERNLTVMDGAAIAICRESGIPILVFDMKVPGNLLAAVEGAAAGNFGGQMRCLANFSRVHRIPPGGLGGNQGGGPFPCNWEPNKTPPLGISKFFSIKRE

SEQ ID NO: 84461 - protein, 75 aa, Unknown
  Obtained from environmental sample
  misc_feature (1)..(75): Xaa is any amino acid
GCYRRGLEANTIEAAPDSDQAKVYTQLAERIAAHEESKTPSPLELDELRTWAASWSDKLLALETGVVVGGERAGI

SEQ ID NO: 84462 - protein, 498 aa, Unknown
  Obtained from environmental sample
  misc_feature (1)..(498): Xaa is any amino acid
MKALVAWLKRKKSAFCILAGIISVSLFVISASNEKIKQTTGGSYVVKIMHYGIDSAEMERTVTVPLEDALSAISGVMSVQSSTENNRSRVFVRFKHGGRGRYEAVRDAAQRVYETLPPSAQRPEILSSNNSRVPVWSAAVFSKSKINETNFDGTRSIKVNFVEENVGEENLLTAQMLEKIVKPRFESLEGAGEVLISGAGLKEIVISLDQEKLFTIGLHPSAVAEALALNDSIFSGGTAVLGNREIIITVDGRYGQSLDKALVPLGNGKFIELADIAVITEQEREPDILSRLNGRKTAGIAIMGRHDADLRKLSSDIKKEIAALSLPLEFTVLTDAGAEETAAFRSVFNAALSGAIMVAVVSFLLGGKNSANLSGFFCALSIPLICVLSIAVLSMLGFPPGRLMLAGIAAGVGTAVDAVILCSEKLRKHLSYEGAAAALSELAGPLIAGAATTVAALLPLSRMQDAAVKTIAASIAVICTVALVFSLSSCLGHLIMAT

SEQ ID NO: 84463 - protein, 88 aa, Unknown
  Obtained from environmental sample
  misc_feature (1)..(88): Xaa is any amino acid
LIDLGEDNYLEAFDTLYKELDAFSEELTLKRRVIVGTKLDLENAEERLEELKKKYPKEKVLGISVFSGLGLQDLASLLCSMVEEEGQA

SEQ ID NO: 84464 - protein, 73 aa, Unknown
  Obtained from environmental sample
  misc_feature (1)..(73): Xaa is any amino acid
MKKKIVLAYSGGLDTTVIIPWLKEQQPCDIAAVCVDLGQEADWKTIKQRAWTRGPFPAPWWTQKKNTSANLSS

SEQ ID NO: 84465 - protein, 96 aa, Unknown
  Obtained from environmental sample
  misc_feature (1)..(96): Xaa is any amino acid
MPTDQTNSTGLNPQNPLIVQSDSALLLEVNNPLFPEARNAVSQFAHLDKSPEYIHTYSITPLSLWNAAALGLTAADVEERLARYSSTRCPATSWTA

SEQ ID NO: 84466 - protein, 375 aa, Unknown
  Obtained from environmental sample
  DOMAIN (8)...(72): 2Fe-2S iron-sulfur cluster binding domain
  misc_feature (1)..(375): Xaa is any amino acid
MSDKNVTLTIDGLSVTVPEGTTILEAARKVNVKIPTLCNHPDLCKRAVCRICVVENDGRGKLLASCAHDAEEGMNIVTNNHRIFDIRKTIIALILSSHPHNDCLACIRNTKCETASLAGIYSTRESPFPKNFSGLSLKNLKEIACNALVRDMDKCVKCGRCVEACQEIQTVRAINTSRRSADYTICTPYDRALSDSTCVFCGQCAEVCPVGAIYEYDQSPEVWALLNEKKQEMVIEIAPRETQALCAELGLPMESITIGKIVTCLKRMGFSSVYDTSSFEVMTANEEAGELNERIKNSHLLPMISACSAGCTKFVKEFYPDLSDHLSKAKSPEQNFRNFFDNRNGAQKIFVSIAPCIAKKYKAQSPKEVSAESVP

SEQ ID NO: 84467 - protein, 164 aa, Unknown
  Obtained from environmental sample
  DOMAIN (27)...(163): Respiratory-chain NADH dehydrogenase 51 Kd subunit
  misc_feature (1)..(164): Xaa is any amino acid
MSKLEFRQLTDSLLSDPFSIEEYIKADGFSSLKKVTAMKSEDVISEISKAKLLGRGGAAYPGGKKWEHLLHIKETPKYIVCNADEGEPGTFKDRFIMEKMPFKLLEGIIVAGFVFRAKAGYIYVRGEYKKIQKRLVEALKNIPGSWVFSARRTGLDFAHSRKFQ

SEQ ID NO: 84468 - protein, 76 aa, Unknown
  Obtained from environmental sample
  misc_feature (1)..(76): Xaa is any amino acid
AERPGVLGELIVRDFHSHLKDVKAGKGVCMTVGVFSEEAKRYTEARLIDLIEKERLAVIMNTVDAKAAALANVKKK

SEQ ID NO: 84469 - protein, 299 aa, Unknown
  Obtained from environmental sample
  misc_feature (1)..(299): Xaa is any amino acid
IGSDGFEEYDVLPMDFCFMFDAQNIKSNKLNSTEQYLQHAATCIYAQSIGPMNTRSNSSEDNVIRTLVSGQSRNRYAGAGASELVYPSNHILNYIALKWAAQTVTGTWTLFDRDYKNKSKQNNRAKMKGLPYDPDIKPETEYIKTVDTEINKNEPNPFAVFTRRMTYNYDKDGFTERGPKWNAYIEALRENVKINAERRQNDIDNARENAQSAINDLRNNDSDDKAEKTDKTDRMDTFIRAYNNLKYYRDLVKRRSDDIGRVTAYSVLNSDDGTDVTLTNENTRVKNTERPRPICHGKT

SEQ ID NO: 84470 - protein, 124 aa, Unknown
  Obtained from environmental sample
  misc_feature (1)..(124): Xaa is any amino acid
ALTSLVEAGIPVHVQTVLLKGINDNAETLALLFRECVNLGLSPYYLFQLDLAPGAAHFRVPLRKGLAIYRELERHVSGLALPTYAVDLPGGGGKIRLSEDVIAGETDGILLLKGHDGKLWKYPS

SEQ ID NO: 84471 - protein, 88 aa, Unknown
  Obtained from environmental sample
  misc_feature (1)..(88): Xaa is any amino acid
MINLEQVKLLETKVTKAIDYVERLGKENIALRRQESELQTRLESYQKRIDELEVLVTGFKEDQSRIEEGILSALDRLSHFEKAMEKGL

SEQ ID NO: 84472 - protein, 74 aa, Unknown
  Obtained from environmental sample
  misc_feature (1)..(74): Xaa is any amino acid
METIKDMVANMGFSSITSSMLIMWVVASVLLYLGIRKQFEPLLLVPIAFGSLLTNLPTRLFYDGGWNVQGMLFQ

SEQ ID NO: 84473 - protein, 258 aa, Unknown
  Obtained from environmental sample
  misc_feature (1)..(258): Xaa is any amino acid
MPGRFYSALPSQVAELSRLLTGARGDRSLSYLSRPNYLSAYLRFFLPWNILRLCRLLPSLDINLRAGDLITDLGSGPLTFASALWLSRPDLRSTALEFICIDNCAPALAAGKKFFAALCAQEDCAWKVNTVREKINLKTKTALAHKKAALVCAVNFFNEIYEDLPHTDSEALKRAAYYAALLMHNQAAPEARLLTLEPGVPQSGQFISLLRSAFLELGRPPLSPCTHSETCPMPGGKAAGGKVNNKSVNTKNLGQSVM

SEQ ID NO: 84474 - protein, 346 aa, Unknown
  Obtained from environmental sample
  misc_feature (1)..(346): Xaa is any amino acid
MQQRAAPAFHHRESGGWRDLLKDDFTNVLINQLRGDKSRKLSAHEELWKAQSSDLFCSTGQRLRSHSIRNAAYSALLRAEQVTRDKGKFTPSLVPFDFNMDGVEEWLFQDAKINCYVQSVGGGIFELDYQPAAWNYLDTCGGRLAFADRLLPKGAAADTVEHDGIKGSARLGARLCYNELYELVELDKVRRKLSFLLRQSPAAAFGNVEIEKSYQIKRDTIHVSYAITNKGAGAEVFLFAPRIDLALPGEGESFARFYTCKPGAPDAPVHGPLRETDCLKIHDIKNEVQITLSSGKPFDGRIAPVRLKDPDKGEELYQAYCVMPLFQLSLEAGSSWEVEFTMKFTH

SEQ ID NO: 84475 - protein, 94 aa, Unknown
  Obtained from environmental sample
  misc_feature (1)..(94): Xaa is any amino acid
DDGRVAQLRSKHLKAKRDWNEGGNGLDTYGFSALPGGAGTSAGGFGDTGYGGYYWSATDSNSNAYYRGVYYRYEYAYWGNSDKNDLFSVRCLKD

SEQ ID NO: 84476 - protein, 74 aa, Unknown
  Obtained from environmental sample
  misc_feature (1)..(74): Xaa is any amino acid
MIRRGKKYRALVASYDTKAFYGVDDAVNILKKSQLKFDQTVELHFNLGVDPKHSDQMVRGTVALPHGTGRKVRI

SEQ ID NO: 84477 - protein, 408 aa, Unknown
  Obtained from environmental sample
  DOMAIN (12)...(313): tRNA synthetases class I (W and Y)
  misc_feature (1)..(408): Xaa is any amino acid
GYRESDVTPGLEESSPPGLFPGTSGFDPTGKSLHIGHMIPIMLLMHFQRCGHKPIALVGGATGMVGDPSGKSAERNMLSAEAVAANAESIRGQLQKFLVFGGGAGGAEMANNYEWTKDVTVLEFLREVGKHITVNYMVAKDSVKGRWEQGISFTEFSYQLLQSYDFYRLYTDRNCVLQLGGSDQWGNITTGVEFIRRKSGGEAFALTCPLLTRSDGKKFGKSEGGESVWLDPAMTSPYKFYQYWLNCTDDDAPKLLRFFTLMGQEEIAALETRHAAAPHERIMQRALAADVTTRVHSEEECKKAVDASEILFGKGSTEALKALSEEDFLSVFDGVPQCRVPRADVDAGMQVIELATDKSKFFPSRGEARRMISQGGLSVNKIKVDDPAFAVGADMCSMEISSVDLSGE

SEQ ID NO: 84478 - protein, 223 aa, Unknown
  Obtained from environmental sample
  DOMAIN (25)...(220): Outer membrane efflux protein
  misc_feature (1)..(223): Xaa is any amino acid
MIFFSPPAVVDYQEGPSGQQVKLDFAGALSRAKAENPLLKAAKAVVDERKGLIKTVKADIYPNFTVTSDFSRVKDVSMLNNSFGEILASDDSMPIDPSAFTAPRTYYSTNIGVTQPLFYFGKISTAIKVAKMGESESESALVTSELNVLHGVAKAYLAVLSAKAEAEVIHSRKLAAEQFLRDVTAKLEVQSATELDRLRAESELYAVLPDELQADANSKGPKR

SEQ ID NO: 84479 - protein, 70 aa, Unknown
  Obtained from environmental sample
  misc_feature (1)..(70): Xaa is any amino acid
MCLDNIVVDSGKALPLGASLVNDGVNFAVFSRNATAVTLIVFESTDSNSPWKEIPLNKKGNKTGNIWHCL

SEQ ID NO: 84480 - protein, 263 aa, Unknown
  Obtained from environmental sample
  DOMAIN (129)...(253): NUDIX domain
  misc_feature (1)..(263): Xaa is any amino acid
MLFPADFSDTQIIEGTGVPYEFAGAFENTEIFDIPSIEPDSASPVITVVSVLKEELAENRKCIPFRQVLAMLSSGGRLPYAADMIRACHIAQWRQESRFCGSCGAKNINNPAEIERHCPKCGRIEFPRICPAVIVIITDDSNRILLAHNKNFKAGLYSLIAGFNEAGESLEATVEREIYEEINIKIKDVSYVKSQPWPFPNSLMLGFKARYLSGTIRPDGIEIEDAAWYTKDNLPALPGEGSLSRFLINLWLNNSCNSAAGHK

SEQ ID NO: 84481 - protein, 277 aa, Unknown
  Obtained from environmental sample
  misc_feature (1)..(277): Xaa is any amino acid
MVQLMDMMRPKYLEALERAKKESKPGKKRGVGVTCGGYNVTGNPDDYAEVHLELNPDGTVTNYNAWEDQGQGGDVGMLVLTHEALKPLGLTPEQIIIYAGDTGRCPNTGPAAASRSHFMAGNAVIDAANQMMDAMRKEDGTYRTYDEMTAEGLPTKFEGAYSTAGLCNSLSPNTGQGNPTPAYNFAVYLAEVEVDMQTGKTEVLKMTVNADVGVIGSRQAVEGQAYGGVAQSIGFALSEDFNDPGEGYQPDLTWGCPLLRIFQIISRLISLGTPREK

SEQ ID NO: 84482 - protein, 328 aa, Unknown
  Obtained from environmental sample
  DOMAIN (218)...(328): SecA preprotein cross-linking domain
  misc_feature (1)..(328): Xaa is any amino acid
MAERRKGPKALLPILYSVNEKESWAAALPAEEFPKMTEKFRERYASGEGLESLLPESFALAREAARRNLGERPYDVQVMGSIVLHQGKIAELKTGEGKTLMVVAAAYLNAIPGKGVHVVTVNDYLAGRDADWMRPVFTYLGLTVGTILSDMDNDRRKENYACDITYGTNNEFGFDYLRDNMCRDMRSRVQRGHNYCIIDEIDSILIDEARTPLIISGAAEDDTFKFAEVNRLIGSLEEIKKKENGDYPDETQGEEVIGDYKLNEQNKNVSFSNNGLAKIEDLLKKRGLIKGSVVDEENFEYIHYFTQALRAHKLFHIDVDYVVQEGQV

SEQ ID NO: 84483 - protein, 69 aa, Unknown
  Obtained from environmental sample
  DOMAIN (14)...(68): Helix-turn-helix
  misc_feature (1)..(69): Xaa is any amino acid
MEEQELRGISSKNIKRCRKRNNLSQMALAEIMDISTNFLSDIESWKNWGSSATLVKLAPALNVEPYELF

SEQ ID NO: 84484 - protein, 394 aa, Unknown
  Obtained from environmental sample
  misc_feature (1)..(394): Xaa is any amino acid
GFFWGVDGRGQTGQKIANDYAAFVTECMEKDSDMHTEFASFKGGKWKGMELEQHIGFVKWNEDNYRNPLRVQVKPAYKPRLVVSRKDREEVYTKNYGRVMTVLVDDFLYAGNDEVIIEIANDGIGSLEYEIIPEKEYDWLRISSRGQQSLKGKVESQEEITLRCDREKLTGETQNARLLIKEKEIKDAVVVDGKTTIAIEIKAKNPVIQDLPPMTFLENNGVIVMEANHFCGKRDATDAGFIELKNYGRSGSGMKVYPTTADFNENDERPLLAYRFLIEEQGDYTAEIWTAPANSVQNKRPLRFTIAVQGERRQQLITAVPADFMAGSHYDKRWCEGVLDQIRISKAPLTFEKGVWEIEIGALEAGLVLERVLIYREDNRPWRLLGPPRVYRPR

SEQ ID NO: 84485 - protein, 65 aa, Unknown
  Obtained from environmental sample
  misc_feature (1)..(65): Xaa is any amino acid
MNRREVINESRNLDQVTHEIKGGVIEMAAGAEQVNTSVNRINEISVKNREGINTLLNEVSRFKVA

SEQ ID NO: 84486 - protein, 204 aa, Unknown
  Obtained from environmental sample
  misc_feature (1)..(204): Xaa is any amino acid
MKIKFKLSIVVIAIMAAVTAGITSLLLWQSSKNTLQLSLRGQEQLANSQAEFLKGQEDGYIRALTTLANVMGDFETVKPEERRDKYDDLLKSALNEEPMMVVLYTVWKPDAIDGMDKKYIGRTGSGPNGQYAIAWSKETGSIKKRATADIDNAIKHITGPNAFKDLINEPVMRNINGVDKWTIRIVVPFPTTIKTTKSCRRSWL

SEQ ID NO: 84487 - protein, 63 aa, Unknown
  Obtained from environmental sample
  misc_feature (1)..(63): Xaa is any amino acid
GNREALKVKRDSLLNKLFKKGYFDEETLALSVAEPLPGEPLPLPRLTPHLLDRLVWKPQENPR

SEQ ID NO: 84488 - protein, 266 aa, Unknown
  Obtained from environmental sample
  DOMAIN (26)...(265): Amino acid kinase family
  misc_feature (1)..(266): Xaa is any amino acid
MNSISNNDRAGVLVHALPYIQSFQGKTIVVKYGGNAMLNDELKRAVIEDVILMSCVGIRTVLVHGGGPEIEAMLKKTGKESRFINGLRYTDEETMDIVQMVLCGKVNKEITALIEKTGGKAIGLCGIDGAMLKASRMKSEDLGLVGEIDQVDVSMLNAVLDAEFIPVISSVAYGTGQDEGKALNINADIAAAKIAAALGAEKLVLMTDVRGILRDIKDENTLVKSIKRPQLNTLKEEGILTKGMIPKTDCCAMALTAVSRADLILV

SEQ ID NO: 84489 - protein, 573 aa, Unknown
  Obtained from environmental sample
  DOMAIN (273)...(425): ABC transporter
  misc_feature (1)..(573): Xaa is any amino acid
ILQFKKGTKIQLLAPVIRGKKGEHQKIIEDARKAGFARARIDGVPVNLDESIKLDKQKKHSIEIVVDRIVIEQDIRSRLAESVETALQTADGLLLVLASDEGKNSEHFFSQKNACPDCGVSIPELQPRLFSFNNPFGACPSCTGLGAKLEFDPDLVIPDPSLSFNEGGVVPYNPDSAWHRSRFESLAKHYKFSLDTPLSKLPKKILDAILWGSKDEIKIRYDNREGTGHFEYQSKFPGVLEDLKRRYLETQSPGIKEWLEKFMSQKPCEDCGGKRLKPEVLGVTIAGKNIWELSCLSVTDSLNFFESVKFSKNEKKIAHQILKEISARLGFMQNVGLDYLSLERKAATLSGGEAQRIRLATQIGSSLVGVLYILDEPSIGLHQRDNQRLIDTLLHLRDLGNTLIVVEHDEQTLRTADHIVDLGPGAGVHGGRVVAQGSPQEVMQVKESLTGQYLAGTLTINIPAERRQGSGNCIKLKGVSEHNLKNINVEFPLGLFTCITGVSGSGKSTLLSDVLYPALANKVYGSHHIEGVYKKLKARNYRQVIDIDQSPIGRTPRSNPIIYVGRLTAIRDL

SEQ ID NO: 84490 - protein, 171 aa, Unknown
  Obtained from environmental sample
  DOMAIN (104)...(143): SWIM zinc finger
  misc_feature (1)..(171): Xaa is any amino acid
MKNRYGITPWGSWFIDVLNSYGLEGRVDRGRTYANTGKVLSLKMEKGRVVAKVKGNYRPSYQVEIIFPPLKEAELVYKMIEDDPLLLAHIASGELPETFLQKLKRRNISLIPRHWSEMKKSCTCPDEYGNPCKHLAALYYVIAREIDTDPHLLSGSGGWIWPPVRNSPIIA

SEQ ID NO: 84491 - protein, 137 aa, Unknown
  Obtained from environmental sample
  DOMAIN (1)...(135): Phosphoglycerate kinase
  misc_feature (1)..(137): Xaa is any amino acid
FSRVCRGYVGATSFDATAVPIPVDGLDLPDNLMGLDVGPKTLAKYKDVIAKAKTIVWNGPVGVFEFDAFAKGTLEVAKLVADATGKGSITVVGGGDSVAAVNKFGLADKMSHVSTGGGASLELLEGKKLPGIEVCRG

SEQ ID NO: 84492 - protein, 152 aa, Unknown
  Obtained from environmental sample
  misc_feature (1)..(152): Xaa is any amino acid
VDFTPFLNTPKKTEDQVYVDEEDNIEGEVEYYLTNPLNISVDDIGAKAVEYGGIVIPAHVDRAAFSMTSQLGVIVKGPWTALECVRIPPVFNGQPLDTLGYPLTTSSDAHYPEHIVRRPFQLDITVEELQPGGPGTMADMEAFKQALGKRPK

SEQ ID NO: 84493 - protein, 275 aa, Unknown
  Obtained from environmental sample
  DOMAIN (1)...(151): Transposase IS66 family
  misc_feature (1)..(275): Xaa is any amino acid
MIPKSIASPSLLGAVFTQKFEMYMPYYRQEKQFEQIGVEISRQDMSNWQQQAFEGLEPLFAILKKTVKDDPVVQMDETEVQVIGEENRSDIQKSRMWLALGGPPGKTVVWYEYHPTRAAYNAKAFLEGYSGYLQTDGYEGYDSAVKDMAGIVQVGCFAHARRKFFEADKISGHGKAIGYSLSQWDKLAAYLESPHLTPDNNACENAIRPFVIGRKNWLFCQSPQGAKSSCGMYSLIETAKRNGLRPFDYLTAVFKKAPVASSLQNWEKLLPWNIF

SEQ ID NO: 84494 - protein, 338 aa, Unknown
  Obtained from environmental sample
  DOMAIN (81)...(337): Methyl-accepting chemotaxis protein (MCP) signaling domain
  misc_feature (1)..(338): Xaa is any amino acid
MSIDKPIAHLVSVRNDVAGGNFRHQIPPHSKDEIGILESATQTMVKNLRSVISNVQSNSEMVAAASEELNASADQSTQAANSVAASILQVAEGTEKLLALVMETNDNVSKVSFESNQAATNAATVADTSQKTAQAAETGSQTLEAAIYQMNAIQNTIEVLAKEIVGLGERSHEIGQIVETISGIAGQTNLLALNAAIEAVRAGEQGRGFMVVAEEVRKLAEQSQDAAKQIAQLISAIQKDTAKAVQAMETGTKEVKYGSELANNAGVAFVEIEKLIGQTSVQVKEIAESIRKIADANQTVAAKGMEIYKLNQETTEQTQNVSAATQEQWPSAESVLGK

SEQ ID NO: 84495 - protein, 311 aa, Unknown
  Obtained from environmental sample
  DOMAIN (4)...(309): Protein of unknown function (DUF1703)
  misc_feature (1)..(311): Xaa is any amino acid
MSVSANKKPLPVDKSFFDRVIEGGSYYVDKTLFIKDLIDRDAEVVLCTRPRRFGKTLNQTMLKCFFEDTAPIGGKDTRALFRGLKIEDAGKRYMEYQGKYPVIFLSFKEGKSNSFDGSYDLLKDCIAQEFERHTYAMEKISNDYDRDLFKKLSTRTGSISDYVRSLKFLSRCLDCYHGRKTVILIDEYDVPLENSWSCGFYQNMIDFIRPLLGSALKDNPHLQLSVMTGCLRISKESIFTGLNNLSVVSILSDFYSERFGFTQNEMDIMLEYYGLERQTQIIKDWVHGYLFGNTVVYNPLSTRRAVDAWTQ

SEQ ID NO: 84496 - protein, 196 aa, Unknown
  Obtained from environmental sample
  misc_feature (1)..(196): Xaa is any amino acid
MTKQKFLQPMWLELIIMLTAAAISIIGFSIISFLSRPHASTVMNYGMIALWLLAFFLIGFSIALVSVLAGIGGGIIFTPIMLAFTPVNSVVIRAAGLVVSMFSGLISTGVFMKKGLGNLKMCIILAASQGLGALIGAQCAIVAANLLGDTGEGMIRVALGSILVVVAANFLTADERYDWANIRNVDKLPNGWAWTY

SEQ ID NO: 84497 - protein, 201 aa, Unknown
  Obtained from environmental sample
  DOMAIN (11)...(201): ATP synthase (E/31 kDa) subunit
  misc_feature (1)..(201): Xaa is any amino acid
MEIQVQELIDKIKKDGINTASEEASRIKTEAEAEARRIVDVAKKEAENIISRGKQDAERFEKAGIAALEQASRNLVLAFKDEIQALLKKIISSHIAAQYNDDVLKNTLPGLLKSWIEKNSSDLAVILPEDALSRLQSFFKEKFTGELNKGVELKSSRKLTSGFHISNKDGSAYYDFSAEAVVEMLSAYFNPKLAENNEKFY

SEQ ID NO: 84498 - protein, 289 aa, Unknown
  Obtained from environmental sample
  DOMAIN (13)...(233): Pyruvate flavodoxin/ferredoxin oxidoreductase, thiamine diP-binding domain
  misc_feature (1)..(289): Xaa is any amino acid
MTRLVRGNEAVVYGALLAGCQSYYGYPITPASEIAHTAAYYFPQLGRTFLQAESEIAAINMVYGAAAAGERTMTASSGPGISLKSEGLSYLAGAELPAVVVNVMRAGPGLGNIGPEQSDYNQMVKGGGHGNYHLIVLAPNSAQEMCDMTILAFDLADRYRTPVAVLADGVIGQMMEAVKFPKPCDTSPAKPWAVRGDAATRPNCHTSIYLDFEELEAHNRKLIMKYAEIEAREQRWQGLMLDDAEVVIVAYGVTSREAKSVCESLRAEGIRAGLFRPKTLWPFPKEGLC

SEQ ID NO: 84499 - protein, 334 aa, Unknown
  Obtained from environmental sample
  DOMAIN (42)...(108): His Kinase A (phosphoacceptor) domain
  misc_feature (1)..(334): Xaa is any amino acid
GLWPVIGNDYIVAAYARDLREHKRMLQEINDAAEEAKKANQAKSDFLARMSHEIRTPMNAIIGMTELALRDDNLTASAREHILTVKQAGSNLLSIINDILDLSKIESGKLEILPVNYSFSSLINDVISIIRMRIIDTPIRFAVKIDSAIPAELIGDETRIRQILINVLGNAVKYTEKGFVSLSVYGEFDEDSTVNLVIEISDSGIGIKQEDIKNLFDVFAQFDSLRNKRIEGVGLGLAITQNLVKMMGGSIGVTSEYGIGSTFTITLPQEYRYQEPLATVRDPQEKNVLLIYERRELYADSIVFSGENPRAKCTVVSDDSKLFEKLKNQTYTYL

SEQ ID NO: 84500 - protein, 179 aa, Unknown
  Obtained from environmental sample
  misc_feature (1)..(179): Xaa is any amino acid
MSSYKLDNLLADRGSKKIYRDGDKVIKLRDEGYPAPDVLSEAHSLAVVGETALKVPRLVEVTKIDGKWAVVWEYVEGTSLDKLMEKNKGKEEQYLERFVDIQLDIHRHSATRLPLLIEKMERKIKASDLDSTARYEILGRLASMPRHTKLCHGDFNPANVVITEKDEAYIMTCLSAICL

SEQ ID NO: 84501 - protein, 296 aa, Unknown
  Obtained from environmental sample
  DOMAIN (115)...(295): Poxvirus D5 protein-like
  misc_feature (1)..(296): Xaa is any amino acid
KYQIGRDRFTNAYRLVSEFGKDIRYIAPWKKWIVWTGARWQVDNGPLIHDRGLTMVRNIYAELYKTADYRDRLDIEKYAIQSESVRRRKAFVEAASWIPCLNAATDDLDRNPWLLNAENGTIDLKTGELLPHRQEDMITKIAEVRYDSEADSPMWKQFVREIMGYKPELIDYLQVAAGWAISGDTSEQSMFILYGTGANGKSTFLNVIQRILGDYAIATYAETFMKRNNDTATNDIARLRGTRFVTTPETEQGKRLSEHLIKQVTGNDSMTARFLYGEYFTSYRLSRFSWQATTSL

SEQ ID NO: 84502 - protein, 536 aa, Unknown
  Obtained from environmental sample
  DOMAIN (383)...(532): Methyl-accepting chemotaxis protein (MCP) signaling domain
  misc_feature (1)..(536): Xaa is any amino acid
MELERAKLEASVNAEIAIALKMATSPLVQRHFINPADSDLRRIAFEEIDGYRRAFKSNSVFWSSNADKEFYFSEDNHYTIDAENPDNYWYKMTLYETEKYNFNINYNAELQQTLLFINAPVFDEQHTPIGLVGTGIDLSEFVNNIYQNYKGGAALYLFNSQGEITGSKDVDQIKNKTMLNKALGDTGRIILERAKSGESQYFSVSEGVATVIGVPSLEWHLTAILPITIADTLKSGMTLLFLLMMAAIAGIIIISYLFIAGLLKPMKNMVKTLDEIADNADLTKRLQFKHMDEIGVLAHDFNSMMEKIRTFVGTIKYKINALTNTGFELSSNMAKTSKSVDQISVDFDGMKSGMGKQEESAAVADKAVKDIEASIESLNSLIEDQSKSINTSSSAIEVMTANIHSVRNTLIENGKNVSELAAASENGKTGLQTVAEMIREIARDSEGLLEINAAIDNIASQTNLLSMNAAIEAAHAGEAGKGFAVVADEIRKLAESSSEQSKTTATMLKKIKTSIDSITASSNEVLSGFEVIDSGV

SEQ ID NO: 84503 - protein, 161 aa, Unknown
  Obtained from environmental sample
  misc_feature (1)..(161): Xaa is any amino acid
SLSCRKRKIPTWGELSRAKTGRVYGSLTGLLTVMKGLPLSYNKDMQEDKEAVFDAVDTVKACLSVFCGMFETITFNTENMYKSALGGYTNATDAADWLVKKGLPFREAHEITGRLVLYAINKKARLEELTLDELKSISPVFDETLYQAISIEACVKARNLL

SEQ ID NO: 84504 - protein, 262 aa, Unknown
  Obtained from environmental sample
  DOMAIN (1)...(64): HAMP domain
  misc_feature (1)..(262): Xaa is any amino acid
MLVIVVFVLIFFVARRISSPIKAFHSALEKVKNGDLTVKVDVKYQDEIGELSGYFNMTMEKIRNLIVAIKGEATNLSDVGGDLSSQMQQTAEAVHHITVNIGAVKEKVTGQSASVSETSATMEQVTDNIDKLGKNVEAQTESVSRSSSAIEEMIANIESVTQTLGRNAESVQELIKVSDIGRNSLQKVTQDIQEIEKESAGLLEINSVMENISGQTNLLSMNAAIEAAHAGEAGKGSPLSPGRYASWRRVIPAVKNIFECSG

SEQ ID NO: 84505 - protein, 63 aa, Unknown
  Obtained from environmental sample
  misc_feature (1)..(63): Xaa is any amino acid
MIEYNIVSFGGVGDGVSDNSDAFQTALNTIKDAGGGIMRVGRGIWRTGPLKFFAHSAESVSAN

SEQ ID NO: 84506 - protein, 329 aa, Unknown
  Obtained from environmental sample
  misc_feature (1)..(329): Xaa is any amino acid
GLWPRGDAGQDMVFPLSEGRHTFRLQAVLGDMGTLLSTMEESIFRLNGMYRKILVLTGTEPDIYRDYRVETAYPDVITAMELESKILYKLVDDFIAYSGERNAQNTVPLTLARQLELFVSEPEIIPRSMNNFRQNISALGDSLLSLAQSQLDIDYIIVSAVDAKLPAVRENFFTGALHEIRSFLVSFFTDYSSLGNVYRRGDNTVEIWILAGRDQSTVLKAMIDDTFTPQTNIRVNFKLVAADALMPAVVAGTGPDAVLTVSQADPVNYAVRKAALDISQFADFKETIREFNRNAIIPFEYNGGVYGLPGNPDLPGDVLPQRYFSGDRY

SEQ ID NO: 84507 - protein, 75 aa, Unknown
  Obtained from environmental sample
  misc_feature (1)..(75): Xaa is any amino acid
MPEVEKVIRILVVEDQTILRESLVRIIGEQSDMEVAGATDDAAKTPELCRQLQVDLVLMDVVTKKRRVSCRILSH

SEQ ID NO: 84508 - protein, 164 aa, Unknown
  Obtained from environmental sample
  DOMAIN (1)...(153): Bacitracin resistance protein BacA
  misc_feature (1)..(164): Xaa is any amino acid
AFGGGYREVWQIAVKRAAQGNLKKAGEMSWLDALVIGILQAVAIIPGVSRSGATLSGALSRRLDRDFAARFSFLLSIPAILGAAVFQIKDLVKASNTTVLSVSNGGIGTAAIIAGTLSAAIVGFFAVRLMLKIVREKSLWGFAIYTGALGLLVIVDQLATHLVF

SEQ ID NO: 84509 - protein, 253 aa, Unknown
  Obtained from environmental sample
  DOMAIN (1)...(103): Response regulator receiver domain
  misc_feature (1)..(253): Xaa is any amino acid
LDYFRVVARKLGVYCDTAISGEDAIALVERDNSFNIYFIDLQMPGMDGLKLSHELKARISEDSEVIIMTANEWTIGAEETKNTRVDKFLSKPLFPPVIEDVINEYLSEKEQEEVNVQSFDGVYEGRRVLLAEDVEINREILITLLEPTLLKVDCAENGKEAVRMFSEAPEKYDMIFMDVQMPEMDGYEATRRIRAFEAERNSASRPKGIPIIAMTANVFREDIEKCLEAGMNDHIGKPLNLDIVLGKLRIYLT

SEQ ID NO: 84510 - protein, 86 aa, Unknown
  Obtained from environmental sample
  misc_feature (1)..(86): Xaa is any amino acid
MVTDLVIGKDVTHIGEWAFYRFFRLKSLTIPGNVESIGFCAFAECDSLTAVTFEDGVKSIRSSAFLGCYHLTSVTIPNSVSADLVI

SEQ ID NO: 84511 - protein, 134 aa, Unknown
  Obtained from environmental sample
  misc_feature (1)..(134): Xaa is any amino acid
MGLINRYWRALSLAVAATALYAFNAAAQTPSGPGPLLTDERDGKTYKTAGIGGKAWMSENLNYKADMSWCYDDNESNCKKYGRLYTWEAAMEGCPSGWRLPTKDEWEMFAKFAGGERRLQKLNQRTGGAVPAWH

SEQ ID NO: 84512 - protein, 104 aa, Unknown
  Obtained from environmental sample
  misc_feature (1)..(104): Xaa is any amino acid
FNIGQNSARGIDGIINKIDPTAEGFGPFDVNLFSWTEEERKKIKALPTSLGQACDALDRDRDFLLRGGVFDKAQLEDWTKALRQQYASVKTRPHPYEMSLYYDA

SEQ ID NO: 84513 - protein, 174 aa, Unknown
  Obtained from environmental sample
  misc_feature (1)..(174): Xaa is any amino acid
MKLFHSLRFRFAVLLSVFIIALIGIVSVLGIRQMSKTVTETFSTQGIYIVEKAVSLIDGDSFETLARSRDINEPFYEETRLKLLELKNFSGCKYLYTMAPVNGSIWQFVIDGSTEPDDIENFSNIGDEEDTSSYDDAFRRAWTSGKTEHGNLVNQEGWGWLISFYIPIINSSGK

SEQ ID NO: 84514 - protein, 286 aa, Unknown
  Obtained from environmental sample
  DOMAIN (182)...(283): Histidine kinase-, DNA gyrase B-, and HSP90-like ATPase
  misc_feature (1)..(286): Xaa is any amino acid
MSARAIIIFIVIFTAVAVMVVFLSFFLSLLISRPIQKLTEEVVNIGAGHLDARIEGSYNDEFDKIKDAVNSMSAEIKTYMEEKLQTERKLSESRISIMLSQIQPHFLYNALAVISSLCDKNPAEAKKATVNFSNYLRGNMNLLERTEPIPFENELNHTIGFLNLEKAMYGEALNVMFDIQTKNFKLPALTMQPIVENAIKHGIGKKEGGGAVTISTKETERSYMIIVTDDGAGFEQDKINDDGQQHIGINNVRLRLSAQCGGSLEIKSKPGTGTTATIKIPKQEAL

SEQ ID NO: 84515 - protein, 456 aa, Unknown
  Obtained from environmental sample
  DOMAIN (72)...(141): HAMP domain
  misc_feature (1)..(456): Xaa is any amino acid
MSTGRLELSEGETGPLLEILRAGKQGLQNAVIGGGERVFQSFYFAPFRWHIIISEERGVFYSDANRIAVQSLITLGASILLASILLIIFSAHLTNPLARIVKTMDDIINSADLSSRVEVEYQDETGNLAFTFNRMIGELDKAYGQIKRYAFEAVLAGKKEERVRQIFQKYVPKDVIERFFASPEKMLVGDNRNLSILFSDIRSFTTISEGMAPDDLVNSLNRYFSGQVDIIYNRKGIVDKYIGDAIMAFWGAPEKHEDDCLQSVLAGLDMIEALAVFNENQKKLGKPEFRIGVGINYGEVTVGNIGSERKMDYTVIGDSVNLASRMEGLTKTYHSELLISENVYVELQKKLTEPNAPKLYFRLLDTVAVKGKTRGVKIYTVKRVLSQAEAAAWPAHNQGMALFYKRSFREAADKFKEVYRLLSKDPNAENLFHRCVEYATNPPPPDWDGVEVMKTK

SEQ ID NO: 84516 - protein, 199 aa, Unknown
  Obtained from environmental sample
  DOMAIN (1)...(190): Queuine tRNA-ribosyltransferase
  misc_feature (1)..(199): Xaa is any amino acid
DDGTVIPEPLRIVQGNFFPDLRKRSAQVCVQSGTPGIAIGGLSVGEPAEVFTEALAYTTEALPDDKPRYVMGIGTPQYILTAIEHGIDMFDCVLLTREARNGRVYTRKGPFALKKRENTLDFSPIDKECGCKVCRDYSRAYLRHLFKTKEILCSMLASYHNLYFINDLVTNCRNAIKEGRFLQYKKEFLSAYTEEGINE

SEQ ID NO: 84517 - protein, 369 aa, Unknown
  Obtained from environmental sample
  misc_feature (1)..(369): Xaa is any amino acid
MNRKDIKNFTTKHTNQTNSYLRYGQENFTSNYANNTNRNKLKRTTTRFELKFRVGSCVSWLIFFFFLFSFQAYAQEIEASRLAIIKYGTETEIANLIQSLRNENADYLDDELIKLIDNTKNQKILSGVFAFFGEREKSGLEERAIKALDEREDEANETVLSAIDYLGMLKVSKAVPSLMELLDTEEKRFMNNAFRALGRASSSDKEKADAAADFLIDFYNDRNVGENAREIIIAIGETKSPKAVPLLAGIASNPDERTPLRIAALDALSRVGDPTGLDAVLSCISTNDPNVRSAAVAALGPFSGEKVDKAILDAFRDSYYRTRIAAAQASRERKLVAAVPYLQFRAERDDVPNVKDEAVKASADLIIDP

SEQ ID NO: 84518 - protein, 500 aa, Unknown
  Obtained from environmental sample
  DOMAIN (93)...(195): PAS fold
  misc_feature (1)..(500): Xaa is any amino acid
LNVKREDIIGVPCSRWGANICNTENCGITRLRNGYKETYFQQFGGEYHVLVSYLYNEKGEVDGHVEVVYEDTAIIEKEKKKFEELAHWYESILDAIPFFISVTDTNLNWTFINAAIEHSLGESRKDVIGKHCSYWGFGHCNTDECTIERARRGLNQTYFTKENLSYQADVEILRDLKGKTMGYLALVQDITKLEQITKQRAEAEAAARAKSAFLANMSHEMRTPMNAIIGMTTIGKSAAAVERKDYCFAKIEDASTHLLGVINDILDMSKIEANKFDLSPVEFNFEKMIQSVVNVISFRVDEKHQKLTVRIDKEIPQNLFADDQRLVQVITNLLGNSVKFTPEGGSISLDARFSGEKDGLCTIEITVKDTGIGISSEQQGHLFTSFQQAEISTTRRYGGTGLGLAICKSIVEMMGGTIRVESEQDKGATFIFTVQAKKSAHVNNAINDLSDSDVKEQSELAGLFTGRRILLAEDVEINREIVLSLLETTQLEIDCAENWR

SEQ ID NO: 84519 - protein, 329 aa, Unknown
  Obtained from environmental sample
  misc_feature (1)..(329): Xaa is any amino acid
SHFCPGRRAFPVWGNKTGTGLIKHSVPIQSVAYSLDRREFTDISFVSRLEKTWFSYFCDFNTLGKSDGQLVFHVTDAAGVVTEVLPEYTIEPNPPLPIIIVNSPAEEEVITNPFEISGLAYDDVGINAVYWRILGPKMESISKGAAGEEARKAAAVFATIREVPFQELLTDQNFRIPVDFSMVTDGEYTVEIYASDIYGVQSEMVSRIIKVSTAPPETEVLSPVITRYNRKAIVVKGFSSDANDIENVFFSMDNGNTFQKVELFTNGNWELALNTADYTDGIYSALIRTYDKYGVSSYSNAMINIDNTPPEIFLTYPVDGQHVGTNMNL

SEQ ID NO: 84520 - protein, 205 aa, Unknown
  Obtained from environmental sample
  misc_feature (1)..(205): Xaa is any amino acid
MNAVAAIFKKEFVSYFISPIAYVFIVVFLIGTNFMYFQPFFLINQADMRNYFSLLPWIFLFFVPAITMRGWAEEKKSKTIELLLTWPVSDTQVVLGKFFASLTFLAITVALSITIPITLFIIGHPDPGPIIGGYAGALLMGAAYLAIGLWVSSHTENQIVAFILAWVAMFVLMIIGHPVVTMKAPSALVPLFSFLGCSRSAESVM

SEQ ID NO: 84521 - protein, 107 aa, Unknown
  Obtained from environmental sample
  misc_feature (1)..(107): Xaa is any amino acid
MTQAPQENSRLLIKITRETLPQVKDKYPFLYLERGRLEVDDSSVKWIDAEGNVIRLPIATINCLLLGPGASVTHEAVKVLGGANCGLCWVGEDSFCSMPPALGRSDH

SEQ ID NO: 84522 - protein, 70 aa, Unknown
  Obtained from environmental sample
  misc_feature (1)..(70): Xaa is any amino acid
MSHSFQRTHIECHILQSFPVTCLNRDDVGAPNTAVVGGVTRARVSSQCWKRQVRQELHDLGVKIGVRTNR

SEQ ID NO: 84523 - protein, 261 aa, Unknown
  Obtained from environmental sample
  DOMAIN (97)...(258): Bacterial transcription activator, effector binding domain
  misc_feature (1)..(261): Xaa is any amino acid
SEGHLRRLFSFAFNLSIASYIRSRTLAATLHDLLETGKSILDIAIEYGFEYEQSYIRTFKREFGITPGHLRKTRQVMQIKPPLHLFDKRRLDNGVLFGPDFVMVPRFHVIGKRHRLSFKDLRAEPLLTKQFWENERKQIKDTVNPHACINLSCNLNMEGGHFDYIPSVQVADIKNIPPGLCCETFETSMCVRFRYIGQHHYYEITGDVVSMMYNAVGNFAQDENAKYELLHNKSNFVKIDGRLYDGTYCQMEWYTPVYEKQ

SEQ ID NO: 84524 - protein, 316 aa, Unknown
  Obtained from environmental sample
  misc_feature (1)..(316): Xaa is any amino acid
GDFFGLSTRPWSPGPQGEPGEPGEIGPEGPQGPPGEDGTGINLIGAFDTEDDLIAASLSGSKGDAVLVAGILYIWDTLNDGWFNTGANIRGPQGEQGEPGEKGDDGEPGTPFRIIAGVADEDELEDLDLSPVLGDHVLVDGQLYAWSPDDDAWIDTGINLRGPQGVQGLQGLQGEPGQRGSRFYVTSTGVNPLPDSWMPGDFILYTGDDDAYFPNSDGDDFAKGSIIEVLRASDMADTPPDRGEVAWRGNLAGRNGQNGADGSRISGVSSEAENTHSLPPTSRRVGDWLLVRVMTPFRGGTGLTCPEVRCSGFQHF

SEQ ID NO: 84525 - protein, 216 aa, Unknown
  Obtained from environmental sample
  misc_feature (1)..(216): Xaa is any amino acid
VSKNTTSNIYKARKIFSLALIYIEFIIVAIIVIYPLLWVVGSSLNPVNSISRPSVLPSNPTLDNFRDLIVKTKFANWYRNTLYVSVLTTIFTVFIHSATAFVFARFRFKGRKAGLLTVMILQMFPSFLGLMALYMVALNFGMLNNLNMLVIIYISGGIPGNIWLVRGYMLDIPKSLDEAAYIDGASKIRLFYNIILPPSLRMCFLFHRRLYGTLAG

SEQ ID NO: 84526 - protein, 74 aa, Unknown
  Obtained from environmental sample
  misc_feature (1)..(74): Xaa is any amino acid
MRQLENKVAVVTGASRGIGKAIANAYAREGAYVALVCRGAPDETIRDIENAGGKYRAFHHDFADVEGVEGLVQK

SEQ ID NO: 84527 - protein, 107 aa, Unknown
  Obtained from environmental sample
  misc_feature (1)..(107): Xaa is any amino acid
EATEVTIALSGANASSFSLSKTSIPGIAAGESDSFTVVPNPGLAAGTYTAAVTVSGGFIVTSRSFNVSFKVNSPDVENSGGGGGGCSAGFGALGIAALAGLFALKKR

SEQ ID NO: 84528 - protein, 237 aa, Unknown
  Obtained from environmental sample
  DOMAIN (1)...(235): Domain of unknown function (DUF323)
  misc_feature (1)..(237): Xaa is any amino acid
MGSPASEVGRYDNEVRHSVTVSSFYMGKYPVTQKEYQEVMGTNPSSFKGDSLPVETVSWFDAVEYCNKLSQKEGLSLAYSISGSGDNRTVTWNSNANGYRLPTEAEWEYACRAGTTTPFSTGSNITTSQANYDGNYPYNNNAKGTYRRTTTAVGSFSPNPWGLYDMHGNVWEWCWDWYGAYPSNAQPDYKGASSGSNRVIRGGSWNNYAQGLRFAGRGYNTPSNRHNNLGFRIVRNG

SEQ ID NO: 84529 - protein, 286 aa, Unknown
  Obtained from environmental sample
  DOMAIN (2)...(166): 3'-5' exonuclease
  misc_feature (1)..(286): Xaa is any amino acid
MDFETDSLDAWNARPIGISFAVKPKEAFYAPVAAHQGAGEDSPSPFLDGEKVKALLAPFLADPSMTIVAHNAKYDYKVSRGWGISRWQCKIWDTMVAAWVIDPERGGYSLDSLAVFYFGVSPIAFNDIVPKGKTFDSVPLETACRYSAEDADFCLRLKHCLEGKLGNTEPLFKNLEMPLLPILAEMEGEGIRIEKDILKNYGAELGKELEDIQARTYKLVGHEFNLSSTQQLQKVLFEERKLKPDKKTKTGYSTDVAVLEELARERRSPRPHTQAQDAFKTQINLR

SEQ ID NO: 84530 - protein, 63 aa, Unknown
  Obtained from environmental sample
  misc_feature (1)..(63): Xaa is any amino acid
MKSCPCGSGRGYGDCCEPYIKGKKDAPTAEALMRSRYAAYVEHAIDYIIDTWSRDEQEKIDVK

SEQ ID NO: 84531 - protein, 222 aa, Unknown
  Obtained from environmental sample
  misc_feature (1)..(222): Xaa is any amino acid
MTLDRYLIRQFLPIFAVAVGMFMFVLSLIDLFAYLVRYLNYEVPFSQIMKISAFYLPKSFSYALPISLLFASAYTLGDLYARNELTSIFSSGIPFWRFSMPLVIIGFLASIFSFFFDDNLVIPTLRVKNELSRRFLRQTTAENNSDIVIKARNGQLIYSIDYYDYTAKILNGVSIVEQDSEGNFISLIRAQQAMWTGEYWDFANPMIYYWEESFCGLAITQK

SEQ ID NO: 84532 - protein, 341 aa, Unknown
  Obtained from environmental sample
  DOMAIN (1)...(337): Predicted permease YjgP/YjgQ family
  misc_feature (1)..(341): Xaa is any amino acid
MTVGRLSSDNEILVLLSSGLSFRNVFIPAITVGIVISILSFIANDILMPGGYVQFSRLYRRILVSTPALELEANSVKKFKDTVIVTGNVTGNAIDNVLILDKTGNGERRVIMAANAELKDAGRNGLSLDLGRAFVQSSKEIAREDYDYASAGNLRYWVPQEDLIQAMSSVSPREMSSIDVFKEIKRRTLDLNNRLNEKRNKVSSLALTLETSIRAGPASPEWNRRASQFTAFQREAQALQVMRKDRGLSLHWLEFYKKFSIPFGGFSFIFLAVSLGLMAKRSGQTVGFIFGLIISVIYWALLLGGQTMGIRLGTSPFWSMWLPNILALSIGLVLTVIKVTR

SEQ ID NO: 84533 - protein, 135 aa, Unknown
  Obtained from environmental sample
  misc_feature (1)..(135): Xaa is any amino acid
VKADKVIATYRRMRAQPLWRLLASDNGPFVIGLLQSHLYESERSLPASILHERIGRDLEALRSQGETFPQTSQAYIAGWLAEGYLERRFPVGANEEEYELSTAAVEAIRFLFRFGATPLGCYRKSISAGIQALVK

SEQ ID NO: 84534 - protein, 321 aa, Unknown
  Obtained from environmental sample
  misc_feature (1)..(321): Xaa is any amino acid
DDGRVGNGWRYLSYQWARNTNIYDSTSWQSIEGATAKTFVPDVSRIGKVYYKVKVTNSNNNVLGESVASQTSYPVVVVVVDNGVKNAKFPIVTGPWLGFDVGNGKPTEMRVTAESVDGGILSYQWFKNQRRENFGGVVVDGANEDVFDPGPNLNLSKEPVYYYVEVTNTNPEATGEKNAITASKAVEQLGIITGINDGARVIPHADTNVETSVITPGNRLTTEFAVGPNPADKASGTVNIFRSGSHVKSASLSVYDASGNVVKKIVIHDDAVDANGKRTVGSWNLRDAKGRIVPNGTYVVRGTINVSSGKTEKVSLVVGVW

SEQ ID NO: 84535 - protein, 306 aa, Unknown
  Obtained from environmental sample
  misc_feature (1)..(306): Xaa is any amino acid
MPVLADLHDAITACMGHGEKSEAAAAFAMCDVGTAIGELPEGVSQTPVQDDMNRQLKKLKLEKYKTAVAQELDLDLRENRSVKSEEAAFIDLARSTFLHRLRFLGIGFAKQMPLKKDGATWAEKWALQWTPESEIQAVEATLKGETVEVAAAYVLKEKLDSCEDIVEASNLIAVLYVCALESSMGLALGVLQRLAADSSNIVKTADAARELSMLILYGDIRKADTEPLKPLLKEIFLRSALMLNEAAGCDDKAAAGYIEAIKTLHDISQSHFDLVDDDLVGKKNTGSLPPRDDKNAKISRLLFPLF

SEQ ID NO: 84536 - protein, 105 aa, Unknown
  Obtained from environmental sample
  DOMAIN (6)...(103): tRNA pseudouridine synthase
  misc_feature (1)..(105): Xaa is any amino acid
MTRIKLTVAYVGAKYCGWQMQAAAHNGSRGELPSVQGAVMRAVERVLGVRVHVHGAGRTDSGVHADAQVAHLDVPDDKAGVDWQRALNTLLPYDIRIASCRMLTH

SEQ ID NO: 84537 - protein, 103 aa, Unknown
  Obtained from environmental sample
  DOMAIN (1)...(103): Aconitase C-terminal domain
  misc_feature (1)..(103): Xaa is any amino acid
MKTFGGPVLFLDRSDINTDEIIPAKYLTESKKEALKPYLLEDLKLDGFDHAADWRGRVKVVVTRANFGCGSSREHAPWALEVNDITCVIAESYARISARNLAS

SEQ ID NO: 84538 - protein, 192 aa, Unknown
  Obtained from environmental sample
  DOMAIN (1)...(184): Aconitase family (aconitate hydratase)
  misc_feature (1)..(192): Xaa is any amino acid
SSEYNNDKETAVKEFAEWRSDPDASYAKTLTIDVSNLAPVATFGYKPDQVKPVKELGDVKIDQVYIGSCTNGRISDLRIAAGVVKSALTKGKKLADGVRGIVSPATPAIFRQALDEGLLTIFMDAGYCIANPTCGACLGMSTGVLAEGEVCVSTTNRNFNGRMGKGGMVHLASPATAAASGIAGKLVDPRED

SEQ ID NO: 84539 - protein, 178 aa, Unknown
  Obtained from environmental sample
  misc_feature (1)..(178): Xaa is any amino acid
MKKLPLQKVFTLLESGPIALLTTACGGKQNIMALAWTMVMDYTPRFAFLTGPWNYSYKALKKTKECVIAIPAVDLAKKSVQIGMCSGAETDKFEKFKLTPLKAENVSAPLIKECYANIECRVIDHIQKHNIFVVDGLAAWIDDKREEKRCFHGIGDGKFIVDRRTINYRKIMLPKLPK

SEQ ID NO: 84540 - protein, 345 aa, Unknown
  Obtained from environmental sample
  misc_feature (1)..(345): Xaa is any amino acid
VERPARILQGYFSAELLRGAATLSAVASAWEAWLGAILSKALTRFEEIKTTFGMATFGDIVRSALEGLGNGSIAPPRPKLLLVDEYQDTSLAQDVFLGALGAERIVRVGDAKQAIYGFRGSSPELFQEHVRAAGDRAYRLTANYRSAPPIVDTVNTFVNDVWPAKDPFFTDFGAEQTPQAKGSCPVGAVFAASASKGTDLPGLSRWIAALSSEPGWEKTLGESQTADSRQTRALLLRQRTNLPALLMRLKRNGVQPYVLAKSGFWDSPGVRLLMAALEAYAHPSRPLPRMVLLRHFAGLSDLELHQMDRAKGIGSLDIESAPAEKRPRIAWLQSLKLHRTTRHNR

SEQ ID NO: 84541 - protein, 127 aa, Unknown
  Obtained from environmental sample
  misc_feature (1)..(127): Xaa is any amino acid
MDRILILDFGSQTTQLIGRRIRDLGVYTEIIPGDTPLVSAITKDVKGIILSGSPESVYDKGAAPDKKVYDCGLPLLGICYGLHRMTHDLGGKVEPLPEKEYGRIEVKVGSREWGVGSGRRARASPST

SEQ ID NO: 84542 - protein, 77 aa, Unknown
  Obtained from environmental sample
  DOMAIN (41)...(72): Ribosomal protein L15
  misc_feature (1)..(77): Xaa is any amino acid
EKEYQIVKVGALKDADFGGSEVTADALRKLGLIHEAGKPVKILGTGELTKALVFRVDAYSKSAKDKIEKAKGKAEVV

SEQ ID NO: 84543 - protein, 64 aa, Unknown
  Obtained from environmental sample
  misc_feature (1)..(64): Xaa is any amino acid
VDCVIICEKPKVLPFRDVIRNSLAKVLEIPLDCVFVKGKTAEGLGSAGKGEAVEVLAQCLVEKK

SEQ ID NO: 84544 - protein, 128 aa, Unknown
  Obtained from environmental sample
  misc_feature (1)..(128): Xaa is any amino acid
MIVLQQLINGVSLGSIYALIALGYTMVYGIVLLINFAHGDILMLGAYSAFFVLSAIGSGPLGMLLAFVVSMVICAAFGISIERLAYRPLRSAPRLNSPDTAIAVSLILEKRRRVFLSMAPIPGISTPA

SEQ ID NO: 84545 - protein, 314 aa, Unknown
  Obtained from environmental sample
  DOMAIN (12)...(314): Cell cycle protein
  misc_feature (1)..(314): Xaa is any amino acid
MDDLRRKRSLDFILFLTALTLWVIGIFFVYSATYIHETGPLAGIYKQQILWVVMALLIVVLIISIPARYISNSAYILYGLSLIMLVLAIATGSGVSAKGAERWIMIGGFKIQPSEFAKVGLLLALAKRLSEKPVSLYNLTTLIVPVILILVPFALVLKQPDLGTAMVFCVMALPMFYWSSLTLLDVFYVVSPLISLLLSAIPLLLAFNTGVSWGVFESVPWGIFFIIVVVLLYIFRAPLFIWIGVIAGNMATATITTVVWGSVLKDYQKMRITSFMNPQADPFGSGYQVIQSKVAIGSGHIFGKGYLQARPICH

SEQ ID NO: 84546 - protein, 240 aa, Unknown
  Obtained from environmental sample
  DOMAIN (73)...(162): Mur ligase family, glutamate ligase domain
  misc_feature (1)..(240): Xaa is any amino acid
LIRIGRGGYIENNAHGNNYRVFIKQLNKHIEVKDNLPGSFNIGNVLAAILTVSNLLNLPLCEIVPHVSKLKPVRGRMTAINKGQPFELVVDYAHTPSSFMAIFPPLRERLDKSGGRIISVFGSAGERDTQKRAEQGKIAGYYSDFIVITDEDPRGEKPMDILEEIARGVETGEESVKFRREENLFLIPDRPSAIRKALSIARKGDLVLLLGKGHENSIIYADHVMAYDEIAEAEKALGEI

SEQ ID NO: 84547 - protein, 92 aa, Unknown
  Obtained from environmental sample
  DOMAIN (17)...(75): Hemerythrin HHE cation binding domain
  misc_feature (1)..(92): Xaa is any amino acid
MNFRSNLITWSPTYSVGVKIIDDQHKKLFNFINDMYNHIAGNEEAEQAYFKKIIQQIVEHIRINFATEEKILLVTKFPDYIEHKSAHNPRHQ

SEQ ID NO: 84548 - protein, 559 aa, Unknown
  Obtained from environmental sample
  DOMAIN (174)...(314): ATPase family associated with various cellular activities (AAA)
  misc_feature (1)..(559): Xaa is any amino acid
TGIRLAETAGPVSQEDGIVPPIVEKISGDTAQLINSVETLVEKQPKIYGEAAQVFFSSAASKIIAKAETEAASLKDEFVSAEHILIAIAASDGKAAELLKKAGVTKNAILGALKQVRGNTRVTDQNPEEKYKVLDKYCRDLTALARQEKLDPVIGRDEEIRRCMQVLSRRTKNNPVLIGEPGVGKTAIVEGLARRIVAGDVPEGLKGKKLLALDLGALIAGAKFRGEFEERLKAVIHEVQASEGGIILFIDELHTLVGAGAAEGATDASNLLKPALSRGELRCIGATTLDEYRKHIEKDAALERRFQQIYTAEPSVEDTIAILRGLQERYEVHHGVRIKDEALVAAAMLSNRYITSRFLPDKAIDLVDEAASRLKMELDSRPTELDKLERKLLQLSIEKQALTREEDQASQSRLVKLEKEIADLSAERDAMNARWEKEKKDVQKIREIKQQIEELKIEETRYEREGNLTKAAEVKHGRIPEAQKRLKTLTDQMEGKSGGKEGKPALLREEVSEEDIARVVSVWTGIPVSKMLSGELQKYLERKRCGTAGLGQSVLGNKR

SEQ ID NO: 84549 - protein, 190 aa, Unknown
  Obtained from environmental sample
  misc_feature (1)..(190): Xaa is any amino acid
VRDITDDTDASLVLDIEDDGRPFLYTACEVDLQGPGGYSYMRKINALTGALVWEHKIRCAYDVDVNGGALSTPVVGRGPIKDLVIFNISKVNNTMAGQMLAFKKYDGELAWELDFPSYGWSSPALTYARDGRPYLIQCDSAGLMHLIDPETGVVKDSLRLNGNVEGSPVIFDDMIVVGTREMKIYGVRLL

SEQ ID NO: 84550 - protein, 150 aa, Unknown
  Obtained from environmental sample
  DOMAIN (18)...(103): Transposase IS116/IS110/IS902 family
  misc_feature (1)..(150): Xaa is any amino acid
MYNELGGIVDEIFAEQFRLLRTIPGIGAKTAAVMLVCCRGMENFQTHRQLAAFVGVSPTVKESGTSVRGSGRVAKVGNPYMRSLLFMCAFTASKACRPCSELYARLTGKGKSKMAALMAVMHRLIKIAFGVVRSGEPYRGGWGKKITEQE

SEQ ID NO: 84551 - protein, 95 aa, Unknown
  Obtained from environmental sample
  misc_feature (1)..(95): Xaa is any amino acid
MGANTKYKDSVFSFLFSDPDLLRELYCALEGVALPSDIPVTINTLQDVLFKDRINDISFEIGGELVVLIEHQSTINPNMALPLLLYIARVYKKNV

SEQ ID NO: 84552 - protein, 74 aa, Unknown
  Obtained from environmental sample
  misc_feature (1)..(74): Xaa is any amino acid
KQLVIDFLQSKSGTKSKFYFNDFLEIFPGKGPRDVKKILTNLVNTEVLEFWSSGSTTMYGLKGAGKQSHAEGES

SEQ ID NO: 84553 - protein, 224 aa, Unknown
  Obtained from environmental sample
  DOMAIN (63)...(168): HD domain
  misc_feature (1)..(224): Xaa is any amino acid
LSLKDDVIKQTASDALSPWTVEVQTDTIFGLAGFVAKIIDYKSLFTRLHSTQIANKAWFMGQYYKHDSQELAELYLAASLHDLGKLAIPSEILEKPGKLSDEEFDIIKGHVRMTWELLGDIEGLGTICQWASNHHEKLDGSGYPFGKKAPELDFNSRLLTCLDLYQAISEERPYHPRRNHGDTIAILNEMADMGKIDGDIVKDMDVALAPYDNKDLPPPDGCGL

SEQ ID NO: 84554 - protein, 299 aa, Unknown
  Obtained from environmental sample
  DOMAIN (90)...(245): Peptidase family S49
  misc_feature (1)..(299): Xaa is any amino acid
MKLNAKLFVFGACFLMARPLFAQNIFLELNLNNQRAQNITRSMRPKPALELFRVIEQAGNDRKIAGIVLNISACQLGQETLWELRNALEKFKAKGKKVCAFISNANLDLYCLATVADKIVMDDQGVLTLLGYAWGRGYVKHSLEKLGIGARELRYLEFKSAAESYTRDSMSDADRKQYGEILDDIMGITRDTVTKARSWTGEEFDSIVNNEFMFSARRALERGLVDRSGRKGAVIEAVREISGGNEAGYFFLYGDAESSLTGSKFPYKTARQGGLFSRPPVIAVINANGVTDMERGIAA

SEQ ID NO: 84555 - protein, 324 aa, Unknown
  Obtained from environmental sample
  DOMAIN (90)...(206): Response regulator receiver domain
  misc_feature (1)..(324): Xaa is any amino acid
KQLRKNSCSLFPGGNYPFAFISVDIAERAIKSKPLPTTLVLLADSLDTITFRNMPVLSRPVYAVPLVNVLNHQTGTVSKSQGLHFIAPDARILVVDDIHTNLVVTSGLLAIYKSHVDTCTSGAAAISMVQNKHYDIIFMDHMMPEMDGIEATKSIRALEGEYYRNLPIIALTANAIIGMKEMFLSNGFNDYLSKPIEISKLDDTLAAWLPGDKQVLNAEAQEPIKDQAVFPDGFLVEGVDIKAGKTRYTEKSFLDVLRSYYQHTPGLLEKINRIKYRDLSEEAIKEYTITVHGIKGASFGICADTVAKQAEALENAAKSRDIKS

SEQ ID NO: 84556 - protein, 126 aa, Unknown
  Obtained from environmental sample
  misc_feature (1)..(126): Xaa is any amino acid
SIRFIQGDLLDALLPDPSSLCYLLPVTCYLIVSNPPYIPSAEIPSLSPEIRMEPSLALDGGDDGLHIIRKIISHAPEFLCKGGSLLLEADPRQMPAIAALYEEAGFSDIQTHTDLSDKERVISGIN

SEQ ID NO: 84557 - protein, 294 aa, Unknown
  Obtained from environmental sample
  misc_feature (1)..(294): Xaa is any amino acid
LGDYGRRLESSRFLGVVTINLPRIGYLAKDKDDFYRRLEQLMVLAKDSLRIKRKIVGRLLEGGLFPYTKRYLNNLDNHFSTIGLVGMNECLLNFLGREFTIATDRGRSFALEVLGFMRNKLADFQEETGELFNLEATPAESTSYRLARHDKKKYPRIITAGKAEPYYTNSTQLPVMETDDIFEALDLQEKLQTAYTGGTVFHCFLGEAIEDWRVCRDLVKTIAGKYRIPYFTISPTFSVCPVHGYLRGEHFSCQKCREEKKTSSARKSRYWRRAGARFSVALATITNIALSRRD

SEQ ID NO: 84558 - protein, 473 aa, Unknown
  Obtained from environmental sample
  DOMAIN (18)...(473): tRNA synthetases class I (I, L, M and V)
  misc_feature (1)..(473): Xaa is any amino acid
LKAIELAKAYDPKSFEGRIYSLWKERGAFKPEAAQDAGANGDAATPFVIVIPPPNVTGVLHLGHGLNNSLQDIVIRYHRMRGGPVLWVPGTDHAGIATQNMVAEKLLEERGISRRELGREKFLEETWKFKHEKHARITEQLARIGASVDWDRERFTLDEGLARAVKEVFVTLYERDLLYKGEYLINWCTKCGTALADDEVKHEDKPGKMYHLRYYFANTEGDAARNAAVNGEAPSSEGAHESSYVELATTRPETLLGDTAVAVHPEDDRYAGLKGKTVRLPLTDRDIPVVFDAYVDRAFGTGVVKITPAHDPNDWEVAKRHNLPILNILNPDGTLNNEVPAKYRGMSVNKAREAVLEDLKSGGWFIKEEKITHAVGQCYRCETIIEPFLSEQWFVRMKPLAEKALASWKRGELVFYPRKWEHTYRHWLENIRDWCISRQLWWGHRIPAWDCKDCGKTSVSRDDPFALPPLRVP

SEQ ID NO: 84559 - protein, 509 aa, Unknown
  Obtained from environmental sample
  DOMAIN (23)...(109): Glycosyltransferase 36 associated family
  misc_feature (1)..(509): Xaa is any amino acid
FITRTYFKDKFILQTINENCLNAVNESRVETRFFGLAGAPVTSYCGDRAAFLGGYHDYGNPLSVEKGRLDGTLNYNLNPCGALHTALTLKPGESVSLVFLLGQKREAEAKELIARYEDKALPDREINDLKTYWHGKLTNLKVETPDENFNHMMNTWNAYQCFITFNWSRAASLIYCGQRNGYGYRDTVQDIQGIIHLDPEMALEKIKLMISGQLNNGGALPLVKYDHNPGHEDKPEDASYRIAGRPFYRADDALWLFPTVWKYITETGNTALLDEEIPYADTGTDTVYGHLNKAIDFSLNHLGIHGLPAGLHADWNDCLRLGANGVSVFVAFQLYYAFEIMIRCAQHKGDAVTETRMNELKKKFGAIIEERCWNTDRFVRGITEHDQVVGKPDDPEACLWLNPQSWSIISGFAPQERGKAIMDLVHQQLNTKYGARIMAPAYRRHAFDGALALLFNPSTKENGGIFLQTQGWLILAEALLGRGGRAFEYYLESCPAAQNPTRPNLSVGD

SEQ ID NO: 84560 - protein, 64 aa, Unknown
  Obtained from environmental sample
  misc_feature (1)..(64): Xaa is any amino acid
MAFKACTGGTDGSRLAELGIPAPNIFTGGRNFHSRLEWVSVSEMSEACKVIIELIKGTSKKFNF

SEQ ID NO: 84561 - protein, 65 aa, Unknown
  Obtained from environmental sample
  misc_feature (1)..(65): Xaa is any amino acid
LSLFIVAGNPARIIRKRFDSELIELMLMFKWWDLPIEEINALIPLLHNSDLEYVKRKIKCMIASE

SEQ ID NO: 84562 - protein, 334 aa, Unknown
  Obtained from environmental sample
  DOMAIN (1)...(326): PEP-utilising enzyme, TIM barrel domain
  misc_feature (1)..(334): Xaa is any amino acid
VQNEPLFLKANASCFPRYALSNDDKERQKALNKLQVMQKDDFYSIMKYGEGKEVTFRLLDSALHEFMPHTNDELQAYIDHVGKVKGTKPSKADIVASVDALHEFNPMLGHRGCRIAVSYPEIYAMQVKAIFEAAYKLRSEKIDARPEIMVPIVMNSAELKLIAYGKKIEGSNYLGIVDIEEALRKEMKAKEVEYKIGTMIELPAAALGAGEIAKYGRFFSFGTNDLTQTTLGISRDDFTAFMPDYTLFDLINGNPFSTLDSRVKELIALATDRGRLTRPDLVCGLCGEHGANPANVRFCMDAGLNYVSCSPYSVPIALLAVAQAEIDRSKAEAK

SEQ ID NO: 84563 - protein, 333 aa, Unknown
  Obtained from environmental sample
  DOMAIN (23)...(91): ATP synthase alpha/beta family, beta-barrel domain
  misc_feature (1)..(333): Xaa is any amino acid
MANYGDLTRVLEEQIKNWNSTAVNETTGLVVQAGYGVVTVHGLSRAIYGELLEFASGAAGIALNLEENGVGCVLLSGEDGVKDGEEVKGTGRVASVPSGDSLIGRVLNPLGEPIDGKGPIQADEWLPVEAPAAPVIERGTVDTPMQTGILSVDSMIPIGRGQRELIIGDRQTGKTALAIDAIVNQKGKDMYCVYCAIGQKSSSVAAIIRNLEKAGAMGYTFVVLASASDSAALQYLAPYSAVAMAEHFMHKGKDVLVVYDDLSKHAVAYRAISLLLRRPPGREAFPGDLFYLHYQAFGKRRNKPVSGIPTRSASLARSCNMLEYYNNQARKKG

SEQ ID NO: 84564 - protein, 117 aa, Unknown
  Obtained from environmental sample
  misc_feature (1)..(117): Xaa is any amino acid
ALWPRIGAVSTAAAQVLVAVIPIVGIVMGSVVVFFYLLWNHRRRTLLINAGQYSRPVFDLLTFSLLAGLLLGSVGLTLTVFLAVVAGPTYGLLGGIIPLAMGIGLLAFYGIKRGEKA

SEQ ID NO: 84565 - protein, 211 aa, Unknown
  Obtained from environmental sample
  misc_feature (1)..(211): Xaa is any amino acid
MIFGNKTTFIALVAIFGFALTFTFSCSGGDDGGGGNSSGGSSCDMSGYKSKKMPDGKTWMTENLNCKVAGSECYDKNESNCNTYGRLYTWEAAKKACSGGWRLPSDAEWDALVAAVGGASTAGTKLKARDGWNSYSGVPSGTDDFGFSALPGGFGNSDGSFYDVGDGGLWWSSTKYDSHYAYSRYMYYYDEYVSRFNGDKDFLFSVRCLQD

SEQ ID NO: 84566 - protein, 406 aa, Unknown
  Obtained from environmental sample
  misc_feature (1)..(406): Xaa is any amino acid
MRQRLINCAMFDWSNISPAIFGAMFQGVMDKDVRRELGAHYTSEENIRKLIDPLFMDNLRREFRAVKADPKALNAFHDKIAKMKFLDPACGCGNFLIVTYRELRELELDILKMKVNSDQLLMDISSLFKVTIKQFYGIEIVDFPCQVATVGMWLADHQMNMLASETFGQYIARLPLTESATIKNDNALRINWEDIVPKNELCYILGNPPFAGARLMTPSQKEDMQLVFEDGFRGIGNLDYVTAWYKRAAEYIKDTKIRAAFVSTNSITQGEQVALLWKPLFEEYCIKFDFAYRTFRWDNEAKGRAAVFCVIIGFSTTGISGRERPQCKGIIYDESGTKIKAGNINPYLVNAQCVFIESRTSPLCDDAPEMIFGSMPHDAGLLSNYSTEEKKLIGSEHPETQKWFKR

SEQ ID NO: 84567 - protein, 123 aa, Unknown
  Obtained from environmental sample
  misc_feature (1)..(123): Xaa is any amino acid
AAIYIEEFNKAIEDDLNTPRALGELWGLLKEGAAETETLAAIFDMDRVLGIGLENACKTEAQIGGKSEDDAFSREIEELIVKRAEAKKAKNFVAADSIRQSLKERGIILEDGPAGTTWRKSAL

SEQ ID NO: 84568 - protein, 297 aa, Unknown
  Obtained from environmental sample
  DOMAIN (121)...(190): Sigma-70 factor, region 1.1
  misc_feature (1)..(297): Xaa is any amino acid
LTLKFANWKVIRECRIRAKLKPGAKSKTPLQGKNKKPETGAKTAQAKKNPLPKKTAPEKNPKQGENREPRTSGTMVRHPSSSVEVRPKASGEGLAVKAAAMLGTETAGNSTPPATVTISGNVPLDPAVLKLVEYAKERKTLSFEEISDYLPEHISDTEKIEPVLALLEANNVQITVDDNSNEDDVDSESGKRTETGRKRAASNDKEASLVDDPIRMYLREIGRESLLTAEQEIELSRQMEEGENIIKNVIKKSGMIIPEFNRIAEEVFSKKDPARAEPYKKRNHRALGRSANLSWGT

SEQ ID NO: 84569 - protein, 219 aa, Unknown
  Obtained from environmental sample
  DOMAIN (1)...(219): Glycosyl hydrolases family 31
  misc_feature (1)..(219): Xaa is any amino acid
MPDWAMGFWQCKLRYQTQEELLGIAREYKKRGVPLSVIVIDFFHWPCQGEWKFDPEYWPDPRAMVDELESMGVKLMVSVWPTVDHRSENFREMEEKGYLIRTDRGHRISMNFLGNTIHFDATNPEARQYVWNKIKENYYKYGIKLFWLDEAEPEYTYYDYDLYRYYLGPVAEIGNLFPQHYARTFFDGMQAEGQKNIINLIRCAWAGNQRYGALVCSGD

SEQ ID NO: 84570 - protein, 273 aa, Unknown
  Obtained from environmental sample
  DOMAIN (19)...(273): Dihydrouridine synthase (Dus)
  misc_feature (1)..(273): Xaa is any amino acid
MSLYSPVKIGSLELSGNLFLAPVAGYTDRAFRSLCAEEGACFSFTELISAEAVCRSPERYSLGGASDNAVRAAHSVSVNLIRRGENEKRYAIQLFGAESESVYKAALLLAPLLPDALDINAGCPVPKVVKNGAGCALMKNPANLGRVTEATVRASRESLGNIPVSVKIRSGWDSSSLNYAECARVAVEAGAAMVSLHPRTRAQGYGGRSNWAFIADLVSQLSVPVTGSGDLYTPEDARQMLEGNGLRRGNVRKASDGQPVYFFSGALAAGNRF

SEQ ID NO: 84571 - protein, 152 aa, Unknown
  Obtained from environmental sample
  misc_feature (1)..(152): Xaa is any amino acid
MKPFGSSKTKVEEYPLLSLRELVIFPQTIISVFITYKSGIAAIEEALRRDLRLFAVCLKTAESSASDQKSEETWDAGTVVRIVQNLRLPDNTFRVVLQGEYRALLAALHPKNEFTLASVDPIRAENPDPQAREKSEARIPGNLKPMRAVQKS

SEQ ID NO: 84572 - protein, 91 aa, Unknown
  Obtained from environmental sample
  misc_feature (1)..(91): Xaa is any amino acid
MESQHKKVIIVGSGPAGYTAGIYCARANLSPLIIEGNQPGGQLTITTEVENFPGFKDGIMGPQLMGDMKAQASRLGAEMLAALCLKIDLAS

SEQ ID NO: 84573 - protein, 172 aa, Unknown
  Obtained from environmental sample
  DOMAIN (1)...(172): Inositol monophosphatase family
  misc_feature (1)..(172): Xaa is any amino acid
MQTDYLNAAVAAATKGGKVLLQYFRKLDPATIEEKSKNDLVTEADRASEQAIQGELAARFPAHSFLGEESGLSGTSDMVWIADPLDGTLNFVQGLPQWCVSVALWDAEGPVVGCVYDPLRRDLFLAQKGLGAKWHSDIDANMDYSPALLLNGHSQAQGMKVSKQPVLDGAFL

SEQ ID NO: 84574 - protein, 252 aa, Unknown
  Obtained from environmental sample
  DOMAIN (150)...(252): ATP synthase alpha/beta family, nucleotide-binding domain
  misc_feature (1)..(252): Xaa is any amino acid
MVNIKPAEVSEVLKKQIEGFKTEVELEEVGTVLQVGDGIARIYGLLNVQANEMIEFEGGMKGIVMNLEEDNVGTVLLGPSNQIKEGFSVKRLRRIASVMVGEGLLGRVVNTIGEPLDGKGAITGQLYEMPLERKAPGVIFRQPVKEPLQTGIKAIDAMIPIGRGQRELIIGDRQTGKTSIAIDTILNQKEFYDRGRPVYCIYVAIGQKGSTIASTVQSLEAHGAMAYTTIVAAPASSPAALQYYAPFAGAAI

SEQ ID NO: 84575 - protein, 172 aa, Unknown
  Obtained from environmental sample
  misc_feature (1)..(172): Xaa is any amino acid
AEGIGEELQKTQGENLGWRYHRRQFWSFFRNGFGKAYGKILLRSAAKAGDDVWLAGSPSGLEIGPITVNPPLSLGKELAKIKGIGACIDTSDSIAESLQHISEKSKVRLDVEDVILNSAEDFCLLFTARESARDSILKLTKKFPINKIGKAKKGSGIFLKGKKIEVKGWQHF

SEQ ID NO: 84576 - protein, 58 aa, Unknown
  Obtained from environmental sample
  misc_feature (1)..(58): Xaa is any amino acid
VFHDLNLSRYFGDTAFLMNEGNQAAYGTIQETLNNKILRDVYGIDIRGFMLESLEKWK

SEQ ID NO: 84577 - protein, 295 aa, Unknown
  Obtained from environmental sample
  misc_feature (1)..(295): Xaa is any amino acid
YFINFELYNGELLKAVVSELVLVRNSLTSSKTITLVGENLKPLPSFEIIVNPLIIGIDEWELTTQSTQAVPNENTQLTVNGTYATYQWYLDGEPVANSSSYIFCKPFGVYELVVVVTNSNGESRSGRCRITVSVSAPTVYTVTYNVNGGSGTLPPVQAVKAGSSITILGGSELTKSGYVFGGWNTATAGNGTNYSVGASYRPTANITLYANWIATYTVTFASNGGTGTAPLTRTVNAGTKITLPDRNNLTRTNYAFAGWNTSADGTGTNYDSGISYTVNANITFMQSGMLGRFCP

SEQ ID NO: 84578 - protein, 240 aa, Unknown
  Obtained from environmental sample
  misc_feature (1)..(240): Xaa is any amino acid
VEKGNLSGSGSTYTLPISGFTNGGTLYVSVSKSGYNIIDSPQIVEIYRYIPPIAVTFNSLNANGSATQITTELTLNFSQAIDGLNAGNITLSGVSGVHKGDLSVSGSTYTLPISGFINSGTLYVSVSKSGYDISDSSQSVEIFYHIYTPPSVEIIINLDDIDEWQLTEQTAYVAPNVNKIFTVSGTYNSYRWYLDGVSVGTSSSYTFNKQLIDVYQLGVVVTNSNGESRSGRCWITAKWI

SEQ ID NO: 84579 - protein, 70 aa, Unknown
  Obtained from environmental sample
  misc_feature (1)..(70): Xaa is any amino acid
MKKIITALIVILVCAGAGFAADPVEGFWLSVDDKTGEIKSGWEIYESDGYMYGKMLSAVAYISSRPNLTL

SEQ ID NO: 84580 - protein, 124 aa, Unknown
  Obtained from environmental sample
  misc_feature (1)..(124): Xaa is any amino acid
MINPVTPVKKAFYNLGFFARTLKGAVNFIRYSRASFKILIMQILFTFVYAMGITTLLALAIGAAVNIIGVPFLTMLNQQQLIYTLLIIIITRELGPLLTAFIVIARSATAMLRKSPRPIYHRLP

SEQ ID NO: 84581 - protein, 319 aa, Unknown
  Obtained from environmental sample
  misc_feature (1)..(319): Xaa is any amino acid
DDREKYADIEEIRKIADQLFVGEAEVYFTGQPIINMIINKSMIADNILLIPLVVIVVLGMLFFSFRRFTFVILPFLTVIIAVVWAIGMAALFGIKLSVITTILPVILVAVGSAYGIHIVTHYMEDTRQKTLTVAEHRELVLGLVKKLVKPVFLAALTTMAGFISFCFTPIVPMREFGYCASFGVFTAFAVAVLFIPSMFLLRGPRVLKERKEEQTDGGFNNTIAVFFTRIAEKRKLVLILAALVVVISLYGLSKVIVDNAVVEFFQKETDISRSDRFIREYFGGSKDLNLVVTADTTEELLHPDVLQAVDNLSAYLTAN

SEQ ID NO: 84582 - protein, 122 aa, Unknown
  Obtained from environmental sample
  misc_feature (1)..(122): Xaa is any amino acid
MARNYYYLIAGLPDLLREESKNVPPFRLVAQEIRQEVTPSDFEFVRAMTLPIDNRNLVNILTHSGEEVDERGNFSKEELAKGSIDLARVYAGGLGRPHKNNPPAIFGVYRPLDQLHVASFYE

SEQ ID NO: 84583 - protein, 207 aa, Unknown
  Obtained from environmental sample
  DOMAIN (28)...(174): Histidine kinase-, DNA gyrase B-, and HSP90-like ATPase
  misc_feature (1)..(207): Xaa is any amino acid
MALHTTNINAGNIQVLPPQEARRIAAGEVIDRPAALIREFIDNAIDAGASVIEVSIEGGGAKKAEVSDNGSGMDRENLEKCVLPHATSKIRCLDDLDTVETLGFRGEALAATAAVAGLEIITCSGGGAASSGGGATGGGSSGAWRLETGPGGDKLHITAASRNRGSTVRAPHLYESIPARQKFLKRDGSEATLCRQGFIDKALAFPE

SEQ ID NO: 84584 - protein, 71 aa, Unknown
  Obtained from environmental sample
  misc_feature (1)..(71): Xaa is any amino acid
MDVKQAIIENKTYLGIELGSTRIKAVLIDDTYAPIAQGSREWENKLEDGVWTYHLNDVWAGLQDCFRDLAL

SEQ ID NO: 84585 - protein, 331 aa, Unknown
  Obtained from environmental sample
  DOMAIN (9)...(201): Calcineurin-like phosphoesterase
  misc_feature (1)..(331): Xaa is any amino acid
MIRSARDGHPIIAEMATVVNVVRAVNPQVLLVDSGDFNTGSALSNMFDAEPVIRAYNMMGYDAMTFGNHEFDGSLEKLDKQIGLADFSFVSSNIKKQDGSYLGGHRYIVRQYNNFSVGIFGITTLRTKVIANPDKSLVFVNEIDAAREVVDFLRNNEKVDIVIGLVHMGDVKEAEDHITSVDLAAAVEGIDILVDGHSHSSFERAKKAGNTWIVTANEMGKYMGFGRITVRNGKLDGFEWVSIAVRPDNNIIEMLKPYIEKAGDSLKAVIGEASDTFVFGNRLTRYQETAIGNMITDANVWYLRNVSKQQVDFAFHNGGNIRAELKKDRSL

SEQ ID NO: 84586 - protein, 341 aa, Unknown
  Obtained from environmental sample
  misc_feature (1)..(341): Xaa is any amino acid
METDPTRRRGDDEEKESASGTNLYTFFVNLVYEPFIPLIGFVNIAVGNHHVFQAGFVNWNTINFNGLQASFINTVGGNFNGLQAGFVNTVRGDTIGLQASFINTVGGNFNGLQAGFVNTNIGETKGMQAAFVNTNAGETKGVQAGFVNTAAKRIEGVQVGFVNTAAQDMRGLQLGFINYADNIKGLPIGFISIVKNGGYMAVEYFNSEYHNYNLSFKTGIDKLYTSIIVSCNKNNENKWDEVFASGLGIGSIIPIGKMFYFNPEFTALWPSISNFSYESFVPYFGVNFKNFSIAAGPTITWVRRNNKDNPLPKPNYSLYYHEINDNNSISIGFRAAARFRF

SEQ ID NO: 84587 - protein, 57 aa, Unknown
  Obtained from environmental sample
  misc_feature (1)..(57): Xaa is any amino acid
MEKEPILSAKDVEIRFSLRGRKLTAIRKCSMDLFEGETLAIVGESGCGKSYLGQSVM

SEQ ID NO: 84588 - protein, 132 aa, Unknown
  Obtained from environmental sample
  misc_feature (1)..(132): Xaa is any amino acid
MRIDIPETSVVAMIGVSGSGKSTFAKTHFKPTEVLSSDYFRGLISDDETNQQVSAQAFETLFYVANKRLDLGLLTVIDATNVNKESRAPVLQIAREQNCLGCALSLIFLKDLQSPHENAPTETLRNVIRARR

SEQ ID NO: 84589 - protein, 220 aa, Unknown
  Obtained from environmental sample
  DOMAIN (177)...(219): BFD-like [2Fe-2S] binding domain
  misc_feature (1)..(220): Xaa is any amino acid
MDKKAAFNVRTIASLLEISERSASRKKHSKGGGIVRTVDDNLLVGPNAIETFEKENFSTHRENIKAVLTKQEKTAPGISERDIITYFTGIRAATYEEDFIVSFGRFTKNIIHAAGIQSPGLTAAPAVAVDVSKMAAGYLDARTNRTFNPIRKAIVRTADLGDDERNALIKKEADYGVIICRCEEVSCGEVLARFKKSVPCDTVDGVKRRVRPGMGRCQGS

SEQ ID NO: 84590 - protein, 126 aa, Unknown
  Obtained from environmental sample
  misc_feature (1)..(126): Xaa is any amino acid
MNLKKYEYWFITGSQDLYGDETLKQVAEHARIMTDEFNKDSLLSGTVVLKPTAITPNAIRGLFEEANASGSCAGIITWMHTFSPSKMWIQGLALNRKPLLHLHTQFNRDIPWSSIDMDLLGRSAII

SEQ ID NO: 84591 - protein, 190 aa, Unknown
  Obtained from environmental sample
  misc_feature (1)..(190): Xaa is any amino acid
MTTCIIKLWKRIIIAAVFLLFNYYSGETITGFEEGRPLFARLPDSNFNLANFMRMLLFSSMATLKYGIDILTEKEKARIDSLLGHGGLFKTKGVGQRFMAAVFNAPVGVMESAGEGGAWGIALLAAFMLEEKETLEKFLAEKVFAGKTGARIEPDPKDVESFGKFMERYTAGLKIERAAVENLRRSGYES

SEQ ID NO: 84592 - protein, 601 aa, Unknown
  Obtained from environmental sample
  DOMAIN (128)...(216): Glycosyltransferase 36 associated family
  misc_feature (1)..(601): Xaa is any amino acid
AYATSNVPTDAGGRYFYLKDGGDVWTPSWMRMKSTLDRYECRHGMGYSRISSARNGLAFSQTSFVPLKDNCEIHKIVLTNESKADKDVDVFSFIEFCLWNANDDMTNFQRNFSIGEVEVEANGARIYHKTEYRERRNHYALWAVNVPVAGFDTDRQTFLGLYNGFDHPDTVFAGKANNSVASGWAPIGSHHVKAHLKPGESKALVFVLGYCENPDDKKWDKPGVINKAPANALFDKYGSPEAADKALAALKDYWDALLGRFSVEAEDKRMARMAGVWNQYQCMVTFNMSRSASYFESGIGRGMGFRDSNQDLLGFVHLVPERARARILDIAATQFPDGSAYHQYQPLTKRGNNEVGSGFNDDPLWLICGVAAYIKETGDFGILDEKVPFDNKEELAESLFVHLKRSFDYTVTHTGPHGLPLIGRADWNDCLNLNCFSKTPGESFQTTANFESGVAESVLIAAIFVFTGPDYVEICRRTKREEEATYAAKAIASMTETIKAHGWDGNWFLRAYDAYGHKIGSHECEDGQIFIESNGFAVMAEIGLDDGRAQKALDSVKNRLDTKYGIVLQQPAYKEYHLELGEVSSYPPGYKENGGSLPRDQ

SEQ ID NO: 84593 - protein, 325 aa, Unknown
  Obtained from environmental sample
  misc_feature (1)..(325): Xaa is any amino acid
GATPCLRVRRSGLTTKYDFSTPFTGNITLYALWESRSPTTFIVTFESNNGSYIETQIVNSDGTATRPTDPIRIGYTFVNWYSNSGLTTVYNFSTPVTGDKKLYAKWNSVTYTVTFDSNGGSSVPKQTVKSGDTATRPANPTKSGYTFDNWYTILGSVYDFSTPVIGDIILYAKWNQVITTVNIADIQGVTPPVADGIPVTAITANDQYTGTVTWNGKPSTFAASMVYTATITLEAKSGYTLQGVTANFFKIAGATSVNNSANSGVVTAVFPAAGWNVPDPPTWNDVVINIKNGGNNKNYYINIIGNFSIQGVTANTLAVSAESVI

SEQ ID NO: 84594 - protein, 172 aa, Unknown
  Obtained from environmental sample
  misc_feature (1)..(172): Xaa is any amino acid
MRKLILTTAAVAAAIGLAGCSKKPAQESTPATQTAAETDSVTLAAAETNSAETDSVTGTLTDRRDGKKYRTVVIGGKRWMAENLNYQTDRSGCYKKVDSNCDKYGRLYAWDAAMKACPAGYHLASDKDWDDLVATVGGKARYVVKSTDTSRVWEGTGKKLKAKSGCSADSDP

SEQ ID NO: 84595 - protein, 75 aa, Unknown
  Obtained from environmental sample
  DOMAIN (9)...(39): Flagella basal body rod protein
  misc_feature (1)..(75): Xaa is any amino acid
VEVKLIRGWYTAASGMRAQQWRLDAVANNLANVNTDGYKRDVAAFKAFPELLIRRQDDDGVYCTLRSADLILVET

SEQ ID NO: 84596 - protein, 83 aa, Unknown
  Obtained from environmental sample
  misc_feature (1)..(83): Xaa is any amino acid
GIPSDETLFKELIDKALVAIEDGRGVCFHCYAGIGRTGMALACTLGKYLSLDADQAIKTVRKCRASIESQSQEDFTRRFLDGG

SEQ ID NO: 84597 - protein, 84 aa, Unknown
  Obtained from environmental sample
  misc_feature (1)..(84): Xaa is any amino acid
MKQNITCLCGRNFSVDIEEEINLDDSPDQIEKICNGTFMSFDCPECNKKHKPEYNLMLVWESKKINFEVLPETEPRRILSKKRE

SEQ ID NO: 84598 - protein, 286 aa, Unknown
  Obtained from environmental sample
  misc_feature (1)..(286): Xaa is any amino acid
MTNIQLKCALASLKSPSHFILTGDSNQIVHPNFFSWSKIKTYFYHSGEGKEKDNPIKILRTNYRNSLNVVELSNNLLKIKNTRFGSIDRESNYLVDTVSTDKGEVALYSSDEKKKHELNRRTQNSAKYAVIVPSNSYKVQAARYFKTPLIFSIHEAKGLEYENVILTDFISSHEAEFREITSGVSAEDLQQDELRYNRAGDKHDKDAEVYKFYINSFYVAITRAIKNVYIFEQLINHPMLKLLQMQENKADIQVRESKITKEEWLDEARRLEEQGKHETARQIRAN

SEQ ID NO: 84599 - protein, 115 aa, Unknown
  Obtained from environmental sample
  misc_feature (1)..(115): Xaa is any amino acid
NGVDRAGMSGQEANYSENWFEYVKAAGIITLFAIVNARFVETADKYSKSSETSSSVAQANQQFFNQLGSSLVSRAMSIQPTLTVDNGTLINIMLNKTVYLPSVPGVSPAKKYVLE

SEQ ID NO: 84600 - protein, 88 aa, Unknown
  Obtained from environmental sample
  misc_feature (1)..(88): Xaa is any amino acid
MNIRNRKTKIVCSLGPSSSDDSVVRELILAGMNVARLNFSHGDKVTHRASVEKVTRISAELGIPVALLFDTKGLRYGRAWWEMTGRVR

SEQ ID NO: 84601 - protein, 324 aa, Unknown
  Obtained from environmental sample
  DOMAIN (3)...(324): Pyruvate phosphate dikinase, PEP/pyruvate binding domain
  misc_feature (1)..(324): Xaa is any amino acid
GLSRIRFSGFTISTAVCAAYYQNKNKYPAGVKEEVESVLKRLEKVMKKKLGDPNDPLLVSVRSGAAASMPGMMDTILNLGINDLAVKGLADKTKNPRFAWDAYRRFIQMYGDVVMGVDHDHFEEVLSAEKKKHGFEQDTQLTAKDLEHIVGEYKNVVRKYSGKDFPQAPLEQLWGAINAVFGSWMNERAIKYREINNIKDLKGTAVNVQSMVFGNFGEDSGTGVCFSRDPSTGVNLFYGDFLMNAQGEDVVAGIRTPERISDLEKHNPVIYDQLVKIKNRLEKHFKDMQDMEFTIQQGKLFLLSDRKRKRTGTAAVKCAVDMVG

SEQ ID NO: 84602 - protein, 61 aa, Unknown
  Obtained from environmental sample
  misc_feature (1)..(61): Xaa is any amino acid
MSNGRFGKYGGQYIPETLMNEVQALEKAYTHYKNDPEFTAGIKHPVQRLRWQTLNALLCRK

SEQ ID NO: 84603 - protein, 319 aa, Unknown
  Obtained from environmental sample
  misc_feature (1)..(319): Xaa is any amino acid
VVKAQNASRTKNNEVLKLELGQKIEHFWGRPGAGAFPPTLPTIGAALCTLPGKCANRPAQLVFDKDMFSKHLFLLGGIGTGKSNALYHLVKRIKASMTANDVMVIFDTKGDFRDKFFAAGDVVISNDANATGPRGKDYWNLFNELSAGSPDRLDESAIEIAKTLFYEKTSQSNDSFFPNAAKDIFFAILLHGVRSREIFDNETLKRFLSQTQVGDLQLILRAHDDLSAMTSYVQNDDSKLAQGIMAEIQQLSGEIFIGNFKKSGALSIRKLIRDKGRKTVFIEYDLSIGNLLTPVYRLLYDLAIKEALSRTSLGQSDLV

SEQ ID NO: 84604 - protein, 298 aa, Unknown
  Obtained from environmental sample
  misc_feature (1)..(298): Xaa is any amino acid
RYREVKPKRCRIAGVIIDYLYSKVSDVPESQDTDDVRVDFSILELKKEFISHNNLFGEKAKTDEIEDALYYLLKIGAMKIDGGFLVIYNTMRIERLEMDNRAQYKREHYAQLEEYYKNKRQQIHIVGEYANRMINDYDEAMTFVSDYFEIDYEKFLNKYFKGRSNEIDRNISSKKFNQLFGELSSAQLEIIKDQDSKYIVVAAGPGSGKTKLLTHKLASLYMMEDVKHEQMLMLTFSRAAATEFKKRLITLIGNAAHFIQIMTFHSYCFDLLGKVGNLEKSDEIIKHTVEKLIPEKWS

SEQ ID NO: 84605 - protein, 151 aa, Unknown
  Obtained from environmental sample
  misc_feature (1)..(151): Xaa is any amino acid
LAMKYKGMQKIASYLVANSSVGRKGEALQILESWGKNMSFVPVPVHSARKRERGYNQCEQAALELSLHCGGRLQTNVLKRRIYKPSQTLLGSSARSLNVAGAFEAKKAQNLKISPQIVVVDDVYTSGGNHSILRKGLKRAGFSANLIHGKP

SEQ ID NO: 84606 - protein, 338 aa, Unknown
  Obtained from environmental sample
  misc_feature (1)..(338): Xaa is any amino acid
VFTLTCFPVWKTKLRPSAGFLPSWRRNARTLDALNRSEKEREQRLELLNYAIEEIAKADPKIGEIKELEAETQRLSDFEKLSFHVNAVSSSLFEDDTSFLSLGRRLRASLENAASIDSSLSPELKRLEDIYYEAEDLAAEFRNYRGRLTYDPAKLEEAEERLALLYKLKKKYRPVESTDSGGQDEGGILAYKTEAEAEIETLSGAGENQDRLKAEISRLEKDLAAKAAVLSAKRSEGAKRLGEGITGILSRLGMPKAVFAANVKPKTREGGAGLVCGQWGADDVEFMISANTGEPLKELARIASGGELSRVMLAIKTVLLNSSGADTSAETLVPNLII

SEQ ID NO: 84607 - protein, 299 aa, Unknown
  Obtained from environmental sample
  DOMAIN (1)...(250): Ppx/GppA phosphatase family
  misc_feature (1)..(299): Xaa is any amino acid
IDQIGRELGAWGIQKEDVRVIATSAVRSARNREIFTDRLRRETGMDITIIEGIEENRLVYLAVRHALKNSHPHFWHYNSMILDVGGGSTEIMLLRRGKMVAARSLRLGTILIDQKVRQGTGSDRFIERYLYENVHNAQDILNEEMDLSNIRSLAAAGSDVRQASRHIGKDLNENCSIINRDDFFDFVKTVENYSVEDCVRLLGIPFVDAEGFVPGLLIYRTFMERLAAEELIVPDVSVREGYLIGMIRGVERELQDDFYSQIVASALSLGRKYHFDETHSRHVMELSFALFDALEKNTA

SEQ ID NO: 84608 - protein, 321 aa, Unknown
  Obtained from environmental sample
  DOMAIN (285)...(321): Topoisomerase DNA binding C4 zinc finger
  misc_feature (1)..(321): Xaa is any amino acid
GLWASTCVRQRPYFNTAIEDVRNWLAKNFPNELPEKPVEYTVGKKAQDAHEAIRPTYTEYTPESIKEYLTKDQIRLYTIIWERFVSSQMNNAKSRTVSVDIKVKEGQDEGLFRVSGTKLIEKGFYRAIKLLSSKEENSGSCPTLKTDDKVKAEKFKKEQHFTQGPARYSDASIVRILEEKGIGRPSTYASIISVLLDRYYVTRSNKQLVPTVLGKLINEVLVEYFPHYIDVDFTASMETKLDEVEENKVSWPDMIREFWFPFKTSVDDVSKTIESYKGTLDEKTEFTCEKCGKTAVKKLWTFGFFLACSGFPECRSTKSIP

SEQ ID NO: 84609 - protein, 201 aa, Unknown
  Obtained from environmental sample
  DOMAIN (32)...(153): Domain of unknown function (DUF477)
  misc_feature (1)..(201): Xaa is any amino acid
MKTKAIKFCLTLLIIFFVSPVFARENIIDNAGILSREEKESLLALISSAASVYNFDLVIVTEKKIGSGSAEYADAFFDKKGYGLGQNRDGCLFLLVTESRDYSFSTSGRGIKILNSAASDKLESSVVKLLRQGGYYGAFNVFLTDWKEFLALDAKGRNYNFFHQWNLVLVLIAWVLAPDIGFIVVQIWKKGMNTVLQQTRP

SEQ ID NO: 84610 - protein, 541 aa, Unknown
  Obtained from environmental sample
  misc_feature (1)..(541): Xaa is any amino acid
ALLDNNYGGPSYKIELKTDNISGIGSALKDQPNKYVDLDLSGSTITAIDDRAFYDCKSLTGIILPSTVTSIGNNAFASCWKLASVNIPNGVTSIGTYAFNVCSSLTSISIPANVTSIGEDAFWGCIKLTAIEVATGNQDYSSVDDVLYDKDKTVLFVYPAAKTGSSFTIPNGVTNVWKRAFNECSNLTSVTIPSSVTTIGERAFFACTGLTSINIPNNVISIGEAAFLDCKSLASVTIGTGVTSIAKMVFEWCTGLTSITIPDSVTIIGEFAFSHCTSLTSINIPNSVTSIGERAFGGCTSLTSVTIPNSITSIGRYFFWGCKSLTSITIPASVTSIEYYAFMDCDSLTALNVDPSNENFNSDQGILYNKNKTILVLYPSGKKGSFTIPNSIKSIGDYAFSYCTNLTSITMGNNITSIGRGAFDGCSGLTSVIIGNSVTSIGESAFRDCTKLTSINIPNSVNSIGGGYSSGAFQNCTSLTSITIGNNVTSIGDWVFYDCKNLANITIPDSVTSIGWVAFEGTAWLDNQINGVVYAGKVAYI

SEQ ID NO: 84611 - protein, 444 aa, Unknown
  Obtained from environmental sample
  misc_feature (1)..(444): Xaa is any amino acid
MARFKETDNTQGQFIAVNLVEQLFPGTFEWTIDYLISKTDMSLFEKKYNNDEKGAAAYPPRVLLKAILYCYSKGIITSRRIEYACRENIIVKALAEDCEPDHGTIAAFISTNSEAVKDLFAQIVVQCGQLNLITGQMFAIDGCKLPSNASKECSGSIRELRKKRDKLKEYIEKIIKQHRELDKDEKAKKLQKRYAKTMGVDTERRGRSVERLEKRLEKLNKFLEEAEPRKGVSGEEVQSNITDNESALIKSPHGYIQGYNGITITDSGNQIIVSAEVIGSGPESGCFPKMLDSLEENMKMVTGKEEPLKKSLLVGDTGYFSEANLQEAAERGINVLIPDPQFRQRDPYYAEKKEEKAGKKKRYTAEDFTYDKKSDSFTCPCGKVLEYKCDITLRNNSGRKYMAKRTDCANCPLLERCIARRSGKKSARTLYIERRNLGQSDLPA

SEQ ID NO: 84612 - protein, 89 aa, Unknown
  Obtained from environmental sample
  misc_feature (1)..(89): Xaa is any amino acid
MRNLEVIEKELAAAREALTAAEGTPAEVYSRIVGYYRSVRNWNRGKREEYGERQLYLVKGQRDAASPRLFHRRVASLLLSRFCPAALSQ

SEQ ID NO: 84613 - protein, 189 aa, Unknown
  Obtained from environmental sample
  DOMAIN (58)...(189): Acyltransferase
  misc_feature (1)..(189): Xaa is any amino acid
MIKTVLGFGYLVFAMIFLLPFAITALIISLFGLRKPMMHVIYRLAQLWALSLLPIAGHTTVKGRENIPKKGGVCFVSNHCGFFDIILLVAFCGRPFGFIAKKELAYVPFINIWIYMLGGFFIDRGNVRKAIATINKGVKRIKAGGGMIIFPEGHRSKGQGLLPFHPGSLKLATQANAVIVPSHNAAAII

SEQ ID NO: 84614 - protein, 234 aa, Unknown
  Obtained from environmental sample
  DOMAIN (62)...(160): HD domain
  misc_feature (1)..(234): Xaa is any amino acid
MNSILSVLNEGFSCPVRDVLWGHVYFTPELAALAESPPFMRLHRILQLGPVHQIYPGATHTRASHSIGVYHLGRRLLQNLVERGAADWVSREGVMAFLCACLLHDLGHFPFTHSLKELPLRSHESLTGDIILSEPMKSLVAACGADPALTAAIVDKDILAADKELFFYRKLLSGCLDPDKLDYLNRDARYCGVPYGVQDVDFILSRLIPCLDRGADIDSRLIPNVEANFQIRKT

SEQ ID NO: 84615 - protein, 290 aa, Unknown
  Obtained from environmental sample
  misc_feature (1)..(290): Xaa is any amino acid
MFSMLFNDPKSVIELVNTLLGTNYGADTKAEITTLKNVLSCGRLNDLSIVLDDVLLVLIEHQSTINNNMPYRMLQYVCEIYKRRMKDDDEYKEYRIPLPRPVFIVLYNGTKETPDRELQRLSEAYPKALPTLAWVGSLELEVLVININNERNEKLVKTCKLLHEYSIFIDALRRNQKTMTPREAVRKTVADCIAQGILEDFLQKHGKELFSMLITDWNWDTALKVAKKENFEAGMEEGLEKGIGIGRQEGIEIGLREGKEKNALAMKKEGFDTKTIARITGLTEDEINRI

SEQ ID NO: 84616 - protein, 200 aa, Unknown
  Obtained from environmental sample
  DOMAIN (27)...(198): Glycoprotease family
  misc_feature (1)..(200): Xaa is any amino acid
MNLLAIDASCSVLSVAVCRDRDYYYAQTEAGMKHSELVMEMINKQMEKAEMKPADLNGILCMGGPGSFTGLRIGFSIAKGLALSLNIPFVPIPTLECIAYSAIGLSLPVIQARKGAYFYSLFNDGRRITEDGDGGINQISELIIKSTHENKNINITGPAAEEIYASLGEDIKSLCIYSCNSLGYAVELINLQKIKIYFTM

SEQ ID NO: 84617 - protein, 82 aa, Unknown
  Obtained from environmental sample
  misc_feature (1)..(82): Xaa is any amino acid
MFPSQSFKSSYKYFDVLMTFFVVVLVLSNIASSAKIVDLGFSIFGIPMAFDGGTLLFPLAYVLGDILTEVYGFKAREAGYLD

SEQ ID NO: 84618 - protein, 83 aa, Unknown
  Obtained from environmental sample
  DOMAIN (2)...(69): Respiratory-chain NADH dehydrogenase 24 Kd subunit
  misc_feature (1)..(83): Xaa is any amino acid
LIRSAENFARRSRRRLGIEPGETTKDGLFTLETVNCLGACAIAPVMLVGEEYYGSLTIEKLDSVLQVYEQSKDKKGGSADEKH

SEQ ID NO: 84619 - protein, 257 aa, Unknown
  Obtained from environmental sample
  DOMAIN (89)...(257): Peptidase family M48
  misc_feature (1)..(257): Xaa is any amino acid
MKNIAAMIVLAAMCSVGGCAQGGKTFVDRVAEAAAKGAQTFKVSDAEVVAYADEYMKWKDANNPLCTMGSYDREMRAVAARLEKITSAIPAKLARELNLKIRAYYVPNVNAFSCANGDIRVFSGLMKCMTDDEVLAIIGHEVGHVANKDSKNAFLLALRIAVLKDAVGSIGGRIGEQLSNSQLANIAEELGKARYSQKQEIKADTYGYSFLKRCGKDPANMASALGVLLRLQEEAGSRPNSGYEKLFSSHPRPQSAN

SEQ ID NO: 84620 - protein, 126 aa, Unknown
  Obtained from environmental sample
  misc_feature (1)..(126): Xaa is any amino acid
MTSIQLLDCTLRDGGYLVNKNFNENTIHNIVNGLTQAGVDYIELGFLQDEISEKENVCFHNSVDARKYVPKNRGNTLYTAFADYSRYTVKHLDDNDGQSFDCVRACFFKEERKDVLEFCREIMLQG

SEQ ID NO: 84621 - protein, 329 aa, Unknown
  Obtained from environmental sample
  DOMAIN (211)...(321): Vitamin B12 dependent methionine synthase, activation domain
  misc_feature (1)..(329): Xaa is any amino acid
GIFRPGGLCAKRGKIRRDSTRPAFRFTEAAIRERTEKSYQEAAQRHEELQSRLEIISLEQARANRVPPADYKPTAPKKTGIIDLDNYSINRVIPYIDWQSFLRGWETKGPQSREPAKDKAPAPAADTILDDAKRLLEQVETKGLLQLRGVAEIFPASSDNEHVFIGDTHHIIYDGHFHRFYFKRNLQKKPAGVFNPCLADFILPAQNGQAVDWLGLFAISAGFGLETAAEQYRHSGDDYSALLLASLANALAEAFVEELHLRVRREWWGYAPEESLSIEEILKGKYTGIRPAFGYPSCPNHEDKRIAFELLKRKNAADKTTEPHDLPLS

SEQ ID NO: 84622 - protein, 164 aa, Unknown
  Obtained from environmental sample
  DOMAIN (24)...(125): Cytidine and deoxycytidylate deaminase zinc-binding region
  misc_feature (1)..(164): Xaa is any amino acid
VSTDKDYGAAVGTGGAGGSPVVAVPDHAYFMSAAYREALSAFNEGEVPVGAVVELGGRIIGRGYNRVEALGDATAHAEIIAITAASNHVGGWRLVGCTLYVTLEPCIMCLGAILQSRVSAVVYGARDSRLGGNKLLSLQGRGGAVLQQLSYRRLRDHEGGVPRF

SEQ ID NO: 84623 - protein, 310 aa, Unknown
  Obtained from environmental sample
  DOMAIN (3)...(225): Glycosyl hydrolase family 10
  misc_feature (1)..(310): Xaa is any amino acid
MESYIKNMFELITTSYPRLNLYAYDVVNEASSENGGPRTAGSDAGNGQSMWVQVYKDNSFIEKAFTYARKYAPKTTKLFYNDYNEYISAKRNYIANSIVKPLKEKGLIDGMGMQSHLDVRTGSNPYPTASDYGAAITTYKNLGVEIHVSELDATIDNGNESYFSAQATYYKNIMNEILTKGGSAVTAVVIWGIRDDQSWRSSRKPLVFDASGNKKAAYNELVKLIPESDWNKPNSTPSSSSTTPSSSSLAVSSSSSKPSSSSSSSSSVAVSSSSKQASSSSVVISSSSSAGTTPIANNLPLATTRADLII

SEQ ID NO: 84624 - protein, 109 aa, Unknown
  Obtained from environmental sample
  misc_feature (1)..(109): Xaa is any amino acid
ARIRRNTYVDGPAHGKGTKAFSGGVLAPNGKVILVPANSANIGIYDPIANTYADGPALDKLADAFVGGVLAPNGKIILVPANSANIGILSIPGLERSLALCLSPFIHKF

SEQ ID NO: 84625 - protein, 159 aa, Unknown
  Obtained from environmental sample
  misc_feature (1)..(159): Xaa is any amino acid
MTQQVFVFQREKFWNEFESLIHGGKSSLRKKASWFPQGYRELTQDLNTAKAHGFDPFIIERLNSLVLEASQILYASRSLSLKAVADFVLGVFPQAVRSQWRSFAAALLLFYGLAFFFGFLCVRNSSMVFMLLGEDTIQSLEEMYDPDRYHYLETPACSS

SEQ ID NO: 84626 - protein, 295 aa, Unknown
  Obtained from environmental sample
  DOMAIN (9)...(211): DNA methylase
  misc_feature (1)..(295): Xaa is any amino acid
LGPQGQIGTRIGKSYTLDEINQEFQTWIAMQNDISAGEAAYKYIDTNGDVYRPVSMAWPNNKKAPDEYFIPLIHPITNKPCPVPQKGWRNPPATMDELLKNNQILFGKDETTQPNRKYLLKENKEENIPSLLYYGGSDIDLLSDMQIPFDTPKVVNIVKEHIRSFTYSDSLILDFFSGSATTAHAVMQLNDEDNSNRKYIMVQLQEEVTEKDKEAYNFLTKENKPLNICEIGKERIRRAGKSIAESKKPAVNKQVLFTEKLIPPPPPPHKNGNWVQVLPLAPPNKKNGKIFPEIT

SEQ ID NO: 84627 - protein, 278 aa, Unknown
  Obtained from environmental sample
  misc_feature (1)..(278): Xaa is any amino acid
MPKIEVNEEVFYKLAGKRWDGGNKEEFEEALTCAKAELDEDSDKNLPVHERILKIELNDTNRPDLWGTAGCARQLKVYRDGKIPEYPFFSRPGGIKECTHKVKVEKSVQKVRPFLTGFIAGGKTISDPALRDMIQTQEKLAWNFGRKRRSISMGVYRIARINWPIIYKGVDPDSVSFVPLQWDSPLTLREILKQHPKGKEYAFILEREPVHPLLTDSQGGVLSYPPIINSNDLRAVQVGDTDIFVELTGSDIAQVTLAASIVACDLADNGFSLSRLES

SEQ ID NO: 84628 - protein, 117 aa, Unknown
  Obtained from environmental sample
  misc_feature (1)..(117): Xaa is any amino acid
MEALAFLPCEKKMLACPEDSVSAFAPLAEEAGFVLVPGPKEDVLARYCLAIRKSGADRVVRATADNPFVFVDAAAAINKEAAELGADYSGYFSLPYGAGVNPSRQRRYARRKELSII

SEQ ID NO: 84629 - protein, 147 aa, Unknown
  Obtained from environmental sample
  misc_feature (1)..(147): Xaa is any amino acid
MLSYMRPYAALIVTAFALALFAVAFEGLSLWFSASLVQTIFSHEAPIVSKPEYTLSNANDILKYWTSNAIGSREPIAALQIVCAMMSLSFLLKNIFIYLKVVAMYLSHILVVRDMRNQLFTHALAPPVSYYDRAKSGNVVSLIVNDV

SEQ ID NO: 84630 - protein, 72 aa, Unknown
  Obtained from environmental sample
  misc_feature (1)..(72): Xaa is any amino acid
MRDMPILIDGTALLCREDLSALKQQNSRILGNVFSDSLENIWKVGDSYYREQCGKNYSGLCKECDEYYTFNF

SEQ ID NO: 84631 - protein, 520 aa, Unknown
  Obtained from environmental sample
  misc_feature (1)..(520): Xaa is any amino acid
SKDQIGRDHLPYRYIRGTDIKASGINTNSINPANNQNIRGDVDIGIKNRQDTVDNSRGVNNSGNVGVNTNSNAKPMDNSVDTGINARSINTSGVGINTNNNTKSADSSVGVGINAKGVDNRPGVVDNSRSLNNSGSVGINTNSNNRPADNSIGMGINANSINTNDIKSTDNKNIRSDASIGANRPVSADRSSGTIVNAAGTTSVDVPAIKESCLSIVDALKSSTAPILRELAQRGEIGAGGAASLIGLVRDAVSSLDEALRPLVRSERPVPPEFYERVASGAGHRISAEAKNALFSQIGAAQALIRTAMEAAEGVNIRTNANADIGGRSNLHIGANADFNFSVGPRVNNNANFTPNIAPSVINNANVAPGVNTNVNPAVNAAPNVNTNINPTANVGINTVVHTNSASGSNPNINTVPNTNVNTNANANANITPVVNSGIGNNVNANDTNDNINPNAAAKADSRRPDDFLQIARRIWANTEKLRAGFREAFSTLDLQNQRLAARQARRRLNRRHGQAPRPI

SEQ ID NO: 84632 - protein, 114 aa, Unknown
  Obtained from environmental sample
  misc_feature (1)..(114): Xaa is any amino acid
MIYEFEGRTEKEAIDRAAEELGLEKDDFDVEILETQRQGLFKKGHVRISVHTDGPVSPAYKGPAAQDVDGNENRQAPSRQKVFGDPAAQNEFERKMTAFVEGLMNTWYSAILSW

SEQ ID NO: 84633 - protein, 429 aa, Unknown
  Obtained from environmental sample
  DOMAIN (198)...(402): 60Kd inner membrane protein
  misc_feature (1)..(429): Xaa is any amino acid
MAERPRRYDFKPNDYMFELTVSLDGGYSVPGFNFGGSAYTLSFGPQIGPQFKKLDNRYDYRQYMTYTNGKRKMEKANDSLISSNPKWAAISGKYFSFIANPLLPQYQLNFSDRSEPGIASASRLNIIRPVINTPRVSDVYRFYLGPKNQEALNVYNTGNNGFNLTDMQLVEVANTRGILSPLEKLLKWMLLLFYKLIPNYGIAIILLTLTVKILFFPLTKKSSEATLRMQALAPKIKELQAKYKDNPQKMNAEMAEFYKKEGYNPLSGCLPMLLQIPIFFAMYNLFNNHFDLRGAMFIPGWIPDLSLPESIFNFPSDFRLPLLGWTALRLLPFIYLGSQLLYGKVTQTPDQKSNTQMKMMLYVMPAVFFFILYDVPSGLLIYWIFSNLLTMVQQVAINKYIAPRRAAEAAQRAANSAPTVNVPPKKKKR

SEQ ID NO: 84634 - protein, 163 aa, Unknown
  Obtained from environmental sample
  misc_feature (1)..(163): Xaa is any amino acid
ERYNVRDPFPEYLAGAHDVFYTNPPYGSKDNGNCGNIFLGRCMELCKHAPSWGIALLPFAHKEDWSRNAMYNIQCFLTGNGYVVSEMIREIHQYHLDDRPNLMSSNVIVDRIKNIDPPFSKIRIEDDKLLHFYGSSTDSMPEYVSKDGYLVYKNGKKIPIEGR

SEQ ID NO: 84635 - protein, 114 aa, Unknown
  Obtained from environmental sample
  misc_feature (1)..(114): Xaa is any amino acid
GVDIVSLFLKDSPEAVALATQYILVTGYTVFILGIMLVFRGTLQGLGMKRAPIICSIMETVMSVFAVFVLIPSFGFIGVCLVNPLSWLVSGIPLYIAFGILKKRPTSYPKSSRT

SEQ ID NO: 84636 - protein, 327 aa, Unknown
  Obtained from environmental sample
  DOMAIN (24)...(171): FtsH Extracellular
  misc_feature (1)..(327): Xaa is any amino acid
NDRLAEPDYWNEPFYYVFLNKMNPAIDFSEFKSRISTGEIKRVEITDSYITGFTSSDKKESSRSITRSYGPTQHDKVYRTVSILTEGFFEFLDANNVSYGAVSREGNAVLNFLFSWVLPIAFFIFIWRFVFKRLGNMGGNVLSIGQNRAIIVAEGDIVTRFSDVAGVDEAKEELVEVVDFLKNPQKYKEIGGKIPKGVLLVGPPGTGKTLLARAVAGEARVAFFRMSGADFVEMFVGVSAARVRDLFKQARNKAPCIIFIDELDAIGKSRINNIGGGNDEREQTLNQLLVEMDGFDNASGLIILAATHRPDVLDPALLRPGRLTSTC

SEQ ID NO: 84637 - protein, 335 aa, Unknown
  Obtained from environmental sample
  misc_feature (1)..(335): Xaa is any amino acid
KDQIRPRRRDQLTQIRWAKQFFKKRYGRDPEGMWLGEAAINMETVLCLIEEKISYVILSPNQATSYKRLSGGDWTYTNQAPIDTRRPYRVFPRTRDGAQLDGHLDVFFFNEGLSKAVSFDNLLQDSRTFGNSINQCYDNNYGGNQAVVIATDGETFGHHKPYGDMCLAYFFKHIAPEMGITPVNFGYYLSINPPEYEVTLGDAFGEGTAWSCAHGVGRWTRDCGCSTGGKPGWNQAWRGPLRNALRKLQSQIDFHFEARLATMFQDPWALRDKYINVMWEPSLVKTGEFLHTQCGGKFSFSEELTAEIRRLLEAQKFMLFSLLRRVVFCEISGIE

SEQ ID NO: 84638 - protein, 154 aa, Unknown
  Obtained from environmental sample
  misc_feature (1)..(154): Xaa is any amino acid
MVFRRCRYMLRKSAYAPEDAAQDVFVNLLACKEKLDDMAKIKNVEGLLWTIATNVCLNKLKAKKWKPGEDLTVNEEELYSAAGDDYKRVDDNLLLEKILEEESEEVRSYVYMHYNDGMGYVEIAKTVGKSKTLGGETTLPPLGNSANLSCPPFF

SEQ ID NO: 84639 - protein, 58 aa, Unknown
  Obtained from environmental sample
  DOMAIN (6)...(57): Ribosomal protein S15
  misc_feature (1)..(58): Xaa is any amino acid
MALTNESVASIVTRFGKNEKDTGATEVQIALLTERINQLTGHCKQFKKDKSGQSSAII

SEQ ID NO: 84640 - protein, 289 aa, Unknown
  Obtained from environmental sample
  DOMAIN (27)...(173): TruB family pseudouridylate synthase (N terminal domain)
  misc_feature (1)..(289): Xaa is any amino acid
MNPQTDGLILLHKPSGLTSFDALRDIKRILGTGKVGHTGTLDKFAEGLLLILTGRALKLSKWFTHCDKQYEGTICFGAETDTLDPEGAVIANAPLPSRETVEQVIPQFLGKIEQAPPAYSAIHIDGERASALARRGETPEMQKRPVTIYRLELLSWEPPYAKIFVHCSSGTYIRSLARDIALAAGSRAHLTALIRTQVAGFKLQLALSNEQGLVRPIDKAVFNALNIPCLDVVPSDVSKIIQGKPLAQILKDVSAGKDTAAALFSEGKFIAMTERQNNKWNYGYVYARD

SEQ ID NO: 84641 - protein, 144 aa, Unknown
  Obtained from environmental sample
  misc_feature (1)..(144): Xaa is any amino acid
FFGYERITGEVVRLLGGNEYLPHEAMTEVNGLWAWTAAPSISVTQNERQMDISVKFPVNETHYIMLRNVKPFPILQIYGQNWRRAADFESYYNASGWYYSEQEQTLVLKIAHRSNTELIRILFVAPPPPPPPPPPPAPDVFDMY

SEQ ID NO: 84642 - protein, 273 aa, Unknown
  Obtained from environmental sample
  DOMAIN (38)...(82): Bacterial regulatory helix-turn-helix proteins, AraC family
  misc_feature (1)..(273): Xaa is any amino acid
TAPALSKNTTIGNPFTQTVQFCVYKPISGYIRSRTCRESLNDLLHTDRNIVDIALEYGVSFENSYSRSFKREFGISPDNLRKYRQIVKIQPPLHLLVENNLDDNVLFGPEFVVVPQFHLIGKPHRLPFETAQKSLYNIGAHFWLNERRHVKKIINPDVYIGLNHNINNEKKYSEYLTSVQVRNLSDIPDGFCGTTFDTSMCARFRFIGQHKNKEINAETANKMYSAIRKYVNDKNCKYNLYIDKVYFERIDWNIYNGNFFQVECFTPVTEKTA

SEQ ID NO: 84643 - protein, 345 aa, Unknown
  Obtained from environmental sample
  DOMAIN (130)...(242): DNA mismatch repair protein, C-terminal domain
  misc_feature (1)..(345): Xaa is any amino acid
FARDFGLETYGFRGEALPSIAGVTRFEMQSADDDGHGYRLRSEFGVIKGVEPAPRAKGTTVTVRDIFAQLPARRRFLKSAETENAHVWATLTRLALATPAVRWVVRPARSMELTLPAAQDLKQRIVLLSGDRMSRLVPFADGEEPWRMHGYISPPDLCYRDRNHLYLFVNGRPVRDRLMLSALSSGWDGFFQKGTFPAVILFLEIPAEAVDVNVHPTKSEVRFREPQRVFPWISRATREAWGAAKGELPSFFAAPSRSFYGGADAPPAGGSDAAAPQQHDRPYSHYTPYGGQGDTREAVKSMWDAFLPATGDRPYEASANGMAVAEERGSYAPARGAIKYLGAFM

SEQ ID NO: 84644 - protein, 288 aa, Unknown
  Obtained from environmental sample
  misc_feature (1)..(288): Xaa is any amino acid
MGKSWIPYAFTPAAGVSLDVFRIHGKAGKADPVKMNFAADFMAPTFQNLAGKIGLSFLIADIINVSGSTQFNVRESINGNAPSVIPSIGVSAIFKLKSGGQRIIGGALPSDGELAVDIAAKPLYNGIWAMGGGATWTVGVADKNPPVIVIDYPETAWISPNNDGKSDDLEFPISITDERYIMEWVFEISDEYSMPIRVYRNKEIRPETQGVQNFLTRLKSVNTGVEVPQSMRWDGTLDSGGIAPDGRYFFTVTAKDDNGYTSIKGPYEVNVDNTPPDITLNPFSGEMN

SEQ ID NO: 84645 - protein, 150 aa, Unknown
  Obtained from environmental sample
  misc_feature (1)..(150): Xaa is any amino acid
MSNIRVEYFSDSLMRPVEFEMYIPNDFRTDIQIPHNPYYDRKCKTVFVLHGFTGWGKGWNNLYELAGKYNLALVFPSGENSFYLDTEATGGKYGTFIGSELVEYITQTFGLCCAKEDTFISGLFMGGFGALQQELFILILSVKLSRYHQR

SEQ ID NO: 84646 - protein, 92 aa, Unknown
  Obtained from environmental sample
  misc_feature (1)..(92): Xaa is any amino acid
MTTQKRRILVTSALPYANGDIHLGHLLEAVQTDIYVRYHRLRGDDVLYVCADDTHGTPIEISALRQGITPEALIDRARENTYTTTRSTISAL

SEQ ID NO: 84647 - protein, 92 aa, Unknown
  Obtained from environmental sample
  misc_feature (1)..(92): Xaa is any amino acid
MAETHRAYVARQGHDVGLLRPLTLFPFPDEKIAELAGKGARFLVIEQNLGQMVEDVRLAVNGRAPVAWHGVMPCVFVDAEDFVAPIMKALEA

SEQ ID NO: 84648 - protein, 194 aa, Unknown
  Obtained from environmental sample
  DOMAIN (73)...(193): DNA polymerase III beta subunit, C-terminal domain
  misc_feature (1)..(194): Xaa is any amino acid
GIDGRDFLIRKDAGDIEDFNGVIIPPKILNVVTKRAGDEGLIGISVIDKMIFIRFGFYNLASVLLDGQFPNYRKVIPEEHKSSFHVDRLEMLDALRRVSQVVEQKSHRIYIGLKPGIMEIYSEEGEIAEGKTEIPCKYDGEEVAFALNYQYLEEPFKVMNCEEICINFTGPSKAITIVPVPKMDYFHIVMPMQS

SEQ ID NO: 84649 - protein, 68 aa, Unknown
  Obtained from environmental sample
  DOMAIN (1)...(67): Chaperonin 10 Kd subunit
  misc_feature (1)..(68): Xaa is any amino acid
GEIIIPDTAQEKTQQGIVVEVGPGTEKDPVLVKAGQKVMYDKYAGSQVKIDGEEHLILKMSDIIAVIE

SEQ ID NO: 84650 - protein, 188 aa, Unknown
  Obtained from environmental sample
  DOMAIN (14)...(187): ArgJ family
  misc_feature (1)..(188): Xaa is any amino acid
MKEVTGGVCAPKGFSAGGIRCGIKASSQKKDLAVIFSQKVCNAAAMFTTNKVKAASVQVSRENIADGKLRAIIANSGNANACTGQEGMEAAKRMAQLAADTLGISANEVAVASTGVIGVLLPIDVIEKNINGIKAAMRSDEQGNADALEAIMTTDMRKKEIAVEVEIGGEIVRIGAMTKGSGLCRSVM

SEQ ID NO: 84651 - protein, 77 aa, Unknown
  Obtained from environmental sample
  misc_feature (1)..(77): Xaa is any amino acid
MIAGIIGATGYAGAELVRLLSRHPKVEKLALSSVSYEGENIDKIYPNFLGKVSLPLLKPKMLSPHPTWFFPPFTRGG

SEQ ID NO: 84652 - protein, 180 aa, Unknown
  Obtained from environmental sample
  misc_feature (1)..(180): Xaa is any amino acid
VIARQRKFIGPDGRAKFHGHEAISEEMAHNILDRLKASSALQAKVSALIRHHGARPDQAWSDAACRRLLHRLEKDGLDWRDWAALQLADQMGKGVDTENAPQSHSELLRRIEGIAAEAPPLNVRALAMDGNEMIKLAGQPPGPWVGKLQKHLLEMVMDNPKLNNANDLEILAKEWVESQR

SEQ ID NO: 84653 - protein, 318 aa, Unknown
  Obtained from environmental sample
  DOMAIN (1)...(143): Mur ligase middle domain
  misc_feature (1)..(318): Xaa is any amino acid
MAERTTGWRLNFCSAVFTNVTHEHLEFHGTWEQYREDKANLFRALDRYIEIYSPDNSSGFKPFGVINADDKSAGFFAQATKCKTFTFSRNGNDADIIAETIENSAQGSSYRVLIKQLNEHIEIKDNLPGSFNIGNVLAACLTVSNLLNVPLREVAALADKLIPVRGRMTTINKGQPFELVVDYAHTPSSFMAIFPPLRERLNKTGGRIISLFGSPGERDTQKRAEQGKIAGLYSDFIVITDEDPRGEKPMDILEEIAKGVETGEESKKFTREENLFLIPDRPNAIRKALSIARKGDLVPALGEGHEKLNYYADHVMPY

SEQ ID NO: 84654 - protein, 312 aa, Unknown
  Obtained from environmental sample
  DOMAIN (54)...(247): ATPase family associated with various cellular activities (AAA)
  misc_feature (1)..(312): Xaa is any amino acid
IYRRANRANQTPVLDSFSIDLTEMARQGKLDPIIGRQKEVDRLIQILSRKKKNNPILVGEPGVGKTAVIEGLAQKIAAKEVPENLEDKRLVSLDMTSLVAGTKYRGQFEERIISLLSELRKNKNIIMFMDELHTIIGAGGGEGGLDASNVMKPALSRGEIQCIGATTYKEFRRYVERDAALERRFQSMSIEPPSMSDTVEILRGLAPKYEAHHKVIYDENSLKAATYLSERYLSERHLPDKAIDIMDEAGAQTRIANLTPPPELYEKERELKTVSAEKKKAVEEQDYVQAGYLRDKGKSYTRRTGKNQKLFG

SEQ ID NO: 84655 - protein, 204 aa, Unknown
  Obtained from environmental sample
  DOMAIN (1)...(204): Dihydrouridine synthase (Dus)
  misc_feature (1)..(204): Xaa is any amino acid
MVTTGAILHNKPEKFLEYNKEEHPVALQLGGNSPKDLAECAKIGEDFGYNEINLNCGCPSERVQSGSFGVCLMREANLVAECVAAMQNAVKIPVSVKTRIGIDRDDSWEFFLNFVETVAETGCKYWIIHARKAMLKGLSPKENRAVPPLNYETVFKLKQIHPDFKISLNGGVRDLYQAKNILQKTDGVMIGSAAIERRARPFCH

SEQ ID NO: 84656 - protein, 89 aa, Unknown
  Obtained from environmental sample
  misc_feature (1)..(89): Xaa is any amino acid
TLLSIVDITQRFAKRFTEKKITINLDKAAKEFIVNDGYDASLGARPLRRSIQRLIEDELANRFLLGEVAENSVMDVSVTEGRLHWGFHT

SEQ ID NO: 84657 - protein, 306 aa, Unknown
  Obtained from environmental sample
  DOMAIN (93)...(298): Mur ligase middle domain
  misc_feature (1)..(306): Xaa is any amino acid
GGKDQIGRAARVEQLEASCPGKRSLPGNSAIRYVLGRHEIDDFKNADMVIKNPGVRPDSPYLKAAKNIETDIGLFLTAIGGIAANGKPPVRLITVTGSKGKSSVSSALHWALKEANFRSYLGGNITVSPLSFLDDLQNGDTVVLELSSWQLGDLRGRIREDGSALLKPKAAVLTAIMPDHLDRYGTMEAYVSDKRIIYQGQDQSDITVAGDDQWGRGFLAESRARSLVYSNSALPQKVSGGWIDAVSGKGFARLRNWDLQGVIESQPVDNEIVEIVPERPIVPGSHQKQNLLAAGLALYGLGMKPE

SEQ ID NO: 84658 - protein, 115 aa, Unknown
  Obtained from environmental sample
  misc_feature (1)..(115): Xaa is any amino acid
VINHFEGFTGLTSVTIGNGVTSIGNVAFGESTGLTNVTIPSNLARIGIQAFGGCTNLTSVTFEARRNISDANFGDYAFPEGSDGWGTYHTFKNAYSTGKSVTYTRASGGTTCAKM

SEQ ID NO: 84659 - protein, 212 aa, Unknown
  Obtained from environmental sample
  DOMAIN (29)...(110): Uncharacterized BCR, YitT family COG1284
  misc_feature (1)..(212): Xaa is any amino acid
MRNGIKKSEWRLIKTVIKEKFLNPLFIRRAALCLLGNFVLALGVAMAVKADLGITPVNSIAFVLSKIFSLDHGLMTGVIYASYVLLQLILLGKEFRINNLLQAGAAIMFGWFVFLCNHLLSFQVPEFYPVRLLFLLTGVIIIGLGIMLYLRANLLPQPAEGLILAIEKKTGWKLHNIKVAFDSSVVIIAAAISFIAINKIVGIRELGRICQW

SEQ ID NO: 84660 - protein, 310 aa, Unknown
  Obtained from environmental sample
  DOMAIN (182)...(215): Tetratricopeptide repeat
  misc_feature (1)..(310): Xaa is any amino acid
VYGEAEPFRADTSLTNLEAFILIALGRLDDASAIVNQVLQREPYNKEALFAAAELDIARGRAGDAVIRYRAAVSRYPDDRRLLVSLALVLGSLGDTDGARSYIERALLAHAGDYRVHYYAAYLASQAGRLADAVAHAEDALYYRPGFIPARFLLASLRYRQGRYEEAARLADELIFLNRDDSLSWYLKGVSYIRMGRFTEAQSVLTTAANINGDDEFIRTALEELLITRTRIEDPVRSRWASWHFARARTFRTGNQLEQALFEYRRGLRLNPYARDRREICRIAQASGLPGPLPGRAKSHAKTWGWRTPP

SEQ ID NO: 84661 - protein, 287 aa, Unknown
  Obtained from environmental sample
  DOMAIN (96)...(206): Histidine kinase-, DNA gyrase B-, and HSP90-like ATPase
  misc_feature (1)..(287): Xaa is any amino acid
MIISGYATLLMKSKELNEKDRGMVDNIAQTTAKLQEFSLSVLELSRSKVMHENKEIELMQTLRACIDVSFNKQASKFVLNCTQRGSALNEGIFINGSPEKLDRVFVNAFSNAIEAGAQNISVRLSVCNTIVLIAIEDDGVGCDVENLSNFFTTFFTTKEGAGGTGLGLCVIRSIIETHGGNINIYSKNLLDNGKHGMVMQIALPASKRMSYEAAKHEFLLIKQGLDDANIILEKLKKPENNPPHRPQTERRRFIAAQIVARLDSADPCGKRCGDKGWIGGGAEAGIK

SEQ ID NO: 84662 - protein, 372 aa, Unknown
  Obtained from environmental sample
  misc_feature (1)..(372): Xaa is any amino acid
LEPYTDPKNNATYAGRARDMLGTIRTTMVKDGKILLPGNWGGDGAGTINPSYFSPASYEIFAEFDSENASDWKTLTAGVYEMLAKSPGYSRGLAPDWFTFEGGSTGGAGYNAYFAGDAMYMDAIRIFWKIGLHSIWHKDERAKSYLSKAINFLGSPEKANFFTMKGELLPDTAIDAISDGKGGTVKRPRRMHNHLTVGMWGIAAMAVGGVEMAEKYSEEFLKFYDAGNDFFAHASDPEGGNDTLHCDMYYDQFLGWFGASVFGGAFTNVWEDLKNGVPQGPPEWKTRPILNTRDIDASKLPLRVSASFSRSVRWTVALKHDSTGREVSFSGYSDSVNSVWYGLSQTGRYMPQGFYTLTGSGAGIDDIYKEKW

SEQ ID NO: 84663 - protein, 192 aa, Unknown
  Obtained from environmental sample
  DOMAIN (58)...(139): Mur ligase family, glutamate ligase domain
  misc_feature (1)..(192): Xaa is any amino acid
GTDFSLKFSGENDAQEFSIPIPGAIQAENAGLAILALKKFEKNITNDAIRRGLNSLKIPARFEKIADNPAVIIDGAHTPESASFCADTFCSLYGEGGILLFGCAADKDAAAMAKILLPRFSQLFITMPGTFRISNPEKVYSAFSSDKTTLVKDTAEAIRRTLELSREKSLPVLCTGSFYLAAEIKQGLGIRD

SEQ ID NO: 84664 - protein, 207 aa, Unknown
  Obtained from environmental sample
  misc_feature (1)..(207): Xaa is any amino acid
VDKEGGPEADGPQAEAPPGGHGGAGGLQKKTAELTAANPGVPVFFFDEARFGLRPAFGRRWAQKGERPVAVVRTGYLNFYAYSAVCPATGEDFTLRLSRVNTDVMNVFLSEMAAFLGGRECILVMDRAGWHVSKDLRVPPNIRMALLPPHSPELNPVERLWQWVKRHAIRNRKFVCLEEVERVVDKCLGFLTPGFLRRICRCSYLSN

SEQ ID NO: 84665 - protein, 234 aa, Unknown
  Obtained from environmental sample
  misc_feature (1)..(234): Xaa is any amino acid
MGTIGVINTDPQIKKLIDAAARNEPTQNYTPRYLSGEEEILDFLNYDLPEIVLINFSDPVIDLDRIVSRIQNDGWLLNFGIIGIFYGENNNEENYLKKYKSINVLAMMDIYRLRTHLIKNIQIIEQNYQIIFQREFTRDLFQGASGSFTIENDILAIPLYAGIGATILSQRGLINPDRKMQLQLSLGELIVNAVEHGNCGVTYEEKTAGMKNGLSVVDLVAEKCKDPQIKKKKL

SEQ ID NO: 84666 - protein, 262 aa, Unknown
  Obtained from environmental sample
  misc_feature (1)..(262): Xaa is any amino acid
IYREASLPAYQSDIAPGTNVDISAIAKAGYTFSRWEVINEGEDVCSFGNSSINSSDLNKNTTFIRVYRSASVTAYFTKSIVYGTLTDSRDGKKYRTVKIGDQTWMAENLNWGEAASGSWCYGDEPNNCNTYGMLYTWDAAMTACPTGWHLPTRTEWGTLAKAAGGTGDYGAGGVAGKALKSTSGWNNNRNGTDDFGFSALPGGGRLSNGNFSNAGNGGYWWAATEGGDNYAYFRGMVYNNDLVDEDGNGKSYGFSVRCVADY

SEQ ID NO: 84667 - protein, 172 aa, Unknown
  Obtained from environmental sample
  DOMAIN (25)...(135): Protein of unknown function (DUF820)
  misc_feature (1)..(172): Xaa is any amino acid
ELKPRERYEIIYGEAYAMAAPNTAHQGILTELLRQFANFLVGKPCKVFPAAFDVRLFYKEDESDDTVVQPDITVICDEKKIGKESCRGAPDLVVEILSPSNTAIEMQRKFDLYRDAGVREYWVLNNEHKTLTVYLFDGEKNISRTYGEKDTAPVSVLNGLSIELAPVFTTEM

SEQ ID NO: 84668 - protein, 337 aa, Unknown
  Obtained from environmental sample
  misc_feature (1)..(337): Xaa is any amino acid
MAERHELEATAFNFPYYLRYFTGPTTEIIVPSATNPNILFMIDNTQAENVGNGIRFSNLDRKVTSVFVDIDFGNIQTVGMFVEWTDEGSTYRYTKQLYKYLPHENYAILQPLGKVSELTITFGGDLSLIVLKSIVINKPIPFYFSGLRLLVVSLLLFAIILFAYKPLRAKTAYYLFEYTFDPKNKRQNIVYACTVALLILFSWICVYTSVGGGINTSTWSEQYNRFLVDALIEGRTYLNYGNPEKLLNAEHPYSWLAGDERYDWKLDYVWYKGKFYSYFGVVPAVILYVPYKMITGNYLSNHAGSILFCMIATILLAILWRYCVKKYMRDTRYALYL

SEQ ID NO: 84669 - protein, 310 aa, Unknown
  Obtained from environmental sample
  DOMAIN (137)...(228): PEP-utilising enzyme, mobile domain
  misc_feature (1)..(310): Xaa is any amino acid
MVTPDKLYVFQRDDGGEVVIRQMGCKDKKIVYDERGGTKHVPVPELEAYRWALSLGQAERIARGVRAVSKAYGGCIMDTEFCIDEKDELWFVQARPETRWNEEFEKHPDVIFMRRKEVDAQAAAVAEILVEGNGASRGAGQGKVKFLRSALELNKINKGDILAAERTDPDMVPGMRMASAILADVGGDTSHAAITSRELGIAAIIGIQSLDKLRALDGQEVTVDGTRGRVYRGLLPLHDVGGEMDISALPPTKTKVGLVLADVGQALFLSRLRNVPDFEVGLLRAGIMLGQYRVHPRALEAFEHGTLEQL

SEQ ID NO: 84670 - protein, 94 aa, Unknown
  Obtained from environmental sample
  misc_feature (1)..(94): Xaa is any amino acid
FGHIAGTCPHESFGPDIDKNYSYEGMLYIYAYLCFRYGPEQGSEDRRATLESARRTIAKLFGMGKKSKDKPGAFLELARKVYNAINEELGVGDV

SEQ ID NO: 84671 - protein, 314 aa, Unknown
  Obtained from environmental sample
  DOMAIN (215)...(294): tRNA synthetase B5 domain
  misc_feature (1)..(314): Xaa is any amino acid
MPDYGFFSSPGNAGKTARKVKVLESVKQVRPYLSGFVAKGKAITDPMLRDMIQTQEKLAWNFGRKRRTISMGIYRISLVKWPIIYKGVDPNTVSFTPLQWDCPLTMSEILKQHPKGKEYAFILENEPIHPLLTDSQGFILSYPPIINSNDIGAVQVGDNEIFVELTGSDMHTLNLATSIVACDLADNGFTIEPVEVEYEFETPFGKSMVTPYYFQEPIFCSLSRIEKFLGEKLSADECVSALARMGVKAEKTEDCERGQKTQKTEGVRAWPPEYRNDFLHAADVMEDVMIGRSLKSFKPERPADSTIGPAFTDY

SEQ ID NO: 84672 - protein, 194 aa, Unknown
  Obtained from environmental sample
  misc_feature (1)..(194): Xaa is any amino acid
VVAEDVNPNRRGQDRDNYYWIRDAEKNNLIVGTQARILYSDAEGRLEIALRFNEMVRKGEVGAIMLGRDHHDVSGTDSPFRETANIKDGSNVMADMAVQCFAGNAARGMSLIALHNGGGTGIGKAINGGFGMVLDGSARVDEILKTAMLWDVMGGVARRSWARNEHAMEVCREFNEKYKDEYIITMPYVNLYYR

SEQ ID NO: 84673 - protein, 251 aa, Unknown
  Obtained from environmental sample
  misc_feature (1)..(251): Xaa is any amino acid
MVNSLEEDIDDLAFLFDKSQNQVDSSSLTKLTEEIIKGAFKLHSEGISETIPIGQIRRAAFWSRLAPASGGKCLVIENAHRMQEEARNSLLKLLEEPPARLTVVLTAPRPLSLIPTILSRLRPYAFNSRDAEAEQEVIRRVFKAEGYKGGIGFYLDSFLPVTQDALEALAAFFAASVAYRAALLSKRRNRPLSGEVVLLGKSSAPKAEAAGFGRPKEDTAAVINLIIEKAAKFEVRSLSPASSCLGQSDLR

SEQ ID NO: 84674 - protein, 318 aa, Unknown
  Obtained from environmental sample
  misc_feature (1)..(318): Xaa is any amino acid
MAERLTEEAEIPGMAAIPDAGAYSGGQRRPYPSAPRESAFSKIWPALRISILAVGVVVLGVLLYLLLIRPKITGKDLMERGLASIRVEDYTEAEDYFHRGETYLGKDIKWYRKYAETYKDMREHARAIRKIRDGLAFAPKDFDSLMLLGDTYTETKDFDSARETFLQLEKYYPESLKVPEKIGDVYLAMGDDRKSPDYYELARLEYTKITDKDWKNLDGQFKTLLSYVKMRKLPESEEKLRHIRRISSQAMNVPILTEYSALLQDNQKWSESRTMLESILDADWQYAPAQYRMSKYFREQIDYKRALAHINNAVRYDK

SEQ ID NO: 84675 - protein, 88 aa, Unknown
  Obtained from environmental sample
  DOMAIN (52)...(87): UvrB/uvrC motif
  misc_feature (1)..(88): Xaa is any amino acid
MIGENDARPSDAIAIALRFTAPIYVSKAVMENAAIILSPENEGEEEEKTESVEPASSLKRELDIAISEERYEDAARLRDELKKILNKN

SEQ ID NO: 84676 - protein, 288 aa, Unknown
  Obtained from environmental sample
  DOMAIN (6)...(284): Succinylglutamate desuccinylase / Aspartoacylase family
  misc_feature (1)..(288): Xaa is any amino acid
GLSRAGHQRICIVSGTHGDELEGQYVCARLAKILSDGKQKLSGIVDIYPALNPLGIDSVTRGFPMFNLDMNRIFPGSPSGSLAEVAAHDIIRDIEGADMCIDIHSSNIFLREIPQARVSEQNETALLPYAVMLNVDLVWIHASATVLESTLAHSLNMRDVKTLVIEMGVGMRITESFCTQIVDGILNLLSELGMWKGDAGRTRQPLVSKDRGVGFLNSDAAGIFIPRAVHGSHVNAGDCIGIVIDPLNGAVVEETLASCDGLLFTLREYPVVFGGSLLARIMEDSTNG

SEQ ID NO: 84677 - protein, 265 aa, Unknown
  Obtained from environmental sample
  DOMAIN (110)...(261): Anticodon-binding domain
  misc_feature (1)..(265): Xaa is any amino acid
MIMAGLEFTGKAPFRDIYIHGLVRDKQGKKMSKSLGNGLDPLELVDEFGADALKFTLAFMCAQGQDILVDKESFRMGSKFANKIWNASRYILMNLEGLNLVPNPDLLPVDKWIYSRLNAAAKKMEEAFLSYRYNDAAQTAYEFFWNDFCDWYVEATKLSMKTSEDNTAEKDRAATVLLDVLSESLRLLHPLLPFVTEEIYGKLPNTEGLLITGSVSESQRRARLSRGRKDFAFLQEFVRMIRTLRSDVQSPQRKDSASWQGWKAE

SEQ ID NO: 84678 - protein, 80 aa, Unknown
  Obtained from environmental sample
  misc_feature (1)..(80): Xaa is any amino acid
MGAKDGMNYAPKGKPNPVVKKGEFVFSAIALDHGHIYGQCNGLIEAGGTLKSVYDPDPKKVTDFAKHIPAKTLGHLIIGA

SEQ ID NO: 84679 - protein, 255 aa, Unknown
  Obtained from environmental sample
  misc_feature (1)..(255): Xaa is any amino acid
VSRPEKIFDSELIEKVVHAQIDPFGGAVIPIMIVVERHMEKEGGGCTLNHAVHHIDMLCWILGLPKKVSAVISNASHDNAEVEDMSVAVLQYDGGLCSKGALAQVTSSVIHHGEEQQLIFQGEKARVSAPWRVSANISQPNGFPFFKQQNEELISKLNNFYESLPKLTHTLHAGQIDDVLTALETGGKPLIDGEDGRRTLELISAIYKAGTEQRAVELPMQKNDPFYTVKGIMERVPHFYEKTVSVNDQGGQITF

SEQ ID NO: 84680 - protein, 169 aa, Unknown
  Obtained from environmental sample
  misc_feature (1)..(169): Xaa is any amino acid
MDEFAYFFGYLGLWRAWVSRFYLGKIPTGLLWMMTGGLGMVGSIYDFLTLPSQVREANIRNALYDRRTQQPAGQQESWRYANDAQYKVVNGKQEKESPERVILKLAKENSGILTVSEVALGANITIDEAKKMLDTLVTKGFAELRVRKSGSLVYVIPDMADKDEPLEDF

SEQ ID NO: 84681 - protein, 388 aa, Unknown
  Obtained from environmental sample
  misc_feature (1)..(388): Xaa is any amino acid
VVLSDGLAKFEHSDYKGKLRYTDKDFPNENRQFDILVSNPPYSVSAFKNTSVEYYSEKNFELYNSLTVNSSEIECLFIERAKQLLKEGGMAGIILPSTILSNEGIYSKAREIILKYFKIVAITELGSNTFMATNTNTVVLFLRRRNNYEFQNFAASLENSLNTYKDNTINGIEKPITKYLNHVWENISFTDYVFMLKKKPKNDITSHEIYKEYKKEIKAKTEVDFWSVLLDIEKEKILYFILTYPQKVVLIKTGEKDAEKRFLGYEFSNRRGSEGIHPIQRGKTIDECTRLFDEKIFDNPEKASTYIYKAFNGDYDFPIHESLKSNIFHVNLVDMLNFDRANFEKNISTMVKKKVAIESKWERKALGEIEQLEFINGYALKVLSRPST

SEQ ID NO: 84682 - protein, 289 aa, Unknown
  Obtained from environmental sample
  DOMAIN (110)...(167): KH domain
  misc_feature (1)..(289): Xaa is any amino acid
MLHAGVPMKKPVAGIAMGLITESNAPGARYAILSDILGEEDHLGDMDFKVAGTADGITGFQMDIKIAGVNHEIMRNALDQAKRGRLHILSIMNKTISKPLDEISEYAPKIVTLRIDTDKIGALIGPGGKNIKALCEQYSVRINTEDDGTVTIFGKTSKDAEDAKAAVQGVVMDPEVGRIYDGTVKSIKDFGAFVEILPGKEGLVHISKLSRQRVTQVTDVVREGDKIKVKLIEIDKAGRLNLSYIDAIDPGLSGEGKPGIFRPETIPGGGSDRNSDTDGISAAIGATNG

SEQ ID NO: 84683 - protein, 172 aa, Unknown
  Obtained from environmental sample
  DOMAIN (2)...(90): Elongation factor G, domain IV
  misc_feature (1)..(172): Xaa is any amino acid
VPDHKGRTPGAGSENKYAWAAKARDIPEEIQDAVERGMNASFQSGIVLGYPCIDIGVTVTGVEYSELTGTEFAFEACASLGFDEACKNASPILLEPIMAVNMVSPKESVGDAISLMTQRGGQVLSMDSKPGGDEVKALAPMAKMFGFMTALRSVSQGRAVFTMEFSHFEKKA

SEQ ID NO: 84684 - protein, 211 aa, Unknown
  Obtained from environmental sample
  misc_feature (1)..(211): Xaa is any amino acid
MKHSLSYVMVTPYTIAKSRTGGVIARLLSRVDLELVGAQIITPGEDFINEYAGTLRNQEKRNLNRAGELLANYIERNMSPSGGRRHRSLVLIFRGENPCRKLSDICGALFPENKGIEALSGETIRDTYADYIVDRDNHEKVIHFEPAILTPRHQELADETMTLLVKYFKNSKNVADNRSCQDSSKREQTLVILKPDNWSWSSGRPYLAIVW

SEQ ID NO: 84685 - protein, 90 aa, Unknown
  Obtained from environmental sample
  DOMAIN (5)...(89): Elongation factor Tu GTP binding domain
  misc_feature (1)..(90): Xaa is any amino acid
MVMLRTMRNIGIMAHIDAGKTTTTERILYYTGKSHRIGEVDDGEATMDWMEHEQERGITIQSAATTTYWQKIENGVKGERCQINIIDTRG

SEQ ID NO: 84686 - protein, 188 aa, Unknown
  Obtained from environmental sample
  misc_feature (1)..(188): Xaa is any amino acid
MSEIMRPIPFPELIRWVRGEYKNHGSVFGIRKEKFFRSVNSNCIELFGTKIKSPVGPAAGPNSQLAQNILAAFLAGARFIELKTVQTMDGEELRKCVARPCINAVDEGYNVEWSTELTVPEAREEYVKAWFLCHIFAKEFEIDNNFIFNMSVGYSFDGIKSEKIDSYIEGMRDAGNTEIGLGQSDHWA

SEQ ID NO: 84687 - protein, 315 aa, Unknown
  Obtained from environmental sample
  DOMAIN (149)...(253): TonB-dependent Receptor Plug Domain
  misc_feature (1)..(315): Xaa is any amino acid
MAEVAVMLQYEYRFSLRDVITVPKSYVNLSGALIERGTRRPIADALVVLRVVDTLSDTSLAMPFSLYMEQIGAIEGQSWEDSRLVATTDSAGAFRFYSLPSGKVEVSVQAPDYVPYFTYERISKLEEVKVLYYVTRLDYADYELVVYGKAEEKEVSRHRISMSEVKRVPGLGGDAVRVVQAMPGVARPSFGGTEVVVRGAPSWASRYYIDGMTVPMLYHMSGATAIYPSDALDGVDFYPGGFSSRYGGAVAGVIEMNTRSPKTDRLHGYADFSMLASALFFEGPVNEKVSFMASGRRYFAGDLLKLYFDISDPEH

SEQ ID NO: 84688 - protein, 512 aa, Unknown
  Obtained from environmental sample
  DOMAIN (6)...(461): RecF/RecN/SMC N terminal domain
  misc_feature (1)..(512): Xaa is any amino acid
GVVGESEIDLRRHYRSFGANGCGKSNVVDAIKWVLGEHAIKSLRAEKMEDVIFGGTEARKPLNVAEVTLAIANETGLLPMDMPEIEIKRRLYRSGESEYFINGAQVRLKDIRELFWDTGVGKTAYSVMEQGKIDQILSSKPEERRYLFEEAAGITRYRERGAEAERNLAKTEENVRQVDLILNEVKRSHDSLKIQSEKTLKYRTMRDEIFNYELDIQLLRLKQFKYERDEKNETLRRRTQDRDRIRAEMEAENQALEAHMDEVNSMEARLVELQKNIYGLALEKNARENEVRLFNEQRGENKIKIGQNEEREKQAVQKITELNADAAGQDAVVQDLRKQCKNIEENIRSFEENIQLAAGRISENDKESHRAESEIHGIEKELAALEKELAIITDDIVAELDAGLKKAGYSATERKNAEEALRETLVRLNTLLSGREALIGDLAAAANATGGVDAAEIKRITDILLKSLAEAAAGANKAIELFNSYREHSPTFIDEFLAPQGIITKKRAWTRK

SEQ ID NO: 84689 - protein, 388 aa, Unknown
  Obtained from environmental sample
  misc_feature (1)..(388): Xaa is any amino acid
LISKALQANGRYAFLWVNEYLRDDFIRRFSDFFDTLDSPCVLSSEEDLKSRTWDFIVLDRYKTSRKEFEFFSSLAPVIGIDEGGSFRNHFDFLIDLLPSARRANEEAKPNIFSPALLSLPRNRRPVDKGETAPGFRILISFGAEDSAGLGIAAARSLSGFLAKTPTKKPLEVTLVSPIPPHDSQGETEELFGITVLRRIPYLSERLAEYDLLVTHFGIGAFEAVYARLPVILVSPGLYHERLSRKAGFFSLGIGTGAAGRLGKLAFSLAHRTEGITSKPDILKTIERKSREIADRYGLWEDQKETIVSLLCRVSPRSPLACPVCEKPRAVAVLARFPEESYRQCPHCGIIYLTRLGEPPIEYEKDYFFGDTKNSTAKLTGGLCHSVLA

SEQ ID NO: 84690 - protein, 277 aa, Unknown
  Obtained from environmental sample
  DOMAIN (70)...(211): Histidine kinase-, DNA gyrase B-, and HSP90-like ATPase
  misc_feature (1)..(277): Xaa is any amino acid
MAVKTKKPVKKSPSKGSPSKTPRVAATKGSIPTKNTPGVYDESKIKTLSSLEHIRARTGMYIGRLGDGSNPDDGIYVLLKEIIDNGIDEFIMGNGKSIEVAIKDGAKPGAASVKVRDYGRGIPLGKLVDCVSIINTGGKFNDDVFQFSVGLNGVGTKAVNALSVLFRVVAIRNGEFAEAVFERGKLKSERKGKLKDKQKDGTYVEFTPDPDIFKDYLFNTEFIEKRMQNYAYLNAGLTLSFNGKHFVSKSGPLRSAVRGDGRRQPLPAWLLQGRTFI

SEQ ID NO: 84691 - protein, 75 aa, Unknown
  Obtained from environmental sample
  misc_feature (1)..(75): Xaa is any amino acid
MKINSGFTTKYLSVIAATLLFFIAFVTGSVLYRGFFSLQTFLNLFIDKSFLLVSAIGMSLVILPGGIDLSADSVL

SEQ ID NO: 84692 - protein, 108 aa, Unknown
  Obtained from environmental sample
  misc_feature (1)..(108): Xaa is any amino acid
GQFFGGQPAESDPRPLAVTDPQLLILDDPTRGIDVHAKAEIMNLAMRLCNDGMSVVFISSEIEEVVRCSDRVAVMRDRKKATEIYGEDLSEEKILKVIAAEDKAAAGR

SEQ ID NO: 84693 - protein, 178 aa, Unknown
  Obtained from environmental sample
  misc_feature (1)..(178): Xaa is any amino acid
GCYTITSDVDAAIDITDNENCGRIFNINDYEALSKILLKVCTNKKLLQDAPQKSIEFAKSHYDWDLIINRINHLMNNISTNEKVIEQKGELKSLWQQVAEKLANIETASKEELSQTIKDLSYLEKLAAKFFCEIEDADLKYKLNQIKEKVLNILYSSPAPQIKRDILEIAAQIALNSP

SEQ ID NO: 84694 - protein, 497 aa, Unknown
  Obtained from environmental sample
  DOMAIN (276)...(487): Beta-galactosidase trimerisation domain
  misc_feature (1)..(497): Xaa is any amino acid
VYREKTTAINTALAQRYKKHPALGVWHVSNEYGGECHCPLCQERFRAYLKNRYQTLDALNEAWWSDFWAHTFTDWSQIESPSPLGETCIHGLNLEWMRFTTEQFADFYLCETKPLKAITPDVPCTTNFMGTYPGFDGFRMAQPLDVVSWDNYPQWTGTEKDIVIAIETSFSHDLNRSFKGKPFMLMESCPSATNWRSAAKLHRPNVHMLQSMQAVAHGADTVQYFQFRKGRGSAEKFHGAVVDHEGSENTRVFRDAAEVGKRLAGMDAIVGTGTPAETAVVYDWQNRWALDDVRGFLQDKTGYYNTVIQHYGIFWQKGVPADIIDSSLIAKPGYLDKYRLLVAPMLYMLRPGLPEAIAGFVRRGGTFVATYITGEVDENDLCFTGGFPGPLRDTLGVWCEEVDALYPEDRNSLIWNGKSYGAFDLCELIHAEGAEVLGTYGIDFYAGRLALTVKKTGKGRAYFIAARTGEDFLSDFYPQVIAQAGIKRSLEAELPKA

SEQ ID NO: 84695 - protein, 84 aa, Unknown
  Obtained from environmental sample
  misc_feature (1)..(84): Xaa is any amino acid
DLWPSLTGESIPQAEKTFEGRNYGYFKNAVGEAAAAALSPLQTEYKRLMADPGYIDGLMKPGAERAAARANKTLKTVHDAIGLI

SEQ ID NO: 84696 - protein, 202 aa, Unknown
  Obtained from environmental sample
  DOMAIN (56)...(202): Thiamine pyrophosphate enzyme, C-terminal TPP binding domain
  misc_feature (1)..(202): Xaa is any amino acid
MTDQIPASKLIKNNLRVDKLPHIWCPGCGNGILMRAVVQAIENMGLDKNKVCVVSGIGCSSRAAGYMNFNTLHTTHGRALAFATGIKLANPELTVIVITGDGDATAIGGNHFIHAARRNIGITTIVFNNSIYGMTGGQYSPLTPTNDFATTAPYGNVDRPFDLIKLADAAGATYVARITTYHVKEAVRLMKGDWQKSSLAIT

SEQ ID NO: 84697 - protein, 454 aa, Unknown
  Obtained from environmental sample
  misc_feature (1)..(454): Xaa is any amino acid
SRLEITPPDNAGPLNNTFKTLATGGTANTLRGTLIESNIKKLIGKLDDSSVEYVLTSSMQVNGNHPSYFWSWDVADLFNEFNEGTSHTFTVTATDYAGKTASAQYTLTKDTKKPTVVITNLEGTARIEEENARLQISINDDSSRIGLYDSANTSVNSGIVNKFQYRIYNTATAFTAAFTDVALPAANPGRTESYVISLLAPENTVDATKKYWTGVTKLTSMDTSIPDGTWTVEIKVSDRAGNAEDSYVKTFVVNRKHPVLDMKKSDTGSNRNTAIFPNDNPKSFYSNGTSVDTVTESGKSVLFTLSGTVRDGDFTGDGGLPNNRDTLKIYVNDIEGTAGTDYVYSLTQASFGVYNWSWSLIKPVNTPETDPTAFANSTFIRQGANIIKVVAKDSQGNENVKLLPNPVNAVILESTFTITKDTKAPTGNFYNLNTSAVVPPTSPNLSRDSADLII

SEQ ID NO: 84698 - protein, 322 aa, Unknown
  Obtained from environmental sample
  DOMAIN (20)...(55): WD40-like Beta Propeller Repeat
  misc_feature (1)..(322): Xaa is any amino acid
VFFVAEGDIWTALLSGGKALRLTTHTGQETRPVISPDGKWIAFSASYEGSGEAYVMPAEGGLPKRIAFDGGSPVGWTPKGEVLCVCSSNKGPSGQRVLMLVNPNTLAKTAIPLADANDGCFDDSGKYLYFIRMGIHMMGDNAKNYRGGAMAELWSYELGTSKEAVKINVPGNGNIKRPMWWKDRLYFIGDSDGTDNIWSIKPDGTDATKVTKHKDWDVRYAYLNEGKITYQLGADVHVLDLSNSQDRVVKIDLVSDFEQMRKRSIRALSYMNNVSLSPTGDKIVFTARGNVAVASPQNLRRGDLATQSGSRITAATLSKNGK

SEQ ID NO: 84699 - protein, 156 aa, Unknown
  Obtained from environmental sample
  misc_feature (1)..(156): Xaa is any amino acid
MADAREFFKGKAPLSFEENVLKSGTYELVISAQDLLGNVSKLSVAWDVTDPSEIKLDHVMNVPNPVKMGQQTRFYYTHSNVTGDLDVNVTIRVYSLGGRLLSVIRKPKNGETWVPRDNRGNYLTPNVYLYQVTATSANVGKTVKSKIKKLAVLPPR

SEQ ID NO: 84700 - protein, 310 aa, Unknown
  Obtained from environmental sample
  misc_feature (1)..(310): Xaa is any amino acid
VFPDKKTGIHNVEHACSDDALWLVSSIAEYIRETGDASCAEKILPYADAEAAPDSVYEHCKKILNFSQRMTGSHGICQGLKADWNDCLNLGGGESAMVSCLFIWALDNFVKLAEFLGKTEDAAVYKTIREKTAKVCRETLWDGKWYLRGFTGKGRPIGTDADAEGKVHLESNTWAVIVSGDPERGKRAMDSVEEYLGTPYGLMLNAPAYTVIDDDVGFVTRVYPGLKENGAIFSHPNPWAWIAECILGRGGRAMDLYNRLCPAAWNDKCDIRKAEPYSTCQFITGKSHPAFGEAHHPFMTGSGGGALAII

SEQ ID NO: 84701 - protein, 146 aa, Unknown
  Obtained from environmental sample
  DOMAIN (56)...(134): BRCA1 C Terminus (BRCT) domain
  misc_feature (1)..(146): Xaa is any amino acid
MAWKKLLSANLEDLSGIYGLGDITAKTYENGLTECKEEMAKVLSAGIISIAPQPKNEDVPLKGLSFCFTGELRSIKRSQAEEKVKALGALVKTSVVKDLSYLVTNDPESGSAKNRKALEMGVKIINEDIFFKLIKNNKITSQKELF

SEQ ID NO: 84702 - protein, 205 aa, Unknown
  Obtained from environmental sample
  misc_feature (1)..(205): Xaa is any amino acid
MYMARQYAHVWDSKIDGYIKVLQSLSNVMNFYENLPLEARRREYENTMESVFEDMPEFVRMFTVWKPDAIDGMDRRFMGKTGATPTGQFAFALTRENGQIEKQTSDVVHAAMTHLTGSNSKKVEMADPIVIKLAGKDTWCLRIMVPIINKRLNESVGVIGCQFNIDLIQPLVEEAIRDNEEISSMAIYTNTGFILANTRADLTHA

SEQ ID NO: 84703 - protein, 306 aa, Unknown
  Obtained from environmental sample
  DOMAIN (89)...(270): Transglycosylase
  misc_feature (1)..(306): Xaa is any amino acid
EYAFNRYLRGWGDKLIDLESRGLLSREYGAGWQDVLMVKAMELEAQRITDTSGEFSDGQKIVDGVEVSDFPSLAVVRLLNEVREYSNTILITDRADRPITRIKTDHRRARMAEFPKTLVTALIAAEDKHYMENTLGFSFDSFVRAFANAVPATIKKFRPATPRGTSTITQQVAKLFMSRLDEAGQRRVSNTLNRKNRELKLAAALRKMYTPEEILEVYMNHAVTSDHGLIGYKDIARGLFGKDLSELTDAECVYLARMVKWGRNLKPKIAAQCRVDMGRMGDALGWDAAKRAEVLAQISANPVIGK

SEQ ID NO: 84704 - protein, 311 aa, Unknown
  Obtained from environmental sample
  misc_feature (1)..(311): Xaa is any amino acid
SLSRASFSRNLSFGAAPVLVLGAGPSLDETLDALVKRYPQDINLNRLFKIVCVDTCLGSLKERGILPDLVVILESQHWNLRDFTGCYNWQVPFAVDFSALPQSALMLAGEGFLFMTPWTPLQIFERLKNAQMLPAVLPPLGSVGLTAVGLSRRLTTGNIICAGLDFSFTPDKFHARGTPGHRALLNSQTRFRSIYNYAAYGQSSVAAVSKTRLPVYTNPALKNYRALFEQEFGGDSRVFDIEGIGLPLGVKTLSLDGAMDLLVNLTTKNTNNQKHSKNSIGIFGGQAQYITQRSQRDTKNTKEDSAKSDPG

SEQ ID NO: 84705 - protein, 115 aa, Unknown
  Obtained from environmental sample
  misc_feature (1)..(115): Xaa is any amino acid
NYWIFGSDVWENLVIFTGGDCAARAFDADSGVLRWERVFDTPVSSAPTLSAGRVYFGLLGDETRKPQIVCISARDGRLLWQMETDGSILSAPVIAGKRIIFGTDENIFYVLEQVL

SEQ ID NO: 84706 - protein, 84 aa, Unknown
  Obtained from environmental sample
  misc_feature (1)..(84): Xaa is any amino acid
MRGPVFPAFHDEEWYKMPLLKAYPENSRGLGITDMAEAIEENRPHRANAEMAYHVLDIMHGIHDASSAGKHIKLKSKCKRPAAC

SEQ ID NO: 84707 - protein, 334 aa, Unknown
  Obtained from environmental sample
  DOMAIN (199)...(281): Fibronectin type III domain
  misc_feature (1)..(334): Xaa is any amino acid
NYRPDTLLCVGEPKNANGSGSANTAVSGKPIGNMGTVTVSAGNEQISLSWTSVAGADQYEVYYSTTNTIPASPSQTVSTNTATISGLANGTTYYAWVKAKNANGTGSASTAASGIPMTTPDALTLSAANQQITVSWAAVPMAGSYEVYYSTTTTIPGTPEDTVTGLSKTITGLSNGTTYNFWVKAVYTGGTSGASPMASGKPVGNMGTVTLVSGNGQVSLSWSAVVGAEQYEVYHNTSNSIPASPTLTVTTNAVTISELANGTTYYFWVKPKNTNGAGSTGVAASAKPIGTPEAPALTSGFRQLLVTWTAVPGADTYEVYYGTTEPPAMLVTQH

SEQ ID NO: 84708 - protein, 322 aa, Unknown
  Obtained from environmental sample
  DOMAIN (60)...(149): Transglutaminase-like superfamily
  misc_feature (1)..(322): Xaa is any amino acid
MAERRYFWEIFSERAENLEPVNEYMEKITAILYNFSEYQYDLNQGEDNSIAALKEFLLNTKEGNCVEFSNTIALLGRLAGVPSRVVTGYLVAEGLQTNAHLKGIASLREKIPVLQQFPFNNLYMVTNLHAHSWTQFYIPDYGWIDFEATQFALPPLGAGDFNTWDVVIPVLEQDKVFSEIRKFPWRAVLKTSGSMAVFALICAYILMYGREVFLFFNARKGGRKGARSLYLLLLARLAADGKPVKPASKTALEYAELFPAGTGAKANPHFREFASLYSELRWREFADNAEMEKRFLLLKDEYANIIKTTRRPGISKSVIRIF

SEQ ID NO: 84709 - protein, 439 aa, Unknown
  Obtained from environmental sample
  DOMAIN (34)...(414): Aminotransferase class I and II
  misc_feature (1)..(439): Xaa is any amino acid
MRRDILHPGAGKLRYEIREIVGFAKSLAKWNIPIHWENIGDPVQKGEPVADWIKDIVRAKAGENLSYAYSETEGVRSTREFLADLANKRPVLELPGPNPRPVVKAEDILFFNGLGDAVAKVFGFLRREARVLGPSPAYSTLSSAEAAHSGYEHLTYRLDPLRDWMPDMTDVELKVKYNDSIAGILLINPDNPTGAVYPVEVLLEFVRIARNYGLFIICDETYANIVYGGAKTAALSQIIGDVPGLALRSISKEVPWPGARCGWAEVYNRRSDPRFDAYIKSLVDSKRLEVCSTSLPQLCIPAILGSPRYPRHLEKRAVMFEKRADEMEQAFAGVSGITIKKPSGAFYVSAVFDDVVNENPGLRSLPVVDETLRNYIRAEITNLKPDKQFAYWLLASTGICVVPLSGLPAICPVFVLHCLNTPMKNGMDFYTLGEAVQIY

SEQ ID NO: 84710 - protein, 300 aa, Unknown
  Obtained from environmental sample
  misc_feature (1)..(300): Xaa is any amino acid
NPVRGSQKADHRCRSFHALYHGRYWANLRNETDPESVHLADFPSPKESRRDRALEFRMASVQRAVSMGRALRSQYNIKVRQPLRMAELVTRDAAEKSALLEMTEIIREELNVKNVSFRDNEEDLVEYGVKANFRVLGKELGKDMSAAAAKIEALSQDEIRGLIEGASLSLELAGGRTVVLTADKLDIRRNEKANLRILNEGTLTVGLDTELSPELSMEGDIRDLIRGVQNSRKEMGLLVLDRIKLTVFGSEKLKQAWDKMGASVAKETLAIQTLWAKVEGQIPLEAGDETWLVKIEKNGE

SEQ ID NO: 84711 - protein, 191 aa, Unknown
  Obtained from environmental sample
  misc_feature (1)..(191): Xaa is any amino acid
RKIHGSDRQSGTQFGNLTAGLYALKMGAPIKQFIAATNINKTVPDYLASGEYRTRASQATISNAMDVGAPSNFERMEAHFSWEEMRRIILGVSVSDEETRETITRVHHEAGYFLDPHSAVGWKGVDKLSAENKIDNPVGVLSTAHPAKFSETVEPLVGPTPVPASLASAMSRAVNSQTIPAEVSALLEALL

SEQ ID NO: 84712 - protein, 317 aa, Unknown
  Obtained from environmental sample
  misc_feature (1)..(317): Xaa is any amino acid
VIAGGELLGVTSEQILYTLDHCVNRDYLICQDGCVYLPYLYAAETGVAQRLSERIRGGARSGERSISNKEINDFIARYEKRTGWIGAPEQLEAVRCAAESGIFILTGGPGTGKTTVLQVIVALFMEMGLKVELAAPTGRAAARMGSISGIAARTIHRLLEFKPGGKEGGFTFQRCENNPINADAIILDEVSMVDILLMKSFIAAVKNDTKLILVGDKNQLPSVGPGNVLADLIACPRIPHVELKRVFRQSAMSRIVTAAHEIIGGDTPEFSNSAADNCFLMTENDPEKCLETIVDLVCRRLPARYGLDPGPIYRCYR

SEQ ID NO: 84713 - protein, 273 aa, Unknown
  Obtained from environmental sample
  DOMAIN (2)...(271): tRNA synthetases class I (I, L, M and V)
  misc_feature (1)..(273): Xaa is any amino acid
VRRFGWDCHGLPVENLIEKKLKLNSKTEIEKYGIAKFNEECRESVLRYVKEWRRTITRLGRWVDFDNDYKTMEPAYMETIWWVMKSLHEKGLLYEGHYILPYCPRCSTVLSNHELNLGGYKDVHDPAITIKFKVKEGAGGQGSGIRGDVYFLAWTTTPWTLPSNLALVLGPDIDYVLIEARTPNPDPLPDPSYYILAKERLQAYFKETSEYKIIYTKKGSELLGVEYEPLFPYFKKPPRRTPSAPIRVILFRPRTARALSTPRPASAKTTRGC

SEQ ID NO: 84714 - protein, 58 aa, Unknown
  Obtained from environmental sample
  misc_feature (1)..(58): Xaa is any amino acid
MARLGEIDTNGVVERSHPFDNVNNFRDDVVRPSFDRELILKNAPVCNDQCVIAPKTVE

SEQ ID NO: 84715 - protein, 488 aa, Unknown
  Obtained from environmental sample
  DOMAIN (1)...(488): tRNA synthetases class I (I, L, M and V)
  misc_feature (1)..(488): Xaa is any amino acid
MKGKKIERRFGWDCHGLPVENLIEKELGLNSKTEIERYGIAKFNEACRASVLRYVQEWRQTITRLGRWVDFDNDYKTMEPDYMETIWWVMKSLHEKGLLYEGHYILPYCPRCATVLSNHELNLGGYKDVHDPAITLKFRVMRNEELGIRNKGEAYFLAWTTTPWTLPSNLALVLGPDIDYVLIEALSDPSSSSPQSPVPSPQYYILAEARLPAYFKSPAEYKIIWRKKGGELLGVEYEPLFPYFKEAAAQNAFRTYPGDFVSTGDGTGIVHTAPGFGEDDARVLRHPGIPVICPIDAECKFTEEVKDFAGQFVKDADKAIMEKLKAEGKLFKREQILHAYPHCWRCGHPLIYRAVGSWFVNIEKIKKDMLKANSEILWVPEHIRDGRFGKWLEGARDWAISRNRYWGNPLPIWRCEDCGKIVCVGSRKELQELSGTYPEDLHKHFVDEITFPCACKGVMRRVPEVLDCWFESGAMPYAQSHYPLTRPI

SEQ ID NO: 84716 - protein, 96 aa, Unknown
  Obtained from environmental sample
  misc_feature (1)..(96): Xaa is any amino acid
MKIKFAPLIAPLFMLILFFSCLSINHSREELNIPASVVYLSFDDGPNVQDDTTVRLLDVFKKYQIKAVFCLLGENAERAPETVKRMYDEGSANLTM

SEQ ID NO: 84717 - protein, 92 aa, Unknown
  Obtained from environmental sample
  DOMAIN (9)...(91): Ribosomal protein S15
  misc_feature (1)..(92): Xaa is any amino acid
GYREFGITKKRGFIVTKFGKNEKDTGATEVQIALLTERINQLTEHCKQFKKDKSGQRGLLILVGKRRRMLKYIQRTNLEGYRKLIKDLGLRK

SEQ ID NO: 84718 - protein, 406 aa, Unknown
  Obtained from environmental sample
  misc_feature (1)..(406): Xaa is any amino acid
CFAFLDPPKEDAPKAMRALNEYGVKVKVLTGDNDAVTRTVCNSVGISAKKILLGSQIESMNDEALAKAVTESDVFAKLSPRQKARIVTTLRNNGNTVGFLGDGINDANAMKAADVGISVDTAVDIAKESANIILLEKSLSVLVQGVIEGRKTYANTIKYIKMTASSNFGNMFSVLAASAFLPFLPMLPLQILVLNLIYDISCLTIPWDNVDFEFLRRPRRWDASSIGKFMIWIGPTSSVFDITTYILMFTYICPLMVPHFIKSTFGVDIGLESCNWNTLDTLKNLLNPEQIEKAKEFFRALFNAGWFVESLWSQTLVIHMIRTPKLPFIQSRASWQLSSLTTLGIATGTIIPFTLLGDKLGMAQLPYAYFPWLIGTIFAYMLLATLMKNIFVWRYKELRSGHPRPI

SEQ ID NO: 84719 - protein, 478 aa, Unknown
  Obtained from environmental sample
  DOMAIN (330)...(408): Bacterial Ig-like domain (group 2)
  misc_feature (1)..(478): Xaa is any amino acid
GSGTGTITYASSDTSVATVTNSGVVTLVKVGSATITATKAADDTYAQATASYTLTITKATGATLSGNPTVASYTSTTITVNTVTAPTNGQTVEYAANTTTTAPTTGWTDSTTITGLTNGSSYYVYARAKSNDNYNAGTAIRSTATRKLELKTDSIAFANTNNESKVYASGNFTKAITNTGSGSGAITYASSDTGVATVTNSGVVTLVKAGTATITATKAADDEYAQATASYTLTVTKANGATLSGNVTVASSTSTTITVNTVTAPSNGQTVEYAANTTTTAPTSNWTDSTTITGLTNGSSYYVFARAKTNDNYNVGTAIRSNATTKLQLKTDAIAFANTNNENKVYGSGNFTKAITNTGSGTGAITYASSDTSVATVTNSGVVTLVKAGSATITATKAADDEYAQATASYTLTITKATGGTISGNVTVASKTATSITATAATITSPNTGSQTVEYAAATVNTSTPTSGGPRPNLSSSN

SEQ ID NO: 84720 - protein, 479 aa, Unknown
  Obtained from environmental sample
  DOMAIN (307)...(469): Type I restriction modification DNA specificity domain
  misc_feature (1)..(479): Xaa is any amino acid
STGSCLWSGGFLISALKYIKEKDPDCNVEHIINNNLFGIDINKTIARIAKMKLFLELNTYSNIISYNSLESLDEIKSLLHNTNGFDVILTNPPFGAKINQQALLRTFQLGYKWSKDQNGFNRMGNILNTQTVESLFIERCIDLLKVGGRMAIVLPNGNFENPSLEYIRYYIMEKCKIMAIVNLPQETFIPYGTGVKTSLLFIEKKEESDTQVYHIFFGKITKLGYQGNKNGTPVYKKNLYGQIMTDSNGSQILDEDVSELIQLYKNFSTGKDYVTSHSFSIKSSQMGSRFDFDYYFPETRSLFANTTNSVKLGDVCEIVKQKSSKLKINSGFIDYVELSDINAYSFEIINATSYNIHGLPSRASFEIREGDIITAVAGNSVGTKKHATALVSKYYNGCICTNGFRVLRNFKINPFYLLYYMRTDKFLKQMYMYRTGAAIPVVSDTDIYNIIIEIPKDDIFKRIIDKMEKCLFFENKTPK

SEQ ID NO: 84721 - protein, 397 aa, Unknown
  Obtained from environmental sample
  misc_feature (1)..(397): Xaa is any amino acid
GYGEPVTLACVKSDSIAVASAGTLKYDGTAALSLPGALIVNGTLNLPLSGLSATTPKITATGALTIGASATLNITGTVAKGTYLIAKGGSGSGDFGAITVNGSANTDYRFTTARTANQIELTIAEKGGSESDAKNYLTVDSAKYTGDNNVTLYLSGSTGSGLKSMRDFIAATSGARITSVYVLYRPGAAATVNASGVVDTTANGGRIAIPLATISATTGNTMTFQLTVPAAKSGSVDEPYYFNVATYWSIDGTATAAPSVSNNKSANLRDPKNTVKENKLELRIVGNQIDSDPTGITLRLNVSNPDILPGSASVGENMPYVDYVGIWVKRNGSAPALTGNKLEGAVAGSEKQNIIPVATLKSQSNLDLSLDPIKNPSADTLYFAIAPHWTGAGIDSV

SEQ ID NO: 84722 - protein, 297 aa, Unknown
  Obtained from environmental sample
  DOMAIN (1)...(284): Inorganic H+ pyrophosphatase
  misc_feature (1)..(297): Xaa is any amino acid
MVRTKEEVSSKNLLRSLLVGTLGSSVLILIAVAVMAALGLITWGIFGSVVSGLVVGVIIGQFTEYYTSDIYKPTQSIANQAKLGHATTIIEGISVGMKSTGFPVVCIAVGILLAFGFAGGFGNLSMGLYGVSFAAVGMLSTLGVTLATDAFGPIADNAGGNAEMSGLPPEVRKRTDELDMLGNTTAATGKGFAIGSAALTAIALLAAYIEEVKLWLGKIAASSNGTFKAGTVVFASSEKNLENYHFDSDLAIRIIDNGNRAINEDGTLVGLVAHNANISDFLVAYNLTLMLVPNSDP

SEQ ID NO: 84723 - protein, 298 aa, Unknown
  Obtained from environmental sample
  DOMAIN (117)...(194): Bacterial Ig-like domain (group 2)
  misc_feature (1)..(298): Xaa is any amino acid
LTESAERLFIVSCGGDDPDPKPDPNPPPATISVTGVSLNKSSTTVIVGGKETLTATVAPNNATNKNVTWSSSDTSKATVSNGEVTAVAAGSAIITVTTSDGGKTATCNVTVSASAVGVTAVSLNKSSTSITVGGTEILTATITPSGATNQNVNWFSSNTAVATVNGGTVTAVSAGSATITVTTVDGNKTATCSVTVTTPTYTVQYNANGGTGTMANSTHTIGTSQALTANGFTRTGYLFVGWSLNSGGTGTIYYNSQSVTNLSSTHGVTVTLYAKWAEGNMYYGVTSTAALNALKGTG

SEQ ID NO: 84724 - protein, 285 aa, Unknown
  Obtained from environmental sample
  misc_feature (1)..(285): Xaa is any amino acid
LGISVSIWNNTATLRLLEELHKVWSSTGKRPVVVLGGPEVSHLRTDAEIFRYADYVIRGEGEETFRELCENILTNRLQDGQSSSVIPPQFTNAENADVSKIKSGYHLYTDEDAAKKLIYVESSRGCPFNCEFCLSAVREQGGALREFPLEPFLAEMDGLIRRGVRTFKFLDRTFNINIERALRIMEFFLEKIKEKNERQDSLVVHFEMVPYLFPLELREMLSRFPQGTLRLEIGIQTLNSEVASRIKRSRGLGQSFFPEEELETLRFPGGKKQARYYPMRLNRRS

SEQ ID NO: 84725 - protein, 177 aa, Unknown
  Obtained from environmental sample
  DOMAIN (5)...(169): Thymidylate kinase
  misc_feature (1)..(177): Xaa is any amino acid
VFVTLEGMEGAGKSTLLTGLTDRLEAAGRAVLCTREPGGSALGREVRALLLRAGSDVVPEAELFLFLADRAQHVARIIRPALARGDVVLCDRYVDSTVVYQGAGRGLDADALRRLCDFAAGSLRPDVTLVLDLDVKIGLARAASRQAADSTLAAEGRFEAEPQDFHKGCAGRTSAFA

SEQ ID NO: 84726 - protein, 58 aa, Unknown
  Obtained from environmental sample
  misc_feature (1)..(58): Xaa is any amino acid
MRTIEQITSKGLPLRGNDIDTDRIIPARFLKCVTFDGLGEHALKMILKAFTNKAAHIL

SEQ ID NO: 84727 - protein, 444 aa, Unknown
  Obtained from environmental sample
  misc_feature (1)..(444): Xaa is any amino acid
LEARQLIAVRRYSAALASLAIFQPVAVETADAAMLRLAALKGLVNGGAVSYSAEFRRRMSEAMNRYPRDTRAPRLFFDYANYAYANGRKPNPDDTRIMEFALERLPFLLPQDPELAWMAAPFINDIEKARQTLADYRSGSSKPNPASLVPALNLGLLDDIDAVEELFAPANAPVVDKDIVVNVWKLLRSEEGRDHMARKIKVFSGDIIEDEDHDGCHESRAVYRQGVLEEYHFDADQDRLDDAVIIFNSGNPQWARMPVLKAVVFWESYPSVQRAMLENGLYLPAPGGFRFAPLGFIEMCAGDSTSGLLYPQRQPLQQAITRYMLASFAVSVQQPSVEFPGGIEHIYLENGIPTNAEVILGNKTVSYTDFENGRPVTQWLDLDLDGRMETVRRFRKNFFIGKTALSWDELQGRLSQGGSDFRQLLESSESDWNGDGKFESREEY

SEQ ID NO: 84728 - protein, 215 aa, Unknown
  Obtained from environmental sample
  DOMAIN (2)...(215): Glycosyl hydrolase family 1
  misc_feature (1)..(215): Xaa is any amino acid
MTFPKDFIWGTATAAYQVEGAAFEDGKGLGIWDVFCHRPNAIWQGHTGDIACDHYHRYIEDVGIMKDLGVNAYRMEIAWPRVVPEGTGAVNPKGIDFYDRLIDALLAAGIDPWVTLYHWNLPQTLQQRGGWMNPESSKWFADYAAVVVDKFSDRVSHWMTINEPHVIINHGLFTGVHARVTNSRWPRRLPPGTPAFVARPRCFRYQAESQKPASI

SEQ ID NO: 84729 - protein, 165 aa, Unknown
  Obtained from environmental sample
  DOMAIN (24)...(151): Polysaccharide deacetylase
  misc_feature (1)..(165): Xaa is any amino acid
MFDTGIKAEIEADIEAHWKEYGYKEKPKKFVAISFDDGPCPASSYGGTAAMLAKLDELKVKATFFVIGGNVRANKSVAKAIFDAGHELGNHSDGYGSLGGETVSAIKTNLTAASLAIKEITGKDPVLFRAPNLNHGRYLSQVCQGNGYALLLTGMFITTGPETRL

SEQ ID NO: 84730 - protein, 214 aa, Unknown
  Obtained from environmental sample
  misc_feature (1)..(214): Xaa is any amino acid
VASIVELCKSIAEQGERWDKATAELRASIAEQGKRLDAVCERLDEQGKRMDEQGKRMDKVLDELRVNNHRVGDLSNKVGRIVEKIVLPGIVDKFNERGFKFDTVSANVEFLNEKKNGKLAELDALLENGKFVIAVETKTELTIKDVNVYIKRLQALRKVPRFKGKKIYGAFSTAIAEQKSIKYALEKGFYVLQQPDVMAVRIIDFPKGRSAKAW

SEQ ID NO: 84731 - protein, 347 aa, Unknown
  Obtained from environmental sample
  misc_feature (1)..(347): Xaa is any amino acid
PYASLFDGYGGRAVKDFEQQRPDLRITKAAEGADILFFDDGEFGRLRSGSKLLALNLYIGVNTQDGETVIEQDVLSQDTQWALPLMSFMDLLFYNINILQAANFDRPPKTRAEFLTVVRTIARTHEEQDAVYGFALDLTQGARRSIYPWIWAAGGEICVPGSAPNEPPVLSRAAVDTIAFFGQLQREGLLSPGQGTGEQRLIEFTEGKIAMITGSARDIAFLQSRNMDFGITAIPGTTQGKNRLSLSKIYAGISADCALPKEAWVFLSFIAGKSQVLAEALTAIPGSIPITFPGEYILKNPLYSKAWDIFEAAEIVEYRNDDPSEEETEPPCNDENHGVRSKEWGSR

SEQ ID NO: 84732 - protein, 228 aa, Unknown
  Obtained from environmental sample
  DOMAIN (86)...(166): Mur ligase family, glutamate ligase domain
  misc_feature (1)..(228): Xaa is any amino acid
PRQIGRDYYCFPEGINGGWLSGGGPAFARLSNWEGVSGEIEALVPSRLLTPGEHQKINLLSAALAVYGFGTKAKYIHDSLATFTGIEHRLELFHTANDARYYNDSAATIPEAAAACVEALSTEGPLVLVTGGTDKNLDFSPLVKVCGKAASIILLAGSGSEKLSRLLGEAGINYSGPFDNLENAVRCAIEKATKGSVVALSPGCASFGMFLNEFDRGRKWKDAVIKMT

SEQ ID NO: 84733 - protein, 297 aa, Unknown
  Obtained from environmental sample
  DOMAIN (98)...(282): Pyruvate ferredoxin/flavodoxin oxidoreductase
  misc_feature (1)..(297): Xaa is any amino acid
LGEPLYEDIRTAIGESLEESGSKFKAMPKVVGGRYGLGSAEFTPGMVKAVFDELGKDKPKNHFIIGINDDVTKASLDFDHKFTIETHEVHRALFYGLGSDGTISANKNSMKIISDTTPFYTQGYFVYDSKKAGTMTTSHLRFGPKPIRSPYLITSAQFVACHNFTFMEKYDMLKNLEEGGNFLLTSEYDKDAVWDHLPGWVQKQIIDKKVNFYVIDAVKIATEVGLGNRVNTIMQTAFFEIAKVIDEKVAIDHIKHAIEKTYKKERRRHSEHEHRLHRRGDKRHTESQLSVRAHQAR

SEQ ID NO: 84734 - protein, 147 aa, Unknown
  Obtained from environmental sample
  misc_feature (1)..(147): Xaa is any amino acid
MSNAANIQIQGDSLQDKIKTFVADFGWPRLIIFFFVVVLFIVAPFVGINIDSSFKDVLVRFGQNGIMVLALVPMMQSGSGLNFGLPVGIVAGLLGSTLAMQLQFTGPLGFCNGDFAQYAFRLVFAWLYGILPHKVKGEEMTIAMYVG

SEQ ID NO: 84735 - protein, 332 aa, Unknown
  Obtained from environmental sample
  DOMAIN (251)...(331): tRNA synthetases class I (E and Q), anti-codon binding domain
  misc_feature (1)..(332): Xaa is any amino acid
VAWLTWANELYASDYLEQLYDWAVLLIKKGLAYVDDQTQEEIRLTRGTVTKAGTNSPYRNRSIEENFDLFMRMKAGEFPDGSRVLRAKIDMAHPNMLLRDPIMYRILHADHHRTGDTWCIYPMYDYAHGECDSIEKITHSICTLEFDVHRPLYDWFIEKLEIFPSHQYEFARLNLTYTIMSKRKLLELVKNSYVSGWDDPRMPTICGIRRRGYTPESIHLFAEKVGVAKRDNVIDLSLLEWCIREDLNKRAQRRMAVLNPVKLVITNYPEGKTETIDAANNPEDESAGTRPVIFSRELYIERDDFMENPPKKFFRLALGQEVRLKYGVPRDN

SEQ ID NO: 84736 - protein, 253 aa, Unknown
  Obtained from environmental sample
  misc_feature (1)..(253): Xaa is any amino acid
MVDIAAHEYEAGADGAAPIHVGEKMLNLNTRKTFGIFKDPFTDDVASAGDVYLNDASRFAAEYLYQTARAGGMVALVGESGSGKTTIRRYAVDRMQAEGQKVRIISPRTIEKQRLTAAAICDAIIADCSTEKPRRTLEAKARQVEHILTNSSRSGFSHILMIEEAHDLSIQTLKYLKRFWELEDGFKKLLAIVLIGQIEMKAKLDESKNWEAREIIRRMEILELEPLDGKEIAGYLDIKFKRLNRNEDSPSTW

SEQ ID NO: 84737 - protein, 105 aa, Unknown
  Obtained from environmental sample
  misc_feature (1)..(105): Xaa is any amino acid
MDALGYYNGKWGPLDEMTVPMNDRGCYFGDGVYDAACAANGIIFAPDEHIDRFFNGAKLLEIKISLTKEELKKTLNEMLSKVDKGEYLVYWQVTREQARADLIIV

SEQ ID NO: 84738 - protein, 89 aa, Unknown
  Obtained from environmental sample
  DOMAIN (2)...(66): Peptidase C26
  misc_feature (1)..(89): Xaa is any amino acid
MSGSFLKAHCVNLPGKEHLETNSIHHQGIDRLAKGLEAMAVSDDGLVEAVYMPDRPFVWAVQWHPECAIKEEISKKISSSFVEGVEESL

SEQ ID NO: 84739 - protein, 128 aa, Unknown
  Obtained from environmental sample
  DOMAIN (1)...(95): ABC transporter
  misc_feature (1)..(128): Xaa is any amino acid
AFGGDIAVSGGDTLVGERGLTLSGGQKQRTAIARAVIMDSEFLVLDDSLSAVDNETELKILEALRRERKGRTTIIISHRVSSLKYADNVLVLDKGKILEYGSPVSLVTEGGFYARMAAFQKLESGAGV

SEQ ID NO: 84740 - protein, 190 aa, Unknown
  Obtained from environmental sample
  misc_feature (1)..(190): Xaa is any amino acid
MAERKPLADSQVNLSRKILSGFLDEPILSAFGSSTYVSVKREDVVSILSEAIEAIRAEGGIAGIHCCGNTEWSILIDAGVDIVNFDAFEYGDTIAIYADSVKKHLERGGVLAWGVVPTSEKIREQTVDSLEKQLEKVMDNLASKGIDKKLIIDQAMISPSCGTGSLSVSDAEKVFSLLSELTKRMKEKYA

SEQ ID NO: 84741 - protein, 220 aa, Unknown
  Obtained from environmental sample
  misc_feature (1)..(220): Xaa is any amino acid
MNKNSGLWLFLGPEIGEKQAAISQIRKNLSQRGELEETVYYAGETAVSVMVSAMRNGSLFADSQLFCVKCVEEIKKKEDLDLLSSCLQSQADNSFVILISEETGISRALEKIIAPANKRIFWELSDSKKAEWVETFFRREGFRIRKEGIETILELVENNTEALKRECSRLTVFLDKNREITGEEAEKWLSPYREESPFTLFSRIATGDLSRSLDPQDAFS

SEQ ID NO: 84742 - protein, 344 aa, Unknown
  Obtained from environmental sample
  DOMAIN (101)...(187): Fibronectin type III domain
  misc_feature (1)..(344): Xaa is any amino acid
TKVRFGRADNTNRFVADSGIVITNSRFEGNIENQARGYRAFMDAVAAAGGAGVMWWGADWFAPVTGLNSNVENSAVFDSTGKALPVLKVLGGIKGANAAKPGKVTNLKAAVSGTTVTLTWDTVNTAITNRYSVERAVSGSGTWAAINDNVAGNNTGTGTFSDTGLLDSTTYNYRVRANNSVGWGNYSDTASATTTGFAAETPTGLRVSAITADSVTLAWNTVTGAASYKVYGAQAASAPADSAYTELGNPTAASYSHTGLTSGNTWWYKVTSVYTSPTSTESARSTAVSATVGAAVDLKSTISMATAVLDSDFLDPKRRQAQRPAGRIPAAWQLRYERAVRGND

SEQ ID NO: 84743 - protein, 311 aa, Unknown
  Obtained from environmental sample
  DOMAIN (21)...(309): DNA polymerase family B, exonuclease domain
  misc_feature (1)..(311): Xaa is any amino acid
MGFIVHAYPDLKKDRLYFLGRLADGRSFAVVEEKWRPYFHIFESDRDRVLPLLSGLRFEESGDCLESFSGREKLLRLGFSSYSGRSSAASLLEDALVPSPDSGIKPAELFLIEKQIRGPVTVQGNAVPGKRVDVVIRDPQISAPQQAVTVPLRIASVDIETDVNTGVIRAVSTAWADGLCDEITDNGTNVVRGIVRVLANRSSPTPDTHSSSFVFHADEKSLLSAFIEDIRRVDPDVLTGWNFLDFDFPHLAERCKKLGVPFALGRSGDPAKYFPGDEPGGVWRRRSAAAIVPGRQVLDALRVVRAGILEQ

SEQ ID NO: 84744 - protein, 102 aa, Unknown
  Obtained from environmental sample
  DOMAIN (1)...(100): Seryl-tRNA synthetase N-terminal domain
  misc_feature (1)..(102): Xaa is any amino acid
MLDQKLLRENPEAARALLSKRNFDTALLDDFLTADQKWKTAQLELDNLRAQLKAASKTKPTPEIIAANKKLSEEIKQKEKTAAVLEEEQKARLLLIPNLPDE

SEQ ID NO: 84745 - protein, 276 aa, Unknown
  Obtained from environmental sample
  DOMAIN (1)...(235): Histidine biosynthesis protein
  misc_feature (1)..(276): Xaa is any amino acid
MVIASIDIQNGKVVQLRQGAELVLQRENSLELAAEFDRYGEVAVIDLDAAMGKGSNLEMIKPLLRKAECRVGGGVKTPQQARELVSLGARKIIVGSGAFRDPAKKGAGIAGGEFAVNIPFLEAMSKKIGRERLIVAVDARGGEIVVDGWKTPTGLDLIEAAKQVEPFAGELLFTCVEREGTMTGVDLAPARKLREAVNCQITVAGGVSTLGEIEEIAALNCDVQLGMALYTGKIILRTLSQYRLLEKNVKSPNPEPRNPNPGPQSPVPSPQSLFRV

SEQ ID NO: 84746 - protein, 317 aa, Unknown
  Obtained from environmental sample
  misc_feature (1)..(317): Xaa is any amino acid
MPLVEQNIFKTWAGLAVETVWSALGWEALPAAKEADDFRRRPTVRCDWDEATCTQVVWLYNEIKERFHHNADELFRLLGRPRVLKPGEGGGAELASLRLASIDMGAGTTDLSITTYALHNPGQSSPLIKPHLEFREGFNVAGDDIMHKIIQTQFIRKIAQAAAGRGLKDAESLVGDLFRVTPKIGVLSDERNRERRRSQFVTRVAVPLALEILKLYEGFDHRGDGLSEKLTVRGVLGDEAAGRLGGVLSYLEDPLNLALKEAGLSADFSLLDQALEIDFHEVDAEVQFVLEKVMTDLAEVVRLYDCDILILTGRPSR

SEQ ID NO: 84747 - protein, 65 aa, Unknown
  Obtained from environmental sample
  misc_feature (1)..(65): Xaa is any amino acid
ARGSVFAEKAGAKPELVHTLNGSGLAVGRTFAAILENYQNADGSVTIPEVLLPYMGGVTQLTPLK

SEQ ID NO: 84748 - protein, 309 aa, Unknown
  Obtained from environmental sample
  DOMAIN (110)...(302): Transposase DDE domain
  misc_feature (1)..(309): Xaa is any amino acid
VWKKSVEKNDKKLDDKLRAYIRMAGQVWKEENEEYGDRDLEEMGGKEKFTSADVKELAGILREKIERLEAEEDKKKLKNEIKTIEKDYLPRKKRYEKAKRICGKRNSYSKTDKDATFMRMKEDHMGNGQLKPAYNVQIGTENGFVVGYDIFQNPADTRTLKPHLKRQAKRLGIKPEAVITDAGYGSEENYVYLENQGITAVVKYGTYYKEKSKKWKEDDSKSENWEYNQKEKYYICPNGKKLKFKESKETKNKSGYAMTIHRYECESCTYCRLQKQCKKGAGNRGIERNERWLRLKRTAKRVLEDERYI

SEQ ID NO: 84749 - protein, 265 aa, Unknown
  Obtained from environmental sample
  DOMAIN (14)...(137): YbaK / prolyl-tRNA synthetases associated domain
  misc_feature (1)..(265): Xaa is any amino acid
MSSKQFIKTLIYRAINVEMDLSSAPGCKDLERKNLAPDGAKGGVEIYPQAFFAVAIRGDLDVNETKLAAMVKAGEVALAADTDVVRLTNAPVGFAGPVGLSTLPVIADHTVTAMNDAVTGALAKDLHYKHVAYGRDFQPWMTGDLRTVKAGDLCPLCGGELYEKKGNELGHIFKLGYKYTRSMNVHYLDENGKSQTPTMGSYGIGVDRALASVIEEHHDEAGIIWPVSVAPFHVIIVPIKYDGKVRPPQTALPPSLRKRGVMSCW

SEQ ID NO: 84750 - protein, 71 aa, Unknown
  Obtained from environmental sample
  misc_feature (1)..(71): Xaa is any amino acid
MAKTRGETAGSKTRGETAAAKKEMKNFEERLERLEILGEKIRKTDIPLDEAIKAFEEGINWQRPLELDLEK

SEQ ID NO: 84751 - protein, 307 aa, Unknown
  Obtained from environmental sample
  misc_feature (1)..(307): Xaa is any amino acid
ARFSNSYGIVPQGYSEANRPYDYLREDLHSVFESFWTGMNRNYIFWDIDPTDWDAVYTTYKPKFAELDIRKEEDVVKGYNYFREITKDLIDGHYHLTINNSYATILQRAGYDGYISPLRARKLAQSDYQDHSSLYNYIFYQLPTIYLKNSFQSITTIEGRNLSTVLGKVNTTEKNICYFYFNRFRFTGYFYSGGENYLDYTPIRDILEELANTLSDPSLDGVIIDLRGNGGGYVNDLNILWGSLLMGNEFMGGYNRMKIGEGRLDYGPRVPFKIRSANYFYQKNIPINPHPVTAPIVFGLGRSDTWE

SEQ ID NO: 84752 - protein, 91 aa, Unknown
  Obtained from environmental sample
  DOMAIN (6)...(91): Carbamoyl-phosphate synthase L chain, N-terminal domain
  misc_feature (1)..(91): Xaa is any amino acid
MPLDKNIKKIMVIGSGPIVIGQAAEFDYAGTQACRVLREDGIEIVLVNSNPATIMTDKNIADRIYIEPLTLTTVKRIMKRTPHSADLSWPT

SEQ ID NO: 84753 - protein, 106 aa, Unknown
  Obtained from environmental sample
  misc_feature (1)..(106): Xaa is any amino acid
MEAFMHGIMENDFMFSGRGEVPWHGIGAVLDGVLSSDEAIKEARLGWTVEQSEVYSSTNWATPIPGFVANVRSDTNEVLGIVSERYKIAQNKDVFAFADELIGNRR

SEQ ID NO: 84754 - protein, 256 aa, Unknown
  Obtained from environmental sample
  DOMAIN (1)...(210): PEP-utilising enzyme, TIM barrel domain
  misc_feature (1)..(256): Xaa is any amino acid
MLGHRGCRLAVTYPEIYDMQVEAIALAAVECVKQKIPVHPEIMIPIVVTARELKLLRPNAEKILEKIFTAAGVKVPYTIGTMIEVPRAAIRSGHIAKYADFFSFGTNDLTQMTFAFSRDDIASFLPTYLEKNVLDVDPFKTIDQDGVGSLIQFAIKEGRSVKPDLKVGICGEHGGDPATIDFCYRAGLSYVSCSPFRVPLARLAGAQAVINNSGNNIMGGGSEKTKPATAGVKGSKKPVREGTKMAVTSARPNLTH

SEQ ID NO: 84755 - protein, 315 aa, Unknown
  Obtained from environmental sample
  DOMAIN (3)...(315): Pyruvate phosphate dikinase, PEP/pyruvate binding domain
  misc_feature (1)..(315): Xaa is any amino acid
VDREGERDESILGGKGANLAEMTNLGIPVPPGFTISIDVCAAYYENKNKYPKGIKEEVEASLKKLETMMNKKLGDPNDPLLVSVRSGAAMSMPGMMDTILNLGISDKSVKGLAAKTGNPRFAWDAYRRFIQMYGDVVMGVEHALFEEVLHSIKKAKKVELDTDLTASDLEKLVEEYKKVVKNNSGKDFPQAPLDQLWGAINAVFGSWMSKRAVTYRKLENITTLKGTAVNVQSMVFGNFGDDSGTGVCFSRDPSTGINEFYGEYLMNAQGEDVVAGIRTPERIATLAKKNPTIYKQLVVIKNRAEKHFTDMQDME

SEQ ID NO: 84756 - protein, 329 aa, Unknown
  Obtained from environmental sample
  DOMAIN (5)...(258): Indole-3-glycerol phosphate synthase
  misc_feature (1)..(329): Xaa is any amino acid
DYREVLEDFSCSKIQIFKALDTEIKKQKGPSNAKRLHKEHKSLKEALTQSRITIIAEISGGNPQHGKVRQAFRPSTHAKSLLDNGAKILSIATDPFLYASSDKHLPEVRAVVDCPLIRRDFIFEEYQIEESKILGADAIYLSAAMLEPDRLATLSSLAASKNLDVVVEVTSEEDIETALEVEAQIICVVGRDIESWEASWGKTILLLKSIPKKCLKIAEAGITSLKQLTELESMGVHGAIIGDVLLNEFYPGKRLGQLLAGQEPAKKAVKKEPPSDEPPKRKQSKLTSTKPSTSSPSKHPSKGEKETLMNQIKADTPATAKELAEKKSA

SEQ ID NO: 84757 - protein, 328 aa, Unknown
  Obtained from environmental sample
  DOMAIN (3)...(87): Enolase, N-terminal domain
  misc_feature (1)..(328): Xaa is any amino acid
GPEKRDGDKNRYLAKGVLGPVKAINEDINNALQGMDPFQQVEIDELMINLDGTENKSKLGANAILGASMATAVAAAKACNQPLYRYLGGAGAHILPVPMMNILNGGQHADFCIDIQEFMVLPVGAPSFRECLRWGAEIYHSLKSVLKSKKLSTGVGDEGGFAPTLQSNEEALNLIAEAAKKAGYEPGKDVFLGLDCASSEFYENGKYNIDKGTKSGPELIDYYVGLTQRHPLLSIEDGCDESDWPNWSVLTEKLNKTTQLVGDDLFVTNTKILAKGISEGVANAILIKLNQIGTVTETLRAVDMAHKAGTRRSSATAAAKRKTRPICT

SEQ ID NO: 84758 - protein, 310 aa, Unknown
  Obtained from environmental sample
  DOMAIN (143)...(310): Radical SAM superfamily
  misc_feature (1)..(310): Xaa is any amino acid
MRYFFDPFGCVKNQVDVENMMAHLNKEGWESVSEAENADLIIINSCGFIESAKRESINAVFEWRKLYPGKKILLAGCLAQRYAKELSKTMPEADGFFGVDNLAQITKIAANLVNGANCAILSHNTVPSAGERPLLSLPGSAYVKISEGCNNRCSYCAIPLIRGGLVSRTIPDILEECNTLLDRGIRELCIIGQDIGAFGTDAVKDSAAKLPELLEAISLLKEKGHFWVRLLYIHPDHFPLKILDLMEKDTRFLPYFDIPFQHSSSKILTAMNRHGNAETYLALLEKIRARLPNAVIRSTFLLGFPGEQKR

SEQ ID NO: 84759 - protein, 239 aa, Unknown
  Obtained from environmental sample
  DOMAIN (33)...(231): ABC transporter
  misc_feature (1)..(239): Xaa is any amino acid
MALLEVRNLTINIRRGKKYYTAVDGIDFRIEAGEIIALAGESGSGKSLTALSIVRLLSTRAKIAGGEILYSANGTVDLCKINEKSLRQIRGKEISMIFQEPRQSLNPLMKIGAQITEALKLHSVVNSYNQAALEMLEKLQFPQPEKIMDAWPHQLSGGMCQRVMIAIAAICRPLLLIADEPTTALDTVNQEHILKLLKQINREIGTAILFISHDISAARHFCSRFMVMYSGRIMREDPP

SEQ ID NO: 84760 - protein, 61 aa, Unknown
  Obtained from environmental sample
  misc_feature (1)..(61): Xaa is any amino acid
ASYHLPKSGTGVDTEIILNPEYITVRGRAKILKELISEAKKSQMVLLASDPDREGEAIAWH

SEQ ID NO: 84761 - protein, 234 aa, Unknown
  Obtained from environmental sample
  DOMAIN (1)...(175): ATP synthase alpha/beta family, nucleotide-binding domain
  misc_feature (1)..(234): Xaa is any amino acid
IANAIQKTHPEVYLIVLLIDERPEEVTDMERTVRAEVVSSTFDEQATRHVQVTEMVLEKAKRLVEHKRDVVILLDSITRLARAYNQTVPTSGKILSGGVDSNALHKPKRFFGAARNIEEGGSLTIISTALVETGSRMDEVIFEEFKGTGNMEINLDRRISDRRLFPAINIKKSGTRKEELLLSEEEMQKIWILRKVINSMDDIEIIELLVDKMKKSKNNEAFLKSMNTGTGGMD

SEQ ID NO: 84762 - protein, 179 aa, Unknown
  Obtained from environmental sample
  misc_feature (1)..(179): Xaa is any amino acid
AAAPDFLKKRGGLMLGICNDFQAFIKTGLVLIGRFIPSAEMETAPTLTFNAIGRHVSRMVRTRVMPNISPWLSLEETGSIHIIPVSHGEGRVAIQSEEAGSLFATGQVPFCYVNADGKATMAEPANPNGSAFAIEGLTSPDGRILGKMAHSERCGEFVHINIPGNKRQRIFEAGVRYFR

SEQ ID NO: 84763 - protein, 574 aa, Unknown
  Obtained from environmental sample
  DOMAIN (203)...(387): Radical SAM superfamily
  misc_feature (1)..(574): Xaa is any amino acid
GVPNDEIKKQRGRYIDAMIDSHKHSAQARVRVFGDPDFVAAMVRLCCENGALPVLAATGSISPKLQEMLANEAEDCKKFHFAEEIRVLDDSDFSAIEKGCVELGANLLIGSSDGRRISRKLNIPLIRCAFPIHDYIGGQRTRILGFDGSLNILDQAANAMMEKTESSFREELHKKFYKPQTADKTATHPCFGEQACQNARVHLPVAPKCNIQCNYCLRNYDCMNESRPGVTSKILSPAEALERYIKLKANMPSLTVVGIAGPGDALANFDKSAETFRLIREYDPNVTFCIATNGLLLPQYAQELKKLDVSHVTVTMNAVDPSIGAKIYKYVQYMGKTYTGVEGAAILLANQLAGIKMLSEAGIMCKVNCVTLKGINDHHIYEVTQTAANLGAFMTNIMPHLPVKGSAFEGLERTTNREIMLLREQCGANIKQMTHCRQCRSDAAGTLDRDVSIEFRENTPEIPQPEKFRRFAVATQTGAVVDMHFGQADEFYIYESDEKNARFVETRKVIKYCNGPQCENKEERWNSVIHAISDCEAVLAVRIGPTPEKRLKENGIGAITTYERVKQPLQAKLA

SEQ ID NO: 84764 - protein, 107 aa, Unknown
  Obtained from environmental sample
  misc_feature (1)..(107): Xaa is any amino acid
MDGVPPNDFRERAVGWGKRNTAAIMKEAASRGGGFGWPAQACDTYTLNGFNDWFLPSLDELNWVYGNLHKKGLGDFRNDWYVSSTDNPVMLINLEQGNRILAARDKP

SEQ ID NO: 84765 - protein, 244 aa, Unknown
  Obtained from environmental sample
  DOMAIN (5)...(244): Serine hydroxymethyltransferase
  misc_feature (1)..(244): Xaa is any amino acid
MIKELERSDPQVAAIIRNELGRQRLGLELIASENFVSPAVLAAAGSVLTNKYAEGYPGARYYGGCEFADQAEDLAASRARRLFGAEHANVQPHCGSAANMAAYLAVMKPGDTILAMSLAHGGHLTHGAPVNFSGRLFNVLPYGVRADDELVDYDEVLALAARHKPAVIVAGASAYPRSLDFGKFKGAAEAAGAVLMVDMAHIARLVAAGLHPSPVEAPDSSPTPPIKPCGGPRTGRFFPRAPWA

SEQ ID NO: 84766 - protein, 115 aa, Unknown
  Obtained from environmental sample
  misc_feature (1)..(115): Xaa is any amino acid
MRNNYEYVDPDYHYTDPKTKVLRNLAGVTDPDDLLFFESAAVTDRLKELESQPIVIRNAETLLDIHSYLFQDVYEWAGKKRTVEISKGGRQFFPISHFDTPSSRKKCNKLKQVGG

SEQ ID NO: 84767 - protein, 335 aa, Unknown
  Obtained from environmental sample
  misc_feature (1)..(335): Xaa is any amino acid
DYGEGSVKIICRTAEDRPIPRLKKNQILAGLLVFTVVFLLLFNLVLGKKGKQKQNGLSGRGGQIVYNAEFSLGDMPERAPVTRDVDDLLAQDIQAIEASSRFRSPPAYENFETKTIQQEQGAGTQYRGASAGGGGNQQSGYSESDTQALSASIRKDGGYGQSPAAAVEPAAPVAVPQAAIQSLPIATIGKEDYTRQQLDEYSRLIQMANSQGAYASGANTPSANVQQTQNMNNGRYSEAGGYNPVNNEAGNFRFLDDNVIVPGTIIHAILVSKIDTDYPGPIHARVTENVYDSKTGKNLLIPQGTILQGIYSSSSVGVAKVQIAWESMVVHFDGV

SEQ ID NO: 84768 - protein, 108 aa, Unknown
  Obtained from environmental sample
  DOMAIN (67)...(90): 4Fe-4S binding domain
  misc_feature (1)..(108): Xaa is any amino acid
DASEEERDYSGIVSEFQGSMKGSCVYCNHCLPCPSKINIASVNKYLDIALLNEKNIPPSIMSHYRALEHHGSDCIVCGSCEERCPFSVPVVQNMKKAAALFENSILPE

SEQ ID NO: 84769 - protein, 299 aa, Unknown
  Obtained from environmental sample
  misc_feature (1)..(299): Xaa is any amino acid
MSESGSDLETAAWCVKNLFTNCYVSGYHLEKPDLSTIPPGCNPKDIFVLLQAVLNRLPQKEITFKESVFSWCELKLTAAEVLAKMLLCIAIPKNRDNELLDKFLEFTNKMGVNTREGLVKHFLSNPANDQQKTALLEALGDRSSGVRQCAREVIKKTNLTAADFLLIEGLLQYKYDDLRKNCLVLLLKQDTDAILPSVERLFASDSENKRLGAIELVASMKGKQDFAAIYQKCENLLTTPTKLTQAEKIRISEITNHDAPVYTLENGLGLYDPNIVYSPQIPRIFRSQTRLNSQPGPER

SEQ ID NO: 84770 - protein, 339 aa, Unknown
  Obtained from environmental sample
  DOMAIN (1)...(330): tRNA synthetases class I (I, L, M and V)
  misc_feature (1)..(339): Xaa is any amino acid
MDDGLSRAVREVFVSLYERGLLYKGNYLVNWCTTCGTALSDDEVEHEDAPGKMYHIRYPFVDSSGFVEIATTRPETLLGDTAVAVNPEDERYAGLIGKKLRLPLADREIPLIADSYVDRAFGTGALKITPAHDPNDWEVGRRHGLAAINVLGPDGRLNDSVPEKYRGLSVKESREKVLEDLKAGGFFAGEENITHALGHCYRCHTVIEPNLSEQWFVRMKPLADKALAAWRRGEIIFYPKKWENTYEHWLENIRDWCVSRQLWWGHRIPAWYCGDCGKTSVSRTDIAACPTAAPIILSRIPTCWTHGFPAGSGPSPLWAGKTTNAIPKISVAIIQPRPL

SEQ ID NO: 84771 - protein, 88 aa, Unknown
  Obtained from environmental sample
  misc_feature (1)..(88): Xaa is any amino acid
MAALFCLLAQLPKAPEVILLINAGVKLAAQGSEALDNLKTIAEHGADIRSCGQCLNYYGLTEKLAVGKITNMMEIVEFLTSSRRTVTI

SEQ ID NO: 84772 - protein, 199 aa, Unknown
  Obtained from environmental sample
  DOMAIN (4)...(121): Response regulator receiver domain
  misc_feature (1)..(199): Xaa is any amino acid
MAGASVLVVDDVEVNLEVAKLYLKPYDLCVDLADSGQRAIDFIKGRNEYDLIFMDHLMPIMDGVEAVKIIRDMDSEYAKNVPIVALTANTEPGNEKIFLENGFSDFISKPIDINKLDACLKKWIKKDRKKAEMNEGSHINFKDGIAQFGTEAKFKKVLSSFKKHVPALFKELEENNGTIYNFYPCSERGVQNIYLTEIG

SEQ ID NO: 84773 - protein, 56 aa, Unknown
  Obtained from environmental sample
  misc_feature (1)..(56): Xaa is any amino acid
GLKELKPNVDCLTLPQPPIPRTLHMSLVKIRDMSLWATAPEGRHPIETFVEEYDNT

SEQ ID NO: 84774 - protein, 89 aa, Unknown
  Obtained from environmental sample
  misc_feature (1)..(89): Xaa is any amino acid
MIKLSAIFIAFFRVGAFTLGGGYAMFSVLRYELIAKRGWVSEEEFTQELAMATSLPGAMVINFSLFCGAKLRGRLGALRRLLGQSDHCQ

SEQ ID NO: 84775 - protein, 348 aa, Unknown
  Obtained from environmental sample
  DOMAIN (136)...(306): Radical SAM superfamily
  misc_feature (1)..(348): Xaa is any amino acid
MYRLAESRGPGSHTCTVTSMAEQKARRVIRKVLREQGKSCLIVTGCYAQMDKAAIKELDESQSGRLFIVPGEAKDRLLDLGPFLSGAAAGENPDLLRGLIASWLNSYEDSNKTDKTIDGAFRFIPEKFFSHSRAFLKIQDGCDRSCAYCRVSLARGKSRSLEAGEVLKQLQALEQREIAEAVLTGVNICQYRDQGMGLPELLEFLLEGTGVIRLRLSSIEPEPALFTDAYLNVLENKRIRPHFHLSLQSGSTTILAKMGRQYSPDDIEKIVGLLRRLRRDPFLACDIIAAFPGETEREFEKTYVLMEKLSFAWIHAFPYSSGPGNAAFDFSANVTAQEALKRVELLQI

SEQ ID NO: 84776 - protein, 484 aa, Unknown
  Obtained from environmental sample
  DOMAIN (220)...(440): Methyl-accepting chemotaxis protein (MCP) signaling domain
  misc_feature (1)..(484): Xaa is any amino acid
LSRESAFWNEVSHFADVIINGKAATSVRYSPGAKKDILYIFEPVIMSGFETTPWSLSLGIPVEDINRPINTMIRFVIVFVFILLALAVVITLLVANGIVKPILGVTATLKDISEGEGDLTRTVAITSKDEVGDLAAYFNKTLGKIKDLVLIIKKQAHMLSDIGNDLSSNMTETAAAINQITANIQSIKNRVINQSASVTETNATMEQVIANINKLNDHVENQSRNVSQASSAIEEMVANISSVTSTLVNNAVNVNSLKEASEVGRAGLQEVATNIQEISRESEGLLEINAVMENIASQTNLLSMNAAIEAAHAGEAGKGFAVVADEIRKLAESSGEQSKTISTVLKKIAESINKITSSTDNVLARFELIDSGVKTVSQQEENIRNAMEEQGQGSKQVLQSASSLSGLTQQVKSGSEEMLNGSQEVMHESQNLEEVTQEITGGMNEMASGADHVNVAVHNVNELTNRTREGINSLLKEVSRFRVE

SEQ ID NO: 84777 - protein, 130 aa, Unknown
  Obtained from environmental sample
  DOMAIN (23)...(129): Phosphorylase family
  misc_feature (1)..(130): Xaa is any amino acid
MIKDADKMDKLYHIDFDDSHGALYAILPGDPGRVEKIASHLDNARFFHQNREYTTWLGELSGRTVMVISTGMGGPSTAIAVEELFQTGVRNFIRIGTCGGMALPVIGGDIVIATGAIRMKETTKSMFRLN

SEQ ID NO: 84778 - protein, 45 aa, Unknown
  Obtained from environmental sample
  misc_feature (1)..(45): Xaa is any amino acid
ITARTQDGEIMAVCHKEYPVYGLQFHPESILTSNGKTIIENFLRG

SEQ ID NO: 84779 - protein, 576 aa, Unknown
  Obtained from environmental sample
  DOMAIN (1)...(373): Ribonucleotide reductase, barrel domain
  misc_feature (1)..(576): Xaa is any amino acid
MNLCGGDERRGMNLTSRTAGNVMKTIKARKLWTDMRRSSWQCADPGLQYHTTINDWHTCPAGGEIRASNPCSEYMFLDDTACNLASINLGALYDKQSKTFSVEGYLHAIGIWTTVLEISVVMAQFPSPKIAELSYQYRTLGLGYANLGTLLMLMGLAYDSAEGRAVAGSLSALLSGEAYSQSARMAAELGPFLRYKENFANMLRVIRNHRRAAYNSPDAEYEGLHTIPCGIDQTNCPAYLLDAAKQSWDRALELGKAHGYRNAQVSAIAPTGTIGLLMDCDTTGVEPDYALVKFKKLAGGGYFKIINQSVPPALEALGYSPQLIEEIIAYATGYKTLNGAPYINPDTLKAKGFTPEAIAAAEDAVKTALNLEGVFTSWTLGRDFVEKILHIPESTWSLPGFSLLKHIGFSAEDIADAELYACGTMGLENAPGLKKEHYAVFDTATPSGKNGKRSIPWTAHIGMMAAVQPFISGAISKTINMPNSANYEDVKGAYMLSWKHGLKAVALYRDGSKLSQPLSSFAPGTDPLADTILKVERGLDMPPPQIVDRRAPARGLRRLLPSRRMGTLGQSDPCPK

SEQ ID NO: 84780 - protein, 340 aa, Unknown
  Obtained from environmental sample
  DOMAIN (1)...(252): Glycosyl hydrolases family 2, TIM barrel domain
  misc_feature (1)..(340): Xaa is any amino acid
MPELYDLCDEMGFLVMDEAFDEWEGCKNKWWQGHNVYPPKRQGYAEDFPQWHEEDLAAMVLRDRNHPSVIMWSVGNEIDYPNDPYVHPIFQQMTGNNDANKPAAEMQYNKNKPNMERLATIAANLVRIVKKHDTTRPVTLAAAFPELSSRLGFLEPLDVAGYNYKEQFYEEDHKRFPKLPILGSENSHSVAAWKAARDNEYIGGQFLWTGIDYLGEARGWPVRCSGAGLLDTAGNEKTAFFRRQALWLEKPVLYLVSRPKPTAKCPNSGKFNPGIFSAAGIIFPAKSVKLRVTPTLNGRKLFLHAQSLGAGTRDADSACIVWTIPFERGELSVRGIGADA

SEQ ID NO: 84781 - protein, 135 aa, Unknown
  Obtained from environmental sample
  DOMAIN (6)...(129): GGDEF domain
  misc_feature (1)..(135): Xaa is any amino acid
DDGREIEFISLALHDTYGHVERDKCLKAVAQTLSQCITRADDFIARYGGQEFIVVLPNTNEYGARLIAEKLLDNIRDLKLPHEQSDVANYVTISIGGTTGKVKHTHNAGDFIKKADELMYKSKQEGRNRFSFGRL

SEQ ID NO: 84782 - protein, 381 aa, Unknown
  Obtained from environmental sample
  misc_feature (1)..(381): Xaa is any amino acid
MASLFDYISWRGDLEFDKLPFNPVDNIVFSQLSYLPMEGIVPGPKDHDTITVEELAARYAIKQRDNPSEIPNDITVNDATSVINAIGSAPRYKNCRLFAYTNNIDLEQEKQFAAYCAIIGRKRLSRKMLVVYRGTDMTLVGWKESFNMSLITSIPSQKEAVSYLEKTAKRYRYPLIIAGHSKGGNLAVYASAFCSKRVRKRVSAVYSNDAPGFHKQVIESEGYKAICPRIRSFIPQSSLIGMLFEHGETPMVVKSAANGPMQHDLCSWEVTYNNMADAGELTPQSRLVNNIISEWINQIDEGQRQQFIQAIYKILVSCDADSVTDLTDDWKNTAGGIINALINMDKPHKKLLGKIIGDLFKTAKDNFGKAYNAKHSKTARC

SEQ ID NO: 84783 - protein, 322 aa, Unknown
  Obtained from environmental sample
  DOMAIN (88)...(218): ATPase family associated with various cellular activities (AAA)
  misc_feature (1)..(322): Xaa is any amino acid
MLNMTQARLQSCRAELGRCGLLDTRRSSDRLRLEDCLLPFWEASVNTEELFSRPLSGAALPLEAFHVAPEDAAHVKTLLERAGKAPVHILLYGAPGTGKSAFAHSLAQACGVKAWAVISREDDGDKNRRASLTACLHVAAGHAGAFVLVDEAERLLDTGRHSGFFGFFGPGGATKDKAWLNDFLERPGQRIIWITNHVEHIDPAVRRRFSFSIHFEKLGIRERTDIWRQVAAKHRVAQRLGDEQIKALARTYPVEAAVINRAVAQAKSLYKGKAEFFSALETLLNAQICLQRDGKNKAAHPGRLRLQPGPRVHGKFRRRIGG

SEQ ID NO: 84784 - protein, 332 aa, Unknown
  Obtained from environmental sample
  misc_feature (1)..(332): Xaa is any amino acid
DYGEPRVAGIIAFVAIIGFSMAACDTGDNDGGGGGTDGTGGTGDGGGGGAHTHQWGEWTPTTAPTCTTAGEEKRVCAFDATHIETRTVAALGHSYGNWTQTTAPTYTSEGEETRTCTTDSSHKETRKSDPLPITTAAEWDTATTAIKNGGNDKTYNINVTGEFSIDGYDTFTNGTGPTFGNVTGITVNIRGAGTITLAASYTNRSLLRIIANQTVSLKDTHLVGHSSNNYELVNVRGTFNMTGGTISGNGGISSEGVYSATSGGGVLVEGTFTMSGGNISGNTAFNGGGVCVSTGTFNMTGENISGNTSNSGGGVRLRRVPCTFNMSGGTIS

SEQ ID NO: 84785 - protein, 98 aa, Unknown
  Obtained from environmental sample
  misc_feature (1)..(98): Xaa is any amino acid
MNAEIYEKARMIDKLKTFLERHNQFILTTHDPADADGLGAQLVFACILRELGKKFRVINSSPIPEQFKFMDRQGIIETMDTEKHNALPEKSAVNARDN

SEQ ID NO: 84786 - protein, 319 aa, Unknown
  Obtained from environmental sample
  misc_feature (1)..(319): Xaa is any amino acid
VKFALPDSLYNLPLYGGASGMSDFGIAEKDLRVSAPLTAVAALPRKLRWRDTGTVSLILTNLETTAVEAKVSAATEAIDGGIWDTVLEIDGIREKTVKINPGSTAEVSFKAAALGAGESRIIFTLMSPSVNERIIKTLRVDRPVLYETVTTIGSLASDNPFIEEGVIIPSLVPEGTGSLSVSLSSSRLALLKEAVGYLLDYPYGCLEQKTARLLPLVAFADRLETFELDSPVKNPKKVIEDELALLAKSQLSDGSFPYWPGGTFGNRYVTLRVAHIVHLARQKGYAVPDAFNTQTLTKYMSENDFSSILFRDSCRSDHC

SEQ ID NO: 84787 - protein, 136 aa, Unknown
  Obtained from environmental sample
  misc_feature (1)..(136): Xaa is any amino acid
RTGTRINDLIKDGTGKSLYDPQNPPEPTLAQTHGEKEEIRVLLARMEERIKNISDSMYPVERQITEERLSMLENEFSSFENCIDPYNLQHGLLVDIDITSIKRKRTTLDSMSAVIGHFLDNISNCFNSLHTGLKFV

SEQ ID NO: 84788 - protein, 253 aa, Unknown
  Obtained from environmental sample
  misc_feature (1)..(253): Xaa is any amino acid
MNKRKIAKKSRVSKPSKISKVKKAVKASNVKKVTKIAKPKKAAKTTNAQNVTKVAKAKKVSKAPKVKAVVKTANVKTPSKAPKVAEPLNAAKRTSLKSEIKSICDIMRRSNCAGAMQYVPELTWLLFLRILDVRESHDAETAEALGNTFVPSLAAPYRWSDWANKNGAKRKKLVDGKLGAYFEFVNTVLIPHLKNLKDRPEASPRQKVISEILSGVERVRVDTEKNLLDILDKIDDISADGSAARPICHGPQK

SEQ ID NO: 84789 - protein, 171 aa, Unknown
  Obtained from environmental sample
  misc_feature (1)..(171): Xaa is any amino acid
KSTKPSSTTTYDTAWHDAAHKIDIVIRTYGNVAAKPINEETSAVYNLVQELKSENYRTAVTLIGLMPWVNKLGTLNTDFESLIQERDRENEAKSHISMKTARRNIDDTYKNIVKTINSLIYLNQLTEYETFVDTYNIVVKRFNTLLKQQQSISRHHGKGGGTGGTDDGNEE

SEQ ID NO: 84790 - protein, 289 aa, Unknown
  Obtained from environmental sample
  misc_feature (1)..(289): Xaa is any amino acid
FIAEWLPLFSLLLFACIQEEEEEPVIYKKFWACNISENMYYQIDAQMLAENDLCRVWAEKDSGVTEETAQKVADGYKKDIYYKMMETFGYKINMTDEKGNSVAIIDNVQFINWLVTGNLSGGKLTILLMDIKDNYQQGANESFVAGYFWAGNLFKNRLLEDEVSNECDMIYIDINPGIPGSKESNETLAHEMQHLMNFAGTVLRDKTTDLWIDEGLSVTAEWVHSNEHSAQRLYCYDTDISGLLGKGNNFFVWGNREEETRMRYWMITRPFTFFSSGSRCSQARIFIGE

SEQ ID NO: 84791 - protein, 211 aa, Unknown
  Obtained from environmental sample
  DOMAIN (1)...(202): FHIPEP family
  misc_feature (1)..(211): Xaa is any amino acid
VIATHLTETIKNHAHEILTRQNVKSLVDNLKEQGGAVIDELIPTMMSIGDVHRVLQNLLRERISIRDLLLILETLAGVAPRSKNTDVQTEYVRNVLAPQICETYKNDDGVIPVITLDPNLEAKLEGSIQESEGIFRFSLSPADANRILEAAGVQIEGAKQAGEYPILICSPTVRPQLKRLTEANFPELVVLSYNEIVPGIEIRSLGMITLE

SEQ ID NO: 84792 - protein, 175 aa, Unknown
  Obtained from environmental sample
  misc_feature (1)..(175): Xaa is any amino acid
MPTRIKKFIAKSMKEALVQIKAELGDEAMILSTNKVSKGLFGGSDEIEVLASVDDEAPGKRPPEFGPIRLGDAVAKPGGLGLYGPPRQTSTLATDSSPSMPPDEAPGSLTLPPKVRPWVPPQLPARPAAESAFAPPPGQSAQPRAAPSNGSRQALARRDRRAQGDITHLKTRQNV

SEQ ID NO: 84793 - protein, 376 aa, Unknown
  Obtained from environmental sample
  misc_feature (1)..(376): Xaa is any amino acid
MGAAGGVLADQWLEFFVCESLEADVLAAKGQRRISKRSSNTKGEDNVISNGSGVVVNKGQAVLIIDNGRIAELCAEEGRYTYEQSSEPTLFYGSLGKGIIDALKNMGERFKYGGSPGKDQRIYYFNTKEIMGNKYGTPAPIPYLIVDPTMNLRLTISLRANGEYSYRMTNPALFYANVCGNVEENYTRDKIDSQLKSEIVTVLGPTLAKLGAGLEYHMIPAQTDKLAVLLNEALTAKWREGRGIEIVNFGIACAATEEDEARIKQLQTAAVMRDPTMAAASLVNAQSDAMRTAAGNTAGAMTGFMGMGMANMAGGMNSQGLFAMGQAQQAPGAPRVAAAPVANGSTWTCACGQSGIPGKSAPSAANLGPLPPGSAP

SEQ ID NO: 84794 - protein, 600 aa, Unknown
  Obtained from environmental sample
  DOMAIN (5)...(69): GIY-YIG catalytic domain
  misc_feature (1)..(600): Xaa is any amino acid
GYRESFGRQILRDRLGSYFSTKDLKTAALLRRARSIETIIVANEYEALLLENTLIKQHTPKYNINLKDGKSYPVIRITADEFPKVFRTRRIIEDKSLYYGPFPDLQKVNAMMDIIDKLFPLRKCRTFKTRTGPCMYYHIQRCKAPCCGKIDAAEYRRHVEPVQRLLSGETSPLIIDLTEKMHEASRELRFERAAMIRDAILAIEGIAGENSSVVDLDPEGRDYIAWASEGLLASFTIFSMRGGKMTGRELYRACSAADEKDTLEVFLTSYYNGGRPPPPKIYLQQRFDDSLLIGWFKSNFNFEPELLSPAEKRHEAVIAMARQNALEDLRKRLKERGAGPALDDLARVLNLPSRPQRIEGFDIAQLDGKHPVASLVSFKNGAPDKKNYRYFKLRSVIGVVDDFAAMREAVHRRYSRLIREDADLPDLVLIDGGIGQVNAAKGVMDDLGIDIPVVGLAKREEELWLPHAKEPLVLSRRSEALKVLQFVRDETHRFATGLNQRLRSKDLFFPTLESVEGIGNRRAATIMKTFGSVENIAEADPAGIAELCRISLRSAKAVRAAARLALEDRKARPAAARFGIAAGRRTAGRRQKRTRRGRAL

SEQ ID NO: 84795 - protein, 121 aa, Unknown
  Obtained from environmental sample
  DOMAIN (12)...(121): Endoribonuclease L-PSP
  misc_feature (1)..(121): Xaa is any amino acid
GYRGDKRLRGHRALFPGHCFGKPSFSSGQIPLSAQDGQVSGSSIAEQTEQVIKNLAAVLEAAGSSFAKTVKTTCFLADMNDFAAFNEVYAKYFTGKPARSTVAVKQLPRNVLVEIEAVAEI

SEQ ID NO: 84796 - protein, 399 aa, Unknown
  Obtained from environmental sample
  DOMAIN (86)...(323): Reverse transcriptase (RNA-dependent DNA polymerase)
  misc_feature (1)..(399): Xaa is any amino acid
MQDTQRFWDTMHTKQQRIAQAAEKHSGESLSSVAHHIDAEWMHCAYEWTRRDGAAGIDGVTAAEYEAGLWEKLERLVGLLKSGDYRAPPVKRVYIPKAGSKTEKRPIGIPTYEDKILQRAIVMILEPILEKEFYDFSYGFRPRKSAHQALERIWKESMGMNGGYVIDMDISKYFDTIDHKLLRGMLSRRVSDGVITRIIGKWLNAGVMDGGMREYPGKGTPQGGVISPLLSNLFLHEVLDDWFVKVVKPRMRGKASMVRYADDAVIVCELKEDAERIYKVLGLRFEKYGLKIHPEKTKLLAFTKPQGEQRKGNSSFTFLGFCHYWTKSRKRKWIVGRKTDNKRLHRAIKAISAWCRTNRHQPIRKQWETLKTKITGHYAYYGISLNFLCIAEFTSLGRS

SEQ ID NO: 84797 - protein, 325 aa, Unknown
  Obtained from environmental sample
  DOMAIN (1)...(323): tRNA synthetases class I (I, L, M and V)
  misc_feature (1)..(325): Xaa is any amino acid
NDQIGRAALADDEVDHEDTPGKMYHLRYYFADAKGDAARNAIMNGEGAPDGAAPVGAYIELATTRPETLLGDTAVAVHPEDERYAGLKGKGGIAATVRLPLAGRDIPIVFDAYVDRAFGTGVVKITPAHDPNDWDLAKRHDLPVINILNPDGTLNGEVPEKYRGMTVKQARAAVLEDLKAGGWYIKEDNINHAVGHCYRCHTVIEPFLSEQWFVRMKPLAEKALTSWRRGDIVFYPPKWQHTYQHWMENIRDWCISRQLWWGHRIPAWDCKDCGKTSVSRNDLSACPHCGSVHIEQDPDVLDTWFFSWLWPFSTLGWENSDCDTA

SEQ ID NO: 84798 - protein, 397 aa, Unknown
  Obtained from environmental sample
  misc_feature (1)..(397): Xaa is any amino acid
MVFHDAHEAYIDYGNYRISYFLFDNNYKTLSDTGWHIVPTPPPPGITPAEASKFTPKHENITPGEDSKGKWNQRLIMQIADVLDPSRSDTNWGTMAAPTSFLFNYYGGAGGRVHRGISAPFKGVWTVTAGNYANRNWGGDWSYNNSGAKATLSDDHMINWGYPITPDFTESPAGDTIGKPVRRLHRKLCGSDASTTIDNVLIEEWDGYTWRRVFGNGPLPGREVVNVVIRDTVPQGVTFINFIEPYPFGKAPKINGRVITWEIDKLLIGEKGSIKYTVRADTPNDTKNVVVKSNAWAVADRESPMKSTATLVITRDSLPPPPPEPTTMYKRANKTAYSPGDTVVYTVAYKQTHGYPAVSSSSSQWEGANKSISADGKTISFGTAMSIWPLRRRPVRT

SEQ ID NO: 84799 - protein, 85 aa, Unknown
  Obtained from environmental sample
  misc_feature (1)..(85): Xaa is any amino acid
MTTIALIDDHPLATNGIGAWLNGTGRFTICGTAKNLAEASALMKHLKNLPDIIILDISLGSEDGLDFIPMLKEICEKRNVPMPGI

SEQ ID NO: 84800 - protein, 97 aa, Unknown
  Obtained from environmental sample
  misc_feature (1)..(97): Xaa is any amino acid
MIYREYGQTREKVSLLGFGGMRFKNVDDHDECVRLMVAAAQGGINYFDTAPGYFETRSETVFGKGFAHMRKLGLPYYSPHKTFETTSDGIRREIEAQ

SEQ ID NO: 84801 - protein, 126 aa, Unknown
  Obtained from environmental sample
  misc_feature (1)..(126): Xaa is any amino acid
MDRIGRDYQFETIISYPEMADRLAVINDGLEPVIIETLKSFLLDKAAENYPDKEINAWYHSNSPDGIEFHLDGIRREEVAVMRIPRELYNKFLTDYKKNPKNGIFPQLRVRSYLSVQNLLRSDALK

SEQ ID NO: 84802 - protein, 356 aa, Unknown
  Obtained from environmental sample
  misc_feature (1)..(356): Xaa is any amino acid
GAWVLFACWAGQRRLIIAPAAALLQRAPARRELFNAVIRIETGAELSMDSLASWLSNSGFQRESSTDNLGAFSIRGGILDLYPFLSDNPYRVEFWGDTIESIRSFDVFTQKSVGAHKSLEIVPMREFCLSDAHLDSAVEKMLASCESGALSVAETAIRKLEHQWKTVGDLDGAEWFWHWFGLDSASILDYLPTDAIIVWNDIVPMKRRLGEALDNYAHHLERVPDAFAPLVSPPSELLFDEKTIAEEMACYNVLYVDTVDTPKDTALFPVSFSPQPLVQQELGHIASGLREHVDGGYRCVIACHSAGHAERVAGLIGDQAGVVAEIVTGALHDGFICSDINLLVFRSRRYSPPVPR

SEQ ID NO: 84803 - protein, 563 aa, Unknown
  Obtained from environmental sample
  DOMAIN (399)...(518): Response regulator receiver domain
  misc_feature (1)..(563): Xaa is any amino acid
IIDRQLFTGTERHNYIDWGKRNSEYRKMGEVFQLIIENNLNGVEEYFIEQYPYEKAERYCAYDFISGTDNWSVLISAPFAESPLTYMRQMLFICAAIIMGLGVIAALLTANSISAPYEKMTELRTTAEAASVSKTRFLANMSHEMRTPLNAIIGLSELELGSAKLQGESFTNVEKIYTAGMTLLGIINDLLDISKIESGKLLMIPVIYDVPGMINDTVNLNVVRIGSKPVQFRLYVDKSMPSRLKGDELRIKQVFNNLLSNAFKYTDSGFVDWHISSVREGDQIKVVSTIRDTGIGIHKDDQEKLFKDYYQANLKANYYLEGTGLGLSITKNLVKLMNGSIKFESEYRKGSSFTVEFYQDVVNDDVIGEEAAEHLSRFRFSAQRRSRNQRLLRADMSYATVLIVDDVVSNLDVARGMLKPYKIGVECVTSGKEAINRVLDGKVRYDAIFMDHMMPGMDGIQTTRIIREEISNEYAKTVPIIALTANALLGNDSLFLENGFQAYLSKPIDIIRLDQILNQWVRDKKKEKELQNKIQDMTEGPIKNKQIKKYTIPGVNTAEALNA

SEQ ID NO: 84804 - protein, 200 aa, Unknown
  Obtained from environmental sample
  DOMAIN (1)...(185): ABC transporter
  misc_feature (1)..(200): Xaa is any amino acid
MVALVGTSGAGKTTLLQILGGLDKCDGGTVAVGGKDLDKLSGSELAQYRNRHIGFVFQFHHLLPDFTAIENVLIPGLISGKSRKECTPHASDLLNIFGLSKRFHHYPTELSGGERQRVALARAMFNEPALVLADEPTGNLDRVNGERLLELFEKANKELNQTFLIATHNSRLSLGMNRVLYLDDGKIADTDKPTTVADEW

SEQ ID NO: 84805 - protein, 115 aa, Unknown
  Obtained from environmental sample
  misc_feature (1)..(115): Xaa is any amino acid
FIGERFRREPAERFGAIAVDGDGAVSAFREKPDNGGVWVSGGFFVVEPGIFDYLTAGDETVLEREPFERLANDGQMNAYKHDGFWHPMDTLHDKNMLTGMWTGAKAPWALWEKQK

SEQ ID NO: 84806 - protein, 205 aa, Unknown
  Obtained from environmental sample
  DOMAIN (14)...(185): RNA pseudouridylate synthase
  misc_feature (1)..(205): Xaa is any amino acid
MTNIAPYIIEETNDFAVVFKPPRMHSAPLAKKEGGTLFDWFTAREQALSPCQANLMHRLDFDTHGLVLFAKNLKSFEFFKELQDKGGFVKEYSAVCAVTCNDSSVPGFPPPPAFADYAPSPENPLVIKSFFRPFGPGRKLVRPVIEESKKSREIAKDNGAFYRTEITGINGNIFSLRPKKAFSGTQKPLSLLAGAGLSHKKNKPP

SEQ ID NO: 84807 - protein, 186 aa, Unknown
  Obtained from environmental sample
  DOMAIN (7)...(108): Hpt domain
  misc_feature (1)..(186): Xaa is any amino acid
MAIDKDKFIKKYVDEGLEILSTVESLIFDIKDGVSVEDDLATLLRSLHTLKGTSRMLEFKRIEELSHSLESVFVAIREQRIGFSENALKLILSSLDLLKDGINVLQNTKDDNIETGEYVKNLTLLAAGEEYSLPKTEKPASIKKQSEDKDAALPQTPGMWELRRKKRRANILPPCNKRKIQKVSPY

SEQ ID NO: 84808 - protein, 321 aa, Unknown
  Obtained from environmental sample
  DOMAIN (10)...(162): NAD-dependent glycerol-3-phosphate dehydrogenase N-terminus
  misc_feature (1)..(321): Xaa is any amino acid
FQHGQHRQRGACLGQVLHENGHNLEFWTPSLTEAELLAKEREYKDKLPGIELPTEFKYSTEMFGVIKDSDMLVLTVPSQFMENVAQQLGQCPAPEKIPIVVNATKGISEHSLKRMSEIILSHVQWLSEEEIAVLSGPTHAEEIAREVYSAIVAASKNEVCAKIVQEAFSNKTLRVYTSQDVVGVELCGSIKNIIAIAGGIIDGLGIGVGDNTKAALITRGQAEICRLGEVLGASPRTFSGLAGIGDLIVTCMSHHSRNRFVGEQIGKGKTLNENLAHIKMVAEGVSTARSTYALAKKVGVEMPIVMAFTKCFLKKRPSYCY

SEQ ID NO: 84809 - protein, 276 aa, Unknown
  Obtained from environmental sample
  DOMAIN (1)...(276): MviN-like protein
  misc_feature (1)..(276): Xaa is any amino acid
MEEFDETVLLTRIMFPFLGFISIAALFQGILNSLHIFTPSGLAPILLNIVTILCAYTLSPFTKNPARAMACGILIGGFLEAAIQFPFVLKNGQRFFFTGIKKAFANPGTRKVLRLIGPTIIGMAAYQLNDLVSTALAGNAGEGIVSSLQYSLRLQELILGVFAVSIGTVLLPNLAEYAKSSQWKSFNDRLAQAMDIIALITVPITFFSLAQGEILIRLLFQKRSFDENSVKLTLSAFTFHMPGPFVYSPEPHSCPGLLRAKRFQNRRPSRGSSLSL

SEQ ID NO: 84810 - protein, 71 aa, Unknown
  Obtained from environmental sample
  misc_feature (1)..(71): Xaa is any amino acid
MNRYEEAFKRAKARRESALIPFAVAGDPGPDVFLDVIKAYVDGGADVLEIGYPFSDRWPTGREPSGRRSGL

SEQ ID NO: 84811 - protein, 217 aa, Unknown
  Obtained from environmental sample
  DOMAIN (133)...(216): Protein of unknown function (DUF933)
  misc_feature (1)..(217): Xaa is any amino acid
IGESRGGSCRSGQIAPALEDGKPVRLVNLNDDEKAAIYDSHFITAKPQLYVCNVDEEGIRSIAAGGDGNIHVQAVKKRAQAEGSTAICICGKFEAELSDITNIEEKLAFLEELGLKEPGLSSLIRSAYQLLNLRTFFTAGEDECRAWTIHSGDSAPKAAGVIHTDFEKGFIKAEVYSCDDIFKYGTEAKIKEAGKYRVEGRDYIVQDGDVMFFKFNV

SEQ ID NO: 84812 - protein, 413 aa, Unknown
  Obtained from environmental sample
  DOMAIN (32)...(140): PAS fold
  misc_feature (1)..(413): Xaa is any amino acid
MSGFYRRALSKLNRLNLEQCRELLVSASQEIFRLDTVLDSLPCGILVCDEKHRLLMANKAALRFLPISYTEGDLLWELLPDERMANFFQQALKRGDRVLEHEMDLQTQGPPGPSRLLSISVHPLVEKRHITGSLVYIEDITEKRGREVRLRRAEHLASLTTLAAGVAHEIKNPLGAISIHLQLMRKALNKRYNTAGQALQQEPAATDALIDKYFSVLNEEVDRLNGIVIDFLFAVRPMSLELSEGDLNALISDLGEFIRAELEQSNIRLLLELDDKLPPVLFDERYMKQVLLNLIKNAQAAMPRGGLLTIATFGTDSEIRISVCDTGTGISQENLKKIFEPYFTTKDNGTGLGLTLVYKIIREHQGEMSVDSREGEGTDFEIILPVYQKEQRLINYTGAKYTGAKYSGAKNEV

SEQ ID NO: 84813 - protein, 265 aa, Unknown
  Obtained from environmental sample
  DOMAIN (62)...(265): Binding-protein-dependent transport system inner membrane component
  misc_feature (1)..(265): Xaa is any amino acid
VGENHRSCQSKSATYINLHSVLRSNGQYYDEQIRNYPPFNKEFWFGTNAIGQDLWARIWSGTRTSLRIGVTVAFLNVVIGIFYGMIWGYVRKVDWFLTEFWNVINNIPSTIILILVSFILRPGVGPIIFAMCLYGWVGMARLIRNLTVILRDREFNMASSCLGSGTLKIIVRNLLPQMISVITLQFALAIPGAIGSEVFLAYLGLGLDVKTPSLGNLLNTGRGIMMAPTLRYQLFFPAIVLCVISVSFYLMGSAFADSADPRNHV

SEQ ID NO: 84814 - protein, 341 aa, Unknown
  Obtained from environmental sample
  misc_feature (1)..(341): Xaa is any amino acid
GLSRESPCPLQDGKASYGSAVSISSGSVNLESCIFSGNQSSASNIGGTIFNASGILSVNGCTFYGNSAVFGGAIFNYNTSCNTTLTGNLFYRNTAISYPVIYKGTVTSAGYNVVDVPLGTGTNQSGWAGQSTDKTISSIPILPLNFKLLSGSEAQNVIINLPTGYPIVDFYGNTIPTTGAAAGAVQEPASSGYLVELTVNNNILGSTEITSAPARNDDGLYPGGSITFKANPEAGYELQYWLVNNQHYTANPLTLPLNSHYIVQAVFDRAGIKLEFLQNPNYRDFAIESILDSSQWSSVTTSSEYRQVLQQISKKVYAIFKDDFDFIFFGLNTEDDISIHS

SEQ ID NO: 84815 - protein, 194 aa, Unknown
  Obtained from environmental sample
  DOMAIN (111)...(181): Cupin domain
  misc_feature (1)..(194): Xaa is any amino acid
MNEKAAHVPERIKELREILDISALDMAKDTEIPFDTYTKYESGEMDIPISVLYTIAGRLGTDVTVLLTGEEARMDSAAVCRKDKGVQIERYPGYEFSSLAYNFKHRTMEPLLVSLDSSKPQAAQVSHSGQEFNFVIERQVKVTVGKSEYVLSAGDFIYFDARPAPRSERRRRKSAILLLLYRNKNMNEIVFRYC

SEQ ID NO: 84816 - protein, 167 aa, Unknown
  Obtained from environmental sample
  misc_feature (1)..(167): Xaa is any amino acid
VYRDDGRHKEARKELKQREGSLRISEKILKGEAYDRSGLIYGQGHAVYTINDPRATLLRDKAVALAEEKGFIKELNLYRLIEKLTPDVFKKVKDSDKEICTNVDFYSGFVYKMLGIPPELNTPIFAVSRAAGWCAHRLEEIIAGGRIIRPAYKCIQLRRLYTEIDKR

SEQ ID NO: 84817 - protein, 159 aa, Unknown
  Obtained from environmental sample
  DOMAIN (31)...(159): ABC transporter
  misc_feature (1)..(159): Xaa is any amino acid
MAEALLKVENLVVNYGAIRALRGVSFDVTKGEIITLIGANGAGKSTTLHAISNVIKKTSGTVVYDGMEISSVPPDRIVAEGLVQVPEGRRIFANLSVRDNLEMGAYSRRSVTPAEKHAIRKDMEKVFDIFPRLKERIRQVAGTLSGGEQQMLSADPVTE

SEQ ID NO: 84818 - protein, 313 aa, Unknown
  Obtained from environmental sample
  DOMAIN (163)...(237): Helicase conserved C-terminal domain
  misc_feature (1)..(313): Xaa is any amino acid
MIRWTAAEPFGYEMEAVQAFGILNNIDLIEKFRLANTTERESLVQEVKNKKFLFYKENTHQLNYISSEWVISIPIGKELYSQYLLVKKVIGNNKLLSHHQINKLSVSPFLVNKKTGVQLNQSKETGKIKALRAIISRLPISDKIVICDNQKETLYYIKTLDFIRPLKPVLYLGGKKSDNKKNIDSFNNNPNYRILLTTRQAGGEGLNLQVANHIVLINCWYTVKDIIQIIGRIKRKGQIKPVYAYILGYNLFDCLEHGKELKSYILQEDESVYMMVRKKKDIYREWGMSVETKLPPLQSFFNYDSFEKDFMNF

SEQ ID NO: 84819 - protein, 417 aa, Unknown
  Obtained from environmental sample
  DOMAIN (1)...(413): tRNA synthetases class I (I, L, M and V)
  misc_feature (1)..(417): Xaa is any amino acid
MKGKKVERRFGVDCHRLPLENSIGEGIHFNSKNDIENLGIAKFNEACRAAVWGYVKEWRSTITRLGRWVDFDNDFKTMEPYYMETIWWVMKSLWEKGYLYEGHYILPYCPRCATVLSNHELNLGGYKDVHDPAITVRFKVVGATPPNTYFLAWTTTPWTLPSNLALTLGADIDYVLIEDLPSTPHSPLPTPNDHYILAEARLSAYYKNDTEYKVVWRKKGSQLAGLQYEPLFPYFKDAPNSFRTFLGDFVTTEDGTGIVHTAPGFGEDDARVLKGTGIPVICPVDEECRFTQEVTDFAGVFVKDADKAIIEKLKSEGKLIKREQILHAYPHCWRCSSPLICRAVGSWFVSVEKIKKDMLDANSQIYWVPEHIKEGRFGKWLEGARDWAISRSRYWGNPNRICPMSRLRQINLRRQPH

SEQ ID NO: 84820 - protein, 406 aa, Unknown
  Obtained from environmental sample
  DOMAIN (31)...(133): PAS fold
  misc_feature (1)..(406): Xaa is any amino acid
TNDQIGRELAKTLEDERAQYRKKIYWLESILDAVNSPITVTDKDMKWTFVNKAVERFLYVKRENIIGRKCSQWGANICNTRNCGIIRLRNGFKETYFQQFGGDYHVLVSYLYDENGEVDGHIEVIYEDTAVIAREKKKFEALVHWYESILDAMPFFISVTDKNMNWTFVNAALENHLGKKRKDVIGKHCSYWNFGHCNTDDCTIARAKRGLKQTCFSMGDISYQADVEILKDLKGAVIGYLSVVKDITNLEQMTKQQAEAEAAVRAKSTFLATMSHEMRTPLNAIIGMTTIGKSAADLERKDYCFAKIEDASQHLLGVINDILDMSKIEAGKFELSPEEFSFEKMIQRVVNVVNFRVDEKQQKLTAHIDKEIPQILVDRRPAAGSGHYQPSGKRRQIHAGKRFYQP

SEQ ID NO: 84821 - protein, 521 aa, Unknown
  Obtained from environmental sample
  DOMAIN (163)...(232): HAMP domain
  misc_feature (1)..(521): Xaa is any amino acid
MYIPYSRYIKTTYRSTLTHVLQMVEKEYPALSDPANLVRLGNEGSQDYWNLINHMDEIAKIFDIAYIYYVRPSGNTFEFVLSSEYTPAMSLEEVFSKYEQRDIPKPMNDAYKTGTLQISPAPFTNVWGTFVSAYIPIMKGGAIIGVLGADYEISKIKFFELEAQISLIVSVIIAAVMAFLLSVSLIKPIVRLFGVLTTIAEGDLTQRIETKGKDEIATMTVMIKETQESIRNLVINIKGEAAALSDIGSDLASNMNETASAVNEITSNIQSIKGRIISQSASVTETHATMEQVVTNINKLDELVEKQGTSVTQVSSAIEEMAANIQSVISTFANNAANVKTLQEASEAGRSGLQEVATDIQEISRESEGLLEINSVMENIASQTNLLSMNAAIEAAHAGEAGKGFAVVADEIRKLAESSSEQSKTISNVLKKIKGSIDKIIQSTENVLTGFEAIDSSVKVVSEQEEHIRNAMEVQGTGSRQIVDSVIQVNEITNQVKSGSHEMLEGSTEVIKESTELDKAT

SEQ ID NO: 84822 - protein, 142 aa, Unknown
  Obtained from environmental sample
  misc_feature (1)..(142): Xaa is any amino acid
EGGHTFLLGSSDWMVLDAQSRKPQSLDGLDMAMHIRPQRLLGDKLPRHKPDGGGQELARFRIPLSALDANGHVNNTEYARFSYDALYAHGYRGEMRGLGMTFHSEAFLEDELSLKYTWEDGQHCVVGYRGTGPVFSALFALG

SEQ ID NO: 84823 - protein, 134 aa, Unknown
  Obtained from environmental sample
  misc_feature (1)..(134): Xaa is any amino acid
MVDLIYAKELIKKCQKTQNPNLDLKPFKITDLNCLPELFECIHLEALKLDGAWLSIIPKKISRLVKLKKLDIKGPDNPSLSDINALAGLVGLQVLDLSYNKISDINSLKELTELRYLNFNFNHILILALKKLDK

SEQ ID NO: 84824 - protein, 298 aa, Unknown
  Obtained from environmental sample
  misc_feature (1)..(298): Xaa is any amino acid
MVSVPLLINNLKNGVLRKIRNEEPKKEKLLNILMKTSLFIQKIAPKTGDLFVRKHITKSVIKKLFGDTFAWICVGGTHVPTDSLKFINGLGHIATIGYGMTECGIIAFEPGTVFKKRIDGTTGPLMHGFTSKIIDADGNAADTGELLLKGSSMHTGRMQNGKMIPSDVDENGWLHTGDIARFIKGSLVIEGRVKEVILNESGENIYPDELEDYFDGLSNIVKRYCILGLNDKGNEKIAIVVEVQDNADNEKGFEEISHIVNTVNGQLPFLKRIKLIFAAKEPMPLGNGMKVRRQKLKE

SEQ ID NO: 84825 - protein, 87 aa, Unknown
  Obtained from environmental sample
  misc_feature (1)..(87): Xaa is any amino acid
GVFWGVDREAVWAFVFIAQAVDIKVLRQKFEKELEKDRKFVEGLKARLANGEFLKNAPPELVEGEKLKLEEGLKKTGKLESYIRDMA

SEQ ID NO: 84826 - protein, 257 aa, Unknown
  Obtained from environmental sample
  misc_feature (1)..(257): Xaa is any amino acid
FSQVQIRHENKKILVPKGKKPFVLSVDDLSYYEHCRENGVVHKLVLDQNGDIAAWTDTPSGGEISYDLDIVTITEDFIKKHPDFSIRGAKGIIALTGYEGILGYQTQAEKSNAPGYQKEIEDAIIIVNKLKKLGWRIASHSWGHLNMPKVPMSWFLYDNKLWDKEVKHILGETDLYIYPFGAALENYEEKHKILRDRNFNLFFGVGSGYGYRIGPKSEYIFLTRRNIDGCYFRLFRNSDKKLFDIDKVMDKESRGIK

SEQ ID NO: 84827 - protein, 331 aa, Unknown
  Obtained from environmental sample
  DOMAIN (70)...(213): GAF domain
  misc_feature (1)..(331): Xaa is any amino acid
GKNRRIRIGTSDEGCADLLYSAARVFANAIVREGYERNAQKTLKALERREKMSDTLNKVSVMFLSQREDTFEETMTAGVREIADLFKLDRLSIWRNLRKNNVLHASQIYRWDRDAGGTTVPTPGLEDVAYSKLAPRWETVFANNEIINSPINLLPEAAMLRAFGVVSAFIAPIFINNELWGFALLEDRHTERFFEKDSAEMMLSAILLCANTVMRAEMEREITNANEFTRAVIDASPLGFNVFDENANITDCSDVLLKLLETTKEYYFEHFYEFSPEYQGDGLKSRDKAVDIIKRALNGEKLVLEWTNCTSKGEPIPFELTLVRVMYKGNM

SEQ ID NO: 84828 - protein, 331 aa, Unknown
  Obtained from environmental sample
  DOMAIN (121)...(236): Response regulator receiver domain
  misc_feature (1)..(331): Xaa is any amino acid
DAIKLRRETASISLEARFLGEENSICTIEVSVSDTGIGISPEQQKHLFQSFQQADGSTVRKFGGTGLGLAISKNIVEMMGGKIWIESEIGKGSKFIFTVRMKRGTEKKRTPAAPGVDLNNIRILAVDDDPDILEYFDETAQIFGVNCDTAANAEEALSLLGQRGDYHICFVDWKMPGMNGIQLAHELKIRKTSVNTFVIMISAAEWSVIEEEAKKAGVDKFMSKPLFQSSIADIIQDYIGDDKTRTETAQEEDSRTPDNQFAERCVLLAEDVEINREIVLALLEPTKLQIDCAENGAEAVRLFTLAPDKYDLIFMDVQMPGMDGYERLCHH

SEQ ID NO: 84829 - protein, 228 aa, Unknown
  Obtained from environmental sample
  misc_feature (1)..(228): Xaa is any amino acid
MVIDKKNTPINRGRRQAGGHQGACGLLQKQIEDTTSDYDREKLQERLAKLAGGVAVFKIGAATEIEMKEKKARVEDALHATRAAVEEGVVPGGGVAVIRAAAAIDKLKLEGDEQIGVDIIRRACEEPLRMITANAGKESSVVCNEVKNGKGAYGYNAFSDKYEDLIKVGVIDPTKVTRSALENAASIAGLILTTECIITDMPEKKDKCGGAHGGGGGMPGGMGGMDDY

SEQ ID NO: 84830 - protein, 572 aa, Unknown
  Obtained from environmental sample
  misc_feature (1)..(572): Xaa is any amino acid
MAEIDPCPVPHCNAEVPEEAFYCPGCGLPIKQRVCPKCGAPTSPTADICQTCGAWLLEGKCKFCYANLSSDDALFCPECGKPKDGIPCPHCGTLSIFDFCSKCGKPVTEEAIAELKHAQEEMASKISSTAPETSAAQAAGKKTFNSNQDARRWYNAQAAAQTAGIETELAQLEALINSKSEPEEPKQIEDEASPPARKSLFSDRQMESIRKTGAVVEQITRQRLEAERIAEEKRKAEEAERKRKEEERQRQIKEAQERKEELERNSVREPGAAMLTTPYIPAVLMNVPIRPWAVNGYDEWQYINIEGRNMQCVKCNTNNRSSAKFCKQCGSAITNAETTTGLGLSIDQLVGLDEIKKELSVLQAILEGMKQSNKVARFPYDTIIIGASGTAKTLISNLIADLFFKFGMISKSKPEKIDGAFLNGMSSKDIDNLFSKAKGGMLFVDNAQKLLDSEGKAAHAFSHFITAMDANQDDPVVLMAGLPTGLREMVKSAESANKQIINHFEKIFIIPDYTPDQYVKITENELKKQSFTFKSGFSENSSLRSVTYTRNYRKRTITLNATVIMPIQKPKT

SEQ ID NO: 84831 - protein, 93 aa, Unknown
  Obtained from environmental sample
  misc_feature (1)..(93): Xaa is any amino acid
MIIVCAALIVFIVFLTVEHVLMRYARKRYSLVIHVNGTRGKSTVTRMIHALLRCQGMAVFGKTTGSKARFLLPDGTEKSVRRFGPPMYGNSVI

SEQ ID NO: 84832 - protein, 285 aa, Unknown
  Obtained from environmental sample
  DOMAIN (5)...(122): Tetrahydrofolate dehydrogenase/cyclohydrolase, catalytic domain
  misc_feature (1)..(285): Xaa is any amino acid
GNHGQIGRAAVFCQETEALISERVNGSKRLPVGFHALATILVGDDPSSATYVKMKGNACARVGMLSLKVEMGRDTATEELLERINALNGDPQTDGILLQHPVPKQIDERAAFEAISIDKDVDGVTCLGFGRMSMGCAAYGSATPAGIMRLLDRYEIPIEGRHAVVVGRSPILGKPMALMLLNRNATVTVCHSKTAGLPELVRQGDIVVGAVGKPEFIQAEWIKEGAVAVDAGYHVGGVGDIDLKNAASKVSAYTPVPGGVGPMTISTLILQTMRAAEKTVGIAEK

SEQ ID NO: 84833 - protein, 324 aa, Unknown
  Obtained from environmental sample
  DOMAIN (40)...(206): Transketolase, pyridine binding domain
  misc_feature (1)..(324): Xaa is any amino acid
VVIHVITQKGRGYGFAEEDPGFYHGIPAFRTDRDLKAGSGAKTFSAAFGNALLEAAGADDRVVAITAAMEEGTGLSPFRRAFPDRFFDVGIAEAHAITFAAGLAARGIRPIMAVYSTFIQRGVDQVIHDVCLQNLPVIFALDRSGLVGDDGETHQGIFDISLFRSAPGIAILAPAGEEEFVQMLRWALSCTGPVMIRYPKASCPSGDPAFFLPVEEGRGAWIRRTGANICIMFTGGLYAQVIQTEEILAKDEIIVDLYNLRFLKPIDEACLAGILDRYEYVVIAEGRKGFRRLWRVFIGICHSPALLLQITVLAAGEKSMPGEQ

SEQ ID NO: 84834 - protein, 63 aa, Unknown
  Obtained from environmental sample
  misc_feature (1)..(63): Xaa is any amino acid
VENHELLRLEGITKSFGHIEVLRGLDLSVDRGEFITLLGPSGCGKTTILRIIAGLETAIPTVL

SEQ ID NO: 84835 - protein, 325 aa, Unknown
  Obtained from environmental sample
  DOMAIN (1)...(168): BPG-independent PGAM N-terminus (iPGM_N)
  misc_feature (1)..(325): Xaa is any amino acid
DKRWERVEKAWHMLVDGQPEYTHGTSKEAIEAAYARGETDEFVSPTATKDLCTIKDGDGIIYFNFRSDRARQLSHALVDPAFDGFKPKFRPKVKLVTFTHYDAGLDPYVSVAYPPQNLAKIFGEVISEKGLKQFRTAETEKYAHVTFFFNGGREEPFPGESRRLVDSPKVATYDLMPEMSCHQVVRGLIESIESGEYKVVICNLANGDMVGHTGVLDAAVSACTVVDDSVRKVADAVLRMEGALLVTADHGNSDIMLDEHGHPHTAHTLSLVPCAIVAKGFEHRPLRSGGALCDVAPTLLKLLGIDKPNEMEGTSLSIWARPICL

SEQ ID NO: 84836 - protein, 121 aa, Unknown
  Obtained from environmental sample
  DOMAIN (1)...(106): Seryl-tRNA synthetase N-terminal domain
  misc_feature (1)..(121): Xaa is any amino acid
MLDYKFIAENLHAVSANIADRFMKADAQEVARLYAKRTELTTHLQSLQQIRNSNADAMKGKHDQEERDALIREGKKLKEDITATEAELAAVELNLLTEAREIPNMAHPDAPVGKRTRINFE

SEQ ID NO: 84837 - protein, 135 aa, Unknown
  Obtained from environmental sample
  misc_feature (1)..(135): Xaa is any amino acid
IGGAHDQIGRARHKTVWRIRDKTGSAIADVLSIDEDDDEIKNGQTYSFWHPSADYRHFVHTVEGSAAPMLKKRIENGVLTAEQPSLAEIKAYAAADLESFDATYKRLLNPHIYKVSITDKLRSLKLELIQKQLPS

SEQ ID NO: 84838 - protein, 82 aa, Unknown
  Obtained from environmental sample
  misc_feature (1)..(82): Xaa is any amino acid
MKTAISLPDIIYFEAEETAQNWGISRSALYLNALTEYLKKNNRKNITQKLNEVYNDDYYKEFEPIANAALESIRELTKNDTW

SEQ ID NO: 84839 - protein, 130 aa, Unknown
  Obtained from environmental sample
  misc_feature (1)..(130): Xaa is any amino acid
ADFPKEDSSKLNFAVGFLVEAYPDAKEKDLEIMDAVIRNLPNLKNFYNGSEYKIEDLADELRGPYEIEIVKEVIPQAYCPCSRERVMTSLSGLHECEIRDIKQKNEVLDVVCDFCRKHYAVAPNELVFPQ

SEQ ID NO: 84840 - protein, 55 aa, Unknown
  Obtained from environmental sample
  DOMAIN (1)...(55): Ribosomal protein L7/L12 C-terminal domain
  misc_feature (1)..(55): Xaa is any amino acid
LAESQVVREITGLGLKEAKDLVEGAPKPIKEGCQKDEAESIKKKIEEVGGKVVIK

SEQ ID NO: 84841 - protein, 253 aa, Unknown
  Obtained from environmental sample
  DOMAIN (18)...(209): RNA polymerase beta subunit
  misc_feature (1)..(253): Xaa is any amino acid
MTERKSYSRIKRGIDLPNLLEIQTRSYEAFLQPDTPPRLRKKEGLHGAFLSLFPVDDVKGYFKLEYDGYKLGIPKYSLKECKERGMTYAAPLKVDMSLLVHELDGESKKFKEKFSNEVYIGEIPLMTERGTFVINGAERVIVSQLHRSPGITFDEVVHPNGKKLLTARIIPQRGSWVEILLDVDDVLTVNIDRRKKMPATVLLRAFGYSSNEEILALFYDTVRVKVDAGDEQLLGAVCAKTVANEETGEIVLD

SEQ ID NO: 84842 - protein, 315 aa, Unknown
  Obtained from environmental sample
  misc_feature (1)..(315): Xaa is any amino acid
KTGKTVKYYFQKQEEAAGFARNLGLQIAKGKWILFADANDFFNNCLNDVLDKYADDWADIVYFKNNSIHNVSHEKLRKGDWLNKFIDIYLANSRKGEKLLRYLFTVPWCKLIKKDLIDKYSIKFDETLVNNDITFSYLCGFYANLIKANSRKLYCWVYGENSLSSQKEEPAIILDRISVHAKAIIFYKKLHQGVRFKRMWREIFYYLRLLYLNDKSCYKKAKNILVNAGFSKIEIFFGLIISFIRNINVNRKTIYVTADTPISDIINNQSFAGFGQFIFPIKNNPNFDPNTRLRNIDSLLPYHNQNLLVPILTER

SEQ ID NO: 84843 - protein, 330 aa, Unknown
  Obtained from environmental sample
  DOMAIN (107)...(256): Fic protein family
  misc_feature (1)..(330): Xaa is any amino acid
LREHQVTPELLDLIARIDEFRGTWHYLGTLELDRLSALRRVATVESIGSSTRIEGSRLSDSEVRQLLSNLAITKFDTRDEQEVAGYSELMDLLFQSWMDIPFNENYIKQLHQILLQHSQKDEWHKGQYKTGPNSVAAFNENGEQIGVVFETATPFDTPRLMTELVQWVNDVLGKDALHRPSAPLATLHPLLAIGVFIVVFLEIHPFQDGNGRLSRALTTLLLLQAGYAYVPYSSLESIIEANKETYYLALRQTQGTIRTEAPNWQPWLVFFLRSLAEQVRRLEKKVELEKTVLAALPTLSLQIVEYVRGHGRVTMADACQLTGAQPHTLK

SEQ ID NO: 84844 - protein, 73 aa, Unknown
  Obtained from environmental sample
  misc_feature (1)..(73): Xaa is any amino acid
MFGKVLIANRGAIAVRVERTLKKMGITSVAVYALPDRDSLHIENADESVCLGDGKCKQTYLDTAKYWQRRNRL

SEQ ID NO: 84845 - protein, 192 aa, Unknown
  Obtained from environmental sample
  DOMAIN (6)...(189): N-acetylmuramoyl-L-alanine amidase
  misc_feature (1)..(192): Xaa is any amino acid
DKAVSHGREKGLLLTHRDTDDFIELAKRPKMASDWGGDLFISLHCNAIAGKEMQQKAEGFKFYILRAGGTEEDKAIARRENQAIALESGKKGKDEISPAEWIILDNQLALYAEKSALLAGHLVEAFDGGSLRKLQTGAGQAGFMVLVGAYMPAVLAELGFITHPGDGAFLATEKGRDEITDKLVKAIIAFSR

SEQ ID NO: 84846 - protein, 538 aa, Unknown
  Obtained from environmental sample
  DOMAIN (88)...(319): Glycosyl hydrolase family 3 N terminal domain
  misc_feature (1)..(538): Xaa is any amino acid
GISFLIVLSFSLTLRHGDSGGHAARHETAMTDEQALAQVVMLGWIGEEPSPLIMDWIRQRNIGGVKIFGWNTANTHKLAETVGIFQGASLNGAFNIPLLVATDQEGGWIRHIKGDTSETPGNMAIGASGYPRDAYLSGYYIGKELALLGVNMNFAPTVDLFTNRDSVLIGPRAFGSDPVKAGILGAAFVKGQLAAGIIPTAKHYPGHGDTNLDSHGILPKIEVPFDTLWERELIPYRMLAAEGLPAVMSGHLAFPLTQSGTEPASLSSWFLRDVLRDKIGFKGIVITDDLVMTGATSTTGSLARTAKQAIIAGNDIIMFSSTLPLFDPVWTFLLSSMRDEKEFRQYVRTSARRILELKLTYMRGNSKVPYIPDLKKVDKGLHDPEGTAYFLNLAARSVTIVKPVPSDSVFPVTKENAGRVLLAGRFSEFISYGRIAFPDAAVYRMPSSAVPNDILYYARNADTVIFCLSDNFDLRFLRNLQQLNKKVIVLSVLSPVYLESVKWVTGAVAVYSYAPESFAAGFSAITGRIPAQGILPYE

SEQ ID NO: 84847 - protein, 400 aa, Unknown
  Obtained from environmental sample
  misc_feature (1)..(400): Xaa is any amino acid
RPSRQSASGDETAASDESASSDEIEEKQEFVDSDIADLGVSLDAESLDTESTDIDSLDAESTVTDEQPDLSVNALDDNIEINVDAEKDHDELEALRENGVTPVTFPPENSSYLEEDDHINLDLSEAVIDEPELSTEGIDEPPITEPSLDIDSLDDLNISVDNSDLASTDLASADLTSEDLASADAPSEDISIDDSSIDGSSSIDDVDIDIAMPLGDVKDDEQDLSLDSGFQSGGDISIDDQMPEGFEDELQDAPVPLEEEADISDIKSTNIKSADLTSVEEAEPAEITAPDESVEVIDKVEEIGDIDDVDEIVDIDEKPAKAASAPASAPSSVPASMPSSALAQKDGNFQLPSDLKKELKNILSYMDQLLESLPEEKIEEIRKSEYFDSLQKLFKDLGVV

SEQ ID NO: 84848 - protein, 263 aa, Unknown
  Obtained from environmental sample
  misc_feature (1)..(263): Xaa is any amino acid
MKRKKHELEELLPKTEEQRAEEYYQQLLNEKKHATTKEEFGELGVKFHEIECYRDAKALGKECIGMAVKKGFEEMVRQKKALDSNPSATDEEYKIIAEKVKVLIPFNVEEITQQCIELVSECDEQYIKLKERREEQEKQEQERRRQEEERVRQEEERRRQEQYDKLVQTMKTASAEEDFRWLAKDFRAMNGYKDTAVLANDCDEQYKKHREQREEQEIKKREAARRRTRNRRIICFVSVIGLVICAVAVYYLRDERRSLFDRI

SEQ ID NO: 84849 - protein, 96 aa, Unknown
  Obtained from environmental sample
  DOMAIN (21)...(92): Transcriptional regulatory protein, C terminal
  misc_feature (1)..(96): Xaa is any amino acid
AEEIRLVPSALPRNFKDFWAEGELRLPLKKFEILALLANNENRVVSHETLLNKIWGYDYYSSEGTVHTHIKNLRAKLPVNIIKTVRGVGYCLGEAK

SEQ ID NO: 84850 - protein, 341 aa, Unknown
  Obtained from environmental sample
  DOMAIN (1)...(233): D-alanyl-D-alanine carboxypeptidase
  misc_feature (1)..(341): Xaa is any amino acid
VDAETGTVVYGQNAFDEIPPASLAKLMTMHLFLSETNKGRVSLDDIVPLSKESWAVNQPPRSSLMFLASGQIVTLREIMLGMAISSGNDAAVAAALYLAPSVADFAGMMTAEARRMGLVNTRFVEPSGISEDNMTTAADFAAFCLEYLRLHPYTLTEFHSVREFAFPKKENMGEAFRGNPRTIVQPNRNNLLRTFPGTDGLKTGYIDEAGYNIALSAERGGTRFIAVILGAPARYGGDRIRDRDGESLLTWAFGNFKTVRPEIPPLEQPRLWKGREKQVSLALAGDPVFTAPLDRAGSLRYRLIINEPLIAPLPASYPVGLFLLADDEGELRRMQISRPIN

SEQ ID NO: 84851 - protein, 193 aa, Unknown
  Obtained from environmental sample
  DOMAIN (8)...(186): Peptidase family M50
  misc_feature (1)..(193): Xaa is any amino acid
LDIQRILISLPGIIIGFTIHEYCHAAAAYKLGDITAKEDGRLTFNPFRHIDILGLIFIIFAGFGWAKPVRFNPDKLKNPKRDKAIIAAAGPFSNLILGVIFLFIIKGLWALDIYDEKLFDIVDFVIDVSYYWAYTNIGLFVFNMFPIPPLDGSHIFLSGLNLTHETETKIMQIGSGILFFYNIQNLGHQRAPK

SEQ ID NO: 84852 - protein, 78 aa, Unknown
  Obtained from environmental sample
  misc_feature (1)..(78): Xaa is any amino acid
MRKWTVDDSRELYSIKGWGVSYFDINEKGNATVSPLKEKGPTIDLVEVMRDLSRKDLATPVLLRFPDILDPRMKRLGR

SEQ ID NO: 84853 - protein, 327 aa, Unknown
  Obtained from environmental sample
  DOMAIN (1)...(323): EPSP synthase (3-phosphoshikimate 1-carboxyvinyltransferase)
  misc_feature (1)..(327): Xaa is any amino acid
KTPVCPALLPALLTDDPVILRNIPDIEDVQVMLAVYRPLGGKAVSLGPNAWQLSTGNISSSEIPAEYAVKIRASILFAGPLLARTGKVVLPPPGGDVIGRRRLDTHFLALTELGAQVEVKDTFVFSSSGLKGADIFLDEASVTATENAVMAAVLAKGETILTNAASEPHVQDLCRMLCAMGARIEGIGSNILTIMGAEKLRGCEFTIGADFMEVGSFIGLAAATGGELFIEGTSPSDLRPAKTAFGKLGIVWKHEGTTLHVPSGQALEVNCDLGGMIPKIDDAPWPGFPPDLTSIVTVVATQVKGTVLIHEKMFESRMFCDKLSPRK

SEQ ID NO: 84854 - protein, 156 aa, Unknown
  Obtained from environmental sample
  misc_feature (1)..(156): Xaa is any amino acid
METQDFKVKFRGTRGSYPTPRANCLHYGGNTSCVEVNAGGHLIILDAGTGIIDLGRELTQEHILSREPIRATLILSHIHQDHIQGLPFFNPLYIPTTDLRVFGLGPSGESLKQTLSEVLFDKVFPLGLEDIACNFEYQNYSERQGDILQKNQPPSS

SEQ ID NO: 84855 - protein, 245 aa, Unknown
  Obtained from environmental sample
  misc_feature (1)..(245): Xaa is any amino acid
LQRRQDFPAAVTIRKNGAITYMTSDSPLGPYTLRKMILPNPGEMFNTKGGNNHHAIFEFRGKYYILYHTRLLEMAMGVPETLPREGYRSTHIDEVTVLQDGTIEEIKGSRKGAAQSGRFDPYKLTSAATIGSQAGISTVAVPGEQRMKVTDIDSGDWIALYGVDFSGTPYYEDGVDLGYAEARTFRCRVTPPKSGSGHAGGVIQIKLDGLDGKPVGYVNVEPGKPEITVKLLQTITGVTSANLTT

SEQ ID NO: 84856 - protein, 270 aa, Unknown
  Obtained from environmental sample
  DOMAIN (28)...(179): ExsB
  misc_feature (1)..(270): Xaa is any amino acid
MTQSELDKLEDTLVQGIRDFMRKNGFGRTHLGLSGGIDSALVAHLAVQAAGAENVTCISMPSRFSSQGSKDDAAALAANLRCRFETIPIEGIYSTYLTALEKVFENRPFDVAEENLQARIRGTLLMAYSNKFNSVLLATGNRSEAAMGYCTLYGDTCGAIAPIGNLFKTEIYALSNRINARAAAAGSKQIIPQAIIDKSPSAELRPGQKDEDSLPPYDTLDAILKLRLCENLSQGEITARGWDRELVDRIIDTMARMEIQHLQCPPSLPI

SEQ ID NO: 84857 - protein, 182 aa, Unknown
  Obtained from environmental sample
  DOMAIN (2)...(182): HDOD domain
  misc_feature (1)..(182): Xaa is any amino acid
KYQIGREPELLVNLIKYLNSASFGLRSKITSIKHAITLLGYDNLKRWLLILAYAGGNSAKINSHSPLLVNAIHRAKFFEELSKFLKLSENVTEKAYLMGLISHLDMIYKVPIQSVLEQMNLDTEINQAIINKDGTLGELFTLLQAIEADDMDKIELSLTHLSLSTENINSALLKAYEASNNI

SEQ ID NO: 84858 - protein, 168 aa, Unknown
  Obtained from environmental sample
  misc_feature (1)..(168): Xaa is any amino acid
LKSLRYQSKTYAKLQTLMNRVNEESLKAEHLKQACRKASGVDGVTKDEYGKNLEANIAELMKRMRGFQYKPQPVRRTYIPKINGSMRPLGIPSYEDKLVQGVMAGMLTEVYEERFCDCSYGYRPGRSAHDAIRYVDTVLGTKKVKYVVEADIKGFFDNVDHDWLMKFL

SEQ ID NO: 84859 - protein, 98 aa, Unknown
  Obtained from environmental sample
  misc_feature (1)..(98): Xaa is any amino acid
MAAMSDYAGHSPADVRQMIREGKWDRPTSGMCAGHAQGNLVILPKDLAYDFLVFAQRNPKPCPILDVTEPGDTEPKIVAPGANLATDLPRYPRPILTL

SEQ ID NO: 84860 - protein, 202 aa, Unknown
  Obtained from environmental sample
  misc_feature (1)..(202): Xaa is any amino acid
MTPSLSPYRLRKAREVFNLFNVFNALSWNLLVGSIITLFAIRLGATSTYIGTLSALLYVSFFFLPLGKLLSKKFSIVGIFSFTWTMRAIGMITAVFAPISAHLGHHDTALGLTMLGVGIFHVVRGIGMIAKHPVLSNLSTGPDRSSYMTQIQIINSAVGMFAGFAIAIILGKDPGYTSIHHYVRRHCLRDYQWYADTEVPES

SEQ ID NO: 84861 - protein, 334 aa, Unknown
  Obtained from environmental sample
  DOMAIN (1)...(198): Protein of unknown function DUF262
  misc_feature (1)..(334): Xaa is any amino acid
GATNDQIRPRLPWDKRNIRDLFDDIHESIDSKSDHYIGTIVLSKDRDDPEKYYIVDGQQRITTISMIIQALVDCLDKENKDFYSRIYIKEEDRYRLLPLNRDKDYFVNLLDKKILEPENKSQRALKEAMEEIRYKIQPIENKLAFLKSVVKLQIMEFIENTEGDAIRIFQTVNDRGKQLSKMEKAKSVLIYFSNRYLSGKLDTKISNDFSEIFEIYDDIKQSGEELNIDIIKNRSFDEDNIMNYHYITFSNENYAPTADFVLQKLKDGLAEKRSDINGLEAFIIKYVDSIKEFFVATKSVIEKASSLEKYYKLFSILKVSATLYPVIIRLETFT

SEQ ID NO: 84862 - protein, 198 aa, Unknown
  Obtained from environmental sample
  DOMAIN (85)...(131): Bacterial regulatory helix-turn-helix proteins, AraC family
  misc_feature (1)..(198): Xaa is any amino acid
GLNIASNGNLERLKLKAIELVVMLPEPGQFGKQRGTVEANTRYVKRIEDSKTVDEITGNMRLILDQMAGKLFSFQGVRHASALRKAERFIWENFSRKISLKEIADVSGLSAPYFSTIFKEEMGENLSTYLNRLRVEKASSMLRETEYPINGISAACGFEDQSWFSKIFKHYTGYSPCQYREQGGIIMADKILTPGRSS

SEQ ID NO: 84863 - protein, 86 aa, Unknown
  Obtained from environmental sample
  misc_feature (1)..(86): Xaa is any amino acid
FTNDFDTLQKNIGGVKVGGGGDIPEAVYEALYAGATKLSWAADKRIMLLIGDAPPHPRPRGAITKNMVDREASNRGIELHAMILPQ

SEQ ID NO: 84864 - protein, 310 aa, Unknown
  Obtained from environmental sample
  DOMAIN (1)...(293): tRNA synthetases class I (W and Y)
  misc_feature (1)..(310): Xaa is any amino acid
MNEGPVTFYEGTDPTGGSLHIGHMVPYFAFRHLKDAGHKGLALLGGGTARIGDPSGKSEMRKMLSYEQLDANTESIRAQLDRFVSFDNDTARAVNNKDWLADLNYIDFLRDIGRHFSVNRMLSFEAYKMRMETGLSFIEFNYQLLQSYDFLELYRRYGCRLQIGGDDQWGNIVAGVELIRRVEGAEVFGITFPLITTADGKKMGKTEKGALFLDPALTSPYDFFQYWRNVQDADIRRFLLMFTFLQIGECEALTAPGKNPNEAKERLAWEVTALIHGKPEADKALSGAKAAFGSGGGGRPWRGQVAMPHA

SEQ ID NO: 84865 - protein, 245 aa, Unknown
  Obtained from environmental sample
  DOMAIN (5)...(245): EPSP synthase (3-phosphoshikimate 1-carboxyvinyltransferase)
  misc_feature (1)..(245): Xaa is any amino acid
MDVKIFPARLNGTVNAIPSKSQAHRALICAVLADKPTRVECNGESDDILATAACVSALGAEIERESKAYVVRPLKREANGGVTTLPCGESGSTFRFMLPIVSALGRKVCFTTKGRLPERPLSPLYEELLRHGAELSPQGSVPFYSGGRLTPGRYSLDAGVSSQFISGLLFALPLLDGDSELALTGSVESFPYVELTMAMLETFGVKAEYSGEVFFIPGGQMYRSSGVVRVEGDWSNAAFWLGAGL

SEQ ID NO: 84866 - protein, 307 aa, Unknown
  Obtained from environmental sample
  misc_feature (1)..(307): Xaa is any amino acid
SRIRSAERYGPYPVALAPEGQVSYTADAVPRLEPGVIRIGFQAAKQLVAKGSDCPLEILPISVHFRFGSWGNFTLELLLKKIEKVCGFFGTHRKKMLFTERVRQCRDHVLEVIENRYQIKTETSDSFEERLGKVISIALGTAERMLGVKAERDFFSRMYRVRQICWDRIFLPGVDNLEGMSAVERSSVDLNAGEAWYIARHMELVDFSWYFRIPLPTEETVIHKKVEYVQNLWDFANRAMGGAFNNRVSIFPRKVIIHTAPAINLSERLPSYNKDKKAEIALAISDLEKAFLDCITEANGIADGRKK

SEQ ID NO: 84867 - protein, 334 aa, Unknown
  Obtained from environmental sample
  DOMAIN (149)...(276): Phosphoribosyl transferase domain
  misc_feature (1)..(334): Xaa is any amino acid
NLAPGAETIRGTDILNTDCFSDGEMEVSLSRSVRGMDVIVFASSARNEANLTVEQAKIELYHTVDALKRSMARNIIIFEPFISCSRSDRTTRRNSVGLWMHFKTLTGLGANHIVTYQLHSKISQSMLDPTACTLDDISGLTLLQRYLCDHYIRNLEFLEQNVRPNWAFCSVDTGGENQVRDFANAFGAPLIVGHKQRDYFKANTLKSFNVLSAVPVEGKTLWIVDDLIDTAGSVESLIRALAPYKPAEINVIAVHATLSPPAPERIMKLRSEGLLKRVIVTDTVCLSSLKTQLPFLEVVSSAELSARLIHTFLTNRSMGALMDLSTPKPSADLS

SEQ ID NO: 84868 - protein, 268 aa, Unknown
  Obtained from environmental sample
  DOMAIN (56)...(88): Ankyrin repeat
  misc_feature (1)..(268): Xaa is any amino acid
LGIFLPVGSGCKGTPSTVEKTAEKPTNDVWALLASGDERAKNYFLGEVDIRAVDSNGRTALHYAAELENPQLAAFFLSLGADPNAQDYDGRSPLGISAAKADPWVAKILASGGANIHQPLKGGASPASLALLMEDSAFLQAILTPTTLDSVDREGNAILHLACISGNLRAVCDILAASQLFNDSAVIGQTDMDGKNALDVALERPDSSVHMQIAEQLILVGAFSDSPIFYYFAPAARSANYNIRRTDGLAPMHYAPRARYTGLISSLS

SEQ ID NO: 84869 - protein, 92 aa, Unknown
  Obtained from environmental sample
  misc_feature (1)..(92): Xaa is any amino acid
EEIEGAAGSRMTGIGFGGCTYTIIRRELVREYKKRLEDYERIFGFRPVIYEIKLAARARVISEPVIEPRRGITTRTGSRPVRKRVYANTADK

SEQ ID NO: 84870 - protein, 71 aa, Unknown
  Obtained from environmental sample
  misc_feature (1)..(71): Xaa is any amino acid
GGSTVLTALFRYKYSYREDPERRVKALEEAKRTIARIFGVGKSSKSKPGPLLEHAKNLYETISKELNEVDV

SEQ ID NO: 84871 - protein, 163 aa, Unknown
  Obtained from environmental sample
  misc_feature (1)..(163): Xaa is any amino acid
EARGYKLEYEKSKKDFNEKLGNYINLFGEFTEYTLAPKVCEKFKELGFSFQKPTRNFTCKDDTNNMSFEVDIVLQNSNLLVLVEVKTKLTNERIDGHIRRLEKVRKYYTEMLNGDKRRILGAVAGVIVSDDTRAYALNQGFFLIEPAGQDISITPPIGKPREW

SEQ ID NO: 84872 - protein, 302 aa, Unknown
  Obtained from environmental sample
  DOMAIN (240)...(302): S-adenosylmethionine synthetase, C-terminal domain
  misc_feature (1)..(302): Xaa is any amino acid
MNSRRYFFTSESVGEGHPDKLCDQVSDAILDACLRDDPQSRVACEAFSSASLVLVGGEITTTTYIDFHHIIREVAREIGYTDASYGLDCESMAVLSMIHNQSPDINQGVSGKGLKKYKGQQGAGDQGMMFGFACNETKGLMPLPITLAHELLIHATKLRKNQTIKWLRPDSKSQVTVEYEGFKPIRIDAVVVSHQHAPEVAYKEIEETVIEKIIKPVLEPTGLLDKKTKYYINPTGRFVVGGPFGDSGLTGRKIIVDTYGGMGRHGGGAFSGKDPSKVDRSAAYAARYVAKNVVAAQLGRPL

SEQ ID NO: 84873 - protein, 328 aa, Unknown
  Obtained from environmental sample
  DOMAIN (80)...(256): Radical SAM superfamily
  misc_feature (1)..(328): Xaa is any amino acid
MRASQIYKWITRGVTSFDQMTDLPSALREDLKSRFRLYSSAVDSRHEDKSSEKIVIALEDGLKIESVLLKDGKSRLTACLSTQAGCPAGCVFCKTGSLGFSRNLTAAEIAEQFLYLRTAVSGEAEKMSGHSIDNIVIMGMGEPLLNLDELRKTIAFFTDPAGINFSKRRITISTCGICDGISDIADNGPYVRLALSLVTADEELRKQLMPIAAANPLEKVKKSLTSFQNKSGGRVTLEVPLLGGINTRVQDSLSIARFAKGMDTVINIIPWNPAEGLEFQGKPLREPEKKETEDYVKQLEKQGLKVTMRHRKGRSIMGACGQLGSGNR

SEQ ID NO: 84874 - protein, 338 aa, Unknown
  Obtained from environmental sample
  DOMAIN (1)...(337): Protein of unknown function (DUF935)
  misc_feature (1)..(338): Xaa is any amino acid
PRSDRPSLPKLKRIYSGLDYGFSVSELVWRYEDGLYIPDNIITRKPERFVFDRNWKLYLNEFGARKPLDQPYKWLEYHHDPDDENPYGTSVLKCVYWAYMFKKAGYEYWLQATEKFSVKTILALFTADGDDKRIQDTAKRIAAELLAIESGSAAAVGGVNSIHEVGMSGELIGFASLVDACDTQISYGLTGQTIATSKTEGGSLALGEVQADLFYEDAKGIALEGQALIQRIINWAVEINGYGNVVPPLAEVDTERKASFDQVMKAIEHGVAVSRDAMYNRYGLPRPHDDEDSFIKETPASLTLSDFQQSENGKKKPCRQNADTDYVHGDGLGSPNGR

SEQ ID NO: 84875 - protein, 105 aa, Unknown
  Obtained from environmental sample
  DOMAIN (1)...(82): ABC transporter
  misc_feature (1)..(105): Xaa is any amino acid
NDQIGRALKLSGGEKRLAAIATVLAVDPSVLMFDEPTAFLDPKGKRSLAATLKALSHTLLLATHDMEFAIQTCERAVILKGGRIAADGPPNLLRDGELLEKCGLR

SEQ ID NO: 84876 - protein, 301 aa, Unknown
  Obtained from environmental sample
  DOMAIN (176)...(300): AIR synthase related protein, C-terminal domain
  misc_feature (1)..(301): Xaa is any amino acid
MDYKEAGVDIEEGYRAAAHYKGFSEMTLNHAVLGGIGGFAGMYSLKEFLSGVGAMEEPVLVSGTDGVGTKLDIAFKLKKFDTVGIDCVAMCVNDVLCHGARPLFFLDYLACGKLDSDVAAEIVKGVAIGCRETGSVLLGGETAEMPGFYENGKYDIAGFSVGIVDRKEIVDGSKICEGDALLGISSSGPHSNGFSLIRKIIRDLNEDFGGMPIGMALLEPTRLYVKPVLSLMEKIEIHGMAHITGGGFYENIPRIFIDKQKCTAVIREGSWDIPPIFAGIAAGCYNTGSSGSLAQRQDWNC

SEQ ID NO: 84877 - protein, 181 aa, Unknown
  Obtained from environmental sample
  DOMAIN (4)...(171): Formyl transferase
  misc_feature (1)..(181): Xaa is any amino acid
KRWFDSAGSEIVRVVSDNPKAYALERAKAAGVAVAVEERDRSVPRDERRQELSDRILMLVETYHIDLIVLAGFLSILKGEIVRRYAGRIINLHPSLLPKFGGDGMYGMRVHRAVLDAGEKESGCTVHLVDTGVDTGPILLRRKVPVLSGDTPDTLAERIHTEEHIAIVEAVKIMVERIKND

SEQ ID NO: 84878 - protein, 396 aa, Unknown
  Obtained from environmental sample
  DOMAIN (18)...(289): ABC transporter transmembrane region
  misc_feature (1)..(396): Xaa is any amino acid
MEQVKWVWNYMKGKRAVFMGGLFLTVVTSSIRVINPLLGKQIIDIVIVKHDTSPLIKLLVIMMIVQLSRLLLNYLQIILMEIASTDVMTRLRRDMYQTVQWQDYKFLNRFPTGNLMTRMTQDLDRLRHTVAWVSYQFIGAIALFAATFIFYLFLNWRLALCLVGITPFILYISSRFVKKIRPRFQLLREKLTDLGTAVTENIDGNRVVKAFAREEYEKEKVEKQNAEFRDISCENALITAKYQPFLETASQLLMVIMVVAGGFFLIKEWMTPGEYMAFSSLTWALAMPMQMLGPLLADLERWTSAGQMIREVVEAPKGISDMSGAMQLTQRPKGRIEFRDVKLAINGNTILEDINFTAEAGSTIGILGSTGAGKTSLINLLARFYEPDYGAVPLDG

SEQ ID NO: 84879 - protein, 130 aa, Unknown
  Obtained from environmental sample
  misc_feature (1)..(130): Xaa is any amino acid
MEPIKHAPAVLRKLFSRGIRIRIITHRFFLKYSHAATIKQTIDWLDNYDIPYWDICFMNDKGAVGAHIYIDDTPDNVISLRKQDCKTIVFTNSTNRKLPGLRADNWLEVEKLVMEACEEWKTGTVGLSFN

SEQ ID NO: 84880 - protein, 322 aa, Unknown
  Obtained from environmental sample
  misc_feature (1)..(322): Xaa is any amino acid
GKRQGGVDLLYPPLAEKLLVVGRRFKLWGRFYYKYGDVQSTSFELEPLDGAMAGGGTGGFGRLLPVYPLCAGLTQAMLRRFVERALDQFSARLEDELPEEICKRDKLLSKSAAIRAIHFPASTVDLEQAKKTLIYEELFYLEIMVGKRALERKGAGRKYFNHEPSRTGKEEKTTEYTELHGGEEAQKVGVTSDQWVVNREEANNDKLPTTHYPLTTTLQNHLLERLPFALTQGQGEAVAEINRDMDGAYPMARLLQGDVGSGKTLVSFLAALYAVENGGQAALLAPTELLARQHAQNAASLLEPLGLRVAFLTGNIRRPGDN

SEQ ID NO: 84881 - protein, 132 aa, Unknown
  Obtained from environmental sample
  misc_feature (1)..(132): Xaa is any amino acid
MAATRPSKKRPVRYQGAGIKVSARAHSEAADREIAILVDSLSAVDVVPQEKLLDALFELGREKRRSGLPWTMFIVSHRVLALSRAEEVVVMEKGRIIEKGSPTEHASRNGLYARTAALQSLGAKGSYGEGFV

SEQ ID NO: 84882 - protein, 118 aa, Unknown
  Obtained from environmental sample
  misc_feature (1)..(118): Xaa is any amino acid
LSSWHGADLRTLFGVPEQDSYLLSDSIKNNIGYAHDGAGSDERLDQEASLAGLGKDFQLIQDGCDTPIEEKARTLSGGRNQSIRQSAFGGGGQGNSHPGRLPFGSGRCTTGKATGRFV

SEQ ID NO: 84883 - protein, 533 aa, Unknown
  Obtained from environmental sample
  DOMAIN (1)...(503): Putative glycosyl hydrolase of unknown function (DUF1680)
  misc_feature (1)..(533): Xaa is any amino acid
GLDYGVPKDTGHGGCVFQDSDFAKWIEAASYSLVWHPDPALEKTLDDAIDIVCNAQQEDGYLDTYYIINGLDNRFTNLRDNHELYCFGHLLEGAVAYYEATGKRKFMDALIRYADCIDRLIGPEDGKLHGYPGHEIAEMALVRLYAITKNEKHLKLAKYFIDQRGQEPLFFEEEEKRNNNNFYWKDSLFRYQYYQAGKPVRDQHIAEGHAVRAVYLYSGMADIARLTDDATLMKACDDLWNNIVNRQMYITGSIGQSAYGESFSYDYDLPNDTVYAETCAAIGLAFFAKRMASIAPKGTYGDVIEKALFNGIISGISLDGKSFFYVNPLEAIPEASLKDHGKRHVKIERQKWFGCACCPPNLARIISSLGSYIHSLNNNAIYTHLFIGSEAKVKISGADMSLKIETKYPWEEQIDISFAMSAKTKFKYYFRIPGWCGKYSIRLNGIEQSCTVEDDYALIDREWSGGDRLSLVFDIAVKFVQSNPHVRENIGKIAVMRGPCCVCAKEEDPRTELFRLHAGKSDDIISGMKRSAG

SEQ ID NO: 84884 - protein, 220 aa, Unknown
  Obtained from environmental sample
  DOMAIN (1)...(188): Amino acid kinase family
  misc_feature (1)..(220): Xaa is any amino acid
GKTGRPIITQVEVDPADKAFENPTKPIGGFHSREEAEILRSKGIPVMEDAGRGWRQVVASPKPINIIEVDTIKALLAEGQIPIAAGGGGIPVAMKDGQYRGMSAVIDKDFSAAKLAELIGADMLIILTAVEKVAVNFGKPDQKWLDSMTVAQAEQYIAENQFAKGSMLPKVQASIAFVKSRGPGSFGALQGVGETHSALITLLAKARDGIAGRTGTRITP

SEQ ID NO: 84885 - protein, 192 aa, Unknown
  Obtained from environmental sample
  DOMAIN (2)...(176): NADPH-dependent FMN reductase
  misc_feature (1)..(192): Xaa is any amino acid
MMKVIAFNGSPHYDGVVAKGISIIQRELEKSATISVETIHVGNKHIRGCIDCRKCGETHRCIIEDGVVNEAIDLLHSADGIILGSPVYYGGIAGTFKSFLDRLFCAGPTMPFKVGATVVSLRRSGGIAAFSQLNNYFSLAGVIIAPSISWGIMHGNNAHETLEDKEALQIMEIQGRNMAGCSKTRADLISGN

SEQ ID NO: 84886 - protein, 327 aa, Unknown
  Obtained from environmental sample
  DOMAIN (243)...(327): Pyruvate ferredoxin/flavodoxin oxidoreductase
  misc_feature (1)..(327): Xaa is any amino acid
PIDGRDSDDLILAHRQRGLTPEKPSIRGTSQNPDTYFQSREGVNPYYTKVAGIVQAEMDKFAKITGRSYHVYDYFGAKDAEKVIIIMGSGADTCEETAEYLMGQGQKVGVLKVRLYRPFDAELFVKALPASVKSIAVLDRTKDPGALGEPLYEDVRTAIAEMQSAGKTPFKGNPVVVGGRYGLGSKEFTPAMIKAVYDNLSGKQIHSFTVGLKDDVTGLSLDYDEHFVIKEEGMSEALFYGLGSDGTVGANKNSIKIIGEAKPNLFAQAYFSYDSKKSGGFTVSHLRFGEKPIRRPYLITKADFLACHKFSYMELYDVLAYAKKAGL

SEQ ID NO: 84887 - protein, 198 aa, Unknown
  Obtained from environmental sample
  misc_feature (1)..(198): Xaa is any amino acid
KRGENPEGQENNCQTGEAATPRNQKSRGHPIFIRTGEYDDGSLGEIFLDMHKEGAAFRSLLNSFAIAVSLGLQYGVPLEEYVDAFTFSRFEPNGIVKGHDYVKMATSVIDFIFRDLAISYLKRVDLGQVKPEDLLATGTKADNRTENSTGLWNSGDGSYQARIKGYEGDACPSCGSFTLIRNGTCMKCDTCGETTGCS

SEQ ID NO: 84888 - protein, 79 aa, Unknown
  Obtained from environmental sample
  misc_feature (1)..(79): Xaa is any amino acid
MIVDENHPFSSFGLSESVLKAIARKGWTAPSSIQTIALPRLLADEGHCIVKARTGNGKTAALRIPLIEGLTQAANLPAR

SEQ ID NO: 84889 - protein, 117 aa, Unknown
  Obtained from environmental sample
  DOMAIN (49)...(100): Phage derived protein Gp49-like (DUF891)
  misc_feature (1)..(117): Xaa is any amino acid
GGSNQRLPFRKPAAYRKWYAEINDEDLKHNIGNRLQNIKKGNFGKFKSERYSLGLIIDYGPGYRIYFIKSGQTVVILLCGGDKSTQDSDINIKVKGMVADLKKNSLKKRKLKKGNNK

SEQ ID NO: 84890 - protein, 573 aa, Unknown
  Obtained from environmental sample
  misc_feature (1)..(573): Xaa is any amino acid
MQPLFWTTEDAIPDGVYWLEVRVYDRVGNLRTYADAADAANFVELRIQFKVNRKPPALNAYKSDDYSAKGEINFYGFDTLSITGTNPVFTLYGDVRDGDLTNLNIKLVDYEENEIFNENMTASAGPWTQFTPPAGSGAPSSSATDSTDCMYAWSWPVTGQNFAAMSQGLATITITATDSTYVPAASSDTGKEKGRKTVATFTFTKDTEAPKPEYYNLNETKIDYDDWTGDSGALDLSKNEMSSFGGADPAIRGAFDDEYSPIGYAVDETGQYYFEYRIYQKDDLQNHDTLDWEKYYLGTSTLRTVTWTIYLTNNRNSTTHATAPGTILPDGVYWIDIRVYDRGNTKYEEGTFAFTVDALDPVLGETITVTPTSAVNIANDILTVFDKPFTLKGTAADGNFRWLKIVVDGKDQSNGTVTGISSTTTPTVPVVDSSGNTVQVPNYDWTWTIPQAVFDNDTLYPEGTRTVTITAYDLANKSVYTQFTFVKDKSPPKVAYNNIDAAGGSEIKDDIALIRGSFNDEYTLIGADKTQGSGSDADKYFYEYRIYRKSASASVGVDDNPTWEDAYFGDNGL

SEQ ID NO: 84891 - protein, 70 aa, Unknown
  Obtained from environmental sample
  misc_feature (1)..(70): Xaa is any amino acid
MSKAHRGKGIGKLAAHGRGTCPVCGASGIKLLYEAGEQKVKVCKPCKAAIKHGKKSAPAPAPAEAAPAAE

SEQ ID NO: 84892 - protein, 62 aa, Unknown
  Obtained from environmental sample
  misc_feature (1)..(62): Xaa is any amino acid
MRENAGRFKISEDEELRRLLIHGILHLDGMDHRTNGTAEPMLQLQEHILSELAGERILGRNV

SEQ ID NO: 84893 - protein, 323 aa, Unknown
  Obtained from environmental sample
  misc_feature (1)..(323): Xaa is any amino acid
LSAADLGEGQGGKKAPFPEIGEFIKSEKSGKSSKQKASGFFPEGLYVSVSRTEDLFIVQSSRPKRVMLSYSRKTAAYLLEENKPPLPFKPAEIILVLDPFFSQGAASGGEESLESEISHLAEKGYRQFVLNNPGHFSLFRNLQNRDKALFDKVHFIGGPWLYIFNAWSLSFVLSLGVDGFVSPLENNRQNLERTLEEVLQKTGRQEARAKQAPRALRSMTFIPVFAWPPLFRIRSDLGKVYDFNSFTDSRGENFSIITGPEGSQVYPAAPFSITDKIPFLKEAGFSRYIIDLSGPPLKKAFYRDLMRAETRDPFKAHTRPICH

SEQ ID NO: 84894 - protein, 81 aa, Unknown
  Obtained from environmental sample
  misc_feature (1)..(81): Xaa is any amino acid
MQAVEVLNITKKFPVYDDLPQNEQIKDGFFHALSDVSFSIENGECTIIAGANGSGKSVLMSIIAGLEEAFSGSVKTNLKLG

SEQ ID NO: 84895 - protein, 298 aa, Unknown
  Obtained from environmental sample
  DOMAIN (75)...(151): Helicase conserved C-terminal domain
  misc_feature (1)..(298): Xaa is any amino acid
MPTAVQKIVSTYLGEYETIRIAGKTATVEKIRQRYLSVRQEHKMEALTRVLEGEEFEGMLIFVRTKQATAEIAERLEARGFNAVPLSGDLAQSLRERTLNRLKDGKIDIVVATDVAARGLDVERITHVLNYDIPYDTESYVHRIGRTGRAGRDGNAILFVTPRETRLLAMIEKETRQKIEKMSLPTGEQISDKRVAKFKEDIIKTVQEQKGLDNFRNLVENIAMEQAIDIADIAAALAFMTQEEQPLFPKMEPLDAESRGTRDREARGHRSDRGDRGERERPRRERDRRRDGSFSDME

SEQ ID NO: 84896 - protein, 195 aa, Unknown
  Obtained from environmental sample
  DOMAIN (2)...(174): Glycosyl transferases group 1
  misc_feature (1)..(195): Xaa is any amino acid
NVPFQTNLLNVKEKKKIVIFIGNIKKHKGLNILLDAFLQCRKEGLNYELVIVGSHNKFRSGDRKTSKRLNMLEGQGITFSGYISDDEKWKLLTESALLVQPSLYEGFGYPPLEAMLLGTKVLISDITVFKDIYSDFPVIFFKSGNSKDLHDKLKGILSDKNQQSLNLSDTLILKYTFEKTASVILKELKSNRNIP

SEQ ID NO: 84897 - protein, 311 aa, Unknown
  Obtained from environmental sample
  DOMAIN (187)...(274): Type III restriction enzyme, res subunit
  misc_feature (1)..(311): Xaa is any amino acid
MAADPNKALIVQSDRTLLLDVHCETAQAARQAIMPFAELEKSPEHIHTYRITPLSLWNAASAGLTPQDVVKTLCEHSRYDIPAGITEGFALLMSRYGKIRMTEEKNEPNLLALRVDDEALRLEIGQIKALEKYIIKNNGKFLLELIHRGSVKRELIRAGWPVQDDAPLSKGEDLQITLRERCLSGRPFIPRDYQVTAARSVVGSGGPGSGYGVVVLPCGSGKTIVGMFIMSLLKTNTLILTTNVAAVHQWIEELLDKTELTREQIAEYTGDCKAVAPCNRRHLSDNRVETGQGRGFSPFQIIPREAVGACH

SEQ ID NO: 84898 - protein, 79 aa, Unknown
  Obtained from environmental sample
  misc_feature (1)..(79): Xaa is any amino acid
GFTDDQIGTRYELEKCGKYIFDKLKGKWQVKIHPKNIISEKFWLKIIDEYTKGNYKIIKNASEAICEGGALGHVILFEI

SEQ ID NO: 84899 - protein, 287 aa, Unknown
  Obtained from environmental sample
  misc_feature (1)..(287): Xaa is any amino acid
VNFQAGGETPAGPTDHVHTWGDWTVTVQPTCDALGAETRICTQDASHKETKTVPKLTGAVCNTWGSGSLPDTIPIPVTFYDFRSNRSNPEFEQPHGKPSGCTNNSTAASGACIRTGMVANTLDSDNKPTLGSTPYRNYGIQHWFRDWNTYTAGPYSKGKFRAPDYTPTPGIQQTVNDEWGVTVTYNGDKDTPGNDTSFINQVFKDSLEFTLQSASTGTYQFDRRGSNGFFPLDRKGFGNEWVVVDDARGNHNFAFTMEMEYPFTAKEGMSFSFSGDDDVWVFIDKQL

SEQ ID NO: 84900 - protein, 67 aa, Unknown
  Obtained from environmental sample
  misc_feature (1)..(67): Xaa is any amino acid
MKRGRRAYAVLEKAGYEEAAVKFENFREEHPDTELHLIGALQRNKAKLAVSLFDCIDCRTRESRAEF

SEQ ID NO: 84901 - protein, 202 aa, Unknown
  Obtained from environmental sample
  DOMAIN (3)...(190): Competence protein
  misc_feature (1)..(202): Xaa is any amino acid
AQFEPGSGYVSVGVLAVLGMLKRKALSLLCLAFLIQLLITPGAGLSLSFILSYLALAGILIIGEALNDIFKGKIPAALLLSLAASVGAFIATAGVTAWLFGILRPVGIIASLVLTPLTTVFMIGSMVWLGVNCALPPLSPLLSYPLSLLYRLMERTAFFAARTPGIKGQPWLVITLSLLSMAAILWFEYRRRLTANRMEPFA

SEQ ID NO: 84902 - protein, 93 aa, Unknown
  Obtained from environmental sample
  misc_feature (1)..(93): Xaa is any amino acid
MTMPAKTLKEVCGCIHLHSTFSDGGCDYGAIVDAAGAAGLDYVCITDHGNVGGRHAGFDGLRENGVFVLVGYEHNDEKNHNHYLAFGVEKPAE

SEQ ID NO: 84903 - protein, 313 aa, Unknown
  Obtained from environmental sample
  DOMAIN (122)...(194): HAMP domain
  misc_feature (1)..(313): Xaa is any amino acid
MSDWPREGSRAFLLDSDFSFLYAPGKEATSVDPRGKKLVDFPFLDKSGRHNFYDEMIAAAHKDGVFWGEMIGPFSGRPAFISFHTISFDNIVSDLEVKPLYLLMGTEIEILYSDANKHLHMILLITAVFIIIIGLVIYVNINSIAKPIKKLTDDVFKISNGDFSVSFEAVAEGDNSEIAVLNRSLAKMVGLLTGSLREVEQRVESRTHELSLMTQKAEEAKERAEEASKVKSQFLANMSHEIRTPMNAIIGMATMGKTAKDASRKDYCLKKIQDASKHLLGVINDILDISKIEAKQFNLAYAEFNFEKTLQNV

SEQ ID NO: 84904 - protein, 240 aa, Unknown
  Obtained from environmental sample
  misc_feature (1)..(240): Xaa is any amino acid
MAKLGIIEISENDRAYLESLVRTRTMQAQIVQRARILILRTEGIPIDTIADRVGVNRKSVMLCISKYQSGGVDNALYDAPGRGRNPEITDDEKTWIINIACQRPYDLGRAEETWTYTGLASYINKNAEAQGYTRLSTVSRSGIRDILERAQIKPHKIRYYCDKRDPAFETKMHDVLVAYKQVEMQFDGQGRILPCEGQKIIPYHMMKSPAYRQSPIRRLTGCRQRQTGTGSANTNMEGWP

SEQ ID NO: 84905 - protein, 120 aa, Unknown
  Obtained from environmental sample
  misc_feature (1)..(120): Xaa is any amino acid
MDFLKRLESERLIFDGAMGSLLEDTLAPGEFPELLNIKNPEKILSIHKAYRNAGCQILKTNSFGANRLKLSDSGFSVNKIVSEAVALAKKAGGEGAFVALDIGPTGKLLSPFGDLDFEEA

SEQ ID NO: 84906 - protein, 411 aa, Unknown
  Obtained from environmental sample
  DOMAIN (1)...(101): NAD binding domain of 6-phosphogluconate dehydrogenase
  misc_feature (1)..(411): Xaa is any amino acid
VDGGGGRDTIEQLLEVLEKGDIIIDGGNSNYQDTIRRTAYVESKGLLYIGTGVSGGEEGALKGPSIMPGGSTAAWNLVKPIFQAIAAKVETGEPCCDWIGENGAGHFVKMVHNGIEYGDMQLICETYDIMKNVLGLSCDEMGNIFDEWNRGSLSSYLIEITRDILRYKDTDGRPLVEKILDTAGQKGTGKWTGIAALDFGVPLTLIGEAVFSRCLSAVKDERARASRVFSKPKPTAVADKAAFVKDLEKALYAAKVVSYAQGYLLMREAAKEYKWNLNYGGIALMWRGGCIIRSVFLGKIKEAFDKNPGLDNLLMDPFFTKILEDAQDSWRRVVSTAIQSGITTPAFNSALAYFDGYRSETLPANLLQAQRDYFGAHTYERVDKHAGESSTPLDRTWRYTSASPYVGNRYE

SEQ ID NO: 84907 - protein, 98 aa, Unknown
  Obtained from environmental sample
  misc_feature (1)..(98): Xaa is any amino acid
MAKANKGGYSIHVSNAGKENENGSACKKLNLALRWLVREGPVDLGLWKKIKPSALYIPLDVHVARTARKMGLLKRKSNDKKSVIMLTENYASFVRKTL

SEQ ID NO: 84908 - protein, 68 aa, Unknown
  Obtained from environmental sample
  DOMAIN (2)...(68): Hsp20/alpha crystallin family
  misc_feature (1)..(68): Xaa is any amino acid
MKIEGERKEERSNGKYHLTERTYGRFYRSFALPDDVDAEKIEAKVSNGVLEISLPKNQKALPVEIKIK

SEQ ID NO: 84909 - protein, 260 aa, Unknown
  Obtained from environmental sample
  DOMAIN (125)...(260): Transketolase, pyridine binding domain
  misc_feature (1)..(260): Xaa is any amino acid
MKTNYQTFRRNFDALAKKIPFVGEAFFNLVLRLKRAVKAVFYTDNFFVDLGFEYVGPIGGHNIQVLTEVFEDVRKINRPVVIHVITRKGKGYGYAEDDPDSYHGVGSFPVDSGIDNCPVNIHADKRLNFTKAFSRALFAAAQRDKNVAAVTAAMKTGTGLSNFAKTFNGRFFDVGIAEEHAVTFAAGLAAQGLKPVVAIYSTFIQRSVDQIIHDAALQKLPVIFALDRSGFVEADGETHQGLFDISLFRSVPDMTILSPA

SEQ ID NO: 84910 - protein, 469 aa, Unknown
  Obtained from environmental sample
  misc_feature (1)..(469): Xaa is any amino acid
AKQCYQHWNAVLKIASTFQRTIQGTITEANPAANAFPGDLSDKYLAANGGPGTYTTTAPVGSSSVWTKVQTFTSIADMATWLSAQPANTAATPYAVKLIVSDVGNVHADGSAGYALKANPTKYVNLDLSDSTITSFADSAFGACASLTSVTIPNTVTSIGNDPFSYCRNLIAINVDAANAAYIAENGVLYNKAKTTLVAYPAGKTGATFAIPNSVTSIGNYAFYSCTSLASVTIPNSVTSIGNNAFSACTSLTSLTIPNSVTSIGREAFYRTSLTSITIPNSVTSIGDWAFVYCTSLTSVTFQGTITQDKFSGYAFDGDLRDKFYSVAPNGTPGTYRISNPGDVVWWNINGKIETNIYEPVINEDSELILEMWYKDDLPLLYDRLNTLKLQGLDPGDAVRFLMIAHYAGAQTPNGGNHFIGPEPFAKMGVNMDGILALRYAVNGSGAFASSETIHAFILMDPAFPGSYR

SEQ ID NO: 84911 - protein, 317 aa, Unknown
  Obtained from environmental sample
  DOMAIN (162)...(317): Domain of unknown function (DUF323)
  misc_feature (1)..(317): Xaa is any amino acid
MSGGKISGTKASSSFSGGVAVGGVAHASGGNAIFTISGGEISGNEANNGGGVYIDSGTFEMKGGDIMNNTASERGGGVYIDSGNFKMSGGTIYGNDDTAKTNMVTGSATTKGMALYKASATIGTAKYDGDYGGGKYAADNIIPTSENTIPPLKAGDILISDIGIKMVWIPAGTFMMGSPETESGRVTDAVETQHEVTLTKSFYMGMYEVTQKQWVDVMGDGENRATTDYAKGDNYPIYYVNWYDALVFCNKLSMAESLTPVYSINGSTDPAVWGGIPTESYNETAWKAVEMDRSKNGYRLPTEAEWEYACRADTSAI

SEQ ID NO: 84912 - protein, 90 aa, Unknown
  Obtained from environmental sample
  misc_feature (1)..(90): Xaa is any amino acid
MPRLTPQEQQEIIRFIEADKPLPDKYRFLLFDDKREVELVWNGKTGEVCNVVLPFQTIEHVDEPRAEKPGSLQLSLVDVESRRRQLKGWT

SEQ ID NO: 84913 - protein, 141 aa, Unknown
  Obtained from environmental sample
  misc_feature (1)..(141): Xaa is any amino acid
MVRLAEPLRAGTAAIGVETVYARSLTFINNKVLAIAGENRSGGAVRLIEIDPRSLEMVNQGNDDLHPGSLIWVNSGDMYIITANGDNTFNLGRFSADLTLQAKSKINVHPNATVTVQQGLALTQRADGSLVILDPKDLTEK

SEQ ID NO: 84914 - protein, 259 aa, Unknown
  Obtained from environmental sample
  misc_feature (1)..(259): Xaa is any amino acid
GAPGFRHIPGQTRGAHGGVGAGQSARYPPVVEEIILECRKHHITRVDILGFEFEMGLFPNVLDEARAKGIDIAPKNIPREVFDKRAVEKNQVVFHDVAFIEVKPHYRKNSLAVKLTDFSVFYSQDSAAAAEASLKDKSSKIVVEQGQIIKISKDKNGIVARERLTKHWTDWIDYWSVDFDFESKREIIRVKNPDTGEIEEQWTGDFIFENDWQSFRTKKDRTLELTSVFQEMPCGRRKVAVKVVDIFGNDTMTLIEVRI

SEQ ID NO: 84915 - protein, 165 aa, Unknown
  Obtained from environmental sample
  misc_feature (1)..(165): Xaa is any amino acid
MSALDDLIRQVADDALRERLHREASRLGESKKFGLVFEDHIPECTPLYEVPIREGAYVAEKGVEIHDTYMVDRIHDGIVECHHKETREPAEFLVGDVVNVAHFGEAIFPHLVSAEKVENAPDSDLWHALIEADNYHALQLLGYLYPEKVDCVYIDPPYTTGRQGL

SEQ ID NO: 84916 - protein, 275 aa, Unknown
  Obtained from environmental sample
  misc_feature (1)..(275): Xaa is any amino acid
DDERLALLYKLRRKYCEAASDNAVSVEDAILAYRATAEAEIEALSNIEENRENLKAAMRALEKDVASRAAVLRQKRTAAAGTLGQRITGILKRLGMPNARFSPSITAKTQQGQDGRSTVVCGPWGAEEVEFLISANTGEPLKDLSRIASGGELSRVMLAIKSVLSATDSVETLIFDEIDAGIGGEVALAVGEYLEKMGESRQIFCVTHLASIAVRAGNHFKVEKRTEDGRTFTGVGPLSADGRRREIARMLSGDGGGAALAHADDLIARYGKAGG

SEQ ID NO: 84917 - protein, 291 aa, Unknown
  Obtained from environmental sample
  DOMAIN (50)...(235): Mur ligase middle domain
  misc_feature (1)..(291): Xaa is any amino acid
MAAQSRLEAFNLVELAKKWKKTLVVVEDTLRGLQNAARIYLEKFPGLLKIAITGSSGKTTTKEIAAAIIGQEKKVVMNSGNLNSETGLPLSVFKVSQEHEIGIFEAGMNRRGEIAELAEVLKPHIALITNIGTAHIGILGSKEAIAEEKKAIFSRFIGKEKALIPLYEEEKYRNFLSQGVAGECVFYGPQSFTELGGLRDLGLGGTEITWSGKTVRFPLPGNFNLRNAFSALAIAREIPVSDEGIRKGLESVKPLFGRGEIFNGKITFIRTVIFQSREPKAGLDFCASVDW

SEQ ID NO: 84918 - protein, 360 aa, Unknown
  Obtained from environmental sample
  DOMAIN (62)...(360): Glycosyl hydrolases family 2, TIM barrel domain
  misc_feature (1)..(360): Xaa is any amino acid
MGIPELGICHDIAVKNGKGEAEISVKPELWSPENPKLYDVIFSYNAGSYVDSTRDRIGFTTISVKGQEIFLNGKKIFLSGVCVHEDHFATGKTTSEEIIRATIRDLKDMNGIYFRLAHYPHDARFARIADEEGVLLWEEIPVYWAIAFDNPETYNDAENQLAELILRDRNRASVIIWSIGNENADTDPRLEFMSRLAKKAKMLDSSRLVSAACLIKHEKLKIEDRLADYLDIIGINEYYGWYDPDFEKLPKILTNSNPGKPVLICEFGGDARLGQRGTTDELWTEDKQKRIYEQQVETFKKCPYIAGTTPWILYDFRCPRRLNRNQEGFNRERGNRTPTGKTRKTGFFTLWKEFLLQVFI

SEQ ID NO: 84919 - protein, 74 aa, Unknown
  Obtained from environmental sample
  misc_feature (1)..(74): Xaa is any amino acid
KAIVYLEPKNTRTPWLGTKAIYRTRMAIADGGELLILASALERFGEDMGMDALIRKHGYRPGKEIIAKTKADSE

SEQ ID NO: 84920 - protein, 216 aa, Unknown
  Obtained from environmental sample
  DOMAIN (14)...(210): Glycoprotease family
  misc_feature (1)..(216): Xaa is any amino acid
RFGGGADREDFTAKYRRNRHSELVMDLIDNLMKKAELSPKDLNGILCMGGPGSFTGLRIGYSTAKGLALSLSIPFAPVPTLECLVYDERFKQGVTLSVIDARKNAWFNAFFKDGRRVTEDKDSNLSLITDDIKRYVKDGQITLTGYGSQTLYESLPEDLKAGITVSFENKGFAEKLIRIAEDKNLFSGGCEANLYSGPEYIRKTDAEIALASAQSP

SEQ ID NO: 84921 - protein, 173 aa, Unknown
  Obtained from environmental sample
  DOMAIN (1)...(171): Cys/Met metabolism PLP-dependent enzyme
  misc_feature (1)..(173): Xaa is any amino acid
MLVVKDSALAEKLRFLAKTTGGCLSPFDSFLIIRGIKTLAVRMERQQETAGKIARWLLEQSAVKKVYYPGLKEHPEYEISCRQTSGFGGMISFSVNSGQAAKKILESVKVIQYAESLGGVESLITYPMLQTHADLPESERIARGIDDCLLRLSVGLEATEDLIEDLKQAIGDC

SEQ ID NO: 84922 - protein, 375 aa, Unknown
  Obtained from environmental sample
  misc_feature (1)..(375): Xaa is any amino acid
FEAVFSRTVIVTGNPRLKLSFIIQGNTDPVPDAYADYVSTGLVGNTLRFRYKVKKGDYSERLHTCFNPIDLNGATLKSEPKNDVTNDAKIDFDKATFETDLTIGSLQNQFKDSSGILSIQLDGVQPHITGASFTQLTGSIGGNSYFNNGKTVTLKLQVSEPVQVSGTPAAYIGYGSARASASFSSVKGQTIEFTWLVNANNVPMTQLSWVDNGIKTSGGMDMTLDTTDKITDAAGNLLDLKSFTLGETNLTGSYTNERAYIITTTPPVPTFTIHSSPDTDTGPLAGDPVLANMQRYIRVNGISGHTLYHSFTGGTVPINYTSGNTVDKRLEDKNAANKDNSSYSPSEYAVTAWQVDEAGTAQTRADAQCIINRAR

SEQ ID NO: 84923 - protein, 95 aa, Unknown
  Obtained from environmental sample
  misc_feature (1)..(95): Xaa is any amino acid
LEGMELYNIDKLFEAVSAKGHVCVGLDTAVEYVPSAERKRAASDAEAVLAFNLALVDATFDTCACYKVQIAYYEEMGLEGLGCTRRLCVHLGHQS

SEQ ID NO: 84924 - protein, 116 aa, Unknown
  Obtained from environmental sample
  DOMAIN (1)...(110): Aspartate/ornithine carbamoyltransferase, Asp/Orn binding domain
  misc_feature (1)..(116): Xaa is any amino acid
GFFIDQIGREHNIEFTETGNLEEAMSLLDVLYMTRVQKERFFNEEDYIRLKDTYVLNKERMALGKRALIILHPLPRVNEISVEVDDDPRAAYFKQAKYGMYVRMALLASLLGVENA

SEQ ID NO: 84925 - protein, 482 aa, Unknown
  Obtained from environmental sample
  misc_feature (1)..(482): Xaa is any amino acid
MSDRVIWDRLIRESPVYSNDMIRVGYNSEADLHVGGNDININENTLLRLRYNKETGEFQIELTSGNIGLVTNPKGNEVALNIMGRQVKAKPGTALNAAAGGNGMALQVSEGTAVIAEENENRELGAGAAVAMDLGGSIRSAPSVFVIQPKPNALYRKSTSEPLNVAFLWNRINLRLDETLRLEIAEDQSFSRSVRALDGLNDSAQTALNAGLWNWRLTYNGGAQRAILASGRFTITDADELELLSPAKNRQFFAESGTPKLYFQWSQIDDVSHYIAEVDITPEFRNPVIKKQITDTSFSDSSLGEGIWYWRVTPVFSQTNEGDSNTYGVTYSRTSSFRIVKNEEPQTPAPVRSSQSKSVTLESPSNNAILPGLTALRQQTVFRWSSDEAVAKSRFVLSRNSNPLSGQAVIEIPDPNRTLRIDRLDEGVWYWTVEAQTPEGVNITAQTPRLLRVLPIPLLPAPAGRQPAEGYRLGRSDQRAIK

SEQ ID NO: 84926 - protein, 326 aa, Unknown
  Obtained from environmental sample
  DOMAIN (33)...(223): ABC transporter
  misc_feature (1)..(326): Xaa is any amino acid
MSNQVITVQNLTKRYKGAQKAAVDDISFSVGKGEFFAFLGANGAGKTTTISILTTTLSKTSGEVKIGGFDIEKEARKVREKIGIIFQHPSLDPQLTAEQNIRFHACLYGMCGYRPSFKLMPSAYRKRVMELAEIVGIQDALFKPIKKLSGGMQRKLEIIRSLIHTPDVLFLDEPTQGLDAVSRRGLWEYINETRSRYGTTIFLTTHYIDEAENVDTVCLINNGKIASCCSPQELKRNLMKQELILDADDRVALINELSSLGLPFKLNGRVVVPYKDSAQEIISRIKTKLTVLKINEPSLEDAYIDFLTKPKDRRGRANLGHLIMAA

SEQ ID NO: 84927 - protein, 296 aa, Unknown
  Obtained from environmental sample
  DOMAIN (1)...(283): CO dehydrogenase/acetyl-CoA synthase complex beta subunit
  misc_feature (1)..(296): Xaa is any amino acid
MGQRDIVWTRVSKGGFAKGLRLRHYGEIIHARFLSDYPAIVDKVRVTLITDQAEVEKRLEIARKVYDERNRRLEAMTDESVETFYSCLLCQSFAPNHVCVITPERLGLCGAYNWLDGKAAYEIDETGPNQPLKKGECLDPVKGIWSGVNEYVYTNSHKAIDSFCAYSIMDRPMTSCGCFEAICAYVPECNGVMIVNREYLGETPIGMTFSTLAGSVGGGNQTPGFFGCGKVFLSSRKFLSAEGGFARIVWMPKELKDLLHDDLLKRFDEKRFNRALLTKSPIDHRRTGEDGARPSI

SEQ ID NO: 84928 - protein, 340 aa, Unknown
  Obtained from environmental sample
  misc_feature (1)..(340): Xaa is any amino acid
MNEDSLPLEALKFLQKAEIQSIVEECLPLLKDPLKLSAKLSKKYNQQERRALIHYLEILPKIRKKFCLQNVDLICDRLAFEQATARDISEYKARMWQSGARIADLCCGMGGDSFWLPSGIVANGADIAPERVLMFNENMERLKLPHRAVLQNALEVKGGDFFCIDPARREGLNPSFESVLELSKKFCGGMVKLPPAYPEDELPKESDILYLGDAKDCRECLMLTGVFGKGFIRAAAICEGEIFEWQCEKDELKDINLDIKKLGNFILEPIPVLVRSHLFLSEAKKLGFWQIDSTLAYLSCKELPHKHNGFAAYKVIEQSSLSTNNVKAMLKTRPNLSSGT

SEQ ID NO: 84929 - protein, 428 aa, Unknown
  Obtained from environmental sample
  DOMAIN (115)...(384): Methyl-accepting chemotaxis protein (MCP) signaling domain
  misc_feature (1)..(428): Xaa is any amino acid
MIAATETYIMREVREMGRFTIILAAIALIAAVVFIYFSLSTITKPIVRVAETLKDISEGEGDLTRTIAVHSKDEVGDLALYFNETLGKIKGLVLLIKKQAGVLSEIGADLSSNMTETAAAVNEITANIQGIKSRVINQSASVTETNATMEQVIANINKLNGLVENQADTISKRSAFIQAMVNNINSVNQTLLKNLENVQTLKEASEVGRVGLQDVAHDIQEISRDSEGLLEINSVMENIASQTNLLSMNAAIEAAHAGESGKGFAVVADEIRKLAENSGEQSKTIGTVLKKIAESIKKITSSTENVLKRFEAIDSGVKTVAEQEEIIRHAMEEQAEGSHQLLQGTSNLNGITQQVKAGSEEMLEGSKEVMKESRNLEKVTQEITGGMNEMASGAEQVNIAVNNVNGISARNREGIDTLIREVSRFKVE

SEQ ID NO: 84930 - protein, 186 aa, Unknown
  Obtained from environmental sample
  DOMAIN (5)...(67): DnaJ domain
  misc_feature (1)..(186): Xaa is any amino acid
MAKRDYYEVLGVQKNASNEEIKKAYRKLALQYHPDRNPGNKEAEEKFKEATEAYDVLADQKKKAAYDQFGFAGVDNMGGQTHDWSNFRGMEDIFGSNDLGSFFESILGGLGGFGSFGGGFRRSGGQNEVRQGADLRYDLDIQFKDAAFGTKKKSSFYITDLVRAGRAPGAPKVRKGKTALLGKVRA

SEQ ID NO: 84931 - protein, 176 aa, Unknown
  Obtained from environmental sample
  DOMAIN (58)...(172): Transposase DDE domain
  misc_feature (1)..(176): Xaa is any amino acid
ERLYPYGHHKYRTGSKKFNPVVRERAQSADLFKAVFLGLLSQAQAQLGSHRFRFKNPLYSIDSTTIDLCLKLFPWADFRKGKAGIKLTVKLDHQGKIPCFVVESNAREHDAKKAREVPYEAGDVLVFDRGYADYGYFASICEKKAYFVTRLKKNAVYRRVKKNPLRKAGMSYPTMK

SEQ ID NO: 84932 - protein, 96 aa, Unknown
  Obtained from environmental sample
  misc_feature (1)..(96): Xaa is any amino acid
MPENNIKEQIKLSVITVNLNNACGLKETAQSISRLTYKYHEWLIIDGASNDDSLQVIKGFNHLITKLVSEPDNGIYNAMNKGVRWLPEIGHQSFFF

SEQ ID NO: 84933 - protein, 84 aa, Unknown
  Obtained from environmental sample
  misc_feature (1)..(84): Xaa is any amino acid
VEKGVGFFSGVPDSLLKDFCAYITDHVEKQNHIIAVNEGAAIGLACGYHLATGRIPLVYMQNSGIGNAVKSPALPCDGEVTAYL

SEQ ID NO: 84934 - protein, 267 aa, Unknown
  Obtained from environmental sample
  DOMAIN (1)...(267): tRNA synthetases class I (I, L, M and V)
  misc_feature (1)..(267): Xaa is any amino acid
GYRGFSRSPLCTGLPHFGHFVPNTIKDIIPRYQAMKGKKVERRFGWDCHGLPVENLIEKDLGLNSKTEIEQYGIAKFNEACRASVLRYVQEWRNTITRLGRWVDFDNDYKTMEPHYMETIWWVMKSLHEKGLLYEGHYILPYCPRCATVLSNHELNLGGYRDVHDPAITVKFKVKGNKEQGTGNGEWGVGSGDVYFLAWTTTPWTLPSNLALVLGPDIDYVLVEARTQNLDPRPLNPLPTPHFPIPTRHFPIPTPKYFILAKERLPA

SEQ ID NO: 84935 - protein, 261 aa, Unknown
  Obtained from environmental sample
  misc_feature (1)..(261): Xaa is any amino acid
MKKRLIFTFIVIASVLLFLAASPWEGSAAIAPNGDLPATGYYIATNAYPRNTVVDITNLETGKSTRVIVSNILTSPGLLAVVSRQAGELIGMRAGSVSRLRMIQPTDPMAYMRFTQSMKDGNPEYDSGNVITEDNLVAQVYKDDTYRPPEAVKAPEEPKSPLLPGYIVDEPEWGGEGRLQIVDVPGYLPESSAKLASAYEPELLEREKDVAPKIDERPPVEVVKEVPEYDPDRVWGTTEVPPKEIVKDVSPFEERTEVART

SEQ ID NO: 84936 - protein, 316 aa, Unknown
  Obtained from environmental sample
  misc_feature (1)..(316): Xaa is any amino acid
VANKSGLESVEKFTVLKDTTPPQAQVIMPIAEAPVNGTIRMAFAVEEMSAVQTIFYQRNVTTPAVAATPGRPATPASTTSSVKEVFNANNWEKDYAPRFFEVLMDSLEMPLDANMRFTFTDKAGNSSEVNSWLFVIDQEMDVPIVQIVLPLENEVITNDFIVSGVMFDDDGVKNYQWRIDNNPWQTEDAEYGFSIPVALSTLTDNEHTIAVAAEDIYGVKSQPVTRVFRVSLNEPTATMTYPLYDTVLKEGIEIKGTASDKNGIREVGASVDNGNSFNIVKGNYGTATGTIDWSYQFNTPILKDGPHVEFIRVYDR

SEQ ID NO: 84937 - protein, 491 aa, Unknown
  Obtained from environmental sample
  DOMAIN (302)...(491): Glutamine amidotransferase class-I
  misc_feature (1)..(491): Xaa is any amino acid
METKYIFVTGGVVSGLGKGITAASLGRLLKQRGLKVAAQKLDPYMNIDPGTMSPFQHGEVFVTDDGAETDLDLGHYERFIDENLTKFSNLTSGKVYWKVLERERAGGYLGGTVQVIPHVTEVIKEFIYAGAKGTGADVLITEIGGTTGDIESQPFLEAIRQISLENPRQNCLFIHVTLVPYLKGSGEHKSKPTQHSVKELRAMGISPDVIITRADEPVSRNIKDKIALFCNVKPDCVIENITLSTLYEAPLMLHRNGLDGVVCRGLSLDVPEPDLAEWQSMADRIGSRERAVNIAIVGKYIKLRDAYLSIIESLNHAGFETAANVHIHWIDSENLIGQNVADALSVVDGMIIPGGFGDRGIEGKIAACRYARENDIPYLGICLGMQVAVIEYARGVCGLDGANSSEFDELSPHPVIDFMSGQTGKMGSGGTMRLGAYPCKVAPGSLLSRLYGEGEISERHRHRFEVNDGYREVLRQNGWRLRTRRHSQPPQ

SEQ ID NO: 84938 - protein, 405 aa, Unknown
  Obtained from environmental sample
  misc_feature (1)..(405): Xaa is any amino acid
MLGSSRGVNSPSNLQGIWNDSNNPPWGSDIHPNINVQMNYWPAEVTNLSECHLPFLNWIAIESMRTGGNWQNAARKNRGPGWVVFTAATIFGWTGEMEFSLVNNAWLCMHLWQHYAYSLDRDFLQNTAYPSMKSACEFWLARLKLGSDGKWEAPNGWSPEQGDFLTENVQNGVPYEQQLIWQLFNETLKAIDILGGDTAFRTELQDKFNKLDKGLKVEDGSRTGVGYASGLLSEYKYAGARLEQGHRHISHLVGLFPGDLITPDRTPYFEAARKSAADRGDGGTGWSRAWKINFWARLLDGAHARTMLKSALTYTVSGSGIFENLLDSHYPFQIDGNFGATSGVAEMLIQSHRGFIEVLPALPSQWSSGSFKGLKAQGNFTVDLEWAGSRPTSCKVIASRDNPPQ

SEQ ID NO: 84939 - protein, 323 aa, Unknown
  Obtained from environmental sample
  DOMAIN (1)...(320): AMP-binding enzyme
  misc_feature (1)..(323): Xaa is any amino acid
LCLFTATHFEKLGITPEDVASLDDLRRLPFTTKQDLRDHYPYDLLAVPLESIVRIHASSGTTGKVVVAGYTRRDVDTWSEVMARSLCSAGVSAQDIVHVSYGYGLFTGGLGAHYGAELLGATVVPASGGATKRQVQLIRDFRATAMCCTPSYALHVHDTGMELGVDIAQLPLRVGVFGAEPWTESMRADIEKKLGIDALNIYGLTEIIGPGVAMECLDAKEGMHIQEDFFLPEIINPVTCEPLPPGEVGELVITTLTKEGMPLLRYRTRDMTSLDYTPCRCGRTFARITRIRGRSDDMLIIRGVNVFPQQIESLLLECEARPS

SEQ ID NO: 84940 - protein, 290 aa, Unknown
  Obtained from environmental sample
  misc_feature (1)..(290): Xaa is any amino acid
MPVADVALGNSEENPGYSLEVQTPGHEPEQLVFSFKKVVYDPNALFSEVPASFNPIKAGLDEEKPVFVAYMAGRFISEKDSVLTNNIYSPTAHSAFEKTFTRTIDYAATVSWFNHVDAGEARAMRDLGLKTELPELKALREALSKALLGQYERPSMRGDPPELIIYKKGTKLAYKVSQLSDGYRAMLALVMDLARRMAQAHNDDGRPGESPLQHPAIVLIDEVELHLHPSWQQTVLPTLMGIFPNTQFIVTTHSPQVLTSIPDQQIRILSDGKAYSVTGQTRGAKASRLL

SEQ ID NO: 84941 - protein, 158 aa, Unknown
  Obtained from environmental sample
  misc_feature (1)..(158): Xaa is any amino acid
MDINKNYLNLKDSYLFSIIAKKVKDYAAANPDKKIIRLGIGDVTLPLVPTVTNAMQQAVLEMGDAKTFRGYGEEQGYSFLRQAICKYYGKKNVALNEDEVFISDGAKSDLGNILDIFSNDNTVLIPDPVYPVYVDTNIMGGQEYSVYGRKLRKRFFAH

SEQ ID NO: 84942 - protein, 251 aa, Unknown
  Obtained from environmental sample
  DOMAIN (1)...(47): Sigma-70, region 4
  misc_feature (1)..(251): Xaa is any amino acid
MLENLSPREREVFDLLLEGLSQKEIANKLNISHSTLDFHRTNLYRKLGVHSIKELFAKYSTNGKAAPSELEAVLPAPGTKKHKKLRLLLPTGIALGIIILAFSALFIGKFVIKPFRKPKGEIIPAHNLGFYPHADSNDWKGESTTEVFISSEEIDGVEINSVLNIKTNLVKLENSDIIYATAITQKHDVIQRLRQANGIRFKARGDGKTWSVDFHTIESTVERIMLVIRIHSETSVIKLWLLMFRIQNNYA

SEQ ID NO: 84943 - protein, 164 aa, Unknown
  Obtained from environmental sample
  misc_feature (1)..(164): Xaa is any amino acid
GFIAENFTEGQGEQKDSGGRHQERGSGKVHAQVMLPNEEGRKLTGKQLLAVLDEACGKGTIVISDDLSSYKILDKKTAKNFAHLTVNHSMGQYSAGNGVDTNGIENFWSILKRMHYGTYHSMSEKHLQNYVNKCAFRANHRGDAGEFEKLLKQTLIAGMDKRAA

SEQ ID NO: 84944 - protein, 205 aa, Unknown
  Obtained from environmental sample
  DOMAIN (9)...(205): Iron-containing alcohol dehydrogenase
  misc_feature (1)..(205): Xaa is any amino acid
MENFSYLNPVKIIFGKQTIAQLANEIPANAKVLMTYGGGSIKKNGVYDQVKAALAGVSCLEFGGIEPNPHYETCMKAVELIRKEKINFLLAVGGGSVADATKLIAAAVNFNGDAWDILAKHAPVTSALPIGVVLTLPATGSEMNGNSVITKAATQEKFSFASPLVYPKFSILDPETPTRCRRAKLANGIVDAFVHVCRAVHESSC

SEQ ID NO: 84945 - protein, 395 aa, Unknown
  Obtained from environmental sample
  DOMAIN (6)...(114): Histidine kinase-, DNA gyrase B-, and HSP90-like ATPase
  misc_feature (1)..(395): Xaa is any amino acid
ESYSAGDSNLLGNAVKFTPEHGAISLTVRLTEKVNDICTLQISVTDTGIGITPEQQKRLFQSFEQAESSTTRKYGGTGLGLAISKNIVEMMGGSIWIQSEPGKGSTFTFTIQLERGKEEKQKRLLDVSLKDIRILAVDDDPDILTYFLEIAQGFGLFCDTAISGEKALELVDQKNDYHIYFIDWRMPVMDGVQLAREIKERKSENSIVTMISAAEWGAVAKEAKAAGVDKFLSKPLFPSTIAEVINECLGVQKQKTEETLEVDINGMFAGRRILLAEDVEINREIVQALLEPTQLEIDFAENGVKAVSMFTENPRKYDMIFMDIQMPEMDGYEATRRIRAIEAELERSEGVPIIAMTANVFKEDIERCLASGMNDHVGKPLDIEELMNRLRLYLG

SEQ ID NO: 84946 - protein, 280 aa, Unknown
  Obtained from environmental sample
  DOMAIN (147)...(280): ATPase family associated with various cellular activities (AAA)
  misc_feature (1)..(280): Xaa is any amino acid
GGGGGDDRRVAIPLLAVQFNDQGSDAGDPLTRAESYFYKPTVEHYVRFCEEFYQSHKKRDYYIEYGKVPLTIPCDNWVDLLAPYIMDGSGNKGTPIDRYKDISVNTFDRGEFLSEYVNHIPSLPPELVMDKELKPIANAIKSGDCIAFLQHGVSGTGKTINCKLICQAIGLPIMETINCSENLDEFVLGKFIPGKGGIEFTESYVTKAIRHGGAVVFEEINFAKPQYLAFLNSLLDDNGFVRLDNNEVVRRHKTFRFFATLNSVTTAQRSLIRRCTIGFR

SEQ ID NO: 84947 - protein, 554 aa, Unknown
  Obtained from environmental sample
  DOMAIN (74)...(144): HAMP domain
  misc_feature (1)..(554): Xaa is any amino acid
ANDQIGRAETINDYFGEAGASILKSAAQSGKVPQTFFLGNSEYVVGSIESLDWHITAILPITALDTLNNGVTIFFMVMLAVIAVILIISFIFISSLLKPMRYMIQTLDQIAKNRDLTRRLKFKHHDEIGTVGDFFNRTFEEFRILVGTIKYKINGLNHTSFELSDNMSKTSTAVEKISSNLDNMENLVVKQENGALVAGEAVGAIKTNIDSLNKMIEQQAESVDQSSSAIEEMTANIHSVTQTLAENSKNVGSLTEASENGKTGLQLVAQEIREIAHDSEGLLEINSLMNTIASQTNLLAMNAAIEAAHAGEAGKGFAVVADEIRKLAESSGQQSKTTATMLKKIKASIDNITQSSDEVLARFGAIDSGVKTVSEHEQNILNAMEEQETGGKQILDSISRLRDITASVKKGSLDMAESGKTLVKETDKFISTSEKAVGGMNEILKGVNQINVSVSHVNDMSQENNRNFESLKQETEKFNITVGNEKQKLLVVDDDAIFLNMVEQTLENDFDVITAKSGKEALGFFYQALVPLINFLDFNMPDMDGWNTYSRIKR

SEQ ID NO: 84948 - protein, 79 aa, Unknown
  Obtained from environmental sample
  misc_feature (1)..(79): Xaa is any amino acid
LARDMVNQLANAVNDTAAEAYIKEQAEKAAVKLGDLMMPLRVAITGSRISPPLFGSLKILGAQESMARVDKALQHLNLN

SEQ ID NO: 84949 - protein, 277 aa, Unknown
  Obtained from environmental sample
  misc_feature (1)..(277): Xaa is any amino acid
MKIIPASLAGILPAELENILIPLPKMRSSQIYKWIIRGVTNFDQMTDLPSALREELKKRFKLYSSYVDSRHEDKSSEKIVIALKDGLKIESVLLKDGKSRFTACLSTQAGCPAGCVFCKTGSFGFSRNLTAAEIAEQFLFLRMYTARKNKFTTEYAELHGGKDAFCTKTPCNSVSSVVNPSETSDKNGHGIDNIVIMGMGEPLLNLEELRKAIAFFTDPAGINFSKRRITISTCGICAGLFDLANNGPYIRLALSLVTADEELRRQLMPIAAAHPLK

SEQ ID NO: 84950 - protein, 302 aa, Unknown
  Obtained from environmental sample
  misc_feature (1)..(302): Xaa is any amino acid
VGNGTAGRESDEFVRTALKGLPDEERPLCVTVSEAGASVYSASDAAIKEFPDLDVTVRGAVSIARRLQDPLSELVKIDPKSIGVGQYQHDVNQTRLKESLDEVVESCVNRVGVDVNLASEELLKYVSGLNRLTAAGIVDYRNRHGAFQSRADLKKVVGLGDKKFQMSAGFLRIPGARNPLDNSAVHPESYGIVKKMAERLNVDIGGLIGNTTLLKSINKNEFVTKDAGLPTITDIVEELEKPGRDPREEFKYAKFDDHVTEIEHLREGMILEGVVTNVAHFRAFVDIGVHPDGLVTYRTVEH

SEQ ID NO: 84951 - protein, 337 aa, Unknown
  Obtained from environmental sample
  DOMAIN (46)...(336): Sodium:alanine symporter family
  misc_feature (1)..(337): Xaa is any amino acid
MEKFGHIIDMIDGWIWGPPLLILLIGTHIYLTFRTGFIQRKLGLGLKLTLARDRGSAGDIAQFGALATALSSTIGTGNIIGVGTAIASGGPGALLWMWLTGVFGIATKYSESLIAVKYRVKNSNGMIIGGAMFALERGLKMKWLGVIFAFLTAVTAFGIGCAVQSGSVAEQVKMAFGITPWVSGLIIAALTALVIIGGLKWIARAAESIVPFMSIIYIVGCIAILIINHKFIIPAIQLVCANAFNLRSVGGGFLGFAAVKMMTAARYGIARGLFSNESGMGSAPIVAAAAQTKTLSGRPWFQHGDFLGSVGICLMTGLVIISSRPAHPDLQIANRVS

SEQ ID NO: 84952 - protein, 163 aa, Unknown
  Obtained from environmental sample
  DOMAIN (14)...(128): MGS-like domain
  misc_feature (1)..(163): Xaa is any amino acid
MKRRALISVFYKDGVLELASYLNDSGWEILSTGGTSKYLKENNIPVTDVSSVTGFPECLDGRVKTLHPAIHAGLLARRDEKTHMDTIQALGLGTIDLVSVNLYPFFEKVQAKLTLEQTVEFIDIGGPTMLRSAAKNYHDVIVLTDPADYAETITAEGLGQSDQ

SEQ ID NO: 84953 - protein, 391 aa, Unknown
  Obtained from environmental sample
  DOMAIN (1)...(232): Iron only hydrogenase large subunit, C-terminal domain
  misc_feature (1)..(391): Xaa is any amino acid
MIAVAAPAVASFFPNQFLNLNGWLHSLGIEAFFDVSLGAELTVITYLDYIKEKAPRTVISQPCPALVTYIEIHHPKLLPYLAPADSPILHTIKMIREYYPEYKNHKVAVISPCIAKRREYDETGFGDYNVTMISLKKLLDDQRLDLSSFPPIEYSGVSAERAAGFPIPGGLMDTAERFVPGIRRRTEKIEGVYNIYPYLKEISEILNSNVELPLLIDCLNCEKGCIGGPGTGNAEKPLALLKNPVQKRIAELEKKQNFKPGKNEFKKYHDLLKKYWKEGLYDRSYLNLSENNTIKHPSEREITEIFRSMKKYEEKDLYNCTCCGYGNCRSMATAIYNKLNKAENCAHYILALLKEKTNTEELNRQLQEHIGQASELMRNNSLGQSVMGPQK

SEQ ID NO: 84954 - protein, 283 aa, Unknown
  Obtained from environmental sample
  misc_feature (1)..(283): Xaa is any amino acid
MDNNFNKAYEHFKKVKKEQIDIISWEMNQYRLAECAYNTGDFDKAVEYFFNYVEACDRNEYTKKEFREMALEYMAISFSDMPNGVDEAIKFFKKNSGKSYEPQVIYMVGSKNRDHGQWDAAIEALSGALKKYPMYKEAPLARQKLIECFVVKKEHEKANKERESLVDDYGEGSKWYTANSKERKVIDVARGQVRRALGDIAIFYHGEGQKKKDKASFDKAMKRYNEFFTKFPDDKWRVFEYKYNVAEIYSSMGDCEKAREDYKFVAEEDVSKYPAYVNDVDTL

SEQ ID NO: 84955 - protein, 311 aa, Unknown
  Obtained from environmental sample
  DOMAIN (6)...(298): Phosphoglycerate kinase
  misc_feature (1)..(311): Xaa is any amino acid
VDKTDRPRSFQDAKKAQEKAEKDGKTFDKDAYIKGKHRMAPVAAYLEKKLGKPVIFAGEDSCYGKKAFIESQPDGSVIMLENTRFHKEETAKEPAELDKLAKELATYGEIFVNDAFGTAHRDHASTASIAKFVPVSVAGFLMEKEVNYLEPIVTSPQKPLVAIIGGAKVSSKIAVLESLLKNSAALIIGGGMAYTFFKAQGHKIGKSLVEDDQLDTAKKILDAAKSANVQIVLPLDQVAATSFDANSSPIQVDSLDLPDNLLGLDVRPKTIAKYKEVLAGAKTIVWNALSASLNLRLLRKEPKSRKTLWRK

SEQ ID NO: 84956 - protein, 292 aa, Unknown
  Obtained from environmental sample
  DOMAIN (141)...(251): Transglycosylase SLT domain
  misc_feature (1)..(292): Xaa is any amino acid
MRIDGFNTDYNATRGLEAKGSTAQGSRAAQVAKEFEAMFTSMMFKAMRGTVKEGSLIPKNMGESIFTEMLDGEYAKMSSDTGALGLAALIQKEIDRCEGRTPALDGNAPAFSAGRRNRPSWSYASGDSATLIEKVRGKWESLISEISARFGVDKDLVTAVVARESAGNPNAISPKGAKGLMQLMDATARDMGVRSSFSPVENLTGGIKYLKNMLESFNGDESLALASYNAGPGAVRKYNGIPPYRETREYVRAVLALRLRPPRARSRLPAVAKITRLTLKAGSYNGKHSAIQ

SEQ ID NO: 84957 - protein, 314 aa, Unknown
  Obtained from environmental sample
  DOMAIN (231)...(313): DbpA RNA binding domain
  misc_feature (1)..(314): Xaa is any amino acid
GHAAAVSRGGEPAILVATDVAARGLDIENLSHVINWDLPNDRETYVHRIGRTARAGKRGIAISLATLSDRGRIHQISRMMEKTLGCGILWLKVPSVKAVMKALRRRISSAVVAALPEQELAVENGEPLADATELSEKTITAEAKETPGASPFLAKVCRSLIERLGAEKAVEALVSLSYGEFLDPGRYGPITEFQEEDFPEPVKAAGKSAGRRRDDRTRRTSGPHAPAGKRGREFREETGDFTRVYIGQGRQHGLGARDIANLLMRAGGVPGRLVDEIEMKDYCSFATLPADAAKRACAFSRKDQQSPVIRPAKP

SEQ ID NO: 84958 - protein, 136 aa, Unknown
  Obtained from environmental sample
  misc_feature (1)..(136): Xaa is any amino acid
MANANLNKANAQKFDEFYTQISDIEKELWYYSHHFKGKTIFCNCDDPYESNFFRYFALNFNRLGLKKLIATCYTGSPIANTQLSLFDYESTENKTTKSPHKIEITEMADENAGDFNGLPLVQYILRNTKNALNSMD

SEQ ID NO: 84959 - protein, 123 aa, Unknown
  Obtained from environmental sample
  DOMAIN (1)...(111): NUDIX domain
  misc_feature (1)..(123): Xaa is any amino acid
MVWQWRHGLRDLSLEFPGGVCEPGENAEEAAGRELLEETGYRAGNIRKLGEFSPNPAIMSNKVHFFLAEDLVNTGKQGLDADEFVEVEHVGVDEVCKGMGKPPYVHALMGTALAMFLTMNNEQ

SEQ ID NO: 84960 - protein, 274 aa, Unknown
  Obtained from environmental sample
  DOMAIN (186)...(267): Beta-ketoacyl synthase, C-terminal domain
  misc_feature (1)..(274): Xaa is any amino acid
MDLYTQYAAAAAAQAFGDAGLEAGSGDPFRQAVIFASGIGGITTLQEELFKFAASSGVPRFSPFMVPKMIGNIAAGVIALKYGFRGPNYGTVSACASSSHALIDAMNLIRLGKADVVIAGGSEAPINVTGLGGFGAMRALSTRNDDPATASRPFDKDRDGFVLGEGAAALVVESLIHAEARGARIYAELAGGGMTADAFHSTLPHPDGTAVEKAMAFAMDDAGANPEDIAYINLHATSTPAGRRSGDHGRGAAVQKFAEIPARKRNEVDDRPPA

SEQ ID NO: 84961 - protein, 80 aa, Unknown
  Obtained from environmental sample
  misc_feature (1)..(80): Xaa is any amino acid
ELSVWLYTKLPECLKGRIIEIDTEVILEWGKIRARTERQMPVADSLIAACAITNHAFLVTRNTKDFDDIEGINLLNPWEF

SEQ ID NO: 84962 - protein, 200 aa, Unknown
  Obtained from environmental sample
  DOMAIN (23)...(174): Anthranilate synthase component I, N terminal region
  misc_feature (1)..(200): Xaa is any amino acid
MFKPSLEEAKQIAATGQYRVIPLSTEMYADMVTPVDVIKKLKKASGHCFMLESAEDTKNWGRYTFLGFDPTMEITCLNGEMSISSGDSGETKTFKTDNPNSRIQEILERHKSVKFDFLPPFTGGLVGYFAYDYAKYCEPSLKLDAVDEERFNDVDLMLFDRVIAFDNYRQKVILIVNIKAENIERNTKKEIHCRSVLAPH

SEQ ID NO: 84963 - protein, 161 aa, Unknown
  Obtained from environmental sample
  misc_feature (1)..(161): Xaa is any amino acid
MQRGFFGKSPRQGGNKLPGAQINSSVFVFVILIIISTLMLLVSSRNFIFGVKNTGLSLFSGVRGGIYELSSLVSRTVLSIKELTNLRKEHADLLKQLDRYEELERSNAEIYQENIRLKEQLDFSGLLDTGEYRRKYREETPIIFFSALVINKGSYSGGSIT

SEQ ID NO: 84964 - protein, 338 aa, Unknown
  Obtained from environmental sample
  misc_feature (1)..(338): Xaa is any amino acid
ISQTEISTVETGNKCASGTGEFFLQQLRRMNVDVKEAVELAANSEEFKVSGRCSVFCKSDCTHALNKNIPIGRVSAGLCRMMAEKILDLLEKVPNKRIIATGGVTHNAVIMDMLRPHVEELYIPEFADCFEAVGAAFYALVNKTPLGLDKEHIFVDGGTSFSQLPPIEMGKPLVRFEDIEIQKADPGDELILGLDVGSTTTKAVALRTKDDAMVASIYLRTNGNPVQASRECYAALLEQITVPVSIIGLGTTGSGRQIAGLHGGTDGVINEIIAHAAAAAHFDKEVDTIFEIGGQDAKYTYLTNAVASDYAMNEACSAGTGSFLKNRRARRSASITKR

SEQ ID NO: 84965 - protein, 320 aa, Unknown
  Obtained from environmental sample
  DOMAIN (51)...(127): Helicase conserved C-terminal domain
  misc_feature (1)..(320): Xaa is any amino acid
TPAFDRPNLYFEVQKPKDKKTALLECLDKRKEASGIIYCATRKTVEETCDFLLSRGFNAARYHAGLIDEERRKNQDDFIYDNKTVMVATNAFGMGIDKSNVSYVIHYNMPKNIESYYQEAGRAGRDGSPADCILLYNGQDVRINQYLITHDEDGESADSALQTHNLELLKQMTFYAAGHDCLRRRLLAYFGEKSPANCGNCSNCLTEFPETDVTVEAQKIVSCVYRLKQRGRSFGKTMIIDILRGSKNEKILRLGFDTLSTYAIMSDVSAHRIRLIIDHLIDKGFLLLEEGEYPVVNAGNAERGFQEEERVFMKLPQERE

SEQ ID NO: 84966 - protein, 142 aa, Unknown
  Obtained from environmental sample
  DOMAIN (88)...(142): PASTA domain
  misc_feature (1)..(142): Xaa is any amino acid
FDWAEIPTPHFIASCIALLPAESPSLILYLVIVKPRGEILGGRIAAPAIREAAESLIDYIGIPRGRNPQVTHPTAVNIPSRRLPVIGTHLPDFSGISKRVLIPLLLRDDIRVELRGEGWVRRQSPPAGTPVTDGMNIILELE

SEQ ID NO: 84967 - protein, 342 aa, Unknown
  Obtained from environmental sample
  misc_feature (1)..(342): Xaa is any amino acid
VIERAYPFELHGCPREEIEKIAAYLINLKGLHTCIKCNPTLLTFETARKLLDEMGYGYISFDDHHFKNDLQFNDAVEMLKRLQAQAKKRKLDFGVKLTNTFPVQIKRNELPGNEMYMSGRPLFPLSINVAKKLSRAFDGEISISYSGGADYFNLKDILETGIRPVTVATTLLKPGGYERLPQLAELAEETVKDISMAAPVNVNALNALAESLPKKSRYRKEYRQTGLRKTGSPLPLFDCAKAPCMDGGCPICQRIPEYLAAVAAGNYDEAFRIIAADNTAPSITGTICDHQCQYRCTRLDYEDPLQIRKAKLLARRQGAERVYFLAAKPPNKTNKSAGGIGA

SEQ ID NO: 84968 - protein, 106 aa, Unknown
  Obtained from environmental sample
  misc_feature (1)..(106): Xaa is any amino acid
LADIVSFGVLPAAIGYIGYDPAGNFISLGWFDTVIFPIYLMAALIRLAYYNVIETELHGQNKKRTYYEGLPVTSVAIIIPLAYAICHTFRQGYIPYLQYTASLFVS

SEQ ID NO: 84969 - protein, 252 aa, Unknown
  Obtained from environmental sample
  DOMAIN (4)...(252): SAICAR synthetase
  misc_feature (1)..(252): Xaa is any amino acid
VEGNVKKIISGKVREVYEISNEISDKVSDDKLVIVTTDRISAFDVILPKPVTNKGKVLNAVSLFWFNFTKGIIPNHIISSDLKDMPEFFQKSEFEGRTVLVKKLKMLPFEFIVRGYMFGNMWASYSRGEKFCGQKIEGDYKLAEKLTSPLFTPSTKAQTGHDEYISVQYVADKIGAELANKIEKVSFELYNTCYNYAYNKNIIIADTKFEFGLDAHNNLLVADEILTPDSSRFWSLADYKVGASPQSYDKQL

SEQ ID NO: 84970 - protein, 342 aa, Unknown
  Obtained from environmental sample
  DOMAIN (9)...(199): Calcineurin-like phosphoesterase
  misc_feature (1)..(342): Xaa is any amino acid
VYGRGCGHHTNEVGGIARLVGTVLKEKSQAPDSTFVLFAGDAVQGTTFSTFFKGEIIFPLFDKFVDYTVIGVHDLDYSLQNLMDLTKDRKYQILAANVFNKYAKPFSGHAAAIREVDGVKVGFFGLTKLITEILQAAKNMGDLNFAPVEETARSMVQSLRAQGADIVIALTHQGLEEDKKLARTVEGIDLIVGGLSHTNLIKGFQTFDTIIVQAGYRGENVGKVTIRYDKKKKAVISITPTIIPVIASSPVDAETAKIVEEYAKNMADQMGVILAKTDVYLEGTREVVRRTETNLANLITDFMCMSSGAELCLVNSGVIRAKYNEGDIRVADVINTLPYPNN

SEQ ID NO: 84971 - protein, 72 aa, Unknown
  Obtained from environmental sample
  misc_feature (1)..(72): Xaa is any amino acid
MPPRTLQIRNSTAEFLIFTKQAGESGKSSSGLIEVRVQDGTIWLSQKLMSALFDCTIENIIIHLKNILSKGN

SEQ ID NO: 84972 - protein, 80 aa, Unknown
  Obtained from environmental sample
  misc_feature (1)..(80): Xaa is any amino acid
MTFWITGKGGMLGQDLCALARQGFKVFESDKEVDITNENAVMDYIHANKPDVIINCAAYTAVDEAETQTELNQLMNALGP

SEQ ID NO: 84973 - protein, 445 aa, Unknown
  Obtained from environmental sample
  DOMAIN (8)...(400): Ammonium Transporter Family
  misc_feature (1)..(445): Xaa is any amino acid
MFSSVDTMWVLVAAALVFFMQAGFAMVETGFTRAKNAGNIVMKNLMDFCIGTPTFWLIGFGIMFAGSGPFIGGIDFMVRGNYDSTFPTMAFLIFQTVFCATAATIVSGAMAERTKFSAYCCYSFIISALIYPVSGHWIWGDGWLAQLGFHDFAGSTAVHMVGGVASLVGAAIVGPRIGKYSEKGESRAIPGHSLTLGALGVFILWFCWFGFNGASTVSMTGENIVSASKIFVTTNLAAATAAVFTMFITWIRYKKPDVSMTLNGALAGLVAITAGCDAVSPFGAFIIGIVAAFVVVFGIEFIDKVLKVDDPVGAIGVHGLAGAAGTILTGIFALDGGLAYGGGWHMVGIQALGVVAVAAWVAITMGIIFTIIKKTIGLRVKPAEEIAGMDITEHNIESSYADFMVATSIEADKDAVVPANVAVPVVNNSKPGAKMTKITSANLIN

SEQ ID NO: 84974 - protein, 75 aa, Unknown
  Obtained from environmental sample
  misc_feature (1)..(75): Xaa is any amino acid
GLWGGDVGERLHDRRELPFHKSLLAGELPLSMGGGIGQSRLCMLMLQKAHVGEVQVSVWDEGTLSGCEAAGIKLL

SEQ ID NO: 84975 - protein, 231 aa, Unknown
  Obtained from environmental sample
  DOMAIN (2)...(228): Beta-ketoacyl synthase, N-terminal domain
  misc_feature (1)..(231): Xaa is any amino acid
MKRVVITGGSIVSALGSEWPDILAKLKAGKNCVRRMDDWDRYTRMNTRLAAPVDFTMPDYPRKKTRGLGRVAQLALVSADRALASAGIKEDDPELKNGRYGVAYGSSMGSIDSLMDFYSMLVEDDVSKMSATTYIKAMPQTCAANIGVFFGMTGRIITTNTACTSSSQAIGFAYETIKQGIQDLMIAGGAEELSPADAAVFDTLFAASSKNDTPDKLPPRMIKPRPRPICH

SEQ ID NO: 84976 - protein, 141 aa, Unknown
  Obtained from environmental sample
  misc_feature (1)..(141): Xaa is any amino acid
VSVIEMRGIKREYRMGGKQGKSKDDSNVVVVRALRGVDFSAEEGEFVSVMGPSGSGKSTLMNILGCLDKPSGGTYTLDGIETSTSDSDTFAYIRNRKIGFVFQSFNLLARTTALENVELPLFYRQKEKGEKRRLFKSEAAF

SEQ ID NO: 84977 - protein, 172 aa, Unknown
  Obtained from environmental sample
  DOMAIN (12)...(171): short chain dehydrogenase
  misc_feature (1)..(172): Xaa is any amino acid
MEINDKFSLKGKIAWVTGASYGIGFAIAKAFHKAGAVIVFNDIGKEQLDKGLEAYKAEGIPAHGYVCDVTDENAVNAAAANIEKEVGVVDILVNNAGIIKRVPMTEMSAADFRLVIDVDLNAPFIVAKAVIPSMIKKGGGKNINICSMMSELGRDDVSAYAAAKAGLNAYQN

SEQ ID NO: 84978 - protein, 514 aa, Unknown
  Obtained from environmental sample
  DOMAIN (165)...(512): Glycosyl hydrolase family 10
  misc_feature (1)..(514): Xaa is any amino acid
GAFLIIAFFLFGCKQTPETPPEIEKTQENGTSSGGGTSPETGTSPETGTPPGTGTSPGTGTPDTNAILLTIGSSKDLKTMLNAEMSGKIITWSSGDSTKVSVDNNGIVTSNLTSFTTAEGGSQKYTQGSAKAQAAITAKAADNTIQTFNVAATTEAQESIASLSPFKDLFPASILVGNIATGGDANGSSITNASLTRHFNALTPENDMKPDAVSNGRNASTGVISYTWTKADNFVNSATGSNFKIIGHTLLWHSQIPQWQKNMANESKATALEAMKQFISDVMTRYKGKIYSWDILNEVFPDGVSASADWKTAMRAENPWFKAIGYEFVYEAYLAARQADPDAKLYYNDYNTDQTGKATMIRDMVRDVNQQYKTAFPSETRLLIEGIAMQEHHNTGVTAASIRAALNLFKPLGVKAAVSEIDVLGQGWSEFSSVGQGANKHTQSTVTNNGLLTQADLYRQYMVVYMDFKDIIERISIWGITDNNSWRSAGLPLLFDKDGKAKPAYYKFAGAVVK

SEQ ID NO: 84979 - protein, 108 aa, Unknown
  Obtained from environmental sample
  DOMAIN (1)...(105): Ribosomal protein L19
  misc_feature (1)..(108): Xaa is any amino acid
LGLWRADAGRVGAGDTINVSFKIREGDKERIQQFQGVVVQTSGSGLGETVTVRKSSGNVYVERIFPMHSPLIAEIKVLKRGRVRRAKLYYLRGLTGKATRIKEKKAKQ

SEQ ID NO: 84980 - protein, 70 aa, Unknown
  Obtained from environmental sample
  misc_feature (1)..(70): Xaa is any amino acid
MAEIGFAVFCIENVAEKLGKAGNEIYNILAEKSDILDSYIIPCYDVLHTQGKNYIVDDILSYMKKRGLVE

SEQ ID NO: 84981 - protein, 480 aa, Unknown
  Obtained from environmental sample
  DOMAIN (227)...(411): Pyruvate ferredoxin/flavodoxin oxidoreductase
  misc_feature (1)..(480): Xaa is any amino acid
MMRGLSRQPIIRGTAQNPDTFFQAREANTPFYVKCPDIVQEEMDKFAKLTGRQYRLYEYHGAPDADRVVISMGSSVDTIHEYIEWATAKGEKVGVLKVRLFRPFSIKHFVKALPASVKKIAVLDRVKEAGALGDPLYMDVVAALREAREEGLTTLDPKVLAGRYGLSSKEFTPACVRAVFENLSSAKPVNHFVVGINDDVSKKSLSVDPEFDIEHSDVKRAMFFGLGSDGTVGANKDSIKIIAGEAGLYGQGYYVYDSKKAGALTVSHLRFGPNKIRSAYLIKKANFIACHQTEFINKYDMLGFASEGAAFLLNTPAPVDKVWDTLPKEMQETLIQKKMKFFVIDGYEVGRQTGMGVRINRIMQTCFFAISGILPREEAINQIKKFIQKTYAKKGEAVVKKNFDAVDQTLKHLHEVAVPASVTSNTCRPPFVSDKAPAFVKDVLAVMMANKGDELPVSAFSPVVEWYIPNGHSADLISVK

SEQ ID NO: 84982 - protein, 79 aa, Unknown
  Obtained from environmental sample
  misc_feature (1)..(79): Xaa is any amino acid
AQGGERRANGYSRRTGDEGQGARRCGPKVVKAEAQVPMAMAEAFRNENLGIMDYYRMQNVSADTQMREAIGKQGPQGGK

SEQ ID NO: 84983 - protein, 404 aa, Unknown
  Obtained from environmental sample
  DOMAIN (211)...(382): Peptidase M16 inactive domain
  misc_feature (1)..(404): Xaa is any amino acid
MNTTLAKGQILRCGFEILDVRELPEFGADGLKVHAIWARHQKSGAEVFHVYNDDSEHLFSFNFATPPTDSTGAAHILEHSVLCGSASYPLKDAFLVLAQGSLQTFLNAMTYPDKTLYPASSVNEHDYFNLMSVYGDAVFRPLLSEWTFMQEGHHLFFSPEGKLQISGVVYNEMKGAYSSLDAYAGLWSFKSVLPGTPYEFESGGDPECIPELDWQGLKDFHRAWYSPANCRVFLAGNIPTEKQLAFLDEKFFSSLPAGNKNAPLHKTERWQSPRSFKVPCPAGAEQKPTVMLSWLCGDVNDTVETLALTALTEILLGHDGSPLTRALVDSALGEDLSPVSGFERELRETSFCAGLRGLNYEELGLSVEEAAKRSRPLYRRTLTSGKEGYQKKNRSCYLGMDFLP

SEQ ID NO: 84984 - protein, 203 aa, Unknown
  Obtained from environmental sample
  DOMAIN (18)...(100): OB-fold nucleic acid binding domain
  misc_feature (1)..(203): Xaa is any amino acid
MFPLIKELLNSEPNGQEICVKGWVRTKREMKNLVFVEVNDGSCFRGIQCTFDTTAALGDEAKAALAELSTGAAVEVSGKLVPSPAEGQAVEAAASSLLIVGAAPAETYPLQKKRHSLEFLREIAHLRARTNTFGAVARVRNRLAIAVHEFFQNHHFQYVHTPIITGSDAEGAGALFQVTTLDLAALAKSGKAPDTKLGQSVMP

SEQ ID NO: 84985 - protein, 205 aa, Unknown
  Obtained from environmental sample
  DOMAIN (1)...(69): FliG C-terminal domain
  misc_feature (1)..(205): Xaa is any amino acid
LREVDMSTLAVALKDAKEEMKDVFFRNMSKRAAMMLEEDMEFMGPVLELDIENARQLILDIYADLPKEKYNRFDDQWTKYKTDKENNTKYRAGADNRDHIVLVFRGAGTIAEFVSVYQFDEYNKVDNFCHHLNNLKPDKGSFFYAKHADQMFEYEITKPLLASFDQIFEYIRIRSSNTQFHCLVFLLLPFHLFPKIAIFFLLCFL

SEQ ID NO: 84986 - protein, 111 aa, Unknown
  Obtained from environmental sample
  misc_feature (1)..(111): Xaa is any amino acid
LFSPGVFPFRYFGGRLRGEVLGRFSRLSTETEPSAATVAFLINKIKAEKIPVVFHIELSNERMADTISEETGAKKLLLHACHNVSKKDFDAGLGYLDFMRKNVENLREALH

SEQ ID NO: 84987 - protein, 263 aa, Unknown
  Obtained from environmental sample
  DOMAIN (4)...(44): UBA/TS-N domain
  misc_feature (1)..(263): Xaa is any amino acid
MAEISAADVKKLREKTGAGMMECKNALVSTEGDFAKAEKLLKEKGLAALEKRSGRATNEGKIFVKVKDDGSAAVLVELASETDFVARNPDFIALGWAITDKALEEGHTEPHEGLSGMVQDLATKIRENMGLKRLKAIKANKDEYLTMYIHGDGNIGVVVKCKSDKPEIFKNEDVKAFIFSLALHIAAFNPQALDKSKIDPAYITEQEEIFRKQMEKDEKLQGQPANVLEGILKGRSQTPFRSLSCRARLCERRKAHCRRSAGN

SEQ ID NO: 84988 - protein, 306 aa, Unknown
  Obtained from environmental sample
  DOMAIN (182)...(229): DNA gyrase C-terminal domain, beta-propeller
  misc_feature (1)..(306): Xaa is any amino acid
MRLRALSGLSGERLQNEYDELTKKIRDVRAVLDDEKVLYSVIHAELTEVMNRFGDERRTRIVADEGEIDELDLIDDETCVVTMTHLDYIKRVPASAYKAQNRGGKGVIGMSTRDEDVVKAVFTVSAHDDMLFFTDLGKAYRVKAREIPMSGRGAKGTPVVNLLSLGGGERVTSIIPVRDYTEGAVIMLTKDGIIKKTALSQFKHVKKMGILAINVKDGDMLKAAFRADGAQELLIATVMGRGLRFRADSVREMSRHAAGVKSIKLLEGDSIAGAIIATETNGEKLLIVSENGYGKCVILGRSVNGK

SEQ ID NO: 84989 - protein, 371 aa, Unknown
  Obtained from environmental sample
  DOMAIN (39)...(156): Oxidoreductase family, NAD-binding Rossmann fold
  misc_feature (1)..(371): Xaa is any amino acid
SFWGGHDQIGRENGKLSDGMNFAPRGKPSPVVQKGEFTFAAIALDHGHIYGMCNGLIEAGGVLKSVYDPDPKKLDDFCAKFPSVKRAASEEEILSDPQVLLVAGAAVTSERCALGLRAMSAGKDYFTDKAPLTTLEQLAAAKAKAKETGKKYMVYYSERIHVESAVFAGQLIEQGAIGKVIQVLGLGPHRLGAGGRPDWFFKKEKYGGILCDIGSHQIEQFLFYAGVKDAKVVSSQIANYNNPQYPELDDFGDAMLVGDNGATHYFRVDWFTPDGLQMWGDGRSFILGTEGYIEQRKYMQFGEKGSHGGNVYLANKHEETYFNVEGQVGYPYFGQLILDCLNRTENAMTQEHAFKAAELCVKAQMQAVKIA

SEQ ID NO: 84990 - protein, 267 aa, Unknown
  Obtained from environmental sample
  DOMAIN (30)...(251): Methyl-accepting chemotaxis protein (MCP) signaling domain
  misc_feature (1)..(267): Xaa is any amino acid
MGKQESSTYEADKAVNDIKGNIDNLKKMIEQQTENVNASSSAIEEMTANINSVTKTLAENSKNVNALKEASENGKLGVQTVAQKIQEISKDSEGLLEINAVMNNIASQTNLLSMNAAIEAAHAGDSGRGFAVVADEIRKLAESSSEQSKTTTAMLKKIKESIDSITKSSEDVLARFGAIDTSVKTVSEHEQNILSAMEEQEVGGRQILESIGRLRDITASVKTGSDQMAESGDTLVKDTAELIETSKKTVEGMNDILQGINQINAAV

SEQ ID NO: 84991 - protein, 330 aa, Unknown
  Obtained from environmental sample
  misc_feature (1)..(330): Xaa is any amino acid
FVRAENPRLRYVDFGIATGVLALIVIIAVMNGFQLGFIESILEISSYHVRVGNLPEASMQEARSLLLDIPGMEAAVPFREFQALAKGWRGGQQAALARGVPANAAELDPGMAGRLHFTEGSFDMEGGKNALVGAELARRLGVRTGDEITLYSIPAIFSAADSESPDDNAGLRQFTVTGIFETGFYEYDVGWVFVETESASAFTDTPPVLGLKIKNRFHDHKMLDLARKCLAQKEGFEEAQFSSWRDYNRSFFGALRTEKLFMFLLVGLIFIVVGLNIYQSQRRAVMEHREDIGLLRAVGGGKRAVRPGFCLRRRDYRLYRPVRGASLWAF

SEQ ID NO: 84992 - protein, 140 aa, Unknown
  Obtained from environmental sample
  misc_feature (1)..(140): Xaa is any amino acid
MTRNEIQELVNKARKAQNIWAELSYNERARRIKKAGHCLAEKRDEVTEIIHRENGKLKIDALAAEVIPALMAIPYYIKQGRRLCKSQKISGGNILMVYKQSLMVYKPWGGSWYHLSLEISLFHSLLRKYHGASCTVRSDS

SEQ ID NO: 84993 - protein, 444 aa, Unknown
  Obtained from environmental sample
  DOMAIN (35)...(182): Flagellar hook capping protein
  misc_feature (1)..(444): Xaa is any amino acid
MAVNSVSQSVSSLLAQTAPYSVTSSVGGDDENGYGFGSATYTGNTTGGIWEETNKMGKDQFLHLLTIQLKYQDPLSPMDNTAFVSQLAQFRALETGENTESAIRELGRAFDENLAAQIVSSQSIANSSAMSLIGHEARMRQTSVTWDGKADTKVPIRVHLGNSDKVTVEIKDADDNVVRTMTASGKDAQNSVTINWDGVKDDGQKAKAGKYSIDVVGSDKDASLYCYVQEVVEGVRFTGEGAMIKIGGKEISIGEVLDVSINESGEGGSYITPSNALSMLGRTVRAKYGEIRHSAYGIAEGVDYPINVNASRGSAVEVQIKNGRGDVVATLKGTANDFGELQLNWDGLTKDGDMAGPGVYTVNVVGSDKNKSLYAYTEGVVDGITSLTGDFKMKVNGQEVALSDIISVTATSSANALNAPDNIGKPRCRQTAHSANLYMGKKSE

SEQ ID NO: 84994 - protein, 298 aa, Unknown
  Obtained from environmental sample
  DOMAIN (7)...(196): Thiamine monophosphate synthase/TENI
  misc_feature (1)..(298): Xaa is any amino acid
MLELPPLYPIADANQVISLSDQVARFAAAGFPLVQFRGKPRSPKEQWVELRSALAKARENGGWPLIVVNDRSDLAVLAFTDGLAPWGLHLGQTDLPASVAAKLPGLGGLHFGTSTHNPCEWSTVDPACDHAGVGPFRATTTKRDHDETIGIVGLQKGCAALKCQGVTPIAIGGLTMDDAAACFAAGAESLAMSKALSPSEPHGHLHNLTECLWQAQKTKYTHKPALGKKNGVAIVGGSGAGKTTLATVLAKRMRIEGIDLDERIAQKTGTSIAEIFGMGEAHFRDIEVNCLPECMERP

SEQ ID NO: 84995 - protein, 100 aa, Unknown
  Obtained from environmental sample
  misc_feature (1)..(100): Xaa is any amino acid
MGNIKSILITSNNNEGYKFILDSLNNQTGLNIIGIENDETNTIIKSERLKPDVLILDLLQPAIDGAELAPIIHRRSPDTAIIVICDKDEHEYAGKALRAG

SEQ ID NO: 84996 - protein, 325 aa, Unknown
  Obtained from environmental sample
  DOMAIN (68)...(117): Secretin and TonB N terminus short domain
  misc_feature (1)..(325): Xaa is any amino acid
IGESYTICAAYALFLAQSAFGTPPAGWGDDSPIVSGNVNPSLKTPVTLTAREASLTEVLKVLADRSGMNFVVGEGVTREKITIILNSTPLDEAVNLLVRAAGLSYEIIGNSILIAEPDKLKEDVGLSSYVVELKYAKADEIAEALGDLAKNVKVDKGGNRLVCYASPRVIMEVERIVKALDKPHILVLLETRLIEVSMDKLNQLGLKWDQFNPELPWDLGSVIRIPEAPLKSGLAFKGTTRGEISLNLALDLMVQNGDARLLMDSKLTTTNNREASLHIGEVVPYTIQSYNLSGAGGRESADWKGERGRTAKNDSPHKPTRPNHA

SEQ ID NO: 84997 - protein, 534 aa, Unknown
  Obtained from environmental sample
  DOMAIN (24)...(66): Putative Ig domain
  misc_feature (1)..(534): Xaa is any amino acid
VNVAISNIDLAAGLNVSGGTGPYSYASSNLPAGIVISAAGVISGTPTTAAVAGTATVTVTDATPTTPNTGTYSLAYGAISDILIVEKSGAVQIPASVVNVAISNIDLAAGLTVTGGTGPYTYASSNLPAGIVISAAGVISGTPTTAAAAGTATVTVSDATPTTPKTGTYSLAYGAISELSIVEKSGAVRIPASVVNVAISNIDLAAGLTVTGGTGPYTYASSNLPAGIVISATGVISGTPTTAAAAGTATVTVSDATPTTPKTGTYSLAYGAISELSIVEKSGAVRIPASVVNVAISNIDLAAGLTVTGGTGPYTYASSNLPAGIVISAAGVISGTPTTIGNAGTATVTVSDATPTTPKTGTYSLAYGAVTSRQSYPGSIAGKISGSDQGTGTLPAAATVTLYKDGVAYSPSITATPAQGSNGNYTLSDVPAGIYTVKVEMSGYVDFISGNITVGATAVMDRNFVLDKAYTITYSVNGGSSNGTITANQSDGKVVGSGSGVQEKHTVTFEVTPAANKQVSRWELGSVPVQQRMS

SEQ ID NO: 84998 - protein, 242 aa, Unknown
  Obtained from environmental sample
  DOMAIN (136)...(241): ATP synthase alpha/beta family, nucleotide-binding domain
  misc_feature (1)..(242): Xaa is any amino acid
MAENSENKNTDTGVLIKISGPVMDVRFDSGVAEPLLNELLVTSDGRHMEVSANFEPGVVRCVALDATDGLCCGTEVFRVGHGIRVPVGSPMLGRVVDVLGRPIDNGPPIENTLQWDIHRPPPSFTDLTPVTEFFETGIKVIDLLTPYSKGGKIGLFGGAGVGKTTLIMELIYNIATVHGGYSVFAGVGERSREGSELIHDMKASGAIDKTALVFGQMNEPPGSRMRVGLTGPTMAELFPRRD

SEQ ID NO: 84999 - protein, 329 aa, Unknown
  Obtained from environmental sample
  DOMAIN (12)...(329): Periplasmic solute binding protein family
  misc_feature (1)..(329): Xaa is any amino acid
MKKYIKYLLLPIIATLLVLAAVGCGKNNKPADAAIGGGKVNIVTTIFPAYDFARAVAGDKAEIIMLLPPASEAHSFEPRPQDIVKIQKSGVFIHVGGESDSWVREILKSIDNPKMKIVTLMDCVEAVEEEIVEGMQPEDEGDKDKEKEGEEEGPEYDEHVWTSPRNAKLIVRKISETLREADSANADVYRKNTEAYLSRLDELDVKFKGVVDSAARKTIVFGDRFPFRYFADAYGLKYFAAFPGCATETEASAKTVAFLIDKIKKEKIPVVFHIELSNEKMANAIGEATGAKACLLHSCHNVTKADFESGKTYLDFMAVNVDAIREALK

SEQ ID NO: 85000 - protein, 102 aa, Unknown
  Obtained from environmental sample
  misc_feature (1)..(102): Xaa is any amino acid
MALIACHNAGFAYDGAPAVSGLNFSVGVGDYLCVVGENGSGKSTLIKGILGLLSPCGGSVVTGDGLKRNEIGYLPQQTAGQKDFPAGVYEVVLSGRLASRGI

SEQ ID NO: 85001 - protein, 71 aa, Unknown
  Obtained from environmental sample
  misc_feature (1)..(71): Xaa is any amino acid
VLVIGLTTVVAGWDDFVVMEDFGKAKKSFFKTFLELPKGIPDEKTFARVFAFINPQELIASLEQWLDEAGN

SEQ ID NO: 85002 - protein, 105 aa, Unknown
  Obtained from environmental sample
  misc_feature (1)..(105): Xaa is any amino acid
MMAESIPDWEPSGSEQNDDPALIAQDWAGIRHTMWNYVGISRTSSRLRRAFEDLRDLSRHIHDFYKRTPVSKRLVDLFHGCQAAYVITQSAMRNKKSLGCHNRVD

SEQ ID NO: 85003 - protein, 109 aa, Unknown
  Obtained from environmental sample
  misc_feature (1)..(109): Xaa is any amino acid
MLFSILAGVKFAFLFLIVGLLSIAYNRFLKGLPLVGNFTVAFLSTTPVIIPIINFGLPQRELSILVFFAFMLNFMREITKDIEDMEGDKSQNLKTLLDSRPRADLSRSP

SEQ ID NO: 85004 - protein, 80 aa, Unknown
  Obtained from environmental sample
  misc_feature (1)..(80): Xaa is any amino acid
MKTNVYIVKCESYEKADGKINELLNLMGGISQFAKKGEKITLKANLLGAVPPEKAVSTHPLVVAAMDVSERRSSADLIIG

SEQ ID NO: 85005 - protein, 84 aa, Unknown
  Obtained from environmental sample
  misc_feature (1)..(84): Xaa is any amino acid
MNTKGTTGGSGFLSGVFNSPVLQSIGKQSSLFVIIGVVLVVVVLVVPIPAFLMDMLLALNLCIALVILLVSMYNKEALDFSVFP

SEQ ID NO: 85006 - protein, 63 aa, Unknown
  Obtained from environmental sample
  misc_feature (1)..(63): Xaa is any amino acid
MTKLPLHTPDLTNKNYAALTALFPNAVTETIDENGVVVRAIDVDVLAQEIRHPYRFQAKKSAT

SEQ ID NO: 85007 - protein, 49 aa, Unknown
  Obtained from environmental sample
  misc_feature (1)..(49): Xaa is any amino acid
MKVDIHSPDDIIKIEIREKALVYSGGKKGLGGLPVGTAGRGMLLVSGEL

SEQ ID NO: 85008 - protein, 283 aa, Unknown
  Obtained from environmental sample
  DOMAIN (80)...(277): DAHP synthetase I family
  misc_feature (1)..(283): Xaa is any amino acid
MIIALKSGVNQEDIKILVADLEKLGVKVDYSQGANQTVLGLVGDTTVINDEALRANRLVEKVIRVQEPYKRANRAFHPMDTVLEFESGGKTAKIGSGYFAVIAGPCSVESRAQVVCIAKEVKNAGAAFLRGGAFKPRTSPYSFQGMGSAGIDLLLDAKKECGLPIVTELMEISQLELFENVDMIQVGARNMQNFNLLKELGHSGKPVLLKRGMASTMTELLMAAEYVMAGGNDQVVLCERGIRGFDNFSRNILDLANVSALKKKTHLPGDVDPAMLRVFHGWF

SEQ ID NO: 85009 - protein, 283 aa, Unknown
  Obtained from environmental sample
  DOMAIN (114)...(235): Domain of unknown function DUF147
  misc_feature (1)..(283): Xaa is any amino acid
MALIQHLIKFFDLIRPILDVALLAFLLYKGYELLVKTQAMQLVKGAGFLVLVYGIAYLFKLNTLQWVLNIIGPGLFIAVAIVFQPELRKIIMRLGQANFFRPDTKPNIGQLEAVVTAAEILSQQRRGMLVVFPRKTNIKNITETGTRINAEISSSLIIAVFEFDGPLHDGAMIIQNGRIVAAGCLLPLSEQQDIRKSFGTRHRASLGMSEQSDAVVLVVSEETGAISIAFDAKLYYDLSPVEVTRKLKELLDRESRSSASGMAAGTAERMAADRDEVSLERMC

SEQ ID NO: 85010 - protein, 108 aa, Unknown
  Obtained from environmental sample
  misc_feature (1)..(108): Xaa is any amino acid
MDEIPDIPVSRTRLESLSTAELIKLADNFGIDIPYGLERIFMIEELLEYSNTGIQEKTDDLEINPAYTETVVLPKQYNISYVEVIIRDPLWVFVYWEIKAHEQARPSI

SEQ ID NO: 85011 - protein, 76 aa, Unknown
  Obtained from environmental sample
  misc_feature (1)..(76): Xaa is any amino acid
LRGAAAGIAVSLIPIIVTLIVADGMIRGIIDRYMELGTGHMQVFSFFGADGLNGAADKIRGIDGVRGVSCRILILR

SEQ ID NO: 85012 - protein, 59 aa, Unknown
  Obtained from environmental sample
  misc_feature (1)..(59): Xaa is any amino acid
LTYSAEQDKGAVDCKIDVAGKKLTFTGTGGAKSVDFNLSQFDNALVEAGGWVEFADKKY

SEQ ID NO: 85013 - protein, 310 aa, Unknown
  Obtained from environmental sample
  misc_feature (1)..(310): Xaa is any amino acid
MVSKADGINTTASAPFNGIATIIDFEILSDNNNLYAKIPGGDPGGDGGDPGDSGGDGSDPGDPGNPVPTRSNPQVKALSEGRLGGGLAILNHGADLAAGEGMASARTVAKAGGGLFAATSAGKSRYDTGSYVDLGVSSLMLGIANRVGSLLGGVFIEGGAGGYDTYNSFASVPSVEGEGDARYYGGGLLARYDIGNGYVDGSLRAGRVRSDFSSADILNSTGTITSYETESAYYGGHAGAGYVAPLGGILEMDFSNRLFMTRQGGSSVTIAGDLVEFAAADSIRDRVGARLVYGPDNIARPYAGAYYEYE

SEQ ID NO: 85014 - protein, 330 aa, Unknown
  Obtained from environmental sample
  misc_feature (1)..(330): Xaa is any amino acid
LSVCTACSQSVYGGYSNSSTDTKDNSVIIDGGTASTDPNHRIYGGYSKDGTAMANTVTIINGGTATSIVYGGYSSSGLAMNNAVTINNGTADWHVYGGYSYNGIAMNNAVTINNGGTVTGDVHGGYSLYSGYSSYGTKNNAVTISGGKVTGKVYGGYSPLNNSPPATDNKVEISGGQTGSVYGGSSTGNVIDNTVKISGGQVNGSVYGGSSTAGNVTSNTVEISGGTVLLNVYGGSSTASNVTSNTVKISGGGRVVKSVAGGYSNNGNVTSNTVEISGGEVKENVFGGHTDDGNATDNIVTISGGKVTKDVYRGSSTAGNVTSTPSKSAA

SEQ ID NO: 85015 - protein, 290 aa, Unknown
  Obtained from environmental sample
  misc_feature (1)..(290): Xaa is any amino acid
MFIKGFTYGWDGRSGAYRTPEAVSSMEKFRQAGNEWLCLAFSVMQEQFSSTKISFDYRYTVKDRDIEFAVKKAHELGMKVCLKPVINCMDGVWRAEINFPDVNMMGKDIYWGQWFEHYTAFICHYAELAEYTGCEMLCIGCEMIATERKESHWRNLINETKKFYTGPLVYNANHGSEGNVQWFDAVDYIGTSAYYPVAEIPGETEENMFAAWQPIKKQVKALSVRWKKQVIFIEIGCRSAKGCAMMPWDFTHTEFPFDEDEQANFYSSCLRTFFDEPWFAGFLWWDWSTK

SEQ ID NO: 85016 - protein, 96 aa, Unknown
  Obtained from environmental sample
  DOMAIN (11)...(87): MutS domain I
  misc_feature (1)..(96): Xaa is any amino acid
MSSPTSAKKEPPMMAPYYRIKAENPNTVLLYRKGDFYQTFEDHTKIPAKVLGLTLTKRHPRGKEKTPPGGISLSPPKQKPPQIGKSGIPNGGPPAN

SEQ ID NO: 85017 - protein, 211 aa, Unknown
  Obtained from environmental sample
  misc_feature (1)..(211): Xaa is any amino acid
MKHLLLPLLCLLLFFCAKQQVNPELQADLKPSSSSSGSEQQNLLFWDGKSEMLRGVAIGNSVWSLQEYANLAINDSSDYIRISADGFNAARFYLSYKFFENDAEPYSYKQGGWLFLDRNIELAKKNGIKLILNMHVPQGGFQSNGEGGALWDIEENQKRLVALWREIAKRYANETSIAAYDILNEPVVSKGKYQWQKLAQEIVNVIREVDN

SEQ ID NO: 85018 - protein, 299 aa, Unknown
  Obtained from environmental sample
  DOMAIN (1)...(293): DNA topoisomerase
  misc_feature (1)..(299): Xaa is any amino acid
VESFVPEEYWTLEADFKAGKASYTAQLVLWNGEKPVLKNEGDVRSIIEAVKNSECLVSDTREIEKSVKPKPPFTTSQLQQTAANRLGFTSRKTMQIAQQLYEGINLQSSRVGLITYMRTDSVRISKSAQEEARKWIGEKFPEELPDQAQEYSVGKKAQDAHEAIRPTYISYTPDSVKEYLSKDQLKLYTIIWERFVSSQMKNARTKTVSIDISASSGDSCGVFRLAGTKVIEKGFYRVIKLLASRDEKGSSYPSLKRATKLKLTSSGRNSTLPRGRPRFTDASHVKNPGRKGHWQAFRL

SEQ ID NO: 85019 - protein, 453 aa, Unknown
  Obtained from environmental sample
  DOMAIN (100)...(244): GAF domain
  misc_feature (1)..(453): Xaa is any amino acid
MPESAMLLSLDLVSALVVPLFIKNSFWGFVLFEDRHNERYFDKEQVEMMRSAAFLCANVFIQWQTEIEIDKTTKALESSKQMLEMLNKAAITFVSQSEESSEKRIEAGVKSICDMAKLDRFSVFRNCPMPDGLHVSQIYRWDRQAGGTTEIYHEVLKDTTYARLMPKWENILSNNEILNGPSRLMPESKALQSFGVVSALVVPLFFKNIFWGFVLFEDRHNERYFDEVQVEMMRSAAFLCVNTLIQRQMELEVIESNELNNSMLNAVPVAIVILNENGDVLNCNDATTKMFECTKQHFMENFFDLSPEYQPDGSKSKERAKELASYIFTGSPNLSFEWIHTSFSGETIPCEVTTTWVEHKGKYLGLVYIYDLRNIKKIEAVATEAQEMTRAITEANPMSYVLFDENYQPIDCNEAIVKMLGSKSKQYLLENYFTHFCPERQSLTIKTLGALRS

SEQ ID NO: 85020 - protein, 251 aa, Unknown
  Obtained from environmental sample
  misc_feature (1)..(251): Xaa is any amino acid
MGVGLLKAHLEAFDTIGAGIIDLRREGYDKQYEYADAIKGAYGVFFFQHPSMLEYQERLKKKKERSNVETILHVDKIPSNNQITRLLDGIRSETFTPVFEQGLETAQRYKGLDQYLVLGGRYRLITLDGVWFYQSENIKCGHCLRQQLKDGQTLYYHDMIAAALVKPGFQTVLPLAPEFIRNEDGKEKQDCEREAAKRWLAGKAEGYRWLNPVFLGDDLYSNYPVCTAITEKGMHFIFTCKPDLVPNADPW

SEQ ID NO: 85021 - protein, 94 aa, Unknown
  Obtained from environmental sample
  misc_feature (1)..(94): Xaa is any amino acid
MNDILEWLVTVEDTRQQAKVKHLMRDIIAIVFFAEIANASEWIEVYLFAVAHEEALRRYLELPHGIPSHDTIQRVFAMVSPECLQEFRGRLADQ

SEQ ID NO: 85022 - protein, 356 aa, Unknown
  Obtained from environmental sample
  DOMAIN (89)...(354): RmuC family
  misc_feature (1)..(356): Xaa is any amino acid
MALLPIVVIAAFAVLVILFILIILVLVKLYSTRQADLSPQILDLKNELNELKTKQLESQQTSLASQQQLFLNTQNSLGSQLQQMMNLMGQSLNSAQSNIAKQLDNSNRIIGDIHTKLGSLETTAKNIQDIGKDISSLQNILQAPKLRGNLGELFLEDLLKQILPEANYKIKPSFKNGTQVDAIIILGGNIVPVDSKFPLESFRRLIAADSEESKKTFKKEFVSSVKKRIDEIATKYINPAEGTFDFAMMYIPAEHVFYETVINDSSTNKDYELFYYAMSKHVIPVSPNSFYAYLMALVYGLQGFKIEQEAQNILGELSQVQDKFGNSLPIRLVGNTFQRDRQVHDTETRRTVTINK

SEQ ID NO: 85023 - protein, 307 aa, Unknown
  Obtained from environmental sample
  DOMAIN (167)...(243): Surface presentation of antigens (SPOA) protein
  misc_feature (1)..(307): Xaa is any amino acid
MVQSGTNPQLVKIVPPNEPVILVTMETKTGDEEGVINICIPYLTIEPIMERLSSRFWYGNYRNITPPDSSNLKLREDIPVRLTAEVLSRDYPVIEILKWKADTLILPLSPLSPDNCYLKLGDRRVWQCQLLPDCKGFIKRIKIINYAEKPFGTEGMDMKTEEVNSLTVDAMSSAKIKISVELGTTLKTVKEVFAMGEGTILELDKLAGEPVDVKANGVLFAHGEVVVIDENFGVRISEISAPPGFVRPEGIRMTLIVVRISFALIWLETTYFIVRYINKLKNELLNKHSDNEKHPRKNRDLPLLRNI

SEQ ID NO: 85024 - protein, 329 aa, Unknown
  Obtained from environmental sample
  misc_feature (1)..(329): Xaa is any amino acid
LSEVSPERLRRQVTDADVNLYAGDIVSNPSSGNFAGIWVFNGNVNVGTLLAGQAVGAAAPNATAQATAITADVTAYGVADGGTKIRNRSSVSSNGALAIFLDGAGSKTVDVGYYGILSVKGTGNTAGMIKVTKKNKVAIGKNAQLISTGSQAFAIEAEEGNVNINGGRIESLASKQAISTKGGDIIIGGDGAAAASAILMAPGSSFRDINGGQRGVRITGNEGVLVRAIKNTVTGRAGEVVVNGGFIYNKYGTGIWADDTLRIKGGEIVTDKDTAVRAGTATAVGLIDIGVGTATSDGLTGTTDLGSRPPHLGRRLSTPRRPRSRLRRA

SEQ ID NO: 85025 - protein, 502 aa, Unknown
  Obtained from environmental sample
  misc_feature (1)..(502): Xaa is any amino acid
MTDSAEPFRRVSSTNTLDVDKLHFNMAANPFDAEVHVKTPESDMQVAAKLAGKIDFNSLVDIVPLDDITLKGLLDCDLALAGRMSTFQNERYEDVDARGMLKLNGFNFESPDFPQAVEIASTQLNFTPRKVDLVNFDAVIGNTDIAMNGTLEKFIPFIFKGDTVHGNLSLRSNNINLNEFMTGEKPEETKESAPLSVIEVPKNIDFTVNVNIAHLLFDKLNISNTTGTLLVSDGKLQMRNLAMNMLDGSVVLSGEYNTQDINVPSIDFNANIRQVDVASAISSFDILQKVLPQPQNYAGKVSTNLTLSGVLDEHLSPVLDKVVSKGQIQTNSVEIRNSELFGSMANMLKNESWRQPSLTNLNIRYEIKDGQLMVEPILMNILQNKLELSGGQGLDMTLNYKVNATVPVSSIGSGATDLLSKIPGGSNVKEIKVTGLIGGTATSPVVSLGVADMASSVISSVTEVVREQVRDEIDKQKAAIMAEAQKQPKTSVMLAKQALTEY

SEQ ID NO: 85026 - protein, 316 aa, Unknown
  Obtained from environmental sample
  DOMAIN (11)...(311): tRNA synthetases class I (I, L, M and V)
  misc_feature (1)..(316): Xaa is any amino acid
MAERPRQREPKRLEKWKAEGIYQKIEATRRADNEKGAGRGRRILHDGPPYANGAIHMGHSMNKILKDIVVKSLWLDGYESPYVPGWDCHGLPIEHAVEKELGSKRREISRADFLAKCRSYAQKWVDVQSAGFQRLGVLGAWQAPYITMAPAYEAEVVRSLGKLFQRGIVRRKLKVVHWSYGARTALAEAEVEYADKTSFAITVAFPVPNEEAAKFGLPAPLYLPIWTTTPWTLPSNLAIAMHPRMEYAIVEGNGRHYIVSTSLLENFQAKLGHALRTLEVRKGNTFDGLKAKHAWINRDSLVLLADYVTEDTGTGL

SEQ ID NO: 85027 - protein, 334 aa, Unknown
  Obtained from environmental sample
  DOMAIN (242)...(275): Tetratricopeptide repeat
  misc_feature (1)..(334): Xaa is any amino acid
GYGEREAYARLADLYAKSGQTEKANATRKKLVSLDPNNPKIHLSLGEYHLASQKYAEALSSFQRSFSLQSTAEAAVGMMNAAWNLKRFDLARDAAESALHRDPSLKDPQLMLAKIYMAEKNYSAARGVLLPLLKVETNDLSLWKDLAECSEKTGDAQVLADADKRIIALDPKNVPSRIRVAKAAEKSGDLKTAYETFKELANLQPKDADVQKSLYEIAVKQKNNTAASGHLKTLLTLRPNDAEGHRELGNMQFSSGDMNGALASYRSAVKADPNIKGMYQNYAPILLKSKAPANEAMPVLIAAVNAGEADEAILTAAGNEYQNRDTSRRPRERY

SEQ ID NO: 85028 - protein, 390 aa, Unknown
  Obtained from environmental sample
  DOMAIN (27)...(212): Outer membrane efflux protein
  misc_feature (1)..(390): Xaa is any amino acid
MSFSRIALILLAAVSAIFAQNYQDLTLQNCIEIAKKNSLSLASTRLSEKTAESSLTQAKNARLPDLRGNISQSAAGNPLLENSQNRYAFGLGLNSSMPIFTGGRIGHSVNQAEHRKEIATLNSDAAERTLSEYVIKAFMQVWSLTESEAAARDALALSKRMLAKDSVLFNAGSYTASDLALAFAQVASDSLNLLQTQSNLTQSYTALRQLLEIPQNSNFSVLPPDTAKPETTENYSVLLESAQNNSIDKKIDSLSVLAAKEAVGIAKAAHYPSVSLSGSLSSGFHWEIEDPKYPKQLKNGFGYSASLGINIPIIDWGGAADGVLQAQVAEEKAQISALNTQKQLENVIEQLALQVETYRLQWEVSSVQMEAGRLSLEKSVSNPRPICPRK

SEQ ID NO: 85029 - protein, 346 aa, Unknown
  Obtained from environmental sample
  DOMAIN (189)...(334): Flagellar hook-length control protein
  misc_feature (1)..(346): Xaa is any amino acid
KDPHDRLAEKWPTEPESLQFERTEQEKSLFALGRLTGQAENQPALGEMDGDVESLTADLRRLSRESMKTETISAELIHGEGHNQPLTANSAALAAEEPAENIQVTAEKAKNRLNSAIAGAKSKSTAAETTAGTAAEYQQAGAQKAVSGEKDGRSKLEEARNKRRGVNIEVRDFRSDGTVTEGVARDGSVPLRVSAETRLPGESGGKEIVLELRLPDQGREAASATTAWEAKAGQAFEDLLARELHQNFNNDIVRHASVALRDGNEGTIKLALKPDSLGNVKIRLEMAENRITGHIVVESKEALRAFEREISSLEKAFRDSGFDGAKFGNVPSGGRPGRGTTMAGNE

SEQ ID NO: 85030 - protein, 339 aa, Unknown
  Obtained from environmental sample
  DOMAIN (22)...(338): CO dehydrogenase/acetyl-CoA synthase complex beta subunit
  misc_feature (1)..(339): Xaa is any amino acid
GLWTEDRGKRWKYARCKIKIVDVPVPVAYGPAFEGERIRKEDTHAEFGGNKTLAFEYVTSAEYDDITDGEIRIIGPDIDTIKPGGLLPLGIWVEVAGRKMQSDFEPILERQIHHLVNGAEGIWHMGQRDIVWTRVSKGGFAKGLRLRHYGEIIHARFLSDYPAIVDKVRVTLVTDQAEVEKRLAIARRVYDERNRRLEAMTDESVETFYSCLLCQSFAPNHVCVITPERLGLCGAYNWLDGKAAYEIDETGPNQPLKKGECLDPVKGIWAGVNEYVNTNSHKAIDSFCAYSIMDRPMTSCGCFEAICAYVPEVHGVMIVNREYLGETPIGMTFSTLGRF

SEQ ID NO: 85031 - protein, 315 aa, Unknown
  Obtained from environmental sample
  DOMAIN (89)...(217): YbaK / prolyl-tRNA synthetases associated domain
  misc_feature (1)..(315): Xaa is any amino acid
YSFHSTPEDLDKHYDLEYKAYQKIFNRVGIEPVIVQSDTGIMGGKIAHEFMLDTPSGEDYLIICKHCGYQANREIAEFKRQPVDGNLGLEKVATPSKQTIDEVCTFLKANKKNAGKCVFFDVDGKLIVALVQGYLEVSETKLRNFLKVKTLIPASEELIKASGMIPGYASPINAKNCRIILDTGAAESKNLIVGANEEGYHFMHCIPKRDFASFETVDIAEAAADCLCPKCEKELTETRGIELGNIFKLGTKFSENMNCTFTDAAGEVKPAIMGCYGIGVGRLMASVVENSHDDFGPIWPLSIAPSQVPRAARQS

SEQ ID NO: 85032 - protein, 67 aa, Unknown
  Obtained from environmental sample
  misc_feature (1)..(67): Xaa is any amino acid
MLDGAKEVIQESGNLEKATHEITGGMNEMATGAEHINTAVNHVNGVSGKNREAIEDLLREVSRFKME

SEQ ID NO: 85033 - protein, 319 aa, Unknown
  Obtained from environmental sample
  misc_feature (1)..(319): Xaa is any amino acid
MDGPFRDVMRHFEKVYATYLTTRADLEWGKLHPEELSQVYLMTPHTTAQAETLEIYLLKGYYEEEIQINKLEDPVRWWEVIDRTSGEVVQPELWSWDFDRGTVTIKAEKWHVYTVTFLAFQIWDAVCMYNHLTNNWGDKPHDLPYDVYNSLTREHVLQFLRDWLRDNPRPDVVRFTTFFYQFTLIYDDKKREKIVEWFGYSGSVNPRLLEDFEKEYGYRLRPEDIVRQGWHNGAFCVPTRQFLDYMDFVQRFVTKLAKQCVDLVHAAGKEAMMFFGDHWIGTEPYGKYWGQIGLDAIVGSVGDGVTCRMIADVPDVKYR

SEQ ID NO: 85034 - protein, 69 aa, Unknown
  Obtained from environmental sample
  misc_feature (1)..(69): Xaa is any amino acid
GYARADSLKERLRKLARGKVRLLFLPPYSPDYNPIEKSWANMKRYLRDNMHNYKFADSAIYDYFGYSVI

SEQ ID NO: 85035 - protein, 133 aa, Unknown
  Obtained from environmental sample
  DOMAIN (8)...(90): Transposase
  misc_feature (1)..(133): Xaa is any amino acid
MGKKSTERRVYTKEFKAEAVALAEKKEKPVSRIAADLGINENMLRRWMQASRESAGSGLQAFPGHGRPKDAELARLRKENKALREANEILKKAAVIFAQGDPSNGVSFHEANQDRYAIRRCRAFWGSRSAYTD

SEQ ID NO: 85036 - protein, 255 aa, Unknown
  Obtained from environmental sample
  misc_feature (1)..(255): Xaa is any amino acid
MEPKIAVVSPQTGAPGTLVTITGNNFGASRENAGVFFSWDYEPLSVNPYVVTEPEFVEVSETELGYEAWNAHEIRIRLPDGAVSGGLKVKTPNGESRSVFFDVTGKPGYKNFKDKRRYTISYSVDVKINEATRPNTLYLWIPLPVTSASQRNVKLVSRSTTPFVENYKGVSLFKLDNLAIGSNHTINLSFNIEVYAVETGIRPASIKQGKTPLNNAYTQNTNLIPADNPQIKQTVRALSAGNRIPMLKQNCCMTG

SEQ ID NO: 85037 - protein, 79 aa, Unknown
  Obtained from environmental sample
  misc_feature (1)..(79): Xaa is any amino acid
MAVDYGIFGDKKAIKAGMSKFLQEIRDSKKAEGHDRIYTHGEKECELMSQRINTQIPVNEKTLEEMKNIAGKLGVEFTF

SEQ ID NO: 85038 - protein, 350 aa, Unknown
  Obtained from environmental sample
  misc_feature (1)..(350): Xaa is any amino acid
MAKKYGLAMSVEDLCFCREWFSSINREPTLAELRALDTYWSDHCRHTTFNTILEKVEIGGGPLAPALNNALALYEEARNEVYGGSAINGDAANRPRSLWDMATIGAKVLRKRGLAGDVDESKEINACTVKVKAEFSDGSAEPWLLLFKNETHNHPTEIEPFGGAATCLGGAIRDPLSGRAFVHQAMRVTGGGDPRSPLSETMPGKLPQIKIAREAAAGYSSYGNQIGLATGQVAEFYHRGFLAKRMELGAVIAAVPAALVRREEPAPGDLVLLVGGKTGRDGIGGATGSSKVHSGESVETAGAEVQKGNAVEERTLQRLFRNPQAGGLSRAVTTLAGGGGFRGGWGNFPA

SEQ ID NO: 85039 - protein, 105 aa, Unknown
  Obtained from environmental sample
  misc_feature (1)..(105): Xaa is any amino acid
FVGEAAPVFFDGLSDAELERARELLANRISAGDEIVISSDEERSQRTNLERAYFRVEALITAAARLPKHRRPTKPSKAAHEKRLHVKQLQSRKKALRRPGPAPED

SEQ ID NO: 85040 - protein, 400 aa, Unknown
  Obtained from environmental sample
  misc_feature (1)..(400): Xaa is any amino acid
MTRSETKQAVWSLSRAQAAHDRAASPIGAFGLSFRPTSFANHPQKLTAPWNITAQKWLGFANTTIAHFMAMAVMCVSLCLLAPPLFSQAPAGGQDLGRTRQRLQELQRQMGQVDEQIGQLRKRRSGVMVELQRIALRAAKARAQAEGAQLRLGEIQRELSQLSAKKTATEKQLAALKDSLRRQVKWLYALGPLGTLSFLPGSADIENYLARGRYLEWWRNHEGQKLQKAFELHSELEAQEKEAKDAQSRYSKLSREMASLEEELKANEEQLYAYLEGIQRDESQKRAMQAEMNEESILLERMLASVVSKPSPAVPTPSGVSFQHLVGRLPKPVEGSLATAFGVQVHPRFGTRTHNHGILISVKGGESVKSVASGRVVRAEPFQSVGLMAIVDLRGSYYTI

SEQ ID NO: 85041 - protein, 67 aa, Unknown
  Obtained from environmental sample
  misc_feature (1)..(67): Xaa is any amino acid
GYRQAGPRGAQHLGTIYREGGMTLGQDEKSAVVYGMPRVAFELGHVMEQVSLDNMARRICDVAKTPR

SEQ ID NO: 85042 - protein, 300 aa, Unknown
  Obtained from environmental sample
  DOMAIN (1)...(144): DHH family
  misc_feature (1)..(300): Xaa is any amino acid
LDGISSSAILAGALEDWGLMANWMLPNRFDGGYGLSAGTLQKLRDAGAEVLILVDTGITAKEEIKAAKEFGMQVLVIDHHRPSGEGLPEADAILDPFLEDCEYPNKCLCAAGVAYKFLYALYQKTGKPLSDLERYLPLVSLGTLADIVPLNAENLFLVRKGMGIFPHSDCLAIQILYEKLGPTEKNFVSSNDIHYRMAPLLNAPGRMEGPDISLKFLLCKDRKEIESLYERLVECNTKRRTIELDIHQQAIKRLEEIYGNNLPQVLIIDSLEWSIGVIGIVAARIAQEYKRPTAIISVPS

SEQ ID NO: 85043 - protein, 269 aa, Unknown
  Obtained from environmental sample
  misc_feature (1)..(269): Xaa is any amino acid
GFPCTDWHESVFLIDTYDTLKSGIVSAINVGKKLKERGKNFGVRLDSGDIQYLSTEVRKMLDNAGLNEATITASNDLDESIIENLVNSGVPVNIWGVGTQMVTGGNDSAFTGVYKMTACEDTNGQMAPVMKLSDNPEKTTNPGPKQVWRIKDSQGAALADVLALDSAADAEIIESGYRYRFWHPSADYRHFYHITEWAPQPLLKKHIADGKPCGPQPSLDAIRAYSAADLETFDSTYKRLLNPHVYKVSITEKLRDLKLDLIKNHLGDL

SEQ ID NO: 85044 - protein, 286 aa, Unknown
  Obtained from environmental sample
  misc_feature (1)..(286): Xaa is any amino acid
LVVSLLFFAIILFVYKPLSAKAGYYLFEYKFDPTNKKQNLIYVSLVILTLIYSGFCVYTSISEDYSNTPMNHQYSRYLVDAFIAGRTNIDFGHPERLLGAERPYDYYYLAANGYELGVDWAWDIAYYKGKFYTYYGPVPAVLLYFPYKLVTGNYMSHHTGVFVFAAVAVIFLALLWRFLVKKYMPEARFAFYLLSFLALFFVSHLFAGLRYPAIWLIVQVAGFTFIVAGTFLLLKSVDRDNIRYGQLFLACLCFPLAVGCRGHMLLVSILVRAFLWKRRSWKLAVF

SEQ ID NO: 85045 - protein, 241 aa, Unknown
  Obtained from environmental sample
  DOMAIN (103)...(203): Shikimate / quinate 5-dehydrogenase
  misc_feature (1)..(241): Xaa is any amino acid
MKKTFGLLGEKLGHSFSPLIHGYLGEYDYSLYEVSAVDLDSFMTERRFDGINITIPYKQQVIHYCATLSHEAQIIGSVNTIIKDENGALHGHNTDYHGFNQMLEQGGIDPKGKKVLVLGDGGSARTVRAALDGLGARETVTISRRGENHYGNIERHYDADIIVNTTPVGMYPDNGSSPLRLTGFRQLTGVADLIYNPTRTTLLLEAGGLSIPRVNGLAMLVAQAEKASLLVFGWASKARTG

SEQ ID NO: 85046 - protein, 482 aa, Unknown
  Obtained from environmental sample
  DOMAIN (55)...(248): ATPase family associated with various cellular activities (AAA)
  misc_feature (1)..(482): Xaa is any amino acid
MNSNKTPNQQEPTALERFSRDLTDAARHGKLDPVIGRDDEIRRMIQILSRRTKNNPVLIGDPGVGKTAIAEGLALRIIRGDVPEGLKSKSVVSLDMGALIAGAKFRGEFEERLKAVLQEVTERGDVILFIDELHTVVGAGSAEGAVDAGNMLKPMLARGELRTIGATTLDEYRKYIEKDKALERRFQTVLVDQPSVGDTISILRGLRERYELHHGVKIKDSALVAAATLSDRYISERFLPDKAIDLIDEAAAKLRTERDSNPVELDEAMRRQMRLEIEIEGLKKEKDKGSKEKLSKLQTELADVRKTASSLKNQWETQKAQSDRLQKVREEIDKARVDLERAERDYDLSRAAELRHGRIPELERKMADIETEIKNSDDGTRLLKEEVGEEDIAEIISRWTHIPVSKLVEGEKDKLLSLSKHLHERVVRQDEATDAVADAVLRARSGFEDPNRPIGSFIFLGPTGVGKTGLARTLAFSLFDDE

SEQ ID NO: 85047 - protein, 451 aa, Unknown
  Obtained from environmental sample
  misc_feature (1)..(451): Xaa is any amino acid
MVWDKDLTRAKKKADIIKTIINSKGFTCKEEEANGLEAFQSMMAGQIYANYRALPVMSYSMAHIVPLSSVWAGLRSNEHAFNVTGVDTPHIICSTIEGTPFFLNLNVGDVGHSAIWGPTGAGKSTLLNLLEMQVFKYPGSLVIVFDKGRSCRQCCLASGGRFYEPAAENIAGINFQPLRELETERDMMDAMDFIESCITVNKETVTAQMRASIKESLERTREIPHNRRTITTFLQYANYLDPDTNRPVLKDMLGDYTIGGKYGKIFDAEASGLSLDTRFLAIEMESLMNRGENCVVPALVYLFNYIEKKFDGRFTLLVLDEAWLFLKNETFADKIAEWLKVLRKKNVYVIFATQDVADVANSPLKTTIIQQCLTKIYLADKSAVTPGMTDVYRQFGLTEAEISLIASATMKRDYFYTSPMGRRLFQLDLGRLTLALIGSPNHALLDELTSK

SEQ ID NO: 85048 - protein, 331 aa, Unknown
  Obtained from environmental sample
  misc_feature (1)..(331): Xaa is any amino acid
VNDQIGRAALWPSTHPRIHPEKVTVAEILERSVSLSSVVKDLDSSAEVFGPALYGVGAYANFQSAPDWYKYSDIYRWFIDAYLDEMRKAGEEKGRRLLDVLDVHYYTEARSPLNHRVSEDRDTNEECVYTRFQSTRTLWDKSYREKSWVAQSLGRFLPVLPALKASIEQYYPGTKLSVTEYNFGGENHVSGGIAQADALGIFASEGVYYASFWPFSEKLDYIYAGINLYTNYDGKKGAFGKTLVESSTENIEQSSVYASTGEDGALHVILLNKDLHKPERFVFTVNSDVRYTNYAYYGFNAQSAVIKKYGSGALGPNGADGFSLQITPGGR

SEQ ID NO: 85049 - protein, 257 aa, Unknown
  Obtained from environmental sample
  misc_feature (1)..(257): Xaa is any amino acid
GESREPSPKVNLTEEGKMLVEQFDAELDEVGEADEATAAKIKWAKLEAIVGNESRIKILANDIVTHFEERQKVFEGKALIVAMSRRIAAALYEAIIKLRPEWHNDDLDKGVIKVVMTSSSSDGAAIQKHHTTKAQRKALSIRLKDENDPLKIVIVRDMWLTGFDAPCLNTMYIDKPMKNHSLMQAIARVNRVFKDKPGGLIVDYIGIATNLKKALGFYAESGGKGVPAETHQKAVDIMLKKWKFSRDFSADLSRPPL

SEQ ID NO: 85050 - protein, 470 aa, Unknown
  Obtained from environmental sample
  DOMAIN (13)...(92): Cache domain
  misc_feature (1)..(470): Xaa is any amino acid
LSARASGGSIAETQPYLDIVTGEAIFTYSCAIYDDNGIYLGVISVDARTEYIGNKVVNIAVSKKGYGFLIAQDLTVLAHSNQEFVGLKLSDPRIPLFRLVSEMMTHGKVSETPLVNWLGEKTVCYIRELPNGWYEGLLMPKHIYYKKVRYMAVILMALGIIFASVISFVLIGVDAAKNKSDLESKRKSAFLANMSHEIRTPMNAIIGMVTIGKSAADVERKDYCFTKIEDASNHLLGVINDILDMSKIEANKFELSETEFEFERMLRRVVNVATFRIDEKRQKFSVNIDHSIPHTFIGDDQRIAQVITNLLGNAVKFTPEQGEISLTVRLKEKADDLCTLQISVSDTGIGISPEQQAKLFQSFEQAESSTTRKYGGTGLGLAISKSIIELMGGKIWIESELNKGSTFFFTIQLRRGTNEKHRLLSSDINSKNVRIMAVDDDPDVLVYFNEISHGFSMMCDTAISGEEALN

SEQ ID NO: 85051 - protein, 191 aa, Unknown
  Obtained from environmental sample
  misc_feature (1)..(191): Xaa is any amino acid
LAACQSHQIQKPRETGSEGEFAEMRPDVRNLDELTATFSSQEMELDFRKSYFASEAQVFTAIYEGLFSYHPLSLEPIPALAERWQLSENKMQWTFTLRRNARFSNGDPIRAEDFRAAWISLLAPGLESPYSGFFDVIEGARDYRNGILKDPNKIGIQAVDQRTLVVKLSSPAPFFMAMLCPHSFSPIHPSM

SEQ ID NO: 85052 - protein, 309 aa, Unknown
  Obtained from environmental sample
  misc_feature (1)..(309): Xaa is any amino acid
MGLVAMVDGTVMAAAILIIIFIQDTRTAAFAVIPLPLVTILILCFGNLIGKRFQRAQETYSALSDAVQETFSGVRVVKSFVKEWWFIKKFADTNDDYRDANMELVKLFGIFFPLISFLSGLTVLIVLLVGGISVTEGSMSPGSLVALFRYLNMLIWPLMGAGFVVNMIQRGAVSLGRVNEVMKAVPLIFSQTEAVKGVSSSEPGVPLIELRNLTFGFSNGFPEETPVLENINLSIKEGTITGILGRTGSGKSTLIKAITRMIAAPPGTVFIKGVESSAWDLTGLRKYSALRRTIAICFQINKKQHWLPS

SEQ ID NO: 85053 - protein, 310 aa, Unknown
  Obtained from environmental sample
  misc_feature (1)..(310): Xaa is any amino acid
MNTKLDIIISFLTSGKYKGIKDEKDMDAIIRLIVLNITYSISSIIIAGIGISDMRTGFVDQGLLELITGFLIFLNLMLLRTELPFMVGGFILTGVFGFFCGYSIFSHDGALSFPSLWIYSYPLISIFTLGLPFGLVPALILFFAAILGTFSQGFANISYNLGEALLICGVYFFILTLTAVYEYVRSIKDNWLSRQDSYMNMVFQNSPDIILLLDSNGGLVYCADEFLKKTRIRYFASIRQVHYAKVFSQFCEKDQLDEIEHFFNLAREERKPVVLERVMDIGRHGHQRHYDIHYTPMYNEDRVFQGAFYL

SEQ ID NO: 85054 - protein, 126 aa, Unknown
  Obtained from environmental sample
  DOMAIN (58)...(126): Ribosomal protein L7/L12 C-terminal domain
  misc_feature (1)..(126): Xaa is any amino acid
MAEKKKFWSDCFMTVLEVSELVKMMEEKFGVSAAAPVAVAVGGGGGGAAPAAAEEKTEFTVVLKAFEESKKIAVIKEVRTITNLGLKEAKDLVEGVPKPLKENVSKEEAAKIKDAITAAGGTVEIQ

SEQ ID NO: 85055 - protein, 93 aa, Unknown
  Obtained from environmental sample
  misc_feature (1)..(93): Xaa is any amino acid
VIGVIDYGAGNLGSVMNALKRLSVPARFVEGPQELSPSSSPFEKIIFPGDGHFATRMASINKSGYAQAIKEWIKADKPFLGYVSAYSLYLKLP

SEQ ID NO: 85056 - protein, 325 aa, Unknown
  Obtained from environmental sample
  DOMAIN (35)...(219): D-ala D-ala ligase C-terminus
  misc_feature (1)..(325): Xaa is any amino acid
VMTAGTRFFPLPLPGLRKKLNLPGIPYETALDASDKGRMRKRFSEAGLPSPAFMVFTRENCTVTKPEGNSGGRLPVDAPFPYPVVVKPVDNMGARGCRMAVNDAELREAVETALGFSRTGQVIVEEYMEGPEFSVDAVVYRGKITICGLADRHIFFPPYFIEMGHTMPAAVPSKEAEAIINVFIRGIQVLGIDNGAAKGDIKLTSKGPMIGEIAARLSGGYMSGWTYPYASGTNPAKGAICAALGREPEGLSPVRSWTSAERAFISIPGLVRSVEGIDEARNIPDIKDLFLRSSPGSRVCFPENNVSKAGNVILRRGSASAESDL

SEQ ID NO: 85057 - protein, 108 aa, Unknown
  Obtained from environmental sample
  DOMAIN (13)...(94): GHMP kinases C terminal
  misc_feature (1)..(108): Xaa is any amino acid
GQSALVKELGFRSRKALKRGTGHRFGELMHEHWEHKKRRSGGMSNPRIDAWYALARENGAVGGKLVGAGGGGFLLLYAENRGRLRKAMHKAGLEDVRFKFDFEGAVLV

SEQ ID NO: 85058 - protein, 366 aa, Unknown
  Obtained from environmental sample
  misc_feature (1)..(366): Xaa is any amino acid
MKNTKKVFKGFSKLFWVIAITAMIVSVLTGCVSYSVQSVVISAANNATQIKAGETLQFSFNVEASGKDTSKSQVVKWNVSSTADGKGPVISGTGINSGGLLTVSANEIYPVLYVTASHAVFSSQKDQKQIQVSGPKVGSVVLSTTASSVVVGKTVKLSAFVAGLPPNQGLTYSVGSKNDGTGAVAQGTSIAADGTLSVAAGEKNPSLWVRAVSNSDRSKFDVKEIKIVSVTSVAVSAEGGTARVLRGAKLKFNAAVTGVNNPGTGVTWKVASKNDGTGDVTAGTAIASDGTLTVASSEAAATLYVIATSSVDTTKSGSIAVIIPTVTSVTVTPANPQVKRGDGATFRARVAGTGDPSQDVTWKMDG

SEQ ID NO: 85059 - protein, 554 aa, Unknown
  Obtained from environmental sample
  DOMAIN (99)...(168): HAMP domain
  misc_feature (1)..(554): Xaa is any amino acid
DIALTDWSPEKLTDEAGQKLLRKVSKVTDDFIDTLEAFAKRTKNFSPEGVCLDPLPDGLTKVGSQALADLDAAKDYMTNQTRHLADLAASDASTSISQATVILVVVILIAIALGIFLTLSITAPLSKTVGILGKIEKGDMTVRVNLERGDEFGQLSKSVDNVASRLQTIMKDLRMESDSLAGSAEQLSVISKQLVTNSEETANKSKAVLGVAEDCSKGVTSIASTAEEASAQISDVASSVEQMTVNINTMASGAEQASANVNDVANAVDQVASNINAMASAAEEASVNANEVAGAAEQMSANMNTVATAIEEMSTSINEISTVAGEARTVAGEATVKSKEATEVMNKLGIAAKEIGQVTDVIKKIADKTNLLALNATIEAASAGEAGKGFAVVANEIKELANQSAQSADDIAQRIEGIQSGTSNAVTVINDVSQIIVKINKSAEAIAGHAAQQTKASGEIANNVAQANTGAKRVAGAIGEVAKGSKDIAKNAGQASTNTKHVAESIGEVAKGSKDIARNAGQANLGAKRVSEACAEIAKGSKDIAQNAANAAKG

SEQ ID NO: 85060 - protein, 155 aa, Unknown
  Obtained from environmental sample
  DOMAIN (1)...(155): Carbon starvation protein CstA
  misc_feature (1)..(155): Xaa is any amino acid
MNGLFLLVISVVVLSLAYLFYGRSLAKRWGIDPMAKTPAHELEDGKEYVPTSPAVVFGYEFSSIAGAGPINGPIIAAMFGWLPALLWLLLGSMFFGAVHDFAALYASVKNKGKSIGYIIELYVGKTGKRLFLIFVWLFSSLLPGALLTLWPALCP

SEQ ID NO: 85061 - protein, 323 aa, Unknown
  Obtained from environmental sample
  DOMAIN (198)...(319): Response regulator receiver domain
  misc_feature (1)..(323): Xaa is any amino acid
MSKIEANKLELSDSEFDLGKMMTNIVDVTSIRAQEKHQQVVVNMNPNLPTFVICDELRLSQVITNLMTNAIKFTPEKGTVTLSAEKTEEKDGEITLKITVADSGIGISPEQQQKLFNAYNQADNTISGKFGGTGLGLVISKQIIELMKGTIWIESELGNGAKFIFTINVKKGTVKEGQATASASPLVIKATDLDFKAFTILAAEDMDFNREVLAKYLEKTGVTIDFAENGKIALDKFKENPDKYNLILMDINMPEMNGDEATREIRISETNSGRKDRQIPIIAMTADVFKEDIEKCLAAGMTDHVAKPIVPMKIYATLKKHLV

SEQ ID NO: 85062 - protein, 109 aa, Unknown
  Obtained from environmental sample
  DOMAIN (6)...(109): Carbamoyl-phosphate synthase L chain, N-terminal domain
  misc_feature (1)..(109): Xaa is any amino acid
MPLDKNIKKTMVIGSGPIVIGQAAEFDYAGTQACRVLRQDNIEIVLVNSNPATIMTDNNIADKIYIEPLTLTTVKRIIEKERPDSILSGLGGQTGLTLALGQSVHGPQI

SEQ ID NO: 85063 - protein, 321 aa, Unknown
  Obtained from environmental sample
  misc_feature (1)..(321): Xaa is any amino acid
GVHDRLAEDQKEPFSVECLPLKPSMVVRSGGGGWHCYWIFHEPIPCNAEYRGWFEQGLRRISGALAKFGADPKVCDCSRVLRLPGFFHCKGKPAFVTLESVSDARYTPDEVLAAFPAPETPALPTEKGAKPQPAAKANASAKTAAKTSATAKTAAKTSATANPRCAEEAEEEEEEVAPETIVKYVRKLDLAVQGNDGSGTTIKAALKVLDRFGISQEEAVALLDEHYNPRCQPPWSREELARKVSEAAKILAKNAKLNQQHPRVPGFQWRADGLNKLVTKGRGDHADIIPVWVSSPFTLTGLASDERGGNPHLVVPVQHNR

SEQ ID NO: 85064 - protein, 348 aa, Unknown
  Obtained from environmental sample
  DOMAIN (9)...(251): Pyridine nucleotide-disulphide oxidoreductase
  misc_feature (1)..(348): Xaa is any amino acid
IDQIGRGKGVSFDWAAIQKWKTEVVAKLRGGIESRMKRFGVETVNGRGEIIAPPSGETPVKVKSITTDNKTAEHEGKTLLVCAGSVPALPPIPGAKGNPLVVDSAALLTIENVPKQLAIIGGGVIGVEFAGLFSALGCEVTVIEMMDEIVPFMDKEQAPILRRAMKGVDFKLGCKVEKIDGAAVYYTTKDAKAELRKADLILMAVGRRPVLDTWGAQAAGIDTGPRGVAVDDRMRTNIPRIWAAGDVTGKSLLAHCAYRMGEVAVADILATLDAGTGNKEQGTGNREHGAADKANRMRYNAIPWAVYGITEAAGVGLTEAGGRGQKRRDPQAKLPMKVSGPLPQKTLC

SEQ ID NO: 85065 - protein, 238 aa, Unknown
  Obtained from environmental sample
  DOMAIN (2)...(238): Homoserine O-succinyltransferase
  misc_feature (1)..(238): Xaa is any amino acid
MPIKIPKALPAYEALSKESVFVITDDYAEHQDIRPLRVGIVNLMPTTMETEIQLLRLLGNNPLQVDITFLNMGSHLSKNAPPGHLEKFYISAEEIINMKVKFDGLIITGAPVENLPFEEVDYWDEFARIIDYSEKNVFSVMHICWGAQAGLYRRYNIPKEPLEKKLFGIFPHSVNEHHHVLFRGFDDEFLAPQSRHTGCSSSAVAADSRLQINPKLPKQEFLSLPRAGEREIYVTGHL

SEQ ID NO: 85066 - protein, 120 aa, Unknown
  Obtained from environmental sample
  misc_feature (1)..(120): Xaa is any amino acid
MPLLKVSDESIRQAAAVLVQGGLAAFPTETVYGLGGDAFNPLALARIFEVKGRPCFDPLIVHIAAGETLEKIADLSLLDTQAREHLARVTNSCGPVLHSDSAQTKNHTGYCYQRTALRCR

SEQ ID NO: 85067 - protein, 323 aa, Unknown
  Obtained from environmental sample
  misc_feature (1)..(323): Xaa is any amino acid
ASNYSSVGGVYVYQGTFTMNSGEISGNTATATNKGIGRGGGVTLDRATFTMNGGTISNNNSANYGGGVGVSADSNYTFTMNGGTISGNTTNDSYNGGGGVYGNVTMSGGTISNNTANYNGGGVYGNVTMSGGTISGNTANYGGGVRGSVTMSGGTISGNNAIHATEGRGGGVYGDVTMSGGTISGNNATNGSGGGVYGNQNVIMSGGIISGNTANYGGGVYVLTFSMSGGEISGNTSNGSGGGVYGDENVIMNGGVISGNIARTYGGGVYALAYSNRNTITKTGGTITGYADDTATGNVVKNTSNVVQNNMGHAVLGRSDLGP

SEQ ID NO: 85068 - protein, 205 aa, Unknown
  Obtained from environmental sample
  misc_feature (1)..(205): Xaa is any amino acid
MMARGHLVGSALIWFFCNYPGIANRELSHRHSAAILEVKAMGLGAEEELKEIERLDTEYRAEILNSSFAASFGRLMQRPLQPILDPDGTRQDAWKDGVALTAGFVAKEIVVSTIAVMYKIPDSDLKAGGGSLKEALRRDSGMTGLTAVSFLVFALLYTPCLAAVSMIHKETGSLLWSLFTVLYGFCLAWGMSWLVIEIGQMAASW

SEQ ID NO: 85069 - protein, 63 aa, Unknown
  Obtained from environmental sample
  misc_feature (1)..(63): Xaa is any amino acid
VSLGVLNASLMNDAVYKFKRYEDSSLSYTGIDKHDGETEVGGYDTVISKKEFDRLFMAQQASM

SEQ ID NO: 85070 - protein, 203 aa, Unknown
  Obtained from environmental sample
  DOMAIN (1)...(183): Peptidase family M48
  misc_feature (1)..(203): Xaa is any amino acid
ILAAIPSFTRPDVIRFPCAILDSNEINAFATSGGHILIQGGLINAANSEDALAGVIAHEVAHIQLQHSIIAIKSSRITQALLITGTSAAGAAAGMDVNQLTDVFNESVGEIVQTLVNNGYSQTQEYDADNTALSLMAGAGYNPRGLIDMLKELNAIQSKTAGGFNKTHPNPDQRIANAEKSVGKYNVTDNRAIRQARFNAAVK

SEQ ID NO: 85071 - protein, 318 aa, Unknown
  Obtained from environmental sample
  DOMAIN (93)...(295): Phosphomethylpyrimidine kinase
  misc_feature (1)..(318): Xaa is any amino acid
MAKGKIVVFGSFVTDLTSRQEGLPVPGQTLLGTSFKTGPGGKGSNQAIAAHRCGADVTMVTKVGKDVFAEMVRDFYKREGMDTSWFFVDEVNSTGSALIMVDEKSGQNMIVVVTGACQNITKEEVEKARPLIESASILLLQHEINFDAQFEAIRAAKKAGVTVVLNPAPANKIPSDIIRLIDIITPNETEAEAITGIKVTDKESAKKAADVFFKQGVKKVVITMGKLGAYANDGERDELLPCLQVKTIDTTGAGDAFNGGFVTALAEGKDLVEALRFGNAAGSLSTTKVGTAPSMPQRKEVRPRWCNKSWFDRIRVYW

SEQ ID NO: 85072 - protein, 94 aa, Unknown
  Obtained from environmental sample
  misc_feature (1)..(94): Xaa is any amino acid
MNISAQNLDHKELNKLIRTSTEAVFVENCFGQRFIGSGMSGKNITINGTPGNAMGAYFNGEKIVVNGNAQDAVGDTMNDGKIIIHGTRAIMRGL

SEQ ID NO: 85073 - protein, 309 aa, Unknown
  Obtained from environmental sample
  DOMAIN (126)...(274): Thiamine pyrophosphate enzyme, C-terminal TPP binding domain
  misc_feature (1)..(309): Xaa is any amino acid
LVLGLPAEYTPNKVPAIMPGPQGPGKPQVDIDLSELHKPTLAMEMSVQADLKVFLPLLQEALKNWQPSPAHLEWLNWCRERVARYPVLPAREYGAEGLINPYFFMDRLFARLGLGDVVVAANATAAVTSMQAGQIVEGLRLYSNSGSASMGYDLPAAIGAAAGGAGRNGRLICLAGDGSVMMNLQELQTIVHYRLPVIVYVLNNNGYHSIRQTQEAYFPDNLLGLDPASGLTFPDYLEVAAAFGLPGRRISSHAEVEDFLAWSLAGPKPACHEIRLDPGQNFEPKLSSRQKADGSMESARRKIWPPRPI

SEQ ID NO: 85074 - protein, 265 aa, Unknown
  Obtained from environmental sample
  misc_feature (1)..(265): Xaa is any amino acid
VVFRKSAEEARIDPDNPYILTDHVKCACFELPFLDGELEKGYCYGENAKDVLEYLEESGVVRHTSGKWHWSDRSYPAEAVSLRSASADNVVIIDLTDGKNSVIGEMDRPSAKELIFVNAVYIHRGRQYLVEELDIENRKCLVREADVNYFTDGLVKTDIKVLCEDEKIKYKEADGVLSDVLVRSQVTKFKKLRFHTHENIGYGDISLPEEETHTRSLALLFGPESACGKLLEKMDEQEIGEALYGMGNLIRNIAPFPSLDPLAII

SEQ ID NO: 85075 - protein, 208 aa, Unknown
  Obtained from environmental sample
  misc_feature (1)..(208): Xaa is any amino acid
ECGYRNFAGSFESKNEEVLNDARKSLYKAVIYLEEAVSNYIDVPFSDYEAKLSLLESFDENQRYFLIRKMGLAIDLLEYAYGDNSKWRWTFVEMEGRFATVAKNILDLRRVIEYSTFESPYYESTSYHLRLIKRLLAQSADRYREKYELSTGQIPDFKTGISFLGALRRLHILMAESEEAENIKKKMAIWKTKLEADHKKQEEAKKRA

SEQ ID NO: 85076 - protein, 85 aa, Unknown
  Obtained from environmental sample
  misc_feature (1)..(85): Xaa is any amino acid
MARDDGLCHCRRDLKLRGPGQIAGTEQSGYLSLGIANPIRDIDALTKAREDAFSILENDPGLVLEGHRIIARVLEEAPPFTGVGL

SEQ ID NO: 85077 - protein, 57 aa, Unknown
  Obtained from environmental sample
  misc_feature (1)..(57): Xaa is any amino acid
GRIREDETIANGLNLWVVADNIRKGAALNAVQIAEELLRRKLVRVRDPRLFLAGTGQ

SEQ ID NO: 85078 - protein, 78 aa, Unknown
  Obtained from environmental sample
  misc_feature (1)..(78): Xaa is any amino acid
MNIAARHLDFKELNSRIRTAEEAVCIDGCYGQRFIASGMTGKNLTINGTPGNALGAYLNGGIIMGNRHAQDVVGDTMK

SEQ ID NO: 85079 - protein, 316 aa, Unknown
  Obtained from environmental sample
  DOMAIN (1)...(315): Uncharacterized ACR (DUF711)
  misc_feature (1)..(316): Xaa is any amino acid
MLFTAKEIQETVDMFLRYKLDIRAITLGVSLLDCASSSGETTRSNIRAKLERIAGPLVKTGRDIETEYGIPIINKRIAVTPIALVAASCGDSDFTPFAQTLDKAAVDLGVDFVGGFSALVQKGFSGGDERLIASLPSALAQTERVCASVNVAATKSGINMDAVKLMGGVIKQIAEKTASHDGIGCAKLVVFCNAPEDNPFMAGAFHGIGEAESCLNVGVSGPGVIKAALENLSGASFDELADAIKKTAFKITRMGQLVGMEAARRLGVPFGILDLSLAPTPAVGDSVARILEEMGLEAAGTHGTTAASAESVIEFS

SEQ ID NO: 85080 - protein, 533 aa, Unknown
  Obtained from environmental sample
  misc_feature (1)..(533): Xaa is any amino acid
MASVLPIEIDTGRNTYRAAEEAQVKIKVLLNGKPAANTEVSFLAVDRGVLDLIDYHVPDPLASFYDPRNFPLGARGADSRSLLIDPVTYNISDLQGGDSDDGEKGRDGADRFNGDMKERKDWRPTAVFEPYLVTGPDGTVTVKFKLPDSLTSYRCTAVAVGVNNFGIKERDLRVSAPLTAIAALPRKLRWRDTGTVSLILTNLENTAVEAGVTLASSAESGAETIIEVDGTDSKTVKILPGASQEVSFKVAALGVGVARLAFTLRSPQVNERILKTLIVDRPSLTETVTTIGNLGPDNPFIEEGIVLPSLVPEGTGNVSVSLSASRLATLKEAVRYLLDYPYGCIEQRTARLLPIVAFGEYLDTFDLESPLAAFGEYLDTFDLASPLRGFSPWNPQKLVEKELEELAKFQLADGSFPYWPGGRYGNLFVSMRMAHIAALAKAKNMKVPDSIDTRKLLSYIAAESSDDKLEDPFIKGYSLWIRTMYNEKISSEITAFLKRGDELGISGWAFAGLAALKWAKGSGSADLILGPPH

SEQ ID NO: 85081 - protein, 322 aa, Unknown
  Obtained from environmental sample
  DOMAIN (2)...(322): Aldehyde dehydrogenase family
  misc_feature (1)..(322): Xaa is any amino acid
MTVREPIGVCGLIAPWNYPLMMAAWKIAPCLAAGNTAVFKPSSLTPLSSVRLFELFESVSLPKGAANLVMGGGTDVGDAIVRHPGIGKVVFTGGTDTGKSIMRTAADTLKGVGLELGGKSPCVIFDDVDIDIGVDWALFAIFCNQGEVCSAGSRLLLQDTIYDKFLTRLADRSNKIKVAPGTTDGAEMGPLVSEAHMHTVLGYIEKAKSEGARLICGGKQLTGPVYDNGYFVGPTVFADCTPKMTIVREEVFGPVLAVQKFSTEEEAISLANDCDFGLAAGVFTNDISRAMRVVKAFRAGITWVNAYHPTFTQAPWGGYSTA

SEQ ID NO: 85082 - protein, 285 aa, Unknown
  Obtained from environmental sample
  misc_feature (1)..(285): Xaa is any amino acid
VPQTIFVGDSGRLVVPLGRAFARITPFILDAPDKLPETPELLIRRLELERRSGATRLLIDFIPYAAGVLSLPDLEILSPGEGTEPLVLSGLEVQVASILNPSQMTLSGPASPITAPGTSFLIYGTIIIFILLLCLGIGISLWGRRHFRELWELFRRRRLINAMSKFLRCLRQECSLEKEGDPNYYLTLLSKEFREFLSLFSGINCRSLTPGEFLELPLSQTALTLGPVYLCWLFQNWETLRFNGQRMEMADMFMALDEIERLIAAPGQEEREKSLPKSLRMAETA

SEQ ID NO: 85083 - protein, 308 aa, Unknown
  Obtained from environmental sample
  DOMAIN (83)...(191): TonB-dependent Receptor Plug Domain
  misc_feature (1)..(308): Xaa is any amino acid
WEGAAARGEPGDLPDAFSSTAILGVGVGGEFLVFLAYNALRRVRALALVLLFASATASQEALAESDSVIIIDGDDFEITVKQRAAATLSPSSRIIKASEFRGKFADLPSVLESVSGVEIRSTGGYGQYAESAIRGSSALGTRVYLDGLLLNSASTGAVDLSKIPLDRITEIRVTKSTSGLRQMGAGMGGVIELFTADGGTGQNIIGIDIEAGSFGLLKGGAIIKYSDKKTGLLRRSAPRNDVIASVAKQSRKPHLLKTTHQINIDVSKSDNDYPFIHDNGTTLSTLRDPDPTRDDTGMRKKNHYYKSI

SEQ ID NO: 85084 - protein, 329 aa, Unknown
  Obtained from environmental sample
  DOMAIN (37)...(162): HD domain
  misc_feature (1)..(329): Xaa is any amino acid
MTEKQAEWTVCAPFIRLSRIFQLAPVYLTYPGATHTRASHSIGVYHIGRRLLQNLAERGASEWLTPEGVKSFLAACLLHDLGHFPYTHSLKELALASHEALTGEIILNEPVKTLVGGTGADPQLTAAIIDKEISGSGTELLFYRKLLSGALDPDKLDYLNRDARYCGVPYGSQDVDFILSRLSPNKERGVDIDSRLIPNVEAILFSKYLMYRTVYWHHQVRAATAMVKKALINGLESGKIKGEELYNLDDTGLFTLIGKKTGNPLVESVKEGRIFATAAEIPVNLKDKTGIKEINTRSRLEEQLAAELCKAGIQITKDDLIIDIPEPVP

SEQ ID NO: 85085 - protein, 252 aa, Unknown
  Obtained from environmental sample
  misc_feature (1)..(252): Xaa is any amino acid
MSISRRNNRALNRVLRGSLRAHEPPPQEAAPAEPAYTLCSDIPENYNDSYVRAIPKDPQSTFVYWELPATGQEDQSLFADKGTAHVGNDEAVRIGQQLNEKQKHRQAEICRHTDDSGGYQQDYSQYDYNKFNRPMNWDNGNNYDFDGGNQQQYHHGVDNYQDGNHGYHQINWDNGNHYNFDHNNQQQYLHGADNYQEGGHGYHQINWDNGNHYSFDDIYQHLHLNHVNNQYDWKRRHHHSRDDVYQNNQTND

SEQ ID NO: 85086 - protein, 127 aa, Unknown
  Obtained from environmental sample
  misc_feature (1)..(127): Xaa is any amino acid
EVSKRLDFESCPALESAIEGALDDANATALMRYQTKVNFSPRSWEQVETDDIGMNKFNLAQFMYGNHIKYSPTLDDSSNSTEAFLKTTGWSLSLNTWYLYFRKIYFPQDPEIHGRWEWAGIYYGEKF

SEQ ID NO: 85087 - protein, 527 aa, Unknown
  Obtained from environmental sample
  DOMAIN (434)...(526): Response regulator receiver domain
  misc_feature (1)..(527): Xaa is any amino acid
MIGASEEYILKDVKDMTYFTIILTLIALVLSTVIVYFTLHSTTKPIVTVAATLKDISEGEGDLTRHIDVNTKDEIGDLAHYFNKTLEKIKKLVLIIKKEAAGLHEIGNDLASNMTETAAAVNQINANIQSIKGRVINQAASVTETNATMEQVIANINKLNGHVENQSRNVSQASSAIEEMVANIGSVTNTLVNNSANVKTLREASEVGKAGLQEVASDIQEISRESEGLLEINAVMENIASQTNLLSMNAAIEAAHAGEAGKGFAVVADEIRKLAETSGKQSKTTATMLKKIKASIDNITKSSADVQARFGAIDSSVKTVSEHEQNIRNAMEEQEIGGRQILESIGRLRDITYSVKKGSDDMEQSGETLVEETDEFIKISKETVDGMNEIMAGINQINVSINHVNEMSIENNNNFESVKQETQKFNVTDDNEKKKILMVDDDEIHLEMVESVLQTDYDIVTAKSGKEALGLFYPGLVPALILLDLIMPDMDGWNTYTRIKAISNLHDIPIAFFTVSDDPKTYSTRKK

SEQ ID NO: 85088 - protein, 190 aa, Unknown
  Obtained from environmental sample
  misc_feature (1)..(190): Xaa is any amino acid
MRAKAVFSLFGRTLPSKKTVYYYQCYDAKGKRQWAKSTGLTKKTEAMAYCIKLFKDGLLIPEQKVPLFSEFSNGWWDLDTCRYLKWRQLRDPIQEGTLSMHKRNFANHIKDYFAKYRLDEITPNVIEAWLLGLSGQGLKPNSVNTLYRTFKLMMGEAYRLKIIKENPCKEVKDLSVTSRSGSRPICQWWT

SEQ ID NO: 85089 - protein, 81 aa, Unknown
  Obtained from environmental sample
  misc_feature (1)..(81): Xaa is any amino acid
MKARIILHGEFSIGETDKRLFGSFIEHLGRAVYTGIYEPGHPNADSNGFRDDVAELIKEMDVSVIPYPGGNFVSGLYWEDE

SEQ ID NO: 85090 - protein, 278 aa, Unknown
  Obtained from environmental sample
  misc_feature (1)..(278): Xaa is any amino acid
MLNFGFLGSEGIAQTYFLGLVPSEKTLDMGILYFFILGIAGASGSFLAGLFLDFFRFIGLSYFLAFKILFIIMITLTILALSIQKKMKPLGSLPLSNALEVIFSVRDLRAISLLGKLNKAEDSSQEKILLGELHNTPSHLAIDGILERACSPKMATRTEAIRALEMLQKLSKKAEKALVDDAMNNPYTTAYISARILGKHNCTEAIPILREITKSGDYMLAGEAIIALAKMKDEAFRPEIEKLILSSDNPRLKIMGAEALGLYQNVESVHYFRLYASP

SEQ ID NO: 85091 - protein, 251 aa, Unknown
  Obtained from environmental sample
  DOMAIN (1)...(96): Acetyl co-enzyme A carboxylase carboxyltransferase alpha subunit
  misc_feature (1)..(251): Xaa is any amino acid
MALNMQQKLDLLKNLGRPTIRDYIPLVFKDFIELHGDRYFSDDPALLGGICLLNGIPVTVVSQVRAKDIAELQRINFSMPHPEGYRKALRLAKQAEKFRRPVICFIDTPGAYCGVGAEERGQGEAIAHNLHDFMMLKTPVISVVLGEGGSGGALALGVCDELAMLENALYSVISPKGFASILWKDGSREREAAELMKITAEDLKRFGVCDHIIAEPDGGAAKDISPYCEEHSVMAGRYRKAIDKRGLLRPS

SEQ ID NO: 85092 - protein, 185 aa, Unknown
  Obtained from environmental sample
  DOMAIN (2)...(174): Mechanosensitive ion channel
  misc_feature (1)..(185): Xaa is any amino acid
RSWHWRYCGGSCSSKILGDLFASVSIILDKPFEVDDLISLDTITGKVESIGVKTTRIRSVTGEQIIVSNSDLLESRVTNFKRMQERRITFGISVSNETAKENLQEIVAIVKGIIENQSNARFDRGHLKGFSASSVEYEFVFWVTKPEYITYMDVQEKINLAILDAFAEKNISMAHPAQKVLLGKT

SEQ ID NO: 85093 - protein, 162 aa, Unknown
  Obtained from environmental sample
  DOMAIN (13)...(157): Prolipoprotein diacylglyceryl transferase
  misc_feature (1)..(162): Xaa is any amino acid
MSYSWWNTIPQHLDPTAITLLNFPVRWYGLMYLLAFFFGYHLIWHFTNKYKIQPMKKEQLESVMTWLIAGVLLGARFGYVFFYNFGYYINHISEIILPFSFSGGFHFTGIFWDELSWRAYRFFFGGFVCHKKAKIGLLKSVNTIFFGGLLVYTLGRLGNFLN

SEQ ID NO: 85094 - protein, 518 aa, Unknown
  Obtained from environmental sample
  DOMAIN (1)...(517): AcrB/AcrD/AcrF family
  misc_feature (1)..(518): Xaa is any amino acid
MINLPIDLYPEVNPPFLVVYTSYTGAGPEEVERTVTRILEAALSGVSGMEKITSTSSKGSSLVFMEFTFGTNLEDASLSIRDALERIRRIMPTNADTPMIFKFDPSMIPIMGLMITGNRTPEELREISEDTIVPRIEQTPGIATASVNGGREKIIRVEIPQNRLEAYGLTVTQIQQMLGAQNIQTSAGTIIEGGMSYILTTMGEYRSLDEIRNTVVSYKGGGYTGAQVELPRQVYLRDLADVFEGYRDETSTVYVNGRPAVMMTVQKQSGKNSVQAAKDLRVRLEKLVREIPPDIKITEMFNTTDIIENSLGQVTSAAFSGALLAVLILFIFLRSIKPTLIIGISIPVSIIVTMMLMYFTGLTLNLMTMAGLVLGIGMLVDNSIVILENIYHYREKGAKLRTASIIGTGEMVVAIVASTLTTLCVFLPLVMFKGLLEMPGELFAGLAFTVVISLAISLFTAIFLVPILSSHYLPLVTRKQKPLTGRLAKIDAKFERFFAWLTKSTAGRGQSLGRICAC

SEQ ID NO: 85095 - protein, 366 aa, Unknown
  Obtained from environmental sample
  misc_feature (1)..(366): Xaa is any amino acid
MAIASSKTMRALIFLGPSVKYAFEKQRGSAVTWINNSPRFINKFNITTQGLYRSFPFDNTMNVSIQAAARVFNYSVISKILKETLIFILIGFTLAFFTMLLQLLLGNTEEPEEAPILKHEFSPVDIRVSEPVSVRVNEPVNVHIHETVHTPPVSEPVNVRVNEPVNVHIHETVHTPPASESANVRVNEPVTVHIHEAVHTPPASEPVNVRVNEPVNVHIHEAVHTPINEHVSKPITFSAEDLIDDESGPKGLYSPRTHIGWEERVLDRLNSELHRCASTEKDLTLLMLEFKEKITNYQFKDAAREAASLFTSRDLLFEKGEQGITVIMPGIDLESGLDKAQKSSFVSKKNFSLIQRRLCLYRTFFA

SEQ ID NO: 85096 - protein, 194 aa, Unknown
  Obtained from environmental sample
  misc_feature (1)..(194): Xaa is any amino acid
MDQIRFDSAGHKLTQTIEIERLKLEASINSEIAIALRMADSPLIKWYFLNPDDENMKQIALGEIAGYRRAFTGKNVFWVGDVDKKYYFNDEYIYTIDSSAESSWWYNSIMKSQSPYSLNVNFDVGLKKTMVWVNAPVLDEDHKPVGIVGTGINVPDFINAINYNNPETEDELFFFNAAGDIIKAKDINLVERKQ

SEQ ID NO: 85097 - protein, 91 aa, Unknown
  Obtained from environmental sample
  misc_feature (1)..(91): Xaa is any amino acid
LAKTGVSRRLKIKIPENLDYEGLFDNIFAKYTTRITLEKVASTDMGSLFELTYSVRLKPSLNNPKAFIDELRCCNGNLNITLSRNRSGEEL

SEQ ID NO: 85098 - protein, 360 aa, Unknown
  Obtained from environmental sample
  misc_feature (1)..(360): Xaa is any amino acid
MEPHREKKPKPKLERKPGGQVGHTGVTLQQTEHPDAIIEIKVDRDGLPPGHWKYAGYEKRQVFALKIVTHVTEYQAEILVNETGDKVTAEFPPGVVQKAQYGNGVKAHSVYMSVQQLIPCERVREHFDSQMGLPLSGGTVHNFKEEAYHLLEGYETWVKARIRKCKIIHCDETGIVIEGKRVWLHVASNEHYTLYYPHEKRGKAAMDETDVLSAEEGVLIHDHWKPYFTYGNKAHGLCNAHYLRELTAASEEGQKWSERMVELLTEANNHTVEGGGKLGEDEQRRVRRKYRRILGEAEKENPISPWQGEGKRGRRAQTKTRNLVDRMREYEEDILRFMTDIDVPFTNNQAERISRADLIL

SEQ ID NO: 85099 - protein, 198 aa, Unknown
  Obtained from environmental sample
  DOMAIN (7)...(175): short chain dehydrogenase
  misc_feature (1)..(198): Xaa is any amino acid
MSQQPQKHALVTGATSGIGLAIAEALLGDGCFVYLNYAHDEERAKGVVSRLAPFGNNFGFIRAGLSEYGGTSKIVAALQDGGAPLTYLVLNYGATDRALFNEIAIEEWERVMRANVNVPFFIIQSLYNASLFAPAASILCISSLMASIPHSVSVSYGVSKAAMSAMCQNLAKFLAPSDIRINAVEPGFIDTPWQKENP

SEQ ID NO: 85100 - protein, 141 aa, Unknown
  Obtained from environmental sample
  misc_feature (1)..(141): Xaa is any amino acid
DTTDWPSFSDASLSGALLSDNTAKAIRNTSVPEKAPIEQRKPRAFRVDLQSPAGGEDSALFEIISESFVNRDWDKARVDLQHYLSLPHSKDVEARARFYLGQTLYFTGNFKGALFEFLSIKSIHPVEANMWIDSILAAMVY

SEQ ID NO: 85101 - protein, 219 aa, Unknown
  Obtained from environmental sample
  DOMAIN (1)...(205): tRNA synthetases class II (D, K and N)
  misc_feature (1)..(219): Xaa is any amino acid
MEDLGFTEIQTPILTSSSPEGARDYLVPSRKHHGKFYALPQAPQIFKQLLMVSGFDRYFQIAPCFRDEDARADRSPGEFYQLDFEMAFAEQEDVFHVAETVMHGVFTTFSNKTVSPAPFIKIPYAEAMLKYGTDKPDLRNPLVISDLTGFFADVEFQPFKNIPVRGIVAPGAALQSKSFFEKMLVFATEIGMKGLGYISVTEDSGLKGPILGRSDQWLN

SEQ ID NO: 85102 - protein, 58 aa, Unknown
  Obtained from environmental sample
  misc_feature (1)..(58): Xaa is any amino acid
ASTYETADIISTHVYRVGLLDRNWSYSTAVGLFNSAINFILLIIANKVSRKVSETSLW

SEQ ID NO: 85103 - protein, 238 aa, Unknown
  Obtained from environmental sample
  DOMAIN (6)...(39): Tetratricopeptide repeat
  misc_feature (1)..(238): Xaa is any amino acid
LNHNDAKAYSDRADAYRGKGDFESAIADYDEAIRLDPNHAAAYYGYGEAYSNPTKGDRDKAIAYYTKAIGLDFKYVVNYFEEGNVYKDSNGNMSYLAEAIKTCQDEFFDKLKTDREDTAKTFEKPSVRGVKKDMAEKYSDKVHFIYELLQNADDAMATSARFELLPDKLIFAHKGTRRFFISDPTSKGEEKDGESRYLGKYKCNYIDCQLSKSTDENTVGNSGVGLKRCFCIPTRRKS

SEQ ID NO: 85104 - protein, 315 aa, Unknown
  Obtained from environmental sample
  DOMAIN (11)...(38): NHL repeat
  misc_feature (1)..(315): Xaa is any amino acid
TMFREILYEGFKSPRGVFITADETLYVADSAAGAVFIFNPRDECIKTIYAPNSIAFGDTQFAPYRIGVDPRGSMYIIGEGVYDGIIHLSNEGEFLGFFASNKTTLTFIQLLQKIFFTERQKQGLLDRLPLTFSNVFVDSRGVVYSTSMGRDIARAGQAIKKHDMAGRNMLKTATTMSITDIAVDRYGNIFTTSTEGWIQVNSGDGEEIFFFGSGHLSNEDIAGWYTNLVSIAVSSQGHIWALDGEKAFLQSYTPTEYTEAIYRAQRLFNEGHYVEAGKEWNNVLRFNQMSVLAHNGLGKSFLYQEEYEKARYSAI

SEQ ID NO: 85105 - protein, 208 aa, Unknown
  Obtained from environmental sample
  misc_feature (1)..(208): Xaa is any amino acid
MQIKKILFVNKRLKTASDGVYALALLLPYGLLFSVFIAIPIAVAIYLSFTYFDLVQAPTFAGLYNYVTLLTQDTVFFKNVLPNTIQFALIVGPGGYVISFLMAWMLAQIQPAPRTILALLLYMPSLAGGVFIGVLWRTIFSGNQSGYINAILLNWNLIQTPIQFLQSPKFLMGIMILVSLWSAMGIGFLAMLAGILNINVEIVRSSLY

SEQ ID NO: 85106 - protein, 334 aa, Unknown
  Obtained from environmental sample
  DOMAIN (47)...(113): His Kinase A (phosphoacceptor) domain
  misc_feature (1)..(334): Xaa is any amino acid
DPVTNGIYRNAARYIEWSDGRIVLIQHSVDVTELTIAKEQPEQSSRYKSQFLSRMSHEVRTPMNAILGITEIQLQDETLPPGMREALDRIYNSGYLLLGIINDILDLSKVEAGKLELSPVRYDVPSLINDTVNLNIMRFDSKQVAFSLEVDESVPTALFGDELRIKQILNNLLSNAFKYTEKGEVSMSVNAEYPRQKDAPPQVTLVFRVADTGQGLTREQVDKLFDEYTRFNLDANRTTEGTGLGMNITKNLVRMMDGEISVESEPGKGSAFTVRLPQEIADSKVLGRELAEKLKQFNVGRIAHIKNAPQILREYMPYGRILVVDLGRSDHWLK

SEQ ID NO: 85107 - protein, 88 aa, Unknown
  Obtained from environmental sample
  misc_feature (1)..(88): Xaa is any amino acid
TDICMAVEVKHELDKMKDVDEHIKRMQLIRQYPVELIGNKQLLGAMAGGVVDPNVKEYAYKSGFFVLELTGESVHLIPPPEGFEPQKW

SEQ ID NO: 85108 - protein, 76 aa, Unknown
  Obtained from environmental sample
  DOMAIN (8)...(62): Chorismate mutase type II
  misc_feature (1)..(76): Xaa is any amino acid
MNIDTLNKEIDGIDEQLLKLFEQRMELAKKLGQHKQDISQPVMDTEHQRKILYQLCEQTRPELAGYVKVSVFSLFE

SEQ ID NO: 85109 - protein, 294 aa, Unknown
  Obtained from environmental sample
  misc_feature (1)..(294): Xaa is any amino acid
VYYNNEGASTAAGSGSPTGILAASSAMLKKQGTYINWDFSNVWGIIEDISYPYLKNNPGKITVPLSATIEAEYFIGQTYTGSQIKPEPTVKLKADGTILTKGTDYDLIYGTNINAGKGTVTIVCLDGDYIDFEETIEFDIIPKTLTISNATAQNKVYDGTTAANITGTLEGIVAGNNVTIGSGVFASKNFGTGIAVSNVAIVGTSAANYKLTQPADLTANITQKPLSITLNPKTVTIAKSDPMTKVTEKLVYNGLVSSETSSVIARTTAVFKDGLLLNTTPAAGEYAITLFGTR

SEQ ID NO: 85110 - protein, 37 aa, Unknown
  Obtained from environmental sample
  misc_feature (1)..(37): Xaa is any amino acid
MQQYNIHEAKTHLSSLIDNAIKGNPFIIAKSGKPVLR

SEQ ID NO: 85111 - protein, 102 aa, Unknown
  Obtained from environmental sample
  misc_feature (1)..(102): Xaa is any amino acid
MNDNTFILGVDLDGVVGDFYGAIRKIAAEWLDRPLETLTTEVTYGLDEWNIIEFGGYDRLHRFAVTQRNIFRDMEPLKDAPATLRKLSHLGLVPNLSCPPPK

SEQ ID NO: 85112 - protein, 190 aa, Unknown
  Obtained from environmental sample
  DOMAIN (1)...(64): LexA DNA binding domain
  misc_feature (1)..(190): Xaa is any amino acid
MKEPTERQKEVLGFIAAYINIHTYPPTIREVADFFSISIKGASDHLTALRKKGLLKQGDKKYRTMELVGAEGEEDFTEIPILGSVAAGLPILALENMEGSIKMHRTLLRNKAKYFALKIKGDSMEEAGIMDGDMAVIEHQSTVRNGEIAVVMLDDAVTLKTFYKESTRIRLPPENSKYSPIYCSKDVRIL

SEQ ID NO: 85113 - protein, 198 aa, Unknown
  Obtained from environmental sample
  misc_feature (1)..(198): Xaa is any amino acid
WFTTDQIGRDSPLHHELNLGGYKDVHDPAITLRFKVKGNKEGFGVQGSGFRGEVYFLAWTTTPWTLPSNLALVLGPDIDYVLIEALTEPRTPNPEPQYYILAKERLQAYFKETSEYKIIWSKKGGELLSLEYEPLFPYFKEAAAQNAFPTYPGDLVSTGDATGIVHTAPRFGENNTRVLNNTGIPVICPHDTQCKFTE

SEQ ID NO: 85114 - protein, 124 aa, Unknown
  Obtained from environmental sample
  misc_feature (1)..(124): Xaa is any amino acid
MMDIGPIHRTEYELENDRSEPVIVAEAPGRVHYLGEHGESKSGLLLSSAIDRYIRVAVSGRKDSSLRFYAADLGERKRSTLVNLKYKREDRWANYIKVAIHLFAELGFPVKGLIHLIGSADLIH

SEQ ID NO: 85115 - protein, 253 aa, Unknown
  Obtained from environmental sample
  misc_feature (1)..(253): Xaa is any amino acid
VNKIIDTLFSGALFHTLRTEDETFRFLGETNGKITFLSDTYPENIHCKKEISLNGAHAYPSFTDAHMHLMYSIAVAALGFHICEIRKNGVVPDTVEGAGLRLREYCSTRGADDIIVANSYVISAIKEKRMPTRHEIDAWTGSRRAVIFSIDGHSSSMSTAMLRSLDINPEGHDGVLQGTEHDFRLGRITEIITKSVGIRDIMRGVAAFINQCADCGITRVCAFDGHGDAKGDTLIKLLEVIAPRLEYDVFLYL

SEQ ID NO: 85116 - protein, 292 aa, Unknown
  Obtained from environmental sample
  DOMAIN (106)...(148): LysM domain
  misc_feature (1)..(292): Xaa is any amino acid
MEAEQRVIQYATTGITDIINKLSPAASEEVSDENAKANIQNDNPHGSIITFEWQQYKVKKGDSVSGIAKKFDVSIGAIIASNNIANARKLQEGTVLKIPNIDGIPYQVQKGDNLSKISASFKVPLDVILDINDIKSDNIRAGETLFIPGARMNDIDLRMSLGETFMYPLHQKFITSSYGMRKDPINGALSFHTGLDLRANTGTAVLASLDGVVSFVGENWLYGKHIIVSHSNGYKTMYGHLNAFSVKQGDRVTRGRKIAESGNTGYSTGPHLHFGIYDKNNKLVNPLELLNK

SEQ ID NO: 85117 - protein, 306 aa, Unknown
  Obtained from environmental sample
  DOMAIN (51)...(283): Transposase DDE domain
  misc_feature (1)..(306): Xaa is any amino acid
MLKLAGFVRYQESRFFQFSKCGEWLRWLCQNICRNNKAIVQPPEWLGDRKAYIVDASDEPVHGSDKADYRLHYAIGLFDLGMKEMALTTTETGEKASNFKTFGEKDIVIGDRAYCSKQGIEYLLGKKSDFLFRFGTKRFHVYNRNRVAVNILGYFKGIKAGGIGEKTLYYEYEGEYKPLRFCVLRKTKEAEQAGLEALRKTQMRKYGNKELSKAQMAYNRYVIIVTSITDVAAELILDLYRQRWQIELAFKRLKSLFKYHEIPVHVEQSAWAWFYGKLLLAALCETWVTKGVFPPRRKAELGRSVM

SEQ ID NO: 85118 - protein, 308 aa, Unknown
  Obtained from environmental sample
  DOMAIN (182)...(305): Redoxin
  misc_feature (1)..(308): Xaa is any amino acid
GLSPRIGRNFKIVVDANNNLDLSDDKLFTPLEMTSVADDAVDSIAREHAFNVSFEIFVHNKIVPVSVPLFVMRRSQYNMFVYNFSQYATTQYKGEQIVIISSRFRNLSYEDIEVAFMRDDLKNGKKVKEEDIYRKKEYVEIKNEIYKILGVNTNKSTLVLEKINLPKAQIFSTQIGYKSHPFQGEEFSTKTNISLESLKGKYVLLDFWAEWCGPCIREIPALKELYAKTDRAKFEIIGIVGSSSPDRLKNRIEQHAVTWPQILSDEIVKMYGVRGYPTTFILDTEGVIIAKNLRRKELGEQILSLIME

SEQ ID NO: 85119 - protein, 237 aa, Unknown
  Obtained from environmental sample
  DOMAIN (4)...(236): Amidohydrolase
  misc_feature (1)..(237): Xaa is any amino acid
KNHTDGTVGGLVESMRLGGVDRSVTLPVATKPSQVSTINRGVAETVSAYPGIIQFGAMHPEMEEFEPEIDFMAAHQIKGIKLHPEYQYSHVDDPRAFPIYEKLASAGLIVVFHSGKDPGPFTNDHALPPALKKIRENFPTLKMVAAHLGGWMVWKEVEETLAGLNLFFDTSAIYKLLPPEIFVRICRKHGIDKILFGSDSPWYDQGASVEWIKKSGLNDTEIEAVFGENAKRLLGLC

SEQ ID NO: 85120 - protein, 102 aa, Unknown
  Obtained from environmental sample
  misc_feature (1)..(102): Xaa is any amino acid
MYQIGRARAGNKKGIQLSNNIERESDNIVCRDYKNKIWAWRGFFHETMKAFIRGRKSCLSNPYRDFTTKEKICTYCYAITDDIFLFADMIKNSEETKDNAVR

SEQ ID NO: 85121 - protein, 153 aa, Unknown
  Obtained from environmental sample
  misc_feature (1)..(153): Xaa is any amino acid
MNKQETLSILEKVKSGSISPEDALLKLCTEPFENLGYAKVDHHRELRQGVPEVIYGAGKTAEQIIGIATAMLDKGQQLILITRLTPDIAEHVGAGLPACPYLPPAPPSPAPLAFLLPAFLGVLCDMPSPTGFGKIVMPTGGTSYIPVNGKMPR

SEQ ID NO: 85122 - protein, 153 aa, Unknown
  Obtained from environmental sample
  misc_feature (1)..(153): Xaa is any amino acid
MDKVIIKADELDDHLTADDKSYLQNMNTLFSKALDIFPKVQAGGKNAQNDLISIYQDMGDLMQVICQKNQRIHVYSFTSPKEDQSEASRVIAKLRDAHTDNNEFIYYIQRAYEMLFKLAWISSGSQKNHLIVKTPVTSPAQKLRGHKITHIDD

SEQ ID NO: 85123 - protein, 427 aa, Unknown
  Obtained from environmental sample
  DOMAIN (240)...(357): Response regulator receiver domain
  misc_feature (1)..(427): Xaa is any amino acid
MASVAHERHHRGCPPWGKTAKSAERKDYCLTKIQDASKHLLGVINDILDISKIEANKFTLSYTEFNFEKILQNVIHSLTFRVDEKGQRLKVYYDHSIPSTLIGDDLRLAQVVMNFLSNAVKFTPEGGSISMHTRLVERKEDGCVVRVEVSDTGIGISKEQQQILFRSFQQADSNTARKYGGTGLGLAISKNIVEMMGGQVGVESELGKGSTFHFTAFLKYGKAPEEGYEEAANDINWDNVRVLVVDDDRDVLDYFKEVTASLGVKNCDIAASGAEALALIDEKGVYNIHFVDWKMPEMDGLELTKEIKKRAHAGEKSIVILFSSTEWTHIEAPAKEAGIDKFIPKPVFPSNIADAINEAIGLRRIHRPDEQTRDITGIFSNYRVLLAEDAEINAEIVKSLLEPTDISIDCAANGTEAVKLSADSELG

SEQ ID NO: 85124 - protein, 201 aa, Unknown
  Obtained from environmental sample
  DOMAIN (3)...(197): Amino acid kinase family
  misc_feature (1)..(201): Xaa is any amino acid
MKKRIVIALGGNALGDNLKEQMDAARVTSTAIVDLVEEGHEIVIVHGNGPQVGMIETAFETAAKADKHFPVLPMSVCVALSQGYIGYDLQNTIRMELDHRNMKNQVATIITQVEVDPADKAFENPTKPIGGFHSREEAEILKSKGVPVMEDAGRGWRQVVASPKPLNIIEADTIKALLAAGQIPIPRRRGISADLINGPPN

SEQ ID NO: 85125 - protein, 53 aa, Unknown
  Obtained from environmental sample
  misc_feature (1)..(53): Xaa is any amino acid
MDQIGRDDPLAGGKTGPHLQFLAEVSLLFKSSEKRKEILNAKTPEEVQKILAE

SEQ ID NO: 85126 - protein, 96 aa, Unknown
  Obtained from environmental sample
  misc_feature (1)..(96): Xaa is any amino acid
MGTHILFAVLGGIMCEKIGNMNLGIEGMMLLGASVGFSAALATANPLIAVLAAGCAGAVGAFIYGIITITLRGNQVVTGLILTIFVPLGQSDLGKT

SEQ ID NO: 85127 - protein, 64 aa, Unknown
  Obtained from environmental sample
  misc_feature (1)..(64): Xaa is any amino acid
MIANVLCDAQPVPVAAVGVDNAANAAYLACEILALKYPELKKSLANFRQRMKDELAQDKGGIEL

SEQ ID NO: 85128 - protein, 69 aa, Unknown
  Obtained from environmental sample
  misc_feature (1)..(69): Xaa is any amino acid
KDQIGRAFIGYSAMAGAIGGGGLGSLAINYGYYRFRTDVTIGAVIVILVLVEAVQMIGTAISRSLLSKR

SEQ ID NO: 85129 - protein, 200 aa, Unknown
  Obtained from environmental sample
  DOMAIN (5)...(200): CobQ/CobB/MinD/ParA nucleotide binding domain
  misc_feature (1)..(200): Xaa is any amino acid
MGSICVFVNQKGGVGKTTSAINIGAFMAEAGKKVLLVDFDAQGNLSSGVGAKPVKPGIYELLSGAATPDEAIKKTEVANLDVIPADHDLSGAAVELIDQKERNFFLKKTLAPIKNKYDYLLIDCPPSLGQLTMNGLAAADLVFIPMQCEYFAMEGLNQLLHTTKRLKENLNPSLKIGGIFFYMYDPRTRLANESNKQVSA

SEQ ID NO: 85130 - protein, 91 aa, Unknown
  Obtained from environmental sample
  misc_feature (1)..(91): Xaa is any amino acid
MKARIILHGEFSIGETDKRLYGSFIEHLGRAVYTGIYEPGHPNADSNGFRDDVAELIKEMDVSVIRIPEVTMSQVIIGRWGRAARIPVLSI

SEQ ID NO: 85131 - protein, 294 aa, Unknown
  Obtained from environmental sample
  misc_feature (1)..(294): Xaa is any amino acid
LRLCRILPSLDINLRAGDVITDLGSGPLTFTSALWLSRPDLRSVPLEFICIDNCAPALAAGKKFFAALCSQANCAWKVNTVREKINLKTKTALARKKAALVCAVNFFNEIYEDLPHTDSGALKRAASDAALLMHNQAAAEAGILTVEPGVPQSGQFISLLRSAFLELGRPPLSPCPHSETCPMPGGKAAFGKAAFGKAAFNKANSKTVNTKNRWCHFAYTAADAPKELSRLSAAAGIPKERLVLSYLLAGAHKERQKHAAQKVRVISDAFSLPDNKSGRYGCVQTGWTLGHLIM

SEQ ID NO: 85132 - protein, 43 aa, Unknown
  Obtained from environmental sample
  misc_feature (1)..(43): Xaa is any amino acid
MSAYWNSRIKDLSPYVPGEQPKDRQFYQLNTNENPLSPLAESY

SEQ ID NO: 85133 - protein, 108 aa, Unknown
  Obtained from environmental sample
  misc_feature (1)..(108): Xaa is any amino acid
MNDLFRSLPAVDACLDALAGLPACRTAPRPLARRLVNDYLDLQRRRIREGAPLDPARLALPGCLPALKDFVSEGLRPRLRSVLNGTGVVIHTNMGRSVLAKAAQEAVA

SEQ ID NO: 85134 - protein, 559 aa, Unknown
  Obtained from environmental sample
  DOMAIN (266)...(508): haloacid dehalogenase-like hydrolase
  misc_feature (1)..(559): Xaa is any amino acid
SAVVYSVYNLFRIAGGDHHAVDALYFETAGVIIALILLGKSLEAVSKGRTSEAIKKLMGLAPKTAITVENGEEKEIPIKEVMPGDIIVVKPGAKIPVDGMVTAGQSAVDESMLTGESMPVDKKPGDPVYAATINSNGVIRFKAEKVGGETALAQIIKLVEDAQSSKAPIAQMADIVAGYFVPLVCAVALAAGIAWFIAASIGVVDLPHGKTVTEFALTIFISVLVIACPCALGLATPTAIMVGTGKGAEYGILIKGGEALGTAHKIQTIVFDKTGTITVGKPEVTNVVWSGEWGLGNSEKGKNTDLFIQLVAAAERNSEHPLASAIVREAEKRDLDLPPVTDFKAIPGRGIEAKIREFGTWSGEISILVGNRKLMDERGISLTELEAAPDRLASEGKTPMYVALNGKAVGIVAVADVLKPSSKEAIERLHKMGIEVAMITGDNKKTANAIARQVGIDRVLAEVLPQDKSAEVKKIQQEGRKVAMVGDGINDAPALAQADIGIAIGSGTDVAMESADIVLMRSDLLDVPTAINLSKRTIRNIKQNLFWASADLIHGPPNG

SEQ ID NO: 85135 - protein, 376 aa, Unknown
  Obtained from environmental sample
  DOMAIN (67)...(244): Type III restriction enzyme, res subunit
  misc_feature (1)..(376): Xaa is any amino acid
ATEIPDAENTAIKEIHYPSSMEKIERAKKTLIYEELFYLEVMIGKRAFERRKISSKFTEAKENPAKQVSFSALQKRLVERLPFSLTTGQCEAVMEINQDMGKDIPMARLLQGDVGSGKTLVSFLAALKAVEERGQAAIMAPTELLALQHAENAARLLEPLRLHVAFLTGNIKAKGRKELIKNLNSDVIDIVVGTHALFSKDVIYKNLKLVVIDEQHRFGVTQRSLIMTKGDSPGLLMMSATPIPRTLALTVFGDMDVSVSRYAAGKKPVKTHLAKESNEEKVYSFIRGELEKGRQAYFVYPLIEGGEDIKDAVSMAERLSKKIFPKYKTALIHSRLTERRKRQTMDNFRKGDIKNLAATSVCKVRLDLPHATCMGN

SEQ ID NO: 85136 - protein, 198 aa, Unknown
  Obtained from environmental sample
  DOMAIN (1)...(154): Serine dehydratase alpha chain
  misc_feature (1)..(198): Xaa is any amino acid
ELKIVPGPHGHGKGFPCFPPLEAVREIRGVSRRKQLKGLVIAAGLGAIAYTLCRASGVSGCVGESGVCCAMASGAITWMAGGAGQDVQNAASMALQANIGIPCDPIPGGLEFPCLTRTVRAAITAPLYADMALAGINPLIPYHEMLALIERTRTLYPDVINGPDCGVNCTATAEHCQRFLSDEVMEGKLKWDANKAQP

SEQ ID NO: 85137 - protein, 308 aa, Unknown
  Obtained from environmental sample
  misc_feature (1)..(308): Xaa is any amino acid
MRYAPTNISELAAFIAAIRPGFKSQYKKFEAREPFSFGVKAFDDLIQTKEFPHSYIIYQEQAMKSLAFAGIPMSECYTVIKNIAKKRADKVYAVKEKFLDGFTKAIISEGKPKETAADIARQLWQVIEDSAYYSFNASHAVAMAADSLYGAWLKAHHPLEFYETVLKICEEKGDKDRMSALKSEAESYFDIKFPAYRFGQDNREIKADASTNSIINSVAAIKGFGKAIGEPLYDCSNYNPTTFIDVLKYLYACGVKEGKVRPLILIDYFRQFGNSKTLSVLLDAWEITKAGRGKLIKTDRSTGLFSRL

SEQ ID NO: 85138 - protein, 265 aa, Unknown
  Obtained from environmental sample
  misc_feature (1)..(265): Xaa is any amino acid
MFLRSLSVPVNTISGVGSSAAQKLARLGIRSAADLLLHYPRDWEDRSNIVPLKAYRSGKVCTVVTVFAREWIGYGRMRALKIYIEDENTQAALVCYNRPWLDKQIITGQKYMISGSFRYKYGELQSTAFEIEDASSGTSFGKILPVYPLTAGIIQGKMRKFISTAVNKYVNQLENELPNEIIEKENLLTKARAVREIHFPASMDTLEMAKKTLIYEELFYMEVMVIRRSIERKSRIKIEKADDKNKEENISLLQQRLIERLSFSF

SEQ ID NO: 85139 - protein, 107 aa, Unknown
  Obtained from environmental sample
  DOMAIN (2)...(103): Pyruvate kinase, alpha/beta domain
  misc_feature (1)..(107): Xaa is any amino acid
MAEVIPIIVITASGETAHYLSKIRCQSPIFAFSPDENVVRQMSLTWNVQAHLLDFKWGDIVDILHRAEEALIERELVVKDGLVAVLAGSIPIKGATSFLRIKKIGEE

SEQ ID NO: 85140 - protein, 251 aa, Unknown
  Obtained from environmental sample
  misc_feature (1)..(251): Xaa is any amino acid
MPYTPNIDGTTVRTLADWGAFFKKNGQPYDIIELMNQENTILDDIPWKEATDFDGNRTALRVGIPTAFWRRLYRGIDVSKSTVTIVKDPVAMLEARSLIDAKLLQIHSSQGAAYRMSEAKSFMEAMRQEVATALFYGDVKNNPDGVHGLDPRYAFKDAPNVVDAGGTGNQNTSIYGIVFGEMDTMGIFPKDSKVGLEHTVLSEYDAYDDQGLAFRAVGDLFQWNIGSASATGELWSASGTSTPPAGPAQGD

SEQ ID NO: 85141 - protein, 113 aa, Unknown
  Obtained from environmental sample
  misc_feature (1)..(113): Xaa is any amino acid
MENIVFLMCGKDKEIFKTQAKYLYKSKRFQKSLQYAKTLADENCIFILSAKYGLLELEKEIEPYDKSIYDMSIIEKDKWAKMVISELKTKVDIDNNNFIFLTDDFYTRPICHG

SEQ ID NO: 85142 - protein, 89 aa, Unknown
  Obtained from environmental sample
  misc_feature (1)..(89): Xaa is any amino acid
IFGTYYGTIKEFSAGLGWNVFAAALIARFYPPAVIPASLFFAWISSGAKIAMQNADITFEVASIVQAVIFFLATSLVMRNLLSGKEKRR

SEQ ID NO: 85143 - protein, 268 aa, Unknown
  Obtained from environmental sample
  DOMAIN (14)...(268): UvrD/REP helicase
  misc_feature (1)..(268): Xaa is any amino acid
MEYNADLPAYLKPLNPDQRRAVLHTGNPLLILAGAGSGKTRVITTKIAWLIRERGVAPQSILAVTFTNKAAREMAERARNIDERAGQAMLRTFHSFGAWFLRRNGHFCGLDSNFTIYDDDDVISFLSTIMDGKQKAEVKHAAYNISRAKDYFLSPEDPSLKLIESHEEFRGIYAEYEKRLANTGNVDFGDLIKKPVEILRKEPEVCRRFRERFSVIMVDEYQDANVAQFEMLKELAGPGTYVCVVGDDDQSIYRFRGAEVKNILEFPE

SEQ ID NO: 85144 - protein, 113 aa, Unknown
  Obtained from environmental sample
  DOMAIN (38)...(101): Exonuclease VII small subunit
  misc_feature (1)..(113): Xaa is any amino acid
AVKGKINAVVESAEKQGVNMAKKTVSAKSGGAKSSGAKSFEEQLGRLEKLGEQIKRNDIPLDEALAAFEEGIRLARNLEKSLEKIENRIEILMNSTEALADESPELELFNAGE

SEQ ID NO: 85145 - protein, 292 aa, Unknown
  Obtained from environmental sample
  misc_feature (1)..(292): Xaa is any amino acid
MGTVTATGNWGAGIGGDFDGIGGDSDGNSGGTITIAGGKVTATGGGFGEGGSAGIGGGGSERYIDMAGAIYGGYGGNGGIITITGGIVMATGGGLCNAAGIGGGGASRSYDSGDDAIYGGNGGIVTISGGTVMAKSGGLVESNPTCYTNGGAGIGGGGSSRNPNDNTISMNGGSGGAITISGGMVTAEGSGGAGIGGSGTGNGGTIIISGGTVTATSRYGVGIGGGYGSSGGKITINGGTVTATSGYSAGIGINDYGNGYEINISGGTVTATGGSTGAGIGGSQDGDNGGPS

SEQ ID NO: 85146 - protein, 227 aa, Unknown
  Obtained from environmental sample
  DOMAIN (31)...(64): Tetratricopeptide repeat
  misc_feature (1)..(227): Xaa is any amino acid
CCKRLRLYEAEAHDSALIYYAKILDAGMKNDAVYYNMGNCYYRLMKPGMARLYYEKAAALSPNDPDIEANINFITSIIVDRQASDNRQESDFLTSVLYGIHTLLPLNIQLIAVCALLFLLAIIASAMLFKRGLARLWLAYGAALCALLIIVVGTSAGYKIYALENNQYAIILSASIDAKNQPSGSQTLFTAHEGTKLQIRKTVGEWSLVSLSNGAGGWVLTNTLGKI

SEQ ID NO: 85147 - protein, 181 aa, Unknown
  Obtained from environmental sample
  DOMAIN (13)...(72): Collagen triple helix repeat (20 copies)
  misc_feature (1)..(181): Xaa is any amino acid
GFPLTDSAERQGGDHGNQGNQGDKGKGGDHGNQGNQGDKGKGGDHGNQGNQGDKGKGGDHGNQGNQGDKGKGGDHGNQGNQGNQGNQGGNQGKGGGDQGGKGNQGNQGNQGGNQGKGGGDQGGKGNQGNQGNQGGSQGKGGGDQGGKGNQGNQGNQGNQGKGGGNQGNQGNQGGSQGRGHR

SEQ ID NO: 85148 - protein, 198 aa, Unknown
  Obtained from environmental sample
  DOMAIN (55)...(142): Mur ligase family, glutamate ligase domain
  misc_feature (1)..(198): Xaa is any amino acid
VSFDLVTPSGTARSCTVGIPGWVNVENAVAASAAAWVAGVSLKHIPAALKNFQGVRRRFDVQLSTPAVTYIDDYAHHPEELCAAITSIRGMFPGKKITGVFQPHLYTRTRDFADGFVKSLSLLDELILLDIYPAREKPIEGVTSSLLFDKIALENKTLCSKDELLNVLKTKRLEVLVTLGAGDIDTMVEPIRELLTSS

SEQ ID NO: 85149 - protein, 87 aa, Unknown
  Obtained from environmental sample
  misc_feature (1)..(87): Xaa is any amino acid
MTDWPSPSLLAIGISTQIMLQALVNMCVSTGITPVTGQNLPFISQGGSSLIITCVMFGMLLSVSRSQMEEEEKERRSLDGSESSSGS

SEQ ID NO: 85150 - protein, 203 aa, Unknown
  Obtained from environmental sample
  DOMAIN (4)...(145): Glycosyltransferase family 28 N-terminal domain
  misc_feature (1)..(203): Xaa is any amino acid
MVKVIISGGGTGGHVFPAISIANALKQMDGSAEILFVGAEGRMEMEKVPAAGYPVVGLPVVGINRKLLSAKNISVPFRLLKSMRQASKVIFDFKPDVVVGVGGYASAPMLWSAQNKGIPTLLQEQNSYAGLTNKLLAKRAKKVCVAYEGMGRFFGEKKIIFTGNPVRQDLGNVAQLRSEAIAHFALQPDKKTLLILWRSLGAR

SEQ ID NO: 85151 - protein, 265 aa, Unknown
  Obtained from environmental sample
  DOMAIN (34)...(239): 7TM diverse intracellular signalling
  misc_feature (1)..(265): Xaa is any amino acid
VFRIVGDPTDDMTGFIYQSPYYIADYDYITHKHSKTAQIIIISILVILGIYHFLFYAIFRENRYSLLCGVFFLGRGVYHLLRTWIHPIIPDTAVAMKLEYFMLYFVTMAFMAYTDKLCNARYSIVTKAYGVFCLILAITQLFFFQTSSVIWEYSNIIVIVWICIYNIVLPFIRELKKGRNFTDALANTYPGNLLIATLIIGITSIFDLIDSLALHLSLHLTNYSIVVFALSVTFMLFRMSVIKDRELKEKARCWKRQPAPEPRVK

SEQ ID NO: 85152 - protein, 336 aa, Unknown
  Obtained from environmental sample
  DOMAIN (10)...(96): Fibronectin type III domain
  misc_feature (1)..(336): Xaa is any amino acid
AYGEITGGAPASPPLITVRGGDTKITVTWAQVHGVKEYKLYYNTTDTFSNSTLSAGSPVLSAAPENTAEITGLSNGVTYYVWVVSSNGAGSDSDPSPSASALTAAKPPIDFNNTRFVLGNSAAEFAFAQDLPVSAFWPEGRPGTDRLTRVQETALGNLFADGAAWYLRNKQNKTIDFVFINGGYIDNALLKGSVTVGNLMGIVYPGSRSEDKFVILTIKGADLKKFFYNPAREVSLAAWNETEDVAGVSHTGRGSANTGFFGVVSKEVRYTLEYPQAPPPGTVLNDDSSQPYYHGRIKPGTLKITARTLKTTPSTGSAPPIIWRRARIFHFVYRKI

SEQ ID NO: 85153 - protein, 282 aa, Unknown
  Obtained from environmental sample
  DOMAIN (75)...(233): Radical SAM superfamily
  misc_feature (1)..(282): Xaa is any amino acid
NKTDRTDVETDDGVQCELCPNNCVIKSGNFGSCGVRGNKGGKGIIPFYGFISALAIDPIEKKPLYHFKPRTKILSLGFAGCNLHCPFCQNWHISQNTDISGKWMQPGEIISAALKHDTPSIAYTYSEPLVHIEYILDCMTLARKHGIANVLVTNGCIKSEAAAEILKLTDAANVDLKTFSQETYKKVLNGDLRTVMDFITLCYKTGVHVEVTTLVVPDLNDSESELNKAADFIVSVSKEIPWHLTAYHPDYRWNAPPTDRDFLLNAAKEAGKKLTFVHTGNI

SEQ ID NO: 85154 - protein, 317 aa, Unknown
  Obtained from environmental sample
  DOMAIN (1)...(263): Glycosyl hydrolase family 26
  misc_feature (1)..(317): Xaa is any amino acid
VYGRGSVYDGREQINEAIEWWEGKNNDKVLLPNKPNIHGIVTFCWHWRAGAKNEFYTNKTDFFIPWKNRQLDTESDNFTTIIKDLDRLALRLQTLKEKDIPVLWRPLHEASGGWFWWGASGPRPYIALWEFMWDYLTYEKGLDNLIWVWNGDDENWFPDPKTVDIIGRDIYASDYSSLKTQFERTKKMGDKEYIVALTENGKIPDPDECIKDGAMWAWFMTWNDGLKTIGESHKDNFWTGEYHNTNTHKKKVYNHPSVITLDKLPKFNTYRLEIYRNFLNISRMNKRQFFSRFFSGVQKKISVRRRSVPTVIWMIGC

SEQ ID NO: 85155 - protein, 130 aa, Unknown
  Obtained from environmental sample
  misc_feature (1)..(130): Xaa is any amino acid
MNTSAMIEVKNLSAGYNGADVIRNISFRAEKGESLCILGPNSSGKSTLLKSIARIIDYRGQVLLEGRDAALFPRREFAKKTAMLSQSMQVFFPYTVYETVSMGRFAYSQGFMKNLSRAKTGIAEDILKKL

SEQ ID NO: 85156 - protein, 188 aa, Unknown
  Obtained from environmental sample
  DOMAIN (8)...(71): ATP synthase alpha/beta family, beta-barrel domain
  misc_feature (1)..(188): Xaa is any amino acid
MNKVYSKIESITGSVITVKADGIRYGDLAEVDTVFGTSLAEVNRLQGDTVSLQVFAGGRGISTGDTIRFLGRPMQVAFSENLMGRVFTGSGKPRDNGPELTENKIPIGGPSVNPSQRIIPRNMIRTGIPMIDLFNTLVVSQKLPIFSVSGEPYNELLARIAMQAEVDVIILAEWAKIRDSGRSAPPKN

SEQ ID NO: 85157 - protein, 90 aa, Unknown
  Obtained from environmental sample
  DOMAIN (15)...(88): Ribosomal protein L1p/L10e family
  misc_feature (1)..(90): Xaa is any amino acid
MIRRGKKYRALVASYDTKAFYGVDDAVSILKKSQLKFDQTVELHFNLGVDPKHSDQMVRGTVALPHGTGRKVRILAFCKENMTQTPRAEF

SEQ ID NO: 85158 - protein, 295 aa, Unknown
  Obtained from environmental sample
  DOMAIN (1)...(245): MBOAT family
  misc_feature (1)..(295): Xaa is any amino acid
AERNFITYTLFVTFFPQLVAGPIERTGNLLPQFKVNHEFDYDRVTSGLRLAAWGMFKKVVIADRLAIYVNGVFENPSVYPAASLALAVFFFAFQIYCDFSGYSDIAIGCARVLGFNLMNNFRQPYFSRSITEFWRRWHISLSTWLKDYLYIPLGGNRKGEVRRCINLLITFLISGLWHGAAWHFVVWGALHGVFQIMERSTAPFRNAIGLKVGLSEESRFRKAIQVCVTFALVCFAWVFFRANTITDAFLIMAKLAKLPAELAGYVGGLSRNGIIGTVRNAFQMGIDVPSCRFCP

SEQ ID NO: 85159 - protein, 315 aa, Unknown
  Obtained from environmental sample
  DOMAIN (24)...(138): Type I restriction enzyme R protein N terminus (HSDR_N)
  misc_feature (1)..(315): Xaa is any amino acid
MLPSALQTLIAKFQDNIEDYKHSSYNETQLRREFLDKFIKILGWDADNEAGLHESFKEVIHEDKLRIGETTKAPDYCVQVGGRKLFYIEAKKPSVKIIDDADAAFQVRRYGWTVQMPACLLTDFEEFSVYNTGIKPKNTDKSSTARFFYCRYDELGKKNPQYPEYENNWSFLESLFSKDAVIRGSLEKIKGRDKKGTQEVDKEFLKEIEDWREQLTNNLVLRNELTERELNFSVQKIIDRIIFLRICEDRGIETKNILHNIAKTNDIYSSLTKLFLTADDKYNSGLFHFHKEKNFEDTLDTLTLKLKIDDKPLRK

SEQ ID NO: 85160 - protein, 132 aa, Unknown
  Obtained from environmental sample
  misc_feature (1)..(132): Xaa is any amino acid
MNEYFKSSGDVFNWLSKFINLERGQTPKSFRIDRMEFLTQLAGNPHRLMPSIHIAGSKGKGSVTGMSAAMLTAAGYRVARYMSPHVVDIRERICFNDSYFNEDVYCAAGNELRDIAERLPQRKSSANLYSVK

SEQ ID NO: 85161 - protein, 371 aa, Unknown
  Obtained from environmental sample
  DOMAIN (293)...(339): RNA-metabolising metallo-beta-lactamase
  misc_feature (1)..(371): Xaa is any amino acid
LARGARRTLFKSQAQKKGEKFDWTPLYTEQDAITAVGQTIGVSYNRPMFMGENVSFEFYDAGHILGSAIAEIKIKKGGEELNILATGDLGRKGKPIIRNPEVPKSAPDYIILESTYGDRRHDSTDDALKKLAEIAKRTVQNKGKILIPSFAIERTQELVYYFHILVDEGIIPEVPIYVDSPMATNATTIFQVHPECYGEEIKQAFIKHHKNPFGFNSLHFTTSVDESKALNEHKGPLIIISADGMCEAGRIQHHLIHNIQDPNTTIMTVGYMAENTLGRRIRNREGEVKIHGEWFKLKAHVEEINAFSAHADYFEMLEWLNALDRSRLKGIFLVHGEKKAQVFLQKYLKENGFQDVDVEIVKRGKTYELTS

SEQ ID NO: 85162 - protein, 64 aa, Unknown
  Obtained from environmental sample
  misc_feature (1)..(64): Xaa is any amino acid
MVRLAECPVRFGTTSDWVAVSVGGSHSLALKKDGSLWAWGDNEKGQLGDGTYTAKNVPVRVDSK

SEQ ID NO: 85163 - protein, 54 aa, Unknown
  Obtained from environmental sample
  misc_feature (1)..(54): Xaa is any amino acid
VKYGEMFEKRMMDFSVNIPLEKALDLGWEILAACFNPEETGLRTELINKFWPKK

SEQ ID NO: 85164 - protein, 81 aa, Unknown
  Obtained from environmental sample
  misc_feature (1)..(81): Xaa is any amino acid
NDQIGRALIKELSATLLRSLAVYRKNEDMINIGAYAKGSDPEVDLAIKRHTAIDKFLLQGIGENSTYEEIENAMKEIASIT

SEQ ID NO: 85165 - protein, 344 aa, Unknown
  Obtained from environmental sample
  misc_feature (1)..(344): Xaa is any amino acid
RSTGHRGVRFVNFAQERITTNPVNGAILSNSVHNNKRVEVTYTYNNTPIRTYTANLTVQKKIIPLIEISGKTLELDSPDGKKFTYVAKCGEENVDIDITRQDADVFVDGQPVQGMFNAPLSYGDNPLEIMVDVYSPLNPSNILVHEDYTLTVKRPFPAEQMIKVRWDNTLTVIDNLNNPYDFASYKWYRNGREIGFGRSWSAGTNGEKLNPKDSYYVEGTTESGKTIRSCEVELSNVAMRGYGISLKNNSAYSNIGIEIFAPEAVSEMEISVHDVAGKQVFKQKGNLAFNWNLTDDKHRMVSNGVYIVTAKAKRESGKIYRYSTNSVVKDKYEKDIYSDFVLLC

SEQ ID NO: 85166 - protein, 341 aa, Unknown
  Obtained from environmental sample
  DOMAIN (95)...(341): tRNA synthetases class I (W and Y)
  misc_feature (1)..(341): Xaa is any amino acid
ASLIFTIVSPSGPFTVTVSFVSRGNVQSLSCPRISALTELSGLKYAAYAEETVRHTAKRIITISRILNRLFITDSIEINRTIYNPLLKRYIVFMKKISLTGIKPTGDLHIGNYFGAIRPALELAKEYDARYFIADYHALNTMKNPEDLNFTIRQVAACWLASGLDPEKVIFYRQSSIPETFELTTMLMAFTSKGLMNRAHAYKDAVQKNNEKGDDTDAGINMGLYTYPVLMAADIIIFDSDVVPVGKDQVQHIEMAQDIAQSVNANYGKQVLKIPQAAVQENVAVVPGLDGRKMSKSYGNTIPLFAPEKTLRKTIMRIVTNSQTEKSRRILIPRADLMRGK

SEQ ID NO: 85167 - protein, 547 aa, Unknown
  Obtained from environmental sample
  DOMAIN (460)...(543): Response regulator receiver domain
  misc_feature (1)..(547): Xaa is any amino acid
MTDSAENFETELHFSDSDIRRLSVDFRKIPYKGRFAVVGSIFDMTEIFQREMMLAHAREVNELQLTKLNLVVKASKIGLWDMEVVRDDPVNPSNTFMWSNEFRHMLGYTDENDFPNLLSSWSNLLHPQDKEATLNAFEKHILDKTGKSPYDVEYRLLRKTGEYAYYRASGETIRDKDGNAIRVAGALMDITDTKNMLLIKDRQKAEAEAASRAKSTFLANMSHEIRTPMNAIIGMIKIGKSALDIERKDYCFMKIEDAANHLLGVINDILDMSKIEANKFELSETEFDFEKMLRRVVNVVNFRIDEKHQRFSVNIDRSIPHTLIGDDQRIAQVITNLLGNAVKFTPEQGEISLTVRLAGQVDNLCTMQISVSDTGIGISPEQQAKLFKSFEQAESSTTRKYGGTGLGLAISKSIVELMGGKIWVESEQEKGSTFIFTIQLKRSTNEKHRLLSSDINSKNVRIMAVDDDKDVLVYFNEISQGFGLMCDTAISGEEALNLIKQKGGYNIYFIDWKMPIMDGIQLAHEIKEHAKENPIVIMISAAEWSVM

SEQ ID NO: 85168 - protein, 204 aa, Unknown
  Obtained from environmental sample
  DOMAIN (3)...(110): Transcription termination factor nusG
  misc_feature (1)..(204): Xaa is any amino acid
MATGWYVLHIYSGYDFLIEKTIRNIFFLGELDKEVVRDIKIPAEEVTEVKDGKKRTITKKFLPGYILVEMDLPDVDMGWKEPCSKIKKIQGVTGFVGTPAGRKPQPLTGDEARAILQKSGEIKGERPVRSRHSFNQGEQVKIADGPFETFTRTVDEVNQEKNKLQIMGGFFGRNVPVEVDFRRAKNISLGSPASDHLLWSENRT

SEQ ID NO: 85169 - protein, 78 aa, Unknown
  Obtained from environmental sample
  misc_feature (1)..(78): Xaa is any amino acid
AELITPDHTGLKFNFTDKNEARSWFHKLRQKFLDYNGSEWQGKHFKECEKDIEEAVKSQSNGVDKTAEKILAPEKAKA

SEQ ID NO: 85170 - protein, 307 aa, Unknown
  Obtained from environmental sample
  misc_feature (1)..(307): Xaa is any amino acid
LLTRLFGIPFKPALYERGDLFAGLARGEIDFTDAVRGNDPRRESFYMTDAVAEYALRSIRIADSPSITDIVVARPLRFAFMNGDAAAGAVASRVDTPFETFLVDTYGAAYDLLKSGQVDAFLGESAAEAAFAAYGDVIVEDFFPLIFNPAHLSTQNPSLQPIIAVAQKAVQSGAAHRLDALHARGRQEYRKNALFLQLNEEEKAYIRDNRVVRFVAVRYNYPINFYNEYDKQWQGIAPDILKEIEQLTGLSFVRVNHHLVSWPDAVKMLERGEASPDHELFRTPSLEGRFPLPKIALPPDNFALLSR

SEQ ID NO: 85171 - protein, 87 aa, Unknown
  Obtained from environmental sample
  misc_feature (1)..(87): Xaa is any amino acid
MRKLILTTAAVTAAIAGAFADETAFGTFTDARDGQTYKTVKIGKQTWTAQNPHYKPQTGNSWCYDNKESNCKKYGRLYDWKTANTVC

SEQ ID NO: 85172 - protein, 502 aa, Unknown
  Obtained from environmental sample
  DOMAIN (234)...(267): Tetratricopeptide repeat
  misc_feature (1)..(502): Xaa is any amino acid
MTSWSEERSGQNWSEAVKYLGMVKGEERNPAFLEMVGKAAFENKDNSRAVDVYKTLSAMNPQNAEYVKMLYDLAGKMGARDDAVTHLKKYVSIKPQDAEMQKTLGDLLYDRKDRPGALAAYRAALAVDPRAKGFHKRYVELVDGSGTPPEKIAAMEGAIAVGEADAPMLIKLGNIYREQKQPAKAVPLFEKAVKEDRNNVQLLAALAQSQEAAGMINEAITTYEQYVIMDPKASKEHKTLGDLYAKQKKPAEASRAYKKYLERNPTDNSVALMVAREAYSAKQYQDAVRYFAMVQGEEAKKPEFIKMYGTAAFQANDNARALTVLKEIATPLNKDPEVFKMLEEVSRRTGANDMAVNYLKQYAALRPQDIEANRKLGDALFDRKDEAGALTAYRAVLKADPNAKGFLKRYVGLVMKAGNEAEKMAAFAAAINAGEADVGVYSQLGALHKSKGDYVKAAAMYEQATKLDPRNADYLGELADCQLKAGNLSGASQLGQSVMRDP

SEQ ID NO: 85173 - protein, 587 aa, Unknown
  Obtained from environmental sample
  misc_feature (1)..(587): Xaa is any amino acid
VIAYGASTGIDVRDTAVVAYIGVASGTPVTTGTKASDSWTGDSRDKTNATLLWTADSKASTVRVPGAITIKAGNNGLGIKSIGQIKVASDQTFPGEIPDNYELSVQVYIGTGNGPNARAIWMPVETGNKQKELNLGQAFVEAGSDGAIAIEGGKRTLIKVDHSVVLVRHASTGIKGAGGVYVDGGYIEVLATEANNTGTALTGVELRISGGWGETVTDRSEIHSKGIAVLDTRKDSVVQITGTVHLSGTLSSNTTVGSSVLGDTAYVTMGTEGDTRNTKSRNLWKMSTVSGVTKDLFEQGRALVIPAGVTVSVSDNGSRLETAKSDTLIVSGRVTTVGKQAGAKFVNNGKIIVENGGNILFNKADAESFKNNRDEAVIVLKTGSKLDDSLLVHDTGTFSAKKYTFLKWAQLLSGATADTIKGTVSSRGPGKVIVPPVYATLYGNQSIFVDEDDLEESGASFWSATSSRTDTVYTAKLVKYPLDRRYKPYLDLEEGGSAKGDFTLSGQGTVKLAEEGVRLLTEAGTFSRLATMTNEAGTGTKTYTHTVLRVDVKRIVAQQNADGPIFFDGFFHNKDGRVVDDLGHLIL

SEQ ID NO: 85174 - protein, 79 aa, Unknown
  Obtained from environmental sample
  DOMAIN (1)...(74): Ribosomal protein L14p/L23e
  misc_feature (1)..(79): Xaa is any amino acid
MIQVESFLNVADNSGAKLVQCIKVLGGTKRKYAGIGDIIVVAVKEALPTSVIKKENRRKGGGGQDSQGIPPPRWNLYTV

SEQ ID NO: 85175 - protein, 83 aa, Unknown
  Obtained from environmental sample
  DOMAIN (9)...(58): Ribosomal L29 protein
  misc_feature (1)..(83): Xaa is any amino acid
MKNRQKSYFSELKAKRDELSRKYMDVRFQLVIGHVDNPLQKRELRRQIARLNTLIRQHELEEQKSVSQKTASKDKAVAKSKKA

SEQ ID NO: 85176 - protein, 328 aa, Unknown
  Obtained from environmental sample
  DOMAIN (76)...(109): Tetratricopeptide repeat
  misc_feature (1)..(328): Xaa is any amino acid
FLGFIAEAAEAMKKVISLYEQGKYDEMLAAVKEVLAIQSNHPGAYYYGGLGRLKKGEIDKAKINFYKAISHPVYGGAAYYNLGVILGQEGNKVEAVKYLKAALNTRSTDFDRNEAARLIELYSGQKVPASMIEIPDLVKSETPKPDTANIPQISPEKYAPIEIRIDSMLSMMTVDTLTDAGQKLLKAIRAFTAGRYDDALREFKNVLAENPSGPVSAQCLYNAGICYYRLRLYKDAENQFQLFLDRFPSHKFASRALFFKACSYQERSDYAVSEKLFRKFIQDNRSHEWVGRAYERLGDSYADLEQQKKAIDAYTAGARRQHPHAPRK

SEQ ID NO: 85177 - protein, 90 aa, Unknown
  Obtained from environmental sample
  misc_feature (1)..(90): Xaa is any amino acid
MKQLPTGLQEFEYIRRKDALYVDKTGMIYEIVSGIKKQYFLSRPRRFGKTLMCWTLDALFSGKREMFEGLAIYKTDWEWESSRANLSCLT

SEQ ID NO: 85178 - protein, 438 aa, Unknown
  Obtained from environmental sample
  DOMAIN (238)...(374): ATPase family associated with various cellular activities (AAA)
  misc_feature (1)..(438): Xaa is any amino acid
LSPTAGPCGQAESFAQYAEFTKKIGTEILSAVEKTENPEKLVNIIANAMSIKADRKIGLIRVADPASRLEKLLETLELENEIFGIQKNISGKVKSRMDKNQRDYILHEQLKEINRELGKDTTEDEFADLERSIEERRPGEEVLAKARKEIARLRKLQVFSPEAGVLRGYLEWITDLPWSEYSADTSDLSEAEKILNEDHYEMKKAKERIIEFIAVRQLNTQASTQAEQIPLGIKGPILCFVGPPGTGKTSLGKSVARALGRKFVRISLGGVRDEAEIRGHRKTYVGALPGKIIQSMRKAGTMNPVFLLDEIDKLSSDFRGDPASALLEVLDPEQNSTFTDHYMEVPYDLSKVLFITTANSLHSIPYPLLDRMEIIEIPGYGENEKLAIAKKFLVPKELAENGLARAKITFKDEAILEIIRHWTMESGVRSLKGKSPGA

SEQ ID NO: 85179 - protein, 319 aa, Unknown
  Obtained from environmental sample
  DOMAIN (81)...(150): HAMP domain
  misc_feature (1)..(319): Xaa is any amino acid
GPDDQIGRAGWIGIEKIDVLFEKYTRLYGPNITNPCTVAEFLETVSLLNTDLCQLWAGTFTSLDARVQRNTATAKLDLLLYLAVVLVSLGIAIGFVAFITLDINKSVRTLKTLFRGLNENDLTLSLKVNSMDEFGELMTAFNGFLNILRSTFGSFKQSAQLVANSVFDLSSSSKEISTTANEQSASVSEIVSTMEGSKNLSEQIAYKTTEVANLAKETQELSSKGAELREANQTMMEDIRNQNQKIISEIRNLSDMIIRISEAIRIIDGIADQTKLIAFNASLEASSSGEAGARFSVVASEIGVSRTMWLNQRGRSNRR

SEQ ID NO: 85180 - protein, 251 aa, Unknown
  Obtained from environmental sample
  misc_feature (1)..(251): Xaa is any amino acid
VKNPKPVLSPHSGLNSTPIYLKQGKGLSSHAQTTKRPLSVEDVCTALKTRGGFSGSFEDLLDYIRQYNEEVAYQLCDGFAVSNGYYTIHPNIGGTFNSTAEIHDHEKHPISFRFSARSKLRSLIKNIEVVVEGMADTGGYIDEYIDQEGDYVNSQFLPDNMFSVHGHKIKIVGDDPSCGLYFVPVLDPSKAVKVTRVGDNNPTKVTGIAPNTGHTKNRIEIRTQYSGSGAILLKTPRTITSSFTLEQLEAV

SEQ ID NO: 85181 - protein, 330 aa, Unknown
  Obtained from environmental sample
  DOMAIN (1)...(325): Amidase
  misc_feature (1)..(330): Xaa is any amino acid
GILRVLSGSSGGSVAAVVAGEIPIALVQTRAAAYASPALLRLPRAFKPTYGSVSRYGLVAYASSLDQIGPIGQNIDDCAALLSIISGPDTRDSTCVIDKPFEFGDGKTRAPFALQGVKIGLPRNYFSGGIDDEVKSAVLTVAKVFEASGAIIEEFEMPLMDYMIPAYYIIACAEASSNLSRYDGLKYGYRSANAQSLSEVYRLSRNDGFGLEVKRRIMLGSFVLSSGYYDAYYKKALQVRALIKDAYTRLFTKYDMILSPVAPTTAYKIGDNIGDPMKMYMGDIYTVSINLAGLPSAALPCGFDTTGLPIGFQLIGDASRKVTRPNLSMG

SEQ ID NO: 85182 - protein, 166 aa, Unknown
  Obtained from environmental sample
  misc_feature (1)..(166): Xaa is any amino acid
VLALHARCPWFESGCAQYWKFCMERNSGVVSVLIVLLSFLTASALLLLIGKNPTEMYQAILQVLSAVDSRRGTWNARYTGEWLVISVPLILCALSVGFSLRAGLFNIGAEGQYIAGLTAAQFTAFFFPHIPVLHIAAAVCTAVMCGSRVGRYSGYLKTRTLGRSVM

SEQ ID NO: 85183 - protein, 228 aa, Unknown
  Obtained from environmental sample
  misc_feature (1)..(228): Xaa is any amino acid
MERAFREAGARTRIVIFRNRNKEDITESKQELARAIAECQILALSGGFSAGDEPDGSGKFIANVLRAPIIADAVNNLLENRDGLILGICNGFQALIKLGLVPYGAYRRAEESMPTLTFNRVGRHVSRMVNTLVMPNCSPWLALDKPGAVHALPVSHGEGRLVISEAEGETLFKNGQIPFCYADENGHPTMRQPDNPNGSDFALRAWSAPTERYSARWLIRNAGVNTFI

SEQ ID NO: 85184 - protein, 519 aa, Unknown
  Obtained from environmental sample
  DOMAIN (36)...(101): His Kinase A (phosphoacceptor) domain
  misc_feature (1)..(519): Xaa is any amino acid
MALTLSALGIVLAAVLIIVLINVDKAKNKSDSENRHKSAFLANMSHEIRTPMNAIIGMTTIGKSASDIEHKNYSFTKIEEAANHLLGVINDILDMSKIEANKFKLSPEEFNLEEMFRRVVNVINFRIEEKHQKLTVDIDPSIPRTLIGDSQRISQVITNLLGNAVKFTPTDGAIRLAAYPGGEENQQYTLQISVSDTGIGIKPEHKEKIFLSFEQAESSTTRKYGGTGLGLAISKRIVEMMGGSIWVESELEKGSTFTFTVQTKRGAEDKQKRLPDINFNDVRIMAVDDDPDILTYFLDIMRRYGISCETAESGEKALEIVDKKGGYHIYFIDWKMPVMDGIRLTREIKARKPENSVVIMISAAEWSAIAEEAKAAGVDKFLSKPLFPSAIVETINECLGVDKQQVEKSQDEKIDGIFEGRRILLVEDMEINREIVMALFETTKLEIDCAENGIEAVRKFTKASDKYDFIFMDIQMPEMDGYEATRRIRALDIPKAKNVPIIAMTAKCQRRRDSANLSM

SEQ ID NO: 85185 - protein, 360 aa, Unknown
  Obtained from environmental sample
  DOMAIN (4)...(359): Dehydrogenase E1 component
  misc_feature (1)..(360): Xaa is any amino acid
GILWAHAQIRHEERGNGIEYNHKGPAHLSMGQEASAVGQSVNLTTDDCIFGSHRSHGEIIAKCFSAIWQLTQDAEGEKKLQAIMKSYLEGETLLAAEKIPYKNLRDLAESFVLYGTLAEIFARKAGFNRGLGGSMHAFFTPFGSMPNNAIVGGSGDIAVGAALYKRINDKPGIVIANIGDASMGCGPVWEGMMLAAMDQYNTLWPESKWKTPGAVSKGAPPIIFNFFNNFYGMGGQTSGETMGYSVMARVGAGVNPDNMHAERVDGYNPLAVADAVARKKALLLEGRGPALLDTITYRISGHSPSDASSYRTPEEVKLWQEADSIEAYGAYLIENKAAAKGELDSIRESIKGKLVEVVKL

SEQ ID NO: 85186 - protein, 74 aa, Unknown
  Obtained from environmental sample
  misc_feature (1)..(74): Xaa is any amino acid
MNIGIIGLGLIGGSFAKAYKAAGHPVFAGDIDQNILDFAILSGVVDAPLDTDAIKHCDLILIALYPQAAIEFLK

SEQ ID NO: 85187 - protein, 260 aa, Unknown
  Obtained from environmental sample
  DOMAIN (30)...(256): Binding-protein-dependent transport system inner membrane component
  misc_feature (1)..(260): Xaa is any amino acid
KYRRPGIHQEWAAYSGLKFLFEDKLFLKTIRNTVAMSFINTSLGFITAIAFALLLNEVKKIFFKRAIQTISYLPHFLSWVIVTGLVSSMLTTDSGAINNAFMALGFIKEPVLWLAEPNYFWGIIGITYVWKEVGWNTIIYLAAIAGIDPNLYEAADIDGCNRYQKMWRITLPCIKPTIIILLIMSVGHILDAGFELQYLLRNGLVMDVSDTIDIYVLIFGLSRSNYSLATAAGMFKNVVNISLIFIANEIAKRAGEERLI

SEQ ID NO: 85188 - protein, 314 aa, Unknown
  Obtained from environmental sample
  misc_feature (1)..(314): Xaa is any amino acid
SAGAMHSINVAETTCNPNPLTITKACTQLNLDNGIYKIPGPVAIGDCFSLPCVGNLEAWYYGGSSKDIEVSSCDNNTYPTGAGTSTSNPDYKQICSTNGNIQVIVKTAITGSSNYINLRCNSSNSTPATPSVTCNLGGGTYNIGAQINRPTVSCGTGFNAPSSMNFSGDVPDQSNGWNSGGGGTGTYKTSGNKSGITLSSVTCAATNSTASHTVNNISCTNPFSINEVTCSISGTHTTGTSGCVNVDIPIVSNCQSAENLTFKIGSNAGDNVNGWNGVAVSNTPKGEFCSNRSGDAGKVWMTTAKCNNVDLNFG

SEQ ID NO: 85189 - protein, 157 aa, Unknown
  Obtained from environmental sample
  DOMAIN (70)...(157): Domain of unknown function (DUF1732)
  misc_feature (1)..(157): Xaa is any amino acid
FPRQIGRVLFQAERIREGKHTEEDILNSISNIESALQTVASHIGELENSIKENIKARFKEISGDTIDENRILAETAVLLMKYTISEEVSRLSSHLAEFRAETAKNERPGKKLDFLCQEINREINTIGSKSAILEVSRAVVGMKESLENIREQLRNVE

SEQ ID NO: 85190 - protein, 338 aa, Unknown
  Obtained from environmental sample
  DOMAIN (25)...(311): Omptin family
  misc_feature (1)..(338): Xaa is any amino acid
MSNIGKITAFVIFICLFPLPVFAEETNPDFKFSVIPSFGLLYGRANEIVYKDSITENYLSELLWNIKPLYYAGLAADFGPVNNFARHGFIGNLSLKMGIPQRTGIIEDRDWFDYYWVPSGTLTHYSRHDNFSERAIMADLSLGYSFPLFNFVALGMAFDFSYMHFYWIAKNGYGQYLRADGIENVDYMGKTMIEYTQNWFIFSPGVFIKFRLGRFFSLYGNFNYSPLIYCADRDNHHYINGSKTTFLDYLYYGQYLKGSGGITFSPLDYLDLTLFLSYSSITDSRRNIYQNSGIYLNQAGAGYAAIEGGLFSQVQLFGRALETALITPSYLNNFARGR

SEQ ID NO: 85191 - protein, 303 aa, Unknown
  Obtained from environmental sample
  DOMAIN (153)...(230): Domain of unknown function (DUF303)
  misc_feature (1)..(303): Xaa is any amino acid
MERLTVSPVFSDGMILQHGVSVPVSGESMPMVQIALSFAGKTYKARADESGKWSVLLDCHSPGGPFSMKIASETDTILIEDIYFGDVWLCSGQSNMELPMRRVKDNFPEEWNKPNQLIRQFSVPQEWEFSGPRQGLSGGCWKIASADTLEEFSAAAWFFAGQIFKTCDYPIGIILAAWGGTPIEAWMSAGALAGFPEKIALGRQFADTAFSDSLIREKQTHIETWNKELAAADAGLAHAWQKPETDISAWDEIQLPGGFGETGLNGLQRFCGVIWLCREFEANDSFITGAGKGGDNGLAGTIT

SEQ ID NO: 85192 - protein, 197 aa, Unknown
  Obtained from environmental sample
  DOMAIN (3)...(191): ADP-ribosylglycohydrolase
  misc_feature (1)..(197): Xaa is any amino acid
MHEIGRKYPHCGFGGMSEKWVFSNDPAPYNSYGNGAAMRVSPCGFIARTEDEAKLLSQKVTEVTHNHPEGLKGAEAVSVAIFMARNGAAKKEIKERIEKDYYALNFTLDSIRETYQFNETCQGTVPQAIEAFLESVSFEDAVRGAISIGGDSDTLAAITGGIAEAHYGVPSELKSRALSYLDKAMLGIYHEWENFLP

SEQ ID NO: 85193 - protein, 110 aa, Unknown
  Obtained from environmental sample
  misc_feature (1)..(110): Xaa is any amino acid
MLIYEKFTGRNRDDFKSYEDIVKNYNITYNDDFNFAYDVLDELAKKQPDALCMLWISNEGEEKRITFSDMARYSNKAANYFKSLGIRKGDFVMLVLKEKLFCSLVPLGHN

SEQ ID NO: 85194 - protein, 322 aa, Unknown
  Obtained from environmental sample
  misc_feature (1)..(322): Xaa is any amino acid
MKESSFPNNGYRDLIDLDSWAKYVLIQLVLDNFDFNSKAQDGYLPGSNYAYKIESCDRIKAGPLWDFDLAAGLERSAPIGGGGWGWGGGAQSSFPAHYKTYQDSIVPTHPFYKRLWEDPVFKAKYKKLWDKHKSDFQSMSNFIDNIKTQVEGSITGKGNNTWANNSMMSGGTLTTQQFNTEVANLKTWWTNRLGYVEQQLNGIDTSKDIEESEPVCIVGSSSSKANTSSSSSANTSGVTLSCTNLQSNVAKGSTIAVPTLTCSNGSQATNPNWTGRPASNTSWTVSATTNTPSYTIGVNATCGSVSGLTATCGTVTVGIPHQ

SEQ ID NO: 85195 - protein, 138 aa, Unknown
  Obtained from environmental sample
  DOMAIN (29)...(138): Glycoprotease family
  misc_feature (1)..(138): Xaa is any amino acid
VKPLTVLAWDTATEHAAAALIRWRSGETEILADYAGDSGLHSQMLPPRAARMLQDNELEPRQLDLLVVGRGPGSFTGLRTGLALAKGLAWGAGRPLLGLCTLEVLAAQILAADPDPEVLAAPGLDARHGEVFAALYRR

SEQ ID NO: 85196 - protein, 225 aa, Unknown
  Obtained from environmental sample
  DOMAIN (5)...(225): Aminotransferase class-V
  misc_feature (1)..(225): Xaa is any amino acid
MTRKVYVDYNATTPLRLEVKAAITEDLDIFGNASSMHSSGRLAHSRVEEARSCVEKLIGAGQHTVFFTSGGSESNNAVFQTMKQLASSPNGSPLKEGRCEFITGSIEHPCVLNSAKHLQSLGFKVYFIQVDEYGKIDMDAFKKALSDKTLLVSIMMANNEIGTIQDIREIASLVKAAGAWMHTDAVQALGKIPVNVDDLGVDYLTASAHKIYGPKARPICHGPPL

SEQ ID NO: 85197 - protein, 250 aa, Unknown
  Obtained from environmental sample
  misc_feature (1)..(250): Xaa is any amino acid
LGIVVTAPILMIIMSSEKHHSIVMGLWSSFFGVAFSVTAWGGKPIVELYSISGLFLIHAIFLLIIFLILFFSIKGISYPSVPHSLDHVRASTAATSLRSSIKKMDIPHNENKQISFLTEHKKVYSNWRAVSPGVLFFFHTFMYIALFTFLPRLSDNENIKNLLLVILPLISIIGTMIAGIVSQYFLSPSKLSIVAYITLFVLIFVVKLSFNNNLLFVAASMALILFSGIVQGSVFSLIPNISLTTEDQQT

SEQ ID NO: 85198 - protein, 122 aa, Unknown
  Obtained from environmental sample
  misc_feature (1)..(122): Xaa is any amino acid
MSEKSVGRFNELIPWNFITKFHEGVVIQKDGILQRTFAYRAPDIDSSGALEVNNIAIRVNDFAMRLGSGWAVQLEAQRFQLAEYPQSAFDTLAPYLIDKEREEAFRSAGRHLIQVLGRSDQC

SEQ ID NO: 85199 - protein, 120 aa, Unknown
  Obtained from environmental sample
  misc_feature (1)..(120): Xaa is any amino acid
YAELQCRSLSKHSSYPQDQAVLPSNRSAFTPKRIFFGEIRSGEVANELLEAWNTGHPGNVTTIHADSAASTIPRIEGLLRQVIKGQLPDLAESINLIVHLKNKTVVEALTIREIREGKNM

SEQ ID NO: 85200 - protein, 270 aa, Unknown
  Obtained from environmental sample
  DOMAIN (124)...(270): 60Kd inner membrane protein
  misc_feature (1)..(270): Xaa is any amino acid
LSHENRYIKPATWAAITGKYFALIALPYANQYSLAFSALPEIGIPNASRLYITRPAFNSSRLEDKYHFYLGPKNQETLSTYNRGDNGFKLFETDLFEIANTKGFLAPLEKVLKWLLQIFYKIIPNYGVAIILLTLLVRLLMFPLTKKGSESTLRMQALSPKIKEIQAKYKDNPQKMNAEMAEFYKKEGYNPLSGCLPMIIQIPIFFAMYNLFNNHFDLRGAMFIPGWIPDLSAPEAIYNFPDGFKLPLLGWTALRLLPFIYVGSQLVYGR

SEQ ID NO: 85201 - protein, 291 aa, Unknown
  Obtained from environmental sample
  misc_feature (1)..(291): Xaa is any amino acid
MYEAAPEEPLRSPPVNVEWKKIQTPAPWGKEWACFWFRAAYSAPLSDIPVFLSVTPNADSLAFIDGKPAGAFNMYHNKFRIDADGKEHTLHVEAYSGHLHGGCGPFEGASIVINIGKTLTGFPNTFSGGCLLERRLAIHSLFYDIRALYETAKIADSNSLRRAQILKGLSFALNRISLNADGKELEKQAVAAAQTLAPLLALKNGPSTPAVHLVGHAHIDHAWLWHIAETERKVARTFVNMLRFIKEYPEFIFIQSQPCQLENVKNEYPDVFKAVKEACKNGRWEPNGGMW

SEQ ID NO: 85202 - protein, 341 aa, Unknown
  Obtained from environmental sample
  misc_feature (1)..(341): Xaa is any amino acid
DDGPGHIAGVMGTDCKVVKVSGANVKMFGDIKIVFAAAFIAAAFASQGFAQASPETVSAQTESAAVRPEHSDSTAKDAAAEQAVSDGEDGDVEQASSDQRRSAGSPSRPRPMALGQPGHLDGIAAVVGDEIILRSELEAYAYMRLTATGQNPDSVDTKVLLNECLSDLIDNKVLLVRAMEDSTVNVRNDEVESTLNNHINMILRQNNITMEQLEAQLRIQQGSTIARFKSEMRRAIREQLYKQKLQQGYYFSAKINRRDVERFYARYADSLPEVGESFELLKLSLRLGTQDSVRQAAFDKIRAAQRDLDAGMSFEEAAKKYSESPERASGGDLGFLAKGST

SEQ ID NO: 85203 - protein, 331 aa, Unknown
  Obtained from environmental sample
  DOMAIN (180)...(268): Elongation factor G C-terminus
  misc_feature (1)..(331): Xaa is any amino acid
LGQLCVGQNTRGTWKAGAFGCSSLQSGKFKNLRIQKVLRYEGISPKPVENAAPGDIVLLSGLETFDIGDTLSSVDAPESLPRIQLDPPTISMLFTVNTSPLAGKSGGKFLTGNHLLERLERARMADPALFVEKTDGASAFKVSGRGVMHLTILIENMRREGYEFTIGSPQVIFQKAEDGSVLEPIEQFKVEVPAEFSGAIIEELGRRKGEMTNMIQDDNNRVFLEYNVPSRGLIGIRSLLLSLSKGYAIAQSIFLEYQPHKGEIPSRVNGVLIVKDPGVASAYALWKLEERGYMIIPPGADVYAGMIVGEHNRDVDIIVNVTKSKPVHLLP

SEQ ID NO: 85204 - protein, 74 aa, Unknown
  Obtained from environmental sample
  misc_feature (1)..(74): Xaa is any amino acid
KMPHERIDFILEKNATLHPIEVKKTTLPGGSDCANMRILENLGRPIGKGAVVCLCQEIMPIPKSSAIAIPAWEI

SEQ ID NO: 85205 - protein, 568 aa, Unknown
  Obtained from environmental sample
  DOMAIN (225)...(291): His Kinase A (phosphoacceptor) domain
  misc_feature (1)..(568): Xaa is any amino acid
GYGQRICPYGQLATDITEPMEKITIDAARISAGDLDHVLEVKTGDELEILVAALNSMITGIKTITAEKERLEIASAEKTRETELIQEANQNLQTILNMLPVGVGVMSTEDHTFLFTNKAFLEVFNCTTIDQILGHSAFEFMPVIQPDGKKTKVKLSEIFQQESANTEIQCVKSGGNPFIARVHTIATNFKGVTASLGVVEDTTAEKEYHEKLQNIALQEQEANQLKSRFLATMSHEIRTPLNVILGIMEIQLQKDDNPPDTQEALEQIYESGSLLLNIINDILDFSKIAEGKMEIVPFRYDIPSLINDTAQMNYMRCDSRPIEFIVAVDPNTPLDLIGDGLRVKQVLNNLLSNAFKYTKEGEVELSVCFEPAGSDEDVIIVFKIRDTGQGIPQDHVGRLFQDYMRINSDLNRSVSGTGLGLSITKRLLNLMKGEITVESQPGKGSVFTVRLPQRRYGDAVCGEDNVRRLRDFSFSSNAIAKKTKIVREYMPYGKVLIVDDVKSNLFVARGLLTPYGLHIDSIDNGVEAVEKIKNGNVYDIIFMDHMMPCMDGIEAAKSYAEWDIPAPM

SEQ ID NO: 85206 - protein, 274 aa, Unknown
  Obtained from environmental sample
  misc_feature (1)..(274): Xaa is any amino acid
MGTVTVKYNNVQRRFSDRVLWSRLTVKSPVYLGDLIRVAEYSSATLNINDGIIDINENSLIRIRASSDGEDRVVIDLNSGSLSITGSDTADIGVALNVMGRVIAPAAKATLSASAGESGIKLQVNEGSAIIIEEGGQSRSMEAGEALFLDTKGVEQAAPAAVVLQPRPNARFIKNSAEPVNIRFAWNVINIDQQQPLRMEIAPGPNFTRIARTAEGVNSCNAVLDAGTWYWRLLYHDTVLSSGQFTITDAVMPAPVSPIQDNIDYRGNTPIRFD

SEQ ID NO: 85207 - protein, 238 aa, Unknown
  Obtained from environmental sample
  DOMAIN (5)...(231): Bacitracin resistance protein BacA
  misc_feature (1)..(238): Xaa is any amino acid
GFFWLCERFHHAPAGTLAAVVAVLWKDIWAILRKLNQPLTLYLIIATVPTVIAALVFRKPLERAFETGHFLGFAFLMTSALLAAAELLAKKAAAKGDTAKNAVSMGWLDALVIGVMQAVAIIPGVSRSGATLSGALSRRLDRDFAARFSFLLSIPAILGAAVFQLKDLVKGGTADATDVTAAGGIGAAAMIAGTVSAAIVGFFAVRLMLKIVREKSLWGFAIYTGVLGLLVLVLRIGG

SEQ ID NO: 85208 - protein, 152 aa, Unknown
  Obtained from environmental sample
  misc_feature (1)..(152): Xaa is any amino acid
MNLKNDKIKCVTSLFTIFFEDPFWVGILEENYNGINYMGKHIFGAEPSNSELLQFYINKFENIKKYKIGETDIETKNFNFKKSIRKSKKAQNKIGVGTKSQNLFKSAFEETMNIKKEKRKIIAKLNKEGKYIKKTGKKNRGKEKDIKKLGSQ

SEQ ID NO: 85209 - protein, 273 aa, Unknown
  Obtained from environmental sample
  DOMAIN (1)...(270): Aldose 1-epimerase
  misc_feature (1)..(273): Xaa is any amino acid
VIARSIAGAKFSLGGRDHYLYKNDGENTLHGGRVPFSSRVWKAEAYEEPDGVFVRFELKSQDGEEGFPGNFAAAVSYGLTKSNEIVADYTAKVDAPCPVNLTNHAYYNLAGEGRGMDVLSTELKLYCPSYLEVDEKLIPTGKILPVKSTPLDFQIRKPIGRDIGPLVSTGIGGYDHCFVVDGEIGKLRPFAEVYDPFSGRSMRGFTTQPGLQLYTANSISPFQGKIGSVYEKHGAFCLETQHYPDSPNKSGFPSAIFGPGQDYQERAVFAFDW

SEQ ID NO: 85210 - protein, 143 aa, Unknown
  Obtained from environmental sample
  misc_feature (1)..(143): Xaa is any amino acid
VIFSFYAGCYTSDSKDKGIHLLKFDTDSGNLRLENSFYGGENPSFLLRSGNFLYAANESKNAGKVSSFSIEDRNTLTLLNSREVSGASTCHVAEMNNFLYAANYGSGSIFGVEILRDGSLGGIVTENTTLWLRPELVLPERAH

SEQ ID NO: 85211 - protein, 124 aa, Unknown
  Obtained from environmental sample
  misc_feature (1)..(124): Xaa is any amino acid
DNDQIGRDSDTDDDFSSLDDSQLEEAPAPAPQPAAKAPPPVQEEAAPQPAPQTAPQSASVAVAGGQAGGGAPFTLPSGLRSELRNILSYMDQLLESLPEEKIEEFAKSEYFDSYKKLFKELGLV

SEQ ID NO: 85212 - protein, 338 aa, Unknown
  Obtained from environmental sample
  misc_feature (1)..(338): Xaa is any amino acid
VKDASVTLERKKAELKDAEAALADARRGRSPSFDSYTYNNAINTSKTAYDRSLEDYNGALRMYDSTVQRYYDLIYAGADESAIELALKSMDDAQNSVTLTKRALDDASGALNSAINDMGRAESAFYANSGEIRQTSIAEAERQVMLAKYAADDAQRAYDRAVEGLNRAKRIYDTNSDDARRKDINDSKKGVEAAGRLADDAERLYNRAVDGRNRAADEAVQAALQHYSDAQTNLTEAQTALERAETTLDIAKRALTTQTDDTRKSLNLELQRADLDVANADIDLRAAEASLAAALNAHSGVSLISDYSGVVISVEKSRGQFVAQGEKIAAISANLIIV

SEQ ID NO: 85213 - protein, 100 aa, Unknown
  Obtained from environmental sample
  misc_feature (1)..(100): Xaa is any amino acid
MSINTELTDYLNAAIRRQVFPGCALAWVSKDEEAVITVGHRTYDDGDVPISENTLYDCASITKAIPVSNLALWLIDHNKLSIDNRLIDFVPNIPVSAITV

SEQ ID NO: 85214 - protein, 123 aa, Unknown
  Obtained from environmental sample
  misc_feature (1)..(123): Xaa is any amino acid
MDFITELRWRGMIHDVTPGLEEKLAAGAVSGYIGFDPTGKSLHIGHMIPIMLLVHFQRCGHKPIALVGGRTGMVGDPSAKSVERNMLFADAGAANAESIRSSWQSFWSSATGPAARKWQTLRV

SEQ ID NO: 85215 - protein, 123 aa, Unknown
  Obtained from environmental sample
  misc_feature (1)..(123): Xaa is any amino acid
MAVQLAMGNLLTDKYAEGFPGHRFYAGNENVDAVESLAQKEARELFGAEYANVQPHCGADANVLAYWAVLQTRVEKTLIEKFSRLSGNQNITCIKFQTANGKDSRRALETKRMLGKTTIREGI

SEQ ID NO: 85216 - protein, 349 aa, Unknown
  Obtained from environmental sample
  DOMAIN (192)...(341): ATPase family associated with various cellular activities (AAA)
  misc_feature (1)..(349): Xaa is any amino acid
MIGPTGVGKTEIARRLAKLAGSPFIKVEATKYTEVGYVGRDVESMVRDLMAAGFQMVKQEMQEAVKQEAEKRAEEALLDLLLPISEKKHKDKKQRPGPIMRPMGTFQINPENSNSSIIATTLQLGFPAFKKNQETQDSENEQKNAEGQEESADEIKDGENERFKATREKLRTMLREGLLNDRTVELTVGQNPTIPAFEMMGGSMEDLEASLSGIAGMLGGGQKKKVVTVPRAMEILKAEEAEKLVDRDRVSDEARQRVEETGIIFIDEIDKIAVKGDRGGGPDVSREGVQRDILPIVEGATVNTKWGPVNTDHILFIAAGAFNVSKPSDLIPELQGRFPLRGNLGHLIL

SEQ ID NO: 85217 - protein, 248 aa, Unknown
  Obtained from environmental sample
  misc_feature (1)..(248): Xaa is any amino acid
MLEFKKQGMTLLMISHKLKEVLKVADTVTILRDGRSISAYDVKADNLTEEIIIKDMVGRDLTHRFPERRSSPGETVMEVKNWTVYHPDYHDIKVVDDVSFYLRKGEILAFCGPMGAGRTELMMSLFGRSYGSRSTGELCITGKTCTFNSARAAINSGLGYISEDRKGLGLVLIQDVKTNIGHASLDKLSRFGIIDNQKEIQAAERYRKELNIRTPSINQLVRNLSGGNQQKVVVSKSLWRSSRYPPKK

SEQ ID NO: 85218 - protein, 329 aa, Unknown
  Obtained from environmental sample
  misc_feature (1)..(329): Xaa is any amino acid
GFIAEGCQSHLAELNLSRISAEPFVKGGFVGLADVVVIDMNKLKEEGKVKTVSVDSFEQNNLVLVDEAHRGLAGDVWRDYRARLSAEGGFAFEYSATLKQAMKTLNVKKDYKLLDEYFRSIIIDYSYKFFYEDGYGKEYRIYNLRESIDEEQRQLYLTGCLLSFYQQLKLFAKKDKEYAPFRLEKPLLVFVGNRVTAKTSVAEMTDVEEILDFIDKFINNRNQTIKRIHDVLHKTTGLMDSRGRELFSQCFNALPALFGRAPKADEVYKDILRLVFNCDAASDEPRLHILNLRQVQGEIALRIGEDGENFGVISIGDASKLVKNCEAGG

SEQ ID NO: 85219 - protein, 189 aa, Unknown
  Obtained from environmental sample
  misc_feature (1)..(189): Xaa is any amino acid
MKIEVYSPTIRRKEMDAVLTAMVEDRIGPGERARLLLQTAKEHIRFDYALALRSPATALHLALKALDLKEGDGVLVSALSPRYYVQTLADLRLTPLFCDVSYSFPCISRESVEKAIMVKPPGVEPRCIILHHTLGFVPDAASIAALGIPIIEDISQSYSPPQETGNDPAEEINEKAEPAASVQTIHGVF

SEQ ID NO: 85220 - protein, 303 aa, Unknown
  Obtained from environmental sample
  misc_feature (1)..(303): Xaa is any amino acid
GLDCEVIGAADVPRGCDITTQELTYILSFTGCEFVFAENQKQVLKILSCKEDLPVLKTLISFDPVDSETEASASSAGVTVLYYASLVALGQKRENLKPGTAEAEMDKGDSEDTASIIFTSGTTGEPKGVMLCHRNFLYQLPAFIKFFELKPGDIWISMLPVWHVYERLIEYVIFYYSTSIAYSKPMAPILMADFLAIRPNWMVSVPRVWEAIMDGINRNIKAKGGFRKKMFDLASSYSMLYTYFKDLTFGLLPNFHGRFRALDSLLGFFPWLLLLPLEGLLRVVAFNRIKKEFGGHFKAGISG

SEQ ID NO: 85221 - protein, 88 aa, Unknown
  Obtained from environmental sample
  misc_feature (1)..(88): Xaa is any amino acid
MRLSGITPESLVDGPGLRYVIFTQGCPHQCPHCQNPETWDIDAGKEYSARQLIRLLNKTKKAKQGVLFPAGDRFYRPAELAKVRWLRG

SEQ ID NO: 85222 - protein, 348 aa, Unknown
  Obtained from environmental sample
  DOMAIN (148)...(247): Methyltransferase domain
  misc_feature (1)..(348): Xaa is any amino acid
LVSDVSHRAEGNAGKPDLLETLERKSREIADRYGLWEDQKKTIVSFLCRVSLRAPLACPICEKPRSVPVLARFPEESYRQCPHCGIIYLARLGEPPIEYEKDYFFSDYKKQYGKTYLEDFPGLVETGKRRLEHIKGLLHLNDEKPSILDIGCAYGPFLAAAAECGFSPAGVEPASDAARYVKETLGFPCYQGFFPAANADEIRRLANDGSGGFDAVTMWYVIEHFEKVGKMLLEVHGLLKEGGALAFSTPSFSGISGSKSPASFLKNSPPDHYTVWSPNICAWILRRYGFRLRKIVVTGHHPERFPLIGRFADNAKKGSIYGFLYRFLFFISRLFRLGDTFEVYAVKG

SEQ ID NO: 85223 - protein, 328 aa, Unknown
  Obtained from environmental sample
  misc_feature (1)..(328): Xaa is any amino acid
KDAALLAIRNSGSDDPLTPQESGFWEQVLPHKYFRVAVAALDNYEEYRRGTTAEQRAYHRFIFISGAEKSAAFPLILRGVHLFEAQIALVINVGEKIETAKLLPFLKTLQETAKPVFGTTLTIGLSETGYAMNGVYQCAAQASEAVTARILSGSNSVIPWTYNEGRKRFFYPQNSEVKILNYLNAGNFERINFELENIMKLIRSTEGVSCDNIFFIYNQLAGGTIRRLSEMSINTSGFFLSHGNIYKSIASSETLERLSRCMGEFYKDLINYMRKDQGEEEVIDRILACFNKYYRTDMFFEDMAAELGISYSYMRKIVKEKTGKSSAI

SEQ ID NO: 85224 - protein, 315 aa, Unknown
  Obtained from environmental sample
  misc_feature (1)..(315): Xaa is any amino acid
MRKIITKAIALLIAFSTVTLAQEKGSFTDTRDKKKYKTVKIGEQVWMAENLNYADKDSKCHDNKPANCTQYGRLYNYETAKKACPKGWHLPRNAEWEKLSNFADSTRKEAGKRLKAKSGWKDTDGKPANGTDDFGFSALPGGYGYGGVGIQGSWWSFTGTQVSITYSDYGYEMPKSKNSGVINNSFTYSIRCIQGDEEEALKADAEENAAKEKAEAEAKAAKDKADAEALEAIRKANGGTFTDTRDKKTYKTIKINGQVWMAENLNYAAENTKCYQDKPENCTQYGRLYNWETAIKSCPAGWHLPKNAEWTNSAI

SEQ ID NO: 85225 - protein, 116 aa, Unknown
  Obtained from environmental sample
  misc_feature (1)..(116): Xaa is any amino acid
RPFPNPHAGGIVSKEEVKRVVAHVKTFGEPDYIDDEIFFDEEEEEAEPSLFAGADDPLYEKALEIVMQQGKASASYIQRRLKIGYNRAARLVEEMEHRGVVGPAQGSKPRELLRGV

SEQ ID NO: 85226 - protein, 91 aa, Unknown
  Obtained from environmental sample
  misc_feature (1)..(91): Xaa is any amino acid
DIQFSRAVKDQVLMNGRWLWFRAMVSSLVGELLDSLIFVFIACLTGVFGWNLFLSLALTNYILKCLIEALVLPLTYTAVRLLKKGEGSDVS

SEQ ID NO: 85227 - protein, 306 aa, Unknown
  Obtained from environmental sample
  DOMAIN (45)...(305): Domain of unknown function (DUF323)
  misc_feature (1)..(306): Xaa is any amino acid
MEFKRYNKSYCFNGVVIAVATGTVTITATTVDGGKTATCAVTVIKQIEMVSIPGGTFMMGSPATEPNRRDDETQHSVTLSGYKMGKYQVTQEQYQAVMGSNPSNFSSNPQAGETQGKRPVEMVSWYDAIVFCNKLSIKEGLSPAYSISGSTDTAVWGTIPTSSNATWNAVVIVAGSTGYRLPTEAQWEYACRAGTTTAYNTGDTISDNTGWYGSNSGLKTHEVGKKPANAWELYDMHGNVWEWCWDWYGDYPSTAQTDPIGASSVSVRVYRGGNCLNSAEWLRFAYRGGYSPDGKNISVGFRLVRP

SEQ ID NO: 85228 - protein, 65 aa, Unknown
  Obtained from environmental sample
  misc_feature (1)..(65): Xaa is any amino acid
MARNAFLARELENEIDLNRDKLRKLGRKRLESGKNVKTELLFIDIVRRIEKLGDYCLEIAEILAV

SEQ ID NO: 85229 - protein, 144 aa, Unknown
  Obtained from environmental sample
  misc_feature (1)..(144): Xaa is any amino acid
NQVQIRPSPFCKIKLLEMVNCHDCGALINPKTAEAQVHGGMSMAIGFGLYEKMLYDPKTGKLLNGNLLDYKLPTIMDHPRLEAEFIENREPTSPYGTKALGEPPTVPGASAIRNAVLHATGIGINTIPLTPHVLFTEFSKAGLI

SEQ ID NO: 85230 - protein, 76 aa, Unknown
  Obtained from environmental sample
  misc_feature (1)..(76): Xaa is any amino acid
MLAKRIIPCLDVDDGRVVKGVKFEGIRDVGDPVELARRYNDEGADELTFLDIGASYKSRATLLKLSIKSPRAESVM

SEQ ID NO: 85231 - protein, 90 aa, Unknown
  Obtained from environmental sample
  misc_feature (1)..(90): Xaa is any amino acid
VTGVINYGAGNLGSVMNALKRLSVPARFVSGVDELAPGTTPFERIIFPGDGHFATAMASLSKSGYDQAIREWIQADRPFSGNMHRPAAAF

SEQ ID NO: 85232 - protein, 98 aa, Unknown
  Obtained from environmental sample
  misc_feature (1)..(98): Xaa is any amino acid
MPGLDQAIDMLRLGDNVVWQVNSIEDYLQVVRPYIKQAKKDGRRLVYFRFGDHEPIMKDDEPSVLYKLDTSEGLSFLPRKYIILLTRKDLRLSMYSTA

SEQ ID NO: 85233 - protein, 82 aa, Unknown
  Obtained from environmental sample
  misc_feature (1)..(82): Xaa is any amino acid
FNRSITGTFSRSIITTFTTMLAAISLFFLLPGSMKDFALALLVGMTSGVYTTTLIATGFVYFWDVQARKREKKRLKPAPVKA

SEQ ID NO: 85234 - protein, 73 aa, Unknown
  Obtained from environmental sample
  misc_feature (1)..(73): Xaa is any amino acid
MKRIIRFSKYFLPAAVLSMTIAVFSIVGFLTQGFNLGVDFQAGLLQEIQLVPTAFSLTYNGRGNATFHSAEPP

SEQ ID NO: 85235 - protein, 129 aa, Unknown
  Obtained from environmental sample
  DOMAIN (65)...(119): KH domain
  misc_feature (1)..(129): Xaa is any amino acid
MGQKVNPIGLRVGINRTWGSRWYADPREYADTLHEDLRLRKQILSMPETKGADIAELEIIRHPQRITITIHTARPGVIIGVKGANIEKIGAELQKNTSKKILIKIKEIRSAEGNAQIIAQNIASANLSW

SEQ ID NO: 85236 - protein, 63 aa, Unknown
  Obtained from environmental sample
  DOMAIN (1)...(63): Lon protease (S16) C-terminal proteolytic domain
  misc_feature (1)..(63): Xaa is any amino acid
DSNVRQSAAKRKTIAARRNKAKHIIFPKQNERDLDEIPDHVKKGIEFHPVERFEEVLALALPE

SEQ ID NO: 85237 - protein, 345 aa, Unknown
  Obtained from environmental sample
  DOMAIN (36)...(345): Aminotransferase class I and II
  misc_feature (1)..(345): Xaa is any amino acid
LAEIEIINKSSKLDNVCYDIRGPVLKEAKLLEDQGCRIIKLNIGNPAAFGFTAPDEIIHDIVRNMQNAQGYGDSHGLFAACKAVMQDFQLKGVMDVGVDDIFIGNGVSELIVMAMQALLNSGEEVLVPMPDYPLWTAAVTLAGGRAVHYLCDEGADWNPDLDDIRSKISSRTRAIVVINPNNPTGAVYERSILEGIANIARENNFIVYADEIYSRITYDGAVHIPMSTIAPDILTVSFDGLSKAWRAAGFRSGWMVLSGDKKSAASYVEGLEMLASMRLCANMPAQFGIQTALGGYQSINELLLPGGRLHEQRDITVRMVREIPGLSVVMPKGALYWFPKVTLNV

SEQ ID NO: 85238 - protein, 202 aa, Unknown
  Obtained from environmental sample
  DOMAIN (1)...(87): D-isomer specific 2-hydroxyacid dehydrogenase, NAD binding domain
  misc_feature (1)..(202): Xaa is any amino acid
GYRELLSNRLFTLHIPQSETTKGLIDAEKLRMMKKEARIINLSRAGLVKDKDIIEALESGKISAYVTDFPTPDLSNCKKVICIPHLGASTPEAEDNCAVMAVKQIMDYLECGAVRNSVNFSRCKLDQRTPFRLLVINKNIPNMIGQITTILAGANINILDLINHHRDDYGYNIIDIEQQLSESILEKIRKVNGIIRVRTIAK

SEQ ID NO: 85239 - protein, 534 aa, Unknown
  Obtained from environmental sample
  DOMAIN (4)...(119): Response regulator receiver domain
  misc_feature (1)..(534): Xaa is any amino acid
MDKRRVLIFEDSETFANLLLEFLNTEGYETQRAKNGFEGIKLVYSFLPELIITAVDMPLFKGCESVRFLKSRPSTRNIPVIMLTFPGETKDKFWGAQAGADIYIEKTPENFEEFSKQIRRLLDENRPIDYERIKKEGEKINDDSLVEMVNNLLDNKLFQATLGSLLAELSSNVSSLEETVKGFFALLNNACRAEMCSIMIKDADDALVVYNANNGRYAEAIAEDFKAITIADFNTRFSDYKVVSKEVHDFFPAGERNERIESYILIPLTSGGEEYATVHIGASVKEYFSPLILENINVFLSAASPIIANALHLKQMETLQKKTRAAFARYVPIDVMDEIIKKSASPASQSESRVVTILFSDIRSFTKISENTPARELVDFLNTYFSAMGDQIIAEGGNIDKFIGDAIMAIFGAPKTLENSAVSGVRAAIRMVKNLPLVDTSNITLPEIGFGAGIGLNCGECVVGNLGFQNKMDYTVIGDTVNLASRLEGITKYYHQTIVVSEYIYSAAKDHFIFRKTDSVRVTRPLGQSDLVKP

SEQ ID NO: 85240 - protein, 108 aa, Unknown
  Obtained from environmental sample
  misc_feature (1)..(108): Xaa is any amino acid
VPSIENGAFVFCSNLTSVTIGNSVTYISSEAFAGCTKLASITIPKSVTEIGSKAFGGCTSLTSVTFQGTIIADNLNSAFDGDLRNKYLAGGVGTYTRPNGTSNTWTKQ

SEQ ID NO: 85241 - protein, 335 aa, Unknown
  Obtained from environmental sample
  DOMAIN (191)...(276): Transposase IS116/IS110/IS902 family
  misc_feature (1)..(335): Xaa is any amino acid
FQKANGKTTVAGRQWLYNKLRAGDKVALEAGNMAFIMAKEIEAAVGCRVYVLNPSHLALIYGSMKKTDKEDALKLAHILEDCKEERLPAVPIPTDKEMNRRKILACYRRGQQSRNREINRLHGLFVAQGITTKVRANLATNEAREESIKELTGMERQEAEYLVECLKLHDKQIKFLEKAIKEESAGDEEIERLQSVPGVGPMVAFAFVSYVSAERFENPSQVSNYFGLVPRVYMSGDVVKYGKITKRGNSYARALLVQAAWALVRSKAGGKLKERYEYMTVEKSISKKKTIVAIARRIAELLYTLMKDGTKHEHRPFIREKKAAEGIAAQLAKSA

SEQ ID NO: 85242 - protein, 95 aa, Unknown
  Obtained from environmental sample
  misc_feature (1)..(95): Xaa is any amino acid
MAEFYTQVRARSGETVVLSGLRQNDSSIIEQRLPLLSKLPLLGWLFKSKNNSTEDSQMIIYLVPHVDIANDEYTVTGLKTASIYTRLVEPYLEGK

SEQ ID NO: 85243 - protein, 455 aa, Unknown
  Obtained from environmental sample
  misc_feature (1)..(455): Xaa is any amino acid
MKGRAGTQENIECFRKKYAEHSQLEEYIRISNLSQNYRDVHQAISDFEKHIAFDKGNYVYHRTWGVGRIASIQSDEISIDFAKKRSHTMSLKMAVDALQTLSKNHIWVLKATKKKEELKEKVKTDFIWTLKTIIKSFENACDMKKIKAEITPALLSAGEWSTWNGKAREILKSNPEFGVSPDNIDIFTVRDRPISVMEKYYNEFTAQKNFFDRISIMRDFTNSTDTGSDSEYFMEMLSYFTGFLRSASDTTEQIASYLLLKEISVKYPPVNSALTVSFEDIFAKINDVRAVFKNLKDAKFREELLLNIKLFMGNWPDIYIKLFPCALMPSIITHLVKEGYENKLTVMCQDLYENFRDNREALVWLYKNSGNSSWFMAANIGVEKQLITLIHILDITYRDIENHKDTVENRKINKQVYNILFKDGELTNFLDNADEDTIIRIFTFINDLRSHPRLR

SEQ ID NO: 85244 - protein, 472 aa, Unknown
  Obtained from environmental sample
  DOMAIN (2)...(434): Borrelia P83/100 protein
  misc_feature (1)..(472): Xaa is any amino acid
VFINYEGPHARVDTREEIRQIGVGVGQQISDSEKGNAAKLAGLTVEQKKTYSYKFEAGTNNRYFVIHCVSGQEGNKIDSDILGLGVDTGVDHVRNLRVIIQGYLQAGYNYSEKDAALLAEYITIDNAVYRGNWDYFTSRYKAQVISNLTKEKAGLSLRYDEWPGRTLIVIPLGIGGLSSIDTSTITDKKVIEEMRKDDDQGIPQRREMVNLQEREAQKAEQQAQTKREEIKQEEKQIAQDKKQLEDDQQLGKVTQEEVKKAEEDLNKRDIAIEQKIEETKKLEEFAAKKLEEAQQQRQEIAKDQQTAIAQDTSGVYGVTIEKTTPTAMGRIVRLNAADGREIKRSPLDSVHSRTVAVIGGRVLAIAGENKGQGAVRLIEINPTSLEMARQGSDDIKLGSLLWVNGNDLYAILYDQAKKQHFIGRFNTNLELQAKSTVKVHPESTVIIQQGRLLTQRENGSAVSLNAADLSES

SEQ ID NO: 85245 - protein, 330 aa, Unknown
  Obtained from environmental sample
  DOMAIN (232)...(278): Bacterial regulatory helix-turn-helix proteins, AraC family
  misc_feature (1)..(330): Xaa is any amino acid
AYRELAVLRLYLPNGLFFWTSPFFSGGRFAGALMAGGALAIKRKQALKRFFDFYKGQISLAEIDKYLEGIPERSSEEMKALAKMLRLCAEKISSSGARYHDLAEHDHEHGGTDQQTYLNDKERLLIACLRRGDSAEAQDIARDLLADFNNTSDGDFEYFKMKAIELVVLVSRTGANSENEAELVEANSRNIKQIEDSNTAGELTDNVCLILERMAGKIFSFQGIRHASALRKAERFIWDNYTRKISLKEIADASGLSAPYFSTVFKNEMGENLSNYLNRLRVEKALVMLGETDTPINKISADCGFEDQSWFSKVFKSYTGISPYEYRKNG

SEQ ID NO: 85246 - protein, 71 aa, Unknown
  Obtained from environmental sample
  misc_feature (1)..(71): Xaa is any amino acid
NLREAGENIAERWAATLSCHQAIRDGDHLDAQTALALAKEALMLPQPRCPHGRAIWTEVSREALYKAVRRI

SEQ ID NO: 85247 - protein, 132 aa, Unknown
  Obtained from environmental sample
  DOMAIN (12)...(128): Rubrerythrin
  misc_feature (1)..(132): Xaa is any amino acid
MTDSRGVTGHCKDLQAHFNGECCEVGMYLAMARVAEREGYPEIAEAYKRYAYEEADHASRFAELLGEVITDSTKKNLELRIEAEFGACAGKTDIAKRAKEKGLDAIHDTVHEMARDEARHCAGFKGLLKRYF

SEQ ID NO: 85248 - protein, 316 aa, Unknown
  Obtained from environmental sample
  DOMAIN (42)...(249): ATP synthase alpha/beta family, nucleotide-binding domain
  misc_feature (1)..(316): Xaa is any amino acid
VVNPLGKAVDGKGPITAEEYLPIESPAAPVIDRGSVDTPLQTGTISVDAMIPIGRGQRELIIGDRQTGKTAISIDTIINQKGKNVICVYCAIGQKSSSTAALIGKLEEHGAMDYTFVVLASASDSAALQYIAPYAAVAMAEHFMRQGKDALVIYDDLSKHAVAYRTISLLLRRPPGREAFPGDVFYLHSRLLERAVKLSPEKGGGSITALPIVETQAGDISSYIPTNIISITDGQIFLDSELFNSGFPSRYRRWTFGKPRRRLRPDKSDTQDFGRIRLDPRQYREMAAFAQFGSDLDQATQDKLAHGERLMEPLKR

SEQ ID NO: 85249 - protein, 317 aa, Unknown
  Obtained from environmental sample
  misc_feature (1)..(317): Xaa is any amino acid
MVSGRLWFRLDLTKNRGYTISKISRNLRKELSDPVNITYYLSNKLRTIVPTPGEIEDMLKEYTAYSKGKIRLTVRDPLKDGLSKADELGLQPRQVQTVEQDNASLITVYSGIVIEYLDRMDVLPWVISTDTLEYDLTSRIRSLVNDTERWIGVIVGDSFRQWREDFGYLEAILAEAGYRVRLISLGDEISDAVPALFVLGGADDLDDWMLYRIDRYIQLGGKVLFAVKGVYVDTVSGSVEATLHRNQTLLDMIASYGAIIRQELALDRNALTLQYQTRTPSGGVQYRIVRYPLWIGVLGDNGNDKHPVCSSFLGVDL

SEQ ID NO: 85250 - protein, 138 aa, Unknown
  Obtained from environmental sample
  DOMAIN (1)...(90): Thymidylate synthase complementing protein
  misc_feature (1)..(138): Xaa is any amino acid
TSTDWPRLADGQKTAYVAYSSLVDEGIARELARINLPLSLYTEWYWQIDLHNLFNFLKLRLDAHAQKEIRLYAELLFEIAKKVTPRCCESFKKHILDGVRFSGNEMAELQRRLDGKSGGLSGKDLERFEEKLKSGRQM

SEQ ID NO: 85251 - protein, 207 aa, Unknown
  Obtained from environmental sample
  misc_feature (1)..(207): Xaa is any amino acid
DRNFYERLVTFAKKYDIAVIHDNAYSELVHDGSRGGSFLATPEAKDVGIEFNSLSKSYNLTGLRISFALGNRHIIEAFRKLRTNIDYGLSALDHAAAVAALTGPQDTVAQNRLAYRQRRDAFCAMLSKNGWNVPMTPATMFTWFPMPVKNMSSEAFCMDLLEKAGVICVPGSSFGEGGEGWLRFALIQPPERLEEAARRIGEYLKKQ

SEQ ID NO: 85252 - protein, 207 aa, Unknown
  Obtained from environmental sample
  misc_feature (1)..(207): Xaa is any amino acid
MLAYVLSRKEYIFRKPFTLVLILSMYINAGLIPNFLLIKSLGMLNTFWVYIVPGMVSAFNFIVIRTYMLTLPESTIESARIDGCGDFIIFTRIILPLCLPVLATISLFVAVGSWNAWFDTMIYNSGRVNLHTLQYKLMEYLQSSQTQTKSAAAIGSMGMAQNLASSMVTPVSIRAAITVVAALPILVVYPFLQRYFVVGINVGSVKE

SEQ ID NO: 85253 - protein, 205 aa, Unknown
  Obtained from environmental sample
  DOMAIN (15)...(101): N-terminal ig-like domain of cellulase
  misc_feature (1)..(205): Xaa is any amino acid
MKPFFALIFMVTLVNAQTHGFGARINQIGYGEQAKKILVLKDAGATSVEFKDLANGKTVLNVPLSAPATWEYSGESVRKADFSGIAKKGVYAAYVNGARVSDNIIVQNNVYENVFKAALKWFYYQRASTALPFEFAGKWMRAAGHPDTSVSFYPEAEQPAGWKISSPKGWYDAREYGKYVVNSGISVFTLWEYMSILKRLKKFPE

SEQ ID NO: 85254 - protein, 163 aa, Unknown
  Obtained from environmental sample
  misc_feature (1)..(163): Xaa is any amino acid
LNRGAWNKFEKARERFRVTTEELSRSLPKLKKLQQELADARAAGKNALYTVETPVVYNTALDDIKIDDEIKLIVVADNPGRREQAAENRRYLVGPSGKIAKKFFIDNPSLGIDFTKNVIILNKTPIHSPRTVELRELVKMETANGSRSIAAALKNSANSVNGK

SEQ ID NO: 85255 - protein, 150 aa, Unknown
  Obtained from environmental sample
  misc_feature (1)..(150): Xaa is any amino acid
TEAAIKNADKIIASISGQLNSLQTSIELLASQNEKAANAVDKIASLDESLSQIEKRISDMNVAREWLARTEAEFIALDKDAKALLKITKGAIDKEKGKTPPKSEGSVTPQEREDILRLKGQGWTTEEIAQAVHRSRGEIELVLELASRGV

SEQ ID NO: 85256 - protein, 280 aa, Unknown
  Obtained from environmental sample
  misc_feature (1)..(280): Xaa is any amino acid
LNNRGLPLADSDIFKAKIYKSYKSEEEKKAFANTWKEMTETCKAANITIDDMFRSYMHVKRARNGDNSKEVGMRKFYENNKNYLVESDLVEEIKKLTIFWFYANKQEVFPDANEDGFSFSIETKKWLHCLSWYPNEYWKFPVSVFFLKYKNDENFDNKFCILLKKLITMLFTRFIIQPTVNAIRDDIFKYYISIEKETNFDIKTSFNKSELKRKFDEDIFGAPRIERALILLDAYITLGTNDLINTDFHVEHILPQNGIRSITLNGETEKKQNLYRKTGE

SEQ ID NO: 85257 - protein, 294 aa, Unknown
  Obtained from environmental sample
  DOMAIN (67)...(293): FAD dependent oxidoreductase
  misc_feature (1)..(294): Xaa is any amino acid
VTRPLGKLAFHFRKKDTRRFIRELQKETDPDTRPGGIVNNIRYTGGDREPMVVPALQDNALEGQKPDVLIIGGGISGCTIARELAHHDLDILLVEKEHDLAMQASSRNDGMVHPGVDLRKGSWKYRYNLKGNALYGKLCEELEVDFDRSGQYVCFSNPLLMPFLYLTLLYWKWLGVPARVIGKKELRRLEPGLKEDLVLALAFPSTGVVCPYNLTIACGENAVQNGARISLDTAVLGMNSCDGRITAVRTNRGTIYPKVVVNAAGVFSDEMQEWRGIVFFLYIPGGGAILYWTK

SEQ ID NO: 85258 - protein, 435 aa, Unknown
  Obtained from environmental sample
  DOMAIN (168)...(237): HAMP domain
  misc_feature (1)..(435): Xaa is any amino acid
MPGTIRRDYTWDPPKRDWHQVAMGSPDKIILIEPYVDAETGKIVISFSRTVKNSAGTIIGVIAVDVTLDNLSEIVTSDKITEDGVTVLVEKNGLFIVHPDQSYVLEKNIFDGALSTDKDTVLKNQVSVIFHGDNYICSAPVGGTDWFLISTGSLNSMRMETRMILWTVLIVVFIMAMVSAGVAIALSHSLAKPFRHLVSSFNVFSSGDFTASTPDYASREASALSNGFNSFADNISGLVRNVKNSANDIDKVAEDLSLSVNDTQTVIIEVKETVDFIHSDVDMENQSIAQNEAAVNHVMEEIKNLNAKIKEQSAQISGASSAIEEMVANIHSVENNTALVSTRIIELVQSSQEEKKRLSETAKASKLIENESSALAVMNKVISDVATQTNLLSMNAAHEARHAGEAGRGFPVVAQKIENWRKHRPTSKVHSYYVS

SEQ ID NO: 85259 - protein, 88 aa, Unknown
  Obtained from environmental sample
  misc_feature (1)..(88): Xaa is any amino acid
GYRGDGHIDLRESWNLIKYFFITEEMPSVTVKGKEKPVRIFAIVNHVSVSSGPRTLAEVRELLGIKPPDISKIDTNAEEKKYKIGADA

SEQ ID NO: 85260 - protein, 152 aa, Unknown
  Obtained from environmental sample
  DOMAIN (5)...(119): Response regulator receiver domain
  misc_feature (1)..(152): Xaa is any amino acid
MADEQKIIIAVDDIPENLTAIRNTLKDLYEVYPCPSAMKMFELLEHKKPDLILLDVKMPDMDGYEAIKKLKSDARFKEVPVIFLSAMSDEQNEIEGLKLGAVDYIHKPFVTPLLLQRIKIHLSMSEQKKTILDRNREIEDFSERISNTLSKN

SEQ ID NO: 85261 - protein, 315 aa, Unknown
  Obtained from environmental sample
  misc_feature (1)..(315): Xaa is any amino acid
LSAGNIKTSGKGSIYIQETPVTRTDLSGFMTLLFDLHGQHDHGSLLRKENHRLYLDRFAGIEDEVLAYNRIFTELAEKRKTLEASFSSQKDREARLEILRYAVDEITAAALRSGELRDLENEAQILSSFEKLAAHVNGASNSFFDGEGSLISLARRCRSALDGAAAIDSTLSVLQKRIEDLYYEAEDIAGELRSYRDGLNYDPRRQQAIDERLALLYKLKRKYCAGPDNAVFAEDAMLAYRAAAEAEIESLSNIEENRENLKAAIAALEKDLSSRAASLRQKRTAAAGVLGQRITGILKRLECPMPGLPLNSADK

SEQ ID NO: 85262 - protein, 101 aa, Unknown
  Obtained from environmental sample
  DOMAIN (62)...(95): Tetratricopeptide repeat
  misc_feature (1)..(101): Xaa is any amino acid
MLAYFHKGDYNRAIDDSSQAIKIDPNFAVAYCLRGAAYLYKGDHDRAIDNCSRAIKIDPNLFWAYQHRGEAYIRKGDHNRAIDDFSQAIRLNPNFTEAHNF

SEQ ID NO: 85263 - protein, 396 aa, Unknown
  Obtained from environmental sample
  DOMAIN (9)...(130): Glycosyl hydrolases family 2, sugar binding domain
  misc_feature (1)..(396): Xaa is any amino acid
VIREDEGLKEKWQSPETGLSAWDDITLPGDFASAGPEADRPLSNFCGVIWLCREFEVKADFVPYEAKVWLGTIVDSDTVYINGVEVGNTGYRYPPRKYRIPAGLLREGRNRIVIRVTCVNGQGEITRGKPCRVFSEQACVELAGTWKYRIGAKAPPHPEAFFFQRHPMGPFNAMIAPILKYPFKGVIWYQGESNDGSSGDYEVLFKAMIRDWRNKSGQENLPFLFVQLPIFGSPTENDETASWAIIREAQSAALSLPATGMTAGLDLGEWNDLHPSNKKEVGRRLFLAAERVVFKNRNAPSSPMCREVKLLGSRLFLTFDNCDSGLIAHDMPYVSIVADGKLLRMPVEIEKHDTLSVDLSSVKKPEKILYAWANNPKDRQLYNCEGLPFIPFKMDL

SEQ ID NO: 85264 - protein, 68 aa, Unknown
  Obtained from environmental sample
  misc_feature (1)..(68): Xaa is any amino acid
MAALPKEKNYFTYADYKEWELAEGERFEIIRGGAFAITAPNAGHQAILVAFVSQFYHFLKDQPWRVYP

SEQ ID NO: 85265 - protein, 99 aa, Unknown
  Obtained from environmental sample
  misc_feature (1)..(99): Xaa is any amino acid
LKGRYRELERGAGPHNGEWGEVTSTSNCTDYQSRRLNIRYKDDDGKNKFVHLLNGTAIAVSRAIIAILENFQQQDGSVRIPPALVPYVGFDIIRRGSRE

SEQ ID NO: 85266 - protein, 175 aa, Unknown
  Obtained from environmental sample
  misc_feature (1)..(175): Xaa is any amino acid
MPRVPRSLRDRWRDGAPVSGRWFSIVLNDVENTEQGQWWDDPLEEDGRNRDRVRLLLARWGILCRPLMEKVSKSELSPFTWSGLLPTMRRMELSGELVAGRFFAGINSLQFASPAIARELENAEAVDGIYWMNAAIRQAPRDLILRGGPPPSRPAGIQPRLFPGLAAYRRVKPKR

SEQ ID NO: 85267 - protein, 92 aa, Unknown
  Obtained from environmental sample
  DOMAIN (17)...(68): BFD-like [2Fe-2S] binding domain
  misc_feature (1)..(92): Xaa is any amino acid
KRGAQAQNRHEVILSAACENVSEAEIIQAVKLGHTTLDGVKYFTRAQMGRCQGGFCTYKIIKIIMRETGLSWNKITKHGGKSRILEASLNDG

SEQ ID NO: 85268 - protein, 67 aa, Unknown
  Obtained from environmental sample
  misc_feature (1)..(67): Xaa is any amino acid
LPNGATIPFSGARPLKRAIQADLENPLAKAIIAGKIKEGDTVTADKNSEKGSEALSFKKSASSKGNT

SEQ ID NO: 85269 - protein, 406 aa, Unknown
  Obtained from environmental sample
  DOMAIN (7)...(282): CTP synthase N-terminus
  misc_feature (1)..(406): Xaa is any amino acid
MNGSAMTKYVFVTGGVVSGLGKGITAASLGRLLKQRGLKVAAQKLDPYMNIDPGTMSPFQHGEVFVTDDGAETDLDLGHYERFIDENLTKLSNLTSGKVYWNVLERERAGGYLGGTVQVIPHVTETIKNFIYAGAENSGADVLITEIGGTTGDIESQPFLEAIRQISLEKGGSNCLFIHVTLVPYLKCSGEHKSKPTQHSVKELRAMGISPNIIIARADEPLSGGIKDKIALFCNVKPDCVIENMTLSSLYEAPLMLHQNGLDIVACRELGINAPEADLNEWRNMTQKITVKKRNVNIAIVGKYIKLHDAYLSIIESLNHAGFETASSVNILWIDSEDITNQNAGGKIKMRGWHNYSRRFPQQGDRRKDCRLPVLEKNNIPYLGICPGKEIALIKFPRNICGTERR

SEQ ID NO: 85270 - protein, 92 aa, Unknown
  Obtained from environmental sample
  misc_feature (1)..(92): Xaa is any amino acid
MADTFAVLLRPKTGRTHQLRVHLRYLGHPITGDPLYGAADALFPQAGLMLHAKSLAIILPGEDTKRIFKAPLPERFTAMIRSLNDLEVQNEY

SEQ ID NO: 85271 - protein, 309 aa, Unknown
  Obtained from environmental sample
  DOMAIN (49)...(216): Glycosyl hydrolases family 2, sugar binding domain
  misc_feature (1)..(309): Xaa is any amino acid
GKFSDQIRVIEEKLEKKTGNYVSDIHNEDYESVYLETRLDASTLINIAGRETESLNGKWNFAADLYDTCRRAHWYRSKRYSPDGREFPLDYDWEGWDRIKVPASWNLEKPELHYFEASGLYTRTFRYIPKYKGERLLLRFEGASYRTTVFLNGKIIGTHDGASTPFNADISDVVETENRIVVVADARRSPIRVPTDNTDWFNYGGIYRDVYLVRVPSIFIKDWFVRLAPDGTYSTILADITLASVVNDRAQANGTACLQIPELSIKQEIVIKEGKGEAKFPPSRNFGVRIIPNFTMSPFLLDPAMLLTR

SEQ ID NO: 85272 - protein, 63 aa, Unknown
  Obtained from environmental sample
  misc_feature (1)..(63): Xaa is any amino acid
MHEFKRLTGEIIEELKKIVGKSNVIIEQEKLENYSHDETDALEYGRCPEAVVLPSIPKKQRQS

SEQ ID NO: 85273 - protein, 85 aa, Unknown
  Obtained from environmental sample
  misc_feature (1)..(85): Xaa is any amino acid
MKNIKDKLILITGGASGIGQLMAFAFAEKHAKVIVWDINENAIKAMEDEARVKNIFIRGMVCDVSDRNAITVRRTRPICHRLSKS

SEQ ID NO: 85274 - protein, 220 aa, Unknown
  Obtained from environmental sample
  DOMAIN (196)...(219): 4Fe-4S binding domain
  misc_feature (1)..(220): Xaa is any amino acid
MAEVRRHKNLFGFVPSIKKSSFHVRYPSRESFASMIVDLNTAIKKPVYAFMDAVTAMEGPGPSAGTPKQVGLILASANLLAMDVAASSIVGYPPQLIPVNKEALERKIWLNDFSEIEYPLLKPQEVMVRDFIKIPFKKTASQLLDFITPGPLKNLFASKNPLPVINGNICVCCSDCVKVCASNAIKLANQEGKMRIVIDKDLCIRCYCCHEMCPEKAIKV

SEQ ID NO: 85275 - protein, 341 aa, Unknown
  Obtained from environmental sample
  DOMAIN (1)...(274): Alkaline phosphatase
  misc_feature (1)..(341): Xaa is any amino acid
SKFPVTGLVTTYDAGTFITISLSAGTAIATGNKTLSGVINMDAGKTKKFKPISEYIHEAGMKVGIISTVTLNHATPASFYAKVPSRSNYYDIGVQLAGSNFEFYGGGSILQQSGKNGDQKSVFELAKDNGFTYVNTKDAFNALKPGVGKVIAISPRLQDDGAMPYDMDLKPGDLTIADFTRKGIELLDNPKGFFIMIEGGKIDWASHANDAGAVIRDVLAMDAAVSVALDFAAKHPKDTLIVVTGDHETGGMTLGFAGTQYDTFFDKVALQTRSYVAFDEEVLKPYKASHSVKDAKFADLIPAIKESFGIDFASLTDFQKQQIEFAFQRSMGKTRADLING

SEQ ID NO: 85276 - protein, 287 aa, Unknown
  Obtained from environmental sample
  misc_feature (1)..(287): Xaa is any amino acid
DRPRGYQGHEILPAQKEKPRWESAFFSDSLGYTPEPYAFFLNAGDNVIRLEGINEPAAIRAICLKAPVPAQNYRQYAAGIDTSNYRNTVSTYKLRIQGEDANYRSDPSLYAIYDRSSGATDPPSVAKIRLNMIGGQSWRVAGQWIEWDFYVPENGMYRVTVKGRQNYNRGFVSNRKVIIDGQIPCTELSAVPFTYSNKWKLVTFNDDQGDMLFPLEHGAHSLRLQVAMGGMGEMLSVMEESVFRLNSIYRKILVLTGTEPDNLPRLPRGCGLSRYYHGDGSGKQDPL

SEQ ID NO: 85277 - protein, 312 aa, Unknown
  Obtained from environmental sample
  misc_feature (1)..(312): Xaa is any amino acid
MNSMEPPKTEMFYSRESPKAGDTLYLKVTVPQGWKINSNRVPEDFLVPSSIEAIAKGIAFDSTIWSKPIVERNELLNMDLLLLRDTFTVALPIKSIEANYNPYDAKLKFTYQACSKICLPPKTIEISFNPVLQKKKVELETKEKSSLPIYILLAFIGGLLLNAMPCVLPILFLKIFDLVKKTGESKRNMLKWGFATASGICFSFFVIALIISGLRLTGNAVGWGFQFQHPAYTAAMVLCLAIFALNLWGVFEIWMPGNVLNVWEKRTKEGGFRGAFAYGILLVLLSTPCSAPFLGTAIGFAFTATTVELFAV

SEQ ID NO: 85278 - protein, 285 aa, Unknown
  Obtained from environmental sample
  DOMAIN (91)...(250): GGDEF domain
  misc_feature (1)..(285): Xaa is any amino acid
MDRFGRETHATIGSVPPILRSEFHDRDFYFALWRSLKRRGSWKGEIMNRRASGEICREWLSISSYKNANGAVALYVGTFVDAANQMSHSYSRHYYDSLTKLPNRLLLQDRLEFMINHARRNKELMALLLIDIDRFNLINDTFGYEAGDALLRATADRLVTCIRDVDVVFRSGDDEFAIILEEITRPEDAAKVARRILKTCAEPLRINGREIYATICIGISIFPPDGDGKVQILQNAEAAMRRAKEIGLNSFEHYKPSMNARALERLTLESDLRNSIDRSELSAFY

SEQ ID NO: 85279 - protein, 63 aa, Unknown
  Obtained from environmental sample
  misc_feature (1)..(63): Xaa is any amino acid
KFIVRWPRKRINNGSRDKADNKYLECGITAGVDYIISGDIHLLELKEYNKIKIITAKEYLEIV

SEQ ID NO: 85280 - protein, 215 aa, Unknown
  Obtained from environmental sample
  misc_feature (1)..(215): Xaa is any amino acid
MGVYMRLFTKPRLTLLLATTIALFAICLSGCGGSGKPGTLTDKRDGQSYRTVKIGGLVWMAENLNYKTDNSYCYEDKDDNCKKYGRLYDGGSAVCPKGWHIPESEEWDDLFTIVGNRDIRLKWDDDNLSSISGDNSVIGKKLKSKEGWDNNGNGTDDYGFSALPGGSRSTFGTYSGIGANGAWWTSSHTETDWTIYNGLPLARFLSGDNSVSEGY

SEQ ID NO: 85281 - protein, 503 aa, Unknown
  Obtained from environmental sample
  DOMAIN (169)...(325): YbaK / prolyl-tRNA synthetases associated domain
  misc_feature (1)..(503): Xaa is any amino acid
MGESMLRVKNRLNNDFVVSPTAEEVFTAIVRDELSSYRQLPIALYQINSKFRDEIRPRYGVMRGREFVMKDAYSWHTDDKSLDDTYQAMGRAYRKIFKRCGLSVIPVKADSGAMGGSGSEEFMVESEIGDNTLILCKNCDYAANVEKAACKNDFTAHNTIEAAKDAAKGTKSFEKIDTPNAETIEELCAFLKTESKAFIKTLIYRALNVELDLSSAPGCGKLERKKPSPDAPAVYPEAFFAVAIRGDLDVNEIKLASVLKASEAALASDTDVTRLTNAPVGFAGPVGLTGLPVIIDHTVTGMNDAVTGALAKDLHYRHVAYGRDFTGWSVDGQLSVDVRTVKAGDRCPQCGGELYTKMGNELGHIFKLGYKYTRSMNVTYLDENGKSQMPVMGCYGIGVDRTLASVIEEHHDDAGIIWPVSVAPYHVIIVPIKYDGKMKEAADKLAAELSQAGIEVLLDDRNERPGVKFNDADLTGIPWRVVVGDKGFRRVSAVELGHLIMIS

SEQ ID NO: 85282 - protein, 148 aa, Unknown
  Obtained from environmental sample
  misc_feature (1)..(148): Xaa is any amino acid
NDRRVPAPLRLFDLPRPRLWGPLAAGLSDWMEFESCGEETKEYVTLHWPEPNLGKGTAEAAVIYIDRFGNAITSISPREVVFACGDSPECILENDRRVPLGNHYSDVPLWSAVAYPGSAGLMEIGVNGGNAAEILELDVGSNVCFTAH

SEQ ID NO: 85283 - protein, 264 aa, Unknown
  Obtained from environmental sample
  DOMAIN (1)...(96): Glycosyltransferase family 28 N-terminal domain
  misc_feature (1)..(264): Xaa is any amino acid
LEFIGIPAGKLRRYFTLKTIPDVFKVAAGFFAGRRILKKQKVDLLFSKGGFVSVPPCAAAASLGIPVFTHESDFSPGLATRLNLRFVRKTNGRVFIAYSDTASFLAKSRLSKEQVIVSGNPVRSAFRSADPAKGRAFLGLGQDERVLLVLGGSQGARELNTLVRGAISDLRRHYTVVHQYGPAQDWDLPKSQGYIPLPYIKEEMPHVLAAAELVLGRSGAGTVWESAALGKPMVLIPLCGSGTRGDQVENARFFERQGAGAWFC

SEQ ID NO: 85284 - protein, 66 aa, Unknown
  Obtained from environmental sample
  misc_feature (1)..(66): Xaa is any amino acid
MANGNFTIPKPQNDPVRSYAPGTPERSLLKAELKRQMSEKITIPLIIGGREVYTENRIPVVMPHNP

SEQ ID NO: 85285 - protein, 115 aa, Unknown
  Obtained from environmental sample
  misc_feature (1)..(115): Xaa is any amino acid
MRRVEVNTSKKYSVWIEEGLLSQAGEKIAAVCKGEAAALVTDDTVNELYGDIVEQSLRAAGYATTRFVFPHGEQSKNTETYVSLLCALTEPNLTRSDVVVPLGGGRVGELAGIRG

SEQ ID NO: 85286 - protein, 284 aa, Unknown
  Obtained from environmental sample
  DOMAIN (1)...(278): Alpha amylase, catalytic domain
  misc_feature (1)..(284): Xaa is any amino acid
VRDYKKVADRYGRNEDLFRLFAEAHKRDIRVLLDLVPGHTSEEHPWFIESKKTNPVGEYKNRYIWTDSWFFWGLDGLKFIAGEAERDGCYIINFFKCQPALNYGFLERKEKWQLPPDHGDCAATREALKDVMRFWLTGDSGRGCDGFRVDMADSLVKFDDPQKSATSAVWKNIRAMLDAEFPEAALVSEWSSPPLSLKAGFHADFLLDHGNSGYRSLVRDYENGGTDNSYFKKKGTGGIDRFIGQYMPWYEGVKRYGYISLITGHHDTPRISHNLDVRELSLAY

SEQ ID NO: 85287 - protein, 172 aa, Unknown
  Obtained from environmental sample
  DOMAIN (31)...(165): ABC transporter
  misc_feature (1)..(172): Xaa is any amino acid
VKGSHVAITGVEKYFGDFHALKSVSIDIKKGEFYSLLGPSGCGKTTLLRIIAGFEEPSGGAVLLDGRDVVPVPANKRPVNTVFQSYALFPHLTVFENVAFPLRLRKMENAAVRAKVQEFLELVKLPKEGKKLPAQLSGGQRQRVAIAPGAHKRAKRPPSRRTALGARRETGA

SEQ ID NO: 85288 - protein, 187 aa, Unknown
  Obtained from environmental sample
  DOMAIN (3)...(117): GTPase of unknown function
  misc_feature (1)..(187): Xaa is any amino acid
MSIKIALAGNPNSGKTTLFNALTGSNQFVGNWPGVTVEKKEGKLKGCKDVTVTDLPGIYSLSPYTLEEVVARNYLIDECPDVILNIIDATNLERNLFLTTQLTELGIPVVMALNMMDVVRKSGDKIDTSRLAKELGCEVVEISALKGDGIAEASSAAVAARKGRKNSAPAQFFRQRRTYACAYRGSL

SEQ ID NO: 85289 - protein, 60 aa, Unknown
  Obtained from environmental sample
  misc_feature (1)..(60): Xaa is any amino acid
SLMISRTTENDRDRKMTVMTTTFIPCSAKLPIIALMRGALFGGNMVGRAQRLLYRDWGDH

SEQ ID NO: 85290 - protein, 64 aa, Unknown
  Obtained from environmental sample
  misc_feature (1)..(64): Xaa is any amino acid
MAGMEWVQCGFGEPAIAAAPNSGIMAKCFKLAVESGRLAFETGLAEQRDEAAASSPLTSFLSTQ

SEQ ID NO: 85291 - protein, 511 aa, Unknown
  Obtained from environmental sample
  DOMAIN (51)...(505): Aldehyde oxidase and xanthine dehydrogenase, molybdopterin binding domain
  misc_feature (1)..(511): Xaa is any amino acid
MDRRLLNARVRCHGDEIAAVIAEDEVSASRALRAIKVEYEEYPVVLSPEEAMGENIPLLHEECPRNILKQSNIIDGNFDEAIKEEGLLCFEGVFETPIVQHCHIETVTSWAYMENGRIVVVSSTQIPHILRRITAQALGIPWGKVRIIKPYIGGGFGNKQDSLYEPLNAFMCTKVGGRLVKLELSREEVFAATRVRHSEKIYLKSWVRPNGRIVARSYTAYSNQGAYGSHGHGIAAKGSNVFRQLYNDEKARKTDIYTVYTNTAAAGAMRGYGTPQAVFAIESHIEDIAKTLKLDPLEFRFLNVMPVGFIDNFTKNVNRFDTFRQCVEAGKKRIRWDEKRERYAKQSGPVRRGIGMSLFWYNTAVWPISIEISSCRMVMNQDGSVQIQLGETEIGQGADTVFSQMAAQTLGIPWQMVHIISTHDTDITPFGLGAYGSRQTYVGGAGVHKAAILLKEKILKAASLYAKIPVAELNIVNGGSCQYFALQQKNCQPWLTLPLKPSTTPKHPKHL

SEQ ID NO: 85292 - protein, 51 aa, Unknown
  Obtained from environmental sample
  misc_feature (1)..(51): Xaa is any amino acid
MRINHNLTAINTHRQLGISELDGSKSMEKLSSGFRINRAGDDAAGWRSPKR

SEQ ID NO: 85293 - protein, 322 aa, Unknown
  Obtained from environmental sample
  misc_feature (1)..(322): Xaa is any amino acid
LIARICRVEAVGIWARHDKTNAEVFHVLNDDIENLFAFAFATTPQDDTGVSHILEHSVLCGSERYPLKDAFLVLAQGSLQTFLNAWTFPDKTVYPASSVNERDYFNLMSVYGDAVFRPLLAEWTFLQEGHRYEYGKDGEGLSVTGVVYNEMKGAYSSPDSYAHMWSVKAVLPDTPYSYESGGAPEHIPELTWEGLKDFHRRRYSPANCRVFLAGNIPTEKQLAFLNDNFFSLIEGGKAPARIGKQKRWDAPKELIVPCPAGAAGDAPSNDDAPSVDGGEYKSTVFLSWLLCDATDTDENIALAALTEILLWSQGSPLLKALI

SEQ ID NO: 85294 - protein, 76 aa, Unknown
  Obtained from environmental sample
  misc_feature (1)..(76): Xaa is any amino acid
MKVAVIHYWLVNMRGGEKVLESMFEIFPDADIFTHVYNPKAISALIKDRRVITSHINRMPFPKSFTALYAAYAQCP

SEQ ID NO: 85295 - protein, 408 aa, Unknown
  Obtained from environmental sample
  DOMAIN (12)...(408): Phosphoenolpyruvate carboxykinase
  misc_feature (1)..(408): Xaa is any amino acid
MSSSSSNAKLNAWVKEIAALTEPDSVYWCDGSKNEYDEMVKVLVDGGLATPLAKRPHSYLFRSDPSDVARVESRTYIASKSQDDAGPTNNWIDPVELKKVMKDLYKGCMKGRTMYVIPFSMGPIGSPIAKIGVELSDSPYVVINMHIMARVGSEVLKVLGDGEFIPCLHSIGKPLAAGEKDNGKWPCAPLDKKYIAHFPEERTIWSYGSGYGGNALLGKKCLALRIASTQARDEGWLAEHMLILKMVRESDKKAKYFAAAFPSACGKTNLAMLIPTIPGWHVEVIGDDIAWMRPGKDGKLYAINPEAGFFGVAPGTAEDTNPNAMKSITKNTIFTNVALTEDGDVWWEGIGHDAPGKLIDWKGNPWVQDKSNKAQEPAAHANARFTAPASQCPVIAPEWARAARPPAI

SEQ ID NO: 85296 - protein, 318 aa, Unknown
  Obtained from environmental sample
  misc_feature (1)..(318): Xaa is any amino acid
ASRRILRENAVYAKCGGQYAYDPAIQTCDNGTVKAKCGIEYYNPAGQFCANNIIYAKCGGQYVYDPATQTCENNAVKARCGSGDYYNPALQFCYNDSIYNKCADTTYDPATQRCQNNIVQAKCGNDYYSTAAQFCALGIIYPKCAGKEYDPSGFKCENDILKTKCGDGYYNPATEFCSNGTVMATCGGKTYDPSKQKCNGTTLVNITTVTLAFNANGAAGATPASIVAEAGDSVTLPLKGAMAREGYNFGGWNTNAAGSGTNYNAGAKFKVTGSAGSTVTLYARWLRSFTVTFDANGGDGVIPAMTADSGSSITLPNQ

SEQ ID NO: 85297 - protein, 92 aa, Unknown
  Obtained from environmental sample
  DOMAIN (22)...(79): Protein of unknown function (DUF433)
  misc_feature (1)..(92): Xaa is any amino acid
MIGRVSWLDFLYIVVMEQFNRITHNPTVMGGKACIRGMRVTVGNILGQLSTGRSIENILVDFPYLEKEDVLEAIRYAAWRMQEKEVPFSIAI

SEQ ID NO: 85298 - protein, 114 aa, Unknown
  Obtained from environmental sample
  misc_feature (1)..(114): Xaa is any amino acid
AVFRAGKLVSIQNAQTMRDGLRAPSLGDLTFKFIREFVDDMVTVTEEEIIAAMHYLWTRQKIVVEPSGAVPLAPVLFKKIPGMTDNRVGVILSGGNVDVIEAGELFKKMKSADN

SEQ ID NO: 85299 - protein, 315 aa, Unknown
  Obtained from environmental sample
  misc_feature (1)..(315): Xaa is any amino acid
LELTGKKVLGIGDASGMFPIDNGKYNTLMIKQFDDLIASNNYSWKIANILPSVLNAGENAGVLTAQGAKLLDSSGCLRDGIPLCPPEGDAGTGMVATNSVAERTGNVSAGTSIFAMIVMEKELSKVYPEIDIVTTPSGKPVAMVHCNNCTSDIDAWVKLFKGLIDMSGAKIEKPALYDVLYYKALEADDDCGGLLSYNYYSGETITGIEEGRPLFARLPDSNFTPANFMRTLLFSSMATLKYGIDILTEKEKTKIDSLLGHGGLFKTKGVGQRFMAAVFNAPCWRYGFRGRRRRLGVLPSCFFYKSTRPNFGKIS

SEQ ID NO: 85300 - protein, 117 aa, Unknown
  Obtained from environmental sample
  DOMAIN (5)...(67): DnaJ domain
  misc_feature (1)..(117): Xaa is any amino acid
MAKRDYYEVLGVQKNASTDEIKKAYRKLALQYHPDKNPGDKAAEEKFKEATEAYEVLGDEKKKQAYDQFGFAGVEGMGGPTPHDFSQTFRGFEDIFDNLGGFSSIFDTILASADLIM

SEQ ID NO: 85301 - protein, 304 aa, Unknown
  Obtained from environmental sample
  misc_feature (1)..(304): Xaa is any amino acid
MEMTLTITPEYEGCSGTTPELTTITINPTPILTFTAGADQEICSGAEFNTVSFSSGGVGATFRWEIDAPPSIGTDPGRLTTGRFTTAERTGTGTSISFAGMTALNTANVNSWGTPTPPAPDVYTATVTVTATSTAAGACPKTETTTLSVKQAPVLVVPSDLTLCADEVINGVSDLSPRITFSVSNDATLKTAAYHWSHSGESVWKTIPDLTGKPALSVTSDDVSATVAKMPPFTTENTTAQNRNAKITVTAYHTNDCEATRDFNITVRPILTVNAIAEERICPPTTASDFFSGKSPSANISGTT

SEQ ID NO: 85302 - protein, 230 aa, Unknown
  Obtained from environmental sample
  misc_feature (1)..(230): Xaa is any amino acid
GIRRALVLALPWDEIRAGHFLPAKPLIYPLPGYPRIEGLSDTDTEEAADLLVQAGFPQGAGLPDLVIRITPSPEAARIGGLMASAWKEKLGVPVRVEVVPYNRYFQMLKNNDYTVGFSTWIGDFADPYTFLQMWRRDSNLNDAHYDDDDYETLIEKSMLEEGETRWATLADAEKLLLERGSVLPISYSPAVNIVDIGELGGWFPNALDIHPFKHLTFKAFRPLPGVVMAK

SEQ ID NO: 85303 - protein, 467 aa, Unknown
  Obtained from environmental sample
  DOMAIN (26)...(160): MutS domain II
  misc_feature (1)..(467): Xaa is any amino acid
MIRDVLDVCTPGTTVDEDFLDKGSSNYICCLACAGNAFSLSYIDLSTGEFFTSGIPADSPEILRQELERLQIKEIVIQESLLEENKQVAAAFYDRSGILINRWADWLFDPAQAKTRLEKQFGLANLKSFGLDAGSAEIVSAGTLLEYLDTTSKSLLPHIRTLKVYSDSEYLGIDESSQRNLELLCNQRDGDVRFSLLEVMDETRCAMGRRLLKRRILHPLRDLIAIQARLDMVESLYRDQGKLGSLRELLGKTPDLERLCSRLAMDRAHGRDMLAVKNAIFSFNSIMKLGFGQGMCFESAGTHETDNFEPLFQIYELLEKGICEDPSVVLSEGNLIKDGFNAELDQFRSLRDKGRQFIEDYLNEEREATGIQSLKIRYNRLIGYFFEVTKTHLTKVPKHFIRRQGITGGERYSTERLAELESEINGASDKVVELEKKLFLEIREQVKKHLARLSAAARRLASANLVI

SEQ ID NO: 85304 - protein, 298 aa, Unknown
  Obtained from environmental sample
  DOMAIN (7)...(297): Aminotransferase class I and II
  misc_feature (1)..(298): Xaa is any amino acid
LWRAPPSSGPCGGAKRLGTIEGYSGYQDEGLQALREKISTVFYNGKFTANEIFISDGAKCDIGRLQLLFGKSTPVAVQDPSYPVYVDGSVLIGAAGGAADSGYKGIVYLPCTSANGFFPDLSRLPSKSLLYFCSPNNPTGAVANREQLASLVKTCLEKKTIVVFDAAYSEYIRDPKLPKSIFEIEGSNKCAIEVNSFSKTAGFTGVRLGWTVVPSELKYEGGESVNADWSRVCFHDIQRRFQYSAGRRAYRLRRRGPERNPQTLPIFISATRKLILGGRLKNPGAIAIPPGRGKNFLP

SEQ ID NO: 85305 - protein, 119 aa, Unknown
  Obtained from environmental sample
  misc_feature (1)..(119): Xaa is any amino acid
MIRYFGISALIGYMTWDSADWNLSMLIRSGKFLTFALRPVHHPFFALSQKIGHRVLGTLLEAVPCAIIFSLLFGIDMRPASIPWTLLSILLAYFVYFYVNYILGIASFWMLGRSDPWVN

SEQ ID NO: 85306 - protein, 317 aa, Unknown
  Obtained from environmental sample
  misc_feature (1)..(317): Xaa is any amino acid
MIAAHWDHPAATHMNEGHAAFLGLERIREIMEEKGFTFEEAREAVWPTNIFTTHTPVPAGNERFEIPMMEKYFRSWPQVLGISWKDFLGLGRIYPGDERETFCMTVLALKMAAYANGVAKLHGVVSRDMWKGIWPGLPLNEIPIGHVTNGVHSRTWISSGMIDLLDRYFGPSFLDRPTDLQIWERMDRISDEELWRTHERRREKLVAFVRERINAQYVRTGAARLKQAEDALSPYALTLCFARRFATYKRGNLLLRDPERLLRLVRDHDRPIQLIFAGKAHPHDMPGKRPYPRNSPLLPKIRRIKQNYICRELRHGR

SEQ ID NO: 85307 - protein, 308 aa, Unknown
  Obtained from environmental sample
  misc_feature (1)..(308): Xaa is any amino acid
NQNTDGGGFHIGNTASVNNVFYGCRSWAVGDDGFDSIRAIMQVVYDHCWIAYVGFNYTFTPSPPPDRPSTGVATYNPPSAEEWAKWTTLLKDDTLWSNGKGSVFSYNGGNGNGLKLGGYGMAAAASINGAIGPTNYPAENPGHVMRYCLAIYNQRAGVTHNYAAGKNAPGSPGQHYYNVTSYNNRINYEMIARSPDTLTGTIEGRRQNAYNVTMKNNISHKNLKENHFMYDLIDYWPDELEEKEYPVRWLDFESGILENNTFGVEDKGGKLNHALDGPFGANGQDKTDFDDNDGKYPNGIRRLGQSVM

SEQ ID NO: 85308 - protein, 508 aa, Unknown
  Obtained from environmental sample
  DOMAIN (190)...(308): Response regulator receiver domain
  misc_feature (1)..(508): Xaa is any amino acid
MSSLLNDIATFTVTRLGEKPITFHLDITDDLPNKLYGDDLRIKQILTNLLTNAIKYTHEGSITLKLRCAREDDAVWMDVAVTDTGMGIPKEDIGRLFLEYYQIESDSNRHIEGTGLGLSITKRLVEIMGGKINVESEYGKGSTFSFRIKQGFVNDTVLGADVSEKLRTFNYSDDKRIATKKLVRVNLSYAKVLVVDDMQTNLDVAFGILRKYQMHVDVLSSGPAAIDRIRGGTPVYNAIFMDHMMPGMDGIETTDRIRAIDTEYAKNVPIIALTANAIQGTDRMFYEHGFQDFITKPIDVMKMVAILRKWVYDRNRDAALASVAQDSGGSEVSEEKEIDIEMPGVDTKKGLSLYAGDMDIYLPVLRSYIAISPGTLEKVRSVTGESLRVYVISVHGLKGTSACIGAEAIRKAGCDLENLSRSGVFRRVLAINGNLIADSEVVVAKCEAPGWFCMGSSTRNQVRKPQISVYGWRVDNAIRFYDVRWRAAGCRPLQKSVISLYIRRARHN

SEQ ID NO: 85309 - protein, 241 aa, Unknown
  Obtained from environmental sample
  DOMAIN (1)...(215): Radical SAM N-terminal
  misc_feature (1)..(241): Xaa is any amino acid
MDSMIAHYTAARRKRSDDAYSPTGKSGLRPDRATLVYVEGIRRTYKDVPVIIGGIEASLRRFAHYDYWSDTVRHSILLDSKADILVFGMGEKPLLNIARRLANGETIGSISDERGTCVRVHGRAAIEQWKDVCFLPKYEAVKEKDTASLRAYAEHFMVQKQNADPLSAKPLAEENDGDRWVIQNPPALPLSQRNWMTYTNFPLREKPTQCMTRQAALTRLKKFLFHWLQAEGGLAAVLFAR

SEQ ID NO: 85310 - protein, 96 aa, Unknown
  Obtained from environmental sample
  DOMAIN (26)...(94): Ribosomal protein L11, RNA binding domain
  misc_feature (1)..(96): Xaa is any amino acid
DWGGLSRLYSVVITIYADKTFTFILKTPPAAVLIKKAISLEKGSAEPHKVKVGKLPKAKCEEIAKLKMPDLSANDVAGAMKIIAGTARSMGVEVEK

SEQ ID NO: 85311 - protein, 92 aa, Unknown
  Obtained from environmental sample
  misc_feature (1)..(92): Xaa is any amino acid
TNLPRGKAYEVLNQPQLSRYSLEVQIAILFLAVNGYLLDVKTENVSAFVKDFLSHLKDQKAELMKAIAETGVVSKEQEDELRLTVEAFKGKK

SEQ ID NO: 85312 - protein, 384 aa, Unknown
  Obtained from environmental sample
  misc_feature (1)..(384): Xaa is any amino acid
MTRFSFNRLGRALSVASAAVVGAVFSVGAAQDSSYIPIKVNVDATVTAVPKSTAEGAETVTLALTANTVDTLILPYVMTTGVTYFAGQRHANALSIVANKSGNITVNLPAQSYKNAEVALYTVNGKRVMSRKVSSSNAVNVISRGNAATGVYLLSVRGANNEAVTARLTHSGGGLSINAAFVGGSVADARKLSKEAADVVMTWTVTVSPTDEEYKDSVFTIQPNKWNNPLKTITLKEKPQVVDVVKGTFTDERDGTTYKKITLTSAKLGAVTWMAENLNYATRESSGNGAWCYGNDDAKCVTYGRLYNWETAMIACPAGWHLPTRDEWGALVRACGGTYENGYPAGNVLRSTSGWKYFPGGPYGTDDFGFSRLAGAAPQLRWRF

SEQ ID NO: 85313 - protein, 320 aa, Unknown
  Obtained from environmental sample
  misc_feature (1)..(320): Xaa is any amino acid
EGGSSEDGRFARLALGFREGHDVTPERLRLGIEAVRATDRFRRVEGSLEEVPGGVVVRLYLDPWPVLKSVEKNVPKQLRSLLKPWLGEIKKGTRSGDIALAAWEKRAREWLVVWGYPSATVSIVRSAEGDSLDVSIEAGEPTLVRRVEITGDTGAIPKESILKDIRCTPGRTVWTSEVQRKAVQRLNRRFSKSGHLFAKVVFSWDRETGILGVGLTVGPVVSLRASGIGLSTGQLKEYLSLPSVERFGTDFLGEAERRLAGRFQAEGRLFAKVTLVETPVRSKPAGKAVSLECNVAGYDVLKIDGIAIKGNVEILGRICQ

SEQ ID NO: 85314 - protein, 156 aa, Unknown
  Obtained from environmental sample
  misc_feature (1)..(156): Xaa is any amino acid
VTKKTAACLLALPPVLAAVFSFILPYAASFGPAIRGFISGEISALQNNALFNITLFTFKQAFLSVLVSLALGLPGAWFIGNSRSRYTPLLRTLTAIPFAMPSILVVLGFVLFFGNSGWVNRVYSSLPFSGEPLGYSTSRRLLFSPTAFLISACDTP

SEQ ID NO: 85315 - protein, 72 aa, Unknown
  Obtained from environmental sample
  misc_feature (1)..(72): Xaa is any amino acid
MKLNTRKIKQIALPNLPYVFLFWLFAKIGEAYRITPGVDMLRKAMGAAANLGGTLSRPMRLQPVDCFLAITF

SEQ ID NO: 85316 - protein, 478 aa, Unknown
  Obtained from environmental sample
  misc_feature (1)..(478): Xaa is any amino acid
LRIGISSGAEQQIKAGQWIQARNALERAADYADVSSDISYLLALTRFNTNESRGSVLQAIENALRTRRWTRYGEPQARLLEAQQFIAMRRYSAALDSLVIFQPVALETADAAMLRLAALKGLVNTGAVSYAVEFRRRMTEAMNRYPRDTRTLRLLFDYANYAYTDGREPSRDDIRVMELALERLPFLLPKDPELAWIAVPFINDIEKARQTLADYRAGSSKPNPASLVPALNLGLLDDIDAVEELFAPAAAETAVVVDKDLVVNVWKLLRSEEGRDHMARKLKAFSGTITEDEDHDGYHESRAVYREGVLEEYHFDADQDRSEDVAIIFNSGIPQWARMPALAAVVFWESYPSVQRAVLENGLYLPAPGGFRFAPLGFTEICASDSTPGILYPQRELLQQNITRRMLASFASSVQQPSVEFAGGIEHIYLENGIPVNAEVMFEHKLRSFTEFENGRPVTQWLDLDLDGRMEPVAPIAG

SEQ ID NO: 85317 - protein, 146 aa, Unknown
  Obtained from environmental sample
  misc_feature (1)..(146): Xaa is any amino acid
VGTSLTRITIPDSVTRIGRYAFRECTKLISIIIPNSVTSIEFAAFSDCTGLTSVIIPDSITSISARTFSGCASLASVTIGNNVTGIQEEAFSGCNNLTRVTFQGTITSSNFSYYLFPGDLRDKYLASDGGPGTYARFVNGLSWRKQ

SEQ ID NO: 85318 - protein, 101 aa, Unknown
  Obtained from environmental sample
  DOMAIN (2)...(88): IMP dehydrogenase / GMP reductase domain
  misc_feature (1)..(101): Xaa is any amino acid
FDRELIGAMKRVPRPLFSSEVGDESKFVPEGIEGRVPYKGPLKELVYQLTGGIRSGLGYVGAADLADLRAKARFVQITSAGLKENHPHDITITKEAPNYRA

SEQ ID NO: 85319 - protein, 75 aa, Unknown
  Obtained from environmental sample
  misc_feature (1)..(75): Xaa is any amino acid
MENSFSESYKNAGVDVTAGYRAVELMKKHVKRTKIPGVIEEIGGFGGLFALPKIDYKEPFSSERRGSTTAITPPK

SEQ ID NO: 85320 - protein, 397 aa, Unknown
  Obtained from environmental sample
  DOMAIN (299)...(382): Hpt domain
  misc_feature (1)..(397): Xaa is any amino acid
MVTDPNDFAVALRQEEWFFVFSGYGLYEKIKTIMDNAAFPNGKRPPLALMVEFGNEPYIPDVRFISLPIQSLSIANTLNGSADSRNYFSGIGSGSTVRFTFSEARLLVVDDIATNLKVAEGLLAPYKAAVDTCLSGLQAIELVKRASLEMREYDIVFMDHMMPEMDGIETTNAIRSLEGEFFKTVPIIALTANAVVGMREMFIENGFNDFISKPIDVANLNEVINRWIGEDKREERKEEKEDVKEKREKRIEKKEERKVNEQPTVSNEQSAIRSIHLIPGLDTAKGISMTGGSQEAYKMVLEIYCKDIEDRMQIIQNIPEADTLPLFIINVHALKSSSASLGARDVSAQAKELEAAGKAEDMAYIRERLPVFLQMLMELKENIRDALQNNEAELDKT

SEQ ID NO: 85321 - protein, 388 aa, Unknown
  Obtained from environmental sample
  DOMAIN (190)...(249): KH domain
  misc_feature (1)..(388): Xaa is any amino acid
MTDSAERLDYRWLYARFLLTASEQRAERIKQDAIKEAEAKKKEILLEAKDQVIRDRNQQERETRERKAELQRYERRVFQKEESIDKKTAHLERIEQALADKEKICQEREDALTREEERYRSELERVSGLSSEEAKRLIIQNLESEAKHDAQVLINKIEQEANLAGEKKARDILLSTIQRLATEVTGEVTVATVTLPNDEMKGRIIGREGRNIRTLETLTGVDIIIDDTPEAVVISCFDPVRREIAKVSLERLIADGRIHPARIEEIVTKVTKDISQKIFEEGEKILFDLGIHNIKQDAIRTLGRLYFRTSYGQNVLYHSRKWRLLPGCLRRKSAVATGNWRSGPPLLTTSARGVESDSDLNHAKIGMDMARKLGRDPQIITPSEAPHD

SEQ ID NO: 85322 - protein, 147 aa, Unknown
  Obtained from environmental sample
  DOMAIN (1)...(100): CobQ/CobB/MinD/ParA nucleotide binding domain
  misc_feature (1)..(147): Xaa is any amino acid
LAWSESAELGVLTLNGMAAADDVLIPMQCEYFAMEGLSLLLQTVQRIQRSLNKTLGIGGIFFTMYDPRTRLAQDVVKQVSAYFKKKVFSTIIPRNVRLSEAPSHGQPIVLYDPHCPGAKAYHSLAKEIIQRAASPGIHSRGGSGSGA

SEQ ID NO: 85323 - protein, 241 aa, Unknown
  Obtained from environmental sample
  DOMAIN (55)...(189): HD domain
  misc_feature (1)..(241): Xaa is any amino acid
YRPSIRQLNESHAKIEQFNKELQSEVDRQTESIRNLQKAIVYSMSDLIEKKDGYTGVHTKRVSEYVAILLRELARRGHQFTESEIQRMAESSLLHDMGKIAIPDSILLKEGKLTDDEFDVMKSHSAKGADSLQKSMQFAKDNDFLKNAFVMAKHHHEKWNGGGYPDGKKRNEIPLLARVIAIADVYDALRSKRSYKTPFSREKAKSIILEENGRQFDPELVDVFLAVEPEFNEFCESAKNE

SEQ ID NO: 85324 - protein, 173 aa, Unknown
  Obtained from environmental sample
  DOMAIN (1)...(72): ATPase family associated with various cellular activities (AAA)
  misc_feature (1)..(173): Xaa is any amino acid
VFNVFLQILDDGRLTDGQGWIVDFKNVIIIMTSNIGSDLILEEKNTGAITDSLLELLTRNFRPEFLNRIDETVIFSRLGQNELRRIVDIQLDRLAHRLAKHQITLNTSHTENKFRAERRYDPMYGARPLKRTIHAELENPLAKLVISRKIHEGDVVTADRVGDGLEFKIVKIK

SEQ ID NO: 85325 - protein, 160 aa, Unknown
  Obtained from environmental sample
  misc_feature (1)..(160): Xaa is any amino acid
MGLSAFDRCTSLTSIAIPDGVTSIGYRAFEWCTEFTSVTIPNSVTSIGEDAFYQCYRLVNVNIGNGVTSIGTSAFSRCDKLTSVTIPNSVTSIGENAFRFCDSLTSVTFQGTIPSSGLNTNAFYNLGDLRAKFYATDATNGTAGTYTRPDTSSTTWTKQP

SEQ ID NO: 85326 - protein, 157 aa, Unknown
  Obtained from environmental sample
  misc_feature (1)..(157): Xaa is any amino acid
MSDHEKKLNDLIEADVKIIQIVSYETMRVHAMLAKSAKALERDLYIWNRVEGLKKWKPKDNKPVVENADMRNGEAIFRFFDSCDNAILLLEDFHPDMTDRNPENIRRVRNFALKNQPNKTLILSQPQMNLPFELEKEVHVFELPYPDEVSANLIIVQ

SEQ ID NO: 85327 - protein, 211 aa, Unknown
  Obtained from environmental sample
  DOMAIN (58)...(91): Tetratricopeptide repeat
  misc_feature (1)..(211): Xaa is any amino acid
MTRDSDSGLDRGIRLDPKNAEAYENMGDAYSFPYYARRNASLAIANYTEVIRLDPKNSKVYEKRGDAYSIKGDYDRAIADYNELLRINPNNRTAKDKIERALEDKNLPHITIDMDKVVDYWVNEGGSFPWSSSGSSSGSSSGSGPGSTTFRSQYHVQGTFTATVNGKITSFTINELVRATSQADARQQVESAIKNQYPTANNINITRIYQQ

SEQ ID NO: 85328 - protein, 263 aa, Unknown
  Obtained from environmental sample
  DOMAIN (16)...(263): Radical SAM N-terminal
  misc_feature (1)..(263): Xaa is any amino acid
LLQGNLLQGSLLQGNLLPVCRRDMDERGWEQCDFIFVSGDAYVDHPSFAAALLCRALEAEGFRAGIIPQPDWKYPSSYTILGRPRLAFLVGAGNMDSMVAHYTAAKRKRSDDAYSPTGKSGLRPDRATLVYVEGIRRAYKDVPVIIGGIEASLRRFAHYDYWSDTVRRSILLDSKADILVYGMGEKPLLNIARRLAEGEAIGSITNERGTCVRVHGRTAVDKGKTERCEDALFLPGYESVKGKDEASLSPMPTLYIQKQTPIL

SEQ ID NO: 85329 - protein, 96 aa, Unknown
  Obtained from environmental sample
  misc_feature (1)..(96): Xaa is any amino acid
SHDRSAEMVLLRGCNTGVSDARAVRGFACGLDTVINLIPWNKVEGLEFEGLPLCAPTQKEITDYAAALEKEGLKVTMRIKKGRGISGACGQLGSTA

SEQ ID NO: 85330 - protein, 145 aa, Unknown
  Obtained from environmental sample
  DOMAIN (5)...(35): Flagella basal body rod protein
  misc_feature (1)..(145): Xaa is any amino acid
MVRSLWTGAAGMIGQQSNTDIIANNLANVNTHGYRKQRADFEDLIYQTVKVAGTPATEDTVVPVGIQMGHGVKLADTQRVFTQGSLQQTEVSTDMAIMGEGFFKIKMYDGSMAYTRNGNFKVDDTGRMVTATVIGYTRYECSIIG

SEQ ID NO: 85331 - protein, 142 aa, Unknown
  Obtained from environmental sample
  misc_feature (1)..(142): Xaa is any amino acid
VYGEDYNAREEIDKMIVIDYLLRNTDRNSGNYGILRNSETLKWEKIAPVFDNGNSLWYNAQGIQFINGNSKCECKSFAGENEKNILLTGNINWYDKNKLNDIKKVISDVFKNNKYIEEERVEKIINEFHVRVNNLEIVLKRE

SEQ ID NO: 85332 - protein, 304 aa, Unknown
  Obtained from environmental sample
  misc_feature (1)..(304): Xaa is any amino acid
MGLIDEILHYVIALYREEVQPDAFETALNRLENNLGDSKTSGLLTAFTGQFPPRKVYTGEKILNEYLNGKEEGESCRALEIEETMMLSLANLNPAFSPFKFMFDDKDLSKNTVYPDAIEELKAHFKELPPFGPDGMNLWDLLRSPALASPDSLLGQLEYMRKHWGMLLSKFMARLLMSLDVISEENKPGFLGPGPTEVLTFAGLDEYEKFSPDQEWMPRTVLIAKSTLVWLFQISQKYERQITRLDQIPDEEIDELARRGLYGGFGLLVFGSGVRASRRLTMDRKSPKLQHRHTAFTTTTLREN

SEQ ID NO: 85333 - protein, 168 aa, Unknown
  Obtained from environmental sample
  DOMAIN (25)...(157): MotA/TolQ/ExbB proton channel family
  misc_feature (1)..(168): Xaa is any amino acid
GKSNDRFGTRKSDYQGAAEYLSAQTERRMGARVLLALINRAQPRGGKVFSEHHAERAVETEAMTCINSMETGFNFLVALGSLSPLTGFLGTVSGMIGAFKSIAEATEVNAQIVANGIYEALITTVFGLIIAIIAMIFHSVFSHIVDKFAAEIETTCSDLIAEIADNQP

SEQ ID NO: 85334 - protein, 596 aa, Unknown
  Obtained from environmental sample
  DOMAIN (38)...(118): Cache domain
  misc_feature (1)..(596): Xaa is any amino acid
PEGPFFFNGTGWEAPDNWLPDDRPWYKGAIEAGDCVAQTEPYLDSLTGDIVFSYSRCIYDNNGNRVGVVALDIEAGHIGEKVANTSLTKGGYGILTSQDLTVIGHINTDFLGMKMYDPRIPVSFLTDELVRTEKITGAEWVNWRGEKVVGFLKTLSNGWTLGLLAPKYIYFKPVYKMALTLSLLGGALASVLIIVLIRVDAAKNKSNMESRRKSAFLANMSHEIRTPMNAIIGMLTIGKTASEIERKDYCFTKIEDAANHLLGLINDILDMSKIEANKFEISPVEFNFEEMLRQAVNVINFRIDEKHQKFTVHIDRSIPRTLIGDDQRITQVITNLLGNAVKFTPENGVISLDARLAGEETGLCTLQVSVTDTGIGISAEQQKKLFQSFEQAESSTTRKYGGTGLGLAISKRIVEMMDGTIWVESEPGKGSTFTFAIQARRGTEIINECSNPDNQQAEEAQAPEIEGIFAGRHLLLAEDVEINREIVQALLEPTQLDIDCAENGAEAVRKFTEAPLKYDMIFMDIQMPEMDGYEATQRIRALDIPAAKTIPIVAMTANVFREDIERCLDAGMNSHIGKPVNFDEVIGKCLVPILTM

SEQ ID NO: 85335 - protein, 99 aa, Unknown
  Obtained from environmental sample
  misc_feature (1)..(99): Xaa is any amino acid
MTDHNVQTAWDLEPEKIKAIMTAVLEGARPADAAGVSQKQLEALYALGHSLYMAGSYHDAVTIFQGLCLYDYGDCRFWTGRGPRYRAKARPILSSSPPN

SEQ ID NO: 85336 - protein, 167 aa, Unknown
  Obtained from environmental sample
  misc_feature (1)..(167): Xaa is any amino acid
MAEGVLETLLCQYNLMDRNKEKGIALAHDMGLGTVVMGPVGGGRLGTPSKAILDLLPGKFTSSAELALRFVLANNKVNIALSGVSSVEQLEENARVADNTAPLSATELGQIETMMKENERLAGLYCTGCKYCMPCPEGINIPDIFTIMNYHRVYQITESPKTSCRSD

SEQ ID NO: 85337 - protein, 73 aa, Unknown
  Obtained from environmental sample
  misc_feature (1)..(73): Xaa is any amino acid
GLSREVIATTRQRAACTTLAYKSDNVATELTTAESKGVALLDKTPRKGAGNMNIGFLHPKSTGGALTEFCSPA

SEQ ID NO: 85338 - protein, 261 aa, Unknown
  Obtained from environmental sample
  DOMAIN (25)...(261): Carboxyl transferase domain
  misc_feature (1)..(261): Xaa is any amino acid
MPIKPEFIEELNNRRKEAKLGGGADKIEKRHAKGQLSARERVETLFDKNSFQERGLHVDQAKPTSKRLPGDGVITGIGNVDGRPVSVFSQDFTISGGSLSQMHAQKISDLQDQACELGFPIVGINDSGGARIQEGIWGLSGYGQVFYRNVQASGLVPQISIIAGPCAGGGAYSPALTDFLIQTRKNAEMYICGPSVIKAATGQEAPVEQFGTAEAHASVSGNIHFIAEDDKDVIAITKRLLSFLPSNNMQNPPHNLPKEIV

SEQ ID NO: 85339 - protein, 322 aa, Unknown
  Obtained from environmental sample
  misc_feature (1)..(322): Xaa is any amino acid
VTKLDFPKIHFYDQDFVDIYDKTWAWLQDCWNSATEKGGIEGKFFSYPGSRAVYQADAIYSSFFLVYSNRIYQATPSLDLFYERQEANGAIRAAYDINTGKPVIERDNSECLGIPLFAWAEYNIYHKSANKKRVKDVLAVLDKYTAWIDKTFKKSNGLYRVPLAVTGITNSPREGAYYSLDFNAMMAINALYLSAMADILNDKDSSFQYKKHYFALKTRINALMWDPQDGFYHDIDKNEKRLPVKTIAGYWPLLAEIPNDEKAEKIIAKLSDPISSARPTPSPRFRFQTRILTKTGRGYPRLVYPPPDLMVIKGLKRYQRWD

SEQ ID NO: 85340 - protein, 190 aa, Unknown
  Obtained from environmental sample
  misc_feature (1)..(190): Xaa is any amino acid
MPTALKERKTVISDSELAQRVAVIKRFKELLVQQRERFRTYLAVLDKQQQLIIGIDSADEIVAHVELEEQIVADIFSIQKVIDPMEVMYNSVSPYLPANDVLELKATLEDLKNQAAVRSRRNRDLISSRMREINKDIQVIENNPFISKARIITVSKRPPFVSRYYGVREKHENVLALLRDPGAMLEGHFL

SEQ ID NO: 85341 - protein, 101 aa, Unknown
  Obtained from environmental sample
  DOMAIN (1)...(99): Phosphoglycerate kinase
  misc_feature (1)..(101): Xaa is any amino acid
VGPKTLAKYKEVLSGAKQSYGNGPVGVFEFDAFAKGTEEVAKLVAEATSNGSITIVGGGDSVAAVNKFGLASKMSHVSTGGGASLELLEGRKLPGIEVCRG

SEQ ID NO: 85342 - protein, 96 aa, Unknown
  Obtained from environmental sample
  misc_feature (1)..(96): Xaa is any amino acid
MAERHEIPAMNIAKLAVSYPAQKKYKGLGTYMINNALALARTCNRQLFACRFLTVDADIEHNESVLEFYQKNGFVPNAEMNSKRNKTISMRKDIFG

SEQ ID NO: 85343 - protein, 197 aa, Unknown
  Obtained from environmental sample
  misc_feature (1)..(197): Xaa is any amino acid
CAAGWCRIEHPQNFINETRFGKGVDYKLTGAADYTLTGKTAYSFCMCPGGVVIPCASEPNGVATNGMSYSRRNSPFANSALIVPYEVGKSDVKSGIAFQRELEQRAFEMTGKNYSAPKQSAENFLAKKSGDYNLWDLMPENINTSLEAALYEFENKMPGFIKNGLLIAPETRTSSPLRIVRQRERRVRFRCWHLPGW

SEQ ID NO: 85344 - protein, 356 aa, Unknown
  Obtained from environmental sample
  misc_feature (1)..(356): Xaa is any amino acid
MELERTIQIAIKKASRVFPVILLTGMRQIGKSWVMEHLAGKQRRYVSLDDMKARALARSDPQRFIEENPPPVVIDEVQYAPELFTYIKIFSDKAKKNGLFWLTGSQKFHLMKGMQESLAGRVGILNMLGFSYWEITGKPADSVPFLPSLARVKQPPVIKQLTSPEVFTKIWQGSFPRVITNRNKTFLRKLFYDSYIQTYIERDVKDFYNIENEINFYNFLVAAAARTGQLLNYSDLSRDAQIDLRTAKLWLEILERSGIIYLLYPYSSNIAKRTIKTPKLYFLDTGLSSYLCSWDTADALRNGAQSGAILETYVFAEILKSYWHNGDTPNIYYYRDTDQKEVDFIILVPIADRWSK

SEQ ID NO: 85345 - protein, 179 aa, Unknown
  Obtained from environmental sample
  misc_feature (1)..(179): Xaa is any amino acid
GGGAVGAIMANPDVTVDFILTGEHVHPGAVKMALACKGLDKVCLIRDANLNAGMEPGIYKGISGTDIKMRYKGGPAREWRQPTEDGGSPNATEPGGLTGSGLTLDLAFRNAVKMLGLSLPQAAALVSHNPARVLGLDHDRGVIEKGYRADFSLLDRDFRVKACYIAGKQAYTEDEDAPI

SEQ ID NO: 85346 - protein, 539 aa, Unknown
  Obtained from environmental sample
  DOMAIN (288)...(323): WD40-like Beta Propeller Repeat
  misc_feature (1)..(539): Xaa is any amino acid
LEFMEYFSDQALESELGPYTQGFDLVRYIAETYGENAIPELWKDMGKLTNWTLSGALNERFKITEKELYKNWKENRKERYEKIRGSVGEIKAGKKISEGSFYNEFISVANGNLYGLSNFEDDFFDGEIFELKDSTPETFEKFKLKKPYLSQGMNIKQTDKGLLLAYVTYQNRDKKGKPYFDIAIADTNGKSHLATKFADAVYPDISPDGKQIVFARREADGTRFYLSIANTDSLSDYKDIVAPQGTEFNIYNPKFSPDGKKIAFSYFDGTKRKIGIINTNQNHSENTVNSINSGSDNRDPSWSADGKSIYYSSDETGIFNIYKKNLEIGETKKITNVLGGAFSPLEKKDSLFYINYDRDGFSIYKIENNSFTAHPVSYAATPLEAGTFASDEISFANSERSYIPIPRMPILVPIFALEDRSPDFGAVNTGIMVPKAGLAFGLNDPLNKNFFQVAALQQIGKFGEDSQSDLLASLENRSFPITLSLAFTRSNTVSKDTVRYEDPRSYEDSLAISEYASELYNASLSASYSLSRPNLTQVC

SEQ ID NO: 85347 - protein, 199 aa, Unknown
  Obtained from environmental sample
  misc_feature (1)..(199): Xaa is any amino acid
WSTHDRFGRVLVIATQNPIESEGTFPLPAAQLDRFMMKLSMGYPDRDAELTILDECPAEKGLANLKPAVKLADFLAAKKAASEVFCHQALKEAVADIIRDTRIHRAFTLGASPRAGLHLLDAAKALALVRGRNYIIDEDLTVLASPVLAHRVRLRDPRAQADKFIREICLARISSIKTDGINAGGMNANGVNAAGTRAE

SEQ ID NO: 85348 - protein, 372 aa, Unknown
  Obtained from environmental sample
  misc_feature (1)..(372): Xaa is any amino acid
MLYITSGKTDIIRVGLNPYRGFTGWDAKTVNVYADWRFNGTSELSITGKYKIGEFLDIPPTIDEIPVTSIGNDAFNNKQIYYIFISDNITTIGNNAFMYNKLTGITIPESVTVIGNTAFAYNSIVYIAFSESENVTSNVTYIGDNAFYHNQLRSVIIPEKITFIGNGTFAYNWLTSVIIPENVTAIGIGAFAYNQLTDITIPGNVITIGNIAFAYNQLTNITISEGVKYIGENAFSYNQLSEVTIPNTVTNIGNSAFANNILNEITIPDDVMSIGANTFFNNQLINVTIPEKVTFIGNSAFEDNKLSEIKIPDKVKSIGVHAFFRNQITSITIGERSTLGDLSFGGGFERFYNENDKKAGIYTRPDPKQYNW

SEQ ID NO: 85349 - protein, 405 aa, Unknown
  Obtained from environmental sample
  misc_feature (1)..(405): Xaa is any amino acid
MALVSTKGYFRLDVVKDNAPKTLIAWTEISDFDGINFTMNIITCGACLIFLVNGKWLAEVADSTVDYGKLGFVLASYESAEESNEYVCKAMLDYLSVDTRIKSIDECYKKWTDDSNINAEWRLRLAETYAVMDEPAKALDQINRAWKRRDEVIRTVSNTSEVRTKRELLFAARMSFRIREYKTAEEFINMILDQWPDSAEGKLACTEKIKILYELNKFAELKEFIVKNQVNINKDIDYYTLFAKCLWELKDYADSAEAWDKAFEMNAENGIYAANAANAHEMAGNNKKALSRYVSAGKIFLNQDNMPELSAIIKKLSILGTGDWEARALAGKWAFSIEDYDRSVKEFEVSNTTRCALRPRPKADPALLYLWRLVYTFNENLPTHPPCKEGRKLAPDMTFQRQLED

SEQ ID NO: 85350 - protein, 187 aa, Unknown
  Obtained from environmental sample
  DOMAIN (1)...(184): Domain of unknown function (DUF323)
  misc_feature (1)..(187): Xaa is any amino acid
GHICRGLAYIHCCRYFSRCRVSENCYSRNTDPADWGTVPTNNDATWNAVVIVAGSTGYRLPTEAQWEYACRAGTTTAYNTGATISDNTGWYGGNSGSKTHEVGKKPANAWGLYDMHGNVYEWCWDWYDTYSNYAQTDPMGESSGTFRVCRGGSWYGGSGQLRSAYRGYGHPYSRLDDIGFRFVRPNQ

SEQ ID NO: 85351 - protein, 111 aa, Unknown
  Obtained from environmental sample
  misc_feature (1)..(111): Xaa is any amino acid
MAKKVQDALKDLVSLCKRRGIIFPGSEIYDGLANTWDYGPYGVELKRNIKDLWWKKFVSSRGDIVGLDSSILLNPKVWEASGHVGSFSDPLVDCKCARKRAGQTIYWKKRW

SEQ ID NO: 85352 - protein, 318 aa, Unknown
  Obtained from environmental sample
  misc_feature (1)..(318): Xaa is any amino acid
EWVKERIAIPLDEWETLCASLPENLKQDFSQTSSNDRLVIVKRNDTAIPSMIHREWEEAWRQEPLPLLGPWLRYEGPISLPRIAGVFGISLAEAEDAVNALAEVEELVCDVRLAGEVSPLVCDSRNLEMLLRLSRRKQRPEISERPAAVLVPFLALRQLTINNEQLTMSNEQSNEAAFKKLYACCAPVKLWETEFFTARCVHYSPEIINQEINEGRLVWYGAGKEKVGFCRPDDLELVNMNTIQKSGQKIHSKNEAMSVGEVFAQLINNGLFDRPRDFWEIKDAVNAGAGRNVTAKECAEALWQEAWQGRLSSDSLNR

SEQ ID NO: 85353 - protein, 279 aa, Unknown
  Obtained from environmental sample
  DOMAIN (12)...(256): haloacid dehalogenase-like hydrolase
  misc_feature (1)..(279): Xaa is any amino acid
MRKFDPKKIKALAIDLDGTILLPNTMLGGRTQACIRKLISNGMEIIIATGRAIEASERFRIPMGAEGPMVYFNGAEVVDMPSGRILYTNLIGKDVVDFGTDIARSLGIHFQVYLPAGISPETGKRDIRQKWEALLTEKDGPDVQMYKKHTGIEPIIKDLKSVAAMPDLEGCIKGMFIADPSIHDEIRKRIYDRFGSRINVMRSFPTFLEVINNGVSKGEGLRIAMEIQGLSPEEGIAFGTKKRLTNVTVAGFAAAPETPGQYSESCRFGIPLPCPMKAL

SEQ ID NO: 85354 - protein, 126 aa, Unknown
  Obtained from environmental sample
  DOMAIN (6)...(103): Adenylate kinase
  misc_feature (1)..(126): Xaa is any amino acid
RLYCRGSGRLGRADVKGGFLLDGFPRSVPQAEALDKILAELGIKLDHVVNIAVADQEVKDRLAKRASIEGRADDADPKVIENRLNTYKQQSEPCLTYYRPNNIVRDVDGIGTIDDVFGRIQAIFVK

SEQ ID NO: 85355 - protein, 65 aa, Unknown
  Obtained from environmental sample
  misc_feature (1)..(65): Xaa is any amino acid
TPHSLLPTPHIHLQWFSDDAEAEGRTEQPTEHKLRRLREEGQVPKSQELVGAVTLFFPRVMLCAI

SEQ ID NO: 85356 - protein, 286 aa, Unknown
  Obtained from environmental sample
  DOMAIN (20)...(285): Putative modulator of DNA gyrase
  misc_feature (1)..(286): Xaa is any amino acid
MNMQEAVEYLNEIAKKSGAEQFDIFAGKSDSKSISVFNKALQNTEISNSCGIGIRIFKDQKPGYASTEKFSKESLEQTLADSLSNSKFTEILNVELPSIAIEKEALPTYNQELENVDITRLLNTCLSIEERILAEKEIKNVPDLGAEISSSTTIFANSNGVFFTDKRNAFGVGAGAVAERNGVVKMGWYSKGGRDFGTVSVEQIADKVIARAKELLSPRHITSGEMPVVLTQRISSNILSMYLPSFFAEHAQKGLSRLANLFREKIASDKFTLSSEPLMPDLPGST

SEQ ID NO: 85357 - protein, 314 aa, Unknown
  Obtained from environmental sample
  DOMAIN (184)...(298): CBS domain pair
  misc_feature (1)..(314): Xaa is any amino acid
MIRLAELSYRIKLKSLAEKSKKMGKRVRLALKLLDVYDKILSTVVIGNNIVNIGSSALATAILIGIFGNMGVSIATVVMTVLVLIFCEISPKVLAKETPELTALRTAPILRFLVWFFTPLSYLAAEWKKFIIKIFSVNQDRSTTEDELLSFVGEVRQEGGININEEKMIRQVIGFDDLKASEIYTPRMDVEAVPVSSAVQEVDLKFTETGFSRLPVYQDSVDNILGIIHFKDFYREVIKGQKSLKEIISPVIFVAKTIKIGKLLRTLQEKQTHIAVIIDEHGGTLGIITIEDIVEELVGEIWDENEKVVKSVKN

SEQ ID NO: 85358 - protein, 57 aa, Unknown
  Obtained from environmental sample
  misc_feature (1)..(57): Xaa is any amino acid
MLTGTEASSALGKNVELMEGERTIQGAVQAVTRGDIPQVLVNGTFYNWDQVLKVFAE

SEQ ID NO: 85359 - protein, 267 aa, Unknown
  Obtained from environmental sample
  misc_feature (1)..(267): Xaa is any amino acid
MSAKIVIGIGEVLWDVFPEQKILGGAPANFAYYASKFGFKGCLVSAVGKDLPGKELLDVLAEKKLDLLVETVDYPTGEVHVALNAQGVPQYEICENSAWDNIPFTKRTEELARSCSAVCFGTLAQRNEVSRATIQRFLELVPKNAHKIFDINLRQHFYSKEIIHQSLQLCNILKMNEEEVAEIAHIFGFADMSEQEICLHLLKTYDLEIVAETKGAAGSYVFTANETSYSASPKISVTNTVGAGDSWIGAFVAAFSTEKVANSTTRE

SEQ ID NO: 85360 - protein, 402 aa, Unknown
  Obtained from environmental sample
  DOMAIN (354)...(398): Bacterial regulatory helix-turn-helix proteins, AraC family
  misc_feature (1)..(402): Xaa is any amino acid
MDRFGTRKTGKAERARQFSLLLAERIVLMHGGDFLLEPDHCTVILPWPTLSGQEASRNPVSSRDHVLVLSDPSFLPTNFFSLPQIRDTGKNRQGKTAFIAWNASGASQGDLVKAASLRRKSEFSGVPFLCYGMPAGSGDPIDSAASLIEAVEFALKSPKKGTILFIGYKYPDGDFELLLSPSAAPGKKQNSANAVFEKTYIESMDTFGETVAEVTPLLIVFNSLDVEGAAAVRRHPLTMTVPVIMISGRVDSTVNVNSLSQLSRLIICHRAIVSSPEFRARIMAIVNGAEILPPHTGVLVKKAILNFDKHAKTHISRWKLADSVNVSEDYLTRIFHKEMGLPLWDYLNRYRIFLSAELLQQTDDTIQEIANRCGFQDQAYFCRVFKKIYGGFPRADAQEVSG

SEQ ID NO: 85361 - protein, 294 aa, Unknown
  Obtained from environmental sample
  DOMAIN (8)...(165): Stage II sporulation protein E (SpoIIE)
  misc_feature (1)..(294): Xaa is any amino acid
LWRGFYKTPEGWIIEVYEELQRVFVAFDGSMLISAAIGLIDEETGAMYYLNAEHPWTVCYRNGTASFTENELTMRKIGTTETENHAVIRTLQLETKDVLFFGSDGRDDIMMGTDEATGQRIINEDETRFLHCVEEAGGDLKKLVESVEQGGELTDDFTIIRIEWKKPPLAPPPDFEAVRSSANKAIVDKDLPRAVQLLRKAMYLYPDIKIIEQLVACHRERKEMPEIIQVYQYGLKMMPLHEGLLHSMVNESRRMVREILDGSKGKEDTNRASKYIQMGDRLRRAAADGKSFTL

SEQ ID NO: 85362 - protein, 259 aa, Unknown
  Obtained from environmental sample
  DOMAIN (1)...(222): Polysaccharide biosynthesis protein
  misc_feature (1)..(259): Xaa is any amino acid
MLVIGGAGYIGSHVTREFLDNGHNCAVYDNLSSGLRENLFEQAGFIHGDIHNYQLLLETMKSGNFNALIHLAAFKAAGESMLKPEKYSHNNISGTINILNAASEAGIKNIVFSSSAAVYGNPQYLPIDEKHPTLPENYYGFTKLEIERFLGWYEKLKGINYASLRYFNAAGYDIKRRIKGLEQNPANLIPVIMETASGARDEMQVFGNDYDTPDGTCIRGYVHVSDLAAGHVLALDYISKNNKSLTVNLEAKKLGRSVM

SEQ ID NO: 85363 - protein, 388 aa, Unknown
  Obtained from environmental sample
  DOMAIN (245)...(388): MatE
  misc_feature (1)..(388): Xaa is any amino acid
MPSQKELTILTTGNPAKRIVVFALPLLIGDFLYVFYTMTDAFIVGRWLGINGLAAVGASYSIIGFVFGFIYGLTDGFAVITAQRVGAGDAEGIRRSVAAGLSLCLFTSIIITVLLLPFCRVFLSLMHTPIEIMNDAYGYVFITLAGSFIGIFSNMLAGIIRAGGDSFTPTVFFLVGIVSNIFLDILCVVVFHWGVRGAAAASVFSQFISCVLFLFLKIRRFSRFFPQRQDWLAGRRDFGVHLSMGISMGLLHSIVEAGNILIQAAVNSLGALTIAAVSAAQRVRGLNMMPLFALSRAMTTYTAQNYGADKMDRVNKGIFQACLISLGLGVFMATVNRFTGAPIAALFLKDSPEAVALAHRFILYTGYTVFILGIMLFSAAAYRASRPI

SEQ ID NO: 85364 - protein, 348 aa, Unknown
  Obtained from environmental sample
  misc_feature (1)..(348): Xaa is any amino acid
VNDQIGRDEDDGYTLYNPEDRLIEQALASGNLRDEENKILFMAEGEYRCAVRIENLPNANALTEQYVNVSPELQNKSGETVAGVRRFYTISPRLAVSGTSVYRIHDLGLRWAETDRINSRLRKDELPAFLSLVFSGFSNLELLYEGWSIKKIRPAAALPALLFMEIDKYGYIHIRPICFLRGFPPHFLENEEIVTVVEIYENEKIFGVAEVIFPESPEDQFRAVLNRGNKATAKNSIHEENGRFIIAPKFAREFFAENIVDLSQRFVLLEAEVLSGYKLSFSRPKIRLSMGKGIDYLFSNAVGENRGRKLFVCPAHGGIPQGILHHPVGRGRAPFPDSGQWIALTVWE

SEQ ID NO: 85365 - protein, 83 aa, Unknown
  Obtained from environmental sample
  misc_feature (1)..(83): Xaa is any amino acid
VARGRREREGKLWVGKGGGEQWTGGGGERGKVGGGAGKGEQGGGEVEAGGRLWSGWGAERGVGRGGRDDRGGEGGGREVGEGG

SEQ ID NO: 85366 - protein, 206 aa, Unknown
  Obtained from environmental sample
  DOMAIN (72)...(148): Helicase conserved C-terminal domain
  misc_feature (1)..(206): Xaa is any amino acid
IARERRQIFVCYFQGVSELRRLASVPEADGEYAGPSAKRQYVLDRITELAENTHKCLIFTNFLATVDIVSEDLAGLGIQNLTMTGATVDRQALVSRFQTDDNVKAFVMTLKTGGTGLNLTAADYIFIMDPWWNSAAENQAIDRSHRIGQQNPVFCYRLIAKDTIEERILELQKRKTDLAGALLADDPGALKALSPEDVAYLVGDAP

SEQ ID NO: 85367 - protein, 170 aa, Unknown
  Obtained from environmental sample
  DOMAIN (18)...(161): RNA polymerase beta subunit
  misc_feature (1)..(170): Xaa is any amino acid
MIKRKSYSSNEFRLELPDLLEMQKVSYERFLQAGIPAKDRRNEGLERVFRDAFPTSDAKGLLVLRYSHYTLSMPRYSVRECRERGVTYSRPLIVHLELQTFKEDGEEKKLQDQVANDVFFCDLPIMTENGTFIINGAERVVISQLHRSPGVSFDSEQLPSGKMIYQSRII

SEQ ID NO: 85368 - protein, 325 aa, Unknown
  Obtained from environmental sample
  misc_feature (1)..(325): Xaa is any amino acid
FDRDTLYSDVDNIRNFIHNQLSELMRVFCVFVISLMIMFSMDIFMSLVSLVLIPFIVAFSILYFRKVSVEFNRADIAEGQVQAAAQENYTGVRVVRAFGRESYEMERFSVKTKKYQDIWVYIGKMLGLFWGAGDFLSGLQLVIIVGFGVWRSVQGQLSPGTFLAFYTYCNWMIWPVRQLGRMLADLSKTLVAAGRIREILAEEPETDPPDALTPDLKGEICFNNVTFNYGEKEPILKNISFTLKPGESMAILGATGSGKSTLVHLISRLYDLNENSSHNAGSITINGVDIHRVARPWLRRHIGLCLQEAFLFSRPFKKTSPWQNR

SEQ ID NO: 85369 - protein, 169 aa, Unknown
  Obtained from environmental sample
  DOMAIN (10)...(132): Acyltransferase
  misc_feature (1)..(169): Xaa is any amino acid
MQHSTSYKHRWRMYGVKRAITVSNHTTFLDPVKIGWLVIPRLLFHTMLEATVEFPLLGTFTRLLGGVPIPRGRHGFQKILESCQKVFKYRRYMHFYPEGECFLYNQRIREFQSGAFRIAAELDIPVIPLVTVFTNGLFKPWSFWGALCPLKAGSAGRRNPAQYIKRERK

SEQ ID NO: 85370 - protein, 471 aa, Unknown
  Obtained from environmental sample
  DOMAIN (197)...(471): Methyl-accepting chemotaxis protein (MCP) signaling domain
  misc_feature (1)..(471): Xaa is any amino acid
MVDAEVQFGSYINEAFDAVKKAEEFACYSWAPTMKTNIQIAVVPVTLGQSNTTWSIMAGTEEWYIMKDINPMIMFAIIIAGVAIAVSAVIIFIVLDRTTKPISIVAETLKIVAEGDLTKTVEVKTKDEVGGLAKDFNFTISKIKDLVLLIKKQAAMLSDIGNDLSSNMTETAAAINEITSNIQSIKGRVINQSASVTETNATMEQVIANINKLNGHIERMSKNVGSVTNTLLNNAANVKTLLEASEVGKAGLAEVVTDIQEIARESEGLLEINAVMENIASQTNLLSMNAAIEAAHAGEAGKGFAVVADEIRKLAESSSEQSKTIGSVLKKIKESIDKITKSTETVTTRFESIDSGVKTVAEQEENILNAMERQQKDGQLDDVSKMNDISLAEISRVVKSGSEEMLEGSQEVLKESQNLEKVTQDITGGMNEMATGSDQINLAVNNVNDMTAKNREAINSLIGEVSRFTVE

SEQ ID NO: 85371 - protein, 310 aa, Unknown
  Obtained from environmental sample
  DOMAIN (59)...(253): Type III restriction enzyme, res subunit
  misc_feature (1)..(310): Xaa is any amino acid
TDAFIKKHDDLFALLSPTTRITANSLNRNINRKFKTHIIAPVKTYSVNIAGWKDKSKDGKDIKPHQWQSIHHLYRNQCGISALGTGFGKTVTGIALMSLLRQEGKAHRIFLQVPNNKIKDWIEEIHAVMPSLKIASIDPEEPGYSSRDKRYAKYQAMARSDADIILMPESSASEIQLSAENDSRITEKVSFLYKLEKADGSKRQQAMAELKGEYKAASGKKNVTVCFEDFGCDAVFVDEAHRYKNLFTSTLSRETGMNDGRQSAKAMSLYKKCDYIREKNNGKNTYLLTATPLTNSPLNIQHDATRADLS

SEQ ID NO: 85372 - protein, 345 aa, Unknown
  Obtained from environmental sample
  DOMAIN (48)...(104): Flagellin hook IN motif
  misc_feature (1)..(345): Xaa is any amino acid
VLAVSATASGAQSGNYDIQVSQLPSRARMETVGWVSSPSASVGDAGDTYTIVNKDGVEKNITLQTGKTSLADLADAINASDSGVTASVVQKTPGKYHLVLSSADTGEGASFTVDGVERTDGSAVGIFASRTDNALGLANNKDNAFDTQYVKVTATAQNAKFTLNGTEMERRSNTIDDAVDGVSFTLNKAEAGKTVNLKVDTDVDSIAKAFQDVVNKYNTAYNAYKTATGKGGILSGDLSLQTIFSQLRSSITGSVEGATWNSEGGSSTGTVSMALLGMSTGRDGTLTLDSGKLLEALRQNPDMVGKVFDKASADTKGLIDKLTTAGGGTLTTIINGIDNSADLIP

SEQ ID NO: 85373 - protein, 269 aa, Unknown
  Obtained from environmental sample
  DOMAIN (8)...(266): Dihydrodipicolinate synthetase family
  misc_feature (1)..(269): Xaa is any amino acid
MQITNSSQLRGVFPALFTPLKNDDPACLRNSIDYDKAKKMIDDLIEAGVHGFVPVGTTGQSATLSTKQHLDFIKFVLDYVDGRVPIIAGAGSNSTRESVEMIKEIQKIKEVPMLCVTGYYNNPPQEGIYAHFKALSNETGAKIILYNVPGRTANYIHPNTIIKLAEDKNIIGLKQAVEFRIGEKYHEDTKSIAEHTKNLDFALISGEDGAFIDMLELGGVGLISSTANIPEASKIFVELYNSFNKKEFEKCDKLQDEARDYVERVFSPK

SEQ ID NO: 85374 - protein, 331 aa, Unknown
  Obtained from environmental sample
  misc_feature (1)..(331): Xaa is any amino acid
LGAIILHLLYWKGITIIESFVFNDNYLTYVKIGKNVTHIEKGAFRRNELANITIPNSVVQFGNVAFWENKLKNINIPNKVVYIGSGAFWDNQLQNINIPNKVTIIEGMAFYNNKLVSINIPNSVTTIENYAFSKNQLKEVTLPNSVTSIGKAAFSYNLLKNINIPNNVSRIEDETFYENQFVSIYIPDSVTHIGENAFSYNQLIKVNIPDIVTYIGAAAFRRNQLKDINIPNSVTDIKYFTFAENELTSINIPNNITHIDRGAFKDNQLKSVNFSNRVTSIKDGTFYEDQLTSVIKIGTGAFENNPLTKITIGENIQCILQLGRSDPSPPQ

SEQ ID NO: 85375 - protein, 80 aa, Unknown
  Obtained from environmental sample
  DOMAIN (2)...(78): ABC transporter
  misc_feature (1)..(80): Xaa is any amino acid
TAYSAFGGQQQRIGIARALYDDPEVLFLDEATSSLDNETEKKIMDEIYSVSENKTLIVIAHRLSTVERCDRRISIENGKH

SEQ ID NO: 85376 - protein, 190 aa, Unknown
  Obtained from environmental sample
  misc_feature (1)..(190): Xaa is any amino acid
MINSKIKSLLSVPGSLSRLLNRRQKISFLILLILTIGYSIIETVGISAIMPFISLASEPELLATGWYKKAFDFAGFNGFEPFIFAFGIVIIFFYIFRAIYSSLLTYLINRYSINIYKYLSKNVLKTILSISYKVFVQKNSAEQIRTIAEETNDVGRIVLNIMKTLSELFPIILIYIVIVMLNWKITLVIT

SEQ ID NO: 85377 - protein, 576 aa, Unknown
  Obtained from environmental sample
  misc_feature (1)..(576): Xaa is any amino acid
LKKGLFIPLYEESRNESRLALNPVLEPVLAPYTADITSLLRSFRNETPAKTDKQNLPFFDDCILAALLSFVSQNEAFFIKEGKIRQKVLNMAASLFPALRLEPVIGGLQVLGLFFANGDTLHPDFTRFAAFGKLDRLERIEYCAAGILCYCDSPAGELSPWLFRSKLRKYAAFIHNFYISLDPKQQYPLVTLRRLVFILNNEINCDMLIKAMEQTGLLISNSNKRWQKPPHFSEDSMTKKNSSGDAVVIAVDSPFTLLMYPEIAYNDAVELASISHVTGTGLNISFEINKDAAVSAFNRGISAAAAIGLLQRLSGNRIDENTAFTLLDWEKRHKEVSLCKGLVLSLSPERLYLAETKPLSKYIIAKLAPGIYMIPESMEEKVYAALKKAGVTIFARPNSEAIYADEGNTLSGSAPSGAPDSRIYFPRLNTGAPHTEKLRQFKLEKDINNAASDSSAAAIIEGFHSIISKMRLGVEERDELTARINRRLVLSESQLKDAVVRYEKLEARGLDYNGKTMIAKQAIARQSPLEISWPGRQKQESVTGIPKALEKKGDESVLVRNQAGNYPFSADLNVGD

SEQ ID NO: 85378 - protein, 308 aa, Unknown
  Obtained from environmental sample
  DOMAIN (52)...(302): Type II/IV secretion system protein
  misc_feature (1)..(308): Xaa is any amino acid
VGTERGSASLGSVPDDALNLKAMEEELVDLGAEFETIDEEQSVSVESLIKGSENAPVVKLVNMVLVDAIRKGASDIHVEPYEKHMRIRYRIDGILQEVMKPNIKLKDPIASRIKILAKLNIAEKRLPQDGRIKLRVNLSSGTKVVDFRVSSIPTLFGEKIVLRLLDSDALMLDLTKLGFERESLAAWNRQIAKPYGMVLVTGPTGSGKTNTLYSSMASLNTEDVNILTAEDPVEYNFAGINQVQMKEQIGLNFAAALRSLLRQDPNIIMVGEIRDFETAEIAIKAPLRATGALTLHTTTRRRHHRLRT

SEQ ID NO: 85379 - protein, 88 aa, Unknown
  Obtained from environmental sample
  misc_feature (1)..(88): Xaa is any amino acid
MPAFAWKGKNRAGDSQEGVIVAETKDIATKMLQRNGVTVATIHTQASFGGRLFGKVKQKTLAIFTRQFSVMIERGPAPGAVPENWPSA

SEQ ID NO: 85380 - protein, 283 aa, Unknown
  Obtained from environmental sample
  DOMAIN (44)...(211): Transglycosylase
  misc_feature (1)..(283): Xaa is any amino acid
LLWILIFGFPIILGTVAIKIVWYKLTPTLPSFEKLETIEPRLITKIYDKDSILAHEFFVEKRIWTPIDSIPEMVKNAVLATEDRKFWSHWGMNPLAIPSAILESVRSGNKMRGASSLTQQLTKLLFLTPERSITRKIREAMTAVRLEKTYTKEEILEFYMNEVYLAGGNYGFQSAGQFYFGRPLDSLTIPEIAVLAGMLQRPEAYRPDRQPEAAIARRNTVLFAMKDAGYISQDDYSNYIKTPLTTETKIDSVVAPYYMKTYANIWKIIRRESLYQMAFSLRT

SEQ ID NO: 85381 - protein, 383 aa, Unknown
  Obtained from environmental sample
  DOMAIN (1)...(383): Pyruvate formate lyase
  misc_feature (1)..(383): Xaa is any amino acid
GYRRADLPSFGATGAGASVCDDKIYKEGFLDYKKKIEGEFEKIDYMNDSKAFEKQEELKAMTICCDAIITYANRYADEAERLAALETNPVRKEELLAIALNCRRVPARKPENFWQALQMYWFVHVSVTTELNTWDAFSPGRLDQHLYPFYKKELHEGSLNEERARELLQCFWVKFNNQPAPPKVGITLAESGTYTDFCNINSGGLTSDGSDGVNDVTYMILEVIDEMRLVQPSSNIQLSKKNPDKFLNKACKVIKRGMGQPSVFNADAVVEELVRQGKKIEDARDGGTSGCVEAGTFGKECYALTGYFNLVKVLEITLNNGYDPIAKKQLGLKTGETSSFKTFEDLFSAYEKQVRHFIDIKVAGNNIIEALYSTICPARFFPS

SEQ ID NO: 85382 - protein, 69 aa, Unknown
  Obtained from environmental sample
  misc_feature (1)..(69): Xaa is any amino acid
MALIRTIFRMDGHHVQFNVCDADTVREAQKHPEEYTNLIVRVAGYSDYFNDLGEVLQNEIINRTEHKGF

SEQ ID NO: 85383 - protein, 301 aa, Unknown
  Obtained from environmental sample
  misc_feature (1)..(301): Xaa is any amino acid
GLWPRGIFQDKDSRHSPPVVSARAELRRRKAGFRNSESDRPVNRDYIREVERRGGVLRTAFPWGNAASFSVSRSRVAEISSLPFVKAVAPVGVYINRKIDGGAGGLFKSKSAVAEGGYDWHTETVNVPLAHDYLRYKGLGIPGSGVRMAFFDGGFRLDHAVYKRLRENSQVIAAYDFVDGDTLVADPDSVANNPRHPYYMNDKHGTQTLAFAAAYAPGVYMGSAYGATFVLARTEDDSVESRAEEDNWMAAMVWAESAGADINLSSLGYRDGFTDSTENLPLPRHGRGERRSSPSGRRGDR

SEQ ID NO: 85384 - protein, 239 aa, Unknown
  Obtained from environmental sample
  misc_feature (1)..(239): Xaa is any amino acid
MEEGFSYKGKTLLSRVDPAGKADRIADSAPVIDGTLYLCPSPLYGYGLERLLSRLENTPNSAVLCIEGEPELYDISRKFFSEALKHSPKLHLTNTCDAAGLCVIIKKEWGSRVFRRLHVLRLTGGWQLLPNLNDLADTLRREIALDWGNAMTLTKLGRRYIRNAIRNLALIPNNPSIGALSFGSDPVLLLGAGPSLDPALDAFANRFGDALRLPETRPFRIVCVDTCLPALSERGIKPD

SEQ ID NO: 85385 - protein, 61 aa, Unknown
  Obtained from environmental sample
  misc_feature (1)..(61): Xaa is any amino acid
MSVGQSIPRVDAWEKVSGRAKYTDDLVGRNALIGKVLHSAIANGLVKKIDASEAKKNSRRL

SEQ ID NO: 85386 - protein, 515 aa, Unknown
  Obtained from environmental sample
  DOMAIN (68)...(287): Bacterial extracellular solute-binding proteins, family 3
  misc_feature (1)..(515): Xaa is any amino acid
VIYSPVSLTTKNPALQVVISIVQKALHNGSLGYISGLHKLGENEHRRHKLFMRLTEEEKAYIRNNPAVSVAAEYDNYPVSFYNKYENKWQGIAHDILRELESLTGLTFKIANDKNTEWPELLSSLESGETSMVTELLFSEDRIGLFLWPRSVIMTDNYALISKSDYPNVSINDILRIKVGLIKNTAYASLFNTWFSDHKNNVLYDNTDAAFDALESGEVDIVMANLSQLLMLTNYYERTGYKANFVFDFTSESTFGFNRNETILCSIVDKALRLIDTRGISGQWMRRTYDYSAKLARSQRPWLISAAALFFCILVLLFVLFQRNRRAGKELEILVQKRTNELVIQSATLTAAFDATPDLIFCKDLDLRFIRCNKTFENYFNVREADIIGKGNIDGLGLSAKTAEKYKERDLKVINEGRMVVFEEYIPSADGTKQLFETSTVPMTQNGRTVGVLAVAHNITERKEMEERALSASRAKSSFLANMSHEIRTPLNAITGMTVIGKSAADTERLGQSDP

SEQ ID NO: 85387 - protein, 154 aa, Unknown
  Obtained from environmental sample
  misc_feature (1)..(154): Xaa is any amino acid
TGLIHDETGFSTNNNAIAAAMMPRLMKKIEDNLNDIIRYEESGVSGCDILLLAYGGTIRTVKAAVKLAAEAGIKAGIFRPITIWPFPEKAFRDCVTDNNIKKVLVAELNYGQISLEAERILKSDAAVLHIGKIDGDILYPNEVLKKICEVVKHG

SEQ ID NO: 85388 - protein, 328 aa, Unknown
  Obtained from environmental sample
  DOMAIN (3)...(148): Carbamoyl-phosphate synthase L chain, ATP binding domain
  misc_feature (1)..(328): Xaa is any amino acid
LIDKYLSGLEIEVDAICDGKDTLIPGIMEHIERAGIHSGDSIAVYPALNINDELAEKIFEVTQKLCLAISVKGLVNIQYVLYENDVYVIEVNPRASRTVPYLSKVTGIPICEMATKASVGNTLSELGFKSGIAEIPPYVAVKVPVFSFEKLSGVDTHLGPEMKSTGEVLGLGKTLEEALYKGLLAAGYKMARGGGVLITVRDSDKAEIIGVAEKFSINLGFSLYATSGTAKLLSGKGFDVTAVQKIHECADENTATLLDSGKINYIISTSEKSRDPNADDVKIRRKACVMGIPCLTSIDTANALADSLLSGYGEMTAEIIDINRIHAV

SEQ ID NO: 85389 - protein, 197 aa, Unknown
  Obtained from environmental sample
  misc_feature (1)..(197): Xaa is any amino acid
MKKTVPYILILIMVYTSCVYKYNNESDFQISLLADGKSAEITDYTGGKQIVSIPPVIQGMTVTGIGNDAFKKKEILGVIIPGSVTSIGNRAFAYNPLTSITIPAGVTEIGESAFAFCNNLNTDITIPSSVMSIGRYAFFHCRNLPSITIPSSVKVFGEMAFYDWNILQTVNIMGLKTKRLLPSNYNKNRSPDPRKKP

SEQ ID NO: 85390 - protein, 88 aa, Unknown
  Obtained from environmental sample
  misc_feature (1)..(88): Xaa is any amino acid
MILKLEQNSAQKDIEILITYPQNNKVVHQLVSLIKSVNMQIPCYSNDGAKLIYTSDIFYIESVDKKTIVCCDNENYQINDRLYRIYEN

SEQ ID NO: 85391 - protein, 67 aa, Unknown
  Obtained from environmental sample
  misc_feature (1)..(67): Xaa is any amino acid
MKKTKLPKSQRAGQFFALKVVGLDKRMIIYPSQLSGGQQQRVAIARAIVNDPAFILRTSVRETLTRA

SEQ ID NO: 85392 - protein, 71 aa, Unknown
  Obtained from environmental sample
  misc_feature (1)..(71): Xaa is any amino acid
MKCLLRIQADFGSLADYQIGTSPKSYDKQFVRDWVQNNKKDGEMQFDNVPDDVLSKTSEIYAECLRRLVNA

SEQ ID NO: 85393 - protein, 301 aa, Unknown
  Obtained from environmental sample
  DOMAIN (1)...(265): DNA methylase
  misc_feature (1)..(301): Xaa is any amino acid
LGQKTYSDKTKDTEFIEFMRKRLILAKEIISDDGSIFVHLDQRKVHYIKAIIDEIFGEYNFKNQIIWKRTSAHNDAGKFGINIDFILYYTNSSSYTWRQLFSVYTEKHLKRFRYRDEDGRQWTDSPLTAKGLKGKGYYYTYKGINGYWRCPIETMKRFDTEKKLHFTKNGGIRIKKYLEELEGTPLQALWDDIDPINSQSDERSGYPTQKPEELLERIIMTSTNENDIVLDFFAGSGTTATVAEKLNRRWITCDIGKYSYYIIQKRLLTIQNSKNLENPNKKYNKPAHSLLLYYGLGQSDS

SEQ ID NO: 85394 - protein, 243 aa, Unknown
  Obtained from environmental sample
  DOMAIN (3)...(243): Polysaccharide biosynthesis protein
  misc_feature (1)..(243): Xaa is any amino acid
VNITVFGGAGFLGSHVCDKLTEAGHQVTIVDLVASPWLKRGQIMRQGSLLDEAFVAEAVAGADVVFNYAGIADIGEANRRPVETVRVNVLGNVTLLEACRLAGIQRYVFASSLYVYGASGGFYRCSKQACELYIENYEAMHGLKYTILRYGSLYGPRADRRNAIHRFVAEALETGGVVYYGAPTALREYVHVEDAADCTLEILKPAFENQNVVIPGNQPMRVGDLFKMIGEMLGQDLRITYEE

SEQ ID NO: 85395 - protein, 354 aa, Unknown
  Obtained from environmental sample
  DOMAIN (242)...(353): Thiamine pyrophosphate enzyme, C-terminal TPP binding domain
  misc_feature (1)..(354): Xaa is any amino acid
LLEHTLNEAFSIAGSGRRGPVLVDIPKSVQTDSCEYTGKPPAVEEREKCSFDIERVAAAIKNSKRPFIYAGGGVLASGAEAELRALSEKLSAPVGFSMMGLSALPDDYPLNLGMTGMHGRYAATVAKSECDALIALGVRFSDRATGNVNEYREGKLIIHVDIDIAEIGKNVASHMDICGDVKDVLTQLLPVLPVQRNDEWLARIEKLKQSPQAEYISAGFSPQHIIETVRRFCGDDTVIATDVGQHQMWVVQHYTFQKPRTLLSSGGLGAMGYGLGAAIGASIAHNKQRTILFTGDGQFGMNLNELWHRGIAETSGGSRHIQQRRFWVGRGHGKRYFMKGGTRTVRLTARMYFP

SEQ ID NO: 85396 - protein, 301 aa, Unknown
  Obtained from environmental sample
  DOMAIN (109)...(176): Elongation factor Tu domain 2
  misc_feature (1)..(301): Xaa is any amino acid
LIDDLSGVSEIITDKYLTGEEIEPSLIRAELRKAVLKREILPLFAGASRRNMGVQPVIDAVVDYLPSPDEAVQAVAHHQKKEEDITIPCDPKGQPLGLVFKIQNDREAGSLCYVRMYSGSIKSGNVVYNTGKKKRERANRILRMHSNKSEPMDSLDAGDIGVIIGMKLAQTGDTIGVENWPVILEKMQFPEPVISISIEPKTISDQDKLKDILAILSKEDPTFTVRENEETGQLIISGMGELHLDVLVTRILKEYKLGAKVGNPQVTYRESINKANEHSESFSKNIAGKGKCRGFVVKVEP

SEQ ID NO: 85397 - protein, 93 aa, Unknown
  Obtained from environmental sample
  misc_feature (1)..(93): Xaa is any amino acid
MQAIDLHNKLHSVQNGTVLCQYSMETCEKLVALINEINDLKKERDAAILAHSYVAPEIILGVADYNGDSYQLSKNAIETPAQTIISLLGSAIK

SEQ ID NO: 85398 - protein, 329 aa, Unknown
  Obtained from environmental sample
  misc_feature (1)..(329): Xaa is any amino acid
MTEDEKMQKATLQTRRTKQKDLNSDVTRAKTRKRLEEVLRKLPGQTATTLELLRDEALQKKGDPPVLTAEECVTGAIKKSMEKESAFCEKDVLNRALKTGMGHYTVGQLLEELRKQPDIKFVGEIDRLGRGYFTTAAMIGIERGILDFVERGRGQSKTAISPEAMARYFDKMTAAGKQLSDGQRSAVEQACTTKDQVSIIQGDAGSGKTYAMECVLAAMVGEKYAVRGFTPTGVAAKEMTAAGVEAITIDKLLVNVDLQNKAKPGEVWLVDECGMVGSEKMKRFLDVAEQKSAKVVLIGDTKQLQAVEQGKIFADIPAKSKAPKTEITE

SEQ ID NO: 85399 - protein, 454 aa, Unknown
  Obtained from environmental sample
  DOMAIN (220)...(377): Peptidase family S49
  misc_feature (1)..(454): Xaa is any amino acid
MDDQGVLMLTGYAWGRGYVKHSLEKLGIGTRELRYLKFKSAAETYTRDSLSEADRTQYGEILDDMMQLAHDTVYAARSWNTGEFNRIINHEFMFSAKNALARGLVDRSGRKDAVLEAVREISDGNAAGLFLLYGDAESSLTGSKFPYKPAKQGGLFSKPPVIAVINANGVTDMERGVAAWTLAATIREVSERRRVKAIVLRINSPGGSAEAADYVAEAIKAAKERVPVVVSMGAVAASGGYWASMSASRIVATPVTLTGSIGVIGSWFYDNGLNSKMGFSVDTIQRGIHADMVTGMILPRRDLRPEEEARYKAYILDLYADFISRVAANRNMDIERVESLAQGRVYSGLGALNAGLIDNIGGIDDAIQIARELAKLPDDRRIKIMEYPKPKFFDKILEQLLSARTAGLTKKSVINTAADLFFPALLGAPSLLEDLSYRIEHNGQVMPILPLDYN

SEQ ID NO: 85400 - protein, 141 aa, Unknown
  Obtained from environmental sample
  misc_feature (1)..(141): Xaa is any amino acid
VVKPNTLKDRIAEIAPDIIGLRRVIHRRPELSGREFGTARLVRDTLNTWGVPAQYHLGKTAVSAKIVNGKGPTVVLRADMDALPIQEENNVPFASVNAGVMHACGHDMHTAILLGAARILHQSKGMWKETALASFNRPEEE

SEQ ID NO: 85401 - protein, 306 aa, Unknown
  Obtained from environmental sample
  misc_feature (1)..(306): Xaa is any amino acid
LGYDKPILFVREWGLKGAIISGGFIDLFVGLSILALCLNDRAMGVVDNVITNSVNDSGLPYGETNKPLSRFARDGGHCELSEAIPCVENNNINTDPINADNELLDDEVNDISAISAKSSVIFAVPDKREDYYPLLFVACGTAVASFMYEIGWIRMLSLVLGSSTHSFELMLSAFILGLALGSFFVRNRLDTVKNAPRFLGIAQIVMGASAIATLFTYSSLFKIMVFTIDALDRNASGYVLFNIISHMICAITMLPSTICAGMVVPLIIHMLYRRGYGEAAIGKVYAVNTAGGILGVIVAVWGLSCR

SEQ ID NO: 85402 - protein, 335 aa, Unknown
  Obtained from environmental sample
  misc_feature (1)..(335): Xaa is any amino acid
VIARVAPRRFSDWRYEGVIYPKTNDPFNKDGRMCLYAPDLTQGSDGRYYLFYVLDKVNVVSVAVCDTPAGEFKFHGYVHYPDGTKLGDRKTDQPQFDPGVLTEGDRTYLFTGFCGRDDKTRIGATAVTLAPDMLTVLDEPVLIAPGVHNSKGTSFEGFEFFEAPSARKHGDTYYFIYSSIASNELCYATSKNPLKDYVYGGVIISNADVHISTYKPADKPMGCGGNNHGSIIKIKGKWYIFYHRHTNGNEFSRQGCLEPIEIKADGSIPQVEVTSCGPNGKPLTGKGEFPAYIACNIFSVENNPQLEDNGRFPPVYAEISQDGRDGHEKAGFVKT

SEQ ID NO: 85403 - protein, 64 aa, Unknown
  Obtained from environmental sample
  misc_feature (1)..(64): Xaa is any amino acid
MAKMSLKDLQALRDNKKNDLQKRGIEGKEVHVIVGMGTCGIAAGAKQTLDAFVTGLDETNLITA

SEQ ID NO: 85404 - protein, 188 aa, Unknown
  Obtained from environmental sample
  misc_feature (1)..(188): Xaa is any amino acid
MLALFAGLTHQMAAQEGVELQSLQVNTQLVHAQKASPKQSTKSLLLPFFDDFSSLRSPYPNDTLWQDKQVFINANFPIFPPTVGVATFDALNANGRLYEHATSSPFSADTLTSQPIRMDSIFPAGAEPQQLTETSNIYLSFYYQPGGGLGNSRGRAPAKNDKLILEFRDKDGNWEKTRLCIDGQRLDA

SEQ ID NO: 85405 - protein, 114 aa, Unknown
  Obtained from environmental sample
  misc_feature (1)..(114): Xaa is any amino acid
MKKSRKSAIRIYNLYKHLCDTKKEYTLPNSYYVPARPWSKLSEAQYSVSQKEFLVKTKIALKECSETESWLDLLKETGLLSQKEYDSIIPDCKEILKLLIATTKTLTDQVTGNK

SEQ ID NO: 85406 - protein, 404 aa, Unknown
  Obtained from environmental sample
  misc_feature (1)..(404): Xaa is any amino acid
MKTFRPRALLFFICLLLVCAGLYPQEEREEQQEQGKKKTDREYKPREQKLYIDIPLTIAEVTLINLAGNGYWRLWGPDSEAAYFTAASIRRNLHPEVWTIEYGQEGDTFLTNQFIHPYAGGLYFASARSNNINFYWSFLSSAFGSITWEALGETDSPALSDLINTAFGGIVIGEILHRLYIELDKGGIGGKIASFFVSPTDRITAAIRGYGPEEGPSKIFRSDLAFGFSMINARFFDDNEEEPKTWNSPAGFLNYDLVYADPYTAHSKTPFEQFDFNTSLTITVPLIHNLIFIADGYLASWLLADDDVNQASNGITLHFDDFVTDKGLLDLNNGRENLSFNAHSLDYSVKWRHVFNKPFALSVKTHIGFSPWAVTDYNGGDENEKERRTIKPVFIRRQFKLFWN

SEQ ID NO: 85407 - protein, 97 aa, Unknown
  Obtained from environmental sample
  misc_feature (1)..(97): Xaa is any amino acid
LSLWTLSLLVSPCQDLSISGNRAGLDGEKSGLFLQAIRVIKEMRSATNGTCPTTIIWENVPGAFSSNKRKDFQKVLQEIAAIAEPGISIPRPSAKSG

SEQ ID NO: 85408 - protein, 354 aa, Unknown
  Obtained from environmental sample
  misc_feature (1)..(354): Xaa is any amino acid
VTGDKDAFFVTKFSMEGHLGAKGDQATFVIWPYENLPAKEYVIKVLIKGTGKDGTVNTEVRAVFTVEDVPACCNVTWSWITGIPANDKSETVDKNTRVSVPTLDDLDAPSRADYTFAGWYSDELKTQQVTAKTVTITRDTTFYAKWTSKTGVYAVYFDPNGGTPSSIRKISTDERGRLTTMPEDQYDPPTRLGYKLSGWYTTPKVGGEKVNRGRIFTDDATVYARWDLMTYNITYDLKGGTVTGNPTSYTVKTESPIIIKDPVRPGYRFEGWTDEEGDDLDWNESEGISRLYIYPTEGEVKNKKFTANWEASEYAITFSRAGGIWAEDADVEEEVYTVPGGGWLLPKSLPTDKQ

SEQ ID NO: 85409 - protein, 115 aa, Unknown
  Obtained from environmental sample
  misc_feature (1)..(115): Xaa is any amino acid
VNIRLKPGKDKPVRNGHPWIFSGAVAKTEGDVDPRDRLCTVYNAGGERLGIGYYNDKSTIRVRMLAVDTAVNATKSTLPPLTFTAKDIHHRIRQSIDVRKMNGIFTGVGETAVPI

SEQ ID NO: 85410 - protein, 108 aa, Unknown
  Obtained from environmental sample
  misc_feature (1)..(108): Xaa is any amino acid
GFWGDYREWVSHPTHYAVALEYQRDTMPGPMVTAKGADEMAARIRNLARDNGVPLVENKPVAQALFRETEVGDYIPEAYYSVVATIFRKVMDINELRRKAKASEKVSA

SEQ ID NO: 85411 - protein, 103 aa, Unknown
  Obtained from environmental sample
  DOMAIN (6)...(101): Carbamoyl-phosphate synthase L chain, N-terminal domain
  misc_feature (1)..(103): Xaa is any amino acid
MPLDKNIKKTMVIGSGPIVIGQAAEFDYAGTQACRMLREDGIEIVLVNSNPATIMTDKNIADKIYIEPLTLPTVKRIIEKEKPDSILSGLGGQTRARAESVNV

SEQ ID NO: 85412 - protein, 326 aa, Unknown
  Obtained from environmental sample
  DOMAIN (9)...(323): Histidinol dehydrogenase
  misc_feature (1)..(326): Xaa is any amino acid
GKGNSFECKKKWGWGRRVPYAKKYDGLKKNNLRIAKAEIKKAASKIDSDLKNALKQAIENVKAFHQKQTEKSWTFKGKDGEVLGQKIRPLKRVGLYVPSGAGVYPSTLIMNAVPALVAGVKELVVVSPIKNGLHSSVAYVLLELGIKEVYHIGGAQAIGLLAYGAKGIAPVDKIVGPGNVFAAFAKKEVFGTVDIDMIAGPSEIAVLADSTANPEWVAADMLSQAEHGSGFEASICATDSLAFAKKLAICIENQVKASPKREILEKSLSAYGRIFLAKNMKEAVDIVNRIAPEHLEIVAKNQDDLEKMVKMLEPYSRLYLRASAIT

SEQ ID NO: 85413 - protein, 132 aa, Unknown
  Obtained from environmental sample
  DOMAIN (19)...(64): Bacterial regulatory helix-turn-helix proteins, AraC family
  misc_feature (1)..(132): Xaa is any amino acid
MADRIFPSGNAPLFRLRKRAEIIWENYSRKINLEEIPKAAGLSAPYFSTIFNEEMGEKLSRYLNRLRVEKASTLLTETNKPMNLIAELCGFEDQSWFSKVFKSFTGVNPGRYREAGKMGYEIKNGKNFKTKQ

SEQ ID NO: 85414 - protein, 163 aa, Unknown
  Obtained from environmental sample
  DOMAIN (7)...(162): Uncharacterized protein family UPF0007
  misc_feature (1)..(163): Xaa is any amino acid
MGAAINIAVVICAAGASSRMKSEGSAVRKKEYEKLSNGNTVLGTAVNAFASVSDVQVIVISVPEDGENAARSALSANLLSSQKPKILFVTGGSTRQRSVFNALSVLADFSPDYALIHDGARPWVSSSLIENIITAVKKYNARYPLFCRSPTPQRNAEFSLGSA

SEQ ID NO: 85415 - protein, 332 aa, Unknown
  Obtained from environmental sample
  misc_feature (1)..(332): Xaa is any amino acid
MIAVRYQPEISLRGLNYFAREQAQYWQGREESYIKQLTAIADIMGEFEMLPAQDRRDLYDNMLKATLNNNDNFVRIFSIWKPNAMDGMDSRYIGRSGSSPTGQYAMTWGRDTGPIEVKPNLILNEINAWMNGPNALKTRVENPTPFKNNGKDTFIIRIGVPITRSTGSEVVGHLCALIDIAPMQSVVEKTIKSYEEISALALYSGNGMIMGHLVPERVGKMLSDVDMIYGDYIKEANKAVQEGKEFQCSGYSPILKADMKITMIPFQIGDSDMNWTIMIATSEKYVMKEADAITRFTIILAAIAIIVAAVIVCLVSIAHQANRHVTFRGEAI

SEQ ID NO: 85416 - protein, 316 aa, Unknown
  Obtained from environmental sample
  misc_feature (1)..(316): Xaa is any amino acid
LKLDSDKNIYINDAVNKNPSGVKFIYKTGGTGFIEFSGINKFENITLEKVGNGIRFVDTSVTITGDFVLSNNETITLATDSILKEGKSSIEAGSISLNNIFAENNESLSLTTTSKDINLNGTIGISNAYIGGITVVCADKVSFSGNIYAGNIDVTSTGEIIIDADIFTTDAQTYTGELALGGMGNRILTGTTVTLGLIEGNGKSLTITGNSVINWGSGIDNFSVSGNFNLAGGSLSAATVDVTGTSTIAADVTTSGTQTYTGQVELKSDVILEGTTVTLGVVTGNENSLTINGNSVLAGGSGINNYCNDSAICLGN

SEQ ID NO: 85417 - protein, 320 aa, Unknown
  Obtained from environmental sample
  misc_feature (1)..(320): Xaa is any amino acid
KDQIGRVAERGAQIFDALDLMRDSGAVRMLEIERSMEFPRIDLSHYRESRRYPIGGYVTLFSREDKQKPALITRIVKKSLAEGKPVVIGMNTPDSFIEAKNVWEPTENPGRFYGGHAMCVVGYDDDKSAFELLNSWGRKWGNGGFIWVPYKSFVDFVMESYEMIENLAIYSDTVKYEGFSRIEILGRGAPRPAALVFSPEGYYKTAESFTEGTQFRFVVGAGESAYVYSFAVSRPSRDNNFYSPILLFPQTGISPLLNYRDSAVILPGEDKTLALDAEAGAEFLITLYSKQPLDIQAVMRRFASAKGNLGERLTAGVGSN

SEQ ID NO: 85418 - protein, 147 aa, Unknown
  Obtained from environmental sample
  misc_feature (1)..(147): Xaa is any amino acid
MSQEKPHYQGHRQRLRERLLRDSSSLADYEILELAIGLAQLRKDTKPLAKELLRRFGSVRGALDAREEELLRVPGFSSGALALWKLLRECMSRYAAAPLHKREAIENPRQIAEMARVRLAGCSHEEIWAAFLDTGKRFLAWTRMSES

SEQ ID NO: 85419 - protein, 241 aa, Unknown
  Obtained from environmental sample
  misc_feature (1)..(241): Xaa is any amino acid
MTSGIHSILDQARKEDGEGNTSSALMKYRLFLKYEASDPQAWADYAGCLLVAGRHEDCRNACVTALELSPDLEPALVNMAAALVGLGRLCEAKDIYANLSSSRPDRTDFALELQKCMYTMGDVAAMEHGLLKILDSEPNNEEALGLLAAVYAARKDWGKFKACSMEYLEAKFKGEGLLCEKGKLLIRLGHFGEGLRQSRNRQSERSQSGVSGTLWGGGPLRGRTLLLHWEQGFGDTIMMLR

SEQ ID NO: 85420 - protein, 585 aa, Unknown
  Obtained from environmental sample
  DOMAIN (266)...(293): The GLUG motif
  misc_feature (1)..(585): Xaa is any amino acid
MDEAGYSFSWNTSSAQGIDFDSWSAKYIHNPNDNSGRIDVSYKQTGADDFRLYYRINRSSGKDIANNIINGVTGPDYSGIRTGRQVTGINEYEINIELYKDGIMENKASIKIWNIPGMSVEYNRAQNIDTRIITIRTAEELAGIKDNLDGLYAFANNITVTGEWTPIGTESTPFTGKLYGNGHTITFNSDFNIGEETNHIGLFGYAQNAVIRDFTFDYNSPVKNINVYYTDCFIGGVAGYLKDTAVSNVITSGRILSIADAGYGYGTIRLGGITGYIEGSGIIENCRAALSVKYTSDEHPGDLCIGAAAGETGEGNASRIIKINNGYNRGVSAEGPNVTLNKLLIDGVTVNADVSAVKKLYQLTIGGAVGKSRENTLNDITFTDGLISFSGSSIICGGIVGVLEQSNITESYFAGNIMRINDNNDPVNGQITLGGLIGRIYIYEDKYYFINKCRVQTKINLEGFSDIQAGGIYGSARTSYSKYTEGFWYTDPVNGIPHFVEGTEGTECSLTITNCFFNGGEINAEKSDKIYLGGFSGWSQGGAVNTNNCGALSGTITVEAISENRIGGFIGHYEGSRTSAICHGK

SEQ ID NO: 85421 - protein, 101 aa, Unknown
  Obtained from environmental sample
  DOMAIN (6)...(98): Endoribonuclease L-PSP
  misc_feature (1)..(101): Xaa is any amino acid
MEIVQTQAAPAAIGPYSQGMVVGGLLFTAGQIPLDPATMNIVEGGIEEQTAQVLKNLDAILSQAKTSWDKVAKTTVYLTNLNDFATFNSITKSTRPICHGY

SEQ ID NO: 85422 - protein, 332 aa, Unknown
  Obtained from environmental sample
  DOMAIN (2)...(155): DEAD/DEAH box helicase
  misc_feature (1)..(332): Xaa is any amino acid
LRAGGLSRLGLGGILADDMGLGKTIEVLSLLLHRQQHCPESGPPSLLVCPTSLLGNWEREIKRFAPTLPFFVHHGNNRQDLPKQFAPHALVLTTYGVVRREEDVFSARHWGMVVVDEAQAIKNSSSAQAKSVRRLRAPFKLALTGTPIENRLMELWSIMAFALPGYLHYESTFKERFSTPIEKYRDPDAAAELRARIGPFILRRLKTDKSIIQDLPEKQEMKIFTQLTREQAVLYQARVQQMEKDLAESSGIERRGRILALLTHLKQICNHPSHFLKEPGPYKGRSGQMERLTDMLEKIIGHQERALYITQFPRNGRTTAGAFEKRLCLRAA

SEQ ID NO: 85423 - protein, 300 aa, Unknown
  Obtained from environmental sample
  misc_feature (1)..(300): Xaa is any amino acid
VTVRNSRIDEVAESDGLVSFLLAAGCVQFALPIEGVSSRIRNVILNKNISFEQIKEAFKRLFFHGVSTVKVNMIWTGLETHEDVDEFLGEICELVALRDEFCARTHVIFIFTSLVVMNDTPLQWCVRVLAGQHLRGEAFGSEYNRIMQAMEVAGFSLRRDRSQYGVIWNQILLDYGRVLTPVIKGVCKDPGFVSSLHTIHAPRYQKVLNVFNAHALPSPARVFGVERPFGYGFPLAVAQLSALDQRKDWYDRVMVRGESQPMCLCTHANRKVECYGCGLCETDEDVKAVTERDLSCDLIM

SEQ ID NO: 85424 - protein, 526 aa, Unknown
  Obtained from environmental sample
  DOMAIN (419)...(498): OB-fold nucleic acid binding domain
  misc_feature (1)..(526): Xaa is any amino acid
VIKHTEDLIRRRGGQYADFSVEKAPEDDALTFRMLSEGKSFAVFQFESDGMQNILKQAKPGSIEDLIALNSLYRPGPMDNIPQFVDSKNGRQKINYPDSSLVDVLKETYGVIVYQEQVMEVARIIAGYSMGQADLLRRAMGKKKKEILDKEKKSFLEGAVKQGYSSSKAAAIYDMLIPFAGYGFNKSHAAGYSVVAYHTAYLKANFPAEFMAANLTNEIRSADKDKLSECIDEARRMGIAIDPPDVNRSDKLFTVVDGRIVYGFLGIKGLGDAPAGQIVKGRKDGPYKNFIDFLDRVDIKAVGKKVIELLIQTGAFDNFGMSRETLAGNLERAVEYAQKKKEDKDIGQSSLFEDTAESGFPDFEYKEFPAMGRAERLNLEKQLIGFYFSGHPMDEYREIWQKAVKADLGHPESLKIGNCILVGIIKNVKTITTGKGNKMTFATLADYNGEIEMTFFARAWEKCQSRVEAGKVAMLRGKIEYQQDRERRGFIVDDWVSAQEVDAVIKETEEQERKWTRCASANLSCK

SEQ ID NO: 85425 - protein, 75 aa, Unknown
  Obtained from environmental sample
  misc_feature (1)..(75): Xaa is any amino acid
MGLSFVSKVAPPRSQGLMQGCWLGATAIGNQLVLLGGIFWTKVQVWGVWAIFIVCCLVSAVVMFSLLKRIERVTS

SEQ ID NO: 85426 - protein, 75 aa, Unknown
  Obtained from environmental sample
  misc_feature (1)..(75): Xaa is any amino acid
MLKGHPKGLYVAFLTNMGERFGFYTMMGILVLFLQAKFNLSAAKAATIFSIFYFLIYALALVGGYIADRTNTTKG

SEQ ID NO: 85427 - protein, 76 aa, Unknown
  Obtained from environmental sample
  misc_feature (1)..(76): Xaa is any amino acid
VKELFYRIIGTNAVYQEEVVKREWYVNVNISRLFADVISRLHQNQSVSGLLDNAGIINRLLSKKTDLQNELPFTHS

SEQ ID NO: 85428 - protein, 183 aa, Unknown
  Obtained from environmental sample
  DOMAIN (1)...(166): Iron-containing alcohol dehydrogenase
  misc_feature (1)..(183): Xaa is any amino acid
GGVTGAFDALAHAFEAATGAQKNPLSDIFAEKACKILKSNLKDAVERRNPEAMSAMGAGANWAGTAFSNSMVGVVHALAHAVGAVSDVAHDLAVALILPYGAAFNGFLSEACEFRDLYITYAKKLALPKNLKDAGVKEEDFDAIVRAAMRDGAVLTNTKPVGRGDVSGVLKNAFLGKDLGDLL

SEQ ID NO: 85429 - protein, 285 aa, Unknown
  Obtained from environmental sample
  DOMAIN (186)...(242): Iron hydrogenase small subunit
  misc_feature (1)..(285): Xaa is any amino acid
MEMFGSLCKEYLCKDLNITRENLVVVAVMPCTAKKFEANRDEFKKNGNPDVDFVITSHELALMMKENGVDFDKMELGSFDMPFGFYTGGAVIFGSSGGVSEAVLRYAGEVLEKGSSKEFKQLRGENGIKTSEINVGGQKLQLAVVSGLANARSLIDKIRKGEVSYDLIEVMACSGGCVNGGGQPITSDRLAIIKRSKGLYDNDKSLQFHISSENPYLQQIYAESLNHEKAHELLHTTFENRKRITQEDFMLGESSGNKEVTLEICLEPVVSARRSESYKTLGHQR

SEQ ID NO: 85430 - protein, 285 aa, Unknown
  Obtained from environmental sample
  misc_feature (1)..(285): Xaa is any amino acid
LAGARVTGLNVKSLVLDTNVKQIGLTDAQMEEFLAWQEQIELDDSDWHYSYNIAYWNYTRTSFIPEILSYDIRCKTGYFNFFTYKDGRFLSNKIIPLDNAEECVKNRQYLYNFVYNWLQNNTGVLDRNLWDFYDDVFDFFIDKFWKYIQDRMQKTFIFEDSTVTYYGTPAQIYQQLTGTNTLDSFIVLYSSDYAFDRYPTADCGYTFELASDLSDAIRWLVVNKGLIVGTESGEWIVPPGVTAVNVQAARNSSYGSDKIQGAAIGDAACSSRQERKVCEYLAIRV

SEQ ID NO: 85431 - protein, 250 aa, Unknown
  Obtained from environmental sample
  misc_feature (1)..(250): Xaa is any amino acid
MKSFTFDSTNGALNGGTSNNGAGIYVNTVAPGIPTFRALKSGTNNNDIISNAISGIGTVTGESVSTPTPSPKDLRNYYGDNLYFAIIANTTGGNRRVGYFEYTLDPLTVTDSNLMKWKRFVKSDGTDNTDGTAVKQDVYGKYIVRTRQIDKAGNPSPVSSPVTINWDPGDFVTRIDSSSPNGDYTNNTTRKDTIKITVLFRKPLTVSGTPKITLNATAGSAKVTVDGSAATTSELSFTYAVGANDNTPGS

SEQ ID NO: 85432 - protein, 79 aa, Unknown
  Obtained from environmental sample
  misc_feature (1)..(79): Xaa is any amino acid
MGNSQRQKRRRNTANIEGVTNIEDILNANGVFSKLGEKWFDDYWMNYRKIPLNSGKRIANLEEFVKYRGGNVSKIVAKR

SEQ ID NO: 85433 - protein, 335 aa, Unknown
  Obtained from environmental sample
  DOMAIN (1)...(251): Penicillin binding protein transpeptidase domain
  misc_feature (1)..(335): Xaa is any amino acid
GGDFHLPQLLFVTALILQAEALFLIAKDGMGRVTVREIIINSCNAGAAYASDNITSSKFYQLLNDFGFGSRTGVGSPGETAGYLVHSENWSDRSKPTIAFGQEIAVSAYQIAQATTAIANDGVLVPPRIVSKIISADGKTETEWKGGEKRRVISAETARAMRSYMVDTASSIGTGWRAGVQDLSLGVKTGTAQIIDPTTKKYSEDDFIASCLALLPAENPTLVLYLAIIKPKVGVISGGRMAAPAIREAAESLIDYLGIPRGRNPQIDHPPSVSIPAGRLPPVETQVPDFSGIAKRTLLSLLLRDDISVEIIGDGWVRRQSPPAGTPVSANLILE

SEQ ID NO: 85434 - protein, 465 aa, Unknown
  Obtained from environmental sample
  DOMAIN (361)...(465): Response regulator receiver domain
  misc_feature (1)..(465): Xaa is any amino acid
DTETREMIDITPVVTGMYGGAKDKIIGQRCETIFCTDKGCPILDDNRFIDHSERQFKTASGEIIPVIKSVSKINYNGRPALLENFSDISYFKKAEEAKSASEAKSRFIANMSHEMRTPLNAITGMTAIGKNAKDMERKNYALDKIKDASTHLLGVINDVLDISKIEANMLELSPVEFNFEKMLQNTAAVINFRVDEKNQELTIHIDSKIPKTLIADDQRLAQVITNLLSNAVKFTPEKGLITLEAHCIREEKDIYTIQISVTDTGIGISSEQQERLFMSFQQAESSTTRKYGGTGLGLAISKSIVELMGGKIWVVSEPEKGSVFSFTIMAKKGKTIEIVNNEDSRQAEGTQTDINGLFAGHRVLLVEDVEINREVVLALLEPTQLEIDCAENGAEAVRMFSEAPNRYELIFMDVQMPEMDGYEATRRIRSLDVKKGKTVPIVAMTANAFREDIEECLAASADLIL

SEQ ID NO: 85435 - protein, 95 aa, Unknown
  Obtained from environmental sample
  misc_feature (1)..(95): Xaa is any amino acid
MMAGGHIELPLGAEVVVRIGDHPLKFARLSEAPFTDRLVSKFALPIVGWRESAAQVSMAKYADAPITAAVSAVGSPVRAFSSLQGEALKGSVSNI

SEQ ID NO: 85436 - protein, 196 aa, Unknown
  Obtained from environmental sample
  DOMAIN (2)...(196): tRNA synthetases class I (E and Q), catalytic domain
  misc_feature (1)..(196): Xaa is any amino acid
MNIRDRYAPSPTGLQHIGGIRTALFNYLFARSKGGRFILRLEDTDRTRSEDCYVQNLYDTFDWLGVKWDEGPDTGGAFAPYIQSERSGLYKKYAQELLDKGQAYYCFCTAERIEKIRQEREASHSSETGYDRRCRAIDPQEAVKRAAAGEAYTVRLKIPLGETTRFFDHLLGDIEWKNDDLIPIPYCKIRRFSAIN

SEQ ID NO: 85437 - protein, 287 aa, Unknown
  Obtained from environmental sample
  DOMAIN (102)...(221): HemN C-terminal region
  misc_feature (1)..(287): Xaa is any amino acid
YFPLGFSADLVTGLPFQTETVIMEDIKALLSFPVAHVSLYSLILEPQTPLGKAAKQGAVSLPPPDEADEFWIAGRDLLERSGYRQYEVSNFCLPGKTCAHNIRYWRMENWLGAGPAASGTVINDETGAGKRFTYPADIENYIRMPRPRINHAITEELGREDLIKETMLMGFRYCEGPDKVLFKQRFGREIEDMIPKTIALWSKRDFFQTGQALKPSKQGLLFVNGFLRDAFEELEHSYSQHGCIPHCPSASLQEKRPVRLYRVPSAVCPDPARASQEGYKICPYLQT

SEQ ID NO: 85438 - protein, 301 aa, Unknown
  Obtained from environmental sample
  DOMAIN (1)...(301): Glycosyl hydrolase family 9
  misc_feature (1)..(301): Xaa is any amino acid
MNTVIECTGGWHDAGDYGRYIAPAAVTVAHMLYSFEFFPQVYRDQLNIPESGNGVPDILNECRYELEWMLKMQRADGGLYHKVATKYFAKFIMPEEDKDELFLFRVSHCSTAGFAASAAQASRVYRAYDAAFADRLLGAAKKAWDWMEANPVFEPFKNPPDFHSGGYGDSSCEDELFWASAELYSVTGDDRYLSAIKKRIATVDIAQFGWRETAGFGALCCLFIMKDKLDKNLHASLKERFLQSADSFLDLTTKSGYSTALSVNKYVWGSILPILNNAIALISAGLLTEKANTQKPPRTYC

SEQ ID NO: 85439 - protein, 71 aa, Unknown
  Obtained from environmental sample
  misc_feature (1)..(71): Xaa is any amino acid
MSAKKYLNENVYEASVARIDIIFKKFEKIYLAFSGGKDSGVMLNLVVDYMKKHKITKKVGLSRADLIIAFF

SEQ ID NO: 85440 - protein, 277 aa, Unknown
  Obtained from environmental sample
  DOMAIN (1)...(277): tRNA synthetases class I (I, L, M and V)
  misc_feature (1)..(277): Xaa is any amino acid
EGERFGWDCHGLPVENLIEKELGLNSKTEIEQYGIAKFNEACRASVLRYVKEWRQTITRLGRWVDFDNDYKTMEPPYMETIWWVMKSLHEKGLLYEGHYILPYCPRCATVLSNHELNLGGYRDVHDPAITLKFKVKGSGVQGSGFRGDVYFLAWTTTPWTLPSNLALVLGPDIDYVLIEALTGPRTPNPEPRTYPYYILAEARLPAYFKDSAEYRIVWRKKGCDLLGVEYEPLFPYFKEAAAQNAFRTYPGDYVSTGDGTGHCPHRFLLRRRRPRVG

SEQ ID NO: 85441 - protein, 325 aa, Unknown
  Obtained from environmental sample
  DOMAIN (58)...(240): yrdC domain
  misc_feature (1)..(325): Xaa is any amino acid
LIGEVMPNHALTITKNGNLPKWRKIIAAQKYCGGFSFIVLLGMEILSPSDQDIERAAAAIVKGFLVAFPTETVYGLGADAFNTNALARVFTVKNRPHFDPLIVHIAEPKSIGRIADLGLLGNEARERFSVLAEKLWPGPLTLILPKQKEVPSLATAGLPTVALRFPAHPVAQKLIRLSTGAVAAPSANPFGSLSPTRASHVKASLGNKVDYIIDGGKTSVGLESTVLDLSRLSPVILRRGGTSREAIEALIGAVELSPDSGGAPLSPGQLKGHYAPKTPLILWRERGTGFHTGSSGRGAALFFRAGGFCGHRKSQVAIQKRRPCR

SEQ ID NO: 85442 - protein, 89 aa, Unknown
  Obtained from environmental sample
  misc_feature (1)..(89): Xaa is any amino acid
MKVSKIMTRNPVFIHPDLSLSDARSLMDREKVGHIPVLNKNNELVGLITKVDLLKAGPSPATSLDVYEISYLLSKITGKRDGNSATLSW

SEQ ID NO: 85443 - protein, 98 aa, Unknown
  Obtained from environmental sample
  misc_feature (1)..(98): Xaa is any amino acid
MAEPLLKVENLIVNYGAIRALRGISFEVSEGEIITLIGANGAGKSTTLHAISNIIKKTSGTVMFDRRDISSVSPDSIVASGLVQVPGGPAHLCQSQRP

SEQ ID NO: 85444 - protein, 76 aa, Unknown
  Obtained from environmental sample
  DOMAIN (2)...(63): Uncharacterised ACR, YggU family COG1872
  misc_feature (1)..(76): Xaa is any amino acid
MMAESAIKMRPQEVEVSVTSPPIDNRANEHLTEYLADILGVAKTSLSIIKGGHSRNKVVLIESLGEDEVVERLKKV

SEQ ID NO: 85445 - protein, 61 aa, Unknown
  Obtained from environmental sample
  DOMAIN (1)...(58): RuvA N terminal domain
  misc_feature (1)..(61): Xaa is any amino acid
MIDYIRGKLTDKELTHVAIETAGVGYSVSIPLSTYEKLPETGKDTLIYIHISADSSWGTPK

SEQ ID NO: 85446 - protein, 315 aa, Unknown
  Obtained from environmental sample
  DOMAIN (174)...(251): Polyribonucleotide nucleotidyltransferase, RNA binding domain
  misc_feature (1)..(315): Xaa is any amino acid
GLSPRSRRLVQREGKATTKETLVSRLIDRPLRPLFEEGYNGDTAVTAQVISFDGQHQPDVLAIVGASAALLISEIPFHNAVAGVRVGRVKGEFVINPTVAQRAASDLDLVVAGTEAAIVMVEAGAQEVQEADMVEALLFGHDKIKKLVKLQKDLQAKVGKKKLTATAPQRNQEVYDKMVGKYATRLMDALTMKVKIESYKTIDALKKEAVAECKEVDATLVDETKACFDFLKETLFRNAILKQGVRLDGRQFDEIRPLNIEVGVLPSAHGSALFTRGETHALVSTTLGTVDDVQIIDGLEEESRKSSSCTTTSPA

SEQ ID NO: 85447 - protein, 61 aa, Unknown
  Obtained from environmental sample
  misc_feature (1)..(61): Xaa is any amino acid
MTEDVLLPYQKAWIEDKSSVKVWEKSRRIGASYVEALDSALEGAKSKEAGGQSTYYLFLFQ

SEQ ID NO: 85448 - protein, 437 aa, Unknown
  Obtained from environmental sample
  DOMAIN (159)...(224): His Kinase A (phosphoacceptor) domain
  misc_feature (1)..(437): Xaa is any amino acid
MAGDRRKKIVVVDDNPENLDSIKNILQDIYMVYPSPSAEDMFELLEHVKPELIILDVRMPGMNGYDAIEKLKSSDKFREIPVIFLTSMDDTQSEMKGLQLGAVDYIHKPFVTPLLLQRIKIQLSIVEHQWEIVDLLEVKTQEVKLREMAEQAAQEASHAKTNFLSRMSHEIRSPLNAVIGMINIANEEKDVASVKGYLKKAGSAARHVLSVINNILDMSKIEANKFELSNSEFDFEKMMTNIVDIASIRAQEKHHNIIVNINPNIPPFIISDELRLAQVITNLMTNAIKFTPENGKVLLNAQNLEEKDGEITIRIEVVDSGIGISPQQQEKLFMAYNQADRTIAKQFGGTGLGLAISKRIIELMQGKIWIESELGKGAKFIFTIKAKKGTGNADNFSHDESKETDLDFKGYTLLVVEDIEINREIMSAFLKRPDSIS

SEQ ID NO: 85449 - protein, 202 aa, Unknown
  Obtained from environmental sample
  misc_feature (1)..(202): Xaa is any amino acid
MSGYIPLSELKFDSRDPSAVVCYKNAMYGSTETSGVAWRQQSAGPAWTPFGNAELWVNEDSCLVVKSDYIKDPSGIFETADLVKMLPDKRFILMGRLDSVVKIEGKRISIPEVENRITESGLVSGVCVIALEDVRQYLAAALVFNPQGERKIRGVWKKMRSINSGGEYLLKYFENTLIPQRWRYLESLQLTLGQKEKEDLKC

SEQ ID NO: 85450 - protein, 70 aa, Unknown
  Obtained from environmental sample
  misc_feature (1)..(70): Xaa is any amino acid
MKQNITCLCGRTFSIDFEEDIALDEKPEQLEKICDGTFMSFDCPECGKKHKPEYSINLLWKSKKLGRFCP

SEQ ID NO: 85451 - protein, 244 aa, Unknown
  Obtained from environmental sample
  DOMAIN (25)...(144): Oxidoreductase family, NAD-binding Rossmann fold
  misc_feature (1)..(244): Xaa is any amino acid
MAKNSDGMNYAPKGKPSPVVKKGEFTFAAIGLDHGHIYGQCNGLIEAGAVLKSVYDPDSKKVDKFCETYPGIKRAANEDEIFSDKEVLLVAGAAVTSERCALGLRVMSAGKDYFTDKAPLTTLEQLNAAKAKVKETGKKYMVYYSERIHVESAVFAGQLIEQGAIGKVIQVLGLGPHRLGAQGRPEWFFQKEKYGGILCDIGSHQIEQFLFYSGAKDAQVVRSQIANYNHPQYPELTTFGQSVM

SEQ ID NO: 85452 - protein, 471 aa, Unknown
  Obtained from environmental sample
  misc_feature (1)..(471): Xaa is any amino acid
VEIPTESTTKKLLEGSATGVRDAIVGTMGLNNNSSVVVDANKQKGMSESIGNDRSWGFDGAYMLIKVNQSVDAGNNKVFKAEDYNLVGPDGNVYKFKTYTPDTQIKASGLQANTIIAEGGETRHLTAAAVGALSGYTNWPDLNSDTNPDDLAVIGATMTEKDLTMVASGSTLVAGSDFTLAAGKSIAINNSAHKVGGAPPLPIPADTEVNKPGITAITLGSGDRLELTLAASGGSPTLVEVGKSVTLDDGTVLKNNGGGKVSIESGSLTIGAALDTTDNVKAFTIAAQSSITKESVAKATELELVLASNLKVEGGAIATNVTIGNSSGLVLGDIQRLEAGSVLAKGSGFSRDSTSFTDDWSLKIEVKGKEVDIKWDGTTKVLTVGGEMVAAGKSITLEDGSVLTHKANLAAPTTATGNIFVEQGSIKLAETFGLGGNTLGDFMAMTSMTIAKDSTLVAGSILGHGAFGIDS

SEQ ID NO: 85453 - protein, 78 aa, Unknown
  Obtained from environmental sample
  misc_feature (1)..(78): Xaa is any amino acid
LEYGTATIEMHKDALSKGDKVLLLDDVLATGGTISAAARLVEKQGALVSGMVFLIELDFLQGRKNIKVNCPVHSIVHY

SEQ ID NO: 85454 - protein, 546 aa, Unknown
  Obtained from environmental sample
  misc_feature (1)..(546): Xaa is any amino acid
KTDRPRAAGLLELIGRLSSGVAPESFFATGQTLPKLGASVGGADLLQSLVKAAFSAAPNALLNLVKQIDTSSVMLGAQLPQTEAARVVREITNSLPAQTAAKPGSLHDTGQLSPRVLAMNDSPAVKAQTPASAVPQIRAGYSELTEATVRALLGGSGKADAAAVSDKINTLREAVARMPITVASNGQGHDTAARDGVVSGNRAESNAASANTQSAVSRLSVSTNETVVNNTAKAPEAFTNVNAQLAVHRASSVSSGDINASVGSGGAKAADAFPAVNRGFVPTQQPQQSQQPSMQTGGVGAGSGTNGINANSNIKPMDNSVGMGINVRGINASGINSTDNPNIRGETGVGVNARNINAQNISTSVITPTDNQNIRSDAGIGINNKQVAVDNFRGNNNSIGVGVNANINTKPTDNSVGMGINVRGINADGVNFTDNPNMRGDVGMGVNARNINAQSIGTSGINPADNQNMRGDIGVGINSRQGAVDSSRGVIINATGAASSVDVPAIKESCLSVVDTLKSSAAPILRELAQRGGISAGGAASLIGFV

SEQ ID NO: 85455 - protein, 132 aa, Unknown
  Obtained from environmental sample
  DOMAIN (7)...(73): ATP synthase alpha/beta family, beta-barrel domain
  misc_feature (1)..(132): Xaa is any amino acid
MANKGYITQVIGPVVDVRFEQGQIPLILNALKVKTDRSVTLEVLQHIGDNRVRCVAMSAAEGLSRGLEVEDTGKPISVPVGKEVLGRMFNVTGEPIDDKGTFSAAQYESIHRNAPGFSEQRPATALGQSENL

SEQ ID NO: 85456 - protein, 74 aa, Unknown
  Obtained from environmental sample
  misc_feature (1)..(74): Xaa is any amino acid
MAIIKKSTKLDNVLYDIRGPVVDEAKRLEEEGYQILKLNTGNPAPFGLMAPDEIIHDMVLNLTGSEGYWTPGSR

SEQ ID NO: 85457 - protein, 198 aa, Unknown
  Obtained from environmental sample
  DOMAIN (1)...(114): CBS domain pair
  misc_feature (1)..(198): Xaa is any amino acid
MTTDVVTAARSDTLRHVQKLMQEHHISGVPVVEDGRLFGLVSVDNILRALDFGYIEDTLEGRMTRNLVVLDADMPLTFALSWFERYDFSRFPVLDKEEKMVGIVTAGDIISKILGEMNKEVNKMESDNVLTPPAAAASATGGRYYREFPIKKFYFERGGGASNEIIRVLKGRKLSPQIHTPRRPRKLTTGDKSCGRTP

SEQ ID NO: 85458 - protein, 182 aa, Unknown
  Obtained from environmental sample
  misc_feature (1)..(182): Xaa is any amino acid
MAYQFMKANHGRYAVKEMAVLFGVSRSAYYRWARDGTSQRRKAGDAELVRLILEIAAKHRRRYGSPRVRRELRDVYGKRVSLKKVARLMRENGLNARKSRKHIQTTDSNHALAVFENILSRKFYAESGGAKWVSDITYLPTTNGWVYLTIVLDLFDRKIIGWALSPGMEASQTAVPSANLTL

SEQ ID NO: 85459 - protein, 332 aa, Unknown
  Obtained from environmental sample
  DOMAIN (68)...(302): Periplasmic binding protein
  misc_feature (1)..(332): Xaa is any amino acid
FRLSEEKDILPRRARSHTEENIIFESKLRVTPCTPWLIFLILFIGCHAEKSREVIDRSGKTIKIKTQINRVISTAPSNTEIITDLGQAHKLVAVDRHSANVTGIPEGLPLLDFFYPDAEVIINLEPDIIIASGHNPTGTGEDPFKLLREMGISIVYITMSASIDEIYNDIAFIADILQVQKEGERLINSMKTQIDEVSRMTANTEKKTTVYFEISAAPDMMTFGKNSYINDMISVIGAKNIFEDENWLVTPGAEAVISRNPDVILTNVNYIDAPIEEIKSRPGFNHINAVKNNRILSIDTDSSVRPSSPDNLALRQMSLTTKNTSEDYLNEK

SEQ ID NO: 85460 - protein, 116 aa, Unknown
  Obtained from environmental sample
  misc_feature (1)..(116): Xaa is any amino acid
KKDRYSHAGAAAYQESDRLAAVSDILRALDADADETTDGLIIHGGKAFKGGEVSSRGDHRIAMSAAIAATICANPVVIHGAKAVNKSYPGFFDDLRLLGGSVDAMNNEQLAMSNEE

SEQ ID NO: 85461 - protein, 260 aa, Unknown
  Obtained from environmental sample
  DOMAIN (189)...(231): Threonyl and Alanyl tRNA synthetase second additional domain
  misc_feature (1)..(260): Xaa is any amino acid
MAYKTEKLCYDYTSVKPINAEIINLYPSQNGETPIILDRTIFYPDGGGQPADSGTINGVPILDVRERDGEILHMISAKDSGKLEVGKAELVLDIRRRRDHTQLHTGQHLLSGTLLRMTGAPTVSMHMGEEVCTIDVNIPEIKDEALIAVEDAVADAIEENRPVKIHLCPPEDISSFKLRKVPPVGEEVIRVVEIEGHDIIACSGTHLKSTAEIGLLRIMGAEKSTGMPRLPFLAGRRLLGPRGLLWRNAVIASRSKGVPV

SEQ ID NO: 85462 - protein, 373 aa, Unknown
  Obtained from environmental sample
  DOMAIN (247)...(373): Miro-like protein
  misc_feature (1)..(373): Xaa is any amino acid
MFVKYKMLSSTSPDYGDKDPIAALATALGESALAIVRTSGTNSSGKGAIDLLAEIFSRPQALFSASGNTIVHGWIVEPLSKKKLDEVLVSVYRAPHSYTGEDSADICCHGGVAAVKAVMAALKKAGFREALKGEFTFRAFMNGKLDLTKAESVMELLAAKTGRAHEQAVRRLSGVLERDISAIKEMLVEVLAAAEIYLDYSEDEFLSPDEESEGALPNKALAEKAAERLKLLSELWSRERIYAEGALAVLAGMPNAGKSSLFNYLIREDRSIVTDVPGTTRDWIEAVISLDDIPLRLADTAGLRKMDTPGSKGIDEAERIGVERSIELLEKADLVLYVVDGEKGFTEEDGEFLMKYNEAQKEKFFVVIWNKAD

SEQ ID NO: 85463 - protein, 336 aa, Unknown
  Obtained from environmental sample
  DOMAIN (131)...(332): Peptidase family M50
  misc_feature (1)..(336): Xaa is any amino acid
DYRELPDGGDMIFAVITLWAAFVHGIDRPAFLDSTKVGVVLKDSPAWIAGFMAGDSIVSINGTPVSTWEQVDMHLSQQLGSGYNIALLRAGNPLELSLHVERTGAHLPKMLSGGLMPARYPPVIGGVKPKSGAEGLLEVGDTLLALKGVPVATFDHFAMLMRDYDPDADGEPAASINIKRGSELMHVFVIPTYDSTEHRYLLGIEPTPEPTRIVRYGAMTALGPTINKTWEYSAMIFDVLGKLTSGKVPASQLAGPLNIIPVSGMMAFQGLSSILNFMALIGINLAVLNLLPLVITDGGLLMFLIIEAIRGRPPIDGVTNGCQQSLHIPYSSPIPI

SEQ ID NO: 85464 - protein, 54 aa, Unknown
  Obtained from environmental sample
  misc_feature (1)..(54): Xaa is any amino acid
VKNSFKTLTYPELKAKREELKKKYMDLRFQMVIGHVDNPLQKRHLVPNLIPWLS

SEQ ID NO: 85465 - protein, 196 aa, Unknown
  Obtained from environmental sample
  DOMAIN (1)...(186): Aminotransferase class-V
  misc_feature (1)..(196): Xaa is any amino acid
DENISAEAVPFEPLDVSKFGLIYAGAQKNLGPAGTTVVIIREDLIKKVPDWIPMMLRYDIHSAEGSMYNTPPCYGIYIIMLVLEWLKNLGGVEAIGKLNREKAKLFYDYLDASDLFYSPVQKEYRSLMNIPFITTEQNEAKKTELETRFVKEAAVAGLINLAGHRLVGGMRASIYNAMPIEGVKALINFMEKFEKK

SEQ ID NO: 85466 - protein, 312 aa, Unknown
  Obtained from environmental sample
  DOMAIN (1)...(312): Uncharacterized ACR (DUF711)
  misc_feature (1)..(312): Xaa is any amino acid
GNRERIREKLFRLAGPLVKPGREIEVEYGIPIINKRVSVTPIALVAAVSDDDDFVPYALLLDEIASELGIDFVGGFSALVHKGFSLGDKKLVDSIPAALASTERVCASVNVATTRNGINMDAVRRMGEIIKETALKTADRDGLGCAKLVVFCNAPEDNPFMAGAFHGPGEGESCLNVGVSGPGVIKAALESRKNASFDEIAEIIKKTAFKITRMGELVGMEAAKRLGVPFGILDLSLAPTPEVGDSVARILEEMGLEKAGTHGTTAALALLTDLVKKAGLWPVPGLGVSPALLYRYRKMRAWQPRLPPAPSA

SEQ ID NO: 85467 - protein, 270 aa, Unknown
  Obtained from environmental sample
  DOMAIN (78)...(262): DnaB-like helicase C terminal domain
  misc_feature (1)..(270): Xaa is any amino acid
VLADILIRKRRLRDLIKLGAQLVRKAASEEDPPETLVETAGRDLFGIAQGHERGGLEHIAQVAQDVHGRLQERLESGGSPGVRLGFQRLDALTRGLQPGNLVVLAARPGLGKTALALNWLLHSSKAYGSHVAFFSLEMSKEEVFNRLLASHSSLNVRAVMSGDIDEHGDPDAPHAYGHLEIVREKLLRARDELVQMPAYICDRASITVHEITAMVDRLCTQTDKRLDLVIIDYLQLISSPADSRGAKLTEAVRIGEISRALKFSCRSDHW

SEQ ID NO: 85468 - protein, 509 aa, Unknown
  Obtained from environmental sample
  DOMAIN (251)...(318): His Kinase A (phosphoacceptor) domain
  misc_feature (1)..(509): Xaa is any amino acid
LWSGIYEFYDLPAQIDFIQRIQGNVKRIIFITDNTEASRDVSDQLNSVAYVQKNIDLEEWKKPSLKSLADSLSHLNPSQDAVVLVGVELNGSIRNPQKLWQDMTKYVDSNSTAPVYSFWDIGIQNGVIGGNIILASLIGKNIGLIAEAILAGNNAYNSGFRRSSNMPMADDHAAEIRKLKLNRLPPETIRLNNKESSIIIKYQNFVYNMRNAIIAELVIILLLGFSFYSYFKYSNRKLLQEKNAVEKASKAKSLFLANMSHEIRNPLNSMLGFSELLLSKSTNLNDEQREWCNNIEISSYHLRDTFNNILDFSKIEAGNLKIEDEWVDVFSLCDDLISVCSHYLIYKSIKFYVLPSIYMPKFIKTDPVRLKQVLVNLISNAMKFTTEGSVKLLINPETKGDDNKISFEIIDTGIGIPKDKIKKIFEPFEQIDSGHTRKYGGSGLGLTISQNILHAMDSNLEVQSDKKGSRFYFILPTKAKENEFYKKFLNEKNQKVVIYNKEKIGFVLR

SEQ ID NO: 85469 - protein, 429 aa, Unknown
  Obtained from environmental sample
  DOMAIN (354)...(427): Response regulator receiver domain
  misc_feature (1)..(429): Xaa is any amino acid
MNPAFIGLKMSDPVIPLSFITDELVRTGKITGIEWVNWRNEPVIGFFETLPNGWRLGLLAPKNTYYKPVYSMALILSIFGTTLATVLSIILIRVDAAKNKSDTESRHKSAFLANMSHEIRTPMNAIIGMTTIGKSASDSVRKDYCFSKIQDASNHLLGVINDILDMSKIEANKLELSEAEFDFEKMLRRVVNVVNFRIDEKHQKFSVHIDRLIPHAFIGDDQRIAQVITNLLGNAIKFTPEKGSIALDVRLAGQGFDLCTLQISVSDTGIGISPEQQAKLFKSFEQAESSTTRKYGGTGLGLAISKNIVELMGGSIWIESELGKGSTFYFTIQLKRGTNEKPKSLPPDINSKNLRILAVDDDADILTYFNEIAQDSGLICDTAASGEEALRLIEQKGGYNIYFIDWKMPGMDGIQLTHEIKSHITKNSM

SEQ ID NO: 85470 - protein, 160 aa, Unknown
  Obtained from environmental sample
  misc_feature (1)..(160): Xaa is any amino acid
IDRRAVESLGAIDGKTIDMIASDHAPHTAHEKSLPIWEAPAGLSGVETTVTLMLNEVNKGRLSINDFVRVASAMPAKIWGIYPKKGSLLSGADADFTVVDMNKKHKISACESHSKSKTSAYDGMETQGAPVATIVRGKFVMKDGCLTGAKGFGKLVSPAL

SEQ ID NO: 85471 - protein, 173 aa, Unknown
  Obtained from environmental sample
  misc_feature (1)..(173): Xaa is any amino acid
LNPKLKKRVNLQIPAKTLQITRQIKTKSGFTLYSNKPVKEQAVKQPVINTTDPVLINLFVEDQSTSIGKRNIHSLKSGYRLSVGGGKSDDFLIFLVPMPSNLGEISRSGSQITFTPHKPKYFPDIGSNEVRDCINKRIRVISEKNYEMWFSFVIYEDPLEALNRVLHSVKVPG

SEQ ID NO: 85472 - protein, 176 aa, Unknown
  Obtained from environmental sample
  misc_feature (1)..(176): Xaa is any amino acid
MYSKKNKNSILTYKMSTLKLTAALACTLLCVVACEQEEGKFKDPRDKKIYKTIKIGEQVWMAENLNYEADSSECYKNSTAYCDKYGRLYEWETAMKVCPKSWHLPSGDEWYELAKAVGGIDTASKYLKATGGWNYAGKIGNGTDDYGFSALPGGKVSTIPMWGSTMLAKKGFWWRT

SEQ ID NO: 85473 - protein, 137 aa, Unknown
  Obtained from environmental sample
  DOMAIN (1)...(126): Bacitracin resistance protein BacA
  misc_feature (1)..(137): Xaa is any amino acid
MNWLGALVIGLMQAVAIIPGVSRSGATLSGALSRGLNRDFAARFSFLLSIPAILGAVVFQLKDLVKGDASEAGVTAADGIGAAAMIGGTISAAVVGFFAVRLMLKIVREKSLWGFAIYTGVLGLLVLLDQFALKLVF

SEQ ID NO: 85474 - protein, 100 aa, Unknown
  Obtained from environmental sample
  misc_feature (1)..(100): Xaa is any amino acid
MNLQKGQKLDSGFSIIDIVDLAEMKALGIWARHDKTNAEVFHVFNDDSENLFAFAFATTPQDNTGVVHILEHSGLGRFGTLSAERRFPYPLGREALQTFP

SEQ ID NO: 85475 - protein, 452 aa, Unknown
  Obtained from environmental sample
  misc_feature (1)..(452): Xaa is any amino acid
AWGGGACIKVGTSGNATKTTSITVSKATPAALTWPTAAAITYGAALSTSTLSGGSNTGTFAWTAPATIPTVTNSGYSVTFTPTDTENYNWTGVTLTKTTSITVNKASGLANTVPVEIQISTSNTETHTYNLHALAFNKSDHGTLSYALGTLTDASSILASVPTLADGILSYKGAGKTSGTATQNITITSQNYADITAAIIFEATPKAEVAIVGLTAQNYVYDGTPKLGVTGTATSGAYTGALVYEYAGTGIDGITTTQPTNAGEYILRVSVPDADALYIGKGEIRIHHRQSHRLGPNRLTATEGQTLASVTLPAGWAWADATTPVGTVGTQTHKANYTPSDEVNYNTLTDVELSIEVKAGETDPDTDPDTDTDPIFSNRENPRIGRIGVQTTANAILLSNLPSNAKVEVYNLQGKRIYSAHPANPQILTIGVQTKGIYVIKAGNQTLRVAVK

SEQ ID NO: 85476 - protein, 310 aa, Unknown
  Obtained from environmental sample
  misc_feature (1)..(310): Xaa is any amino acid
YLGYGEHDRTYWYETLLTKGQILDSGFEILDVRELAEFEADGLEVFGIWARHQKSGAEVFHVSNDDSENLFSFNFATPPSDSKGAAHILEHSVLCGSASYPLKDAFLVLAQGSLQTFLNAITYPDKTLYPASSVNEHDYFNLMSVYGDAVFRPLLSEWTFMQEGHHLYYSPDRKLGISGVVYNEMKGAYSSLDSYAGFWSVKSVLPGTPYEFDSGGDPECIPDLTWQDLKNFHRAWYSPANCRIFLAGNIPTEKQLEFLNEKFFSSIPAGKKNAPIPKTKRWQSPRSYKVPCPAGPSRSPPCCFHGSAVM

SEQ ID NO: 85477 - protein, 194 aa, Unknown
  Obtained from environmental sample
  DOMAIN (75)...(194): CDP-alcohol phosphatidyltransferase
  misc_feature (1)..(194): Xaa is any amino acid
MLEKRKIKTNQVSGNAAMPRKKRRLKYIAVLPSFITLMNGVCGFFAIIIASRSPDIRWNFSFIPGAGMSPFTLAGVLIFLAMVADMLDGRVARLTRTTSSFGGQLDSLSDAISFGIAPAFLIVQLVELHLTYVILEPRQLSMILERGIIFSAVFYAMCAVVRLARFNVENDEDESAHMNFAGSSVNRGRPGVVT

SEQ ID NO: 85478 - protein, 322 aa, Unknown
  Obtained from environmental sample
  DOMAIN (46)...(189): GAF domain
  misc_feature (1)..(322): Xaa is any amino acid
FYFGIDGRVIRVELERAQVERDKKTRLINALRDVSEIMLSRSENDEFENSLAKVMAIIAVCVDVDRVFVWQNENKNGNLHFFSRYKWIKAEQTGYKYSSTSFMYAEDAPGWEPRLYSGGVINGPTVSLDDDIKKIVCRYGTLSVLIIPVNLNGEFWGFVSFGDCHKERYFEEDEINILRSVCLVMVGSVSSYDKSIRLLESHEHIKIMLDAMPYTCHLWDKNGNIFDCNEESLRLYGASSREEFLGNFFRFSPEYQPDGTLSIKKASMHIKEAIESGRYRFEWMHLTKDGERMPCEVKLVRVPYGNDYIIAALRYDLREHKR

SEQ ID NO: 85479 - protein, 299 aa, Unknown
  Obtained from environmental sample
  DOMAIN (75)...(190): Response regulator receiver domain
  misc_feature (1)..(299): Xaa is any amino acid
VEQADKTKNRHIVGTGLGLSISKSFVEMMGGSITLESEYGKGTKFTVLIPLVEGDKNRVEKAGSSQEYMFCAPEANILVVDDNEFNLKVAQGLFGLLQIDIKTADSGKQAIEMVKKEDYDIVFMDYMMPEMDGVQAMELIREIGEKYASLPVIALTANAVQGAQEMFLQNGFDDFISKPIDSKHLNELIIKWLPHDKIRMKDGVKTPDSPDSPDPGSDDSEEDFLEKIGGVKEINMAIGLSRASGIVSMYRDTVELFHNKLDCEYEKMSGFLAENDLDSFTISVHAMKSMLLGRSDHWS

SEQ ID NO: 85480 - protein, 86 aa, Unknown
  Obtained from environmental sample
  DOMAIN (1)...(70): Flagellar protein FliS
  misc_feature (1)..(86): Xaa is any amino acid
RENHDRSAEIMVSLDFEQGGDIAKNLFSLYTWFNRELMEANIGQDVQRISGVRNLIEELRSAWQRIVVTNAAETANREIVGLNIAG

SEQ ID NO: 85481 - protein, 245 aa, Unknown
  Obtained from environmental sample
  DOMAIN (30)...(153): RNA pseudouridylate synthase
  misc_feature (1)..(245): Xaa is any amino acid
VGGDRWDDPKERLDRLVAEAAALPAALPADMGMNKPPVSKLFTVHRIDRETSGLVVFAKDEAVHRQLSLAFEGRDVKKRYIAIVHGRPSWQETVCDLPLVPNGNKQHQTIIDKYQGKKSLTCFKFLGSAGNLSVLEVFPETGRTHQIRVHAAALGFPVVCDSLYGKDKPVLLSAIKKNWRGNLLEERPLLARLGLHAAELSLPSSQTLCAPLPRDMTALIKQMKLFHLTIEPFPKPGRTVGTQFL

SEQ ID NO: 85482 - protein, 80 aa, Unknown
  Obtained from environmental sample
  misc_feature (1)..(80): Xaa is any amino acid
MFDFLRTLWNMLPSTLMMAAPIFIAAAGGMICERAGVVNIALEGLMGIGAMAAATTHVLLESHYFFFDTIGLFSAAARPI

SEQ ID NO: 85483 - protein, 61 aa, Unknown
  Obtained from environmental sample
  misc_feature (1)..(61): Xaa is any amino acid
MKINSVLVAGAGAVGLTVAETIYNYDPGCVSILAKGERLERYRKNGLKVNGPQPDFSFAQE

SEQ ID NO: 85484 - protein, 554 aa, Unknown
  Obtained from environmental sample
  misc_feature (1)..(554): Xaa is any amino acid
VADNQDRPSIWAISLNTEAYMDGQYSMLVRTTDGYNVQSFTNAIINIDNTPPVIDLVSPKNGSPAGRTLEVNGQVYDNLKVKVISILVSDTNNPDSFLVVEPPIEAVIQQTLDIRSYRDGDYALTVTVEDFAGNQTVVIRNVRFVKAKAASEIAIISPMSGVTHTGKAVISGRISGAVVPDNVELMLGRRKLADVEVNKYGVFRYELPDFYVLEDEGVGVSASFQTPSGEWVVSHESLLRVEAYGPVLDIASHKDGDVITGRPWLSGSAYMFRPEDEAVTRRTKALYGVARVEISLDNGRSFTPAVGTGDWKFRLETSQLAEGILPIIVKATFHNDDVAVRRILLIVDPREPSVNVIGPDENSGHRTTIRVFGSTVDDYDMDSVEVSLRPGDKLGYTVPGFIQGLYLDGSVLGSMNFCAGIGLSFFEDNVKVQANVSQAPSGRYSGWAFGGKILANVWTKNLGDWFGPDWSFWKTSFVLGAHFSYFLMEEGETPLWMGEFLGQWEVIKSDMSFFFPNWKYFKSLSFYVEPGIWIAPSDVTYDPNAGARPILTLD

SEQ ID NO: 85485 - protein, 82 aa, Unknown
  Obtained from environmental sample
  misc_feature (1)..(82): Xaa is any amino acid
LDRIGVAVASAFTDICALVGHIGQVARVRGWVRNARASKTRFVELRDGTGFVQCVITASDSDPESYELAGSLAQECAIEIRA

SEQ ID NO: 85486 - protein, 111 aa, Unknown
  Obtained from environmental sample
  misc_feature (1)..(111): Xaa is any amino acid
MRVAHPEHGQGVAIEEERNGYVLVAFGALERSVPVASLSRKLSRAEQVLGSVGGGRERIARAWLCHEAYSLPLLDSAAALTSAKIDLLPHQVVLTHKVASVSPRRFLIADE

SEQ ID NO: 85487 - protein, 486 aa, Unknown
  Obtained from environmental sample
  DOMAIN (209)...(443): Methyl-accepting chemotaxis protein (MCP) signaling domain
  misc_feature (1)..(486): Xaa is any amino acid
KNIKDTEADMAGKYIGNFLNSVKTGKYYSFSNYIESIEKEMRMFIIPIPFGETETTWSYAIAVMNDVVMSPVYEMIFMTILISALVLGIVIFAAIFLSRSISKPIIKASETLKDISEGEGDLTRSIAVNSKDEIGNLALYFNKTIEKIRLLVITIKNEALSLNNTGAELASNMTQTAAAINEINANIQSMKGRVMNQSASVSETHATMEQVVSNINKLNNHVENQSNNVSHASSAIEEMVANINSVTETLVKNTNNVKTLKEASEAGRNGLEEMASDIQEIANESERLMEINSVMENIASQTNLLSMNAAIEAAHAGDAGKGFAVVADEIRKLAENSSEQSKIIGGVLKKIKSSMDKVILSTGNVLKKFEAIDSNVNIVSEQEENILSAMEEQGKGSKQILEVVSNVNEITKQVKGGSNEMLEGANEVIQESDNLEKTTQEITGGMNEMASGAEQINTAVHHVNEISSKNRAGIDTLMREVSKFKV

SEQ ID NO: 85488 - protein, 333 aa, Unknown
  Obtained from environmental sample
  DOMAIN (221)...(298): Bacterial Ig-like domain (group 2)
  misc_feature (1)..(333): Xaa is any amino acid
GQWWQHNQGRPLYRAQYGRDITPSGPTSVADTTKYDTATVTVNTTNVPVTGVTLNKTVTSINVGASETLVATVAPSNATNKTVTWSSSNTGIATVNGGTVTGKAAGTATITATTQDGGKTATCVVTVNTTNVPVTGVTLNKTVTSINVGASETLVATVAPSNATNKTVTWSSSNTGIATVNGGTVTGKAAGTATITVTTQDGNKTATCAVTVEDYEAQWVSVRGVSLNKASTSISVGGTETLTATVTPSNATNKTVNWSSSNTSVATVSNGTVTGKAVGTAMITVTTQAGNKTATCTVTVIAASSQNITAIAAGGNHSHALMGDGSRWGWGGQ

SEQ ID NO: 85489 - protein, 342 aa, Unknown
  Obtained from environmental sample
  DOMAIN (1)...(53): Phosphoribosylglycinamide synthetase, N domain
  misc_feature (1)..(342): Xaa is any amino acid
FIPAYRRFGLRQKEGVGLTVVGPEAPLAAGIVDRFRGAGLAIVGPGQKAARLETSKVYSKSFMGKYGIRAAASRNFTSHADALKYAEKYFSKAKKTTPPPLVVKADGLAAGKGVVVAANLTEAKQTLSAFMKEGSLGDAGKSVILEEYLEGLEVSVLAAVSVSPGKKGTIKPFISARDHKRRFEGGSGPNTGGMGAIAPVPDFTEAARNDFETAILAPTLKGMVAEKMDYRGFIFFGLMVREERCYLLEYNARLGDPETQAVLPLMDSDFAELCTAILNGTLQNFPLKWKKGAVCAPVAVAESYPGSYRKGDPIAINPTELGKTGAKLFVAGANLREQPAPL

SEQ ID NO: 85490 - protein, 459 aa, Unknown
  Obtained from environmental sample
  DOMAIN (374)...(459): MutS domain V
  misc_feature (1)..(459): Xaa is any amino acid
LILLGKTRLEKQFGVANLKSFGMEANSPELISAGALLDYLDSTSKSILSHIRTIKVYRDSEYMGIDESSQRNLELLYNQRDGEPRFSLLEVMDETKSSMGRRLLKRRILHPLSNVEKINKRLDMVEDLYRDQGRLSKLRELLGKTSDLERLCSRLAMDKAHARDMLAIKNAIFCFFAVKEILNTEFEGRKICFECDEQESVNNFDSLLQLQDLLEKGIKEEPSVFLNEGNLIKDNFNKELDDLRSMRDNSRQILEQYLEEEKQETGITSLKIRYNRLIGYFFEVKKNSLDKVPKHFIRRQGMADGERYTTDHLAELESEINGADDRIIDLEKKLFFEIREEAKKSLNLMSVCARRLAEIDAAQSLAKAASIRNWTRPQLDESSTLEIYEGRHPVVEEHISRGEYIPHDILLNTALSEISFAMITGPNMAGKSTYLRSAALINIMAQAGSFVPAHRLVSA

SEQ ID NO: 85491 - protein, 528 aa, Unknown
  Obtained from environmental sample
  DOMAIN (192)...(420): Methyl-accepting chemotaxis protein (MCP) signaling domain
  misc_feature (1)..(528): Xaa is any amino acid
SVYNIYPYLKEISELLNTDDELPLLIDCLNCEKGCIGGPGTGNAEKPLAVLKAPVQKRMAKLEEKQHSLIGNDTYKKYHDTLGKYWKKGLYNRIYRNLSENNTIKQPSETEITEIFHSMKKFQKEDIYNCTCCGYGSCKAMATAIYNKLNKPKNCAHYILDLLKENQEHIANASDLIEGINKLIQELNATISSQAEAVDHSSAETEEIITSIKDTSEMSLKQQESVKGLIEIAGRGQESMRKTIQSINEISQSVEGISSAIQIISSIAANTNLLSMNAAIESAHAGDAGRGFAVVAGEIRRLSDSTRENSVNISKTLKSIIDGVAVTEKQSDDTGTRITAMSKEIGSFAKTMSDLINTFGELSAQSSEITSALDNLQSQSDMVKTDYAEILSMTDKLRMAMIDLTMLSKKKVLVIDDEETVLIMTKNVLKNDYNVTTINSGKAALEYFLKGYIPHLILLDLYMPEMGGWDTFLRIRNISQLHNIPIAIYTTSNDPKDKIKAEELGAVEFIHKPLNKAELLEKVGRLLR

SEQ ID NO: 85492 - protein, 184 aa, Unknown
  Obtained from environmental sample
  misc_feature (1)..(184): Xaa is any amino acid
MRIALELVPKTLDSFLEESKTHINNFPKIAAINIPELRSVEIKSFEASEHLLKNSVPAIPHFRLIDRTLENLENLIEKLISLGLKQTLLISGDPPLDPQGFVPSGIKAPQAIKHIKTKFPGLKVYAGQDPHRQSFKKELDYCQEKLDSRADGFFTQPYFSEGLLTQWLEHLPEHRNVDRVKALL

SEQ ID NO: 85493 - protein, 226 aa, Unknown
  Obtained from environmental sample
  misc_feature (1)..(226): Xaa is any amino acid
ATHPALTSRLASTFSDAAQAPPAPPDPGYLTFRDRVLAGCGDLDLAQSFFSRRLNANPNDHGALHGLGLLAQRRQNLSQADQLMQKALALAPGREDYLADLGDLALKRHQPAEAKGYYEKAHNRLAVLGLARTSELLGDRARAATLYDQAVNQGPADYLPALELAGRFFGQNGQMDKSHFYLGRFFAGSGQISQAIFHYQQTAGPFKAQADRELKILTELKKDDRK

SEQ ID NO: 85494 - protein, 192 aa, Unknown
  Obtained from environmental sample
  misc_feature (1)..(192): Xaa is any amino acid
MWDYEFYGDETVRTFEIEAFRYAASLPINVVTFQNSPSSKGWKLKIIDITKEAGPSVKIDLPLSDIRRPVAGKTPLKTINNYQYSGTISWSPNTSTFTNGTAYNATISLTGKAGYTFDGIAANGFKVIGASNVTHATGSGNKMTITASFPAAAAFAPAKNITLYTRDVKGYGVKVDLFRTSGFFVTKNTNDQ

SEQ ID NO: 85495 - protein, 217 aa, Unknown
  Obtained from environmental sample
  DOMAIN (90)...(217): Aminotransferase class-V
  misc_feature (1)..(217): Xaa is any amino acid
MITPNDYGLPDPKELEQWALPYFPEFQEKKTDDAKTAYSPVVAPYTAAPAVMSPEGTKNSPLGTGGFDVNRIRQDFPILSEKVAGGKQLVWLDNGATTQKPNAVIDRISYFYRHENSNVHRGAHDLAARSTDAYEAARETIAKFLGAPSKDNIVFVRGTTEGINLAAQSYVKPLLSPGDEIILTILEHHANIVPWQLIAQETGALIKVAPVDDTGQI

SEQ ID NO: 85496 - protein, 68 aa, Unknown
  Obtained from environmental sample
  misc_feature (1)..(68): Xaa is any amino acid
MPKELLKSHQKLDKAVETAYGRNFDNDSQRVAYLFELYQKLTGELFTEIKKTGKGKKIKSKKDSKGIN

SEQ ID NO: 85497 - protein, 195 aa, Unknown
  Obtained from environmental sample
  DOMAIN (12)...(194): Glutamine amidotransferases class-II
  misc_feature (1)..(195): Xaa is any amino acid
MNLDDDKLCEECGVFGVFLNDPQHDAAPLIYQGLFSLQHRGQEGAGIAVVHDNVIEPSPIGENSVEPEVRSSRLDIHKGQGLVGEVFGPDALAKLKGHAAIGHVRYSTCGANIMENVQPFISHFKLGSIAVAHNGNLTNADVVRELLEDAGIGFASSSDSEVIINLIAKNYKKGLGKALYRYGQIYQGLLCAYSV

SEQ ID NO: 85498 - protein, 234 aa, Unknown
  Obtained from environmental sample
  DOMAIN (16)...(231): Orotidine 5'-phosphate decarboxylase / HUMPS family
  misc_feature (1)..(234): Xaa is any amino acid
MVFSALLESRIGVCKNPVCFGLDPVLSLIPAEAGSSEDKIRKFYFDILEEFLKRNIMPAVAKPNSAYYECVSIGAMQVLAEIIATYRREGILVILDAKRGDIGKSSEAYAKAAFDVYGANAVTVSPWMGSDSVKPFLREENGVYILLRTSNAGAADFQDLKLASGEGKAYRAVAEKIIEWDNSSVGAVVGATNVRELAEIANFFCSQKKEIPFLIPGVSSPGSRGNSANLIMVS

SEQ ID NO: 85499 - protein, 302 aa, Unknown
  Obtained from environmental sample
  DOMAIN (96)...(301): Papain family cysteine protease
  misc_feature (1)..(302): Xaa is any amino acid
GLSRALPGTATITATAQGSNNTASCLVSVLEQAPINPDYLEWLAKEEERAQRIKDGLPVEERDPRLGFIPSPYALPSIDGQGVQIGPMAANIKASYPAKYDLRQLDYLSSIRDQGQYGTCWAFASLASLESNIKKTTGQNTDFSEWHLAYYTYNSLNGLPAFAGAPGAEAYHRGGNDALSTAIMSRGKLAGGPVNESSAPYGGSTPSPSAATTAAIKNVYRFNTQNRDIIKGMVQTYGAAYIIFNIVQNSSYYNPSTYAYRYVGTSANHCVNIVGWDDHYARTIFPSGNQPASNGGKDCPAT

SEQ ID NO: 85500 - protein, 330 aa, Unknown
  Obtained from environmental sample
  misc_feature (1)..(330): Xaa is any amino acid
MLPALSVDQKEREKIGAVARICANAGMFFVVAGIVPLTGLLGERFGSPQKGWFVFTVAATVVMLAGQCVTLFGVKESGVIANRRQSTPLRELLRVIYKNDQLFFTAIAMSLFMIGYVTTASFGLYFFKYAYGDEGMYAIFALILGVSQITALAVFPLFSKRFNRKTLFTAAIVLISAGYIIFFFAPVTTMIFIGAAGILIFIGQSFVQLLMLMFLADSVDYGHWKLGKRNDSITFSLQPLINKMGGAISSGVVSAVIIVSGIKDADSAAEVSAQGLLMMKIAMLVFPLVCIVVSYLIYRKKYIIDSKFYAKMLSDLRGRGEITSEDDSEK

SEQ ID NO: 85501 - protein, 485 aa, Unknown
  Obtained from environmental sample
  DOMAIN (118)...(406): RNA polymerase Rpb2, domain 6
  misc_feature (1)..(485): Xaa is any amino acid
VATGKIEYLTADQEDNYIIAQANTPTDKSGKITENMLFARYRGDFPVVSPQEVTYMDVSPMQLVSIAAGLIPFLEHDDANRALMGSNMQRQAVPLLRTQAPFVGTGLEGRAAVDSGCMVIAKNPGVVEKVDAVKVVVKKTGRDANDILGLTEFDTYELTKFERSNQDTAINQKVCIREGQHVDAGTVLADGHATSLGELALGRNVMVAFMPWRGYNFEDAIIISEKLVAEDVFTSVHIEVFETEVRDTKRGPEELTREIPNVSDDAVRNLDENGVIRIGTEVEPGDILVGKVTPKGETELSPEERLLRAIFGEKAGDVRDSSLKAPPGLKGVVIDTRVYFRKERDKRSKKKDTKRIEELKKESEREILEIKKVRAERLAEILNDTQTTEIVNIETGEVIIGAGRKWTKQLLTKIDFSAISFKDGLCQEAEKSAKAEEVYYKAGDLITKKEDKLGKGDRQGAPRRRVKARRVATCQGLCRQGAQTV

SEQ ID NO: 85502 - protein, 312 aa, Unknown
  Obtained from environmental sample
  DOMAIN (1)...(184): Glycosyl hydrolases family 38 N-terminal domain
  misc_feature (1)..(312): Xaa is any amino acid
VGSTASAWVETDKNMPNTESLLRHIRYTKDYLSHNWSVDRSSMNIDFSPDTFGHSANIPEINAYGGVKYLYHCRGFEERQVLFRWKSPSGTEILAHCEPYWYNSGITPHIGMGVTELASLCGGLKTSLIVYGVGDHGGGPTRRDVEQIIEMRDWPVFPTIKFGTFHEYFKAAETVRDKVPVIDREINFIFSGCYTTQSRIKLGNRHGEAALLDAETLDAFSGLLTGKRYSRKQYIEAWQNLLFTHFHDIITGSCVRDTREHAMGLYANVMALTQTMREKAALSIAEQIDTSSIQTMIRKKKEPNPKALVPSI

SEQ ID NO: 85503 - protein, 187 aa, Unknown
  Obtained from environmental sample
  misc_feature (1)..(187): Xaa is any amino acid
FFADASESARDIKNYKEDILELYIIQARNEINDIQNEIENILLKYSVKYIFPAITQNDEQDLTAPISFKQLGVYAGIGWIGKNDLLVTNEYGPRIRLGAVLIDIDFPYNINLKENKCPENCILCIKSCPYKALKNKMWTNSVKRDEIINYKLCNIKRSLYINQIGRKHSCGYCMVSCIYGLKNNENI

SEQ ID NO: 85504 - protein, 108 aa, Unknown
  Obtained from environmental sample
  misc_feature (1)..(108): Xaa is any amino acid
VIIGAGPAGLCAGLHLTSISSSLSVLLIDKAVPWKRPIPCAEGVGRLGFEEAIEVDPAWIRLVVSRADFYAPDGARVSYTDANKGFIIDRAKMQGDWREASAESDPDC

SEQ ID NO: 85505 - protein, 57 aa, Unknown
  Obtained from environmental sample
  misc_feature (1)..(57): Xaa is any amino acid
GDVFYFATRIIMTALSVGFSKKTGLLTFGASGQFIVGAFIAVLIGVKCTSFPGISTG

SEQ ID NO: 85506 - protein, 402 aa, Unknown
  Obtained from environmental sample
  misc_feature (1)..(402): Xaa is any amino acid
SPLAAFGEHLDTFDLASPTRGFSPWDPKKLVEKELADLAKFQLADGSFPYWPGGSTGNLFVSIRMAHIAALAKEKNMNVPDSLDTRKLLSYIGTASSEAKLKDPFLKGYSLWVRTMYKERIGSEITAFLKRGDELGISGWAFAGLAALEMGQKDLAASAKDRVRRFIRPGTRSLDLTDTYERQGNFWGYDSDRYALALMLFNSLDPQGDDMTTRLATSLIERQRRGVWNNTASSFWAALAFGMLGDAESSEWKAANGAPLDVTTSLGGVSLFKAEFKKYGGVPVSYNGHFTEKPVLDLPRDTLLPLRIERSGPGRLYYTASLRYGIPVELAGARDEGLGVFVETLDSNGNPVKTAGSSRARPTPARHRNQFPRPHPCRVTLAHPLRSRNVGRRILLPVPLCL

SEQ ID NO: 85507 - protein, 65 aa, Unknown
  Obtained from environmental sample
  DOMAIN (1)...(63): Thiazole biosynthesis protein ThiG
  misc_feature (1)..(65): Xaa is any amino acid
VHAMEMGASAVLVNTAIAAAPNSGIMAKCFKLAVESGRLAFETGLAEQRDEAAASSPLTSFLPTQ

SEQ ID NO: 85508 - protein, 129 aa, Unknown
  Obtained from environmental sample
  misc_feature (1)..(129): Xaa is any amino acid
MKYFLDSAITDEISYALENWGIDGVTTNPRHIQASGKPFYTVIKEIADLTKDIPGFTVSVEVNPHFRKSEDMIGMAKKIAGLSPNFVIKIPCIEQGVSAGYKLEKIGIRTNVTLVFSAAQAIMGRRIGA

SEQ ID NO: 85509 - protein, 324 aa, Unknown
  Obtained from environmental sample
  misc_feature (1)..(324): Xaa is any amino acid
LSRNLATTDRFLDLVYPGYLVDKSKPLDSLLERDSTLLLESMAFFKIVRCSVEDADDLFESVNEKIEKLFTALHSINIPVGYGIISRGGVTNLVLCVYSKKDVRPVKKVIEGMLSGIELEDYDAGFKNPAKQEKSYGILSGVPSVFLKEKRQKFSLSSIMKALNGEDYTLLFLAKPVSAEIVKQQVFELIDVKDKAFAISKRNLSRNTSHTDTDTHTVTVSDTEGHTDTAGVSVGGFAGVFIPPLTAGKNINVNYSHSYSRSHTEGYSDAISTAITAGESIAVEIQNGFALELMNYADKAIERLKNSPKYGIWQTAVCYSANLK

SEQ ID NO: 85510 - protein, 280 aa, Unknown
  Obtained from environmental sample
  misc_feature (1)..(280): Xaa is any amino acid
MNRLEKSKELLLKNYELYGMVNRSDTENLPGRESIENIVLGLEELLFPGYLENAHADNGNLLRTTNDKVNQLSGKLIHEVEKSLVFSARLGVLNCGHGGCRAAAALVTDDFFEELPRIRALLAKDLEAAVRGDPAAMSADEVILSYPGFQAITVHRMANFLWTRQVPLIPRMMNELIHRRTGIDIHPGAQIGESFFIDHGTGTVIGETTIIGDNVKLYQGVTLGALSVKKDESGHKRHPTIEDNVTIYANATILGGETVIGRGSIIGGSVWNTQSVPAGK

SEQ ID NO: 85511 - protein, 320 aa, Unknown
  Obtained from environmental sample
  DOMAIN (20)...(186): Conserved hypothetical ATP binding protein
  misc_feature (1)..(320): Xaa is any amino acid
MKSYQEHIRNFCIIAHIDHGKSTLADRIIEKTGLVSQRDMREQFLDNMDLERERGITIKLQTTRLRYHAVDGQEYIFNLIDTPGHVDFTYEVSRSLAACEGAVLIVDATQGVEAQTLANVYMALDEDLEIIPVLNKIDLPSSRPEEVKLEIEEIIGIEAAGAPLISAKEGIGIEDVLEAIVKKVPPPSGDADGKLKALIFDSYYDNYKGVVTYTRIFDGSVQKGDIIRLMNTKKKYEVTEVGTYCPKPAACEELKAGEVGYICASIKQVADARVGDTITLDADPAPDALAGYQRAQPMGYCASIPRKVKIRNVKDALEKL

SEQ ID NO: 85512 - protein, 203 aa, Unknown
  Obtained from environmental sample
  DOMAIN (1)...(131): Thiamine pyrophosphate enzyme, C-terminal TPP binding domain
  misc_feature (1)..(203): Xaa is any amino acid
GSDRDRIGTSRGVKLTRPELNVFVPMGDGDGLAIGGNHFIHAARRNIDMTAILLNNRIYGMTGGQFSPLSGRGISATTAPYKSIDPDFDTVKLALGAGASFVARSTTFHVKEMTGLLKQAIQHKGFSLVEVLSQCPTYFGRRNRMGDAVEMMEWFRDNTAKIGSKKLEENPKLLPRGVFAENDTPEYCAEYARMSARAREGRI

SEQ ID NO: 85513 - protein, 60 aa, Unknown
  Obtained from environmental sample
  DOMAIN (1)...(57): GTP-binding protein LepA C-terminus
  misc_feature (1)..(60): Xaa is any amino acid
SPRALPEGRFVCEKLREIIPMLQFEVPIQASIGQKVIARETVRAYRKDVTREVLRRGYLS

SEQ ID NO: 85514 - protein, 513 aa, Unknown
  Obtained from environmental sample
  DOMAIN (138)...(371): tRNA synthetase class II core domain (G, H, P, S and T)
  misc_feature (1)..(513): Xaa is any amino acid
MNQYRTHTCGELREGNTGQAVTLSGWVDTIRDHGGVTFLDLRDQYGVTQIVLHDEYKLNKESVITVTGTVKKRDKETVNPKIETGTVEVHAKSIVIQSRAVRALPFEISDSKNTREEVRLCYRFLDLRNPDVKKNILLRSKVISFLRTKMEELNFIEIQTPILTSSSPEGARDYLVPSRKHHGKFYALPQAPQIFKQLLMVSGFDRYYQIAPCFRDEDARADRSPGEFYQLDFEMAFADQEDVFQVAETVMYGVFKSFSDKAVSTLPFIRIPYAEAMLKYGTDKPDLRNPLVIADLTGFFADVEFQPFKNIPVRGIVAKRAAFQSKSFFEKMLAFAMEIGMKGLGYISIQEDSSLKGPIVKFLSAEKQDKLKKDLCLEKNDTLFFIADAPDRVNSLAGQIRTALGSQLNLIKKDSFEFCFIVDFPMYGISEETSASREAAASEEAGKVEFTHNPFSMPQGGLEALETKSPLDILAWQYDIVCNGVELSSGAVRNHLPEVMAKALKLRDTPRLT

SEQ ID NO: 85515 - protein, 50 aa, Unknown
  Obtained from environmental sample
  misc_feature (1)..(50): Xaa is any amino acid
ENRDSVADYRAGKEKVFAFLMGQVMKKLSGKGNPEMVKKTLTGMLREESK

SEQ ID NO: 85516 - protein, 110 aa, Unknown
  Obtained from environmental sample
  DOMAIN (27)...(106): Bacterial flagellin N-terminus
  misc_feature (1)..(110): Xaa is any amino acid
MQINHNIRAMVTQQALFQNDNSMTKSLEKLSTGLRINRAQDDAAGLAMSEQMRTQIRGLAKAKRNSQDGQAALQIAEGALAEITNMMQRQKEFGCSSANDYSEQHRAYVP

SEQ ID NO: 85517 - protein, 167 aa, Unknown
  Obtained from environmental sample
  misc_feature (1)..(167): Xaa is any amino acid
MIITSPILNGLRTALRDEFRKRMSEISANSIWKLLATVITSNTKSNTYGWLSAFPQLREWVGDRVIKDIAESAYQIVNKKYESTLGVERTDIEDDNLGQYRVLAAAMADEVEAFFNRNIALLLKEGFNNICYDGQRFFDSEHPVMKRPTEQASHAVSTRPICLVTQN

SEQ ID NO: 85518 - protein, 179 aa, Unknown
  Obtained from environmental sample
  DOMAIN (30)...(177): Peptidase family S49
  misc_feature (1)..(179): Xaa is any amino acid
DSRDYDALVLLSGSYGGYSYKLQKFARLIDRIAQDKPVFTYTDTIMASAAYGIGACADKIYAAPSALVGAVGSYSEWLDFSKKWEKDGIEYMLFRAGEDKARIGFDGQMRDSDKAEIQADVEENHLQFKKCVLEHRKIEEEYLQGKLFSGEKALKLNFIDGFSDSIYDFSDLLKNGGIS

SEQ ID NO: 85519 - protein, 286 aa, Unknown
  Obtained from environmental sample
  DOMAIN (1)...(269): UvrD/REP helicase
  misc_feature (1)..(286): Xaa is any amino acid
MVDEYQDANVAQFHLLRELCGEDTYVCVVGDDDQSIYRFRGAEVKNILEFPNRFKNADIIRLERNYRSTPPILKAASSVVNYNRGRLGKTLRAEKGDGPLPILAYLPNQDEEAKFCADKIEGSVQNGEAAWSDWAVLYRTNAQSLGFETLFLRRSIPYRVVGSLKFYEREEIKDALALLSLLVNPRDEVAFRRVVNKPARGIGPVSIDKLVEASADYGGNLLKAGRNLEFKQKARTGLDTFLTVIENGRALLEKDASAEPQKGKKRKKKKNALYPVRFSSFCRSTR

SEQ ID NO: 85520 - protein, 323 aa, Unknown
  Obtained from environmental sample
  misc_feature (1)..(323): Xaa is any amino acid
MYALKATGAIVVKDANIIYSTKTAIDGGSVFDNTAISSGAAAVTLWDVNVTGQSASALNGSIVMSKGSVEIKRGAYQAATGGNGGRAIWTDGGSAQASTVTLEEVAISSNGKLKDSKADYVVSANGKVTLESKKKAATSVSLTTLTSDSVGGISAKGGVWLKMEGSPVSSVNIVGSGRGINVESKATGTAYDIGSNGYITTPGAAIVDIEGSASYSALVSVGSGQAIYVDLKPQGGTTDDEAGLVYLYNAEVKRTAAATTAKKNLIHASGADVYVTGSKAELTKVKTDSTSTGATPLATAIFSTDVANFYGSSVSSYGGSVTV

SEQ ID NO: 85521 - protein, 161 aa, Unknown
  Obtained from environmental sample
  DOMAIN (11)...(161): Crossover junction endodeoxyribonuclease RuvC
  misc_feature (1)..(161): Xaa is any amino acid
LKLSDSDRVRIIGVDPGLASTGWGVVEFSENRLLYVAHGCIETGPEDPKGKRLHIIHSSFLKVLKAYKPCEAAIENLYFGKNISSAMSVAEARGVLLLALTSQGLPVRELTPNAIKKAVVGVTKADKSQIQEMVRLIFGLKEIPKPDHAADALGAAISAAH

SEQ ID NO: 85522 - protein, 309 aa, Unknown
  Obtained from environmental sample
  DOMAIN (174)...(309): PEP-utilising enzyme, TIM barrel domain
  misc_feature (1)..(309): Xaa is any amino acid
MLEDADFHEQMNNRLKESLCNAEWVVWEVSRELSQTLMQSPDANLRERVVDIDDVSRRIIDCLLSDARGRSPLADLDEEVILVSQYLMPSDMVNLNKDCVKGIVMDEGSSTCHTAILARAFNIPAVMGISGFSRIASDGEPLVMNGLSGLVVINPDKQTLARFRTDEKQQRRQTDRLNALRELPAETTDGCRVALKANISLPEEAETLKHYGAEGIGLYRSEFLYITPGKAPDEETQYKAYSQVLKAMGELPVTIRTMDMGGDKIVPEFHAVGAVRQRNKIPAGLEGDTAVPCNPEMFKCSCGQFSRQA

SEQ ID NO: 85523 - protein, 84 aa, Unknown
  Obtained from environmental sample
  DOMAIN (5)...(61): Bacterial flagellin C-terminus
  misc_feature (1)..(84): Xaa is any amino acid
GDRESSVSGVRAKIGTYINRLEYTINNIASLEFNTQDAESRIRDTDFAESTTQFTRNQILVQSATSMLAQANTLPQTALTLING

SEQ ID NO: 85524 - protein, 248 aa, Unknown
  Obtained from environmental sample
  misc_feature (1)..(248): Xaa is any amino acid
MDTNFTDKVLNFFTKVICPVPRASHQEDLIADNLEEFAADRGLTSFRDDNNNVIVFKPGTGKYAGTSTPVILQAHTDMICVPASADFSFGVEAYYSAENRLTGRSAVTGEKTSLGADDGIGVAVAMAVLDGADEIVHPPLVAVFTAEEECGLTGARDISADDILGIAPGLDFGRAAFINLDDGRFGQFSVGCAGSANVTVKVPVERTGIAPPPDAFCFEFAVCGLAGGHSGLSIHEKRANADILLCIS

SEQ ID NO: 85525 - protein, 79 aa, Unknown
  Obtained from environmental sample
  misc_feature (1)..(79): Xaa is any amino acid
GRPEPGALRFSRLIWRWRREAKFFVFEQFLELKVFGKVKGDRVEPDPKDVKGFKKFMERYTMGLKIERAAVENLKRGKL

SEQ ID NO: 85526 - protein, 202 aa, Unknown
  Obtained from environmental sample
  misc_feature (1)..(202): Xaa is any amino acid
MIRSIIDFLEGSGNPDYGITKEIRKLLLEVSAAEADILLKPARKALEIKGASTTRAVQTPLRSQIPVRTYFDRDTVKPGKFAFDTVAHCGGSASGQFCKTLTGTDVYSGWYEGRALLNAANCWVKAAIFDIKEPKTPYERLMESPDVSPECKAELERRRAGQNPVELNRKLNEAVGLLLKINREKLYLGKTSCQGDGQAPAA

SEQ ID NO: 85527 - protein, 282 aa, Unknown
  Obtained from environmental sample
  misc_feature (1)..(282): Xaa is any amino acid
MLFENEQFRMSRLQVFNWGTFSGLHDIPISPKGFLFVGGSGSGKTTLLDAFSALLVPPRWIDFNAAARESERKGKDRNIVSYIRGAWAEKEDEASGDISKHYLRPAKTWSALALSYQNEIGQIVVIAQVFWISNNSNATADVKRYFFNFERTFSLNEFDDFGKSNFDIRKLKQLFPDAFIHNEFTPYCERFRRLLGIENEVALRLLHKTQSAKNLGDLNTLFRDYMLEKPETFDAAETLVNEFGELSAAHQAVVTARKTIETLLPAREKHHQMELLVKQRND

SEQ ID NO: 85528 - protein, 267 aa, Unknown
  Obtained from environmental sample
  misc_feature (1)..(267): Xaa is any amino acid
MSLARYTAKKKAIFSRLIKDIINSRVCYFFLAPYAVVFALFFIAPLVVSVFYSFTYFNILEPPKFIGLRNYINLMLGDDVFLKAMKNTFIMAAITGPIGYIFSFLFAWFINELPRYIRALVTLIFYAPSISGAVYMIWAIIFSGDAYGYINGLLMNLGILSEPKLWLTDPRYMMPVMLIVILWMSLGTGFLAFIAGLSTIDVTLYEAGLVDGIRNRWQELWYITLPNMKGMLMFGAVMAITQSFGVADVTVALAGFSCRILSHGPTP

SEQ ID NO: 85529 - protein, 127 aa, Unknown
  Obtained from environmental sample
  misc_feature (1)..(127): Xaa is any amino acid
DLGAQGSDRPRETKLSFDEIASVIAASFWQTIEKQPAKEREIHEYLRVMFSAQLITGPFSILVGFDGGLMALNDRLKLRSMVVGEKDDITYIASEEAAIRIIEPNLDTVWAPRGGQPVIVNINRGKA

SEQ ID NO: 85530 - protein, 320 aa, Unknown
  Obtained from environmental sample
  misc_feature (1)..(320): Xaa is any amino acid
VMYSAVVATVICIGCGGDDGEQTKSLKASDLLNAITGGGTGTPNTPGAPKYNVYFNPNGATGAPPETIQRDSGSVVPLPDQAGLVKDGHSFGGWYENRDGNEIHYNANSSYTVTRTVTLFAKWTRNSYTLTISANPSVGGTFSRNPNQTSYSHGTNVAVTATPNTGYTFTGWSGAMSGAANPVTIVMDDDKTLTANFEQIPYSVTVSSVGTGASNNGSYVAGTTVTITAGTAPPDYRFKNWTTTSSGVTFANANSATTTFVMPANTITVTANFEAAFITDSRNGQKYKTVRIGGQNWMAENLNYAVDSSWCYWVSADLIL

SEQ ID NO: 85531 - protein, 313 aa, Unknown
  Obtained from environmental sample
  DOMAIN (32)...(313): Serine hydroxymethyltransferase
  misc_feature (1)..(313): Xaa is any amino acid
MKTNPVADYLAAVTPDKIDAGMLAYICNLTEVAKVTPEIASSIVLELENQRKRVKLIASENYCSMSVQLAMGNLLTDKYAEGVPNHRFYAGNENVDAIETLAAQEACKLFGAQYANVQPHCGADANLLAYWAILSTRIENPALEKYGETNLYKLTDSQWNELRASFGNQRLLGLDYYSGGHLTHGYRHNLSGRMFDIYGYSVSAKDGMLDYDEIEKQALQVRPLILLTGYSAYPRKINFKRMREIADKVGAVFMVDMAHFAGLVARKVFTGEYDPVPWAHVVISTTHKTLRGPSAGIVLSTKRFAEALDQGCP

SEQ ID NO: 85532 - protein, 212 aa, Unknown
  Obtained from environmental sample
  misc_feature (1)..(212): Xaa is any amino acid
MSSKQKIIMISAGAALAVLIVLGIIFFVKGKKQEPDGEETAIASQSDSRRQNTLKLIERYLTQGEFDRALDLIDRLLIENPDDEEANELQQRILTADRHKDSDGLTELQRQLLEEQRRQNERIAASMQKSMSSPSMASGESEAAAERRAAAEAEAARKKAQEEELAKVSRELQDKMRKVNELVADAKAKLNAGDLAGAERIFRSQKNLPVHH

SEQ ID NO: 85533 - protein, 99 aa, Unknown
  Obtained from environmental sample
  misc_feature (1)..(99): Xaa is any amino acid
LASAKSYSEVSRRIADLAKKYGKEAQMWIKNYHIEAGTEHFITESTQIASSAGIKNIFAWSYLGSKYMDFLRSENPETVWKTQIKAFSLAKTWSLEPRV

SEQ ID NO: 85534 - protein, 181 aa, Unknown
  Obtained from environmental sample
  DOMAIN (6)...(108): Hpt domain
  misc_feature (1)..(181): Xaa is any amino acid
VETDNDILAEYIEESREHLSHVEQIFVEIQKTGEVSPGSINDLFRAIHTIKGSAGFLGLTGIGTLTHTMESLLDSLRENRLSMTEQITEALIEGTDILNDMFDDVDNSNKRDTSELIALLKNLNSGAPAPAAPQPAAAAPAPAPAPAAAPEEKRSVADVLNQFPKTAHMLLQSNRQRQLKR

SEQ ID NO: 85535 - protein, 70 aa, Unknown
  Obtained from environmental sample
  misc_feature (1)..(70): Xaa is any amino acid
MGTISIEYSSNLYWLGRYTERTYTTLRTFFNYHDKTLDKDKNAYKEFLDNLDIEGQVRRSPPLHTGLSVR

SEQ ID NO: 85536 - protein, 254 aa, Unknown
  Obtained from environmental sample
  DOMAIN (40)...(253): DNA methylase
  misc_feature (1)..(254): Xaa is any amino acid
MLFEQNRIKKIAEEFSAESDIVISRGNAFDVLQQCPSDFASLIITSPPYNVGKEYETQINLEKYLNGLEPVLEQIVRVLASNGSLCWQVGNYVEDKEVFPLDVYFYPLFKKLGLKLRNRIVWTFEHGLHCSIRFSGRYETLLWFTKGDRYIFNLDSVRVPSKYPGKTHFKPGPKYGLPSGNPLGKNPGDVWKLLLHEWEIGLWNIPNVKANHPEKTLHPCQFPIELVERCILALTNPNDWVLDPFRGVGSAMLA

SEQ ID NO: 85537 - protein, 117 aa, Unknown
  Obtained from environmental sample
  misc_feature (1)..(117): Xaa is any amino acid
MAAVVKDLVQLNADLQEQKERIDTVDFKMITFSLAGKAYGVDIMNVKEIAKADKFTFVPNAASFVRGVYNMRGDIIPIIDLRQFFHLPQDKKNDGQENMLILRIHEQSLGRSDHRLS

SEQ ID NO: 85538 - protein, 119 aa, Unknown
  Obtained from environmental sample
  misc_feature (1)..(119): Xaa is any amino acid
MIQRNPCIANIKAGYLFPEVAKRRREYAAAHPEAKIISLGVGNTTEPVLSHINQGLVDGARRLGTVEGYSGYQDEGLLVLREKISAVFYNGKFTANEIFISERGKVRHRQAELSADLIH

SEQ ID NO: 85539 - protein, 205 aa, Unknown
  Obtained from environmental sample
  DOMAIN (60)...(174): Pyridoxal-dependent decarboxylase, C-terminal sheet domain
  misc_feature (1)..(205): Xaa is any amino acid
EIINLAAGVGFPYSPDQKAVDTNVLTSGIQKAYNDVLKPVDLDCRIHTEWGRTITGPYGWLVARAVHKKEIYRNYIGLDACMADLMRPALYGAYHHISVPGKEDAPVNKVYDIVGSLCENNDKFAIQRKLPKIDTAAQAPDGKGDFVVVHDAGAHGRAMGFNYNGKLRCGELLLRQDGSTVMIRRPETVNDYFVTLDLAGLKKFS

SEQ ID NO: 85540 - protein, 293 aa, Unknown
  Obtained from environmental sample
  misc_feature (1)..(293): Xaa is any amino acid
VDGEERDLLPFTLGNRFGYLSDDGKFALNQIRDGYVSMSKNSWAEYEALPSSIQVMDPRKEEIFVIENPKGYPLFLDNRSFIVGSEQNSIIALNSAGEELWTHDFPAPLTCVDAAGGYFLAGTLDGAVELLDSTGKMVFTPFEPGGSRLSVILGCAISQDASRLALISGVEKQRFLLLEHSGDTYKVAYHEFLSDGFRRPVHIKFINNDAEIVFEREEGLGLYVIGSRTSTKVNLNGEIMILDDSGEGGFLFLITSQSQNEKRFIAIRHPGLIVHEAPFKSKNAFLARQQNKV

SEQ ID NO: 85541 - protein, 234 aa, Unknown
  Obtained from environmental sample
  misc_feature (1)..(234): Xaa is any amino acid
GYRQYGSFGTAFREASPLAWESQTLEQSISWVQRWIEEANTSIQVEDDFAFKYFYDPPDKLVNSGRILFTFMDSSSFFTLSEERRTNLDFRWIAANDRIPLDEGGVYYGIHKKTKALKAAKAFTKWFFMAETQKLLLETAKISRLNESSFGIAGGFSAMRTVTEQVFPLFYPNLLGRMPPESYLSPPNILPRNWTAIKERVILPYLRDRIRHTTREEVRSLERRISDWYRLNRD

SEQ ID NO: 85542 - protein, 116 aa, Unknown
  Obtained from environmental sample
  misc_feature (1)..(116): Xaa is any amino acid
MRNKEYAVVVIDIGMTNKKITVYDGNLRPLDALYRNFAPEIVNGFETYDLEAMEEWFIEGLKTFAAEYPLKAIAVSAHGATFVCVGKDGKPLLSLCVYYTHEPGLVPILVLVPPPK

SEQ ID NO: 85543 - protein, 609 aa, Unknown
  Obtained from environmental sample
  DOMAIN (250)...(329): Bacterial Ig-like domain (group 2)
  misc_feature (1)..(609): Xaa is any amino acid
GPPEGSESARAEAYGGWTSSARAIPGVGFISPNGTTQWSDITSTPIQPVFGPNSWGASGTNPNAPVSTASVCLKAFTEPAANVSVTGVGLNKTAMVLEGLSQEQLYATVQPDGATNRAVYWMSSDSSIATVSSNGLVTGVSVGTAEITVITQDGNHKAKCAVTVVPVATTGVGLEDSQVLIGSQEQLSPIFKPSNATNRNATWASSNSTIATVSASGLVKGVSLGTAEITVTTQDGNYSATCTVTVMPVRVTGVSLGTTAQTMRGAGSAFMQNPIIQPSNATNRTVTWSSSDETVATVEADGWVRSLGSGKAVITVTTQDGNFTATCTVTVTPIAVTGVSLNRLTADLAVGNQMLLSATVQPSSATNKAVTWASSDSAVATVSASGLVKGVGAGAATITVTTKDGGKTAVCTVTVTPAISVSGVSLKKTMLLVINGQETLTATVQPSHATNQAVTWASSDSTVATVSASGLVKGVGAGTATITVTTKDGGKTAACTVTVTTGEVAGVSLNKSATALALGYKEQLTATVQPSNAKNKTVIWSSSDEKIAAVSTSGLVTGVGAGTAVITATTQDGGKTATCTVAVATVASKEAYVDPNGHLAMLCGHLFQL

SEQ ID NO: 85544 - protein, 483 aa, Unknown
  Obtained from environmental sample
  DOMAIN (274)...(411): Ras family
  misc_feature (1)..(483): Xaa is any amino acid
MAEHIPIAQRPAAAAGRVGGKYVGLRPAHEENIRVANQVQRPIGGTGRTGPRPAGRSPGENRTGGLGQNRPFTGRPQGSRPQGGTHQGGFGQRTPSQKGLTRPGGTRPGGFPPSGGTPPPPTEGPTKKAFKAKKPVYTRKEKELEMEEKLLQTKKKITQVANPVPKSIEIMEVISVSELARKMNLKASDLIQKLMAMGQMVTINQQIDADTATILASEFGADVKIVSLYDETVIQTESDDDAEMLPRPPIVTVMGHVDHGKTKLLDAIRSADVVSGEFGGITQHIGAYTVETPNGRITFLDTPGHEAFTRMRARGAQVTDIVIIVVAADDGVMPQTVEAINHAKDAGVPIIVAVNKIDKPEANVEKVKTQLSEYQLIPEDWGGQTIFVEVSALKKEGIDKLIEAILLQAEILDLKANYNRSAEGKVLESRIDHGRGIVATVMVQKGTLMIGDSFVAGVWPGKVRALFTDKGDKVRKRRRLGRI

SEQ ID NO: 85545 - protein, 122 aa, Unknown
  Obtained from environmental sample
  misc_feature (1)..(122): Xaa is any amino acid
MTTEQMLHMSGIHLAPYIQAATLLIGKSREGGGNMFRHQLDTMTILIDYGFIDAVLLKASLVHDLIEDIHDLDHNVLLTIDSDSKAVYDLVLEVSRRNGETKADFLMRIREKGSITRNLAIN

SEQ ID NO: 85546 - protein, 215 aa, Unknown
  Obtained from environmental sample
  DOMAIN (21)...(162): Protein of unknown function DUF88
  misc_feature (1)..(215): Xaa is any amino acid
MPLLPFSGIPVGDHQPSEMRQAKLAVLIDADNTQPAIIEGLLDEVAKYGIASVKRIYGDWTSTNLRSWKERLLEYAIQPIQQFSYTTGKNATDSAMIIDAMDLLYSEKLDGFCIVSSDSDFTRLAARLRESGRIVYGFGEKKTPRAFVSVCDKFIYTEILKEAQEETDDEDSSPSLGAPAAKPKKEFKVDRKLLKLLRETVDDMAEESGWAYLGG

SEQ ID NO: 85547 - protein, 93 aa, Unknown
  Obtained from environmental sample
  misc_feature (1)..(93): Xaa is any amino acid
MRVVRYEELKARGLDYVGKAMIAKQAISLQTPVEVIWPGKRGQERVFGIPKALEKADSESILVIDPLNEGDILRIPLGKISMLRRRRKSVFEE

SEQ ID NO: 85548 - protein, 338 aa, Unknown
  Obtained from environmental sample
  misc_feature (1)..(338): Xaa is any amino acid
MMAEPDTSAFAAFGALDRQERLIYCAAGILCYRDYTASKEASDSKESSASKESAASVAFSPWLMRSRVYNYAEIINRLYELIDANRVYPPATLRKLAYMLECANAENSVNAISGANNSGGASGSPASGGKIIEVMKETGLIVPVSDNYWYKTPFTESAASRESAASDTPLIVMDTPFTILLYPDIAYNDAITIAAFSDVIEAGMAVRFEISRDSAVSAFNRGLTADEIVELLQRLSHNRINENLSFTLHDWEKRHGEVTLRRGLVLTLSPEQRHLAETRSLARFITETLAPGVYMLSESAEDKVVQALNKAGGAIYACRGGGRNIFYEGGSSFGVLPF

SEQ ID NO: 85549 - protein, 195 aa, Unknown
  Obtained from environmental sample
  DOMAIN (33)...(187): Integrase core domain
  misc_feature (1)..(195): Xaa is any amino acid
GFYLIPPENAIILCVDEKSQIQALERSQPVLPIIRNVPERQTVDYLRHGTTTLFAALDVLNGKVIGDCKETHCSKDFIQFLKKVDKACAPKKALHIVADNLSAHKTKAVNDYLESMPGRFVLHFIPTHSSWLNLVERWFAEITNKQIRRGSYESVTQLTKAIKGFIKNWNKSGRSFKWTKEPEEILAKIKKAKSF

SEQ ID NO: 85550 - protein, 70 aa, Unknown
  Obtained from environmental sample
  misc_feature (1)..(70): Xaa is any amino acid
MSDKYFPLSKAELEKLTKRFPTPFYLYDEKGIIENVRRIKEAFSCFPGYKQHFAVRPCPILHLKILAAEA

SEQ ID NO: 85551 - protein, 165 aa, Unknown
  Obtained from environmental sample
  misc_feature (1)..(165): Xaa is any amino acid
LTGSAEWEPSLFHAAGYDVKGRIKGLEQNPANLIPIIMETACGKRNELQIFGDDYDTPDGTCIRDYIHVSDLAIGHAMTLDYICKNDKSLIINLGSETGSSVKEVLDTARKVTGKPIPSKIAGRRAGDPAKLTASSAFARELIGWQTRYSDMETLIKTSWAAYVS

SEQ ID NO: 85552 - protein, 320 aa, Unknown
  Obtained from environmental sample
  DOMAIN (174)...(245): HAMP domain
  misc_feature (1)..(320): Xaa is any amino acid
VIDSDGQREYDRCQQAITANEAWPYMLPVPIPFVNRGKDTFTVLLTTPIIDNVTKELYGFIGTRVDIAPMQEYIRNLAPYETGQAQLISPGGIITASQDPEMLGKNFHEAGEELFGPGGLEMIDRTLETGVPTFARYHGNIIANYPVKVSGTKTNWGLSVEIPFAEQRQMQNFTIFFAIIMVIITAIIVYVIVNTSLKPLINVSLLLKDISHGEGDLTRSIPEKGNDVITDISRHVNQTLVKIRNLVINIKKEAGILFEIGGDLSKNMSNAAAAVHEINANIQSINTRVKRQGTSVTETHDTMGHLVTGINGLDEHIEKQ

SEQ ID NO: 85553 - protein, 283 aa, Unknown
  Obtained from environmental sample
  misc_feature (1)..(283): Xaa is any amino acid
LSERDLWCVSIDRLVAFLRHQDHEWGHFLALANGCLPGGRRTDAYIAERGGEVSANEAGILATKLLADLADFITLTLDENFSLIRYRAAGDASFRSFSAVQKTLDGYIMKNFYRPMLEEEWEKLESTGFANDSFLLGVTIPFPGCLQAALVCAESAKKRFGRAVCTVAGGGYVNTELRFLDSQEFSNYFDHVSFDKGYASLVSILEDNEINELTEDSFVKTTFPDYSEVDFSRYLYPVDDANPMHRLWSDGHWLTAYLAHGLLLAFLRFLRCYPWIHQKLYSG

SEQ ID NO: 85554 - protein, 243 aa, Unknown
  Obtained from environmental sample
  misc_feature (1)..(243): Xaa is any amino acid
MKRVVFMFAFILAGISAFAQNGVIKELSGTVELKNANSPAFVAAKAGDIVNQDTVVSTGFKSTALIEVGSTVITVRPLTRLTLTEIKATSVSETLNVNLQSGRIRVDVNPPAGAKASMAVSSPSATASVRGTSFEFDTRNLHVISGNVIFKGIRGVSTLITAGFNSTTDHKGSAVNPLAFGDAAYKPHMPVGTQANASPAPIVTGSGGETTPTEPGKPTPRLIRDTDPVRLIQDKHPPARAAY

SEQ ID NO: 85555 - protein, 538 aa, Unknown
  Obtained from environmental sample
  DOMAIN (4)...(158): Pterin binding enzyme
  misc_feature (1)..(538): Xaa is any amino acid
MCAFLDLALSDPEIAKVPVMIDSSRWSVIEAGLKRLPGKGLVNSINLKDGESEFLRRASLIKRYGAAVVIMLIDEKGQAVNFDRKIEIAGRAYRLLVDSGFPPENIVFDPNVLAVATGISEHDACAIDFIRACAWIRDNCPGVNISGGISNLSYSFRGNNKVREAMHSVFLAHAQAQGLSMAIVNPAALIAYNSIEENLRNAVEDVILNRSPNAAERLLELAEQIAAASSSIPNSSFLIPHSSSSDWRNQPVEKRIVHAMLRGIDDFIEADVLEMLTSSPSSSAIEIIEGPLMDGMKEVGKRFDEGTIYLPHVIRSARVMKKAATALEPYMGKVNANGSNAPKIILATVKGDVHDIGKNIVGIVLACNGYQVIDLGVMVSAEQILDTAEKEQAAIIGLSGLIAPSLDEMAHIAREMEKRRMLIPLLVGGAAASLVHTSLRLAPEYSGPVVYVPNAGKSAETVRALLSDSQRPRFLQELEKSYQEAARRHEEIQSHLELISLEAARANRVPSAVYKPVAPKTACLSAGNTQTGHLHGPT

SEQ ID NO: 85556 - protein, 155 aa, Unknown
  Obtained from environmental sample
  misc_feature (1)..(155): Xaa is any amino acid
MDAKQAIIETRTYLGIELGSTRIKAVLIDTDYAPIATGIHDWENRLEDGVWTYHLEDVWAGLRDCFSKLILDVKNRYGLTLSSVGAIGVSAMMHGYLVFDKNGDQLVPFRTWRNTITEKAAASLTDKFNFNIPQRWSVAHLYQAILKRRNHCKGY

SEQ ID NO: 85557 - protein, 142 aa, Unknown
  Obtained from environmental sample
  misc_feature (1)..(142): Xaa is any amino acid
MAAALSPYRLGKARDIYNLFNIFNAVSWAFLAGNIVTLLALRMGANSTYIGIINAVLYVAFFFLPLGKILTRRFSIIKIYSFTWASRAIGMIPLLLAPFVFAFGYRDIALFLILIGVVFFHVIRSIGLVAHNPVLSYLSQGS

SEQ ID NO: 85558 - protein, 138 aa, Unknown
  Obtained from environmental sample
  misc_feature (1)..(138): Xaa is any amino acid
AYREFRHQKSRITQALMITGTSAAGAAAGMNINQLTDVFNESVGEIVQTIVNNGYSQTQEFDADNTALSLLASAGYSPSGLIDMLRELRAVQSGSSGGFNKTHPTPAQRITNAEKSVNKYSVTDTRSYRQARFGSATR

SEQ ID NO: 85559 - protein, 167 aa, Unknown
  Obtained from environmental sample
  DOMAIN (24)...(152): Histidine kinase-, DNA gyrase B-, and HSP90-like ATPase
  misc_feature (1)..(167): Xaa is any amino acid
MAQHQFQTEVSRLLHLIIHSLYSNREIFLRELVSNASDALDKLKYLTVADDAYKSVNFDPRIDISFNKDAKTLTISDNGIGMNEVDLIESLGTIARSGTRAFLEKLAEDAKKDSNLIGQFGVGFYSAFMVADNIEVVSRKANEDASWKWSSDGKDGFEIERAERDSQ

SEQ ID NO: 85560 - protein, 289 aa, Unknown
  Obtained from environmental sample
  misc_feature (1)..(289): Xaa is any amino acid
KEKSPGKNKHRGLVPGTGLSDCVTQIVRDSGIAEYHEMQDDVTGNNKLNNLQELVNAASEYPQTSEGLLEFLEDIELDRSLKDNAPQDAQNSVTLITFHNTKGLEFKRVIMTGLEHGIFPREDKKDEELEEERRLFYVGVTRAMDELYLTSCMMRRMYGKTMPMQPSLFLHEIDTSCLQIKELAPTQSAATPYYTGKRPLIGRNFNPLNPQSLHASGSTSSGTNAELEERAGWRKGQRLFHEDHGYGAVMGVKDSEDGPVVHVRFDSGQDKRFLSDIQGRAYEKIGEDC

SEQ ID NO: 85561 - protein, 250 aa, Unknown
  Obtained from environmental sample
  DOMAIN (23)...(174): Anthranilate synthase component I, N terminal region
  misc_feature (1)..(250): Xaa is any amino acid
MFKPSLEEAKRIALMGKYDIIPLSTEMYADMVTPVDVIKKLKNVSGHCFMLESAEDTKNWGRYTFLGFDPTMEITCLNGEMNISSSDSGETKSFKTDNPNKYIQEILDSHKSVKFEFLPPFTGGLVGYFAYDYAKYCEPSLKLDAVDEERFNDVDLMLFDKVIAFDNYRQKIILIANIKAANIESEYEKGKLQLESLKNLIKNGQHEKTPQAHVKSDFKACSPKMNTARMWTGRKITLEKRYFSGRGIQR

SEQ ID NO: 85562 - protein, 152 aa, Unknown
  Obtained from environmental sample
  misc_feature (1)..(152): Xaa is any amino acid
AHEGTVIHVPKNQAWEVNHDLGGMIPKIDDAPWPGFPARSYQHNNRCATQINGTVLVHEKMYESRMFFVDKLIGMGARIVLCDPHRAVISGPAKLHGSELISPDVRAGMAMLIAAMCAEGKSVIRNVYQIERGYEQLAARLSSLGANITRND

SEQ ID NO: 85563 - protein, 66 aa, Unknown
  Obtained from environmental sample
  misc_feature (1)..(66): Xaa is any amino acid
MRTDTVLKVEAIDLLLRTFGVLETERFITSIKSNNFDYTEWHKNLWKDKSINEIHNTRAECCPSAK

SEQ ID NO: 85564 - protein, 343 aa, Unknown
  Obtained from environmental sample
  DOMAIN (1)...(343): Polyphosphate kinase
  misc_feature (1)..(343): Xaa is any amino acid
MPSVLDRIIWLPAHDSQTGAAEKEKLQLTLLEDVIITWGAYLFSGYRVKESMLFKINRDADFSVDERRDEDFVEAMAEVIEGRDKSDVMRMVYSSGSEKLRDELARRFSLETDDLYEVDGPINPVDFLELTNIAGLEKLIEEPWKIHKSKEFSEDIPIWDRISQGDVMLHLPYQSFDPVVRFFQEAADDPNVISIKTALYRTGGAIPGSGMQVSSSAFSPVVKALEQAALNGKHVTAVVELKARFDEERNISWAKRLEKAGVIVVYGLSLLKVHSKITMVMRRENDRVRRYVHLSTGNYNYRTARYYEDICLFTCREDIAYDASLMFNMLTGFLRLGRSVIAN

SEQ ID NO: 85565 - protein, 221 aa, Unknown
  Obtained from environmental sample
  misc_feature (1)..(221): Xaa is any amino acid
YCGLPKKTRNLPLDERLKLCRDHILRQNEKRYNINNNSSLSFNERLELVINAALETAERMLGIKSEGDSFSRMHKVRQICWDRIYLPGIDKLEHLSYIQRNTIDLGAGEAWYIGRHQELVDFCLFFRSPPPTEKSSLHSKIEYIQNLWNFACRTMGGAVDDRNNIFVRKVIIQPGSIIKLSDYLPEYNKDKKTTISQVMSRLEKAFLDCIDEADRTEKDRY

SEQ ID NO: 85566 - protein, 143 aa, Unknown
  Obtained from environmental sample
  misc_feature (1)..(143): Xaa is any amino acid
MKTITTIGIDLAKNSFSIYGVNAKGKPVMQRTLTRAGVVRFFAHLPACLVGMEACASSEYWARTLESLGHEVRRIHPRYVKAYLLGAKNDVNDAAAICEAVQRPNMRFVSHKSPAQTDIQCIHRIRQGFVRSRTALVNQIRGI

SEQ ID NO: 85567 - protein, 403 aa, Unknown
  Obtained from environmental sample
  DOMAIN (20)...(396): Glycosyl hydrolases family 38 C-terminal domain
  misc_feature (1)..(403): Xaa is any amino acid
SLSREGRCSKACGDDSETVFPVQRYINLDGKEIAVCCPRLPPLGWITLRAAEFSASSCFTFRGNSLKTPFYEVGFDVAGRITSLFDIMGDRELVAPGGVLNGFVSAQDVPVLWEAWDIEADWTRYLTEETRLLSTEIAASGPVCFRIRRKYKIGEASILSQDTVFYTENPRIDFETLVDWREKQRLLKTQFDTAINTAQIRCEVQFGHLSRNTHKNLPQDRARFEFCAHKWVSLEEEGGGIALLNDCKYGHDAEGGRVRLTLLRSPTAPDPDADTGEHRFTYALLPFAGTFGESALVRSGYELNDPAHVEPTFGSLLTSDSQADEYSLFRTEGKSVIIETLKAPETSAADGSEKRLVIRLYESLGGPAKTVLHFNKALLSAVETDMLKRIPEHCLLGRSDHCS

SEQ ID NO: 85568 - protein, 181 aa, Unknown
  Obtained from environmental sample
  DOMAIN (14)...(178): Electron transfer flavoprotein domain
  misc_feature (1)..(181): Xaa is any amino acid
MSAENSVMVYVQQNASAGADGGKAAEVSLELVSKARELADKLGVEVSAALFGDKVSGEVPRLASLGADRVYVMEDPRLKYYTPIPYSKLMIQTVSERKPQIVLYGASTEGRDIAPRVASHLKVGLTADCTDLQIGDHTQQETEYKNILYQNTSRLSGGNIIAHHRMPGEETPRWPQSREGR

SEQ ID NO: 85569 - protein, 526 aa, Unknown
  Obtained from environmental sample
  DOMAIN (359)...(392): Tetratricopeptide repeat
  misc_feature (1)..(526): Xaa is any amino acid
AGYNVIVALDICRKKEIAKEGISEDKSYALPATKKLLDYAMVFQRRFPQGQNAPDVLYLAGNIHYEGKNFSEAVTAFKMVVDQYPNAKIAPKAARMLGNSYSSNNQFDLAMQTFKALLARTQRDSKDYEEINELAAGAMYRNADNLKKSGNLAGAAAAFQAIAGEFQQGKVAEKGWFEAGVCFEEMKEFDRAAGIFEQLPERFPKGTLRESAYIRAAENYKKKNDFGRAAQIYLTAANQIPKAEFAIPSLSSASECYQKLNQYDMAGKMFELIYERYANDPKTPQALYNAGLIFEKGKHYHNAINVYETMASRYPSSEFAAEAFFSIGLCWEKLEEFGKMANSFSDYAEKYTTDRYKQVQALVKAGNAYFNMQNFTDSKNNYDKAVKIYEQYSKTSDIDVANVAEAYFRVGEIFYKKFEDIKLTAKNEKEMVAVVKQKTKALEEPAKYFAKAIELGVEEWTMRATYMIGKGFYDMAEAVANQTLFGNEEERMGGKIKVLSSLDKYYDKAMEYFGQNIAGEARHLIL

SEQ ID NO: 85570 - protein, 83 aa, Unknown
  Obtained from environmental sample
  misc_feature (1)..(83): Xaa is any amino acid
MNRRKMDYTEAPKNISRAITEGEIVADFLPPPEELVRKEPKVKITITLNTGSVEFFKKHARKNNVKYQTMINEVLDKYVQRYR

SEQ ID NO: 85571 - protein, 110 aa, Unknown
  Obtained from environmental sample
  misc_feature (1)..(110): Xaa is any amino acid
MVQRVYEQAKQVFERCYVATDDERIYAAVQSFGGKVVMTSSTHQSGTDRCAEAIVKIETEFDEKFDVAVNIQGDEPFIAPAQLEQLKGCFYDSGVQLATLVKKFGKDEDI

SEQ ID NO: 85572 - protein, 118 aa, Unknown
  Obtained from environmental sample
  misc_feature (1)..(118): Xaa is any amino acid
VIARAEHLLRELYGALEGVTLPPDVKITINTLQGVLFMGIMNDVSFEIGGKLVILIEHQSTINPNMALRLLMYIGRVYEKIVGDMNVYSSRQLRIPRPEFYVLYNGIAPYERRKKREE

SEQ ID NO: 85573 - protein, 204 aa, Unknown
  Obtained from environmental sample
  DOMAIN (20)...(203): Domain of unknown function (DUF377)
  misc_feature (1)..(204): Xaa is any amino acid
MRTNINESHVSGIIINGSSLPNIPWEERPPSSNPKKELMWRYSKNPIIPRDLTLRSNSIFNSAVVPFKGEFAGVFRCDDTARHMDIHAGRSKDGIHWVIEDEPIKFIKDNPDVPDSDYKYDPRVIFIEDRYYIIWCNGYHGPNLGIGYTFDFEKFYQMENALMPYNRNGALFPRKIEKNTPCTAAPAIRGILPLEIFFILKAPD

SEQ ID NO: 85574 - protein, 396 aa, Unknown
  Obtained from environmental sample
  DOMAIN (184)...(394): DEAD/DEAH box helicase
  misc_feature (1)..(396): Xaa is any amino acid
LQVTFEQILQEFRDKSFSERDKGYRFERLMQSFLKTLPEYADYFTKIWLWNEFPSRGDFGSGDKDLGIDLVAMTKYGDYWAVQCKCYQEDAVIDKPKLDTFLSTSGKTFFDIAEAGKKATFACRLWIDTTVKGFNREAESTIQNQTPEVKRIGYYQLADAVVDWQKIYDGLSGSKAAVKKYGPLPHQQTAITKTHEYLKTNDRGKLIMACGTGKTFTSLRIAEKETSKNDGLVLFLVPSIALLGQTLREWKAQCARPLHAICICSDAAVSKSGKNNNDDTNQISVTDLCLPASTNIKNITRQVANARNSQKSEGGNVVVFSTYQSIDVISEVQKTFNRAKKDSFLFDLVICDEAHRTTGVTLADQSEAAFVKVHDDKFIKPKSVLQTVPEICRICH

SEQ ID NO: 85575 - protein, 288 aa, Unknown
  Obtained from environmental sample
  DOMAIN (58)...(281): Domain of unknown function (DUF323)
  misc_feature (1)..(288): Xaa is any amino acid
MRKLILTTAAVAAAIGLAGCSKTPTPKSVSATPDTAALSVDTPPADASAFSETAVGGQSFEMAFVAGGTFTMGCAAEQDSDCDDDERPAHSVTLSDYYIGKREVTQGLWKAVMGADNNPSYFTGSDNLPVERVSWNEVNAFIDSLNRKTGRTYRLPTEAEWEYAARGGNKSGGYKYSGGDTLGSVAWYWDNSGRKTHEAGTKAPNELGIYDMSGNVWEWTGDWDGDYGSDAQTNPTGPSTGSGRVGRGGSWFGDAWGCRVSIRSVNDPDYRYDGMGSACCSAESVNGP

SEQ ID NO: 85576 - protein, 303 aa, Unknown
  Obtained from environmental sample
  misc_feature (1)..(303): Xaa is any amino acid
MILRSEIKDQQYGIIGGYANVEWKPTDKLLLIPGVRYDYYPELDYEGSVLPAFWDYGFMDNRRGWSGEPSFRISGRYRLTDKHTLKAATGAYSQSPEPTGIVINKDFGNPDLPSTKAAHHIAGFEWQINDLISLDAQTYFNRIWDVARSYDERIDYDPTLDRQRRYFSDGKQRMYGLELMLRHSRSEKFFGWISYTLAKSELWSKQEEKYILSNRDEPHNLQLLGSWRLKDNWEVGTRARFVSGKPTSPIIATIESENGRNIRPVYGAQNSTRQDPFFQVDARIDKKFIFDKFILTYYWILSI

SEQ ID NO: 85577 - protein, 196 aa, Unknown
  Obtained from environmental sample
  misc_feature (1)..(196): Xaa is any amino acid
MTFYQFMSKFPTEEAAINYFIKVAYGGILTCPHCGSKTRVYRYRQLQKLCNCKNCLNSFSPFTGTIFEKSTTDLRKWFFAMRLFLNDRKGVSSLNLHREIGVTQKTAWNILQKIRLVMEEKDMEPFDSVVEIDETYVGGKPKYTPPPKGIDFSLLDSSEGYSMIEYIEDNPSWTSKLRVGPGDKKKLSFWALNAGI

SEQ ID NO: 85578 - protein, 325 aa, Unknown
  Obtained from environmental sample
  DOMAIN (182)...(296): Response regulator receiver domain
  misc_feature (1)..(325): Xaa is any amino acid
KQVSDRPSGTRKDASKVVSVVNFRVDEKQQKLAVHIDKDIPKTLIADDQRLAQVVANLLSNAVKFTPEKGAITLEARFKGEDRGLCTIQISVADTGIGISGEQQKRLFNSFQQAESSTTRKYGGTGLGLAISKSIVELMGGKIWVKSESHKGSNFAFTIKARRGTTKEKGALLVPGIKLENIRILVIDDDPDILAYFSDILHEYGVNCDTAISGEEALQLVEKNGPYHIYFTDWKMPVMDGIQLTRELKTREPHNSVVIMISAVEWNVISEESKKAGVDKFLSKPLFPSTIFEAINECTGVEKEQEKKIRQLSAVHTTGRHILLV

SEQ ID NO: 85579 - protein, 57 aa, Unknown
  Obtained from environmental sample
  misc_feature (1)..(57): Xaa is any amino acid
MTDWTSDPFGNSGCDVRVVQELLGHASISTTQRYTHVNMEHLKKTYKKAHPHGGEKK

SEQ ID NO: 85580 - protein, 58 aa, Unknown
  Obtained from environmental sample
  misc_feature (1)..(58): Xaa is any amino acid
MNEKSVDRLSPREIVVELDKYIVGQKKAKRAVAIALRNRIRRLKSARKSGTTLRQRTY

SEQ ID NO: 85581 - protein, 85 aa, Unknown
  Obtained from environmental sample
  DOMAIN (4)...(79): Bacterial export proteins, family 3
  misc_feature (1)..(85): Xaa is any amino acid
MTIESVGALLRGGVFQILLIASPLLLSALLVGLVVAILQSATSIHEQTLTFVPKIFAIMIILALLGRWMFTSLGQYTIELFRRIP

SEQ ID NO: 85582 - protein, 327 aa, Unknown
  Obtained from environmental sample
  DOMAIN (150)...(323): Stage II sporulation protein E (SpoIIE)
  misc_feature (1)..(327): Xaa is any amino acid
MIAEKMKVFSLECGHNSSGVLLSHSTDNMEAILGNLSQEVHSIILVPLLQETELLGVLVLENKIGLDYLTEADFNMARSFANFAAIILNTSRVATQKHENLRMSTELNTGNLLQSALFLNSVPKVAGIDVSFFMSPAKEIGGDYYDFFEKGNKFALTIADVSGKGVSAGIIVAIMQTYLQNQYKRENDLKKLIVDLNKYLSTKITTGMFFATLLFFEWDIKQKKLNYVSCGHEHILHFHAKTGTIECIRSGGLALMMDADIDPYIKNAELDVEKGDSIILYTDGITETFNPEKEIFGLERLCGIFYKNSHKQKLNRKTATPNPRKMA

SEQ ID NO: 85583 - protein, 186 aa, Unknown
  Obtained from environmental sample
  misc_feature (1)..(186): Xaa is any amino acid
ADIEANFAQIQKSQEEAWKAIRETQQAHKETEKAIKEAQQAVKETQKNIGGLNNTLGSIVEHLLTPSLPKKFKKLGYSFNRIATYKFAEGVYAQIDGMLENGAQAVAVEVKTTLRQADIDEHLARMEKIRKHADEYGDKRQFMGAMAATITDESTRNYALKQGLFVIEPSGENVKVTKPATEPRIW

SEQ ID NO: 85584 - protein, 303 aa, Unknown
  Obtained from environmental sample
  DOMAIN (148)...(302): Nicotinate phosphoribosyltransferase (NAPRTase) family
  misc_feature (1)..(303): Xaa is any amino acid
MENSALFTDFYSLTMAQGYWKRGQNERAVFEMFFRTQPYNGGYAIFAGLGTLLEKLTNFSFSNEDIEYLKSLSVFDSAFLDFLKTFRFNGSLWAMDEGTVVFPQEPLIRVEGSLIECQIIEGMLLNTVNFQSLIATKTCRIWLASGKGKLMEFGMRRAQGFNGAISASRAAYIGGANGTSNTLAGKIFGIPVMGTMAHSWVMSYDSEEEAFDAYAAMYPDRSIFLIDTYDTLRSGIQSAIKSGKKLAEKGKNFGVRLDFGDIQYLSTEVRKRLDEAGLKKRLLRYPAIRREYYRDLVKTAFRR

SEQ ID NO: 85585 - protein, 319 aa, Unknown
  Obtained from environmental sample
  misc_feature (1)..(319): Xaa is any amino acid
KRVIASWGPVEGFGGTYATQENFRIMRVALDEASEKQRRYVYLTNYASGLCMPEIAVMGALERLDMMLNDSMYGILFRDINMYRTFVDQRFSRMVNAYAGVIINTGEDNYLTTSDAVEKAHTVLASQFLNERFAFEAGLPPAQMGLGHAFEMDPTIKNGFLMELAQAQMAREIFPDAPLKYMPPTKFMTGDIFRGVVQNALFNFVSQLTGQGIHLLGMLTEAIHTPYMQDRALALENAKYVMDNMADLGDEISFREDGVIAARARQVLKETVEFLGQVAEKGLMESMEQGAFADIKRPRDMGKGLDGLVRKGGDYWNPA

SEQ ID NO: 85586 - protein, 83 aa, Unknown
  Obtained from environmental sample
  misc_feature (1)..(83): Xaa is any amino acid
MVKDENNLLNWLHFFKARTREEFEAVAATNPEIREAVDILYELSADEKGRAEYNARHKAWMDSQSQFDGYFKKRQVEGKIEVK

SEQ ID NO: 85587 - protein, 245 aa, Unknown
  Obtained from environmental sample
  misc_feature (1)..(245): Xaa is any amino acid
MRIQDALIKLLMIQPFYGALASVLSIKESDAVKNKEMSLLPSPSLKYNRKWYEELPDAQAVGALMHELLHLLLLHALRQGGREPLLWAICCDMAANDHIPCEMLPDNAVTTEQIELIVKCKLERMRSAEYYYNKLSGLPENSISLLKHEGAVTLPKVNGSMMEADIQKEKDIDNVNEAALKNKLHEIVETASQNGELPPDLLHKIEEIEKQDDELPPDLRRNFVISPKRSKIDWKNMFKRFLSGR

SEQ ID NO: 85588 - protein, 322 aa, Unknown
  Obtained from environmental sample
  DOMAIN (8)...(317): tRNA (Uracil-5-)-methyltransferase
  misc_feature (1)..(322): Xaa is any amino acid
FLGEQVNGKKDILIDCVTRIGKFDYPPDVEIFKANDFGYRIRAQIKVDYENNVAGFFRKKSNDVVRVDRCLLLDERINGVLAKLNGGMIRGINTAILFDNDNGCVGAATCRPPSPTSKKYINGVSGIKILAGDKIAGDPVIDGLTDATTEINVSGIKFLADGGSFFQSNGFLLERLGRWAGGLLGGGFCLDLYGGIGFFSLMLADDFDEIALVENVAEQVRAAERNFAVNKKDHIRAVLADVERGGGLQKAAGGRRPDCVVVDPPRPGLVKAMRKWLIETAPRSILYVSCNPSTFARDAGALLGGGYKLTNLACSRAARPSS

SEQ ID NO: 85589 - protein, 249 aa, Unknown
  Obtained from environmental sample
  misc_feature (1)..(249): Xaa is any amino acid
GDKEERANCKQKLAEKLKEEEGYEIALCGDTIELLATVLFGEENPPAMEVPPVKVAPPVKVKLEPPSGTFTDPRDGRVYKTVKIGEQVWMAENLAYNEPGSKCYKNDESNGKKYGRLYNWDAAMKICPKGWHLPSNEEWQTLVDFAGGEEIAGKKLKAKSGWKDGFDGKSGNGTDEFGFSALPGGNGNSDGIFYTIGDEGYWWSSSESGSYNAYARTMSSYYEDTYYRSNAKGFLRSIRCVQDSQPRKN

SEQ ID NO: 85590 - protein, 164 aa, Unknown
  Obtained from environmental sample
  misc_feature (1)..(164): Xaa is any amino acid
MESALIISCAEKETAFFTELLSSASINHIASIKSVESAHKIILQEDFDLVIVNAPLGEEGGEIFARYIASRGIAQVILLVKNECFDSVSAVCENNGVFVISKPVDKAFFLAALSLAKSAQNRIKTILNENVQLKQKIEDIRIIDRAKCIFISIMKMNEQGSHKY

SEQ ID NO: 85591 - protein, 78 aa, Unknown
  Obtained from environmental sample
  misc_feature (1)..(78): Xaa is any amino acid
MIKPVSVAALPVAENFVIQKNRIENNTGPETASKRVCIVTGTHGDELEGQYVCARLAKILSDGKHKLSGIGYNPRDNP

SEQ ID NO: 85592 - protein, 324 aa, Unknown
  Obtained from environmental sample
  DOMAIN (161)...(305): ATP synthase alpha/beta family, nucleotide-binding domain
  misc_feature (1)..(324): Xaa is any amino acid
MTRGIVVDDAVEFSGDMLAVELGPGLLTQIYDGLQNPLPQLAEKCGFFLERGEYLDPLSLAKEWDFTPVAKPGDKVGRADTIGTVPEGVFKHRIMVPFNMYKEYTVKSVKPAGKYKIHDTVAVLADDKGEESNVCLSFNWPVKRAINCYDERFRPEVPLVTQIRLIDTFFPVARGGTFCVPGPFGAGKTVLQHQMSQHADVDIVIVAACGERAGEVVEVLKEFPELIDPNTGKSLMERTIIICNTSSMPVAAREGVALYRCNHGGILPPDGPSRATPRGLYKPLGAGPPRNVRAPGRNPWRRSVPRLPGIDHRRLLRKGGPCEA

SEQ ID NO: 85593 - protein, 105 aa, Unknown
  Obtained from environmental sample
  misc_feature (1)..(105): Xaa is any amino acid
MAKINMKTPLVEIDGDEMTRVLWEVIKNKLLLPFIDLKTEYYDLGLANRDSTNDEITVKSAEAIKKYGVGVKCATITANAARQKEYNLKHLHPSPNATIRALLDG

SEQ ID NO: 85594 - protein, 377 aa, Unknown
  Obtained from environmental sample
  misc_feature (1)..(377): Xaa is any amino acid
MQQESRKSLLFLYKLGFTGAKAMLAWNLYKTQTEDMVSENPYILCEEPFAYPFEIADNAAKKIGFEESSGLRLRAAILHVLREAKYDGGHSFMPPEILLQNALNFLRITPSFPDDDIFDYLYTALSDLKKAEKVIIQQERVWLPELYEAEKYIGTFIRSALNSGHLETLHSDAEINAAASSLEISYSNEQLKAIKDAVSNMFFVITGGPGTGKTTILKGVLHILNLQKKKVMLAAPTGRAARRMAEVCRFKASTIHRLLEIDPISGLFYRDEMNPLEANVVIIDESSMLDNELAADLMRALRPGTQLILIGDADQLPSVGPGNVLREILSCPEVAKARLSKIYRQGESSDIAENAHRILAGKMPNCKTAPRPNLTLV

SEQ ID NO: 85595 - protein, 193 aa, Unknown
  Obtained from environmental sample
  DOMAIN (1)...(183): Iron only hydrogenase large subunit, C-terminal domain
  misc_feature (1)..(193): Xaa is any amino acid
VVEVAIGADITSDKEAAEFTERMEKGEKMMTTSCCPAYVRAVNRHVPELANCISGTCTPMHYTAEIAKKDFPDCITVFIGPCLAKRREGMDDDLVDYVISIEELGAFFVAKEIDVAKADPKPGSKLPTCTGRNFAKSRGVAASVKARLKDPSILTEAVIDGLDKTTIKTLAEFGKINTGGTSAQGRHAPILLK

SEQ ID NO: 85596 - protein, 314 aa, Unknown
  Obtained from environmental sample
  misc_feature (1)..(314): Xaa is any amino acid
FGESVDSLESEDSLKSADPLESAEPIEFEADIESAITEAPVPAAEPVGIVQKTQASLPVIPVEKETVKETQTLDLSTQLLMKIAEELSSIRSELSTLKKEFSGLRAAPPQAESSEKTYEEDDEKISLTGDEMNNIINTADFTEEAGSDAAIGLSDNEDNSDELNLSTADLDVEIDLIDSNLENLEGETKLGNSSFIDDNIDDNVNENNQISSEARIEIPDDSILDFSSDENDELNDILENGIEPMAPAPAPEDTNYLAEDPLAENSVSEDSLPDLAEMTVDTPLDFSEGIDEPIDLSETVSESIDLSEAVIDEP

SEQ ID NO: 85597 - protein, 212 aa, Unknown
  Obtained from environmental sample
  misc_feature (1)..(212): Xaa is any amino acid
MYSPTWGFYIDLPEGYEYVDGDARDRFSFKGPGGAMFDAAVYYGRYENLHELMNDVNRSIGNKGDVDYYRYNNRQTAIMELDFGDYHGWAIAVELDKNKGQQPMLLALAYGLSDLKELELFHISALDSICPSKEERRYPGPVIDYSYPRGGQKKVTIVAGNINVMVRENDAEAAQVFIEREFQLLQNYVNSQKWQERVDSLYRSRPSSPPPN

SEQ ID NO: 85598 - protein, 91 aa, Unknown
  Obtained from environmental sample
  misc_feature (1)..(91): Xaa is any amino acid
GYGEVAVYTSVAFDDFDSLTVIPMTTIEVNSDFRVKIEPSKENNLGRVGFVMIDKLTTIKKSGLGEYIGHIEDKYVDQIESALLKFIGVKR

SEQ ID NO: 85599 - protein, 95 aa, Unknown
  Obtained from environmental sample
  misc_feature (1)..(95): Xaa is any amino acid
MKIFGGEVLFLDRNDINTDEIIPAKYLTEDTREALKPHLLEDLKLKGFDPLLDIKGKGAVLARANFGCGSSREHAPWAFEVNGINIVSRKLLAIT

SEQ ID NO: 85600 - protein, 181 aa, Unknown
  Obtained from environmental sample
  misc_feature (1)..(181): Xaa is any amino acid
MIGLFALAFFFQILALIFSAPPEFKLRNKEETIAALAIFILVFIGGALFVRPFQEKAVDKGGGLLEPKLFRFDFSQVIRLESEISVNDDLVLIVKKDPYDSHILLRRYTLSAYNPRQGFFRLGDVDEAAHPQNLPSRRTSLPNEEIRNYRESEQEYYIVNLILPLYRDEYSADLILGPPQS

SEQ ID NO: 85601 - protein, 481 aa, Unknown
  Obtained from environmental sample
  misc_feature (1)..(481): Xaa is any amino acid
VSQKESYTGSMEAVLQARLNGETLFHFERPRLNSLFMEAVKYPLVVVCAGAGYGKTSAVHDFLEKYEATTAWVQLTDLDNDRAHFWETNVHAIGQINRDLAKATNKFGFPDTKEKLNYYATLMQKHTDLKRRIIVFDDFHCIDDPLIIRFMEECILFKMPPGTSVFLVSRSVPHINLAGMIYRDQIFDISENDLRFTESELAQYFHSRNNYIQPESLREVMRDTGGWAFAINLIARSYQKAPGYGGYLQSAMKTNIFQLIETEIWDEISERLQSFLVRLSLIDHLSVDLISLLAEEDETLIAELERQNALVRRDSYVNAYLIHPLFLEFLRKRHGLLSEDQRKKTYAIAGGWCSKNGFRIDALSYFEKIKDYKSIIYILFGLPAQIPDEISRYAASIFDRAPAEDFDKVEFLAEMHLRTYMCQGNWQKSLELGEYYEKKFLKLPENNPVARRTLARLYVCWAFIRALGGLTDDVHNFDIYL

SEQ ID NO: 85602 - protein, 135 aa, Unknown
  Obtained from environmental sample
  misc_feature (1)..(135): Xaa is any amino acid
MIKLSAELEKNIRTDGETAYPNECCGVLIGDIDNEGIKTARSTLTIDNAREDGEQYHRFLITPEDMMKAEQTARSMKLDVIGFYHSHPDHPSAPSGYDKDHALPFYSYVIVSVDNGKAQVLTSGTYDDLGRFVTR

SEQ ID NO: 85603 - protein, 284 aa, Unknown
  Obtained from environmental sample
  misc_feature (1)..(284): Xaa is any amino acid
LHLPFFKNENTQTAIWRDVVHVYQNMVSVFNYIFTEDHFNNLRYTVTFVYNDRTTGDSPLNRFHGDIVNAPASPSRTGYIFDGWYTDNGSFQNKYVFGTALIGDLKLYAKWNPINYTVVYNKDASGATGTTETSSHIYDESKPLTANGYSYTGYTFAGWARTEGGTVEFTDGDSVVNLTSVNNATVTLYARWGSEPYYIKYNKNSDEAEGTMETSTLFFGIEQDLEENSFTRTGHTFAGWARTSGGSVEFADKQAVIDLVNTVGATITLYAKWTVHKLSINYAS

SEQ ID NO: 85604 - protein, 328 aa, Unknown
  Obtained from environmental sample
  misc_feature (1)..(328): Xaa is any amino acid
LSESAEISIANKIGIETIKYSIDGEVVEIIKNPLRKKISPIILLPYDILRKLPFATTWEEIEDAAYKNNQLRAKFNHYLGGLFKAKTKAEKERQLASLMKNQEGINTLFEIINKANIKPYDFKADAESIMFIRHVSEVINNNPLGLSAVNNDINDLKNIVKTIIEQFKFLIENKGMNSLLWKDKKTPNVEKTAQKIFHLVAYSYCKANNIDINPEMDTGVGNVDFKFSKGFSKKVIVEIKLSTNYNIINGFSTQLNLYKISEETLSGYYIIIDVGHMGKKLENLYEIYNADITKKSEIFYIDALFKPSASKRKAQKYLFKKSEQTYQI

SEQ ID NO: 85605 - protein, 128 aa, Unknown
  Obtained from environmental sample
  DOMAIN (29)...(128): ABC transporter
  misc_feature (1)..(128): Xaa is any amino acid
MAFVQFSRVCLAFGDRDILKDVSLNLASGSRTALAGANGAGKSTLMKVIAGKLPADSGERSVQKGCRVSYLPQSGIVHHGKTLREEAETAYESILLLIARVEELGRELEKPQGTHAALARFWKSIIVY

SEQ ID NO: 85606 - protein, 352 aa, Unknown
  Obtained from environmental sample
  DOMAIN (1)...(352): DNA topoisomerase
  misc_feature (1)..(352): Xaa is any amino acid
EKTAFRGTRSVRSARANLRREKEVENFIPDEYWTLEADLKSRKTVYDAQLVLWNNNKPVLKNEAEVKAIIEKIKDKDFLVSDVRATEKTIRPKAPFTTSQLQQTAANKLGFTSRKTMQVAQQLYEGVGIGASRVGLITYMRTDSVRISQTALEDVRTWLEKNHPKELPEKPIEYTVGKNAQDAHEAIRPTYTEYTPDSVKEHLSKDQLRLYSIIWERFVSSQMTNAKSRTVSLDIKVIADNEEGLFRVSGTKLIEKGFYNVIKLLSSKEENTGSCPSLEVNDKVKIDKFKNEQHFTQGPSRYSDASIVRTLEEKGIGRPSTYAAIISVLLDRYYVTRSNKQLVPSAIKPKKK

SEQ ID NO: 85607 - protein, 317 aa, Unknown
  Obtained from environmental sample
  DOMAIN (158)...(280): Thiamine pyrophosphate enzyme, C-terminal TPP binding domain
  misc_feature (1)..(317): Xaa is any amino acid
KGNKGIASGGVSYAYTREALAQFNCDCKTLKISTYPFPEKLALSFLEGLDEVLVIEELDPVIENELIHLCGLYNLHIKILGKRSGHVQIAGENSPDSAIKTIGEFLNIQPPKAENKTSAAPPPLPVRQPVLCAGCPHRASFFAVKEAAKGREAVFTGDIGCYTLGNAQPLDMVDTCLCMGAGITIAQGLKRIAPDAVHFAFIGDSTFFHAGITGVINAVYNQTDIIVVILDNSTTAMTGNQPHPGTGVTMMRAQTENMKGINTAGQALHPAPTAPSAAEPRGIEPFVSSFARSCPCKHGRDLAPFVNKQIRHVIPKK

SEQ ID NO: 85608 - protein, 275 aa, Unknown
  Obtained from environmental sample
  DOMAIN (1)...(157): Respiratory-chain NADH dehydrogenase 51 Kd subunit
  misc_feature (1)..(275): Xaa is any amino acid
GGQGAGFLGNNILGTGLDFDIHVISGAGAYVCGENSALLNSTEGKVGRPRIKPPHLAEVGLFLKPTLVNNVESFAHIPAIIEMSGDEHLKIGHPDSGGTKLICLSGHVQNRGVFEIPLGKLTLREIIYDPELGGGIPAGRKLKFFHLGGKSGQIGGPELLDTVYSYTDLRKAGLGVGSGAIVVMDEAVPILEYLECVTEFFIHESCGKCIPCREGNRQILKILKKIQTSGADPSDLDLLRRLIRTMTDASFCGLGQTAAKAPGERVETLLRRKSR

SEQ ID NO: 85609 - protein, 850 aa, Unknown
  Obtained from environmental sample
  DOMAIN (319)...(347): The GLUG motif
  misc_feature (1)..(850): Xaa is any amino acid
NVTGTSSAVAGIVGNNANNCTVQFCVSLGARVTGTSNVGRVAGTVPGLGNNRARADMKIGASGAEATVSGNGSSSNGASNSIGTAQTSFYLSWDSSIWNISGDMTIGVNLATLKTNTQSPAPTLPAEYLVPGTAENPFLVTNEADLRKVGTETTAGGWTLSAHYKQTASITMMGGNFLRIGSSTTPFTGTYDGDGKTITGFTINGTNAYMGLFASIGATGTVKNMNVSGTITQTGGATATNTGGIAGGNDGTIDNCSFSGTVNGGTTSDYIGGITGQNNGTVINSRNNATISGRTSVGGIAGVNNGKIEKSYNTGSVTGIRQVGGIAGVNTGNSNYIKNCYNTGNVTSTEATVASEAGGIVGSNQSSATVEYCYNTGNVTGTSSAVGGIVGNNANNCTVQFCVSLGARVTGTSNVGRVAGTVPGLGNNRARADMKIGASGAEATVSGNGSSSNGASNSIGTAQTSFYLSWDSSIWNISGDMTIGVNLATLKTNTQSPAPTLPAEYLVPGTAENPFLVTNETDLRKVGTETTAGGWTLSAHYKQTASITMMGGNFLRIGSSTTPFTGTYDGDGKTITGFTINGTNAYMGLFASIGATGTVKNMNVSGTITQTGGATATNTGGIAGGNDGTIDNCSFSGTVNGGTTSDYIGGITGQNNGTVKNSRSAATVSGRTSVGGIAGVNNGTIENSYNTGNITGTNQVGGIAGANSGTGSFIKIRNSYNTGDITGTGAFVGGIAGTNQSSSTVEYCYNTGNVTSSTNTAGGIAGSVSAGSTLQNCVSLGGKVTSTNNPLGRVVGGANGTLANNRARSDMKTGASGSEVLQTGTATDRNGADVTVGSGTARDLCFSSAI

SEQ ID NO: 85610 - protein, 121 aa, Unknown
  Obtained from environmental sample
  DOMAIN (31)...(94): Bacterial regulatory proteins, gntR family
  misc_feature (1)..(121): Xaa is any amino acid
MTARMNKRAKQPADHKEPLNFTLDPVNGVPIYRQIIQQIEYAILSGRMRAGDRLPTIRALAVELKTNPNTIARAYNEMEIKGILVTQVGSGTYISDKKPVLDDDRLTKIRNLADLAICQAP

SEQ ID NO: 85611 - protein, 177 aa, Unknown
  Obtained from environmental sample
  misc_feature (1)..(177): Xaa is any amino acid
MDTLDKIKKAIKHAMNSEFYKKYYTGINVDDIKSMDDFRKLPFTDKEDLRDAYPLGLLAVPDEKIVRVHSSSGTTGAPVIIPYTQKDVHDWAIMFKRCYETAGCTSKDRIQITPGYGLWTAGIGFQAGAELLGAMAVPMGPGNTDRQIKMMIDLQSTVICATSSYALLWRELGQSVH

SEQ ID NO: 85612 - protein, 369 aa, Unknown
  Obtained from environmental sample
  misc_feature (1)..(369): Xaa is any amino acid
DVEITAICDIVPDAVEKARQRIVAAGKKEPAIYGKNEDDWKNLCKRGDLDLVFVVTPWLLHVPNAVAAMEGGAHAAVEVPAAIDLNGCWQLVEVSEKTRRHCMMMENCNYGRTEMMVLNMVEKGLFGTITHGEAAYIHNLRTPWYISKTNVGPWRRPMHTRFNGNLYPTHGLGPVCWYMGIHKGDRLASLVSFSSPEASLTEFMNEKLEAGDPRRGEKYICGDMNTSIIKTAKGRTIMLQHDVVTPRPYSRHNMIQGSKGCFADYPARIHIDGVTREHQWDNDMKSWDEKYGHPLWKELEEQAKLSGHGGMDFIMNYRLVQCMKQGLVPDFNVYDAAAWSAPFPLSIASVQSNGKPQDFPDFTKGLWKG

SEQ ID NO: 85613 - protein, 73 aa, Unknown
  Obtained from environmental sample
  misc_feature (1)..(73): Xaa is any amino acid
GYRERIVLPGMSGWNTLIKLQKLCKARNIPIVMYTSSEDEGDIEKANAFGAVGYIHKPSDRNTLLKELANLLN

SEQ ID NO: 85614 - protein, 127 aa, Unknown
  Obtained from environmental sample
  misc_feature (1)..(127): Xaa is any amino acid
MSEPSGHRPFALRRLHLTLAEAIVLVTYTAVVLLTSLQVFSRYVFGNSLPWTEEMARYCFMWLIYVGMVLALNRGTHASVDILSARCSGKGEDHGATGRAYHCRRSFRRAAVSGLAALYMVKGQLLG

SEQ ID NO: 85615 - protein, 165 aa, Unknown
  Obtained from environmental sample
  DOMAIN (1)...(163): Domain of unknown function (DUF323)
  misc_feature (1)..(165): Xaa is any amino acid
DYCNKRSVKEGLTPVYTVEGNKVTWNRSANGYRLPTEAEWEYACRAGTQTPFYTGDKLEDAGWYRGNTRNMETLARSPFPVGLKKPNNFGLYDMHGNVLEWCWDFFAPYTAAEQVDPTGPATGDRRVYRGGCWDFEKLNCRSAYRFRQHVNFRFFYNGFRVARSL

SEQ ID NO: 85616 - protein, 76 aa, Unknown
  Obtained from environmental sample
  misc_feature (1)..(76): Xaa is any amino acid
IIAKLIGGAGAGRKGDFVVIHDTGAHGRAMGFNYNGKLRCGELLLRRDGSIIMIRRSETVNDYFATLDLAGLKRFS

SEQ ID NO: 85617 - protein, 315 aa, Unknown
  Obtained from environmental sample
  DOMAIN (17)...(69): Y_Y_Y domain
  misc_feature (1)..(315): Xaa is any amino acid
GPEQRTSLPPERKLTVTYNGTENVTYQWQKDGEDVGSNSNKYTPTEPGEYTVTVSVPGYESKTVTVTVVQLYTIQIEKTGNVNGDTVTASPNKGVAGDTITLSYTVANTAPSNQLDFGGVNDSIASVESASMGSRTYTINAADSSNGVITITAIFTHTDLEIDHIVFNEHNEGHITKTYGDPAFTNAITEGLYKGSGAITYHSSNTNVATVNSSTGQVTILKAGSAVISAEKAADGIYAHAQTTYTLTVNPKPVTITGLSVSNRPYDGTRTATVTGTATISGKVASDTVNVTAGSALFVDKNVGTGKSVHSADIC

SEQ ID NO: 85618 - protein, 230 aa, Unknown
  Obtained from environmental sample
  misc_feature (1)..(230): Xaa is any amino acid
MKYSHERFIIGKLCEFRNREVEADFMEYEKATSLGLVRILILVLGFSFASFAVSDYYYYGTANELFVSLALRGAAIIITIVSSFLAASFKRFDHTLLLITFTELAVFVVYLLNLYASALFANSQQIGTPAITHFMSILVLILAVFLIPNRWKNCLFASFFIATIYLIFCSVFQGQDDSPSVLQQGLHLGICLEPAPFLFTARQVPKNKHFDGIHAAPGDLQDLERSPAVF

SEQ ID NO: 85619 - protein, 90 aa, Unknown
  Obtained from environmental sample
  misc_feature (1)..(90): Xaa is any amino acid
MKKIFKVLAIIAIVAVIGFSMACGGGGDDGNGNGNGNGNGNGNGNGNGNGDSTKTPVASDYDIGNLKQFKGIVSEVTITPKDGKSTGSYQ

SEQ ID NO: 85620 - protein, 119 aa, Unknown
  Obtained from environmental sample
  misc_feature (1)..(119): Xaa is any amino acid
MRKKAVLFVNTHKNNAQSAAGQIQAELEKRGFSVVVYSFDGKPERPPEGVWDIAFSLGRDGTVLYTARCLAPLGVPNPAVNMGSLGFIAEVDWNDWLSTYKNGKKAKYPFQKPCSWKSP

SEQ ID NO: 85621 - protein, 75 aa, Unknown
  Obtained from environmental sample
  misc_feature (1)..(75): Xaa is any amino acid
IRHEQMKMMLYVMPIAFFFILYDVPSGLLIYWIFSNILTLVQQVIINRYIHAKNEQVINQPEEKPIIAPKKKKNR

SEQ ID NO: 85622 - protein, 405 aa, Unknown
  Obtained from environmental sample
  DOMAIN (65)...(205): Thiamine pyrophosphate enzyme, C-terminal TPP binding domain
  misc_feature (1)..(405): Xaa is any amino acid
MLYGELLRHDPSDPAWADRDRFVLSAGHGSMLLYSLLHLAGYKDMTMDDIKSFRQIGSRAAGHPEYGMAAGIEATSGPLGQGFAMAVGMAVAETMLAARFNTADHKIVDHYTYALCGDGCLMEGVSSEASSFAGHHGLGKLIAFYDSNKITIDGSTDLAFTEDVAKRYEAYGWQVLQGSMYNFEEIAKLTAQAKAETKKPSMIILGSIIGKGAPNKQNTADIHGVPLGAQEVKAARANLGIPGDFYIAPEAQVFFSAKRQEWKKARADWQALFDAWSKKTPKSAGSGTSSIPVPQFPPPCLLTTLAKKLPPAPPAIKPYVPKRLLVPTWSAVPPTSRAPMPSAFPPMPEHGHGITLPDGTSILVSANSQWRQFATASRCTAACAPTVQPSWSLSIICARPCECPR

SEQ ID NO: 85623 - protein, 126 aa, Unknown
  Obtained from environmental sample
  misc_feature (1)..(126): Xaa is any amino acid
TNDRIGTRTQTARAYIAPELEQKIIESKYETSSGIVCAMEPPLQSAWIRAVKKSESAVINRGFQPVILCSEEARYLVKNSTERELPKLAVISVKEITPDIIPEALGIIRLEGAPSREGAPSKEGGE

SEQ ID NO: 85624 - protein, 332 aa, Unknown
  Obtained from environmental sample
  DOMAIN (198)...(317): HD domain
  misc_feature (1)..(332): Xaa is any amino acid
YRELTDSDLDLLLERILLEARKVIRADAGSIYVKQAEKENNVTTEKIAIKYAQNDTLQRQLPPGQKMIYSVYSLPINEKSLSGYCAFTGKMVNVPDMYNIPPEEPYSFNAMFDKMTGYKTISTLTFPLATADGRLLGVIQLINKKNEEGEVIPFSEGDEFLITHFAANATVALQRAFVTRAMILRMIKMAELRDPKETGTHVNRVAGYAVDIYDRWAYNNKIPDTERESFRDVLRISSMLHDVGKVAISDVILKKPARFTPEEFLIMQQHTLYGASLFDDPQSSIDKIAGGYCPLPITKTGDGHRGIRGWIDPGHSKFPIKTKWRKGKTGLG

SEQ ID NO: 85625 - protein, 76 aa, Unknown
  Obtained from environmental sample
  DOMAIN (5)...(35): Flagella basal body rod protein
  misc_feature (1)..(76): Xaa is any amino acid
MVRSLWTGASGMIGQQANIDTISNNLANVNTAGYKKMRADFEDLIYQTVKVAGTPATEDTVSRWVQISANLYMKFP

SEQ ID NO: 85626 - protein, 116 aa, Unknown
  Obtained from environmental sample
  DOMAIN (3)...(115): Domain of unknown function (DUF404)
  misc_feature (1)..(116): Xaa is any amino acid
MEMSVATAYEINKLMARYGVKFGIYKNGKFIEQLFPYDAIPRIISHDEFALLDKGLVQRVDALNCFLRDIYSDAKIITDKVIPEEFVYISKGYLPECAGIVPPEGVYSHFSANLSM

SEQ ID NO: 85627 - protein, 651 aa, Unknown
  Obtained from environmental sample
  DOMAIN (319)...(476): DEAD/DEAH box helicase
  misc_feature (1)..(651): Xaa is any amino acid
VSGRSVVDLLASAFLNEWVYRRSLAFRTSFGRQSGGQEYQELLNLFFYETEFDVSAPARRSLPQAIDRWLAVLHIDFTAYRYSLTVKDAHAKRAFGTDFKFSLSMDVITEEKDETRKIPLCQCKDLDALKAPIALSNYLPEIRQLASVSEKTRKGSVELSQTRLVNFLESASFLLSRLGMTVELPKSLHRELKPRLLVKADSAAKGSGSLKRYLDLNVLQDFEWQIAIGDEVISIQEFEKLVKQKQDLVRFRDGFIKIDTEELARLLKKAKDTKPDLNDFLKAHFSGDTILAFDVRKIIDNLFHEQNLPVPNSLNADLRPYQKRGFNWVCSLLLSGFGCILADDMGLGKTVQSIATLLRLKEDGHLEKGCLVVAPASLLSNWEKELERFAPSLLVSRFHGPNRVINRKFNVFLTTYQTAVRDVEKLKDVAFSVLLVDEAHLMKNVETRVSRAVKLLQSKYRLALSGTPVENRLEDLRSLFDFIIPGYLGNARGFQKQYRIPIEVMRSREQAEALRKITAPFLLRRVKTDKSIIKDLPEKIVANEYAVLEKGQAALYESVVSESIKKSEKMKGSERSSLILSMLTSLKQICDHPRVFDKESPAVSELSGKAQLLLTLLEEILVSREKVLIFSQYVKHWTALTLLSRRSVMAN

SEQ ID NO: 85628 - protein, 360 aa, Unknown
  Obtained from environmental sample
  misc_feature (1)..(360): Xaa is any amino acid
MDFSSSNTALWNFILQMGMIAAILIASNIIRRKVPVIKKMLMPTAVIAGFIALILRTFNLVKLDVKIMEMVTYHTIAIGFIALSLIIPKKETSYSKVFIGAKTGALIVSSYLLQGIIGLLISIGLAYTIRPELFKAAGILLPMGFGQGPGQANNVGSTYEALGFSGGQAFGLSIAAMGFLVACIVGVIYLNILKRKNLLRKVDETAARQTSNLDDYESKNEIPVSESIDKFSIQVALVFVVYLATWLLSFGITRILQASNAGLAKSLIPIIWGFNFIFGSLLAVLLRGIIRLFRNTGFMTHQYQNNYLLARIAGYSFDLMIVTGICTINFEKLSGLWLPFFLMCAAGTVLLNYLSADSDP

SEQ ID NO: 85629 - protein, 452 aa, Unknown
  Obtained from environmental sample
  misc_feature (1)..(452): Xaa is any amino acid
MLEHYGQSPIIVRSSSLREDNFGNAFAGKYESVFCANQGTPEERYAAFEQAVRTVYASTMNDDALAYRQRRGLTNLDEQMAILVQRVSGNHYDELFFPHIAGVGNSTNLYVWEKSMDPEAGMLRLVFGLGTRAVDRVSGDYAKIIPLDCPNKGPPVSYGDEKKFSQHKADVLDLKNNELSEVSLEKLADGDLKTDKDIFFTIDNEAVKRIRELGIKADSTPRIPDFKKLLTGTNFSEFVRTVLSKLRTAYNYPVDIEFTANFDTNGEFRFNLLQCRPLQTKGIGRVMEAPNPKQEQIFFSSAGDFMGGNIRLNFDYVVFVKATEYLELPDKDKYQAARTIGVINQKLKDKTVLLMGPGRWGTTTPSLGVPVHFSELCNMAALCEVSYPKAGIAAGMSLEAISFRISWNPICSTPRSLTANPASSSVPIRFYRGRTCLRNFTLKNKNGSRLYT

SEQ ID NO: 85630 - protein, 340 aa, Unknown
  Obtained from environmental sample
  DOMAIN (172)...(339): Domain of unknown function (DUF323)
  misc_feature (1)..(340): Xaa is any amino acid
MMAEPNRVFRSAGLINKTYGDVFTNAITGEHKGSGAITYSSSDTDVATVNNSGQVTIHKVGSAVISAEKEADLVYAPAQKVYNLSVNPKPVTITVSVENKQYDGDRTVKNTGTPVINGIINDDNVTVNEGTAEFESANIGVQTVTFSGWSLGGADAGNYTLSAQPSATATINLIEMVWVSAGKFMMGSPSTESYRDSDEGPQHSVTLTKGFYMGKYPVVQQQYEMLMGTNPSRFTSDPQAGEFISWRPVEQVSWYDAIVFCNKLSMKEGLSPAYRINGSTDPAAWGAVPTDNNATWNAVTIVEGSTGYRCRPRRSGNTRAELYGRRRRIRRRPHIACTHR

SEQ ID NO: 85631 - protein, 316 aa, Unknown
  Obtained from environmental sample
  DOMAIN (272)...(307): Sel1 repeat
  misc_feature (1)..(316): Xaa is any amino acid
AEKYRNGEKIETAYGTTLIATLWTDAFLLAVQIGDGSCVTMDSAGEFHMPVPVDEECFLSTTTSLCHPDAINKFRHYFTKEKPVVVIIASDGVDDSYGFNDPEASPKKLYGFYRKVMRDFKEKHEAGAIESAIAELKDYLPIMSEKKSGDDISIGVIADLDLLPVLAAEPVVVPVVEPEAPPVVASVAEPVVAPVAVPETGGNAESAFENGQKCYRESNYAEAARLYRLAADQGHAEAQCNLGMMYQWGEGVGLDYSEAMKWYRMAAQQGNSEAQYSLGLLYRSGMGVAHNDNEAEKWLRLAADHGHKGAQNSCAP

SEQ ID NO: 85632 - protein, 295 aa, Unknown
  Obtained from environmental sample
  DOMAIN (188)...(287): Peptidase family M23
  misc_feature (1)..(295): Xaa is any amino acid
LAALLGLFSHSISAENLVHMVAKGDTIYSISRLYKISQEELMRSNNISDASKLQTGMRLVIPSKTSPKAESPKTESSKTAGPPAVIAAPPANAVFFFYTVSKNDTLYSIARSRGVTLQALRDLNGFSKNYVLKTGEKIKIPGPAPAPTTVTITAAGKPPSKPSAQSTAKTADPSIRWPVAAKEVLYMSSNTGVLVSGKESESIKSLSGGLVVHASPWRGYGNVAVVETDEGYRYLYGSCETLSVRKGDTIEPGTELGKLGIYPASGKPDLVLIVSHNGSPGGSGKSPPDFREKMK

SEQ ID NO: 85633 - protein, 312 aa, Unknown
  Obtained from environmental sample
  DOMAIN (1)...(133): Domain of unknown function DUF21
  misc_feature (1)..(312): Xaa is any amino acid
MLETYDKLLSSVLIGNNISNIASSTLATALFIGLFGVNGVSIATLIMTILLMLFCDISPKALAKETPELTAMRVAPLLRFFVFIFTPVNFLTVAWKKLLMKIFPVKQDRSTTEGELLTFVGEVREEGGININEEKMIRQVISFDELKVSGIYTSRIDVSAVSVSDSVEEIDRKFRETGFSRLPVFQDTIDNIKGIIILKDFYHHVIREQKTPLEIIKPVVYVTKTIKISKLLRTMQKKQAYMAVVIDEYGGTLGIVTIEDIVEELVGDIWDEHDKRGGTCEKKHADRSYTVLGSANFRNMLEIIRDPRPHLF

SEQ ID NO: 85634 - protein, 130 aa, Unknown
  Obtained from environmental sample
  DOMAIN (66)...(130): D-alanyl-D-alanine carboxypeptidase
  misc_feature (1)..(130): Xaa is any amino acid
VVDESSQNIVEQEEKKEDDAITLELLRILKGDPYLWVLVDKTHPIGDYEPQDLVVLKSANYDNTEGIKLREVAAAALEEMAVAARKDGVKLNVSSAYRSKSYQTDLYNRYVKTMGQEATDRVPPSRTQPH

SEQ ID NO: 85635 - protein, 227 aa, Unknown
  Obtained from environmental sample
  DOMAIN (18)...(196): von Willebrand factor type A domain
  misc_feature (1)..(227): Xaa is any amino acid
MANLYDEAGPVSRRTMVLFFVVDTSGSMDGAKIGTLNRAVEEVLPEIQDISGSNADAEIKIAVLQFSHGAKWLTTEPVEVEKYSWVDLKAAGVTDLGAAYRELNAKLSRKTGFMKDEGTGYMAPAIFLLSDGDPTDDYKTPLEELKQNNWFKAAIKVALAIGSDVKFDILKEFTGNSETVLTVHTPEALRKMIRFVSVTASKIGSQSSGVGTTSAPASKEDDFVKQL

SEQ ID NO: 85636 - protein, 183 aa, Unknown
  Obtained from environmental sample
  DOMAIN (25)...(181): ABC transporter
  misc_feature (1)..(183): Xaa is any amino acid
MLEVKSLKKTYGDFSISLDLSVGAGETLTLAGPSGCGKTTALNLIAGLIEPESGSICIDGKDITRLPAWKRNISVVFQDLALFPHLDVGGNIAYGLFIKRVPKKERRRIVEQTLEIVRLQGYSARRIDTLSGGERQRVAIARALASNPRLLLLDEPFFSLDAPLRKTLRREFPGNRRHSKTSC

SEQ ID NO: 85637 - protein, 321 aa, Unknown
  Obtained from environmental sample
  DOMAIN (59)...(164): ATPase family associated with various cellular activities (AAA)
  misc_feature (1)..(321): Xaa is any amino acid
MNDIQVKIGDVNQLTPKEIVVELDKYIVGQKKAKRAVAVALRNRMRRLKLDPELRDDVAPKNILMIGPTGVGKTEIARRLAKLAGSPFIKVEATKYTEVGYVGRDVESMVRDLMASGFQMVKQEMQESFVAEADKRAEEILLDLLLPGTGKKSKVKKSTPAPVVRPVGSFSFGPENGQGAGLIGTAIQVGIPSFVNQGEEKAEDEADKQENPQPADSTTDTSTTREKFRAMLREGKLEDKTVELMVNQNPQFPPFEMMGVSMEDMESSLSGFANFFGGGKKKKVVTIARAREIIRAEELEKLIDRDRVSDEARQRVRLGRI

SEQ ID NO: 85638 - protein, 98 aa, Unknown
  Obtained from environmental sample
  misc_feature (1)..(98): Xaa is any amino acid
MRVRMDSLIKSIATALDIVEGGLLGASTNHGKRIAVLCAKMGNVLKKKPGEITRLAICALLHDNALTEYILSERLDNRHDPGMKKHCEFGQRNGDALH

SEQ ID NO: 85639 - protein, 227 aa, Unknown
  Obtained from environmental sample
  misc_feature (1)..(227): Xaa is any amino acid
MITKLIKIALMVSIALSVSFTLSCGQHDFWDDIFGPSCGSGGNFDYGYVTDKDGNTYRTVKIGKQRWMAENLATKVYGSVCYGEGGEVLGGGGYSTLSPAEVQANCDKYGRLYGWAMAMELPCECDKDIVELGSYGCTIEATQYQGICPAGWHIPSDDDWDVLMQFVNSSCSDNSQCADEGTKLKATCGWDSDTKRKKSGQGYRRIRLCGCAQAALRSAIEKNFVGA

SEQ ID NO: 85640 - protein, 238 aa, Unknown
  Obtained from environmental sample
  misc_feature (1)..(238): Xaa is any amino acid
MTVIAFTTTVIAFTTTVIAFTTTVIAFTTTVIAFTTTVIAFTTTGIAFTTTVIAFTTTVIAFTTTVIAFTTTGIAFTTTGIAFTTTGIAFTTTGIAFTTTVIAFTTTGIAFTTTGIAFTTTVIAFTTTVIAFTTTVIAFTTTVIAFTTTVIAFTTTVIAFTTTVIAFTTTVIAFTTTVIAFTTTVIAFTTTVIAFTTTVIAFTTTVIAFTTTVIARSEATKQSSAFDVSFDFDFICGV

SEQ ID NO: 85641 - protein, 323 aa, Unknown
  Obtained from environmental sample
  DOMAIN (1)...(250): RecF/RecN/SMC N terminal domain
  misc_feature (1)..(323): Xaa is any amino acid
MLRELRIKNLALIETLTLDFRPGFTVFTGETGAGKSILIGAIGLLLGERASSEMIRSGCEDAEVSGSLDIENIRHKLREFLREASIDAEDGSLIIRRNISKSGKNKIHVNQVPLPLSTLKALGDLLIDLHGQHDHQSILNEETHADIVDALPEASAAKAVYTSSYNAHTAATQELRDAQRAARELTDKKDVLEFQYKELSTLNPQRGEEATLEQELSLLSTSAERSKCVSEILTLLGSNDIGVTSGGESIQKRLSQINRKLEALCKHDPSAAPYISELESALSICSDLDMFCSKYLETTDDAAGSESRMRRSTRGCHSRSIQN

SEQ ID NO: 85642 - protein, 314 aa, Unknown
  Obtained from environmental sample
  misc_feature (1)..(314): Xaa is any amino acid
MMKKMNRLRLDYEKGLVSFEKAKAQLERDVRKAYHNMLLLQENINLLRGSFENAGRQVQMAQANYNAGLAPELTFLQAQVARENLRPVIDQAENGLKLSMAQFAMFLGLDYNTPFDLEPVKGNTNFISIDVAQMISKAASGKPDIQELRQDILTLNSVKKSTWYRLYTPSLSLSWSADPTFQKDPWKDPWFGDKDNWKQQSGSFRISVGFRLNGLIPYTSEHQGLKTLDDQISAITLGLTQMIRGTEIEIYNTVLALERARISAQAQAQTVSLAEQSYRLTEQAYQAGLQDYFQVQNAEQSMRPRPILTTFLPQ

SEQ ID NO: 85643 - protein, 213 aa, Unknown
  Obtained from environmental sample
  DOMAIN (4)...(207): Methyl-accepting chemotaxis protein (MCP) signaling domain
  misc_feature (1)..(213): Xaa is any amino acid
MSSSAIEEMTANINSVTRTLVENSKNVSTLTEASENGKTGLPLVAQEIQEIAHESEGLLEINSVMNNIASQTNLLSMNAAIEAAHAGESGKGFAVVADEIRKLAESSSKQSKTTAAMLKKIKASIDNITKSSGDVLARFDAIDSSVKTVSQHEQNILNAMEEQETGGKQILESISRLRDLTSSVKKGSDSMEKSGKTLVQDTDGFHKTSQETV

SEQ ID NO: 85644 - protein, 520 aa, Unknown
  Obtained from environmental sample
  DOMAIN (1)...(520): Formate--tetrahydrofolate ligase
  misc_feature (1)..(520): Xaa is any amino acid
LLPDIEIAKQAAANMLKITEVAEKLGILPDDLEPYGHYKAKISETLFAKVADRKDGKLILVTAVNPTPAGEGKTTVSTGLAQALTKIGKNAVLALREPSLGPVFGVKGGAAGGGYSQVLPMEDINLHFTGDMHAVTAANNLLCAILDNHLFHGNKLQIDQRRIMIDRCMDINDRALRNCVIGIGKKGDGIPRQDCFRITVASEVMAILCLASDLSDLKSRLGKILVAYSHDGKPVFARDLQAQGAMTTLLKDAINPNLVQTIERTPAIIHGGPFANIAHGCNSVRATKLALKLGDYCVTEAGFGSDLGAEKFFDIKCRCAGLKPSCAVIVATARALKYNGGVPKTELNHENIDALKKGAENLKVHIENIRKFGVPAVVAVNRFHTDTQAEIAAIQDICAETGVPAPLAEVFAKGGEGGVELAQKVCETIEKQDGAKTFAPLYRNAIPIKEKINIIAREIYRADGAVYIAQAEKSIKEIEALNLGDMPVCVAINAVLALRRPNAPRQTRRLNLCKYVLGPS

SEQ ID NO: 85645 - protein, 257 aa, Unknown
  Obtained from environmental sample
  DOMAIN (26)...(214): ABC transporter
  misc_feature (1)..(257): Xaa is any amino acid
MKVRGLVNRFGSQVVHDGLDMEVERNEVFGIVGGSGSGKSVLLRCILGLLRPHAGTIRIEGKDITTMSAGQLRAVKTRYGVTFQAGALYSSLTVLQNVQLPMIEHLRLKAGELDELARLKIQLVGLPPNAADKHPAELSGGMVKRAALARALALDPLLLFLDEPTSGLDPISAAEFDELVLYLRQELALTVVMITHDLDSIFRTCNRVGVIVNRRMVSDTSPPIVDYPDPWIRAYFHGVRVPGEPCPPPRPEWSPYT

SEQ ID NO: 85646 - protein, 439 aa, Unknown
  Obtained from environmental sample
  DOMAIN (358)...(438): Transporter associated domain
  misc_feature (1)..(439): Xaa is any amino acid
MNNNDPILWKFLILVVLIFASAFFTLAEIALISLNKNKLEKESLSGNRKAKRILSLTGNPSKFLATNQVGTTLTNFMASAFAADTFSGRFTLWLVSLGVKIPYNVLASVSLVSITIILSYFSIVLSELLPKRIALKKADALAFPLSGSVLFFSRIFAPVVWLLTKSTNGILRLIGIDPKTDAHAVTEEEIRLMIDVGSAKGTIRDGEKEILHNVFEFDDKTAGEVMTHRRDTVLLKLEDSDEEWEKTIIESRHNFFPVCGKNQDDIAGVLVFRDYLCLSDRRRGTVMSRAVRPAQFVPITVRTHTLFARMKKSRNHFAVVVDEHGGLMGIVTMKDLLEELVGNLDDDSTTLPEQPMIVKTGPGKWTLNGAVSLDKAARELDITLPVEHHDTFAGFVFSLLGQIPEDGSQAVIETPWPENRTSGNSRTQAEKVRYQEPRQ

SEQ ID NO: 85647 - protein, 335 aa, Unknown
  Obtained from environmental sample
  DOMAIN (65)...(123): Collagen triple helix repeat (20 copies)
  misc_feature (1)..(335): Xaa is any amino acid
GLWPRRCQAQGPKGENSDIPSIKEDGYWYIGEINTGVKAQGENGNTPYIKDGNWWIGDDDTGIAAQGPQGPQGPEGPEGPVGPAGSQGPQGPVGPAGPQGPQGPAGGTPQPQPTGNTLLIFQAYGGDNASGVTHHFVELYNNSNTAVDLTNYSLQYAAAKDGTTPESDWTVILLSGSIPAQSSYLILGKKNPVQTQRIQIADNSGDVNDNDFVLSNRGFKVALINGTAKLTAANPYNTDGNGTKAAGYIDMVGCSNSFSSNIITGYEGPASIETLPRNSAQEGIRRVNLTDTDNNNNDFVSVRYTTVRTAQYPHGVDAYEIPFYTPKMFASVHGT

SEQ ID NO: 85648 - protein, 99 aa, Unknown
  Obtained from environmental sample
  DOMAIN (39)...(93): Hemerythrin HHE cation binding domain
  misc_feature (1)..(99): Xaa is any amino acid
RLWRVSLISLFHVIKEAADYAVNHFSDEDKYMVKVGFPKLTEHRKQHDDFVTTVLKSINEFEAGKTAPIDLAHFLKNWLLNHIAISDKQYAPYLKNLKA

SEQ ID NO: 85649 - protein, 219 aa, Unknown
  Obtained from environmental sample
  misc_feature (1)..(219): Xaa is any amino acid
MGIFAYMPYGAGGIIIRVEADIRRGIPGVDISGLAEGAVREARDRVRAAFRNSGFSFPLDRILINLAPAGLKKDGAALDLPIALSVMAAAGTAPVSGNLLVMGELELSGKIRPVRGVLAAIAAGLSEGITEFIVPAENSGEAAILAEKGAIFTAAENLQGAVHALFIRAENGKLPASLRTAVSEDMSGAGEKSNEGVYTGGDFSECGDKRLQRALEIAL

SEQ ID NO: 85650 - protein, 53 aa, Unknown
  Obtained from environmental sample
  misc_feature (1)..(53): Xaa is any amino acid
MNLKKYEYWFIVGSQDLYGDETLKQAADHARIMTDEFNKEPLLSGAVFKTYRI

SEQ ID NO: 85651 - protein, 84 aa, Unknown
  Obtained from environmental sample
  misc_feature (1)..(84): Xaa is any amino acid
LGQPQRGRLPGYLEAGLADVLRDRNPETPGLYTWWTQRGGARQRNVGWRIDIFLVSQTLTPQVKDAAIHPDVHGSDHCPISLVF

SEQ ID NO: 85652 - protein, 300 aa, Unknown
  Obtained from environmental sample
  misc_feature (1)..(300): Xaa is any amino acid
VISFLAGTSTNNIDYSWSLDVTNADNAFGALPQGSNTVTVTAYDASNKTAVKTYSFIKDTANPIVTLSNLEVDPEHPTVLPSITDVAAPQIKLSLNDDDSRLGDTTATINTINDQYFYEYTIYRYNPYAATTTSTVYKTDKISLGTNPGKSLNSLSIPLATSIPDGKYKLEVVVADRVGNTATKTQDFTINRNKPVLAYTPSGFNATGYYGKQTGDASAAVFSLTAGTVTDGDFDRLEIKVNGNLVSPTTQVAFDSATGVYQWTWVFTRGLYNNVGTDYINEGKNTITIIAYDKGGTRPI

SEQ ID NO: 85653 - protein, 316 aa, Unknown
  Obtained from environmental sample
  misc_feature (1)..(316): Xaa is any amino acid
IARGVYWLDIEVSDRTGNITSINNVVFTVDNGEPVVNITTPKRTAPENTPFTLEGTVDEFNFNRLTVKINNNPVEVELMRPSAVASTHSWSWALGTTIGVVPNAFDFDYLSEGPNTIILTAYDHAGQTGTAQYTFTVDRLPPEVNFNSINGNKKIDKATWQNGDKVALLKGISLIEDTNAIIRGSFFDEYSRIGNGTDDLPYIDEDTQVSSTRDQYYFEYRLYTSTQLESGPAEASWNDDNANTIPWTRIALGINPDKSVNWAIPLTGSSLYWTPTTGIPDGTYWLDIRVTDRTGNSIPVHHVVFTVDKSPRCLMY

SEQ ID NO: 85654 - protein, 279 aa, Unknown
  Obtained from environmental sample
  misc_feature (1)..(279): Xaa is any amino acid
MTCKRIAPAILAALLPLSLAVLMGCGGSNNPVEVSPKPVPSGDSGLAGLSISTGELSPAFNPNINKYSATVGYLGESSMGVTATPKDPKARLTVNGVAYASGTQVNVALHEGINTIHVMVAAEDGLSAHSVKLTLNKLPFNTSVWVVNGIGGVPLENTLLTLTDARGKVLADNVPLPRAKNGQKVFGLDPKEKYNIYARGDDAARACFANFDPSKEDTAEMICLRTYSTYYQYEAPVIEKIEFATTSANAGGVEGWRPCPMSPLCGHAGGCCRCQSHHA

SEQ ID NO: 85655 - protein, 78 aa, Unknown
  Obtained from environmental sample
  misc_feature (1)..(78): Xaa is any amino acid
MKLVRVALRGYRNYYGISGNARLLWSYYSYVKYTFYRMLNRRSQQSKFCRDKFNRIWKYYIDESRLTAGIWDSKPMLA

SEQ ID NO: 85656 - protein, 326 aa, Unknown
  Obtained from environmental sample
  DOMAIN (4)...(326): Protein of unknown function (DUF1703)
  misc_feature (1)..(326): Xaa is any amino acid
MTIMAANTERILPIGIQDFPKIRERGFVYVDKTARIYELLTGSGEAFFLSRPRRFGKSLLCSTLGAIFEGRRELFGEIAGRPALAIDGLDWEWKKHPVIRIDLSAGNYGKGVAALLSTIHAEMRSEAEKYGITLYRDDQPASQFKYLIEKASQNVGEKAVVIIDEYDSPMTGTLTKRDVHIELREELRAFYSVLKSCDAYLRFIFLTGISKFSQVSVFSALNQLSDMTLDPRYADICGMTQEEIEANFGPEIDGVLESTESSREEYLDKLRQFYNGYRFSRKPLTVYNPFGLLNHFDNGGYFQPYWYRTGTPALLTDLINDRDIDI

SEQ ID NO: 85657 - protein, 155 aa, Unknown
  Obtained from environmental sample
  misc_feature (1)..(155): Xaa is any amino acid
MKIFRSVEFWKASIMPLPDHAFFELLRTVFGKIKTPFNKQNLVGDLEKFLSNNEIQKNIAAYIDKNDARLIAAVAALNEPTAAELEAFFDGELDHSELQDMIINLEERFILFRFTEEGRNESRLAPHPVLGPILTPYTDDISSLLPSVHNKTGGQ

SEQ ID NO: 85658 - protein, 162 aa, Unknown
  Obtained from environmental sample
  DOMAIN (1)...(148): Crossover junction endodeoxyribonuclease RuvC
  misc_feature (1)..(162): Xaa is any amino acid
MGIDPGTAVTGYGVVSVSGNSVAWVDSGVIVTDTSEPLSQRLLMIYDGLSEKIDERSPDRVAVEEAFYGKNVHTTLVLGHARGVAMLAAARRGCGVFEYSPREIKKAVTGNGNASKEQVEYMIKTLLRPSGGKMRPDAYDALAVAMCDFYNMGRAAFIRQKK

SEQ ID NO: 85659 - protein, 181 aa, Unknown
  Obtained from environmental sample
  misc_feature (1)..(181): Xaa is any amino acid
MAIGTYGRGIYVADIYPMKEFKPEIFDKAAHLFEPAPAIRWNRYYRRGDTYGSPNRADNPPIGVNLYYYLKSDAGKASLVIKDLEGNTMATLAGNAKSGLQKIFWGLTRDMPQNQAGPGGRPGGGGAAGQGGRFGRGPALDLGTYKVTLLVDDKEVGTHRLTIQRFPVRSSDGPRHHCPWV

SEQ ID NO: 85660 - protein, 70 aa, Unknown
  Obtained from environmental sample
  misc_feature (1)..(70): Xaa is any amino acid
LGTVGTEVSFKHLKATPIGSKVKCKAKVTAIDGKRISFIGEMWDEAGKIGEGTHTRYVINVEEFMKRVGK

SEQ ID NO: 85661 - protein, 92 aa, Unknown
  Obtained from environmental sample
  DOMAIN (4)...(87): Transposase
  misc_feature (1)..(92): Xaa is any amino acid
MGKRKEYTKEFKGSAMELYHSSSDKTIKEVAEGLGISPENLRRWLREEEERKTSKLKAFPGRGNPRDEEVAQLRKEVADLGRQRILKKAWPL

SEQ ID NO: 85662 - protein, 368 aa, Unknown
  Obtained from environmental sample
  DOMAIN (258)...(348): Penicillin-binding protein 5, C-terminal domain
  misc_feature (1)..(368): Xaa is any amino acid
VVMDAATGTIVYYKNPDDEIPPASLTKLMTMHLVFKEIASGRASLNEMITPPREGWAVNQLPGSSLMYLAQGQTLTLRELILGMAVISGNDAATAAALRFAPTVNDFIKMMNTEAAAMGLSVTRFVDASGYSEENMTTARELAELCRIYLQAHPESLGDFHSVREFAYPKPENVPPERQGNPGTRLRRNNNNLLGRVEGVDGLKTGYIPESGYNIALTAERNGTRFIAVILGAPAEWGGDRKRDEDGEKLLEWAFGRFKTIPIRMSIGAFPPVRIWKGKDNYLSFGPEEPLDFTAPVERGSQLSWETELDEPLIAPFYTGQKVGSLVLYDSLGELRRITLVAAQNAEKGGFFKRLFDSIRLFFDKIFR

SEQ ID NO: 85663 - protein, 307 aa, Unknown
  Obtained from environmental sample
  misc_feature (1)..(307): Xaa is any amino acid
MFTAQRFLLPLPGAAEAVTHDQGYIAGAPPAPRPESVVTTARARSPEGPAGVERDLAYDMDAEKASAGGVIAATISGASASAAGEQFEFTIKNPVSVARQMSAMLPLTDASVEARKLLIFSGSGPVNRNQNPRLGAELTNTSGIKLPAGPITVYDGGTYAGDALIEFWNESEKRLISYGEDLSVIGSATNSNSAAFSSVTISDGVMTITRSQEFLKTYTFKNNAAQEKILIIEHPKNQGFSLASPKADEETPALYRFTVTLTARGEFTVPVRESRPIMERVTLTQLRPGAFLSFVSSQELLGRSDHG

SEQ ID NO: 85664 - protein, 106 aa, Unknown
  Obtained from environmental sample
  DOMAIN (24)...(97): Mur ligase family, catalytic domain
  misc_feature (1)..(106): Xaa is any amino acid
MKFRELLTVSGINVTADGGSGDPVISDIVYDSRNVKPGSLYVAVPGTKVHGDTFIESAIKNGAAAVVSENSQDQLSTPWAKVLDVRGALGKLGIALGNSANPINRV

SEQ ID NO: 85665 - protein, 358 aa, Unknown
  Obtained from environmental sample
  misc_feature (1)..(358): Xaa is any amino acid
SSIWKTDSHVKEYLEKRGRGNGYKELKPSDTAYYDGFIRIDLSKIEPSIALPFHPSNVFTIKELNKNAKDIFADIEKENKGADLGLKYRSTAVWADQAVIAGCSGGIFSNIMAAADILEGHSTGSGNFSLSVYPESQPTFLELVKNGAVETFMKAGVLVREAFCGPCFGAGDTPANNELSIRHVTRNFQNREGSRPADGQNAYVALMDARSIAATAINGGKITSAADISVKYGKYKFFFDKGIYDKRVYNGAGNPLPETELVFGPNITDWPKMPALPDNLLLKIVSFITDDVTTTDELIPSGETSSYRSNPLKLAEFTFSRRDPSYVKRGKEVNDFEKQKKSGSPKNKYPEFFSKLRI

SEQ ID NO: 85666 - protein, 625 aa, Unknown
  Obtained from environmental sample
  misc_feature (1)..(625): Xaa is any amino acid
GYRSGIGKFSFFQAAGRRQPLNTSLLTNYPKTDFYGNSITGKAAAGAVQSSVTTVSGIYIETSVNDSGRGSVKLSPETSTADGLVTSTSVTITATPVSSEYYLAYWLVNGEKSTVTSTQLPLTSHARVKAVFGKDFTVTNFTDDGYTSGTLRQAINAAIDGDKIIIGGTAGQQTIALEGNNTITINKSITIEGNGVTITGASSWGSSYYGFLYINRSTVTIRRVWFKDGTTYNEGGAIYNSSGNVTLESCIFSGNRSNYSYGGGGAIYNYNGTMNIKACTFYGNSAINVGGAIYNNNSNDSALTLTGNLFYGNTASSCPVVGYYNGTSTGYNVVDVPLGTDDSTLSGWTAVTGDKQISTFPVSGKTFKLLSGGGAANVITTLPANYPKTDFYGNTINNGAAAGAVQSNASGSGIYVEVSVNDSQRGSVSGLPTSSNNDGLVLSPVTLTANPASGCYLAYWLVNGQKSTVTSTQLTLTTHSRVQAVFRKEFTVSNFTDTQGSDSTQGTLRYAINNAQDGDKIVINGTAGQTSIALRSSLEISKNITIEGNGVTITRASSSTSYRFLYIYSTVTISRVWFKDGRITDRGAAIYNYGNVTLESCIFSGNQSDDGGTILNSSGTMPRPI

SEQ ID NO: 85667 - protein, 179 aa, Unknown
  Obtained from environmental sample
  DOMAIN (1)...(150): ABC transporter
  misc_feature (1)..(179): Xaa is any amino acid
LGGRMTDSAESLRSLFGIVAQETFLFNDTISANIAYGLQNADRDSITAAALAANAWEFIEKLPQGLDTVVGERGIMLSGGQRQRLSIARALLLNPPILILDEATSSLDTESERLVQSAINKVMENRTVLVVAHRLSTIRHADQILVLEAGSIAERGTHEELLALNKRYKYFYDIQFTGN

SEQ ID NO: 85668 - protein, 191 aa, Unknown
  Obtained from environmental sample
  misc_feature (1)..(191): Xaa is any amino acid
MFLLKAQKYRQEMEGDEMARKPALGRGLDALIPVGDFSIETETEAVESDIEVRSDIDIDDVTSIEPPAEQPEPSAEVAEATEPAEATEPVEVAEIAESAEIVETAEAAEVAEATEPAETAEATEPVEVAEVVEPAEVVEAAEAVEVAEPAEVVEATEPVETAEPAEVETAALSNDSVVQLLRRQLVPIRDS

SEQ ID NO: 85669 - protein, 58 aa, Unknown
  Obtained from environmental sample
  misc_feature (1)..(58): Xaa is any amino acid
MLISNEPGVYGHFEMKIDGVLYKEDIGIRLEDDLLITEKGCENLSASIPKEIEDIEGG

SEQ ID NO: 85670 - protein, 482 aa, Unknown
  Obtained from environmental sample
  misc_feature (1)..(482): Xaa is any amino acid
VKNTASSATARAIYSDGGAVTISNGIVTAKDGYAIYRSNGTITLTGGTVFAYGTAASNVIYGTYNASGSSEIVAWNPSLTATYGQTLANIASNLPTGWSWQGQTTTPVGNLGTQTHKAKYTPTKAGNNNILTDIDVTINVEKAPGSFISPTALNTIYTTTLKLSDLSLPNGYAWTTPTTSLNAGSGQTFAATYTDPSGNYNAASGTITVNVAQATGTFVSTTALSTTYTPTLKLSDVTPPTNYAWTTPSTALNAGNGQAFAATYTDASGNYTAASGSITVNVAKANPTITWPTSATITYGQTLADAVFAGESGTGTFAYTNSTATPTVAQSSTAYAMTFTPTDQANYNTLAQNVAITVNRSSDLHATNPLSQKISKGDLSPNTFDLSTIVLNKTQADHGTLGYARGTFKNEAGILTAQPTLSGHTLTYTGTGKESGTATQEITITSENYNPITATITFEATPKTEGQSAARSPDAPRYRPQR

SEQ ID NO: 85671 - protein, 241 aa, Unknown
  Obtained from environmental sample
  DOMAIN (148)...(226): BRCA1 C Terminus (BRCT) domain
  misc_feature (1)..(241): Xaa is any amino acid
LEKWVSVLDIRELGEKLLCQLFEKNRVTHIHELYTLTAGELAEFDRMGELSAVKVIRHIQTKRELSLAIFIAGFDLEGVAETTMEKIAAAGFDTLEKLRSASVADLASVYGLGEITASVIADGLKECATEINSVLKTGIITIAPPPSEESQPLRGQSFCFTGELKSMKRGEAEEKIKSLGAQSKSSVVKGLSYLVTNDPASGSSKNKKARELGIPVIDEEQFLALLSAPKKQSAPKQGELF

SEQ ID NO: 85672 - protein, 297 aa, Unknown
  Obtained from environmental sample
  misc_feature (1)..(297): Xaa is any amino acid
KEKQTLGEGEPIVLYSRITPFHDSMVALYESFNDEERKALFLKIVERIKGVDMVFIDEIQYLEGKRALNLVLEVIKFMVSIDKQMVITSQKMGIDKTDIIPDLAERLDNFEYIKILPPDSEDRLKMLEDFMKEENLSLENPNLRDVWSKNMEKRSLKCLMNKLNRLVCEAEDRVITERTMEQLFEAKDSAEKILYIISSHFKIDVKILISDERKFSYERSLAMYFIKNANRDMDFCEVGKKLCRSENTVRIACDGIERALNGGKEFFNKIKPAQIIADIEEISRAFCTSTNSNLQSN

SEQ ID NO: 85673 - protein, 422 aa, Unknown
  Obtained from environmental sample
  DOMAIN (304)...(421): AIR synthase related protein, C-terminal domain
  misc_feature (1)..(422): Xaa is any amino acid
AYREKMADNPVESRQASMEKPQSLLVNYPRPSDVENIDGFINLTDSGLETLRQNMNLAMDLSDLQFCQIYFKKTERRDPSVTELRVLDTYWSDHCRHTTFLTELDDVKIDDTVLRESYENYLKLRKSLGGDNKPVTLMDIAVIGAKALKQKGLLPDLDESEEINACSVKIKVDVDGKEQDWLLMFKNETHNHPTEIEPFGGAATCLGGAIRDPLSGRSFVYQAMRVTGAGDPLKSASCALPGKLPQRKICRTAAAGYSSYGNQIGLATGQVCEIYHSGYEAKRMEIGAVIGAAPAQNVIRKKPEPQDVVILLGGRTGRDGIGGATGSSKSHTSSSLETCGADVQKGNAPEERKLQRLFRNPAAAKLIKRCNDFGAGGVSVSVGELADGLEIDLSKIPKKYEGLDGTELAISESHSANLSWEP

SEQ ID NO: 85674 - protein, 329 aa, Unknown
  Obtained from environmental sample
  DOMAIN (11)...(328): FemAB family
  misc_feature (1)..(329): Xaa is any amino acid
MTSDIKTPFIANIKEADLAVCENADSFLQSSMWGEFKSRFDSTAKAFLIDWQKNQITETLPLLALCRRFAFAFGLGFSFVYVPWGSLPDFFPAEDRAKALAELAVKLKPFLSKDTAFIRFEPPWHYKDGDEIFKNESVMLTSAGFKKAAATVQPPDTVIVNLNLSYEEILASMKPKWRYNVSLAEKKGVKVNVCGVRDIEVFYNLLKETATRDGIAVHGINYYRTLFEVCEKQSKINQFIRLYTAEHEGDFIAAIVVLFRGKDATYLYGASSNNKRNLMAPYALQWKAMRDAKEAGCINYDLFGIPPNEDANHPMAGLYRFSCRILSHG

SEQ ID NO: 85675 - protein, 96 aa, Unknown
  Obtained from environmental sample
  misc_feature (1)..(96): Xaa is any amino acid
MAIPAYMKIDGIPGSVNVSGREGFVEVLEFNHRVYVPTDRDDGSLTGTRKHDSLVLHKALTNRPRSLPKGLHGANGPRHLYSGVQNHRSRRGGCIF

SEQ ID NO: 85676 - protein, 64 aa, Unknown
  Obtained from environmental sample
  DOMAIN (1)...(53): Sigma-70, region 4
  misc_feature (1)..(64): Xaa is any amino acid
LSQSTFDVNEDIQLRYGLAGEGPLTLEETGKLLGITRERVRQIQEKATFKLRNIKALSELKETC

SEQ ID NO: 85677 - protein, 225 aa, Unknown
  Obtained from environmental sample
  DOMAIN (46)...(219): GDSL-like Lipase/Acylhydrolase
  misc_feature (1)..(225): Xaa is any amino acid
MDKLLLMILAVSFSACSSTHVRSGQEQNIRMQNFMAKLRESKTVSVVALGGSITTGHQAQPPDTAGWAGLVNVWLKEKARESGCAVEFHNSGASGTDSAFASMRAGDHALAYNPDLVIVEYAVNDQWLNSRVRRRSFEGLIRRLLDNSPKRAVIIIALNEKGGPDKSTFREQLEIGRHYNIPVLAWADWVKSSEWNNYFSGKETIHPNNEGHASIASGIIKFLNI

SEQ ID NO: 85678 - protein, 275 aa, Unknown
  Obtained from environmental sample
  DOMAIN (6)...(269): C-5 cytosine-specific DNA methylase
  misc_feature (1)..(275): Xaa is any amino acid
LEDASFFSIVLFSGMGGFPEGLRKAGFQRKFAFEIDELASKAYKLNHKKTNVITKDIRNVDIEEIKQKLKDKTIHLLAGCPPCQGFSSIRRLNKPKPVQDERNTLINEFVKFVEKLKPYTFMMENVPGLALDESFHKAKEYLETKLGYYVDYKIVNVKNYGVPQSRKRLVMIGSRLGEIKVAAPINEKITVRKKIGSLSEPELSKDPLHKIFPKHTDKISQLIKEIPKNGGSRKDLGKEKQFPCHLKKNVGLKKVTGWNSCSPGDPLFRAPPRVF

SEQ ID NO: 85679 - protein, 341 aa, Unknown
  Obtained from environmental sample
  DOMAIN (95)...(324): Glycosyl hydrolase family 3 N terminal domain
  misc_feature (1)..(341): Xaa is any amino acid
VDREILLLIFFTSPIFALNFFDDRAPEELAVAIERAMSDDEALAQVFMLGWVGAEPSPLIMDWIRDRNIGGVKIFGWNTGDTIRLARTVGALQEASLRGKYNIPLLVATDQEGGWIRHVKGNTSITPGNMAIGASGYPRDAYLAGYYIGKELALLGINMNFAPTIDLFTNRDSWLISTRAFGSDPVKVGIFGAAYMRGQQAVGIIPTAKHFPGHGDTQLDSHGVLPRINVSFETLWDRELVPYRMLVKEGIPAVMSGHLAFPNIEKNGVPASLSSWFLKDVLRDKIGYRGLVITDDLMMNGATIWAGSVSRAAKQALLAGMIYTFFKTPDFLIRVKLLSVP

SEQ ID NO: 85680 - protein, 189 aa, Unknown
  Obtained from environmental sample
  DOMAIN (31)...(183): Peptidase family M50
  misc_feature (1)..(189): Xaa is any amino acid
SQIPFRSYKYFQDVLKANINNAVRCFVHRDTGIAILQATLDSTGKLGFFPRYPYQLINYTFGSAFVYGWKEAVDLLKANTKGLGKVFSGQEKATESVQGPIGIAQIYGKQWIWSRFWYVTAIISLILAFMNFLPIPALDGGHIMFTLWEIVTRRKPSDKFLMATQQIGMLILFALMVFAISNDLFKIFR

SEQ ID NO: 85681 - protein, 304 aa, Unknown
  Obtained from environmental sample
  misc_feature (1)..(304): Xaa is any amino acid
MQLSWEEIRNRALAFSKRWKDGKSEEAEGQSFIRDLLYVFGVKDPLKVGMYEYKVLYAGGKSGFGKIDYFWQGKIAIEMKSRGEDMTEAYQQLSKYIANLPDEDKPDLWLVCDFENMRVRRRFAKRSVEIKTSGLYKHIKLFAEIAGYGDTERVVHQKDADVNAAEKMAVLHDALKNYGYGGHDLELYLVRLLFCLFADNTGIFPKGSFLQYIEESKPNGTDLSDRLAKLFEVLNMPEETRKARTLLSDDLKLFRYINGNLFKDPLSIAEFDAKMRQTLIDCAVFDWSNISPAIFGAMFQGVMD

SEQ ID NO: 85682 - protein, 96 aa, Unknown
  Obtained from environmental sample
  misc_feature (1)..(96): Xaa is any amino acid
MAVLSIQSHVVYGYAGNTAAVFPLQRLGREVWAINTVEFSNHTGYGAWRGKVLGADLAAELVTGLEERGRFKPLRGGSFRILGRRRFARANLIIGK

SEQ ID NO: 85683 - protein, 63 aa, Unknown
  Obtained from environmental sample
  misc_feature (1)..(63): Xaa is any amino acid
MGITQLSYQDPTAPMQDKEFIGKMAQFSSLEQMTKHGRGFCQAYRDDKRQRGFPVIGQKRGID

SEQ ID NO: 85684 - protein, 208 aa, Unknown
  Obtained from environmental sample
  misc_feature (1)..(208): Xaa is any amino acid
MAEKTYEEWLEAFRDRKVLITPEQQLADLVLGDYSEKKDREIILLKDVPNEHKTVELCLVALEVVGYELQFIPEECKTAEVCLAAVQTHGQALQYVPEERRTAELCLSAVMQDGFALAYVPEKHRTGLLYLVAVVHCGAVLQLVPKEHRTAELCLAAVMNNCEALEYVPGNLKTAELCFTAVQQNSRTLEYVPEETQTARLCLMAVEQ

SEQ ID NO: 85685 - protein, 85 aa, Unknown
  Obtained from environmental sample
  DOMAIN (14)...(82): Uncharacterised protein family UPF0047
  misc_feature (1)..(85): Xaa is any amino acid
MLYEYSLSAQRQDFYNVTNKVREAIAQSGVADGIAVVYCPHTTAGITINENADPDVVRDLLIGLDKAFPDRAEFRHASCRILTHG

SEQ ID NO: 85686 - protein, 83 aa, Unknown
  Obtained from environmental sample
  misc_feature (1)..(83): Xaa is any amino acid
LPCPYIQISIGNILKEPLKDIIDRGLSIAEFGELRDTCLIAEDMNFIKKYMEPHVYSKPVPVPCGEVFGEKDRTVKPFNQSIT

SEQ ID NO: 85687 - protein, 137 aa, Unknown
  Obtained from environmental sample
  misc_feature (1)..(137): Xaa is any amino acid
MAEAFCRPFYRCRKPGAFPGKIKSDLNYFGYLFESLVIRDLRIYAEVNDGKVYHYRDSRDMEVDAIIEYPDNTWAAFEVKMGFAAQDDAAENLLAFAKKVDQNKMGPPAALTVITANGIACRRHDKVNVVPLSVLTA

SEQ ID NO: 85688 - protein, 167 aa, Unknown
  Obtained from environmental sample
  misc_feature (1)..(167): Xaa is any amino acid
VVYAPERKITRRTDPLNMPLLTVRYSSPARNVIRVRITHFEGTVDRGPRFPLEIDSSFKPVIRITEKEAVLESGGLSVNIEQDQGWNNTFSGGGKFLTGNTVQSTGYMVDKDRGPFVKDELILSVGELIYGLGERFGPLVKTGRQLTFGTPTAARQANWRIKIFLFT

SEQ ID NO: 85689 - protein, 282 aa, Unknown
  Obtained from environmental sample
  DOMAIN (40)...(282): Glycosyl hydrolases family 31
  misc_feature (1)..(282): Xaa is any amino acid
MTSRGYGIFINDPGNVSLEIGSEKTSRVQFCVSGEALEYFIIYGPSPKAIFERYTAITGRPAMPPEWSFGLWLSTSFTTSYDEKTVMSFIDGMEERKIPLSVFHFDCYWMRGFNWCDFTWDKATFPDPKGMLSRIKAKGIKICVWINPYIAQRSPLFAEGKKGGYFLKHANGDIYQTDQWQAGMAIVDFSNPAAVKWYTDHLEKLLDMGVDCFKTDFGERIPEDAVYFDSGCPERHHNFYAYLYNKAVFELLERKRGQGEACVFAVPRQPAPSVSPCTGGGD

SEQ ID NO: 85690 - protein, 469 aa, Unknown
  Obtained from environmental sample
  misc_feature (1)..(469): Xaa is any amino acid
MTMNAIFMMVIIPLVSLGITMMDVDIMRTSIDFGIAFLCFLSLILIRSKMPLRLVPVFPVTIFGAYCLYLLYTGHLNLWAAVWVFSFPLIVIFLCQIVVGIVESFIMLAGMILLFFAPFAPPAQQEFTIRIRFIMGYILVMGLAIVYEYISIKKDQKEKILKTELAQEKNIIQTMKDNINQGIFMMDSEFKILPLYSKPLITILSYYDSELAGKNFLDMLQASLDTKQLQIMKGYFSMIFSKAKSAKVLESANPIAEFEYRIDDRIKTLTTKFNLIEQSGAEPVIIGIIQDITKEKEYEKDLQIQREAQELEMKNMFDVLQIDPLVFNDFIEDTESNFNYINSILKDRSLTEKQVLTKFFQNIHAIKSNALILGLETFGNKLHTLEDDIKVISAYNKITVEDVLGLALKLESILKEKDEYVKITKKIEAFKTSNQVDTILIYSLTSAVEKLSAETHKKVELKAGQVDIE

SEQ ID NO: 85691 - protein, 92 aa, Unknown
  Obtained from environmental sample
  misc_feature (1)..(92): Xaa is any amino acid
DISSYIQIYEVFKKLLFERNEDDAIFAIAHMRQGKIIELTDELSLFAAKIGKDYKLPLADSIIYATNISFNCTLWTQDKHFMNLESVNYFEK

SEQ ID NO: 85692 - protein, 317 aa, Unknown
  Obtained from environmental sample
  DOMAIN (18)...(200): Outer membrane efflux protein
  misc_feature (1)..(317): Xaa is any amino acid
FVISGLYANENAQQTLTFAQAAKLAVSASADLKHSRASLALSKGAWKWGVRSYFPQISVSVSENDRLQQLGADSFMKNYSVSLEQPVWDGGKLSMSRKLEKMELDLSSSKLDRTANEIAESAIAAYRNLLSSREILKIKKSAFTVLEEQRNILDEEVKLGLALSVDLASADINLLNAKIDIYSLQLDLGEMEKQFMELLGLESMPILTEKVDINRSVLLPSSSAAETLAKEKNPDLIDARYSITKKQMEYKYISHSWIPSLRLTGNFALTGQHYPLTRYNWSVGIAVDFSNPWFSSRFGTHSAGNLFMTYGDDSNSF

SEQ ID NO: 85693 - protein, 302 aa, Unknown
  Obtained from environmental sample
  DOMAIN (76)...(225): Thiamine pyrophosphate enzyme, central domain
  misc_feature (1)..(302): Xaa is any amino acid
VDIVKICEPVAKKTYCVTDPKKIVETFNEAFYLAREGKPGAIVVDLPLDVQNADIEFDPASYKSRSVTAPEPSAADIARAVKMIGEAKNPALILGGGVILADAAKEAVELAEILKTPVICTYMAKGAIPEDHPLNAGHAGIQVGQPIGNRVFMDSDLILGIGCRFTDRHTGAINVYRGNRKFIHINIEPKEIGKIFPADLGIVADAKKAILALIAEVKKTGISASHVDTAGLPALRKELARKTDYDKKPIVPHRVFQELNNYFGDRVIFTQAAALPRSGQASFKKLQVPNTCHPEPPLPGLQ

SEQ ID NO: 85694 - protein, 190 aa, Unknown
  Obtained from environmental sample
  misc_feature (1)..(190): Xaa is any amino acid
MPLIFCPECNKEISDRAEFCPNCGLPAKHFGISVKQDNTATNTSLDLSILRNDLISFDHTYQTYFGASHYITARELTNLKTSFKKWVEQLSVKATYDYCKENAPRFSVDIETVNSCLRRYETLDQDAESHNAQYIDIIVEQNKNYFDNLLKDIDPNIKLDDEQRRAVVADDDYCLLVAGAGAGKTTLGHH

SEQ ID NO: 85695 - protein, 69 aa, Unknown
  Obtained from environmental sample
  misc_feature (1)..(69): Xaa is any amino acid
IMATTSAQLYIACGISGAIQHRAGMDASSRIIAINSDPEAPIFSIAHYGIVGDLNEVIPRMIKAYKARV

SEQ ID NO: 85696 - protein, 447 aa, Unknown
  Obtained from environmental sample
  DOMAIN (319)...(385): His Kinase A (phosphoacceptor) domain
  misc_feature (1)..(447): Xaa is any amino acid
MSIRIRAFLIIITTNLLIILFSVFLGVTYTRKNMEKTIEADMMVVADIADHFVSAELELLRLQAFEAAGHITKEPSNLSDVLEKTEPLYPQFLGMSVLNYTALAASAGKSPAPAEILENKYIKRAFLGDNAFTSTYPTDNGVVFYLAVPVPELRGHILVVTIPGTYFSERVNTFAVWKTGHIFIDDSEGTIIANIRDEWVQQRANFIRMGETNSQYAEIGSVVKLASLGNIGIGYFSISGIPRMCAYRPISGSKEGWFLGIIAPLPESPVKNLDRGFLAVGLVAFIFSFLAAIIASYFIKKPFEETAKLKEEAESNLRSKTDFLANMSHEIRTPLNVIIGLTDLVLEDDTLDKKVTENLTKINNAGDTLLSIVNDILDFSKIESGKLTISPVEYYMSSVLNDVVTLVITRLGEKPIIFSLNIPDELPAKLFGDDLRVSRYSATLSCF

SEQ ID NO: 85697 - protein, 590 aa, Unknown
  Obtained from environmental sample
  DOMAIN (497)...(568): Bacterial flagellin C-terminus
  misc_feature (1)..(590): Xaa is any amino acid
VFDGAYMLIKTNQTFQDGDPVYSPSDYKLVGPDGTMYNFKALSADTKVKATELEAGTIVADGGAVTKVTKAGAISAAFTGTPPASIVLGNALTEHELSSVTSGSILASGSNFTLLTGGEIALDKASTGTGAITYTATGELQLLDSPGGAVITTVEVGKTIRLNDGTVLKNNGGGNVSVDSGSLEIGTNLTSANVLSFTLASQTTINTNSQTSRDNVEVVSASNYLVASGELSVNITLGNSSPLISRTDTASTSDPGDVAVLAEGSILSKGSIIEMLTPGPGSSPTAIKIMVNGNEVTVSYDDVSKTLKVGNEVVSPGKSITLEDGTVLTHMTDINDKNTATGKLFIDTGRITLAEDISADSVGGVRNVKAFSLAKDSILAAGTKLNTVVPQAGTQLMAGTVVTAPDKFYPGSVTMGHEGRRIQFSANIDVSLEARYYEAAVSESLTFIFSRYEPASSNLKDSVMAQIGANSGQTAFISMGDMRAAALNVANIDISSKWGAATAIETVNNALQRVSHQRALLGAMQNRLEHTIKNLDTSAENLQAAESRIRDVDMAKEIMEYTKDSILMQSSQAMLAQANQIPQGVLQLLR

SEQ ID NO: 85698 - protein, 572 aa, Unknown
  Obtained from environmental sample
  misc_feature (1)..(572): Xaa is any amino acid
MKYQTFAKTTLEGGENHKKHNKPCQDRSFKFSGEGMHIAVVADGHGSDNCFRSEYGAQFAVNAARKGINAFIKSLQGTELPLEDNFARQVKKLVGTIVDNWIYLVSEHYKRYPITEEDREYDTPEGKKLFKGLKSFEVDKTYRDLYLQEAAGGSSGKGGLLADDERPVTRHAYGATLIAAAVTEDYWFGIQIGDGKLTAFYPDGSFDQPVPWDDKCYLNVTTSICDDDAAERARVYVKKRSGCAAAIDAIGAIKKLEDSRPLPSAVFCNSDGVDDSFPIEDNMDHMAKKFYYSVLRMFIENDDDPAKSWEASVKELADYLPDLSKRGSGDDISVAGIIDMDAVKAEPFREALRKAKIEAEERRERERKEREEAIKMAEEARAKMEEEKKAAEEAAAKKEEKKAEDLKAAQEKKAAEEAAAKKAQEKKDEDLKAAQEKKTQENGGKAITDDYSASNGSANNGAQRISPDSLKQSAADPLVQEKAKQFKKLQKAEEEKVRELYEIQQVKNRTGIELAEAVQSSLQKKTEEDDIDIPSSDANKVQSPKYEPGTNVTSKLNNSLFITRPIYHRSPN

SEQ ID NO: 85699 - protein, 562 aa, Unknown
  Obtained from environmental sample
  DOMAIN (127)...(242): Miro-like protein
  misc_feature (1)..(562): Xaa is any amino acid
RAAAYATAYAYAIANGSYIGHKDTYDWECLLFDDIEAIKKNKLDECNHDVNIYDELWDSFQEDLKAFGCTYWALFYKNLFKNGFTIDEEQLKRHFGVPDEIKDQGAAAVGRYLQGLGKNVERLNEARIIILGEKGAGKTSLARRLLDVDAEMPKEYESTEGVETSLWRFPGKDGADVNTHIWDFAGHSITHAVHRCFMSARCLYIYVYNGRIERDNDPVYWLEQIRIHGGDSPVLFLINEKDDHSAVIAEKKMKYEYPSIVGYYHINIGSEDKTKLKEFRQIVMDMVSNNPSWNNQIVSMEAYKIKNKLRECFDKTKSPHITREEFDKIALNCGASAGRIEDILKDLHTLGICLWYNKPEMIEFNMLVLNPDWITNGIYKIINQSFEEHEHILNTSKGTEILKSDKRYKYPHDKVAYLFKLMRLYELAFFKDTDNNIFIPGILSIDMPDGVPVFDDANNRLTMSFVVEKVLPPSITARIIVKRNEEIFNEKLLWRNGAVLKYKGSETFARIIEESRSITVSVKGTERTEYITSLRETINAIFDDYKGIKPDFVYESFNTLKY

SEQ ID NO: 85700 - protein, 85 aa, Unknown
  Obtained from environmental sample
  misc_feature (1)..(85): Xaa is any amino acid
MGPDPDFPFLSENQRFQFPSPEKAKHNSVVAWGGNLSPGMLLSAYEQGLFPWYGEDDPVIWHSPDPRFCYLSRKTTCVKVDAKNT

SEQ ID NO: 85701 - protein, 179 aa, Unknown
  Obtained from environmental sample
  DOMAIN (27)...(179): ABC transporter
  misc_feature (1)..(179): Xaa is any amino acid
MIVLEGISKSYGAVTAVRHVDLTISRGCIFGIIGRSGAGKSSLLRTMSLLETPDTGKVYYGDERVDTLRGAALLERRKKMGMIFQNFNLLGSRDVMGNIAYPLEIAGYNRKQIEKRIDELLEMVDITDKRKARMRELSGGQKQRVAIARALAVNPADIILRRGDELAGSADHALNPRPD

SEQ ID NO: 85702 - protein, 314 aa, Unknown
  Obtained from environmental sample
  DOMAIN (1)...(92): Response regulator receiver domain
  misc_feature (1)..(314): Xaa is any amino acid
MVKDAASENREYDIVFMDHMMPGMDGIETTSAIRAWEKEQLENKQSNLRRQIPIIALTANAVVGMRELFIENNFNDFISKPIDISKLDEILNHWIHEEKKLKISKNDSPYSIPNSPLLNISGVDVKKGIAMTGGTLAAYKQVLTLFCKDAKDRLPLLQKTPEADTMLTFITNVHALKSASASLGAGDISVAAAELEAAGKVSDMAYIRENLPGFAVKIETLVNNILDALEPDKPEYHDIPNSTSPAPHSMLPLFKKLSEALKTKNAAEIDRIQEELNKKQLDSKTRETVEKIFHDVLITEFDSALNSLEELIHK

SEQ ID NO: 85703 - protein, 230 aa, Unknown
  Obtained from environmental sample
  DOMAIN (4)...(229): Cys/Met metabolism PLP-dependent enzyme
  misc_feature (1)..(230): Xaa is any amino acid
MDISTICVHGCEKKFDTTGSVAVPIFASATFAHPGVGKSTGFDYSRSLNPTTVHLEDTVSALEGGCQAIAFSSGMAAVSALMELFSPGDHIIASDDLYGGTVRLFTHISEKNGVKVSYATAENIEKGITPSTKAIFIETPSNPMMHVTDIAAVAAITKKHNMLLIVDNTFLTPYFQKPFSLGADIILHSGTKYLGGHNDTLSGNVVCKGCDHRGKIKVYRENNREEPLAL

SEQ ID NO: 85704 - protein, 204 aa, Unknown
  Obtained from environmental sample
  DOMAIN (14)...(185): Glycosyl transferase WecB/TagA/CpsF family
  misc_feature (1)..(204): Xaa is any amino acid
WDLLRARRSNEYRKYVQNAALVIPISKSIISGIRFLSGEKAVRYMPFEFAVSLLAILEKREFSSYLLGGRKQILMRTEKNIRLTFPKLRIVGRYAGYFRHQEEATIIEAIRKASPSLLLVGTGVRGEERWIARHNAALGNGLRMWCSDLFDVFAERKKHPSKAVFNYGLEWIGYCFQQPLKLFRIFPFLYYKLLLLIYKLFVKK

SEQ ID NO: 85705 - protein, 102 aa, Unknown
  Obtained from environmental sample
  misc_feature (1)..(102): Xaa is any amino acid
LSREVDDFAGAIPKMQAADLSPVKRRPCWHIQRDMNILLDGRVLNCREDLAALKENTELWGNAFSDDLSHIWEKGAALYNAHCKAEYPGICALCDEYYTYNF

SEQ ID NO: 85706 - protein, 55 aa, Unknown
  Obtained from environmental sample
  misc_feature (1)..(55): Xaa is any amino acid
ARDSTIFCSQFDVDGWYAKIGEPILADAVCDRIVHNSYTIVLSGDSMRKRNGIAE

SEQ ID NO: 85707 - protein, 255 aa, Unknown
  Obtained from environmental sample
  DOMAIN (96)...(234): Thiamine pyrophosphate enzyme, C-terminal TPP binding domain
  misc_feature (1)..(255): Xaa is any amino acid
MKNPHEEMINLAREARREIVRMIGMSGGGHIGGCLSIVEALIHLYYKEMSIRPEQPDWADRDRLVLSKGHAGPALYTVLGMRGFFSKDLFPTLNQPGTRLPSHCDRRLTTGVEMSSGSLGQGLSCAVGMALAARLDKTSRRVFCIIGDGEQQEGQVWEAAMYAAAQKLDNLTAILDDNGMQIDGMTDDINSVRPMEQRWSAFGWATTVIDGHDFGDLEKAFALARKTTGATQGPPGGKPGKGREIPSGKQVPPLP

SEQ ID NO: 85708 - protein, 81 aa, Unknown
  Obtained from environmental sample
  misc_feature (1)..(81): Xaa is any amino acid
MSQLTVKGVGDFQGLFKEMIGTFLENDLESELEEELGYSKYDYRNKETDNSRKDTTCCKCSKRRNYLFIPFTRQQTRFYAL

SEQ ID NO: 85709 - protein, 335 aa, Unknown
  Obtained from environmental sample
  DOMAIN (196)...(335): SUA5 domain
  misc_feature (1)..(335): Xaa is any amino acid
MPQNKLTDINEQIQEAAAVIRCGGVVAFPTETVYGLGANAFDAKAVARVFEVKRRPYFDPLILHVCEKDWLGDLAVDVPTSAQKLIDALWPGPLTVVLPKKPAVPDIATSGLPGVALRLPSNEIARELIRAAGVPIAAPSANLFGSVSPTAAEHVRAQLGGAVDMIIDGGECSVGIESTIISFMGDQPMLLRPGGVALEEIEAVIGRVVVPDNDELVNQSPGRSGTHYATSTPLIRIGGVDEISSINNDDSINTARINPSKPIAKIGLIALSPASVPDPAALPPAVVNIEYLSASGDLREAACRLFAAMRRLDAAGLDAIAALPVPVPGLGLAIN

SEQ ID NO: 85710 - protein, 297 aa, Unknown
  Obtained from environmental sample
  misc_feature (1)..(297): Xaa is any amino acid
LKKLPVTHTPVHVHYNNHGKIFKYINNFIYNPNLLEITYAKNEDYTFTPCNNYFPTPLDAPNVQDKPDIPIGFFDILLDDFSDPQSIIQNASPPKEIPKMFYDNFTMDGKICVKSLYYDGRTFGNNVHIQQSEYERVIKALEEKSFKYYGDEINSFYDALDDYDVSGKRVLVFGLERCNCEAIALWKKAAEVYVVDYNKPTCDHESVHTVTHDELQKLALRFDCAISFSSFEHDGLGRYGDPIKSGRRSAGHEGGGKVFARRRHFCFLGVPTGARIGFAGTRTKNTALSGLPLLLPE

SEQ ID NO: 85711 - protein, 69 aa, Unknown
  Obtained from environmental sample
  misc_feature (1)..(69): Xaa is any amino acid
ERSESFFTVHIISERRQGRAFLLVSFELDEIMGLCDRIAAISKGRIIGILPAAEADERRIGAMMGGIHA

SEQ ID NO: 85712 - protein, 121 aa, Unknown
  Obtained from environmental sample
  misc_feature (1)..(121): Xaa is any amino acid
MAFFQAIWQMLPSTLMIVSPILIAAIGGMICERSGVVNIALEGLMSLGAMSAAVCHVLLESQIDFSVPAALLIAAVTGRRFFPDTRILPRITLRGGIKVIFRAQGNKPSFAHRAFTVFLFC

SEQ ID NO: 85713 - protein, 138 aa, Unknown
  Obtained from environmental sample
  DOMAIN (28)...(137): ABC transporter
  misc_feature (1)..(138): Xaa is any amino acid
MSIEIQNIKKTFGNFVALNDINLNIPNGEITALLGPSGCGKTTLLRIIAGLETPDSGVIKFSGEDQTNKHVKDRKVGFVFQHYALFRHMNVFENIAFGLRVRPRKVRPDKKTIHESVMRLITMVQLEGYVTVSLSAIS

SEQ ID NO: 85714 - protein, 96 aa, Unknown
  Obtained from environmental sample
  misc_feature (1)..(96): Xaa is any amino acid
TSPVLIKGIFPTVLPALVPGATMAFARGLGEYVSVIFISSNMPYVSEIVPLLIIKKLMQFDYLGASAIGVTMLIIAFVMMLVTNILQKYMLKGRSS

SEQ ID NO: 85715 - protein, 59 aa, Unknown
  Obtained from environmental sample
  misc_feature (1)..(59): Xaa is any amino acid
MKILLVDDSSTMRRIQKNTLASLGYTDVLEAEDGADALEKDIAKALTCSLRLWTGICRT

SEQ ID NO: 85716 - protein, 69 aa, Unknown
  Obtained from environmental sample
  DOMAIN (3)...(66): Tetrahydrofolate dehydrogenase/cyclohydrolase, catalytic domain
  misc_feature (1)..(69): Xaa is any amino acid
MPIVMDGKSFAKESEALIAERVERFKTIAGRVPRLATILVGDDPSSATYVKMKGNACVRVGCSSADLVP

SEQ ID NO: 85717 - protein, 146 aa, Unknown
  Obtained from environmental sample
  DOMAIN (7)...(121): Glycosyl hydrolase family 67 N-terminus
  misc_feature (1)..(146): Xaa is any amino acid
MLKEYDCWLQKRKITTGVKVPNTVFAGKGGEVFEQAVKEFTSGIERLLGFTPNVSRKIDANKSAVFLGLVGIKGSVPVCCEEDGADNCNLTENGFVIKVTDNKIYITGYDEPGLLYGVFRFLSLLALGRIKAGFKLCDSPVSVLRM

SEQ ID NO: 85718 - protein, 309 aa, Unknown
  Obtained from environmental sample
  misc_feature (1)..(309): Xaa is any amino acid
MKQISEKQPPVSEEMRLNMINIDHPGKIADFIASILNMHKAEMQKILEILNVRKRMEQVLVFIKKEQELLRIQKKIQKEINEKIEKSQRDYFLKEELKAIKGELGMTTDAKSSDYQRFKDIVEGFKFEGEIKETIEQELEKFNLMEPNSPEFVVTRNYLDLIVSLPWKDPEPENFSMKNAKAILEADHYGLEDVKNRITEYLAVRKLRSYNVKSVPVQLVAPPPSAETEQGMGNGEQGTEQGTEQGTGNREQGTGNREPVADKIPLRDSVDSPAGSIICLVGPPGVGKTSVGRSIARARELGHLIMAPQ

SEQ ID NO: 85719 - protein, 298 aa, Unknown
  Obtained from environmental sample
  DOMAIN (30)...(200): Radical SAM superfamily
  misc_feature (1)..(298): Xaa is any amino acid
MQNEIIIKGYHYNQKIYDEYSNDGIFYLALNFTSHCNYRCPYCFVGHHELNKIDSDLSLEKVKMLLDEAKCLGAKTLVIPGQGEPFLDKKFWNILEYASISGYWIVIYTNGYYLDNETIKRIKQLPVSLFLKTDSLNRAIYEEMVGVKDTYSKFRQNLDMLITDFHEPENIDARIVSRLAINSVVTKISAYSIEELYNFCRKHQIYYTCRSPVKVGEANKTWDYLTGSDVERFQSIGKKFASRNFTSATPSGTCGIYRFGLTIEKHGDIYRCPNARENFTPIGNVNEKSLSELLAMKN

SEQ ID NO: 85720 - protein, 139 aa, Unknown
  Obtained from environmental sample
  misc_feature (1)..(139): Xaa is any amino acid
MNGIKSIITNTMFVTGAALVILTVFSLLLTVEIHFVPTVFEIFAANIIIVLGLFLRWKIEIRTIIFEYLVDISYIIVVLVIFGLIFDWYSAIPVWLLAAMAVLIYIFAMIISVTRINKDAKELNKLLQKRQKKQADSAS

SEQ ID NO: 85721 - protein, 364 aa, Unknown
  Obtained from environmental sample
  DOMAIN (91)...(220): Glycosyl hydrolases family 2, sugar binding domain
  misc_feature (1)..(364): Xaa is any amino acid
RRRLSGGAWTVATAETLHEFSVVAWFFARNLYEKYHLPIGLICTAWGGTPIEAWMSREALANFPEKTVQGEQYADPAVCKEITIKNEAAIQGWEGQLIREDDGLKEGWQNPEISLSGWDDITLPGDFTEAELDSFCGVIWLCREFDVKVDFTAHDARVWLGTIVDSDTVYINGVEVGNTGYRYPPRKYLIPAGLLREGKNRIVIRVSCVNGEGGITRDKPFRVFSERSCVELAGKWKYRIGVKAPPRPEAFFFQRMPMGPFNAMIAPILRFPLRGVIWYQGESNDRNPDDYAALFKAMIQDWRIKSGQENLPFLFVQLPIFGSPTENDEAASLGNHQGSPKRRSVPSGYGMAAGLDLGKWTICI

SEQ ID NO: 85722 - protein, 471 aa, Unknown
  Obtained from environmental sample
  misc_feature (1)..(471): Xaa is any amino acid
VIVSTHTRNLQDQLITKDLPGVAALCGGKLRYSKLKGRGNYLCRNRFYKMLRGEIGTFSQRERNAALPLIVWSQRTESGDIEEQTFFSPKWFFKVWNLISADSLDCSGRKCPYFTTCFLQKARQLAQSSHIVVINHALFYSDVCSETSFLGATGSIIFDEAHHLESSGHQHLRTELDTNRVTAFADRLQNVLHIAPNFKASVNVDGFEKDMKRHLKHIRKCAQDMMSEVDNWAAFALPGAKTEYQITVNEETFGQMLTPAVLDIALGELQDTFHEFRQIISAAREKDKVDELRDEVQACAEQTSQMRADLQYLTAAKTEDHVFWAEGNHEKKWAKLCGVPLDISELLAQIWERCGGGIVFTSATLAAQGSMEYMSRAIGLDRFANRTDSVILPSPYGADQTLFCAFRNCPEPDATEFAAFAAEAIAAIHAKLGKNVLALFTSNAMLNKVYTELKARPEVNPANILPQGYPG

SEQ ID NO: 85723 - protein, 252 aa, Unknown
  Obtained from environmental sample
  DOMAIN (34)...(233): Xylose isomerase-like TIM barrel
  misc_feature (1)..(252): Xaa is any amino acid
LKESIHKYLKVGLISFMAYPSTLKGEDPNGLEIIKKVARDDYFDAIEITWTKDAALRAEIKKLLEVSHLTVCYGAQPRLLTTGMNANHLDEAERKKAEATLIEAVDEAEYMGAKGIAFLSGKWATETKEQSYTQLLKTTRNLCDYAKPKGMNIILEVFDFDIAKASIIGPAPLAARFAADMRTSHNNFGLMVDLSHIPMTYETPEFVVRTLRPYIVHFHVGNTVCRDPKAEGYGDEHQRFGFPNGQTTRLSA

SEQ ID NO: 85724 - protein, 83 aa, Unknown
  Obtained from environmental sample
  misc_feature (1)..(83): Xaa is any amino acid
LEKTYAAVGGAEKDIDDRELEELFLTALSQAQADINNSGKTIILPPDITRFHSRAGFFTEIAAKQLGEKLGAVLPALGTHMPM

SEQ ID NO: 85725 - protein, 191 aa, Unknown
  Obtained from environmental sample
  misc_feature (1)..(191): Xaa is any amino acid
NRSAIRSSSSLRYRLSLIGNCVDLSCTNTIFNVLTAVGLLVLLGVIVNNGIVLVDYTNLLRKRGYALQDACIEAAGNRLRPILMTTLTTVFGLIPMAFFPGEGSELVAPIGKTVLGGLTIGTLMTLFLMPTVYAVLNKRSDERAARAEARREGIALGEGGRARQKKAQSAAAAAASAIVGETGLNNLEAGK

SEQ ID NO: 85726 - protein, 793 aa, Unknown
  Obtained from environmental sample
  DOMAIN (449)...(516): Transglutaminase-like superfamily
  misc_feature (1)..(793): Xaa is any amino acid
MEKNAALAFRSAAVFIILFQIRLIAADLADTPIFTVTLLAGFSAAAFLSVLKTGGKQINAAAAILSIALIPWAGRFLVAMPRYFIPGRTDALAITFDSMLLNLDRNNFVSLFPYYWSAVTTFFAVRSRKFLRAAVIADASMLLFIYSVARTGKIEIYRWPVVMIVIFALVVFFQALALLFSMPIETKLRVKEKCFAITALIVIIVTGGILFIKPIQEQAAQMGGGLLEPKFFSFDFSRLLRLDPEISVKNDLILIVKKENDDHILLRRAVLSGYSKRNGFYKIEELDEKTHPQKLPGKQISFTPPAFKEARLSEQEYFLVNVESTAFIGMKEPVIVTPYENWDASSFKAAYAVTSLVSDADIYDLIISTVKWPVFSDLGLSENEIKIYTEYGNDESIRSLAELITEGCITYAEKVIAVYNYLKNGDYRYSLKPGIAPDGDQLGWFLFKSKKGYCSYYAFAMTLLLRSMGIPARLAAGFFVEQETNTFDYYPVRSDMAHAWVEIAFPGYGWIEFDPTTENLAEDEEVRFSAGLDLALFEKLMREILENRFSMRVKEDADDIKIISGNNSAAKNAYILLKNNGLSLFVLILIALSLYIRCGVYISVFLTRNTRKKAIRLFKHARRLLRLAGLSARLRAVQRRGNMTIGLSESEWALQLNSIFNGIYPLYQSAAAARFSLNYSEQELKIQTANYRDFRSSYNANVSIWRRIKTWIFPLSLITPGKILTVFILLGLFGGSQSQIVTAQDSQSVQSAQSSAPNGGGEEIISADALFREASDADYSEHWERAIECTKKG

SEQ ID NO: 85727 - protein, 199 aa, Unknown
  Obtained from environmental sample
  misc_feature (1)..(199): Xaa is any amino acid
MIGDVVGDPGMEALERRLPALIRENSADFVVVNGENAAGGFGLTADFLERIITAGADLVTSGNHVWEKREFWPTLESEERVLRPLNYPEGSLGLKTAGKGWVKLEKLSPWGPITWLTVNLQGRDFMKAIDCPFKAFDTLEALEAAADTAGTEKPVILVDFHAESTREKEALGYYLDGRASLIAGTHTHIQNADERLLPK

SEQ ID NO: 85728 - protein, 105 aa, Unknown
  Obtained from environmental sample
  DOMAIN (4)...(90): RelB antitoxin
  misc_feature (1)..(105): Xaa is any amino acid
MVKTANLSIRIDPQTKKGAEQLFSNFGITISDAVNIFLRQSLMVGGLPFEMKQPRYNAETEAAMQEARDIMSGKKKAKSYSNADELFEELTHTDLFDKKKRQRKI

SEQ ID NO: 85729 - protein, 168 aa, Unknown
  Obtained from environmental sample
  DOMAIN (1)...(166): Protein of unknown function DUF45
  misc_feature (1)..(168): Xaa is any amino acid
VLGGGYREISVSWKTFPLFVWGEALELEIIRRKGNPKIVTEDGKMKMYVRPDSTNAKRQEFLDKWYSKILKDSSLPVIEEWEGRIGVKVNKLFVRKMKTCWGSCNSTRQTLRLNSELAKRKRECLEYVIVHEMLHIIEKSHNRKFYSLLNKYLPEWKIIRKKMNVGEL

SEQ ID NO: 85730 - protein, 67 aa, Unknown
  Obtained from environmental sample
  misc_feature (1)..(67): Xaa is any amino acid
MHAKAIAVANQKGGVGKTTTALSLGAAMAMRGQRVLIVDLDPHVCASVHLRFYPDDCVYTILYSAIK

SEQ ID NO: 85731 - protein, 158 aa, Unknown
  Obtained from environmental sample
  misc_feature (1)..(158): Xaa is any amino acid
MNNRQTKEIHPAVIAVWAAVVSAGHLLPTIPILGTGGTFSLSHALSPLSGIFFGPVAGALCSAAGGFAGSLVAPHTAWMGPFTFIIGTATAFTSGCIAWGKWPPVVISGNGSLIINGGIIVYTIGTILWFTQEIGRSIFLFPVVFYGFGFSAMTAGII

SEQ ID NO: 85732 - protein, 98 aa, Unknown
  Obtained from environmental sample
  misc_feature (1)..(98): Xaa is any amino acid
MNLLAIDASCSVLSAAVCRDRDYYYAQTEAGMKHSELVMEIINKQMEKAEMKPADLNGILCMGGPGSFTGLRIGFSIAKGLALSLSIPLYSRPICHGD

SEQ ID NO: 85733 - protein, 325 aa, Unknown
  Obtained from environmental sample
  misc_feature (1)..(325): Xaa is any amino acid
VIAEEFYLGIINAAGKTYNQLKTEVETIVTNNYPLSGVQFVLSQPAVFKIYIRGEVRRTVEVTAWALNRLSGVLGGHLTPFSSTRNVSIRSSNGQVRVYDLFKADRMGDLSQNPFVRPDDVITVNRIERQVTIGGAVERPGTYQLLAGENFKELVEIYASGYTITADKTRIQLVRRVGSNEISGDIMYLTEQDITDNFTLLHFDTITIPSITDLRPAVPVNRLERRITIEGAVRRPGTYDLMPHENLRELIEVYGDGYTPIADSSRIELVRHVDSAEASGDKIFLTEKDVTNNFILQHFDTIMIPDITTLRPVIFVEGALWWYGR

SEQ ID NO: 85734 - protein, 161 aa, Unknown
  Obtained from environmental sample
  misc_feature (1)..(161): Xaa is any amino acid
MDIHDDAQTAMTLSRFSSEDPDELRSAASDAATWGLVEAVPRLVRLIQSSNLGVQEAAEEALRTIRGPEAVRGVAPLLRSDNASVRNSAMDILREIGEDDIKVLAGLMHDQDPDMRIFAADILGTSGEHSAITLLIDALLHDPEPNVRHQAAVSLGAMGNP

SEQ ID NO: 85735 - protein, 93 aa, Unknown
  Obtained from environmental sample
  DOMAIN (4)...(88): Anticodon binding domain
  misc_feature (1)..(93): Xaa is any amino acid
GSAHLRKLLGVCENILQRTSVANIRAEIDTSNEKIGYKIRLGEMAKIPYLLVVGEKEVTENVVAVRKRKEGDLGKKSLAEFLKEILNSPYAML

SEQ ID NO: 85736 - protein, 93 aa, Unknown
  Obtained from environmental sample
  misc_feature (1)..(93): Xaa is any amino acid
MDQIGRGVTSRYRYKRKETWSEKKPEGRFRCFTYKEILERDKTSLDIFWLKDKSLTDLDSLPDPDVLAVEIMENLETALENFKTLMTNLNTEK

SEQ ID NO: 85737 - protein, 120 aa, Unknown
  Obtained from environmental sample
  DOMAIN (32)...(120): Histidine kinase-, DNA gyrase B-, and HSP90-like ATPase
  misc_feature (1)..(120): Xaa is any amino acid
MSEDNNYSGSNITVLEGLEAVRVRPAMYIGSTDTRGLHHLVWEVVDNSVDEALAGYCNRIEISIMQGNGIKVVDNGRGIPTDIHPKEKVGTLQGVMTKLHAGGKFDDNAYKVSAGLHGVG

SEQ ID NO: 85738 - protein, 297 aa, Unknown
  Obtained from environmental sample
  DOMAIN (35)...(295): ABC transporter transmembrane region
  misc_feature (1)..(297): Xaa is any amino acid
GSQPFFPSDQVDHKPLRRALILRLLKYLKPYVLHCFVFLVLMLGGAVLEVMPSEFTQRLIDHHLLTKSLKGAGPLFATFICFVCLSFIVQLTRSVLLGWVGQKAMLDLRLQLFGHLMHRSTSFFQHNPVGRLMTRVTTDVQNLNEMFSSGFVAVIGDALSLLAIVIWMYLRHPGMATIALFILPFLIVATEIFRRKASMAFRETQGRYAAIQAYLQERLSGMSLVQLNSNENASKRTFDGLNQSYLEAFLKTVLAYSVFFPVVEFMTSVTLAAIIFYAGYKVQIGDVTLGLLLAFVR

SEQ ID NO: 85739 - protein, 295 aa, Unknown
  Obtained from environmental sample
  DOMAIN (161)...(283): GTPase of unknown function
  misc_feature (1)..(295): Xaa is any amino acid
MERFADEAVIEVSSGNGGNGCVAFRREKYVPKGGPSGGDGGRGGDVIFTVRRNLRTLAHLRFKHKFKAQNGRDGGNANCAGSNGEDVIVPLPPGSIIREAETGNVIKDFSGNNGDFVFLKGGNGGWGNVHFKSSVNQAPRKALPGKPGQTVKLKVELQIIADIGLVGFPNAGKSSLLDRFTNARPKIAAYPFTTKIPNLGVLTIDDKDIIIADIPGLIEGASGGAGLGIRFLKHISRTKALAFLVDLSEDNYLEAFDVLLNELGSFSGDLPKKKRLLIGTKTDLDGTFAPAGGTC

SEQ ID NO: 85740 - protein, 332 aa, Unknown
  Obtained from environmental sample
  DOMAIN (6)...(134): Cytidylyltransferase
  misc_feature (1)..(332): Xaa is any amino acid
MKKTVYLGMRGDIIHPGIINIIRKGAIFGELTVGLLTDSAIASHKRLPYLTYEQRKDVIENIKGVERVIPQEEWSYVPNLRKLKPDYIIHGDDWKSGPLKKERDEVFAVMKELGGEVIEIPYTAGINSSSINEAIRSVGTTPDIRLKTLRRLLETKQIVRIMEAHSGLSGLIIENLEIEKEDGLHSFDGMWSSSLTDSASKGKPDIEAVDLTTRLHDLTNILECTTKPIIFDGDTGGHHLSFTVKTLERNGISAVIIEDKTGLKRNSLFGTDVNQELCPIHDFCEKIKAGKKAQVTKEFMIIARLESLIAGFPVSHALKERALLWRPARTAL

SEQ ID NO: 85741 - protein, 260 aa, Unknown
  Obtained from environmental sample
  misc_feature (1)..(260): Xaa is any amino acid
MSVMTPGKPPAAGVFSAPRLAPCARGPDKSLDRACPPIETVRMAKARFQAMADKGLPLLRGLLRTDSGRLAVSSCRILPGEEARRLLPDGKLAGDGTSQDQARASALMKLAESYSFYSFWERLPRLPGMVRGGWSEAQAELGSALIDLEEILRSARDAVSPGRLHTARKLFDLMPWTFVPALHLGENRIVWIPAEWFRMLGADNGCSAGNTVTESILHGVRELIERHVCAVIARSEQARAFILTDDIRESALDFLLGRFA

SEQ ID NO: 85742 - protein, 276 aa, Unknown
  Obtained from environmental sample
  misc_feature (1)..(276): Xaa is any amino acid
MKALCVLYGGRLEEEAFEKILSGKTGNESAFSLAVASARAFPGVEKTVLLGMRDSGFADLPSDIETVLHPSWTRRSLFEEISRLSAGYDFTYFAWADCPLLDSALTGAMAERHLRYRAEYSYADGWPYGLAPEILGPGIAGILAKLSENSDGLVDRDALFLTIQKDINAFDIETEISPVDLRPYRLSLTADSKRNLLLLIRFMEDLKQTVSNDAISASDIEKIILEKPALLRTLPAFFNIQVLGACPQACSICPWPSHGSSVPVTERKDLCPKPSS

SEQ ID NO: 85743 - protein, 296 aa, Unknown
  Obtained from environmental sample
  DOMAIN (1)...(202): Transposase IS66 family
  misc_feature (1)..(296): Xaa is any amino acid
KLGEEFSEKAGNDSHASFMWPSKYVPSTPPANARGPKTKGKPTFRIAPVEKVMIPKGIASDSVLVMIITQKFEMHLPYYRQEKQFEQIGLTISRQDMANWQQQVYEKLKPLFILLKAMIKSWYVLRMDETPVQVMREEGRENAQTSYMWLALGGPPDKTVAWYEYHPTHAEYNAKAFLEGYSGYLQTDGYDAYDSAVKDMPGIVHVGCFAHSRRRFFEAAKINKKPQSAEEGMKYIRRLYQLEDALRGKWKDDLEKFHEERKKEAATILDEFKAWLLKRVNEVPPKTLLGEAVNYT

SEQ ID NO: 85744 - protein, 98 aa, Unknown
  Obtained from environmental sample
  misc_feature (1)..(98): Xaa is any amino acid
MEKGTFTDPRDGKAYKTVKIGNQIWMAENFAYDAPGSKCYDNNPTNCQKYGRLYDLDTALKVCHSGWHLPSKEEWQELVYFIGGRKNCWKKTPSGLVE

SEQ ID NO: 85745 - protein, 260 aa, Unknown
  Obtained from environmental sample
  DOMAIN (1)...(183): E1-E2 ATPase
  misc_feature (1)..(260): Xaa is any amino acid
VVGDMVYLAAGDMVPADMRIITAKDLFISQASLTGESEPVEKFASPAISASRNPLEYKNLAFMGTNVISGSATAVAVTVGDDTILGSIAKQLQTKAPPTSFEKGVSSVSWVLIRFMLVMVPIVLLVNGFTKGNWLEAFLFALSVAVGLTPEMLPMIVSANLAKGAVSMSKKRVIVKNLNSIQNFGAMDVLCTDKTGTITQDKVILELHLDVHGNDNLDVLRYGFLTQLLSDGIKKQRWIFPLSITRSKRNCKTCGRDAPY

SEQ ID NO: 85746 - protein, 164 aa, Unknown
  Obtained from environmental sample
  misc_feature (1)..(164): Xaa is any amino acid
FTERLKKDPKNQRVYVDECGVNTFLQREYARAHRGEIIEEITRGEKFDRINTVGALCNEEYFAIECYRQTTNSVFFEDWFVNNLLKEIPHGYTIIMDNAKFHRKKELRKIARGKVRLLFLPPYSPDYNPIEKTWANMKRFLRNNLNDFHSVVSGIYNYFGFIDA

SEQ ID NO: 85747 - protein, 190 aa, Unknown
  Obtained from environmental sample
  misc_feature (1)..(190): Xaa is any amino acid
MRVLATSRLNGILERFNYIATSKLPVYSGAGTGRLYWLNTAETRNPAAALLYALQGRAAQQAVAPEDIDWPSFEAFYTWCEEHNYACNAYLSDPVTIADILRMIGNTSRADVLRIDSKVSIVQDVERYSPVQLFTPKNTISYSVTMFNADVPDAISLRYIDEDAGFAQKRVSVYHTPDGNRIKELIHSKL

SEQ ID NO: 85748 - protein, 106 aa, Unknown
  Obtained from environmental sample
  misc_feature (1)..(106): Xaa is any amino acid
AGNTRFLKTKPAFILAGFEETAYSEDATKLSAGDVIYLYTDGVTEAMNKKNDLFSDQRLLETVNRYKDSPIKELLSSVKNEIDIFAEGAQQADDITMLALQITGGV

SEQ ID NO: 85749 - protein, 111 aa, Unknown
  Obtained from environmental sample
  misc_feature (1)..(111): Xaa is any amino acid
MLEELTIRNFALVDSISLSFRPGFNVLTGETGAGKSIIVGSLGFLMGAKPETDVIRSGCEEASVSAIVSIGKGNNGAFEWLRSREINSEEDTVIIRRNIKHRARDQLLGII

SEQ ID NO: 85750 - protein, 77 aa, Unknown
  Obtained from environmental sample
  misc_feature (1)..(77): Xaa is any amino acid
MSEMIGLNALKLALQELFASDEKIIAIGEDIGAHGGAWMYFQGLYAKYGRDRVIQMPIAENGYSGFANGLAYGGYRP

SEQ ID NO: 85751 - protein, 173 aa, Unknown
  Obtained from environmental sample
  misc_feature (1)..(173): Xaa is any amino acid
MAKKETKKADLNVLTFKFQEMAMPGTGMLNYLPNPDTVLREQGGRIQVYRDMKDGHLGSVRRKRHAGVSSKSWSLQSGQGSYDKARVVETHLWNIGLRDAIKQMMKSLDFGYQVTEIVWGKRKWNTAAVHSNRQAARTFSILPKPKVGITNEKNGPIRRTNFCWGGTPPASNP

SEQ ID NO: 85752 - protein, 104 aa, Unknown
  Obtained from environmental sample
  DOMAIN (2)...(104): Glutamine amidotransferases class-II
  misc_feature (1)..(104): Xaa is any amino acid
MCGIFGYVGTQDAVPIIVEGLKKLEYRGYDSAGIAVYGQNGLGVVKQKGRLTALEARLAEQSHAVPPMAGPPLAGHIGIGHTRWATHGEPSDVILILILGRSVM

SEQ ID NO: 85753 - protein, 404 aa, Unknown
  Obtained from environmental sample
  misc_feature (1)..(404): Xaa is any amino acid
LPQSAGTAAATPVQAAEDDKNPKEDAEEEKVSYIEMDIRTSTLLELAAWCRELGLSDGGSWGQLASRLRSHYNLRSQRSAYQPGQQIITIESAKTTEYFTLEVVDEEYARLKGDVIVSLKDGATVHRIKAWEILYNRTRNVMTATGNVEYTKEEGSNVETFSGESITVNLDNWSSIFMDGSSQKSTIGRSATFRFAGTVVSRNSEGATILTGAEISNPANEEAYWSLYASKLWLLPGNDWAILNAVLKVGNIPLLYLPFFFYPADEIVFHPVLGYRSREGTFLQTTTYILGRPKSSGSSENSITRIFGGDSDSEDKVREGVFLRTSKEKTADPSATQLSLLFDAYVNLGAYLGAEMTAPAKGLFGETKLSAAPWLDQRYFYQRREIYSVPRLQRGEQPGFFKIF

SEQ ID NO: 85754 - protein, 278 aa, Unknown
  Obtained from environmental sample
  DOMAIN (1)...(254): Dihydroorotate dehydrogenase
  misc_feature (1)..(278): Xaa is any amino acid
ISVLGGIGTKGFTLTPRPRNTAPVFGTPRGHLNSIALKIREFNILLKTIFLLAPIRACCNRKPSGAESSEYIKGAGLLNQSTVDMIELNISCPNVKAGGISFGLDPGTAAALVAAVKRVCTIKPLIVKLSPNAPSLPAVSLSCIKAGADALSLINSYRAMAIDTVNRKPVFDNISAGLSGPAIKPIALGMVWELIKILRDSKSNVPVIGIGGIACTNDALEFLMAGASAVQVGSATFVNPNTMTEIIDGLHNYLIDNKMSNVNQISIRIEKDDHGKHN

SEQ ID NO: 85755 - protein, 84 aa, Unknown
  Obtained from environmental sample
  misc_feature (1)..(84): Xaa is any amino acid
LKTKIGLYRLEPEAVISRNPDVILTNVNYIDDPIAEIKNRPGFNNVNAVINNRIYQIDTDSSVRPSSRIILALRQMSQAVYSNE

SEQ ID NO: 85756 - protein, 340 aa, Unknown
  Obtained from environmental sample
  DOMAIN (133)...(238): Protein of unknown function DUF58
  misc_feature (1)..(340): Xaa is any amino acid
MIARRATLVAIALAWFLLGAVGFFSDAVSLVWLFSGLLLLPVIAADGLALFFFADTLAVKRDVPSSLAQGQRFTVKLEIRRGEKGFLPFRIRLWDLHPQSMDCEAFPALVSRSLLIGEKSEAPLILEYCLLPKERGLWFFRGTELLFSSVCGFWRLKVFHPCESSGRTYPDFKMIKAKAGTDLRGLLERNGQKNIRMRGQGLEFRSLREYQEGDSIREVDWRATSRRRKVIVREYQEEQDQQVLFLLDSGYRLHRSEEDGRTHEMHTQFDSALEAVLLLSWVSLKHGDSVAVGCFGPIKRWLGPRKGISAFPPAMKRLYDLVSGPYPSSPFSALEEALLR

SEQ ID NO: 85757 - protein, 73 aa, Unknown
  Obtained from environmental sample
  misc_feature (1)..(73): Xaa is any amino acid
LTKDQIGRGILLKELKKFTDIPENIKEAAQLTNYAVQTRYPGEYDEVTKEEYEKSIKIAKDCMNWIENKITNS

SEQ ID NO: 85758 - protein, 321 aa, Unknown
  Obtained from environmental sample
  DOMAIN (2)...(167): Sigma-54 interaction domain
  misc_feature (1)..(321): Xaa is any amino acid
EVRGQAVYKRAMEIAAAGGHNVLFFGPPGAGKTMLARRLTSIMAPLTSDEAVEVTRLYSLAGPLINNGDRYSQRFIDRLITNAPFRAPHHSASAEGILGGGRNPRPGEISLAHFGVLFLDEAPEFRINVLQALREPLEDRVISISRAEGPVRLPAEFQMIMAANSCPCGRLGIRETDNACFCSPEEVNRYWRKFSGALLDRVEIRVAVLPPGIEEMNAGTGKSVKTEERSAVIAQRVKAAVEIQRLRFKGTEIRRNALLPAGKTASLCPLSEKAENALNTAISKMGLSGRAFHGVLRVARTIADLKAGKSSKRNIYCSAIN

SEQ ID NO: 85759 - protein, 581 aa, Unknown
  Obtained from environmental sample
  DOMAIN (34)...(188): Histidine kinase-, DNA gyrase B-, and HSP90-like ATPase
  misc_feature (1)..(581): Xaa is any amino acid
MQPKNQNQQQPQNLEFQTEAKQLLHLMIHSLYSHKEVFLRELVSNASDALDKLRFEALTNPAINAGAELAIRVAVDKEAKTVTVSDNGIGMSREEAIENLGTIARSGSKAFLEKMTGEERADSNLIGQFGVGFYSAFMVANRVKVVTKRAGSDGGAVAWESTGENSYTISDAEKEGHGTDVVVYLKDDESEYLELWQVRSLIKKYSDFIAFPIYLPNDKGENEIVNQTKPLWLRPASEVTREQYEEFYHQALGGYGKTLCAMHSKAEGILEYSSLLFIPAQPPFDLFSSFERKHGVKLYVRRVFIMDNCKELLPEYLRFVRGVVDSEDLPLNVSREMLQKNAVIERMSKALVSKILGKLTEMAESDPAAYKDFWKSFGTVLKEGLYNDYENREKLLELARFQSSMGESDSDIVSLKQYVGRMREDQKDIYYITAENRSVAEKSPHLEIFRAKSIEVLYLVDPVDEWIIGMGGISDYNGKQLKSITKGDLDLGDLGKEEAEKRTAAQAELAGLSGRIKEILAESVEEVRVTGRLKDSPACLVAGAQFVGAHLEKMMKAMGQEVPVSKRVLEDNAEHPIHQNL

SEQ ID NO: 85760 - protein, 212 aa, Unknown
  Obtained from environmental sample
  misc_feature (1)..(212): Xaa is any amino acid
VVATASLELGIDIGSVDEVVLAGSPGSVSQALQRIGRSGHGVGMVSRGFLFPFHGLDLLLATALKGAVEDRDIEEIRPIENPLDILAQMILALCIEKNRNIDELYSLLKRFYIFRNLNREAYLRTVRMLAGLSSNGNGKIRLRDIKPRIWLDNISSEIGALDGSLLLLYSSRRGHSPTGGCIHWRLAQRNKNRGIGRGNCLGNPPLGIAFIL

SEQ ID NO: 85761 - protein, 159 aa, Unknown
  Obtained from environmental sample
  DOMAIN (60)...(144): Acetyltransferase (GNAT) family
  misc_feature (1)..(159): Xaa is any amino acid
MQIIKIDEHVILRFAKKRDTALIMNFIRELAEYEHLSGLLEVDEINLQKYIFKEKVVEVIIAEYDNKPAGFAMIYTNFSSFLGKPGIYIEDLFVRPDFRGKGLGKHLLSYLAKLVQERNYGRLEWACLDWNEPSHQFYRNLGAQPKDEWTKYRVSGESL

SEQ ID NO: 85762 - protein, 84 aa, Unknown
  Obtained from environmental sample
  misc_feature (1)..(84): Xaa is any amino acid
DGKGHYPNRIDFLHRYLRCLKKAADDGVDIRGYFHWCFTDNFEWDRGYTERFGIVHCNFETQERIIKDSGYWYRDIIKSNGTQL

SEQ ID NO: 85763 - protein, 391 aa, Unknown
  Obtained from environmental sample
  misc_feature (1)..(391): Xaa is any amino acid
MQKAKKESEDFSLALRKQSKALNDAAGAARDYAEAFKGMTGEQSAISLQDAERRVNHLIGIIRDGEQEIERLKEKWDEEGKVYDTPRLDKLETAVSNAKLQLEAARAEWAAIQEGYRQYRNPVEEAVPIDESARKAAENWFKQWKDQYEKFKRDVSGNPFADIEFELQLKLSEAQTYGANREVINQINEYYAAERSKIIEQLTKEEARMQRDLTKSKIDNLEYEKEEALRLLNELEQKRIISAKYTEEEISEIRERFAQMRDDIDLKFNIEIDKAKLDEARDAVKSWQEELSNSLLIAVMDLGLFSEEASVIISDLSAKLIELSASAMLSGFEEFGRALGERSKDTEALTRALSRMAKQILNQLPMMFLQPGYSLSQTDSGRWGLVSSPRP

SEQ ID NO: 85764 - protein, 231 aa, Unknown
  Obtained from environmental sample
  DOMAIN (23)...(46): 4Fe-4S binding domain
  misc_feature (1)..(231): Xaa is any amino acid
MYSPGSGSHHMKEKGSLSLPPVIRVDGEKCTNCQKCIAVCPVKFCNDGSGKAISLNHDMCIGCGSCIPACTHGARTGIDDTDVFFADLAKGEKIIAIVAPAVVASFPDQYLNLNGWLKSLGVGACFDVSFGAELTVKSYLDYMKREKPKTVISQPCPAIVTYIEVYRPELIPHLAPADSPMLHTAKMVREFYHAYSGHRIAVVLPLPGEKREFAGDRRMRLQRHNGSTSQT

SEQ ID NO: 85765 - protein, 75 aa, Unknown
  Obtained from environmental sample
  misc_feature (1)..(75): Xaa is any amino acid
MDAKQAITENKTSLGIEFGSTRIKAVLIDTQYTPIAQGSHDWENRLEDGVWTYHLDDVWAGLQDCFKNLGVDVKN

SEQ ID NO: 85766 - protein, 164 aa, Unknown
  Obtained from environmental sample
  DOMAIN (35)...(113): Bacterial Ig-like domain (group 2)
  misc_feature (1)..(164): Xaa is any amino acid
MLSNNADNARPAEYFGAGILNVAKLAPRDDSNEIPVTGISLNPKSVSLHIDANEKFSASVLPGNATNQGIAWKSNNPRIAKVSKDGLVTGVTPGNTIVTARSVDGNSRSNAIISVLANDKQVDLRKKLLVIAPVIILLLLLFTLNLPKAQTFQADYPAFNTAIY

SEQ ID NO: 85767 - protein, 92 aa, Unknown
  Obtained from environmental sample
  DOMAIN (6)...(91): RNA 2'-phosphotransferase, Tpt1 / KptA family
  misc_feature (1)..(92): Xaa is any amino acid
MNGNKSDNNHVAISKFLSLVLRHSPQTIQLNMDKNGWINIDELIQNANKYKKMHLTFDLINTIVKNNDKQRFILSDDGKRFRANQGHSINID

SEQ ID NO: 85768 - protein, 170 aa, Unknown
  Obtained from environmental sample
  DOMAIN (1)...(170): NLPA lipoprotein
  misc_feature (1)..(170): Xaa is any amino acid
GPPHDRFGTRCGPFGLYSAKHKNINDLPNGATITIPNDPSNGGRALLLLQSKGLITLKDGILGLTATPRDITSNPKNFRFQELEAAQLPRSLLDVDAATINGNYALEAGFNPVRDSLIIEGADSPYVNIVVVQKGKENDPRIVALKNALRSQKVKDFIASHYNGGVVAIF

SEQ ID NO: 85769 - protein, 307 aa, Unknown
  Obtained from environmental sample
  DOMAIN (146)...(300): Domain of Unknown Function (DUF748)
  misc_feature (1)..(307): Xaa is any amino acid
MGTQKISVSRRRIRLIAWISGLAAFCLMFASLVLPHVLRPALETLLSRTLHSAGRVESLSFNPFTLTLSASNITVPYPGDVGIFLRLDRLEVVFSFFSLFRLTPRISELTLDNPTIDLTLFENGKFSLQLFFDGRDAELSGTTSVFPCVIENFSLNNGTVVFRDLGAGTTHIAEKIQLAVPFASSLPADRELAVMPRFNAVVNGQPLGLAGETRPFSETLLTEFTLQIEELELDRFREYIAPYTTLTLKNGALSTALKLLISREEDESIRFHLASKTTIRDLELAGPHGTVFKPPAWKRTSKSGRKS

SEQ ID NO: 85770 - protein, 124 aa, Unknown
  Obtained from environmental sample
  DOMAIN (88)...(121): Rubredoxin
  misc_feature (1)..(124): Xaa is any amino acid
VIASSAERTDKFAGSGEALRAENGVRYLSECANGVISAEVKESIDCGTHTLFIAEVNQAFSLSRDPSVTYQYYFDNIKPKPQPPKGNKKGFVCKICGYVHEGDTLPDDFICPLCKHGAADFERI

SEQ ID NO: 85771 - protein, 316 aa, Unknown
  Obtained from environmental sample
  DOMAIN (225)...(292): Elongation factor Tu domain 2
  misc_feature (1)..(316): Xaa is any amino acid
LSFRASEFALLMVDGRSGVQIETIKLWRSLDAQKKPRGAFISKLDNDQTDFNKALADIKEKFKMDPVPVSIPMGSGGAFKGVIDVLHNKAYMAGDDGAEKECPIPDEFKDAVAAAREKLIEAAAEGDDTLMEQYIEKGSLSPEEMKKGLIEALVESKYIPAFAGSALKNSGLIPFMDFIADVGPSPRSAKDAILGSDGKTQEVSIDPDKPLSALVIKTTYDQFSGKLSWVKVISGKLAADTEAFNVSENKKERIGKLYTCQGKKLEELRELYAGDVGGITKSATLKTNDTLAAADKRLDFVHLQLPKRYIRCGSRA

SEQ ID NO: 85772 - protein, 579 aa, Unknown
  Obtained from environmental sample
  misc_feature (1)..(579): Xaa is any amino acid
ADFAKRSLSGKTRLYLNEWRQAAMERQALQTVEERMAPYAKIIEKIKQVDGVVQEEFYTTEYTELHGGKESFRTGTPCNSVPSVVNSFLAEIISALALFEEYELLEALFEKKMFTANMLNETVSPSFSYYQPTPLYLITGKKALKKMKDPVKMIRTLASFGADPNVPAGDGSTMLWNQCNPGYPIEIMKTFLEIGADPNQTSEDGEFAWTPLAYCLIPSNPEDENGNPIAHQYLPFESEALQKAKLLLDSQRRHEPRKPFSAGHSAADVRRPYSSRQNDETERLRPQDMELIKLLLEKGANPNFTDSKGDTPMIVALEKGMWETAELLLKYGAIMPNVKIKTLTQKINRIKEEYADLPPMILPPADDEEIKRHSRMLTGYGFPPIPHGYAEFLKVCDGYAFDGVELYGTESVTEEGSTFILHDIGSMTFKMNKRYEEYCEQSNKSLLWLGSDAGGNYYTYDDKTGKYQLRSHESIGEVYFEYGTFEELFDRLIYENQITDDEDNIKYIYKEGATASETYDKIKTDDAVAKDALEYYRALAEQGNRSAQFELARMLFLDSRFEDKEQQRMAETRRKLRHS

SEQ ID NO: 85773 - protein, 84 aa, Unknown
  Obtained from environmental sample
  DOMAIN (2)...(79): Anticodon binding domain
  misc_feature (1)..(84): Xaa is any amino acid
GLGGSWIRSAREAGIEVLLDDRNERPGVKFNDADLTGIPWRVVVGDKGLAQGQVEIKRRGEKESRMADLATAAKELAEAVNKEK

SEQ ID NO: 85774 - protein, 140 aa, Unknown
  Obtained from environmental sample
  misc_feature (1)..(140): Xaa is any amino acid
LTEINENENESGSGINSDTNDGINADVGNDIDNGIDDSGVNDGVNADGNNDTGDGVNNDIGDNSVNDGVGTDTADVVDVDIQPQQDEGAIDETRILEALLFASDELLTPSKTEGIIPGSPDARHIRQMVGEITSGCLRKD

SEQ ID NO: 85775 - protein, 128 aa, Unknown
  Obtained from environmental sample
  misc_feature (1)..(128): Xaa is any amino acid
MDKKIIYSIKSPYRQSMDIIGYTFGSGELSCCVVGALRGNEIQQMAICAQLVDTLKRLEENGCVLLGKSVMIIPCANTYSMNIGKRFWTMDNTDINRMFPGYDQGETTHRIADGLFKAVKDTSTAYEC

SEQ ID NO: 85776 - protein, 235 aa, Unknown
  Obtained from environmental sample
  misc_feature (1)..(235): Xaa is any amino acid
MVFSSIIAEELKIEEQRVKAALKLMEEGGTVPFIARYRKDQTDNLDEIQLRDIQHRKESLTELAERKETVLKTIEELGKLTPELKAQIDSCRDKNILEDIYAPYKPKRSTRATIAKDKGMEGLAKIIWEQEETSNSAETIAMAFLSEEKALQTLRQQSNSLWIFWQKMLQIHRNSADICARKLKNRAKWFQRLKRNLKAKRQNSKTTTIFPRLLAQYQATECLQCAVAKKKKFCV

SEQ ID NO: 85777 - protein, 67 aa, Unknown
  Obtained from environmental sample
  misc_feature (1)..(67): Xaa is any amino acid
DQQTLRSTRFSTRYNAACFGCLGYEMDLRFLTPAEKSEIKEQIAFIKITEKLFNTELLNVCLLWETG

SEQ ID NO: 85778 - protein, 262 aa, Unknown
  Obtained from environmental sample
  misc_feature (1)..(262): Xaa is any amino acid
LDAEQELRALDQSLADNKPHRLYEEIRARIERIKLDLAKQTEQAEKYRDLKSQCETLLNRALTENFDAEDAALAEEAKKYQNERYIAEQKKNETQNLLHDIRSEIAELDRGILRYPDAPRELQIALEKAGIEAFFLAEAAEITEPAWVDAVEGWLNTRRFAILVAPENFQKAIGVYDRLPRSVAGAFIPNIEKMRDAKAKLGSLAEIVKAEGYAHIYINYILGKVMRSDLANLKTYDSAVTKECMTYTNHTVHSAESVMPHP

SEQ ID NO: 85779 - protein, 318 aa, Unknown
  Obtained from environmental sample
  misc_feature (1)..(318): Xaa is any amino acid
AGTASVVADGLDAYEGKTAPKTFEIAKKTPTSADFTWSVSNAYTADTNSAKVKSKDSTATVATLGALTVKYAGATTVPVNAGQYALTVDVAGGSNFNAAPGLVLGNYTITKAVIDTTWLAYTIPTNHKEGQSAPFGIGAVTMKKGTGVDASAITVKYNGLSTVPSVTGTYNVTVDILGGDNFFSVANLALGTYVIGGIGVAEGNTTIPTAKKDAVVTVAPIKVAAASFTAGPSPVAKNGVIKFFSAKQVKSGSLYIFDANGNAITKLSAKSGSGEIASWNLKDKKGVTVAEGTYVVKGALAGKDGTREKVSFVFSVVK

SEQ ID NO: 85780 - protein, 457 aa, Unknown
  Obtained from environmental sample
  misc_feature (1)..(457): Xaa is any amino acid
MESTFEANHDSTASFHFERPRLNSLFTEAVKYPLVVVCAGAGYGKTTAVEDFLKGYKAAAARVQLSDSDNVGVRFWENYTRSVSVVNPTMAKKLFEFGFPNSIPKIQGYKKIIDEYIVREKRILVIDDFHCIEDPAVLQFMEGGFFRDMQPETTVFLISRSLSRVNIAGKLYRDQAFNINEDDLCFTENELAQYFRRLGISAQPDGLREIMKDTEGWAFAINLIARSYQKAPGYCGYVRNAMKLNIFRLLETEIWDGISERLQNFLVRLSLIDHLSVDLIAELAGGDEELIAGMEKQSAYVRLDSYINAYLIHPLFLEFLATKQELLSEKQKQETYAIAGDWCNRNGFRIDALSYYEKIRDYKSIVNIFFDLPLQIPLDVSHYAMPILDRARPDELYKVEFLAEMHVRAYMCQGLLQKSLDLVKYYEAKFLELPGDSAVKKRTRRGSYLGRSVMAPP

SEQ ID NO: 85781 - protein, 335 aa, Unknown
  Obtained from environmental sample
  misc_feature (1)..(335): Xaa is any amino acid
LPRPQDWEDLEEALGGGFEASYRLRAQSGWSEEFYDEDDEGTEMGDDSGFASMPGGLYAPESSEPFYGLGRFGFWWSASEDGGSAYSRSINCCGDDGVGEASPNTESFGYSVRCLLDDKSNERKEQRLREETRKKEIEARKKMEAEQKCMEEERQRKETAERETMEEGQERFGKTSVYFTDSRDGQKYRAVKIGGNTWMAQNLNYKPENGKSRCYKDSASYCGKYGRLYDWETATNACPAGWRLPSNKEWSGLMSAVGGKFKKYEHNPGWFGAGAALKTNAGWDCYKDRNGNGTDAYGFSALPGGEYFNEFRDDFRGLGKIGMWWVAHSDTPHPF

SEQ ID NO: 85782 - protein, 365 aa, Unknown
  Obtained from environmental sample
  DOMAIN (120)...(362): TonB dependent receptor
  misc_feature (1)..(365): Xaa is any amino acid
MTDWPRMPRAFCDDLAMEASLGSYFTRKDYTSPADIFSRHDQQTLTAINRWNWFTSEQLALKSGFDYRFIWLDSTDIGNRDRHDGGIYLTAEYKPVQQLMIIPSVKAVFANKGDTLFTAVPKLGLLWNVTDSLALKNNYFRSFKFPDFEELYWNDGGFATVGNPDLKPEDGWGGDIGLSWCYKDLFIFESTFFTHWLKDSIHWYQGTGGIWRPENVGEAIFLGLDNKLRFEIPVKLGAIKKIIPSVSYQYLLSYLLSFGYDFSDNKRIPYSPAHTIGGSLEIPWGSGSVIISGHYESLRYDDRANLTQLKPHFLLNAAVNQKIGKNFTVFGVLRNILNESYQSFNDYPMPGITLTLGIRANLEIK

SEQ ID NO: 85783 - protein, 568 aa, Unknown
  Obtained from environmental sample
  DOMAIN (449)...(539): Helicase conserved C-terminal domain
  misc_feature (1)..(568): Xaa is any amino acid
LNEPAIEEEAMNKLPIVNKPNEYFDLVFNIPSERAFSYLGDEKGEAAVGRRAMVPFGGRDCLGYIINQKDSPPHGMTSETIKRIRRVVDKEPVFDGRDLELAKWMAGYYFCGLGQALQAMIPSGKRASDFSSLAGDEEITASPLALSDEQQRALDAIIRKERHEPSGAAALFYLFGITGSGKTEVFLRAAEAMLKEGKSVIYLVPEISLTHQTADVIWKRFGNAAATIHSGMSPAARLSEWMRIRTGQVKIVVGPRSAVFAPVLNLGLIIIDEEHDGSYKSGNTPRYHARQTAMRRCATEGARLVMGSATPSAEAWKLMRDGAIKRLDLSRRLSGGQVPEIIPVSLEKTDGCLTRELKDEIRVTAQMKKQTILFLNRRGFAYYYHCRSCGYELTCKHCSVSLTWYKSRNKAVCHYCGYSVTPPSVCPQCGSLEAGFSGFGTEMIEEEVRRTFPDLRIMRIDADSTEKKGSLKKALDLFKAGEVDILLGTQMVAKGLNFPGVRLVGVILADMGLQLPDFRAAERTFSLVVQVAGRSGRYFRDGKVVVQTLRPWDPAIVKSALGQSVLET

SEQ ID NO: 85784 - protein, 271 aa, Unknown
  Obtained from environmental sample
  DOMAIN (113)...(268): Uracil DNA glycosylase superfamily
  misc_feature (1)..(271): Xaa is any amino acid
RLIGERPSPCLIMEEEAESFEETGEPDQQPRPKGTGYVGSDKNGFYAGLIPSQTIHSEVTSNALKLARESVQKVLNPPANKKYASGDSLEAVAADVGACKACGLAATRKNTVPGEGSIYPLVMVIGEGPGADEDSAGRPFVGRAGQLLDKMLESINLTRGKNCYIANMVKCRPPGNRNPETAEISACYPLLERQIILLKPVFILCAGNVATQNLLKTSKGITSMRGQFVEFKIGELTIPVLPTYHPSALLRDETLKRPAWEDLKLLKSRLC

SEQ ID NO: 85785 - protein, 375 aa, Unknown
  Obtained from environmental sample
  DOMAIN (10)...(362): Protein of unknown function (DUF1016)
  misc_feature (1)..(375): Xaa is any amino acid
MKLDDEYKKWLTELKSRIRQSQIKAAVKVNTELLLLYWDLGHDITIRQMEKTWGSSFFEQLSSDLRSEFPEMQGFSATNLKYCKRFYLFYTQSDPNRQQLADDLILQQPVEKLQILENKGNSIRHQVGDDFENHPIFQIPWFHHVQLITKCKSVKEALFYVQKTIENGWSRAVLMNFLEADLFSAQGKALTNFSRLLPDPQSELANQILKDPYNFDFLTLTQNFKEKELEDALTSNITKFLLELGQGFAYIGRQIPLKIGETERFIDLLFYHLELRCFVVIELKAGKFEAEHIGKLGLYISAVNHQMKKEADGPTIGMIICKTKDSVEVQYSLEIVNQPIGVSEYRLSKLLPDNLKSSLPSIEELEEQLKKMDDA

SEQ ID NO: 85786 - protein, 305 aa, Unknown
  Obtained from environmental sample
  misc_feature (1)..(305): Xaa is any amino acid
FSHDRSAEQGKIPDAIVVDFGDLSKNTTDRFEEIFYKKFFDKFTAELQEYHITFLNELLTKGIIIPNEDRLKDAADGRYEMEKFFDKLNRFVSSNNAFARKSVVIILDEFTYLYKWMKKGKVDEEFMKYWKAMISDYKIVAIAAAQDYIGEFISAYPNQFGTTELIPVDYLVEEDVLEMIRRPFKDNSFMAAFEHKMKDEAINRIIKLTAGNAYLTMIFLDRLVDYLNKTNQPIVMQVTVDTVLQKEILGGNNPFSLEYFEMLYNDDGDIYDTDRPMHNLALLWTVAQQKRATFSKDENQDFGRK

SEQ ID NO: 85787 - protein, 100 aa, Unknown
  Obtained from environmental sample
  DOMAIN (5)...(98): CHC2 zinc finger
  misc_feature (1)..(100): Xaa is any amino acid
MSPRYNDDAQERVRQRIDMVAVVSRYVSLKQRGRSMVGLCPFHREKTPSFHGNPDVGAYYCFGCQKSGDVFSFVPEMEGVGFREALEMLPEGAGVELPLY

SEQ ID NO: 85788 - protein, 202 aa, Unknown
  Obtained from environmental sample
  misc_feature (1)..(202): Xaa is any amino acid
ITADSRGKRVLNFFCYTAAFSIHAASGGAASTDSVDLSNTYLNWARDNFTLNGFDTAMLRLDEFFAGDHNQGKTAAQGAAHRLIRADAVTFLHQAAAARQRWDSIIIDPPVFSNSTMARADFDLNRDCGELLAGCLALMSPGGKVWFSANARSFKTNAADMEMALVNHFPGIKVSDYTDKLIDEDFKGKKIPKAFMLETINR

SEQ ID NO: 85789 - protein, 455 aa, Unknown
  Obtained from environmental sample
  misc_feature (1)..(455): Xaa is any amino acid
GVQGAQADGCFAAIGVAEKPSNEILPFTDPDQVEKKIGDGPLRDFLVSSLSIAQTKVSVIVLEGTIPGTVSAVKSGAENKGVGTITVSGSPRNEYKITVAIESDGGLNEATFRLTIDGQSGKLITVPDGEAKHEISGTGLTLQFNPGTGFKEGDSFCFETTAPSATNGEVLAAIDKIFDAKLLIEFIAITGVSAAPMWAALATKANRAEGIYQYLFFVAQARYLKKNETLDALVNALCGEERGTVGSTRLQVCASYIEEADVNGQIDLRPLINTYCGTLASRKVQDGPDAVKFGGIDAATALMPEEINDGHIENLKNAGYVTARKYVGRKGIYITSGQMMSEEGSDYDLVERRRVMDKACRNLYVAQLPAVNDTVTISKDGSPEGIEMFVAKSQSPLDIMKTNREISDGYVIVPPGQNILADKKLRTKVRIVPLGKMSYIENEIAYMNPALGGAE

SEQ ID NO: 85790 - protein, 297 aa, Unknown
  Obtained from environmental sample
  misc_feature (1)..(297): Xaa is any amino acid
GLACVRSAESTAERFRYYRVDSVSVRNDYGIPKDDTQMRLENTYIGWNFATIWAMDYESQSYPYLGMIRAPAPVITKHPADDSVGIGAKSPTLSVTATASGIISYQWYSNSVPSNKDGVKIEGATNPTYNPPTNEESRTFYYVVVINTSTVTVADSLAGRKTASVASNPAKVKVGKPFDAVLSYDRVVPLADNNKESASISPVQKPTANFTAGPNPVNKGGVITIFHKGKRIVGGDLFIYDVTGKLVNRIDVSRSKYTWDLTDKKGNKVPEGTYVIKGVVTGSDGKREKVSVLAGVR

SEQ ID NO: 85791 - protein, 790 aa, Unknown
  Obtained from environmental sample
  DOMAIN (552)...(789): Glycosyl hydrolases family 38 C-terminal domain
  misc_feature (1)..(790): Xaa is any amino acid
MPKVEQRIRRYLNLLEKNACRKIADLEFKTHEKEDARFRFRAVYNAPLSGNPLFLCVTPDEDSLAFIDGRPAGAFDMYHNEIRIDADGKEHTLHVESYSGGCLLERRRAIHSLFYDIRALYETAKIADPNSLRKAQIMKGLSIALNGISLNADGEELEKQAAGAAQTLAPLLALKNGPSAPAVHLVGHARIDHASNIAETGRKAARTFANMLEFIKEYPEFIFLQSQPCQLEIVKKEYPDIFTAVKEAFKNGRWEPNGGMWVEADCNIPSGESLVRQFLVGKKVNKELLDYEADTLWLPDVFGYAAALPQIMAGCRIKYFVTSRINWNDTTPFPYETFIWRGIDGTGVKTHFLSTMCPGADYNGRVVPEELAAVWNAVQHKEVQSACVKSIGEGGGGTLRADLEMARRLGDLEGTPRAAWKTVSAALAEIFDNGEFPEWRGELYLEPHGGTYTTQARAKRNNRLLEFSLRRTEFFCSLAALEGKGEYPREILLDFWKHVLTYQFHDIIPGASIGQVYKEAEEDSAKILTKLAQAADSGKRRLVKAMYTSNNMAVFVFNDLSWKRVTAVTISEDLAGKAAALQSVDGAVYPVQRYIDHDGNMQAVFFPETPSMGWTRLTVLKDINEEKSPFIWKDNVLESPFYTITFDTEGRITSLVDHRQGREMVAPGGVLNALITAEDARDAWDIDADWIKHIRQETRLVSTEITAYGPVCFRLRRTYEIGEASRLVQDMVCYAADPRIDFDTKVYWHEKWRLLKAEFDTAIDAAQVRCEVQYGHILRNTHRLGRSDPW

SEQ ID NO: 85792 - protein, 191 aa, Unknown
  Obtained from environmental sample
  misc_feature (1)..(191): Xaa is any amino acid
MDNASLTKSSSKAHSSPAPAGPDPYATALHNSLEVFVSYAESPFDDVMSKGLHDIADIADLDRILIIRARSKEQTAPGEVYRWDRAGGGTRPVNEGLKQMPLTDQLKRWIAVMWQNSCVALRRSEFTEEEAAFLEPRGVKSILIVPVFIEGEVWGVVPYPDHRNERDFDKRCTALLRSVAPLGVSSNLREG

SEQ ID NO: 85793 - protein, 70 aa, Unknown
  Obtained from environmental sample
  misc_feature (1)..(70): Xaa is any amino acid
MTDRPRATRIFQQIGGSVGTAVLAIILQNHMPANADAEMVGKAFNTVFLWSIGFAVISIIPAIFLPMKKE

SEQ ID NO: 85794 - protein, 198 aa, Unknown
  Obtained from environmental sample
  DOMAIN (6)...(108): Hpt domain
  misc_feature (1)..(198): Xaa is any amino acid
VETDSDILAEYVEESREHLNHIESIFESIRKTGESHPDSINELFRAIHTIKGSAGFLGLTAIGTLTHAMESLLDSVREGRLTMTPDITEVLMKGSDMLADMFDDVSKSGEFDINDVVVTLKALNSGEAAPAAAAPAKAAKKPAAKAAAPADGAPQMSVSDVLAKFPELAGTVPQPPPSTAPGPTISAAVAPGRRRHHL

SEQ ID NO: 85795 - protein, 212 aa, Unknown
  Obtained from environmental sample
  misc_feature (1)..(212): Xaa is any amino acid
MMAEFSPAGYDVGGSPKTVQIYSITPVTFTGVTANGSSSQTTTQIELTFDKAITGLSASNITLSGVTGVTKGTLSGSGPKYTLPISGFTAGGNLSVAVAKSGYNITDSPKTIPIFANGQAIFEYYWVNEHDSLVTTSGGAITINAGTTLTIIAQGTGYVVKQWNLNGVDTGQSGSTYNFSSMQTGKHIVGLFVEKDGKLYNTNITITVKQGE

SEQ ID NO: 85796 - protein, 41 aa, Unknown
  Obtained from environmental sample
  misc_feature (1)..(41): Xaa is any amino acid
MPFDMEPYRGECGNSYDFAYGLNWSGVIKDERVRKYGRSAG

SEQ ID NO: 85797 - protein, 94 aa, Unknown
  Obtained from environmental sample
  DOMAIN (1)...(71): Acetyltransferase (GNAT) family
  misc_feature (1)..(94): Xaa is any amino acid
LAKQFLKVSPKLDEKTALIECLAIDTKHLRKGIASTLVNTLFTLTEYENYVLEVIGTNKKAIKFYNKLGFKIAYIKPYFPSVYFCLKYTKKEKN

SEQ ID NO: 85798 - protein, 139 aa, Unknown
  Obtained from environmental sample
  misc_feature (1)..(139): Xaa is any amino acid
MPHNFFEFFEFISPFYFPILLAVTVYFFILSLANHYEMWRFTSASQIFDGPMVSVLVPARNEEQNIERCLNSLRNQVYTRYEILALNDNSTDNTLEIMDRIAASDKKVRVINGKPLPDDWYGKPYALHQSRAESDTWLT

SEQ ID NO: 85799 - protein, 318 aa, Unknown
  Obtained from environmental sample
  misc_feature (1)..(318): Xaa is any amino acid
VPSEFHLRGQHPKPLGQPGAPFTNITLDWICPLDLKDKKAVVGGREMEFTYGDCQEEMNRVNRFFIELMLEGDAEGRGFHYPIPTYNITSNFDWDSDNAKLLFEMTSRYGTPYFQNFINSDLNPSDVRSMCCRLQLDKRELRKRGGGLFGSDELTGSIGVVTINLPRIGYLAKDEEDFYRRLDRLMILARESLRIKRKIITRLLEGGLFPYTRRYLKNLDNHFNTIGLVGMNECLLNFLGEDVTIATQSGRNFALGVLGFMRKRLSDFQEETGELFNLEATPAGSTSYRLAKHDKERVQKIIYAGNKELTTPFITATG

SEQ ID NO: 85800 - protein, 343 aa, Unknown
  Obtained from environmental sample
  misc_feature (1)..(343): Xaa is any amino acid
LEADVTVHHVVRECIEQDSGKTVSSSSIQKIQQRYNENTRKIINEADIVDSKEGEASFKFFIEKLNNGTLEVKKTKEPAHAKMYVFTNTDEHSEGGEYPGKVIIGSSNLTFHGLGGRFEINATLRDKADYTEASDIFKKLWDEAIPLVDASTKDQFIEAVIKHTWLEKIPSPYLMYVRVLHEYFNKNTEAIKTPAGLTHTGDVQYMNLAYQTEAISEGLDMIKRHSGCIVADVVGLGKSIIGITIAANLNLTTIIICPPHLKAQWGRLLPSILVYRKSVLFHPGKIEKSPYTIQLVETDEKTSSFVNQTLIPIRKWKTTTGIFGAQITIKNLVIGKNKNILLT

SEQ ID NO: 85801 - protein, 74 aa, Unknown
  Obtained from environmental sample
  misc_feature (1)..(74): Xaa is any amino acid
MISRLGKRDKPVKELILALNPTVEGDTTALYLQKQLKDFAVEITRLLSGMPVGGNIEYIDKLTLSRSFRGRVKV

SEQ ID NO: 85802 - protein, 221 aa, Unknown
  Obtained from environmental sample
  misc_feature (1)..(221): Xaa is any amino acid
GLWPSVDVEWIIQYRVSDPKAWTFSVNERVATIRDVSRSVINMLVGDRAIMDIMGLERSAIEAEGIALMNETFRGYNLGIDVIAVKLQNVTPPAGVQQAFEDVNKAMQDRERLINEGQQVYNEEIPKTRGEAERLIQVAQGYATERVNRANGDVARFNAVYNEYRRSPDVTRQRLYYEMIEEVFKGEEGTVIIDRSLRNFLPMMNLGGGTPSAAQGAQGGR

SEQ ID NO: 85803 - protein, 298 aa, Unknown
  Obtained from environmental sample
  DOMAIN (1)...(58): His Kinase A (phosphoacceptor) domain
  misc_feature (1)..(298): Xaa is any amino acid
MSHEIRTPLNAIMGMGELALYTDVMPKIHEYLKGIKQAGQNLLLLIDDILDFSKIETGNLQINQAPYYLASLLDDIINIIQIRIGEKPILFTANIEPNLPARLLGDEARVRQILFNLLSNAVKFTNQGTIELKISAGYRAEEKADLPIVITVTDTGIGIKEEDMGSLFKSFTRLDMTVNKSIEGSGLGLSITRSVCQAMGGSVTASSEYGKGSVFTAVVPQGRVDIDRLAAVDNPKVKVVLIYDHHPEYLKSLTETLRNLGVIVVTADSADDFLGRLSDRGFSFAFYSEPTLEKARAV

SEQ ID NO: 85804 - protein, 96 aa, Unknown
  Obtained from environmental sample
  misc_feature (1)..(96): Xaa is any amino acid
MMVERIGPVDPIQPGKIPGKSEPLRGGGKDSINLSPEAKEKAELYQVIELIKSAPELSDAPLIAIRNKINDPSYLNERTISATADRIMDAFGLYAE

SEQ ID NO: 85805 - protein, 231 aa, Unknown
  Obtained from environmental sample
  DOMAIN (1)...(231): Inorganic H+ pyrophosphatase
  misc_feature (1)..(231): Xaa is any amino acid
RYREPLWRRYLYQAADVGADLVGKVEAGIPEDDPRNPAVIADNVGDNVGDVAGMGADLYESYVGSIVATMALAVSAGYNFNGAVVPMLMAAVGTVASIIGTFFVRCGEKADQKSLLGALRKGTYISSAIIVVASYPVIRIALPENQGVYFAVLSGLLAGVLIGFFTEYYTSDHYRPTKNLAAASLTGPATIIIGGISLGMLSTLLPVIIVGASVITSFIVSGGGQFFHTAR

SEQ ID NO: 85806 - protein, 248 aa, Unknown
  Obtained from environmental sample
  misc_feature (1)..(248): Xaa is any amino acid
ARGDRVRIGRAKKSGLCGERSFPYCLKLRSEPAQIRDYLGGIYNTVVLKDIVERKKIADVSSLDRVIRFMFDNIGNLCSTKKIADTLVSSGRSISVNTLESYLSALTDSFILYRLGRYDVHGKEFLKTGHKYYLADLGLRFYLLGSKITDTGRILENIVFLELFRRGWELSVGKMNTYEIDFIAQRGEKREYYQVALSVRDETTLEREVRPLEAVKDNYPKFLLTMDDDPPAEHNGIIRENVLEWLTR

SEQ ID NO: 85807 - protein, 232 aa, Unknown
  Obtained from environmental sample
  DOMAIN (12)...(221): haloacid dehalogenase-like hydrolase
  misc_feature (1)..(232): Xaa is any amino acid
MKTDGPGGLKILALDLDDTLLHSDLSISYRTRNAIKQAVEMGVTVVLASGRVLAVMEHFARLLGLHKKRGYLICNNGALILETHTGNIVHEAKLDKETLLAVCSLADAEGFALQMYDDNIMYVSQQNEYSDIDQKVTGLRQVVVENFKDMAGEGCYKLVIPGDPELLKYMEIIIQTYMGQSLTLFTSRPYFLELTPVNTDKGNRVGKKWRKCLNVRQKGDNCPPGIHEPTRQ

SEQ ID NO: 85808 - protein, 375 aa, Unknown
  Obtained from environmental sample
  DOMAIN (193)...(351): Type III restriction enzyme, res subunit
  misc_feature (1)..(375): Xaa is any amino acid
LSRIRDIDYEIPDKFIDRITPGLPVLVEVKSSRIWGVAVEIKAESAVAGKVKLKEIIDIKEGHWADSNRSLLKLYEWIAQYYQCPVGRVFRPVVGKAIINKKAKTVTVYRCVDIDGDNGINANRPILKDNQRAALEKIKARPEPLSAAQIEALFGITASTLASLRKKGYLSKEVKTVLRDADELSYLSAGEENITLSAGQRACVDRVAASFAAPDKPFLLYGVTGSGKTHVYTELAKRVLAAGRGVIILVPEISLTPQTISRFRAAIGDAVTVIHSRMSDGERRDSLQEIVTGRRRAVVGVRSALLCPMEDVGLIVVDEEHDGSYKQSDTDPRYNARDAAGCAGACRAPRSCWAAPRRASKATTTPSPASTTCLL

SEQ ID NO: 85809 - protein, 323 aa, Unknown
  Obtained from environmental sample
  DOMAIN (116)...(206): Helicase conserved C-terminal domain
  misc_feature (1)..(323): Xaa is any amino acid
DYRGSRLNKPVSLEKTEGCLTRELKEEIRITAQMGRQTILFLNRRGFAHFYYCPSCGYEQKCKRCSVSLTWHKNKNRALCHYCGYSEPPVDVCPKCGSLEAGYRGFGTEMVEEEVRRTFPNLRVRRIDADAAAKKGILEDTISLFKAGLIDILLGTQMVAKGLNFPGVRLVGVVFADTGLHLPDFRAAERTFSLIVQVAGRAGRYFPDGKVIVQTFRMGDPVITRSCAIDVKGFFEAELSQREALNFPPYTRLIRFSARSRNSDRADIAIKRLAALAESLIPPGADMLGPAECPIGVINGNYRRQLILRGNQWVPCTALPASF

SEQ ID NO: 85810 - protein, 149 aa, Unknown
  Obtained from environmental sample
  misc_feature (1)..(149): Xaa is any amino acid
VFNFGARCLHWRKAIPVEGAGAIGQILGLLKENGGKKPIFVTSPGRVKEGTISKITDVLEKAGIPYAIYSEVEANPSVKTVEKIFELYCREGCDSFIALGGGSPIDAAKAAAARAVKRRKSVNRLGGLLKVLRKLPLFIAIPTTAGTGS

SEQ ID NO: 85811 - protein, 546 aa, Unknown
  Obtained from environmental sample
  DOMAIN (115)...(280): Type III restriction enzyme, res subunit
  misc_feature (1)..(546): Xaa is any amino acid
MPRNWRMNFPRRLLNGTTVIQAAAIKAIHFPASLAELELAKKTLIYEELFYLEVMVGKRAVERKGLGTREQGTGVVVSERSELPLRSDGKQQSPLPTPHSPLSSPLQQRLLERLPFSLTLGQQEAIAEINADMAGNPPHYSMARLLQGDVGSGKTLVSFLAALRAAENGGQTALMAPTELLARQHAENAARLLEPLGLRIAYLTGNIKAAGRKDLLQHLASGEIDIAVGTHALFSKDVSYKNLRLVVVDEQHRFGVTQRSLIMAKGNNPHLLMMSATPIPRTLALTVFGDMDVSVIRDLPPGRKPVKTHLAKESSEARVYDFVRKKLEAGCQAYFVYPLIEGGDEANLKAAVSMAERLAQEIFPRFTVALIHSKLDDEEKRQTMERFRNGEITVLVATSVVEVGVDVPNANCMVIEHAERFGLSALHQLRGRVGRGQDQAYCFLVYSDDLTDDGKARLKVMLENADGFIIAEEDLKLRGPGQIAGIEQSGYLNLGIANPIRDIDELARARTDAFFILKNDPGLVLDSHRIIARVLKEAPLFDEVVL

SEQ ID NO: 85812 - protein, 88 aa, Unknown
  Obtained from environmental sample
  misc_feature (1)..(88): Xaa is any amino acid
MLGAIIGDIAGSRFEFDNIRSKDFELLAEDCHVTDDSIMTLAVAKAILTCNGDWEQLGYNSVKYMHEIGRKYPACGFWRYVQKVGVQW

SEQ ID NO: 85813 - protein, 414 aa, Unknown
  Obtained from environmental sample
  DOMAIN (25)...(403): Permease family
  misc_feature (1)..(414): Xaa is any amino acid
MYTDDPGGNMANQEILRPQDRPNLAKWIPLSFQHVFAMFGATILVPILTGLEPSAALFTAGTGTLIFILCTGAKVPAFLGSSFAFIPALILIGQNAQYGIPYALGGAAAAGLFYCLVSLIIRFTGTKWLDKALPPVVIGSVIIVIGMCLAPTAMGMAMNDGDGNYSLVSLSIAAFTLAVLVVASIFIKGFFGTIPILIGLVLGYFFTLIMGIFFPAYDIINFQAVKEAHWFAFPTFHAPKFNIVPILTFIIISFATICEHLGDVLVISKIAGQDFYKNPGLHRTLLGDGLATAWAALFGGPPNTTYGENVGVMAITRVYSVWVIGGAAVIAVLLSFFTKIGAIIQTIPSPVLGGICMLLFGIIASSGLRTIVESGVDYKDKRNLIITSVILVIGIGGGQLAFNLTKDLRFVLSG

SEQ ID NO: 85814 - protein, 235 aa, Unknown
  Obtained from environmental sample
  misc_feature (1)..(235): Xaa is any amino acid
GSTLWAWGNNAGGQLGLGDNTNRNTPVQMGTVKTWTAVSAGGNHSLAVRSDGTLWAWGNNRRGQLGLGDNTNRNTPTQVGTVKTWKSVSAGSENSLAVRSDGTLWAWGDNYYGRLGLGDTTDRNTPVRVGTANTWTAVSAGIEHSLAVKSDGTLWAWGDNGFGQLGLGDYTDRNTPVQMGTVNTWTAVSAGWSYSLAVRSDGTLWAWGSNGSGELGLGNNTNRNTPAQVGAGGWF

SEQ ID NO: 85815 - protein, 65 aa, Unknown
  Obtained from environmental sample
  misc_feature (1)..(65): Xaa is any amino acid
MDSIRNFCIIAHIDHGKSTLADRLIQKGHLVDDRDFQNQILDNMDIERERGITIKSQAVLFRTQP

SEQ ID NO: 85816 - protein, 303 aa, Unknown
  Obtained from environmental sample
  misc_feature (1)..(303): Xaa is any amino acid
LRQAFWAMILGGWDIDSKIQLLVYDLGYSPAGTTLGYFWGKDMRTDHGSGQRSNEAAMFYLNGNANVFTNFGADTLYSTLVHEFQHMIHHARKSMKGLNSATWYNEMISMTTEDVISPMIGIGPTNQGHPIQSRIPGTNGFLNKYYIAGITEWDTSDDTLDSYAIAYAFGAYLLRNYGGASLLQEMLANDSTNITSVTDALRKVNVNNEPNFEEALRRFGEALVFSGTMPADVQSFDKTVTKTINGYTYTASKFNIWGDFGSTKPKIFGVNEQRQMRPHSITVHQAASGWKNQSEPTVDLLGD

SEQ ID NO: 85817 - protein, 684 aa, Unknown
  Obtained from environmental sample
  DOMAIN (582)...(646): DNA gyrase B subunit, carboxyl terminus
  misc_feature (1)..(684): Xaa is any amino acid
MAVKTKKTGKQSLHRVAATKGNIADKGIHAKGNAVKSNTASSLPGVYDESKVKTLSSLEHIRARTGMYIGRLGDGSNPDDGIYVLLKEIIDNGIDEFIMGNGKHIEVAIKDGAKPGAASVKVRDYGRGIPLGKLVECVSVINTGAKFNDDVFQFSVGLNGVGTKAVNALSVYFRVVAMRNGEFAEAIFERGKLKSERKGKLKDKQKDGTYVEFTPDPDIFKDYLFNVEFVEKRMQNYAYLNAGMTLSFNGKQFVSKRGLYDLLYEETGDDNLYPMGYYKGEHSPNGQLEFAFTHTNNYGEEYFSFVNGQFTSDGGTHLSAFKEGFLKGIQTYFKKDYRSEDIREGTASAIAIKLKNPVFESQTKNKLGNSDIRAWVVQETRNAVEDWLHKNPEAGKKLEQKIISNESLRTELNAVKKEAREAAKKIALKIPKLKDCKYHLEDGKNGEESTIFITEGDSASGSIVSSRDVMTQAIFSLRGKVENMYGKKRAAIYKNEELYNMMMALGIENDVEGLRYAKIVLATDADFDGFHIRNLLLTFFLSFFEELVTAGRIYILETPLFRVRTKKETRYCYTEKERDEAAAALGGQTEITRFKGLGEISPKEFGQFIGEDMRLVPVSINTLKAVPQVLTFYMGKNTPERRDYIMKNLIEERGLILFVRYISLIISKKGFKMGNQNKAPPRDK

SEQ ID NO: 85818 - protein, 201 aa, Unknown
  Obtained from environmental sample
  DOMAIN (51)...(196): Peptide methionine sulfoxide reductase
  misc_feature (1)..(201): Xaa is any amino acid
MKRSTLLCILSGVFLAATLAPAAGIPQPKKSGKAGGAAGTESAGGSPDTLRDLYFAGGCFWGVEEYFSRIPGVFDASAGYANGTTENPTYEQVCSGTSGYAEAVHIRYDPQRVSLRTLAEQFFKIIDPFSVNRQGNDVGSQYRTGMYFLHAEDKAILAPVMAGVEKTYDRPLGRGIAAAAKFLSGGKNIPQGYLKKKSPAG

SEQ ID NO: 85819 - protein, 560 aa, Unknown
  Obtained from environmental sample
  DOMAIN (301)...(543): TonB dependent receptor
  misc_feature (1)..(560): Xaa is any amino acid
MDGKFDIEQIDLNSIERIEVIYGGSDTKYNVSGAMGGVINIITVKKQPTGLRLGASVSNTGVLPGEYRGRNGQTQGPNWENLTDTQNIAVSAAYGGNGLSITANIFANRAQNHFLFNDRYNYTRRKDNNEVWDAGGAVSVTGELPDLSKLIASSMFYYGDKNIPSSGFSSNVSKQQDIFSRNNVMLDMPRAFRDDLAMEASLGFNFARKDYTSLTDAFSRHDQQHLTVINRWTWFTNEQLAVKSGFDYRFIYLDSTDIGKRDRHDGGIYLTAEYKPVKQFMIIPSVKAVFVSKGDTLFTAVPKLGLLWNVTDSLTIRNNYFRSFKFPDFEELYWNDGGASGVGNPDLKPEDGWGGDIGVSWCFKELLSFESTFFTHWLKDSIHWYPGIGGIWRPENVGEAIFFGLDSKLRFEIPVKLGAIKKIIPSISYQYLLSYLLSFGYEFADNKRIPYSPAHTTGVSLEVPWGLGSLLISGHYESLRYDDRANLTQLKPHFLLNAAVNQKIGKNLTVFGVLRNILNESYQSFNDYPMPGITLTLGIRANFDINKNQGDKKNASIPYH

SEQ ID NO: 85820 - protein, 242 aa, Unknown
  Obtained from environmental sample
  misc_feature (1)..(242): Xaa is any amino acid
VVCSWIVGRSADPVDVFSASILSGYLLSTETSPLKRALIDSGLGEDLDDMCGFDADLAQGVFSAGLRKAQPQNAQAILDIIINTLKNEVEKGLDGELIEGAVRQTEFSLREITGGHYPYNLRLADRCYRSWINGGDPFALLAFEGPLSVIKDGMKSGRFFEEFIRKNLIDNKHRLLAVVTASSEKGRKLEAQTEEQAAKLTAGFTEGDKKRYHELTLALRERQSAPPSSEALATLPTLDIGH

SEQ ID NO: 85821 - protein, 116 aa, Unknown
  Obtained from environmental sample
  DOMAIN (2)...(92): Guanylate kinase
  misc_feature (1)..(116): Xaa is any amino acid
LFVTPEQFEAAIAAGELLEWAKVHGRNFYGTPRAPVLAHLAANDPTLLEIDLQGARQVRESLPDALFVFLAPPSFDDLVSRLVGRGTKDAAERERRLETACIELASESEFDATIIH

SEQ ID NO: 85822 - protein, 66 aa, Unknown
  Obtained from environmental sample
  misc_feature (1)..(66): Xaa is any amino acid
LYAAKRARQINSYYSQLNEGLLENVGPLVDVHGQEKPLSIAMREINSGLLHARSIHDLDEEETSEE

SEQ ID NO: 85823 - protein, 355 aa, Unknown
  Obtained from environmental sample
  DOMAIN (34)...(354): Alkaline phosphatase
  misc_feature (1)..(355): Xaa is any amino acid
MKKQIAVLLCVAALIIQPLFAKGATDGGAQNNSIANQGQAKYVFLFVGDGMAMPQVSSAEVFSTARSSKDINITRLGFSQFPVTGLTTTYDAGTFITDSASAGTAIASGNKTLSGVINMDAGKTRKFKPITEYIHEAGMKVGIVSSVTLNHATPASFYAKAPSRSDYYDIAVQLAKSNFDYFGGGSILQRTGKNNDQQDAVAIAKANGFTYIDTKDGFNTLKPGSGKVIAISPRLQDDGAMQYEIDRKPDELSLADFTRKGLELLDNPEGFFMMVERGKVDWACHANDAGAAIHDVLAMDAAIRVALDFAKNHPGETLIAVTGDHETGGLTIGFCGTPYDTFFDEDALQNALMSL

SEQ ID NO: 85824 - protein, 153 aa, Unknown
  Obtained from environmental sample
  misc_feature (1)..(153): Xaa is any amino acid
LTAPLKTLFEADLEQIYARAQNDFRLLAGAGLFLTGCTGFIGQWLIEALLWANKNKALGCRLTVLTRDAALIRRSRPHWAGHDSIVWLEKDILALNFEDLKPCAFAIHGLNLPNDGSPSWPARHMTAAVEGARRVIDLAGAAGCRRLLLLSSG

SEQ ID NO: 85825 - protein, 215 aa, Unknown
  Obtained from environmental sample
  DOMAIN (68)...(189): Polysaccharide deacetylase
  misc_feature (1)..(215): Xaa is any amino acid
LNDPALTYPHERPFASLHDRIPYVPFPDRQPIEWLGGARLAVWVVPNVEHYEYLPPAGPVDPYPRSPHPDVRKHAYHDYGNRVGFWRMLPVMDRHEIPCTVSLNVAHLDHYPEIASAMVERGWELMSHGMYNTRFLDGMSLAEQIEFFNACETVVRRRTGRGIRGMLGPYISATAETPDAMALAGMTYHADWVHDERPSPLLNSSGRRMVACPTP

SEQ ID NO: 85826 - protein, 73 aa, Unknown
  Obtained from environmental sample
  DOMAIN (5)...(64): Heavy-metal-associated domain
  misc_feature (1)..(73): Xaa is any amino acid
MNTETLSVGGMTCAACSARVERALRKLDGVESASVNLATEKATVVFDPGALRLSAIRKRYQGGIPGIETSKIP

SEQ ID NO: 85827 - protein, 381 aa, Unknown
  Obtained from environmental sample
  DOMAIN (1)...(202): SNF2 family N-terminal domain
  misc_feature (1)..(381): Xaa is any amino acid
GAYGTDRDASQLKRTVFRIILSTYATLRRDIEDFRKINFFYIILDESQNIKNLSSQTTAAVLSVQGEHRLAMSGTPIENNLGELYSLFRFLNPSFFGSERLFMQRYLHPIQDNNDEDALKDLKARIYPFMLRRLKRDVLKELPAKTEETAFIELEENHLAVYHRRRLEYKQLIDGIIAKGEAAKSSFIIFKALSELRRLASIPEADGEYAGPSAKRQYLLDMIAELVENNHKCLIFTNFLATVDIVSEDLAGRGIQSLTMTGATVDRQSLVRRFQTDNDVKAFIMTLKTGGTGLNLTAADYIFIMDPWWNSAAENQAIDRSHRIGQQNPVFCYRLIAKDTIEERILELQKRKTDLAGALLADDPGALKALSPEEVAYLVGN

SEQ ID NO: 85828 - protein, 340 aa, Unknown
  Obtained from environmental sample
  misc_feature (1)..(340): Xaa is any amino acid
ERAPEKRAHKAQRIAEEEIILRAAQPALDDERNAEAELFALAQVDNAENFLRHAAIQAEREGLERRMRDLEDALRLAAGDMPFDEFTASFSASDRQEREQRLTALDAEMERQAQEERALVDALGELSARRSSLDAAAEELGGLRRQENALLESLRQLTLEYGRHALARQLIQNAKRNFERESQPAVIRAASSIFAAMTNGAWIGISASLDDSSLSALPPHGEAVLPEHLSRGTQEQLYLALRLAYIRNHAGHASALPVIMDDILVNFDPARASRTAQALTFLVQGLPPQDGQNAAPPHQALFFTCHPHVAEMLQNTVPGSALYRMGEGSISPGALGRSDK

SEQ ID NO: 85829 - protein, 79 aa, Unknown
  Obtained from environmental sample
  misc_feature (1)..(79): Xaa is any amino acid
PSIRSAERSDEFGFSALPGGGRYTDGSFRDVGKYGYWWTATEYGSGIAYGRDMRYDEGFVNEDYHVKGGGDSARCLQDN

SEQ ID NO: 85830 - protein, 200 aa, Unknown
  Obtained from environmental sample
  misc_feature (1)..(200): Xaa is any amino acid
PLDREFAFSLGSSHIVVIRKGGFVNAIGDNDFGQCDIQGWRDFIKVSAGQFHTVGLRGDGTVAAVGHNDYGQCETQEWRDIVDISAGFGHTVGIKANGTVITAGCKGAAQCATQHWQDIAAVSAGLTHTVGLKADGTVIVAGSNDFGQCNVQGWRNYIAVHAGMSNTVGLKADGTVVVCGDNKFGQCNTQNWRNIGLMPE

SEQ ID NO: 85831 - protein, 287 aa, Unknown
  Obtained from environmental sample
  DOMAIN (5)...(211): Abi-like protein
  misc_feature (1)..(287): Xaa is any amino acid
MITVKQPTTYEKQIEMLRSRGCTIGDESEAIQILSRVNYYRLTAYFLPFRKSDSSYFQGTNFKTVYRIYEFDRKIRHIIFSAIEEIEIFIRSIFAYYHAHTFGALGYLDHNNYNQRHNHIEFMAQIDNEKKKQSKELFVQHHNSKYGGQFPIWVIIELFSFGTLSHFYTDLPGSSQKYLARNFYKKHQKELTSWLYCCTGLKNICAHFGRLYFRKFPVYSNGIPSLDQTNNRSLFGAVMALKSLYTDTDNGTKEVFTSIKNLSIEYSADIQLKHIGFPVDWEIKLTR

SEQ ID NO: 85832 - protein, 174 aa, Unknown
  Obtained from environmental sample
  DOMAIN (5)...(166): Phage integrase family
  misc_feature (1)..(174): Xaa is any amino acid
GTRQIDSSQKSLKKDGNTEWYFVVWYLAATGARVSELVQIKVEHVQAGYFDLYTKGGKLRRLYIPKKLRTETLRWLNLTNKTFGYLFLNRFGERITTRGISQQLKNYAEKYGLNTKVVYPHSFRHRFAKNFLEKYNDIALLADLMGHESIETTRIYLRRTASEQQALVDKIVTW

SEQ ID NO: 85833 - protein, 141 aa, Unknown
  Obtained from environmental sample
  DOMAIN (4)...(135): Type I restriction modification DNA specificity domain
  misc_feature (1)..(141): Xaa is any amino acid
DSNPDGVEFHQGKIYFTERYLEHSRQYTTEVNKIAPKDSVLLCVRAPVGIVNITDHEVAIGRGLCAVSPFGEISVEFIFHWLTAFQYSFVEQATGTTFMAITTDVVQQQIVPIPPLAEQHRITVAIESAFKQLDNIVTNLL

SEQ ID NO: 85834 - protein, 394 aa, Unknown
  Obtained from environmental sample
  DOMAIN (2)...(372): Beta-eliminating lyase
  misc_feature (1)..(394): Xaa is any amino acid
LDMLTDSGVNAMSENQYAAMMQADDSYAGSETFFRLEKVLSDMFGMKHFLPAHQGRACEHIISKAFVKPKSTALMNYHFTTTKSHITLMGGIVEELIGDQGLKIKSNEPFKGDIDINKLNDAIKRLGKENICFVRIEAGTNLVGGQPVSMRNLREVSKICRKEGIMFVYDASLLADNLYFIKVREPEYKDTSLNDITREIASLADIIYFSARKLGAARGGGILTSDENLYLKMRELVPLFEGFLTYGGMSVREMEAMAVGLRETLDIDVISQTPIFVEALCGELEAKGVPVVTPPGGLGCHIDAKQFCPHVPQTQYPSGALASALFIAGGVRGMERGTLSEQRNADGSERLAEMETVRLAVPSACLLYRRLIHRRSRGMALQKPLFDRGGWSFV

SEQ ID NO: 85835 - protein, 128 aa, Unknown
  Obtained from environmental sample
  misc_feature (1)..(128): Xaa is any amino acid
MSKRNGLLITNVVRGSLAEETGISPGDMLLEINGEKVLDSLNYQFLASQRDYTEALAIKPSGETVRALMENGGDALGIELAQDTIKVCKQNCVFCFVSQMPKGFRKNLYLKRRGHTPFFFVRTLHDTI

SEQ ID NO: 85836 - protein, 322 aa, Unknown
  Obtained from environmental sample
  DOMAIN (103)...(179): PDZ domain (Also known as DHR or GLGF)
  misc_feature (1)..(322): Xaa is any amino acid
MIRSAERFRRRHLQLARDASGGLIIYKGEAMVGIYPFPFTGSSPDLAVRLGEYLANLTVQLRGQVAALKKTHPQQIYHAIANRVLGSLDAGSYYIYAAKAVKRDNIESNPAGIGITYRRVKDGLQITRVFAGSPAHVAGLFEGDVITHLDRKKTADMNLAQLEGLLYGKSNSLLRVGVVSYAHSRFKDMHLRRAEYGFSPVSMSVGEGVATIVVPGFVPGTAPLLREALESLKGVENLTGIIIDLRNNAGGLMEEGLAAADLFLDKGRLSVVRGRNTEVNKTHEASPNTALPKKDLRMAVLVDQTTASPPEVFARRLAGQRR

SEQ ID NO: 85837 - protein, 186 aa, Unknown
  Obtained from environmental sample
  DOMAIN (54)...(185): Alanine racemase, C-terminal domain
  misc_feature (1)..(186): Xaa is any amino acid
IEYVLALFVQNTLRPEPLFLIKMPRILTWVRPGYMIYGYYPSEALREKILLKPVLKFVSVILQIKEYEKGTPISYNRRFVTKRKSRIATVSAGYSDGISRKLFDPKNKKNGFFAVNGQRAPIAGTVCMDLTMIDITDIKGDVNVGDEVAIFDNVNVTVEEMAGICGTIGYEIISQIEDKADRVESF

SEQ ID NO: 85838 - protein, 565 aa, Unknown
  Obtained from environmental sample
  DOMAIN (509)...(561): DNA gyrase C-terminal domain, beta-propeller
  misc_feature (1)..(565): Xaa is any amino acid
VHRRVMFGMEELSLQHNKPPKKCARVVGDVIGKYHPHGDSSVYFALVRMAQDFSMRYPMVNGQGNFGSVDGDPPAAMRYTECRMTAFAEEMLADLDKDTVDFAPNYDDSLKEPTVLPSKLPFLLLNGTSGIAVGMATNMAPHNLREIATGLIMMIDNPDVTVDELISVIPGPDFPTGGVVFGRSGIYAAYRSGKGRMIVRGRAEVIKKANDREEIIITEIPYQVNKSVLYQRICDLARNKIIEGISFTRDESDRRGMRIVIGIKKDDFGEAVLNKLYKFTDLQTSFCIINLALVNMRPQILSLKELMGHFLDHRHNVVVRRTQFDLKKAQDRAHILAGLRIALDHIDEIVALIRASSTTEEANEKLMQRFGLSEIQAKAITDMRLKQLTGLEREKIEQEYQELMKLIEELTAILASRDRRMQIIKGELEEMRERYGDVRRTEITDAVGDVDIEDMIAEEDMVITMTREGYIKRTAVSEFRAQRRGGKGVKGMESKENDVISTLFVASTHAYILFFTNIGRCYKMKVYKIPEAGRNSKGRPIVNVLNLLPDEKVAAFVPVSCRILV

SEQ ID NO: 85839 - protein, 392 aa, Unknown
  Obtained from environmental sample
  DOMAIN (10)...(109): Flagellar hook-associated protein 2 C-terminus
  misc_feature (1)..(392): Xaa is any amino acid
MSDVYIPGVRSRFNSEKIIEDLMSLERIPKERVERNIENLQVQKGYWQEVGRRINSVRESARFLYSFQNPFNDRIARTENDNVITASATREAQERTYAFTVKQTAQADRFLSQPLDEKMRIEAGNYSFSVGNEEISLNFRGGTLKDFVDALNRRSKDKISASLLAVQSGTKSLLIESKVTGAQNRLTFSGDSVDFALKIGMMERDNSAQTSGFIGTPAVQKGAEINDGVLKMPPLSSASMPLNISINSNSLLMLKFDTSTRIETDPNFGIPKPPPGPSVPSSSVTYGGITIKNEPSLAPLPEWKVPAEPQRHDDMAVLSLVFSDGSSAKLPPITDSTNFTSRQYFLSEIAQGRTITSLNIENTNTHREITISNEKYLIPILNSCRSDPCPPQ

SEQ ID NO: 85840 - protein, 87 aa, Unknown
  Obtained from environmental sample
  misc_feature (1)..(87): Xaa is any amino acid
MDRKEILEMYKDFRVTDVRDGMDWCGYHHYGTVHHSIKPLWRTRAIGFARTARYLPYEGPVPMVTGDEYTKWVGWYYGNVCSAESDP

SEQ ID NO: 85841 - protein, 124 aa, Unknown
  Obtained from environmental sample
  misc_feature (1)..(124): Xaa is any amino acid
MSEQKAKILSVGTYVPDAVLSNSQFESFLDTNDEWIVSRTGISERRVVNMPHAAPGGTTAAEMGCKAARVAMKRAGVSAEEVDGIVVATFTPDNFFPSTACRITSDLGCAGAFAFDISAACGGF

SEQ ID NO: 85842 - protein, 143 aa, Unknown
  Obtained from environmental sample
  misc_feature (1)..(143): Xaa is any amino acid
GLRAGPALAIMGFIVGAKASKNLDNARSNMAEARKIAEELNTGAFMCNSIRRRSYMFHRLLIRLDTLFIHLNYELVKIIKKHGKNYKKYTTEQKHKIAQICSIAGAIKAVLDTPILAENGSLTLQSETIATEIQSKLPVLVQG

SEQ ID NO: 85843 - protein, 116 aa, Unknown
  Obtained from environmental sample
  misc_feature (1)..(116): Xaa is any amino acid
MQDTQMYWDNVYTKQQRIAQAAEKYSGKSLISVAHHIDVEWMYCAYEWTRKDGAAGIDGVTAAEYEVGLWEKLEKLEGLLKSGNYRAPPVKRVYIPKAGSENEKRPILVPLGRSDH

SEQ ID NO: 85844 - protein, 243 aa, Unknown
  Obtained from environmental sample
  DOMAIN (128)...(231): OmpA family
  misc_feature (1)..(243): Xaa is any amino acid
VAKKKKKELGGASQEWLTTYSDMVTLMLCFFVALFNPDDVDPTQLQALISNFINAGLGAQSGGNTLSVGKSADLGNTVNSLPAMDRGKSLGTSLRKAVSLFQPEVKSNQVKVTSEERGLVITLASDAFFNPASARVNIEETREILLRLASLLNSNEVGLRKVRIEGHTDSVDVDPAGPWQDNWQLSSERARAVLRYLTDFGVAENRFQIAGFADTMPVSSNLTPEGRAYNRRVDIVIIDEGHL

SEQ ID NO: 85845 - protein, 87 aa, Unknown
  Obtained from environmental sample
  misc_feature (1)..(87): Xaa is any amino acid
MIMVLLLIMEALMKYLIITGNPKQDGLCHAVTEEARKGAEAGGAVVDILNVTKIERCHVCGAGWGMCREKQVCTFGNDGFNEAQAKR

SEQ ID NO: 85846 - protein, 414 aa, Unknown
  Obtained from environmental sample
  DOMAIN (26)...(413): EPSP synthase (3-phosphoshikimate 1-carboxyvinyltransferase)
  misc_feature (1)..(414): Xaa is any amino acid
MYHERDKSRRIGKRDPAWSGGANLNIRIVKPVQGGTIGAIASKSAAHRLLICASLADSETFVICQERSQDIDATALCLKSLGSVIRYENGGFFVTPINKTKDLTKERSLNCGESGSTLRFLLPVCGALGMKVKFNMEGRLPARPLTGLYEEMTSNGCKLSEQGHSSLVLGGKLKSGNYYLPGNISSQFISGLLFALPLLEGYSTISVTDKLESRPYVDMTLDALRLFRINVHEEEKPRLTFCVTGNHTYRSPKTVQTEGDWSNAAFWLCAGAIGTNGITCTGLYKDSRQGDRAIVEYLKKFGARVSVDGGEVTVYPNDLKGIEINAENTPDLVPVLAAVASAAKGETVIRGAGRLRLKESDRLRTIAASLSALGADVKETDDGLVIQGKNKLQGGVTKSFGDHRIAMAAASRHK

SEQ ID NO: 85847 - protein, 135 aa, Unknown
  Obtained from environmental sample
  DOMAIN (2)...(110): ABC transporter
  misc_feature (1)..(135): Xaa is any amino acid
DIDQIGRERSREFAREMLGEVGLLGNCDDNAVSLPYGKQRRLEIVRALATGPKLLLLDEPAAGMNPQESYELMDFIVSVRDKFKISVLLIEHHMQVVMGICTRLYVLDYGITIAEGTPHEIRKNQKVIDAYLGVE

SEQ ID NO: 85848 - protein, 327 aa, Unknown
  Obtained from environmental sample
  misc_feature (1)..(327): Xaa is any amino acid
VIAGACGPESAAHENITEELKTFENEFLANLTKRSNDIGLRITEWQGGLEKRLSAIGEDSEKALRKLEHDHAEEMKKTLSAMDTSLVSELDRLKSATGAFEEGILAQMKGAYDSVASFKEQLNSGFEDAKIELQALVDKTRNEWRAERSDWETKDKAIGEERKKDLEAFTAKLDASKKQIEGFSMQANEIISSQETLLVKAAEEMKQKALETSAAKLEEYRRAQDVEFKRLESLADDSRKLDAELRQYMQESIERLKEEFSGYQAEAEELRERPKRKNSPQPATRLGGKMTEFEKGLAALKSASYDKISNSSQYLKMNSWPDLPTQQ

SEQ ID NO: 85849 - protein, 78 aa, Unknown
  Obtained from environmental sample
  DOMAIN (25)...(62): KOW motif
  misc_feature (1)..(78): Xaa is any amino acid
GFIESTYCPRHGQVGALLPIEAPLIKEGDSIRIKEGPFSDYTGLVEEISKERGKLKAMVVIFGRSIPVELNFSEVEVL

SEQ ID NO: 85850 - protein, 231 aa, Unknown
  Obtained from environmental sample
  DOMAIN (1)...(214): ABC 3 transport family
  misc_feature (1)..(231): Xaa is any amino acid
SLAVATALHTAPLTVAIPIVVAAAFLLLRLSENSKIKGDAAIALISTGSLAVGVIIISQTTGMNTDVCNYLFGTILAMAKEDVYLSIALSITVLVLFILFYNKLFAITFDETFAKAAGIKTGLYNMLIAFLTALTIVLGMRIMGAMLISSLIIFPALSSMRIFKKFKSVTVCSSVISILCFFTGVVISYIYATPTGASVVMINIIVFALFWLFENIRNSTVLNKYRRKNYA

SEQ ID NO: 85851 - protein, 502 aa, Unknown
  Obtained from environmental sample
  misc_feature (1)..(502): Xaa is any amino acid
MAESGSFNKLASGLPIEERQNLLERLKAQSNFSGKILYEEETGDSSSEDIDTEFSKLPLIYHLWYYFLSFFKSKPPLQIFGESKLAALGNKIEEKAPGLYDHQKGMLLPLFYRQLTKLKEAAHFFYSALDASVNRDKASFFAFLGSLEMPDVHRVLQNETNPAVIAEKNPGMPENELRQIALKGMDDAFAMIDEERRNIMYSDARSLFCLKELSSFLYDRVLMAFENNAAVGGETCSVGIVRDLLMTLNNILLSLKIVPPMPLLESLFIFILQDKVGEHGFEINREIRILLSKAEESLSVIREFNSHVPLTLVLRCSTRNMSLSPHELSGGEEWFVVYRDYWKKHIDSVFAEFLKDHRQKELVQSFRLFLKGKELKTLGNVQSDANPDGMPIKGAFGLSFLYTFYPVVFMPDINWILRPILIEGDFQKKENRLEFAEGYNNLIKLEDEIKKFEYNISASGDYYKSYAQIRQDMSSLSIQRHKMHVVIREAEEDVTKILEQAR

SEQ ID NO: 85852 - protein, 292 aa, Unknown
  Obtained from environmental sample
  DOMAIN (13)...(140): Respiratory-chain NADH dehydrogenase 51 Kd subunit
  misc_feature (1)..(292): Xaa is any amino acid
LGGGGGGGGGGGGGGGGGGGGGVFFLEERGGRKRVFGGKKHPRLKPPFPAVNGAWNVRACVNNFFSIMALPWILEHGPAEYQKLGTPKAGGTKVFCISGDVKKRGVYEARLGIPLMELLESEEYCGGITGNLKGCIPGGSSTQVLTAEECKKANMDYESLAAMGTMFGSGAVMPFNDTRSIVQMLNTLGKFYSHESCGQCTPCREGTGYVQRIISCIANGQGKDGDLELLDSLCKGFTGTTVCPLAAALAAPVQSYLQKFRSEFEEAILNNPEHTSPRLNENYRPQGWWENK

SEQ ID NO: 85853 - protein, 397 aa, Unknown
  Obtained from environmental sample
  DOMAIN (306)...(396): GMP synthase C terminal domain
  misc_feature (1)..(397): Xaa is any amino acid
NACRKFVKIIWQGPFHCLDEPQGCAGAPTEGFRITAKTTACIAAFENSAKKIYAVQFHPETKHTEGGREILSKFLYDVCKASGDYKLDDYIETQTALMRNKVGDKKALLALSGGVDSSVCASLLSLAIPGQLTCIFVDHGFMRLNEGDEIERVFSKRNLRFIRVNAQKRFLAKVKGVTEPEKKRKIIGEEFIRVFEEESAKLGDIPFLAQGTIYPDVVESGGKYGAVIKSHHNVGGLPERLKFTGILEPLSGLFKDEVRVLGKKLKLPVSIVNRQPFPGPGLAIRVSGEVTEEKLETLRKADAILREELDGLKNRPDQYFCVLTGTRSVGVKGDDRTYDFVIAVRAVKTDDFMTCEYAPLPHKLLSRISSRITAEIPSASRVVYDITSKPPATVEWE

SEQ ID NO: 85854 - protein, 284 aa, Unknown
  Obtained from environmental sample
  misc_feature (1)..(284): Xaa is any amino acid
MAEMLSRERIARAYAHKEADRVPIFDVPWLTSLARWEREGMPKGSVFHDFFDLDLICKLELDNSPRFPETVVEETAEYTIRTDKWGSTYRMLKATMSPPEFLDYTIIDESSWERAKARMTPDDDRVPWAYLEENYPMWEAKGYWKRARLWFGFDVTHSYAVGTERFLMSMAENPEWCTDIFNTQLDLSIALLEKVYAKGYVFDEVSWDDDMAYKYNQFFSLDMYRRLLKPVHKRAVDWAHSKGAVTHLHSDGDIKPFLPELIGIGIDAINPNGVKAGMDPNTLK

SEQ ID NO: 85855 - protein, 57 aa, Unknown
  Obtained from environmental sample
  misc_feature (1)..(57): Xaa is any amino acid
DDREPFRGGEYHITVRNPEHLCKGVAEIRVNGEKSDIIPVIEQGQICHVEVVIGLIH

SEQ ID NO: 85856 - protein, 381 aa, Unknown
  Obtained from environmental sample
  DOMAIN (82)...(132): Regulator of chromosome condensation (RCC1)
  misc_feature (1)..(381): Xaa is any amino acid
VTVTGGGPGPSSDWKAVAAGTSHTLAIKTDGSLWAWGYNQFGQLGIGTSDLNEHPTPTRVGTDANWVAVSTNFDHTLAIKTDGSLWAWGRNGNGQLGLGDSGSSTNRNVPTRVGADSNWAAVSTGGDHSLAIKTDGSLWAWGYNFRGQLGLGDSGNGTERKVPTRVGTDANWAAVSAGGIHTLALRTDGSLWAWGYNYNGQLGLGDDNDRSTPTRVGADANWAAVSAGWSHTLAIRTDGSLWAWGNNKYGELGLGDSGTGTDRSTPTRVGTDANWKAVSAGWYHTLAIRTDGSLWAWGDNVYGQLGLGDSGDGTSRNTPTRVGTDANWAAVSAGDFGHTLAVRTDGSLWAWGYNGDGQLGLGDSGYGTSSTDRNTPTRVGR

SEQ ID NO: 85857 - protein, 197 aa, Unknown
  Obtained from environmental sample
  DOMAIN (3)...(187): Malate/L-lactate dehydrogenase
  misc_feature (1)..(197): Xaa is any amino acid
DSSGHAGSPFVFSYDGATPVVPRGKLEVYRKNGEPLPDLWALDINGKPCTDAASVIDNIIKKAGGGIAPLGGIGVLHGGHKGYGLSIIVDLFSAVISGGLTSNHVNRKPDHTGICHYFMAIDYGIFGDKTSIKAGMSKFLQELRDSKKAEGHSRIYTHGEKEAQLMEQRIKGQIPVNEKTYEEMKKIAGMLNVEFSL

SEQ ID NO: 85858 - protein, 113 aa, Unknown
  Obtained from environmental sample
  misc_feature (1)..(113): Xaa is any amino acid
MIIGVAGLGLIGGSLAKAYSSGNHTVYGYDIDESILSFAKLSGAVKDPLDANTLKLCDILLVAVNPEDAVKYMENTAPNIAKHTFVIDCCGVKRYIAISASAGKKRFAISNTN

SEQ ID NO: 85859 - protein, 293 aa, Unknown
  Obtained from environmental sample
  DOMAIN (24)...(87): FHA domain
  misc_feature (1)..(293): Xaa is any amino acid
MNHAETTQTAATTAFLFPLDGRELKIGRDASCDIILTGIGVSGRHAVVRCDATRPTITDSNSKCGTSLDGEPITEAVLRSNSALTIGVNVLRVDIDEVSISFTLLNSNVDDSAPDGAVGDLIRIGRDAANDICLPHPMVSRFHAVVKRGADELTVIDQGSANSTYVNGRSVGTRSLREGDVVHIGPFRFYVTGGEFRRADDISKIRIEAHALGVRLGGKRLLDNVNLTIEPGDFVALLGPSGAGQSTLCKVLSGQLAPRQGGFSFNVSPALSSERSSPAVWGTYRSRYLYGRQ

SEQ ID NO: 85860 - protein, 456 aa, Unknown
  Obtained from environmental sample
  DOMAIN (1)...(455): Hsp70 protein
  misc_feature (1)..(456): Xaa is any amino acid
VDSAVITVPAYFTDSQRKDVMAAGKTAGLEVERIINEPTAASLDYGIEHMRECKYMLVYDLGGGTLDVTVLELFEGVVEVKSSCGNNALGGKDFDQAIMDHITGVIKKRDKIDISSDARAMMRIKIAAEQCKIALSVNTENAIELPFLYGKNGNPVGYSEKITRTAFESMIREKIYSTEQQIKTALFDANLNADDIDLTLLVGGSTRIPLVSRFLDEIFGITAESAVDPDLAVVRGAAIQAGVLSGVLNENAIVPDDICPYSLSTEALTDVGFGHKELFCDILIKRNTTLPASASKIYLTSRDNQTKVHVTAYQGESLDPDENYLLNCFELNGVPKAKAGKEKINIRFEYDLNGILTVQAEIVSTGKSAAVMVNTSQMGKNLDLSKWKDASAAWKYRKIIQKAERLVKVHDGAEEIEAAANELKKALVMNWDDAVIEKMKNVLADAIDGMEEEDKG

SEQ ID NO: 85861 - protein, 91 aa, Unknown
  Obtained from environmental sample
  DOMAIN (3)...(90): Response regulator receiver domain
  misc_feature (1)..(91): Xaa is any amino acid
MNKTILLVEDDSIIASGLAYALERDGYAVVHTASVKEAASAALKNKFDLAILDMQLPDGTGFDVRERLTNTETAVIFLTVADDEGNIVPRV

SEQ ID NO: 85862 - protein, 549 aa, Unknown
  Obtained from environmental sample
  DOMAIN (95)...(174): Cache domain
  misc_feature (1)..(549): Xaa is any amino acid
GLSRGRLCASIQNLIRNGYDAEKLIAYNKDITSYLLSKNNEALSSNGPFGYIEKLPNGPAFINGIGWEMPDDFFPTERPWYKAAIKAAGGIAEIAPYTDTVTGETVLTYSRAIFTENGVRLGVLAIDVRAGYIGKDIANTAFSKDNSYGVLISQDLIIFGHSNTEYLGKKMNDPTIPLAAITDDLVRLGTLSEIKWVNWKGESVIGFFRTLPNGWRLGFFTQKNLYYKPVFNMLIILFILGAALASVLIIVLIHVDAAKNKSDSENRHKSAFLANMSHEIRTPMNAIIGMTAIGKSASDPVRKDYCFTKIEDASNHLLGVINDILDMSKIEADKFELVPAEFDLEKMLRRVVNVVNFRIDEKHQKFSIHIDRSIPRILIGDDQRIAQVITNLLWNAIKFTPEKGAIALAVRLAGKGNDICTLQVSVSDTGIGISPEQQEKIFNSFEQAESSTTRKYGGTGLGLAISKRIVKMMGGSIWVQSEQGKGSTFTFTIQLVRGTVEKHILLSSDINLSNLRILTVDDDPDILTYFFEIAQGFGIICDVASRPIL

SEQ ID NO: 85863 - protein, 300 aa, Unknown
  Obtained from environmental sample
  DOMAIN (2)...(291): MraW methylase family
  misc_feature (1)..(300): Xaa is any amino acid
MEAIHTPVLTEETLCYLAPRGKAEFMIDATLGEGGHSAAFLERFPVLRIAGVDADEEIQSRARERLSPFGNRICFYKCWAEEFFADYPAELPSPDTILFDLGISLYHYESSGRGFSFLRDEYLDMRLDTSRGKTAAELIEGLSEKNLADLLYNNAGETYSRRIASAVQRAKKHAPVTTTAALAEVVASAVPAAYRKGPLHPATRTFQALRMAVNGEGERLEPMLKTALERLNIGGRMGVISFHSGEDRKVNIFSGKKPGLHPFFETPICKKGKMAGKNLTPKPVTAGPEKCPEQPPFPEG

SEQ ID NO: 85864 - protein, 443 aa, Unknown
  Obtained from environmental sample
  misc_feature (1)..(443): Xaa is any amino acid
VVAKNPKSLAFAELADLLRMASSGDKQKLDEALLTANNGLEANSDFLPGRLVRGRILLEKGDLAGARADFEVVAEHDSFCSSAQKLFLETSEKLGQSVETEVYQKILGTLEPGVVVKVKVKTESGGGGGVNAALDDLLSEDDNVVDKEDNVISDLLLQTFTNIFEPSKQEQPPDLVPYAPPTPKSQPAPKPQPAAAKPPPAPKPAPDLDSLINEQLKSKVEDMPDLTGDMDSLLASASDILSASGTLTAPSSSTPDIDSLVAEQLTSRVDNMPDLTGDISSLLSSMPAEPSLEPSLAAGYSFPSITFPPVPVSGTPNPPSSPTTPDIDALINEQLKSKVEDVPDLTGDISSLLASNTISSPNPPDLDALINEQLTPKMENLPDLTGDIDSLLASAPAVGTEPELMPYVPPTDNADPALAQKPTMTLAELYMDQGLPQKAAAGL

SEQ ID NO: 85865 - protein, 280 aa, Unknown
  Obtained from environmental sample
  DOMAIN (14)...(263): Acyl-ACP thioesterase
  misc_feature (1)..(280): Xaa is any amino acid
MKCNPANPKDSGIVNIWQETFPVRFGSIDKSDRLTLDAVFQFFQEAAICHAENLNVGREDMLRTGQIWILSRMSVIVKKRPNYFENITVRSWPRGGEKLFAIRDYDIRDKDDIPVVCARSGWIVLDVEKRRPLRPQSVMDSLPQNEGENALSPEDGAIAALEERSNLQKVSGRKALYTDLDFNGHVNNVRYIQWIEDSLAPQFLENADRMRLDINYLNEILGGEDIDIMSADIEDPACAEAFAFEGRKAEGSQIASPAASQQVAFRADLRLYGKIKLLFL

SEQ ID NO: 85866 - protein, 58 aa, Unknown
  Obtained from environmental sample
  misc_feature (1)..(58): Xaa is any amino acid
MAEINWDAFIAAWLPGSEGGGIADVLFGSRDFTGRTPYTWRKTINGEILFPFGYGLTK

SEQ ID NO: 85867 - protein, 173 aa, Unknown
  Obtained from environmental sample
  DOMAIN (7)...(172): Indole-3-glycerol phosphate synthase
  misc_feature (1)..(173): Xaa is any amino acid
VKSPPDILGKIASQTVLRVAKAKEALSYEQARTHALSLAAKDTRASVLPFDSAIAASGLSFICEVKKASPSKGVIAPDFPWLEIAKDYEEAGAAAVSVLTEPEFFLGSDMYLREISAAVKIPTLRKDFIIDEYQIYEAKIWGAKAVLLICALLEKETLSSFISAADKLALGLP

SEQ ID NO: 85868 - protein, 236 aa, Unknown
  Obtained from environmental sample
  misc_feature (1)..(236): Xaa is any amino acid
LPAPMKLKLIYPRWNKLPGQTTFNLPPHGPVVFAAALPANVEITFTDENVQSLDFDEDCDLVAISMMLSTQVKRGWAIADEYRMRGKQVIFGGIAAMLHAEETIPHADSVFLGEAETRMEQIIADWSKGRLQQVYNFMPQQPPVESIGKARRDLYQRELYNHKGVQMVDLFHASRGCRFSCYPCAVSYLGGRSFRPRPLDKVIEELSGIDNNAALYRGQFAGTGQTMERSARPICL

SEQ ID NO: 85869 - protein, 72 aa, Unknown
  Obtained from environmental sample
  misc_feature (1)..(72): Xaa is any amino acid
LSRAAVHNGHCIAPGIIETEMIRDVPLDIVLPSIPMGRIGKPEEVAALAVFLLSESASYITRQVISVNGGMA

SEQ ID NO: 85870 - protein, 65 aa, Unknown
  Obtained from environmental sample
  misc_feature (1)..(65): Xaa is any amino acid
MAAKGARIRGPEDIYSVASCWARRREENFLAVTLNGAHEVIKVRHITKGLVNRTIVHPRECFYPA

SEQ ID NO: 85871 - protein, 402 aa, Unknown
  Obtained from environmental sample
  misc_feature (1)..(402): Xaa is any amino acid
MMAALAAAPLLFAQGLRYEPPAIDGHEPPFRQIGGSPFTSGNPAILKNNGTMFFDTSAIDFEKRQLTFTRQDKDGNTVQSYHYGELNDYITDSRAHSFYEQWYNTLTEQAKKDLGLPPAPKLQWELAVHYPPWAQRLLGNDPPKLKIEGRLKLTVAYDYTRIVVDKDTTTDIIPLDFEPEYEFAIRGSVGRLISVNITHSRKDGFDLGDDPLKNFKVEYKESYEGELEDEIIQEIVAGYTGFDMPGTNLSGYSEKHDGLFGLKARAKIGPLMLTTVLSHAQGEAMTRELGGKNDPNAMTALRDNEFIKNRYFYLDTAYKAYNNKVYSITNPERNAPRPPRITDFQAFVSIQGNETSNSTVRRYRADITNIGDVYFRMLELNKDYTIDLDRGFVRFEYTVKEE

SEQ ID NO: 85872 - protein, 299 aa, Unknown
  Obtained from environmental sample
  DOMAIN (141)...(296): Integrase core domain
  misc_feature (1)..(299): Xaa is any amino acid
MSPEEELANRLQKGVEKAPRQDDGNGETWAKDTESAFLELGISYRQAKRIYQKYLSGGDDALIHGNKGKPSNRRIDQALLQKALSLYAEKYSDFGPTLAQEKLLERDGLDIGVSTLRRELTAAKLWMPKRNGREYRARRTAREHFGELVQFDGSHHDWFEGRMGRCCLITLIDDATKTRLSQFFEEETMFGAMIVLKMWIETYGIPESLCCDKKNAFVLTREPTDSELLAGITRPKSHFGKACGKLGVQLIAANSPQAKGRVERNHGVDQDRLVKELRLAGIPPSKKLMLPAETTRHNG

SEQ ID NO: 85873 - protein, 79 aa, Unknown
  Obtained from environmental sample
  misc_feature (1)..(79): Xaa is any amino acid
MLLSTKWLRELTPCDATAQTISDRLTMLGLEVEDIRHPFADLKDVLVGHVVECGRHPEADKLFVCKVEAGQGGMLDIVC

SEQ ID NO: 85874 - protein, 337 aa, Unknown
  Obtained from environmental sample
  DOMAIN (1)...(323): Protein of unknown function (DUF342)
  misc_feature (1)..(337): Xaa is any amino acid
GLYGRERHSPAYWEYVRANDNEDTILANINGQVLIANGKINVEPVLTVEGDVNLKTGNIIFLGNVIIGGNVEDGFSVKADGNIEIKGTVSKAELDAEGDIIIYQGVNGKGGDKKIRAGRSLWSRFIENANVEVGNMVVVTDGIINSNVDAVKSIVCMGKRASIMGGRLRAGEEISANVLGNPTSGTETICEVGFDPKSKVEMERLMAQKTTSTDELETIRMDLQVLINTKKQRKTLPEEKEAYMQELMERRQVLSEELKKVEERIAKIQEFMNSIQTRGRVSAAKKVYPGVKIMIRDVKEEVRSDYRATTFILENGLIRVSKYEEPHEMAKKDLMAI

SEQ ID NO: 85875 - protein, 130 aa, Unknown
  Obtained from environmental sample
  DOMAIN (2)...(130): Glutamine amidotransferases class-II
  misc_feature (1)..(130): Xaa is any amino acid
MCGIFGYVGSQDAVPIIVEGLKKLEYRGYDSAGIAVYGQNGLGVVKQKGRLAALERRLAEEPFAGPPLAGRIGIGHTRWATHGEPSDVNSHPHVGSKNKIAVVHNGIIENYKQIKERLSAGARPNLSCLT

SEQ ID NO: 85876 - protein, 175 aa, Unknown
  Obtained from environmental sample
  DOMAIN (5)...(167): ATP synthase A chain
  misc_feature (1)..(175): Xaa is any amino acid
GYGEIIWPFCEFLGPYMGSLFLFLLLANIIPVLTPLGLKAFGHEFTPLFEIRPPTRDINVTAALAVISILLVLVCGFAARGFTGWFKKLFQPVPFMLPFNIMEYGTRLISLALRLFGNMLGGYVLMSMIEGLLPLALPVVFSLYFDFFDGLIQAAIFVFLTSLYIGEAVKIETEQ

SEQ ID NO: 85877 - protein, 323 aa, Unknown
  Obtained from environmental sample
  misc_feature (1)..(323): Xaa is any amino acid
ETFNFTDAEPVTIVWDGKDDGGTIVKDGVYNYRISATDKAQNSGEASLENIIISTIRPAVSLTITDAYFSPNGDGVKDVQIFIPAVPVREGITNWELQVKDSAGVVQRRLTGTSAVPARLEFDGRDNRGKVLPEAVYSASLSVRYRNGYLSTANSPGFTLDVTPPWAAVQIEDKDQGPGIPAVFSPNNTGHKDELILIQEGSVELVWTGEVRRSGDRSGALVRTFRFSGTPPRRHTWNGITNAGALAPDGFYTYELYCTDPAGNTGRSNAVEFELNTRDTPIFVSSDLRAFSPNGDGIKDTINLIPSIQEKDGILNGSLILPP

SEQ ID NO: 85878 - protein, 436 aa, Unknown
  Obtained from environmental sample
  DOMAIN (51)...(76): The GLUG motif
  misc_feature (1)..(436): Xaa is any amino acid
AGGIVGQNNGHDGKWSFSGTVPGSACDMFGGIVGQNNGTVINSRNSATVSGKSQFGGITGRNEGTIDNSYNTGAINGKRYIAGIAGVNTNLGKYIKNSYNTGNITATEATQSSMAGGIAGLNQSGATIDACYNTGNVTASTNAAGGITGSNSSTVQNCVSLGARVTGTGDFGRITGANSGTLGNNYARSDIKIGASGAEEAVSPAGANTLNGGNISITSGASLTVVFSGWDTALWNISGTLAIGGNLATLKTNTQSPAPTLPAAYSPLGSADNPFLVTNETDLRNVGKETTAGGWTLSAHYKQTADITLTSAFTGIVYTSSKFNGSYDGGGYTITGLNITATSSNLGLFGYIGSGTVKNVNASGTVTGTGSVAGIGGIAGANEGTIENCSFSGTVTGSTTSLQVGGIVGRNTGTVKNSRSSATVSGNDQLGRFCLG

SEQ ID NO: 85879 - protein, 141 aa, Unknown
  Obtained from environmental sample
  DOMAIN (15)...(141): Enoyl-CoA hydratase/isomerase family
  misc_feature (1)..(141): Xaa is any amino acid
MAERVSLTVDDAGIAHLAMRDKANKNLFSDDFIHELVAAIEQAETLRPKVMLLSGLPEVFAAGAEKKNLMDLCDGKVHVKDLVISERLVHASFPVIAAMEGHALGGGLVMAACCDMVIAARESRYGVVFMGLGFTPVWADK

SEQ ID NO: 85880 - protein, 122 aa, Unknown
  Obtained from environmental sample
  DOMAIN (27)...(121): Toprim domain
  misc_feature (1)..(122): Xaa is any amino acid
MTAEKTEKKSSEKKTTTKKKTSKAKKQILVIVESPGKVKTIEKYLGTSYNVKASMGHLIDLPKSRTAIDVDHNFEPEYITVRGRAKILKELQSDAKKAEKVLLACDNDREGEASPGIYETPF

SEQ ID NO: 85881 - protein, 97 aa, Unknown
  Obtained from environmental sample
  misc_feature (1)..(97): Xaa is any amino acid
MESQRLLVLSDTHGNSPFLEAVLRWARNDTFDAAVFLGDGIEDLHRATALTGFSGEWKMVRGNNDYAASVPEAAVVDCGGHRFFLCHGHRYTLYNGH

SEQ ID NO: 85882 - protein, 289 aa, Unknown
  Obtained from environmental sample
  DOMAIN (213)...(289): Pyridine nucleotide-disulphide oxidoreductase, dimerisation domain
  misc_feature (1)..(289): Xaa is any amino acid
MRERQYCSAPVPFPFCRQYQAQRVIPLLVDSTGLLAVENVPKRLAVIGGGVIGVEFAGLFSALGAEVTVIEMMDEIIPFMDKEQAPLFRRALKGVDFKLGCKVEKVEGAAVHYTDKKGKSEIKEADLVLMAVGRRPVTDTWGAVAAGVDYSPKGVTVDDRMRTNIPGIWAAGDVTGKSLLAHSAYRMAEVAVADILTGDHADSKTNRMRYNAVPWVVYGLTEAAGVGITEQEAEAKGIAILKSVLPMRVSGRFVAENTLMGQGAVKVIADANDRRILGIHAVARPILTK

SEQ ID NO: 85883 - protein, 239 aa, Unknown
  Obtained from environmental sample
  DOMAIN (4)...(223): Pyridine nucleotide-disulphide oxidoreductase
  misc_feature (1)..(239): Xaa is any amino acid
MQYDTIIIGGGPAGYLAAERLGHHKKKVLLIEEQHLGGTCLNVGCIPTKTLLNSAKLYVHAKEAEKFGVKAEGLSYDWSAIQNWKIDVVTKLRGGIESQLKRYGIEVINGRGEILSTPSGEKAAKVRVISPDGNIEHEGKTILLCAGSVPVLPPIPGAKGNPPACGFHRASGCRKRTKTPGGYRRRGYRRGICRAFFRVGSRGYCNRNDGRDHSFYGQGTGSPVSPGSERSGLQAGLQG

SEQ ID NO: 85884 - protein, 84 aa, Unknown
  Obtained from environmental sample
  DOMAIN (13)...(72): DNA gyrase B subunit, carboxyl terminus
  misc_feature (1)..(84): Xaa is any amino acid
MLRSHKGERAKKQICNATKGLGEMNPDQLANTTMLRETRVLKQCCVEDAIKADQIFSMLMGEEVEPRRRFIEENAYKVLDKLDV

SEQ ID NO: 85885 - protein, 95 aa, Unknown
  Obtained from environmental sample
  misc_feature (1)..(95): Xaa is any amino acid
MIADFGGEFAVLLPDAGPEEAVSIAEKAREKMAARKISVPIKPNGSKMTEISVCTSIGIATAPIHANNWENLLLAADGALRQAKTLGRNRVVVAG

SEQ ID NO: 85886 - protein, 303 aa, Unknown
  Obtained from environmental sample
  misc_feature (1)..(303): Xaa is any amino acid
MVNPAELAETWNNVQHKELQSASIKPIGEGDGGGGTARGDLEAARRLANLEGAPKAGWKKVSDALENIFAESAHWPEWRGELYLELHRGTYTTQGAIKRYNRKLEFTMRNAEFLSSVAMLENGVPYPHERLLKNWKLLLTNQFHDIIPGSSIGRVYDEAKETYCNIEADLADLSKTVLQELSGSKDTASGGIRFYNDLGWEREDPANFPADLVKGASALKAYGDNSEAIYPVQRYINLDGKETAISCPRLPPLGWITLSAAELKYNSPSFTFQGDSLKTPFYEVGFDETGRIKSLLDVERDQG

SEQ ID NO: 85887 - protein, 168 aa, Unknown
  Obtained from environmental sample
  misc_feature (1)..(168): Xaa is any amino acid
MAEDRMLEFIKGLRAKRPDLQAVLEGVYAAHRVILAEWAAIDPHYLRYPPGHYYSPLPSKREFLSVAEKIYGTSSCPMGVNLRVKEQFRLVARLAKYYDELPFAEEAQETCRYYCNNTYFCHADAYWLYALMREYRPQRIIEVGSGFSSAVMLDVNELFLTRSPSDPR

SEQ ID NO: 85888 - protein, 490 aa, Unknown
  Obtained from environmental sample
  DOMAIN (118)...(228): Phosphoglucomutase/phosphomannomutase, alpha/beta/alpha domain II
  misc_feature (1)..(490): Xaa is any amino acid
FFWIIESRTFHSSVEAALVFCGSGIKTYLFTGLRPTPELSFAVRRLKATVGIVVTASHNPPEYNGYKAYWNDGAQVVPPHDTAIIKEVLAVGGAIKAMDKDEALKTGMLVMIDEEIDRPFIEMVKKCAIRPNLLREGGKSVKVVYTPLHGTGAVPVDTALREMGVDVVFVEEQRAPDGNFPTVSYPNPEEASAMRLALELGEKIGADLVLGTDPDADRLGIAAPDGGSLKLITGNQLGSLLADYVFSARKEMGSMPAKPTLIKTIVTTELQRLIADSYGALCFDVLTGFKYICEKIREFESQKDGPSYVVGGEESYGYLVNTEVRDKDAVSASTMTVEMALYHKSQGRTLWDQLREIWKRYGYFQEALISKAFKGESGLTAMRALMERLRNSPPKLFAGQSVVSVKDYMTGETITPSTGKRDKNIDLPSSNVLQFILEDESIVTVRPSGTEPKIKFYVSCRTGKGAELEEAKKVAGGKIKAITEELNTIA

SEQ ID NO: 85889 - protein, 488 aa, Unknown
  Obtained from environmental sample
  misc_feature (1)..(488): Xaa is any amino acid
LRPADIAYYDGLIYVDLSKIEPCIALPFHPSNVYTIRELNENAKDILAKIEEDGLKTLGIQGRPTGLGLMAKARDGGVWAQQAEIVGCSGGIFDNIMAAADIIKGGSIGNGNFTMSVYPESQPVYLELVRNGAAETFIRAGVLMREAFCGPCFGAGDTPANNELSIRHATRNFPNREGSKPGEGQTASVALMDARSIAATALNGGRITAATELQVPFGKYKFFFDKGVYDKRVYNGTSKPLPQTDLVLGPNIRDWPAMPALAENILVNVCCFITDPVTTTDELIPSGETSSYRSNPLRLAEFTLSRKDPDYVRRAKDIQTIEQARRNNKQDPETAALLKEIHGIPGCANISLSEIGVGSAIFARKPGDGSAREQAVSCQRVLGASANFALEYATKRYRSNLINWGILPFIINDETALGLNRWVFIPLVQKQLREKARTLKAYVLSEKSSEIAVTLGELTDTERQILLDGCLINHYREWGVGRRESGFC

SEQ ID NO: 85890 - protein, 280 aa, Unknown
  Obtained from environmental sample
  misc_feature (1)..(280): Xaa is any amino acid
MASARGDYAWSQAVDVSRIDKDGRRVVTLDRGDPVSARVVIDASGPISLLGRGENICWRPYDLEPAYFVVAENVDAADDAVHIYIGSKVAPGGYAWVFPRGGGAANIGVVVGRNHIKGVNIKKLLGDFLAKNYPKAEIKTYFAGCIPCGYRRGNLALPGLIKCGDAANATNPISRAGIVEALMSGGLAGSAAFDMLSAKDIKQTKKICIDYEKAWLEKRGARHLKLAKSKDSLAKVPDEDYNIAAKTLSGLSSDKVSMAKIFGLSLSRFPRIVWAMRHLM

SEQ ID NO: 85891 - protein, 375 aa, Unknown
  Obtained from environmental sample
  misc_feature (1)..(375): Xaa is any amino acid
VVVALFAVCGLIVTIGRKSRLNVFRSKMFFMAFCVAALVAFALEATTFNFRHYLKYFAGPPTSIKGASEIDPTVMLTTDGTHVESVEDGLRFKNINRRITSIFVDIDFRDNEMVEMLVEWTDEGITQQYVKRLYKYLPYENYALLQSCGKVHELTITFNGKTGESIGIIDVVIDKPIPFYFSGLRLLVTSILLFAIFTFVYKKLRAKAAYYLFEYKFNPKNKNQNIVYICIVALVVLFSWICVYTSVADLYENDLRFSQYNRFLVDALIAGRTYLDYGHPEILSNAERPYDNSWRIANGYGETINKEAFDWAWYKGKYYCYFGVVPAVLIYIPYKMITGNYLSNHAGIFLFGAIAIVLLAVLWRYCVKSICGLSI

SEQ ID NO: 85892 - protein, 94 aa, Unknown
  Obtained from environmental sample
  misc_feature (1)..(94): Xaa is any amino acid
MDTGTNIPALAQKAQDYINLEQDPHFRSQVEDLLKKEDWTELSDRFYADLEFGTGGLRGVIGGGYNRMNPFTVRRATPGLGQLARSAIIPPPQI

SEQ ID NO: 85893 - protein, 251 aa, Unknown
  Obtained from environmental sample
  misc_feature (1)..(251): Xaa is any amino acid
VPILTGFITANDTELGAMASQYGLAMALDDLIFCREWFSSINRDPTLAELRVLDTYWSDHCRHTTFNTILEKITIGEGPFAPALKNALALYESLREELYGNDPPSNRPRSLWDMAVIGAKVLKKRGAADDVDASKEINACTVKVNAEFSGGQTEPWLLLFKNETHNHPTEIEPFGGAATCLGGAIRDPLSGRAYVHQAMRITGGADPRASLDKTLPGKLPQVKIAREAAAGYSSYGNQIGLATGPGGRILS

SEQ ID NO: 85894 - protein, 213 aa, Unknown
  Obtained from environmental sample
  misc_feature (1)..(213): Xaa is any amino acid
LEPLDLPPGKQPVVVRTSFENGEQAVRRVLLFVDPDAPKVETVAPEEKTVHRDELKVYGAADDIFELTDVNINLRPYDKFWYEVPYAIRGLYIDVKTLGATYFDVGIGLSFFDNNVRFQGQFGVAPPWGARNALVEGGRYVGDVVGFKLIANIVTIPFDWLFRDRDWVFSKVNVAVGAELPPGLRWTGNDFYTWALVDADRPCERRRAMPRPL

SEQ ID NO: 85895 - protein, 62 aa, Unknown
  Obtained from environmental sample
  misc_feature (1)..(62): Xaa is any amino acid
MVKVQGIIPPRKWIRAHFMRRGSEVEQMMKVVGEKGTSLEDYIIYLKGDLIDSVTSSKTPST

SEQ ID NO: 85896 - protein, 314 aa, Unknown
  Obtained from environmental sample
  misc_feature (1)..(314): Xaa is any amino acid
MPDALLKRQLYLDIEVPKALLEAERPYDNEYRQQKGMIVRFNMKTIKSLDTLENVLLSDHAYYKGKYYSSMGMIPVLVLFVPYKLITGDYLPSSIGAFLFGSITTILLMLLWKQIAQDYLKKIPYFFFLIGGVALYACSLIPVVLSISIFHTIAQFSSLAFVILGVIILLKAKETLSIKLFIISSFSFALAVACRPSALFWSLLIPVMLWDKRKELLNANRYLLAIIIPFVIVGSTLAWYNYVRFDSPFEFGYAYIIGESNQHMFYKRSIIGKIYPFIETFSLMYLTTKFRFDISFCSIKYQSTSSQSTFHMIY

SEQ ID NO: 85897 - protein, 199 aa, Unknown
  Obtained from environmental sample
  misc_feature (1)..(199): Xaa is any amino acid
MDFQLKGSDREWAETIFEKLNAKLKAECIRLGNTIPYIAKDGHYSDIDTGESIYWWTNGFWPGMLWQMYHATNDAVYRKSAEAVEKRFDEALEGFEGLHHDVGFMWLHTAAANYRLSGSADSRRRALHAANILAGRYNPVGKFIRAWNGESRAGWIIIDTLMNIPLLLLGLQENRRITDIRKMAQCHAQYRVEASMPRP

SEQ ID NO: 85898 - protein, 274 aa, Unknown
  Obtained from environmental sample
  DOMAIN (8)...(268): PHP domain
  misc_feature (1)..(274): Xaa is any amino acid
MKKNLNFSSLHNHTIFCDGKDDIETMCRAAFEKKLCALGFSAHAPITKKTGIESCWNLKDDKFEEYVEQVLAAKKRWRGKLEVLLGFEVDYIKGLRSALDKDITEVNPDYLIGSVHYLIPANGAKPFTVDGPEEELTQGINEGFNADAQAFMNSYYDAQLEMISLGGFDILGHADLIKKNCFGKNLWPGEVEICRQKEIARAVGDAIGDAVGDAAGDTAGKAGIIAEANTGGINRKTINEVFPSETFLRFFRENNVPVIITADAHRAASCRFVH

SEQ ID NO: 85899 - protein, 103 aa, Unknown
  Obtained from environmental sample
  misc_feature (1)..(103): Xaa is any amino acid
MKKNLRFSGLHNHTIFCDGKDDIETMCRAAFEKKLCALGFSAHAPITKKTGIESDWNLKDDKFDEYVEQVLAAKKRWRRKMESLLGFELIHQGLRSALDKTSR

SEQ ID NO: 85900 - protein, 198 aa, Unknown
  Obtained from environmental sample
  misc_feature (1)..(198): Xaa is any amino acid
KVFNEIDALGLGDHRIELVHGKKRIPVRVIKLSLDSKETETLITSLTNRRYGVEDFKRLYFKRWPVETKYDVIKKKLEIENFSGKLVDNIRQDFYATMTLANIAADFYRDAQADVEAQQERKENKYQYQVNVSHEIGVLKDRLVKTLIEDDDKKRSAMFDEMLNLLKKRLIPIRPNRSLPRVAFPRRVKFHHNHKSNC

SEQ ID NO: 85901 - protein, 93 aa, Unknown
  Obtained from environmental sample
  misc_feature (1)..(93): Xaa is any amino acid
MPDYTLFDLIDGNPFSTLDPRVKELISLATDRGRLTRPDLVCGLCGEHGANPANVHFCMDAGLNYVSCSPYSVPIAMLAIAQAEIAKAENPAK

SEQ ID NO: 85902 - protein, 189 aa, Unknown
  Obtained from environmental sample
  misc_feature (1)..(189): Xaa is any amino acid
MKIKIKLSIMMIAIVAIVAGGVAVIQLVRSSNITLNLAKQKTLYLARQRAQYWDGRLNGYISTLQALSNIFNFYESISVEDRRQQFEDNLKGIFEDMPDFVRMGTIWKPNAIDGQDAANIGRVGSTPTGQFAFTLTRETGQIVELTSTVVDETMAIMNGPNSRVVNMSDPAPMKNQGKIHFASGSQSPL

SEQ ID NO: 85903 - protein, 62 aa, Unknown
  Obtained from environmental sample
  misc_feature (1)..(62): Xaa is any amino acid
MNKKKFKQIKRKWAKTSSWAVWTKAGDKPKSNIGDLSIFDINKNQKLLSILNPNIINGARPI

SEQ ID NO: 85904 - protein, 236 aa, Unknown
  Obtained from environmental sample
  misc_feature (1)..(236): Xaa is any amino acid
MSRIVVKNATTGAELIWRHIAIKKSLDDICHTLELEIAPSERGKVSRHDKIEVRYANPAIKDSQAAGGRRVTTVLVDEVAASADIQKHSIAVTGRSPARDIIDSAWSEDFDDMTVLDLAKTIGGRFGIQCHALPPSIAGKMQPIYAFRIENESPWVKLANAADNEGYMLTSNEAGDLYLWEVSAAVRDEGFKLAEGANIKSIEFIENGAEQFNEYIVGGCGERARAIDDSCPGRRI

SEQ ID NO: 85905 - protein, 156 aa, Unknown
  Obtained from environmental sample
  DOMAIN (3)...(154): Phosphorylase family
  misc_feature (1)..(156): Xaa is any amino acid
MKTIAVLTAMPQELDAVLKTFNFANPEKVELFGMSVYISVHNGIKFILALSGVGRANTAMNTALIAKEFKPDEIINVGSAGGLQNEQKILDIVIPSEIVAVDVDLTVLGCEYGQMLGDQKSYFADAKIQEKLINSGEGLATVHTSTIGSSEAFICA

SEQ ID NO: 85906 - protein, 208 aa, Unknown
  Obtained from environmental sample
  DOMAIN (1)...(200): 4Fe-4S iron sulfur cluster binding proteins, NifH/frxC family
  misc_feature (1)..(208): Xaa is any amino acid
MREGYGGIKCVESGGPEPGRRLRRTGYYYSHRLLEQLGAYTEELDFVFYDVLGDVVCGGFAMPIREGKAKEIYIVASGEMMALYAANNIAKGIAKFAQKGGVRLGGIICNSRNVDRENELLEAFSKELGTQLVYFVPRNNVVQRAEINRKTVIEYAPEDKQAQEYRNLAKAIEGNTLFTIPKPMTQERLEEILMEYGLMDAIKNDYRI

SEQ ID NO: 85907 - protein, 298 aa, Unknown
  Obtained from environmental sample
  misc_feature (1)..(298): Xaa is any amino acid
MIGLPACSQANAAGSADTSSAGEETAIVNFVSSVAKKTAMHFNVNVGLFVPKPHTPYQWARQLDSETAAKKLDFIRSRLKPQGHKVSVCDTFVSMLEGILSRGDERASGIVEQAFRLGTRLDPWQEFISKDAWQTALDNNPGLAGEFLAEKDPSTPLPWSVINAGVSAAYLRKELEKSSRGELTPPCKEDCAERCGVCNDKVQIAMNNAQCLQTTTLLPTPQGDAVAPLLPNKKPDPAIWRLLFEFSKEGSAVFHGHLSLIEIFSMALCRTGLDVQYTQGFNPLQSWRLSRRFRLGRF

SEQ ID NO: 85908 - protein, 336 aa, Unknown
  Obtained from environmental sample
  misc_feature (1)..(336): Xaa is any amino acid
VIARDGLGEAAINMETVLCLIEEKISYVILSPNQAESCRRISGGDWVHINQAPIDTRRPYRVFPRTRDGAQLEGHLDVFFFNEGLSKAVSFDNLLQDSRTFGNSINQCYDNNYGGNQAVIIATDGETFGHHKPYGDMCLAYFFKHIAPEMGITPVNFGYYLSINPPEYEVSLGDAFGEGRSWSCAHGVGRWIRDCGCSTGGKAGWNQAWRGPLRNALRRLQSQIDFHFEARLSTIFADPWALRDKYINVMWEPSLAKTAEFLHAQSGGKLSFNEELTAEIRRLLEAQKFMLFSFTSCGWFFSEISGLEPMQNLAYACRALQLGIPEDSKQPVLDAF

SEQ ID NO: 85909 - protein, 94 aa, Unknown
  Obtained from environmental sample
  misc_feature (1)..(94): Xaa is any amino acid
MGTMVLFRPTAIQRKALALLKGGAKHILLFGGSRSGKTTVLVMAIIYRALRFAGSRHLICRYRAKDARSSVLRETLLPWLDNTVGKSRLLLLGA

SEQ ID NO: 85910 - protein, 68 aa, Unknown
  Obtained from environmental sample
  misc_feature (1)..(68): Xaa is any amino acid
VIARFATSPITLKGKIVMGIGCGILTFLIRFHGGYPEGVSYSIIIMNLFVPLIDKYIKPRVYGKGKKK

SEQ ID NO: 85911 - protein, 129 aa, Unknown
  Obtained from environmental sample
  misc_feature (1)..(129): Xaa is any amino acid
MKTLGICFGATTVQYVKLSVSDAAAGAKIEATGRIAHEGDPKGVALKLLSDPAIAGVDRVAVTGRAFRASVDLSAISEPEAVECALRRSYQGGGCPHPCDSSGGETQLVYVINSKGGGSFRPLPQTVRL

SEQ ID NO: 85912 - protein, 84 aa, Unknown
  Obtained from environmental sample
  DOMAIN (2)...(76): chorismate binding enzyme
  misc_feature (1)..(84): Xaa is any amino acid
VTDSAERPRKKRGIYGGAIGYLDFTGNMDTCIAIRIVYRRNNKVFIRSGAGIVADSKPESEYQECVNKSKAVMDALKNSSGGLE

SEQ ID NO: 85913 - protein, 215 aa, Unknown
  Obtained from environmental sample
  misc_feature (1)..(215): Xaa is any amino acid
MKIQYFKRNIDEILLSWSRDTPPDRKPLLLRGARQVGKSSAVRQLGKQFKYFVEINFDENKEVKSFFEAPLSPQEICEQLALFYHTPIIPGETLLFFDEVQSCQPALTKIRYFYEKYAELHVVAAGSLLEFALEEIPSFGVGRIRSLFMYPFGFDEFLTALNEEALSEAVKTASPEKPLAVPIHQQLLGRLKIFFVCGGMPEAVPNMCGSADSDQ

SEQ ID NO: 85914 - protein, 509 aa, Unknown
  Obtained from environmental sample
  misc_feature (1)..(509): Xaa is any amino acid
VVSANPASSFITATSITIAAVTITSPNPGNQTVEYAISTTASSVPTSGWQAGLTFSGLTPNTNYYVFARSKENENYNAGAAKVSAAIKTQAAQIIEVPRTTIVDFEADDLNKTYESTKGGSAPTVKVVTDPLNSGQKSLQITSSDYNQAAIVPVNLPVELHHYKSFSFRFNLLSSANLTNQSIMVYVAKNTADFKQYGFGNPADSSYAQFADKLLGSTPAETIGDNHRNKWTGYTLTISNPGAAIKDLKGDIYIAIGINVQNGANYLIDDLKFEMKDGYNPPPIVILPGPTPPTIGAVSSGNYRNMFMEWGKTETEVNAKINTTWNKLFNGTETEKVYYTVGSDMAYILDTGNNDVRSEGMSYGMMMCVQLDKKAEFDRLWKWARTYMYNTVNNGSNSRGYFSWQCKPDGSKMDPGLAPDGEVYFITSLLFAHARWGSTTGIYDYAKEARQVIYDLTRRKPGNGDPYGEPSMFNVDNYLIRFGTVGNSATFTDPSYHYAAFPRPILTHG

SEQ ID NO: 85915 - protein, 114 aa, Unknown
  Obtained from environmental sample
  DOMAIN (1)...(107): Diaminopimelate epimerase
  misc_feature (1)..(114): Xaa is any amino acid
VGFYDNRDDLDLSRIGPLFENDACFPDRVNAEFVKVVARNRLKIRLWERGSGETQASGTAACASAVAAVLNGHCDKDTDIKVQLPGGDLIIRYTDEAVYMTGDCKKVFDGTVEI

SEQ ID NO: 85916 - protein, 138 aa, Unknown
  Obtained from environmental sample
  misc_feature (1)..(138): Xaa is any amino acid
MADAAKTTEAGWPAARYQWIFSVQTPVTLPEYAGSMLRGVFGQALRQIACMTRERVCPDCPLYRTCPYAALFETPPPPAHPLQKFSAAPHAYVIEPPPWGRRVYQPGDSLVFEMTLFGQALEKLALILVPILIPWPKP

SEQ ID NO: 85917 - protein, 322 aa, Unknown
  Obtained from environmental sample
  DOMAIN (1)...(232): RNA polymerase Rpb2, domain 6
  misc_feature (1)..(322): Xaa is any amino acid
VKAGDVLADGTSTDNGELALGKNIRVAFLPWQGYNYEDAIIISEELAIKDTFTSIHIEEYEIEVRETKRGKEEITKDVPNVSEKDRSLLDEEGIVRIGMEVRPGDILVGKVTPKGESELTPEEKLLRAIFGSKSGDVSDSSLRVPSGVKGIVVDTRIFQRRENHASKKDEELRHREEQASKIRAVATDFAERTNLIEEARKPELARLLLGKTSGNVCNGITNEVLVAAGKKWTQDILDKTDFSQLASSSVFCDEPAIQEEVAALLSITNRRITELNDLKGKGIDKINKGDEIEPGVGQVLKLYSQRRRLSIAIKWQVATETK

SEQ ID NO: 85918 - protein, 204 aa, Unknown
  Obtained from environmental sample
  misc_feature (1)..(204): Xaa is any amino acid
LDEYRGKEFNGVWPTLPELFRITVSRHGQRQCFTVFEPDRVSLNYTEALALIQAVARWLYSKGIRKGDKIALTSKNSPEWAVAYLGIVFAGAVVVPIDYQLKNEETELLMRTARAKILFVDEEKHTHFKENPKDLTDIVSLKKGVGQYIYDLNGPEAAIEEATENDLAATPFYIRIYLGSQPKKEKRSAALEYPSRGPRYATRS

SEQ ID NO: 85919 - protein, 107 aa, Unknown
  Obtained from environmental sample
  misc_feature (1)..(107): Xaa is any amino acid
MAAGNKGLYTTHIANPEANSACKRINLALRWLVRKRPVDIGLWKSIKPSSLYIPLDVHVARNARNIGLLERKSNDKKAVMELTGKLRQFCPEGPGKIRLCFIFNRLD

SEQ ID NO: 85920 - protein, 264 aa, Unknown
  Obtained from environmental sample
  misc_feature (1)..(264): Xaa is any amino acid
LAAQIVKPVSEFIEGHTTVAVERASLRLVGANGADSNGIPVPNLIVDQLKGQLEGGALRWYINALLKMGHAPDALNAQIADGFSLKDVPLGDPSQIEAKGGQLASQHISRIQVNRKHRETKLEQFKGKNRDPLLYVIVATGNIYEDIKQAQAAAEQGADVIAVIRTTAQSLLDYVPHGATTEGFGGTYATQENFRIMRTALDESSEKLQRYIYLTNYASGLCMPEIAAKGASERLDMMLNDNKYGILFRDINMYRTFVTVIPVH

SEQ ID NO: 85921 - protein, 143 aa, Unknown
  Obtained from environmental sample
  DOMAIN (2)...(132): Response regulator receiver domain
  misc_feature (1)..(143): Xaa is any amino acid
MIFIVLIDDHPMLTGAIGVWLEAEGRFTIAGTAANLEEARKLMKELETLPQIVILDISLGSGNKDLVQEDGLTFIPELEKICKERNAAMPAVLVCSMYKDPFLVQRAMDLGAKGYVAKSAVAGRNNCRHRRHTRRGNLYKRKN

SEQ ID NO: 85922 - protein, 265 aa, Unknown
  Obtained from environmental sample
  DOMAIN (11)...(107): Oxidoreductase FAD-binding domain
  misc_feature (1)..(265): Xaa is any amino acid
MNANVNPTQFTSRITANDRIADGFYELSLSWDQRAPIPLPGQFLTIRVNGGTVPLLRRPFAFAGFSADSSVATIIYQKRGAGTEFLAAMRAGEGIDVIGPLGTPFAVDTNQQQKHIIVAGGIGLGPMLLLASSLKVRNIPARFIFGCRNQSFIPNTKRFIDVNPQICTDDGGSGFRGTVADYINTNVSLDINTTVYACGPLPMLKSINNLAKNSGSRCLVSLEAMMACGVGACMGCAVPVAGGGYSRVCGEGTFFEGGEVLWEQT

SEQ ID NO: 85923 - protein, 298 aa, Unknown
  Obtained from environmental sample
  misc_feature (1)..(298): Xaa is any amino acid
MSTGAVSGHGFKLAMDALCEKYKSDAALAADPISIPLTYTSAVDIETTSWVAAHLAYGRVSPMLNAIRRLLVPLGSRPAQWLRERSEAEIRRELEQSQPGWVWRFHTLPDMAAWLIAWKRLDKSTGHSGVGPLLIPDGRDSADARLSALVNDLRKELPESHGLRFNLPDPLKGAACKRWRMFLRWMARKGWPDFGAWENYPASCLVVPLDTHVHRISMQIGLCQRRGADAKAAHEITAALRELDPEDPLKYDFALAHLGILGDCTGKKRHKLQECPLEALCLATAAIITVRGEKWCRN

SEQ ID NO: 85924 - protein, 558 aa, Unknown
  Obtained from environmental sample
  DOMAIN (274)...(339): His Kinase A (phosphoacceptor) domain
  misc_feature (1)..(558): Xaa is any amino acid
MADTPVIQQYFMNPSDPVLKSQAHTELTLYKEHFENKAAFWINDIDKIFYTTGNAPYVVNPDDPENYWYNLTLYKTEKFNLNINYNPDLDQINLWVNVPVFAETDAGRKPIGMLGTGINLTDFSNFVASSYRKFDENITPYIFNKYNEITSAVDYTLVEKKVRLDDLLGETGEKLIQAAHELSKGESRSFSYDNKIFLVNSIPEMEWYMVLSYPMHGLFSLNRAMNTVFFCMLFLILFLFIVINIFIARLENAMAEHNLQLLEANRKAESASHAKSDFLAKMSHEIRTPMNAITGMAELLIRGDISGEALGYAQDIKQAGNNLVSIINDILDFSKIESGKLEIIPINYLLSSLINDTINIIRMRLMEKPLRFFTNIDSNIPNSLIGDETRLRQILLNLLSNAIKYSERGHVGLAITTDKRDDKQVWLRITVSDTGKGIRHEDQEKLFDEFVKVDVKKNQGIEGTGLGLAITKSLCIAMGGYISMESEYGKGSVFTALIPQGIETDTPFAAVDEPEKKKVLVYEGRINYAKSVCWTLENMKVPYAMVTNPGGSCRCALS

SEQ ID NO: 85925 - protein, 69 aa, Unknown
  Obtained from environmental sample
  DOMAIN (1)...(57): Bacterial regulatory proteins, luxR family
  misc_feature (1)..(69): Xaa is any amino acid
AQFNERELAVLRLVCNGMERDEMAAKLGLSESMIGRHITSILDKTGFDSISKFAIYAVSEGLIKPDPII

SEQ ID NO: 85926 - protein, 65 aa, Unknown
  Obtained from environmental sample
  misc_feature (1)..(65): Xaa is any amino acid
VASAFLDICTLKGHIGQVAKVRGWVRNARTSKTRFIELRDGTGFVQCVVTRSDSEPESYDLAGGL

SEQ ID NO: 85927 - protein, 248 aa, Unknown
  Obtained from environmental sample
  misc_feature (1)..(248): Xaa is any amino acid
LIVENKQELENEYSNINVSSIKMLYERAKLLIPNIQKTFEDTLSFHNKLLSEKLEFITKELPQIEKNIKTNKNEIETLTIEEQKLGDILRKNGFAEDMEKVIIELNKQHEKKGHFEEQLRILQESKNNLDAVDKRLNEIDNDIGSNDFLFKERITEFNKYFSEITNDLYGESYLLSSSKEECYDLAVTNVEGNLGTGKKKVQIAAFDFAYVIFADKFNIKCLHFILHDKIEGVHDNQLILYKRRDPDA

SEQ ID NO: 85928 - protein, 195 aa, Unknown
  Obtained from environmental sample
  DOMAIN (27)...(153): Tripartite ATP-independent periplasmic transporters, DctQ component
  misc_feature (1)..(195): Xaa is any amino acid
MNKTAGRLFGITENIEKGVCFAAFALMAMLPFFDVILRPLNVIIPYSRLYLIRLFLVSGLFAAMLTTKAKDHISIAIINYAKSEKLKKILSCISGLLSAFIAANLFWDSISFLAYSFSGRSTGAIPDWLFALAMPIAYGVIAVRFAIYSASLGPKEGADGEKTDWKRWALPVFILLFGKRRRTPAHNKIFWGFNP

SEQ ID NO: 85929 - protein, 546 aa, Unknown
  Obtained from environmental sample
  DOMAIN (283)...(395): PAS fold
  misc_feature (1)..(546): Xaa is any amino acid
MFPDHKYSIEYDSQEEVWSSLKLDNEVDVIFGCNRRLITYTNYYEDAGYRLNLILNYTFDASMGFNKNAAVLKSITDKALGIINVNNISNQWMHKSYDYRKKLTEAQRPWFIGAAGLFLTVLVLTLFFLYKSRSFGKQLETLVKHRTSELSLKTSQLQMMIDSIPDLIFCKDTELRYTQCNKIFEEFIGVSETELFGKTDKEGLWLSSDSEKRISAVEEAVLKDKNIAKYEEYVTSIVTKKGYYFETIKAPLVKDGVVVGLMCIARDITGRKTMAKEIALQASLLKTIINSLPDSVFCKNLELKYTLCNKYMADLFGREINDILGHNDMQAFGFTKEAMEIANNADRIALNECRQVSFEEWMVCGDGTKRLFETVKVPLILDEEIVGILGIGRDITQRKAMEEEVRAASVAKSDFLANMSHEIRTPLNVVIGLTDLVLEDGSLSKEVTGNLIKINNAGSTLLSIVNDILDFSKIEAGKLQISPVEYYVSSLLNDVITLVVTRIGEKPITFSLNIPDNLPNKLYGDDLRVKQILTNLPEHSAKYTHR

SEQ ID NO: 85930 - protein, 513 aa, Unknown
  Obtained from environmental sample
  DOMAIN (135)...(300): Protein of unknown function DUF115
  misc_feature (1)..(513): Xaa is any amino acid
ELFAGANAAGQGRPIIIVEKYRKLLVKALEARDLRGFLSKNRIIFVIGGAGEGITNALSIADGFISSNERAEAVVIRNRALIDLDKEWYGVVEEKLRTWSMRDDVNSATLKRFGRRWVRNLSRNIGAIRDYAGISRLANIANGITDGITENITAGVAVDAPVFLAAAGPSLDKVRPLLHEIHKRCVTVAVDTSFRFFTDNGIQPDFVLVVDPQFWNSRHLDRCPCGHTALIAESAVYPPVLRLPFKNIFLCGSLFPLGSFVEKQVDPKGPLGAGGSVSTTAWDFARTLGSKEIWIAGLDLAFPGLKTHFRGAVFEDRSNAASNRFSPVETWVVRALRDGFPFNAPCASGGQVLTDRRLSLYAAWFENRFRQHPEVQNYGIFQDGLAITGIQSADAEKLLSLPERRGEIDRRLKAVFSKIDGDFNNPVEKQKRAERYANAVSALIRGLEEVGNAAKKGAEITRQALKGKTDSGMQNRILKELDEIMRRITDSEVKEVAGFLFPAENKNNEAEGL

SEQ ID NO: 85931 - protein, 166 aa, Unknown
  Obtained from environmental sample
  misc_feature (1)..(166): Xaa is any amino acid
MKALCVLYGGRLEPEAFEKALPTQAGNESAFSLAVAAARAFPGVERTVLLGMQDSGYPDLPSDVEIVTRPSWTKTSLLEEISRLSVGWDFTYFAWADCPLLDMALAGAMAERHQRYKAEYSYADGWPYGLAPEILGPGTAGILAKISDSTGSDGPVEKDALFQVIS

SEQ ID NO: 85932 - protein, 328 aa, Unknown
  Obtained from environmental sample
  misc_feature (1)..(328): Xaa is any amino acid
LIGENERVVLCLLVLLVLAGGTVFAGGSSSGGASSTASQTRTPVGQYPIETDVTLTYWVQLHNNISPNYTNLGDTPFYKELLKRTGVKVSFEHPPSNAVNEAYNVMVASGDLPDIIEYNFTTLPGGPPEKAISDGVITRLNDVIDKWAPNLKAVLKAKPDWDKWVKTDEGSYYVFPFIRGDPKLLYTQGLMIRRDWLDDLGLQIPQTIQDWHDVLVAFRDRKGATAPFTMTWSNRGRMFMPGFNILNEFYISADDKRVHYGPMEPGYRRWLETMAQWYKEGLLDKDIMTVTAAPAKHEDDDRCFRRVRGVHSKWYGTMDKHSPAHYSQ

SEQ ID NO: 85933 - protein, 188 aa, Unknown
  Obtained from environmental sample
  misc_feature (1)..(188): Xaa is any amino acid
MYIHRLLENSLAKTFDSFPITALIGPRQCGKSTLAKHFLKESGKDYIFLDLEKPSDLQKTENAEWFFNTQKDKIICIDEIQRCSELFPCIRSLTDEWGKNGSFLILGSASRDLLKQSSETLAGRIAYKQLSPFLWSELNGICTIERYFESGGFPRSPAAKILIFRLMARNFIRISAIWHEKALAMPAH

SEQ ID NO: 85934 - protein, 630 aa, Unknown
  Obtained from environmental sample
  DOMAIN (2)...(65): 5'-3' exonuclease, C-terminal SAM fold
  misc_feature (1)..(630): Xaa is any amino acid
MTRYVSLDNIYKNLAASEASVGKKIAEGKENAYFSQSLIRLRDDVKLPISSVDELSVENLDRSAGAKVLIREGIRQSAKQLDPNVKPAAQTAAEQSSVTQNSSIKETNNVNQSESVSFPAAEQALIGDGVYKTILDIDELISVLEQAKKQKLLALDFETDSLDAWHSHPVGISLAIKPKEAFYVPVAPHGDGGELSEFNNPEKVRALLSPLFADNEMTIAAHNAKFDYKVSRGWGIERWKCKIWDTMTAAWVVDPERNTYSLDSLAAYTFDCTPIKYMDIVPKGMTFNVVPLETATRYSGEDADFCIRLKHHLEPVLKKTESIALFENMEMPLLPILAEMEGEGIKIEPKALTNYGKELAVELDKIQSETWKTVGHEFNLASTKQLQEVLYVERKLTPGKKTKTGYSTDAAALEELAREDPVPALILRHRTLSKLKSTYVDTLADMADSEGRLHTNFVQTGTATGRLSSREPNLQNIPVRAEEGRRIREAFIAKSGCVLISADYSQIELVVLAHLSQDENLISAFKEDRDVHARTASLIFGIDENEVKNEQRRMAKTINFGVIYGMSAFRLANELNISRTEAQNFINAYFNTYSGVRQFIENTIRKTEQTGYVTTLSGRRRYVPTILGDN

SEQ ID NO: 85935 - protein, 392 aa, Unknown
  Obtained from environmental sample
  DOMAIN (1)...(166): ATPase family associated with various cellular activities (AAA)
  misc_feature (1)..(392): Xaa is any amino acid
LGGGLDQIGTSRFCGMFVGVGASRVRDLFDQGRKSAPCIIFIDELDAVGRTRGAGYGGGHDEREQTLNQLLVEMDGFDSKDGVIILAATNRPDVLDPALLRPGRFDRQVIVAMPDIKEREAILQIHAAKIPLDKEIDLARIARATPGMSGADIANLVNEAALFAARKDRPEVIMHDFEEARDKVLMGVARTTLVVSDKERRMTAIHEAGHAILHYFLKNADPLHKVTIVPHGRALGAALSLPEEDSYSRSKGWIEDRIAICYGGWLAENLFYNETTTGTKNDIQQATEMARNMVCEWGMAAELGPIAYGQEDEPIFLGKEIARHKDYSEDTAQRIDKSVKEILDRARNNALKIIEEHKAQLEKLADALLARETLIDDEVREILGLPSKGESE

SEQ ID NO: 85936 - protein, 365 aa, Unknown
  Obtained from environmental sample
  DOMAIN (3)...(334): Basic membrane protein
  misc_feature (1)..(365): Xaa is any amino acid
GCAVSSLWYTFGLLKKQDQKKSAETFDLALVTDLGTIDDKSFNQGSWEGLAQYAKEKGISHKYYQPAEQSDDAYLTAIGLAVQGGAKVVVTPGFLFETPVFVAQDRYPNVNFILVDGVPHSADYSEFKTGKNTVGVNYAEDQAGFLAGYAAVKDGSRKLGFVGGMAVPAVVRFGYGFVQGAEYAAKELGLASGSITINYHYTGAFAATPEAQTLAASWFNSGVDVIFACGGAVGNSVMAAAEQAGKKVIGVDVDQSGESPTVITSAMKGLQVSVYDCIADYYNGKFPGGLTLVFAADNKGVGLPMQSSKFKNFSQADYDSIFHKLATGSIPRMDNLDSKRKSKRSSGYHIRSYRGKVNYGNGLHL

SEQ ID NO: 85937 - protein, 438 aa, Unknown
  Obtained from environmental sample
  DOMAIN (312)...(387): Hpt domain
  misc_feature (1)..(438): Xaa is any amino acid
LLTNAIKYRNEGSVELKVRCERENDTVWINAAISDTGIGISEEAMKDLFQDYHRIDSKSNHHVEGTGLGLSITKKLVEMMDGEIKVESEIGKGSTFSFRIKHAPVGDAVLGADISDKLRNFCYTDDKRVVSQKLVRIDLSYAKVLVVDDIVTNLDLAAGILGSYKMHVDCLTNGPAAIERIQSGTPVYNAIFMDHMMPGMDGIETVDKIRALGTDYAKKIPIIALTANAIKGTEKLFYDHDFQAFITKPIDLVEMDTVLRKFVRDESVAEVVINDELSETDLKIEKLVIEIPGVDTKKGLSLYAGAKKIYLPMLRSYAHNTPKVLEKLNSVSAENLHDYVITVHGLKGTSAAIGAEHIRTAALELENLSRAGNLQGVLAKNDQLIVNTKIVVASVQEWLDKNDIREVKPHLKAPDRELLAKLRENCESYDPWTPWKTP

SEQ ID NO: 85938 - protein, 137 aa, Unknown
  Obtained from environmental sample
  DOMAIN (4)...(89): ATP synthase, Delta/Epsilon chain, beta-sandwich domain
  misc_feature (1)..(137): Xaa is any amino acid
MSALFNFEVHTLRRIFYSGKAQVIIISLEDGEIGIYANHAPFSAHSVTGTLRIKDESGNWRTAFVCGGILEVKEHKNVLMVETADWPEEINVEKVLEAKRQAEETLKETNLKFEIDKAKKKLHHAECRLKVLEMVKK

SEQ ID NO: 85939 - protein, 186 aa, Unknown
  Obtained from environmental sample
  misc_feature (1)..(186): Xaa is any amino acid
MQGTKHYQEKFFVNFRLSERIPSDNFYKRLKDSLDLDYLRPLTAKHYGKEGQKSIDPVVFFKLMLVGYLENICSDRKIIEQCSLRLDILYFLGYDIDEPLPWHSTLSRTRKLLGEEVFLSFFRDILKRCVEKGMVDGRIQAADSAFIKANASMSRLEENELAKKSKSYFDVFFTIARRIATYATLV

SEQ ID NO: 85940 - protein, 106 aa, Unknown
  Obtained from environmental sample
  misc_feature (1)..(106): Xaa is any amino acid
MEKDYLAYLDDYEFNRIRIFGFTKRGDVKDIMCQYESLMNGKWIAIIRYDSSHGQPFHRDVMMPNGEKEKELVEIESLNEAFTYAVQDIKDKWRFYFNRYISKIRS

SEQ ID NO: 85941 - protein, 228 aa, Unknown
  Obtained from environmental sample
  DOMAIN (8)...(186): Methyl-accepting chemotaxis protein (MCP) signaling domain
  misc_feature (1)..(228): Xaa is any amino acid
RLVPGRPLRRIASIVLVDIPEIAKESEGRLEINMVIQTIASQTNLLSMNAAIEAAHAGELGKGFAVIADEISKLADNSRAQSKTISVVLKKIKSMIDTITKSTGAVLDRINEIQQEVQVVSEQETQIRNTMVEHGKGSQEILEAVTQLNNATDLVQKTSEEVTSESRDILNQSNELKQITTDAAVNMDDMTVSIEEIACTISRVQEISDENKGNIDSVSAEIGRFKVE

SEQ ID NO: 85942 - protein, 393 aa, Unknown
  Obtained from environmental sample
  DOMAIN (10)...(141): GTPase of unknown function
  misc_feature (1)..(393): Xaa is any amino acid
MLSSEISKRRTFAIVSHPDAGKTTLTEKFLWYGKVIREAGHVRAKANKSYTVSDWMKIEQQRGISVSSSVLNFPFEGCYFNLVDTPGHQDFCEDTYRALTAVDAALVLIDSVNGVERQTIKLMEVCRMRHTPIITFINKMDLDGRDVLELLDEIEKILQIQACPFTLPIGYGKLFKGIYSIADNTFHTFNKEEGKQEILQMSGADDPKLTELCGEEYIKEFKNRYEMVTQAMEPFNKGEYLAGKQCPVFFGSAVNNFGVRQLLNTFASIAPPPTPRESDVRIVMPTEDKFSAFVFKIQANMDPRHRDRTAFLRICSGSFERGNKVWHCRSGREIRLAAPTSFLAQDKEVIDKAYAGDIVGINDPGIFNIGDTLTEGERFQFPAFPDLPQTRPS

SEQ ID NO: 85943 - protein, 495 aa, Unknown
  Obtained from environmental sample
  misc_feature (1)..(495): Xaa is any amino acid
MLWISGKLPENFRLLCSITEGPETEAFKQLGGELRPVPSISTEDEAAIIHGIAARHHKQINNAVVEYILQKQTPDGAQAAQNPLYLSLITQDLVMMDRYELETVQKYMEDGASQPEALAKFMRERVDETPGDPEGAYLAVLDRLDKLIGKDFVRAVCGMIAISRNGLRESDIEGAFRELGLKFNPADFSWLRQMMRGHVSQGDMQQWDFSHQSLRRAIKEKMPEELERLNNGIVAHFRNIIAHDDFAAREIMHHLCTANRPDIAAEVIAAYYDNHRTTLARGLADVYTEHGEGQAFLLKVPDSVKNVEETKRWSITETIDDCLPLLPEKTRPFRIEFMLAALAMIEKQEDAQTRRIKTFSEDTVADLYTETGQTKEAGEYYRKALDVRVQVYEQAGTISALRDLALSYSRMGDHLKELGRTEEAGEYYRKFLDARVQSYEQTGTATALSNLSMSYQRMGDHLKELGQTEEAGEYYRKCLNALVQVYEQPARTRDN

SEQ ID NO: 85944 - protein, 103 aa, Unknown
  Obtained from environmental sample
  misc_feature (1)..(103): Xaa is any amino acid
MWGFEPNIVMPVGKILELITAEGRAIEGITLLGGEPLDQAEECAELLRLCKTRELTTMLFTGYELGEITDGDILKLCDILITGRYDESKRTLYRPRADLINGP

SEQ ID NO: 85945 - protein, 289 aa, Unknown
  Obtained from environmental sample
  DOMAIN (61)...(289): Phosphatidylserine decarboxylase
  misc_feature (1)..(289): Xaa is any amino acid
MNSIAYAFLRLLPKNALSRAFGNFSRAKIPLFSSLSAEWFANRYKINLEESVVPANGFANIHELFTRKLKSDARIIEDNAEVVCPVDGVLTAFGMLTEEPEYMQAKGKYYLLKDLLRNKELAKKFIGGVWATIYLSPHNYHRIHSPVSGNVTAAYYCPGTLWPVNAGSVERVEGLFSINERLITQINTYDGGEVLLVKIGATNVGRIAVDYKKDWFTNSMPMVANRNALFTKWEPEQQIYAYTKGQEIARFETGSTVIMVCNRAIFKRTKYLFAELEGREVKMGQGLMI

SEQ ID NO: 85946 - protein, 336 aa, Unknown
  Obtained from environmental sample
  misc_feature (1)..(336): Xaa is any amino acid
GLSRGGIERGKRSLQRTYTFAASELDLNVPTEAWGQWNNPAGFVKFGRFKPEISPTPNSIILGGAPHHDAIHWKFNAGVARYDLLLISLNAWLSEDERKEQHDIQIPNARKRIYEEPAKNLLLHKVGIDGGFGYFSIIEQSLIGGKNLEFRDFSPFVAWHNNFSYGYSKMSVALEAGLRPIKKSEFYWQFVMEDIQSPVGEVEGDKGYTTLAFLAGYKQKIPLGIYGDIESRIDAVRTDPQFNNNKVPLQKMTSRKVYNSNFREQGKPNFADMYIVDYPLGYRRGPDAVDLWWNIKYTPASKKFNAGAGNRIFKAGRLRDLFRPPGMQRTQSFRRH

SEQ ID NO: 85947 - protein, 312 aa, Unknown
  Obtained from environmental sample
  DOMAIN (34)...(103): S1 RNA binding domain
  misc_feature (1)..(312): Xaa is any amino acid
VEVLVEHLEDARGNVRLSRDRAEKMKIWDEVEKAFRANLTVHGVVLEKVKGGLAVDIGIRAFLPGSQVDSKPVRNLDPFLGKSFDMKVIKVNRRRGNIVLSRKLFMETVNASLKEETLSGLEEGKLVEGQVKNITEYGAFIDLGGVDGLLHITDMSWGRLNHPGEMFHVGDKIEVAVLKYDRESERVSLGYKQKFPDPWLSVEERYPLNAMVKGKVVSITDYGAFVELEPGVEGLVHVSEMSWTKKVKTAKGMVNMGDMVEAQILQIDTENRRISLGMKQVTPNPWTAVAEKYQIGQVVTGTVRHITQIGAF

SEQ ID NO: 85948 - protein, 206 aa, Unknown
  Obtained from environmental sample
  DOMAIN (93)...(122): Helix-hairpin-helix motif
  misc_feature (1)..(206): Xaa is any amino acid
GERNGAEKDPAVTTVAEHTRHDPWAVLVSTILSLRTKDDVTLKTSRRLLEQAAGPKELNALPEDRVARLAYPAGFYRTKAASLKKIAAILLEQYGGKVPADMDALLALPGVGRKTANLVLIEAFDLPGICVDVHVHRISNRCGWLRTKTPEETEMTLRGILPKKYWKGINALLVLYGQNLCRPVSPHCSRCVIKPHCERNGVERSR

SEQ ID NO: 85949 - protein, 321 aa, Unknown
  Obtained from environmental sample
  DOMAIN (178)...(316): ATPase family associated with various cellular activities (AAA)
  misc_feature (1)..(321): Xaa is any amino acid
MAEGIQNGKRNILVVDDKDFMRESISEVLRRKGYDVKTVSGGAEAMEAFMRELFDLVISDYKMPQMNGVELLQNIKAVNPDVPFLIFTGFGDIKTAVEAMEKGAFTFLEKDDTLLQKIELMVDRALQHRSLITENKALNSENETLKNELRDRWNYVGCAPKLMEIRKFTESVAGSRSTVLITGESGTGKELIARWIHYHSPRQIGPFVKINCAALPESLIESELFGHEKGAFTGAIRDKVGKFEAANGGTLLLDEISEMPMNAQAKLLRAIQEKEIQKVGGDDPLKVDVRILATSNRDLLAEMDKGEFPRRPLLPPEHLPR

SEQ ID NO: 85950 - protein, 61 aa, Unknown
  Obtained from environmental sample
  misc_feature (1)..(61): Xaa is any amino acid
LSFEELAEAFHTELEVLNDRPFQKLPGSRRSVFLETEQHELMKLPSQRYEYAHFKQAKAGI

SEQ ID NO: 85951 - protein, 272 aa, Unknown
  Obtained from environmental sample
  misc_feature (1)..(272): Xaa is any amino acid
VYRRILLSTPALELEANSVKKFKDTVIITGNVTGNAIDNVLILDKTSDGERRVIMAANAELKDSGKDGLSLDLGRAFIQSSKEIAREDYDYASAGNLRYWVPQEDLIQAMSSVSPREMSSIDVYREIGQRTIELNIRMNEKRNKVTSLAFAFENSLRAGPASHEWNRRTNQFTAFQREAQALQGMSKDRALSLYWLEFYKKFSIPFGAFSFIFLAVALGLMAKRSGQTVGFIFGLIISVIYWALLFGGQTMGIRLNTSPFWSMWMPNFSAIS

SEQ ID NO: 85952 - protein, 83 aa, Unknown
  Obtained from environmental sample
  misc_feature (1)..(83): Xaa is any amino acid
GLWRDFGHYREIERRKRLEAEERARREEALRQQALLQAEEEGMDATISVEERTRMELQESVQNMAREHPEDAAQLIRTWLLEE

SEQ ID NO: 85953 - protein, 192 aa, Unknown
  Obtained from environmental sample
  DOMAIN (108)...(192): SRP54-type protein, GTPase domain
  misc_feature (1)..(192): Xaa is any amino acid
MFDKLTEKISDAFRFVAGKSTISEKNIDDAVEAIKMALLEADVNLRVVRRFVNSTIEEAKGEKVLRSVDPGQQFTKIVHDKLVSFLGETSKGPDGRSAQELKLKGPDTVSVVLMLGLQGSGKTTSSAKLALRLKKEGRKPLLAACDLIRPAAVEQLTLLAAQVGVPVYKEEGASDPVKVFRGALTALGQSVI

SEQ ID NO: 85954 - protein, 563 aa, Unknown
  Obtained from environmental sample
  DOMAIN (431)...(528): Histidine kinase-, DNA gyrase B-, and HSP90-like ATPase
  misc_feature (1)..(563): Xaa is any amino acid
LDSARFSGAYSEVVESINTFTDVLLEAQKSALLTVSTMFESNPQINLLFNDKLKLIDCNPEASRFLHFKTKEEMLEGFHDRMSKIIPKVRSDGQPSMSLEEQLKVAADEGRANLETEIHFEDGIRRLVVNLRKIPYKGSFAIVAYVFNITEIFQREMQLSHAMELNELQLAKLNLVVQGTKIGLWDMEVVMEDPVNPNNVFVWSKEFRNMLGYTDEKDFPNILSSWSDLLHPEDKERTLNAFANHMLDTTGKTPYDVEYRLKRKTGEYAYYRASGESIRDRRGNAIRVAGALMDITETKNMLIEKDRQRAEAEAANRSKSTFLANMSHELRTPLNVIIGLTGLVIEDKRLDKHVTDNLIKVSNAGSTLLSIVNDILDFSKIESGKLELTPDEYYTASMINDTVTLTLARIGEKNIKFHLNIDDNLPHKLYGDDLRVKQIFTNLLTNAVKYTEEGSINLNVSCEHEGDTVWVHAAVSDTGKGIAEEAMGDLFLDYHRIDTNPIIMLRVLDWVCPSPKTLWKIWAEKLWWRAGSAKAQLSVSRISRHLSATKVWDRIVQTNSVPS

SEQ ID NO: 85955 - protein, 309 aa, Unknown
  Obtained from environmental sample
  misc_feature (1)..(309): Xaa is any amino acid
IDQIGRDRDNNTNNSTAPVLSFYEFSLEPVAKETAGLDKWSVSGKDIKVSDTRRTFAETVTYQGKSNVFHINPKYNASTYDHFVMEYDLSAFIGKKIGVEMSFDVWINKGARIAWQMLVSPDYPVVAGYIEPTYFLPANTWNTISGNTIVTVPQSGILYLSGMQINGAEAYFANASLTITEGTSAPDTAVTLNSVTADGSASAKTTQLTLTFSQAITGLNAANINLGSEISGLTKGTLSGSGPTYTLPVTGFTSGGTLSVSVTKLGYNITPSKTVTIYGGSGSGGGGGDGDGRTFNNFDGLKDWLNNKK

SEQ ID NO: 85956 - protein, 135 aa, Unknown
  Obtained from environmental sample
  misc_feature (1)..(135): Xaa is any amino acid
NADDSKQIIGVAKETFDAMVNILEGAYAEKHKRRGRHAKLPITDQLFMSLKYWRQYVTQKELAYEFEVGEATAHDVIVWVEDTLIKSGKFSLPGKKALLEDNEIEIVLVDVTESPVERPKKNSATGTRVKRNATS

SEQ ID NO: 85957 - protein, 74 aa, Unknown
  Obtained from environmental sample
  misc_feature (1)..(74): Xaa is any amino acid
KYWKRFKQKINTLDHYPYRGAYVPELLARNIKDYWQITESPWKIIYKVDDDTVNILTILDSRRNLQDILVKKLL

SEQ ID NO: 85958 - protein, 94 aa, Unknown
  Obtained from environmental sample
  misc_feature (1)..(94): Xaa is any amino acid
IFRGDDGRGHYGVGFKYFDCKGIKRIKIKTRGYNHGAFHVKTSWYGEPLACIDVHSSNVWMEYSAEINIPDGIHALYFVYKGAGFATLGSFTLE

SEQ ID NO: 85959 - protein, 295 aa, Unknown
  Obtained from environmental sample
  misc_feature (1)..(295): Xaa is any amino acid
MFGSVNDKTFEGLIKPKKGKSDGEIKIYYEGKDGTAYNKSETPPTNAGTYAVTFDVAAATGFSATKEPLSAGTLTIKSVTPTADDFNISGTGKFTYNGGTKAVIITPKEGKSDGRITIYYGGKKDAPPKEAGTYAVTFDVAATQGFNGAKELKAAEALTIVPAAIHYLIAGLLLVMAALIVFLSYYFSRKLFLREINNLRKNIDETIENIEQKYNEKYDSITNNIIDSPGSLSNTDDMRDKFGILEMSISGIKSEISILAELKNKVDILYSGKKMAESIISGSLGVTEAFNHGLP

SEQ ID NO: 85960 - protein, 280 aa, Unknown
  Obtained from environmental sample
  DOMAIN (129)...(218): Cyclic nucleotide-binding domain
  misc_feature (1)..(280): Xaa is any amino acid
MSSRTHIETVQAMTDSVLIPVNQNRYVGLIQRNTQVALTIILRFSKRLRSLNETLARLTLKNTADTGPSHLYDVAEYYLSQKQYKLATYAYGQYIKHCPDGEKAAAANEKYSKLSSRIRLEKFTANDVNRNYRKDTMLFAEGEPGDELFIIQKGSIKITKIVDNKEVLLAMLKPGDILGEMALLEGKPRAASALAYDDCDVMAVNKANFELMINSQPQIIAKITILLSDRLWLIYKQLVNAMIENPIGKMYDALLIQLEKNRITLEKKNFLSLHLWACLS

SEQ ID NO: 85961 - protein, 121 aa, Unknown
  Obtained from environmental sample
  DOMAIN (5)...(113): Response regulator receiver domain
  misc_feature (1)..(121): Xaa is any amino acid
MRNTTSILVTSNDNGDFLCILDSLGSQNGLNIIGIEKDETHTIIKSERLKPDVLILNLIQSVMDGAELAPIIHRRSPDTAIIMICDKDENEYAGKALRAGILGYMLRNAEYARAEFCPSSK

SEQ ID NO: 85962 - protein, 257 aa, Unknown
  Obtained from environmental sample
  DOMAIN (145)...(234): Domain of unknown function (DUF814)
  misc_feature (1)..(257): Xaa is any amino acid
GALRQSTGEDRERHLGPVGLRDQQGKLQAELWRLKGANGSVELLDGTTIELPPGMSIERTVQKWFGNAKKAERGLVRVDALERERMRQIMELERASGQDAPTINNVRKKTSPQVKQAGSTAQGKKKMDQQKDHKRNDVKGRAFRSQMVEGFEVLIGRGDTDNDTLTFKVASPPDFWLHVASVPGSHVVIRNPDKISEPPKAVLERAAELAAFYSKARDGGKVEVHWCRAADVHKPRGFEPGKVFLKNYKSLKVYPKQ

SEQ ID NO: 85963 - protein, 327 aa, Unknown
  Obtained from environmental sample
  misc_feature (1)..(327): Xaa is any amino acid
MLVSDLQKLVQEKDKQQSHKYINSLTDYYLKGGNYADVEWEMDAVSRMLPHIKARDINAVIKDYFASGDIQVFIFAPDSEQDSLPDEARIKQMIAESKKMKISAPKSKAVERGLLSSLPERGAVVSESIDAETGAILWELSNGSKVVLKSTKNKNDEIVMHAMALGGTSSAAPEDDVSASLAIEMAQVSGLGPWSRPELTIKLAGKQVSLSQYVYSYYRGFRGSSNLGDLKTFFEMIYLSFTAPRIDSEAVQAMIDQYKTSLALKREDPHAVFSDEINRTIYSGHPHFKPLAPEDLPKVNIDTRSAFIRKGKNPAEYTFIITGESGY

SEQ ID NO: 85964 - protein, 704 aa, Unknown
  Obtained from environmental sample
  DOMAIN (346)...(539): FtsK/SpoIIIE family
  misc_feature (1)..(704): Xaa is any amino acid
LNFTGKTGFSLIIIFITVIEILVLQVFKTKLFRQKADTGKSTNLLPPPKDESTAEPARNVKKDEEEKVLEQLFKEGIGDFGNEYVPVIQQPISADDLNDFDQDDYTPKGSDSEEDFGNIGDYDIGIENAGGKGGNENAEAPSFDLINDPENVPINIPSNNPVSDPIDDIYELNSEIEPPPEIEPLQESSLSESSLQESSLQESDSVERALEEAEAAAALHAEQVQKKNAANGSRKKKYKIPVDILNEYPDGEYWVIDQATRDAAMALKETLEEFKIQAEVTGIRKGPVITLFEILPAPGVKLSKIVGLQDNIALRLAASSVRIVAPIPGKHAVGIEVPNAKRNIVSFREIIEGQLHDDQKMEIPVVMGKDISGEAQTIDLVQMPHLLIAGATGSGKSVCVNSMILSILYQRTPAECRLMLIDPKIVELKLYNDIPHLLTPVITEPKKAFQALQYCIYEMERRYACLDSVGVRDIRSYNKRIKEKNIAQEHMPYIVVVIDEFADLMATTGKELESTVARLAAMSRAVGIHLVLATQRPSIDVITGLIKANIPSRIAFMVAGKMDSRIIIDAVGAEKLLGKGDMLYAGVVDPFPIRMQGAFVSEEEVEAVVEHVKSFGKPNYIDDEIFFEEEEEDSNLSLFSDGDDPLYEKALEIVYQQGRASASYIQRRLKIGFNRAARLVDEMEHHGVVGPAQGSKPRELLRGA

SEQ ID NO: 85965 - protein, 107 aa, Unknown
  Obtained from environmental sample
  misc_feature (1)..(107): Xaa is any amino acid
DDGRAPLLRTFRRISRTHKIQGIGAGFKPQVYDAAVIDEIYQTDETKAGTAARRLAKEEGIIVGISSGSVLEAALTVAKRPENNGKTIVAVLPDTGERYLSTWLWEE

SEQ ID NO: 85966 - protein, 131 aa, Unknown
  Obtained from environmental sample
  misc_feature (1)..(131): Xaa is any amino acid
MKKIILLMAAVILNISGCKENAGQSSVKLSREEIKSRAFTDLFNAIEAKDIPEDVFKLIGKDFAVLTAGKPSHYNSMVAGWGGWGILFSKPTTFLMLRSNRYTLELMRKEQSYTMAFFDEEYKNDLGIARH

SEQ ID NO: 85967 - protein, 81 aa, Unknown
  Obtained from environmental sample
  DOMAIN (5)...(67): PhoU family
  misc_feature (1)..(81): Xaa is any amino acid
FITTVGVAKEIETLDDEIDALFKRIHDNMASMVTQDPNSVEQAIDVVMIAKYLERIGDHAVNISEWVVFNITGEHKHRLLI

SEQ ID NO: 85968 - protein, 85 aa, Unknown
  Obtained from environmental sample
  misc_feature (1)..(85): Xaa is any amino acid
MILSELIQRSPIRIFEQSIHGGLKPGEIGVIASPNGVGKTSVLVQLALDKLLQGKKVIHVSFSQHTQYVPVWYEKYFFGIYQQEE

SEQ ID NO: 85969 - protein, 204 aa, Unknown
  Obtained from environmental sample
  misc_feature (1)..(204): Xaa is any amino acid
LKFFGHRGFKLCLFALLLAGLILAAPLYGADWAFPAAPRGHRGSVSAVFQKGDTIISAGEDGFLGLWNLYSAAAVDRFQVSQRRIIAMAGRPGKDEVCVVENDGVGLYWISAWNYRERRKIFSLQFKDVIGYISYSAGGNFIIAARSGRTALVMLDANSGDALQSPESLTGTVGLVVTGGSERNMMAYLSSGEISYWDIKSGNR

SEQ ID NO: 85970 - protein, 167 aa, Unknown
  Obtained from environmental sample
  DOMAIN (2)...(167): Formyl transferase
  misc_feature (1)..(167): Xaa is any amino acid
MTRIAVLVSGGGTNLQALIDARDRGELGGGELSLVISSKADVQALERAQKAGIKTKTIERKKYSCIEDFDAAFAAALSEEKTDLVVLAGFLSILGQKTLKLFENRIINVHPALIPSFCGKGFYGLRVHEEALKKGVKVTGATVHLVNEVVDGGKIILQKAVDVLSDD

SEQ ID NO: 85971 - protein, 75 aa, Unknown
  Obtained from environmental sample
  DOMAIN (6)...(73): Ribosomal protein S6
  misc_feature (1)..(75): Xaa is any amino acid
IDGRALIGRPCRNGVEIEKTDETGDRDLAYEIKKRKRGKYVLFTVKADPAKITNLDRAFKLNANLLKYLFVRIED

SEQ ID NO: 85972 - protein, 225 aa, Unknown
  Obtained from environmental sample
  misc_feature (1)..(225): Xaa is any amino acid
MGRDILDLYSDYLLYSSGQTTATGLSAVLEGNVSHDKITRTLSSEVFDEKTLWKKVKKVVRAYEREDACLIFDDTIIEKPYMDENDIICWHFDHKENKAVKGINLLSAFYHSEKDGQTVRLPTGYRVIAKTEEYIDEKSGEKKRRSPVTKNEMMQEMIKRHIQNEVKFTYILADSWYSSAENMRFINKKEKVFIFELKENRLVADSEKERNQGEVERLDALELRE

SEQ ID NO: 85973 - protein, 140 aa, Unknown
  Obtained from environmental sample
  misc_feature (1)..(140): Xaa is any amino acid
MTEHNIASFGGVGDGVYDNSNAFQAALNTIKEAGGGILRVGEGTWRTGPLEIYSHTTLVLDEGAVVSLIPEPARYPPVLTRWEGLECYAMNPCIFATGQEDIVIGGKGVIEGNGQYWWNKIREKNTGGQRQPQTSADSDP

SEQ ID NO: 85974 - protein, 170 aa, Unknown
  Obtained from environmental sample
  DOMAIN (23)...(69): Bacterial regulatory proteins, tetR family
  misc_feature (1)..(170): Xaa is any amino acid
MPSLQKNHWLDTDKGKGGKRLAIMKAALKLFAAKGAAETSVPEIAQAAKVAVGTLYCHFKSKEALANHLIKEACEAFCRHLWDGFPHDAAFRQQFGFFWRRYISFALSQPDAFAFIQGRAKDTELDGASKKALATLAETEIGYWTGGLQLGELDPMPIPALGAMVSRPCR

SEQ ID NO: 85975 - protein, 122 aa, Unknown
  Obtained from environmental sample
  misc_feature (1)..(122): Xaa is any amino acid
GICALWKKRQETVPQKIVFAGGAAKSFLWPQILADVLGIPVDVPVVKEATALGTAVMAGKGIGLYTDIKEAVNNLVKIEKTFLPDKENREVYDRAYQNWKAAYQPLLRLSDENITKYMWRSP

SEQ ID NO: 85976 - protein, 85 aa, Unknown
  Obtained from environmental sample
  misc_feature (1)..(85): Xaa is any amino acid
MAIDAGTGSIRAVIFDTQGNQKGCVQKEWKHFEDPRYPGSMDFDWNADWQLTCSCIRGVLTQTNIEAGRIAAVSQHVCARELSIR

SEQ ID NO: 85977 - protein, 95 aa, Unknown
  Obtained from environmental sample
  misc_feature (1)..(95): Xaa is any amino acid
MIEQTAKKELLSNAKLYAEYHHDRWDGTGYPHGLRGTEIPLHGRIMAIVDTYDALISKRPYKEANTDEEAAKIILAESGRQFDPKIVEVFLEVLG

SEQ ID NO: 85978 - protein, 324 aa, Unknown
  Obtained from environmental sample
  misc_feature (1)..(324): Xaa is any amino acid
LSREWFEEKEKSGYRNPTLVLVPHRKSRIHGVEHACSDDALWLVSSIAEYIRETGDAAFMEMVLPYADAEAKPDSVYEHCKKILNFSERMIGSHGICLGLKADWNDCLNLGGGESALVSYLFLWALDNFVRLAQFLGKTEDAAAYRAIHEKTAKVCRETLWDGKWYLRGFTGKGRPIGTDADAEGKVHLESNTWAVIAGPDDHQRKMQAMDSVEQYLGTVYGLMLNAPAYTVIDDDVGFVTRVYPGLKENGAIFSHPNPWAWVAECILGRGDRAMDLYNRLCPAAWNDKCEIRKAEPYSTCQFITGKGHPALARRIIPSADLIN

SEQ ID NO: 85979 - protein, 416 aa, Unknown
  Obtained from environmental sample
  misc_feature (1)..(416): Xaa is any amino acid
MRCLFWANAIRPYTLAAGFVLAMVFTFSCSSGGGGGNDPGGDDSSSSVGGVVGVSSSSSAGGGKNRSSSSSDDVGLSSSVENAIVSSSSGEATISSSSSDNVVSSSSAGNVIVSSSSSDNVALSSSAGNVISSSSDAIVSSSSVNNVVSSSSLGNVIVSSSSSDNVASSSSVVEIPKCGSVEYNPSTEQCCGSGKYTLATQFCYDNSKVVNLCGNRTEHYDPDLYECKPSINVNGIYLKNKPKDSAGKEYEAVLIGTQTWMAENLNYNASGSRCYGDNTGGDSQNRCDTYGRLYNWSTAMGGVCPAGWHLPSDAEWTALTNFVGSSTAGTKLRANSTLWSTNTGTDDFGFSALPGGYGNSGGRFYDVGNIGYWWSATEDFASYAYNRDISYNNAVVGRDYNDNSYLYSVRCVQDSP

SEQ ID NO: 85980 - protein, 106 aa, Unknown
  Obtained from environmental sample
  DOMAIN (40)...(105): ATP synthase subunit C
  misc_feature (1)..(106): Xaa is any amino acid
RSEYEASVFVLVMVLITAAFVCAQEAQEAQANETASASMWKYIAAAAAVGISCIAGGLAVGRIGSAAMGAMSENPELSGKAIPYVGLAEGICLWGFLVALLILVIN

SEQ ID NO: 85981 - protein, 307 aa, Unknown
  Obtained from environmental sample
  DOMAIN (148)...(262): Response regulator receiver domain
  misc_feature (1)..(307): Xaa is any amino acid
VHTDVSIPHTLIGDDQRLAQVITNLLGNAVKFTPEKGSVSLAVRLIQQANNICTLQFSVSDTGIGMTPEQQTKIFHSFEQAESSTTRKYGGTGLGLAISKSIVEMMGGKIWVESESGKGSTFIFTIQVMRGTEEKHGLLAPDINLKNVRVLTVDDDPDILTYFMDIAQRFGLSCDTASSGKKALELIGQKNGYHIYFIDWKMPGMDGIQLAREIKEHGSEKSIVIMISAAEWSAVAEEAKAAGVDKFLSKPLFPSTIAEVINECLGVDKRQAERSQAAEIAGIFAGKHILLAEERGNQPRDSPARPI

SEQ ID NO: 85982 - protein, 276 aa, Unknown
  Obtained from environmental sample
  misc_feature (1)..(276): Xaa is any amino acid
MEIRINGQIADIVLDSEKTVGDILAGFEQWLANSGYRLSGLVLDGETTDTGSMEAAFGRDVDSVQTLDIFTSSLAELATQGLAHICRDIEEYESLDFDGKQKYFEKWSESPQARFTGEQIPELFALCKKTFSDGDVSPQMLRAITEERLRELDDPSGELAALEPLVGEVCVRLEDLPLDIQTGKDGRAAQTVQIFSNIAEKVFRIFNALKAEDPAADEIKIEQIGLAGFLAEFSTVVKDMMAAFQQHDTVLVGDLAEYELAPRLRTLYGAIMKDAA

SEQ ID NO: 85983 - protein, 387 aa, Unknown
  Obtained from environmental sample
  DOMAIN (234)...(387): Pyruvate flavodoxin/ferredoxin oxidoreductase, thiamine diP-binding domain
  misc_feature (1)..(387): Xaa is any amino acid
MDATNGNDVSFTLRVLLVGEAGDGVLNAGSTLMQAAAALGFSSAVHNSIPPTIRGGQCSTLVTVSDDDSIAPVSVYADFVFALDKASLIVLGESGINSAGCSGNIGGAVDYDTIISAVNAGHDDDAGGARSFRLNFDRCRHINTHPQLKSSFVLGVISAILGIPDGLILGIITEKLKAKKLTEQNEETFRIGFDYAASDILPSLRANKHALRLATPREASKDCVILDGNRAVALGAISAGCRLYASYPITPATPIGACMATYLPSFGGVAYQTEDEISAIGAVAGAWFFDIPAMTATSGPGLSLMQEFLDYCSMTETPAVVVDVQRAGPSTGMPTKHSQDDLMAAVFGGHGEGQRIVLAASNLKECFHLTIEAFDMARRFRCPVILL

SEQ ID NO: 85984 - protein, 454 aa, Unknown
  Obtained from environmental sample
  DOMAIN (119)...(262): GAF domain
  misc_feature (1)..(454): Xaa is any amino acid
MTDWPSQGDCVRMRESDYNADQAAFMRVYGIKSILLIPIFTHGGLWGAVSFQDHTNDRYFDEDCFDLVYSASRIFSNAVIRAETEDSAIKAIEELRHREKMEAALNRAAILFLSQNEKTFEATMTAGVGAIANTLNLDRFSIWRNTPSPDALYVSQIYRWDRDSGGTTTPTESLINVTYAQFAPRWEKLLASGEIINSPAKLLPEAGLLKSFGCVTAFVTPLFINNVFWGFALLEDRREERFFEEDAVEMMRAAAFLCANTVMRADMEREIADAGEFNRALLDASPLGFTIFDENARAFDCNDFTLKALGTTRQYYIDHFLEFSPEYQSDGIKSAEKAFNVITRALKGEKQVLEWENITSNGKIIPYEITLTRAMYKGKYVALGFQYDLRNTKKMMENIRKQGEQLRIRLEQQELISRTFKGIYIVRRFADSGAGSCRQAGAVPSCGIGICIRH

SEQ ID NO: 85985 - protein, 334 aa, Unknown
  Obtained from environmental sample
  misc_feature (1)..(334): Xaa is any amino acid
VIARTDNAVSHHQNELSAVLKELKEKNNTAVHLHQNELSALLKNLKEENDSAVYQQQAELTNVLKEIKEKTYSSVNQQQAELTNVLKEIKEKNDSAVYLHQDELLTLLKDLKEKNNTAVYLHQDELSTLLKDLKEENDSAVNQQHAELTTALKDIKDKTYSAVNQQQTELTTALKDIKDKTYSAVNQQQTELSAVLKALKEKNDSAVYLHQNELSALLKDLKEENNYAVHLHQDELSTLLKDLKEGNDSAVNQQHAELTNALKDIKDKTYSAVNQQQVELTTVLKDIKEKTYSAVNQQQTELTTVLKDIQEKTDTAIHLHQNDYRPPSKNLRKN

SEQ ID NO: 85986 - protein, 116 aa, Unknown
  Obtained from environmental sample
  misc_feature (1)..(116): Xaa is any amino acid
MLKNLDSLFPADFTDDQKARAKTQFLKNLSLSAHRFYGGKMQTLPKCGIYGNAWFNVWYTPGVSAVSTAIRSDREASFALSNRGNLVAVVSDQLVFWATETAPPPGGLGRYEGKAM

SEQ ID NO: 85987 - protein, 697 aa, Unknown
  Obtained from environmental sample
  DOMAIN (47)...(694): AcrB/AcrD/AcrF family
  misc_feature (1)..(697): Xaa is any amino acid
NAGRACRVYALEPFCHSPGANYVFQMEIAKRGFKLKALVSWLKRKKSAFCILTGIISVSLFVINTSKERIKQTTGGSYVVKIMHYGVDSAEMERTVTIPLEDALSAISGVMSVQSSSENNQSRVFVRFKPGGRGRYEAVRDAAQRVYETLPPSAQRPEILSSNNSRVPVWSAAVFNKENTNEEENPLTAQMLEKIVKPRFESLEGAGEVLISGAGLKEIVISLDQEKLFTIGLHPSAVAEALAMNDSIFSGGTAILGNREIIVTVDGRYGKSLDKALVPLGNGKFIELADIAVIKEQEREPDILSRLNGRKTAGIAIMGRHDADLRKLSSDIKKELSALSLPLEFTVLTDAGAEETAAFSSVFNAALLGAIMVAAVSFLLGGKNSANLSGFFCALSIPLICVLSIAVLSMLGFPPGRLMLAGIAAGVGTAVDAVILCSEKLRKHLSYEGAAAALSELAGPLIAGAATTVAALLPLSRMQDVSVKTIAASIAVICAVALVFSLSLLPPLLLWKVKSGAVNFFVKMPFMFKQIQRRLSRLLCKFLAADVKLCFRYPVLIPAISLALTAAAVLALFAKGVDASSYGSEDSVYAQVEFEGGLLAQEADRLLAAYGEQLSGYAGIKNVETGARTGSGSLLVSFDPKQITSHNVKDLAKSVYIPGGFVFFHESSNRERYWEIRICGDEDKKCRELARKLAYLC

SEQ ID NO: 85988 - protein, 575 aa, Unknown
  Obtained from environmental sample
  DOMAIN (213)...(248): UvrB/uvrC motif
  misc_feature (1)..(575): Xaa is any amino acid
MNSQGEVRGTSRLDSLKAVAHDAPRLPGVYLWKDEEGRIIYIGKAKSLRDRLSSYFSGEKDPKTAVLVRRAASIETIIVASEYEALLLENTLIKQHSPRYNIDLKDGKTYPVIRITNEEFPRIFRTRRIIEDQSLYYGPFPNVQGVDAMLDLIDKLFPLRKCKTIRSALRKRRDPCMYYHIGRCMAPCCGKIAPEKYRRHVERVQRLLSGETEPLIIELTEKMHEAAKALQFEWAARIRNAIKAIEDLVGEDSAVVDFDPESRDYIAWAAEGVLATFTVFSMRGGKMTGRELYRTRSAAEEGESLELFITTYYDPTRPPPPKIYLQPGTNAAISGPAVSSTAAIINNDSLMNWFKTQWGHEPELIQSGEKHHTAILAMARQNALEDIRKRLKERGAGPALDELARALDLPGRPERIEGFDIAQLDGKHPVASLVSFKNGIPDKKNYRYFKLRSVIGIVDDFAAMREAVHRRYSRLIREGKDIPDLVLIDGGIGQVNAAKGVMDELGMDCAVVGLAKRDEELWLPHTQQPLILSRRSEALKILQFVRDETHRFATGLTSVCVQKIVFRRRSVMAPF

SEQ ID NO: 85989 - protein, 479 aa, Unknown
  Obtained from environmental sample
  DOMAIN (392)...(475): Hpt domain
  misc_feature (1)..(479): Xaa is any amino acid
MVLIPVEYDTPSLINDAVQLNVVRIGSKQIEFKIDIDENLPSKLYGDELRIKQILNNLLSNAIKYTGKGSVKLSIGYLTDNNGVMLRFVVEDTGQGMKLEDKDRLFSEYMRFNAQANRATEGTGLGLNITKKLVEMMDGTISVESEYGKGSVFTVTIRQKPVECTAIGASIVEQLSKFVFTGDRHTANLQIAAEPMPYGCVLVVDDVATNLYVADGLLSLYQLKIETADSGFAAIRRVENGYIYDIIFMDHMMPRMDGIETTLKIREMGYKGTIVALTANAIIGNDEMFMQNGFDGFISKPIDVRQLNEILSRFIRDKHPEEAKRCAAETPAREERPQNGAGLRQETDQHVEAGSKPALSVETSRRGGAGKSQQARSVSKSRKPVNIANDSKLLKFFCQDAEDAVVKLRETVKNGDAKLFTITVHAMKSALANIGEDEASKVAAALENVGRSGDMGYISENIDEFIDTLESLVERFSGE

SEQ ID NO: 85990 - protein, 537 aa, Unknown
  Obtained from environmental sample
  DOMAIN (246)...(460): Methyl-accepting chemotaxis protein (MCP) signaling domain
  misc_feature (1)..(537): Xaa is any amino acid
MAQSNGNIWRYIIDGSGEPDDPDNFSEIGTEEDTSDYDNAFRQVLISGKTENGNLVDQGEWGWLVSIYAPIKNSAGKIVGIVGCDFNGEHLHDTIVANNKQQVIIGGISLLLGLILILFLMNRIFSPLGKINSILKEISMGEGDLTGRIKTGKDDEIGELAGYFNLTMEKIRNLVGIIKYKINGLNHTSFELSANMGETSTAVQQITSNLDNMENLMVKQENGAMEAGREVGEIKTNIDSLRKMIGEQTESVNMSSSAIEEMTANIHSVTQTLAENRENVNFLTEASENGKTGLQLVSQEIQGIAKDSEGLLEINSLMNSIASQTNLLSMNAAIEAAHAGEAGMGFAVVADEIRKLAETSGKQSKTTASMLKKIKSSIDNITKSSNEVLERFGTIASGVNTVSEHEQNILHAMEEQEIGGKQILESIGRLRDITASVKKGSDDMEESGETLVKETDAFIKTSKETVEGMNEILSGINQINVSVTHVNEMSLENNRNFESLKQETEKFNDRTGSEKKKILMVDDDTIHLNSAILTMAH

SEQ ID NO: 85991 - protein, 347 aa, Unknown
  Obtained from environmental sample
  DOMAIN (3)...(173): tRNA synthetase class II core domain (G, H, P, S and T)
  misc_feature (1)..(347): Xaa is any amino acid
MRAFRKVEQIVREEMDAIGALEMKPPVVQPGEVWKESGRWEAMGEGMLRAKNRLDNDFVVSPTAEEAFTAIVRDELSSYRQLPLVLYQINTKYRDEIRPRYGVMRGREFVMKDAYSWHCDDESLDKTYQAMGRAYRKIFKRCGLSVIPVKADSGAMGGSGSEEFMVESEIGDNTLILCKKCDYAANVEKAGCKPDFTAASSIEEAKVAAANTPPYEKIDTPNVKTIEELGAFLKNNDGSPMSPKQFITTLIYRAVNVELDLSSAPGCKNLENKNFALDGAKGRVEIYPQAFFVVGIRSHLNMNEARLAVLIKACEVVPRARQRRFSSYKAACGLRRSCGSCFSARQS

SEQ ID NO: 85992 - protein, 133 aa, Unknown
  Obtained from environmental sample
  DOMAIN (37)...(132): Citrate lyase, gamma subunit
  misc_feature (1)..(133): Xaa is any amino acid
RYGQVSILLVRFSAPHQQSTEQKEGCGKGVKEKEVSMEVLKASVAGTMESSDIMITLEPGSGSIEIELQSVVDKQFGAQIRSVIADTLAELEVKSAKVSAVDKGALDCTIQARVKTAVYRASGKDCSEWKVSK

SEQ ID NO: 85993 - protein, 200 aa, Unknown
  Obtained from environmental sample
  DOMAIN (6)...(199): HpcH/HpaI aldolase/citrate lyase family
  misc_feature (1)..(200): Xaa is any amino acid
MKQLRRTMLYVPGNNPAMIQDAGIYNADCIMFDLEDSVSINEKDSARFLVFQALNTISYPGKELVVRINDPRTELGLDDLHAIVSIGKAVIRLPKTESADDVRYCEGIIEAIERRTDLKMGSTRMMVAVENAAGVLNAQEIAFASKRLIGIALGAEDYVTDLKTSRSPDGVELYFGRSMVLLAARGRRHKRHRYCVLHGH

SEQ ID NO: 85994 - protein, 658 aa, Unknown
  Obtained from environmental sample
  DOMAIN (497)...(580): Hpt domain
  misc_feature (1)..(658): Xaa is any amino acid
FWGGYGETHGHKFFKPRVSYAANDTICTLVITMILSYAQNTLRYNTWRQHIALKQLVAQDQKRIETISNLAQKAEAASKSKSDFLARMSHEIRTPMNAVIGISELAMREKDVPQSTYNLLVTIRQAGLNLLSIINDILDFSKIESGMMKIVPANYHFPSLIKDVVNIIGIKAANSMLDFQVSVDRQIPDTLFGDEVRIRQIFLNVLSNAVKYTTEGFVALTVTGRQTDENTVVITIEVADSGRGIAQEDMGMLFDDFVQLDVAENKGIEGTGLGLAITHRLVKAMNGDITVQSEYGKGSVFTVTLPQGISVRESFVTEAAAKAFIAPTARVLIVDDVRTNIQVAQGLLSFYEMTVDTCLSGPEAIEAVKQRSYDLIFMDHMMPEMDGVEATRHIRELPAGGNLPIIALTANAVSGMREMFLQNGFDDFLSKPIDTAKLNTILERWLPKEKQVEAALEDDGVDAAPDSTRVHATFCIRGVDTDVGVSRAGGSQENYLHTLSIFRDDAAAKAGEMKGALKNGDIPALTLYAHALKSASANIGASDISERAHALEAAGKSGDMAFINANAVSFLADLETLIEDIKLIIAVNKIAAAQTPSDLGMLKNTLTALKTALADVDIEEIDKNALELQNFSHTAGAESAVEAILRMVLIGNFDEAEV

SEQ ID NO: 85995 - protein, 541 aa, Unknown
  Obtained from environmental sample
  DOMAIN (369)...(534): Glycosyl hydrolase family 3 C terminal domain
  misc_feature (1)..(541): Xaa is any amino acid
VMALMDLNKKIYQMTQAKVGNSFGSGGNFYGSVLHGGDGYSNSVLSSMNSAINSASPKIPVTYGKDMMHGAAAIDGATVFPHNIGLGATRDSALVRRACEVTAKESWAGNVDLIFGPAISVPQDDKWGRTYEGFGSTPELAVEMGAACIRGYQGAKYDAPWRVIATAKHYLADGGVSKDRGNVTASDADIRKIHFPGYEAAVEQGVLSVMASFNQINNVHQHVDSLRLTGWLKTELGFDGYIISDWQGIANSTKPGHTECDYGSACTGPSLTSDAVRKAINAGIDLAMEPGDGNNQTTNFVSYLTTLASNGQVSDDRINDAVRRILRAKFRAGRMDNPAGISNTVKNTYGDIGSTAHRAIAREAVRKSLVLLKNDNSALPISKTAKVFVTGSHATNTGYQCGGWTGNGCETSGYNQTCYGWTNTRDNVQGATSIKDGFNKVVSNSVANSAGEASVIVYVTGEKPYAEWHGDLQSLTFQDNLSNPNLASLKNQNSGKKIITVFISGRVMETSSLISNSDAFVAAWLPGRKARASRPICHDFP

SEQ ID NO: 85996 - protein, 81 aa, Unknown
  Obtained from environmental sample
  misc_feature (1)..(81): Xaa is any amino acid
VESQTEDIVNTSRSAKKRGINLLSFSLLSGLLLSSVGIALTVLLIIIEGASYGLLGGIIPLSVGIGLLTHYAIKRGEKRNG

SEQ ID NO: 85997 - protein, 59 aa, Unknown
  Obtained from environmental sample
  misc_feature (1)..(59): Xaa is any amino acid
GDGVTNLITPTSGVLIGVLEIAKIPYTKWVKWAWKLIAILVVVGFLALIPTVMIGIKGF

SEQ ID NO: 85998 - protein, 332 aa, Unknown
  Obtained from environmental sample
  DOMAIN (112)...(326): Domain of unknown function (DUF323)
  misc_feature (1)..(332): Xaa is any amino acid
RLDQIRPSGTTAADGDNGRNSPFAEAFLKYMDSDEILPVMAGLVTRETMRLTGGKQRPYQNGSIVSELYYSLSSGAPARDLPAGSNSASLSAAPSGVPSGAPAGNPPSVAVPSPVMAAIPAGNFFMGSPVIELDRDPLGETRRRVNMSAFYIASKELSVGEFRRFVEDTGHITTAEADGGAQAYDEAKNEWVFRAGANWRNPGFRQGDDHPVVCVSWFDAVKYCNWLSAKEGLKQAYIITGRTVNWDRNANGYRLPTDAEWEYACRAGTSTPLSTGESISTSQANYNGSLPHNYGNIGLFRKATVSAGSFSPNACGVIRHARQCLGMVLGIL

SEQ ID NO: 85999 - protein, 546 aa, Unknown
  Obtained from environmental sample
  DOMAIN (157)...(233): Helicase conserved C-terminal domain
  misc_feature (1)..(546): Xaa is any amino acid
MLHTGILPNHPKWINFFSHLSYVVIDEAHAYRGVMGSHVANVIRRLRRIAAFYGANPKFILCSATIGNPGELAQALIGRSIELVDRNGAPRGEKRIILYNPPLVDKVQGIRRSVVTESRRWMVALLKAGIKTILFAHSRVKTEVAASYVNEDLANIFTDNSRIRVEAYRGGFLPNERREIEKGLREGTIQGVVSTNALELGIDIGGLDASVVAGFPGSFNSFWQQSGRAGRRGGTSVSVFIANVSPIDQFIMNDPDWFFRKSAEEARIDPDNPYILTDHVKCACFELPFSDEELLSGVNGYGANARDALEYLEEAGIVRHTGAGVSSEGNGLREGRWHWADRSYPAEGVSLRSAAPDNVVIIDVTGGKNLVIGEMDRPSAKELIFENAVYIHRGRQYMVEVLDIENRKCLVREAEVNYFTDGLVKTDIKVLTEDEEFFFGNNSSGHKARGVMTDVLVRSQVTKFKKLRFRTHENIGYGDITLPEEEMQTRSLVLLFDPQTAGGRLLAEKDEKFIGEALSGAGTLIRTIAPVFCSATRAILGQSVSG

SEQ ID NO: 86000 - protein, 150 aa, Unknown
  Obtained from environmental sample
  DOMAIN (41)...(150): Protein of unknown function (DUF820)
  misc_feature (1)..(150): Xaa is any amino acid
MRLLNTERYTFADYMKWDDGIRYELIDGLPYAMSPAPTWFHQDISIKIAKQIAVFLEGKPCKVFTAPFDVRLNAADEDDTVLQPDILVICDRSKLDKKGHGCKGAPDMVVEILSPSTAKMDRLIKYKKYQQYGVREYWVVDPASRTVEVH

SEQ ID NO: 86001 - protein, 88 aa, Unknown
  Obtained from environmental sample
  misc_feature (1)..(88): Xaa is any amino acid
MSSSFASFEKLESFMKDVFIKVGVPEEDAAICAEILIESDKRGIDSHGVGRFKPIYIDRIKDGIQNPVTNFEIVKIILLQRSWTAMTA

SEQ ID NO: 86002 - protein, 190 aa, Unknown
  Obtained from environmental sample
  DOMAIN (5)...(189): Electron transfer flavoprotein domain
  misc_feature (1)..(190): Xaa is any amino acid
MSDNSVMVYIQQHEGKAAEVSLELVSKARELADKLKVEVSAALFGEKVSAEVSRLASLGADRVYIAEDARLKYYTPIPYSKLMNQVVEEYKPQIVLFGATTEGRDLAPRVASHLKVGLTADCTDLQIGDHTQKETEYKDILYQIRPAFGGNIIATIVCPKKKHKWPPSGEGFFLNAPPPPNPEKRKPEKI

SEQ ID NO: 86003 - protein, 77 aa, Unknown
  Obtained from environmental sample
  misc_feature (1)..(77): Xaa is any amino acid
MTDWPRAARLASDCHVHPVTASTIERADELINRYDFQLFDGIIVASALEAGCGILYSEDMQDGLIVEKTLSIVNPFK

SEQ ID NO: 86004 - protein, 344 aa, Unknown
  Obtained from environmental sample
  DOMAIN (20)...(189): Radical SAM superfamily
  misc_feature (1)..(344): Xaa is any amino acid
MNDIELGPIRPPSESQSLLIRVTRGCHWNKCFFCGLYKGMRYSVRPTDDILEDIRKSAELYNGMAFTSCFLQDGDALNIPTEDLLLILKKIKSCFPSLQTITTYARCDTILKKSQSELIALRELGLNHFYRGIETGSDTILKNIYKGITSKDIIDSGLMCKKAGIILSDFTLLGIGGRELSEENAIETARVINAVNPDYIRVHHTAFKPNTKLGRDVENGTFILQSEEEIVREQRLFIENLNGITGTYINEHIVNLLLEVRGEFPSSKETMLKNIDNYLGMSEDDKLNFAIGRRIGVYYLLSDMQNKAKKEAVSQYINNLKAKHSDVDFNKVCNSVEHLGQSVH

SEQ ID NO: 86005 - protein, 255 aa, Unknown
  Obtained from environmental sample
  DOMAIN (13)...(245): NQR2, RnfD, RnfE family
  misc_feature (1)..(255): Xaa is any amino acid
MPEQKIAYRNKPQINLSYPSTGRMWLVSVCAFLCALQSALTDDGNSLIIAGTTVFSAVLIELLLTVRQFGVSKIKDGSAVATALILSLILPNQIHPVYAAFGAAFAIVIVKYSFGGLGSNWLNPALGGWLFIRFSWPSVFVKAIDNNVSEMIVSGLSSIDNSVTTFFNDTVLSVTGVQLPSGYINLLFCNNPGLIVDRGLFTLLLGTIIITALGITGGGCRWYFFRSMDFLFVLRETRREYSGTVIYIRSFFRRH

SEQ ID NO: 86006 - protein, 178 aa, Unknown
  Obtained from environmental sample
  misc_feature (1)..(178): Xaa is any amino acid
GVTQNLAKDRALPRRLRLCLHFTREILDKLSANGIESVFVTLHVGMGTFYPVRSENIEDHPMHSEHFSIDENTAQKINKAKEAGRKIIAVGTTSARTLESAWSEGKIIPGEGSTAIFIYPGYKFKVLDALFTNFHTPESTLLMLVSAFAGRELILESYAQAVKEGYRFFSYGDAMLII

SEQ ID NO: 86007 - protein, 118 aa, Unknown
  Obtained from environmental sample
  misc_feature (1)..(118): Xaa is any amino acid
MAVEVKIMALVSGGGTNLQALLDAQKNGAFASGDSGGKIVLVVSDNSKAYALERAKAAGVSVAVEEPDKRITRDERRQELSDRILRLADTYHIDLIVLAGFLSILKEGYCSSCRILIP

SEQ ID NO: 86008 - protein, 145 aa, Unknown
  Obtained from environmental sample
  misc_feature (1)..(145): Xaa is any amino acid
METLQTMIFSWMPQLVKGARVTISLTVLAVCAGLVLSLFLALGKMSKNVILNKFSSGYIFFFRGTPLLMQLFFVYYALPMIAPALTINNRFLAAFIAFTMNSAAYCAEIIRAAIQSIDKGQFEASRALGLSYGQTMRLVIIPQFI

SEQ ID NO: 86009 - protein, 112 aa, Unknown
  Obtained from environmental sample
  misc_feature (1)..(112): Xaa is any amino acid
VRTVAEQEDNVRNAMEEQAQGSKQVLEGVSNVKEITRQVKSSSEEMLEGSQEVMKESRNLERVTQEITGGMNEMASGADQINVAVNSVNEISLRNRQGIESLTREVSKFKVN

SEQ ID NO: 86010 - protein, 180 aa, Unknown
  Obtained from environmental sample
  misc_feature (1)..(180): Xaa is any amino acid
MILPSWEKGNLTACSQARAEHRFIVSPRHSGHKAYPPKGREAGLVDDARWEHSLEKTKKLDEIKELLARRKTDEVADNALEGKSLASKTLADYPAELVERALLDKKYAGYIEKEIRFAAKAAKMDAIKLNPNTDYSAISGLSSEAKEKLQSVKPLNVGQAARIPGVRQGDIAMLIILARK

SEQ ID NO: 86011 - protein, 393 aa, Unknown
  Obtained from environmental sample
  DOMAIN (20)...(176): Flagellar hook capping protein
  misc_feature (1)..(393): Xaa is any amino acid
SQSVSSLLAQTAPYSVTSSIGGDEKNGYGVGAAQYTGSTSGPLWEEPNKMGKDQFLHLLTIQLKYQDPLSPMDNTAFVSQLAQFRALETGENTESAIRELGRAFDENLAAQIVSSQSIANSSAMSLIGHEARMRQTSVSYDGKADTKVPIRVHLGNSDKATVEIRDSEDNVVRTIAASGKDAQNSVTVYWDGKTDDGEKAKSGKYSLNVKGSDKDASLYTYVQEVVEGVRFTGEGAMIKIGGKEISVGEVLDVSMNAGGEGGYMSPSNVLALMGKAVRARCDTIRHTTNSVADGNVEYPININASRGSAVEVQIKNGRGDVVRTLKGIANDFGDLQLTWDGYTKDEEMAPVGVYTINVVGSDKNTSLYAYTEGVVDGLTSLTGDVKLKINGAK

SEQ ID NO: 86012 - protein, 190 aa, Unknown
  Obtained from environmental sample
  DOMAIN (1)...(185): Dihydrouridine synthase (Dus)
  misc_feature (1)..(190): Xaa is any amino acid
MRSGWDSASINYAECARVAVESGAAMVSLHPRTRGQQYGGKSDWSRIADLVSRLSVPVTGSGDLYAPEDAKRMLEETGCAAVMFARGAMGNPFIFPEARSFLETGAWEPAPFSARMAAAFRHLEMLAADIGERTACLEMRKQFCAYTKGMKGGAPIREQAVHAQTIEDYRKILEEIPHAEARRTQRVGGG

SEQ ID NO: 86013 - protein, 166 aa, Unknown
  Obtained from environmental sample
  DOMAIN (8)...(71): ATP synthase alpha/beta family, beta-barrel domain
  misc_feature (1)..(166): Xaa is any amino acid
MKKIYSKIESITGNVITVRAEGVRYGDLARIDTSFGASLAEVNRLAGDMVSLQVFAGGRGISTGDTIEFLGHPMQVSFSENLLGRVFTGSGSPRDNGPSLEENLIPIGGPSVNPAQRIIPRKMIRTGIPMIDLFNTLVVSPEAPDFLDFRRALQRASCPYRHAGRG

SEQ ID NO: 86014 - protein, 135 aa, Unknown
  Obtained from environmental sample
  misc_feature (1)..(135): Xaa is any amino acid
KLRFGRDLSEKKRLSRAGRAAVEIGIARQRKPLSKTIFTIIYKEKGTGFPCIKRCVIEGWIMNKDYFLVPDGAQVLHIDTRQKFIFSVKYVPKPRLKVLSEDFKAHNYNVRGVKAGGIRLSTKEAANVECREKVK

SEQ ID NO: 86015 - protein, 85 aa, Unknown
  Obtained from environmental sample
  misc_feature (1)..(85): Xaa is any amino acid
LGTDILISEDTWNMVKNHIIVEEMPPVTVKGKEKPVRLFAVVNLVSVTHGPKTLADVRKLLGIKPPDISKADVNAEEHKYKIGGK

SEQ ID NO: 86016 - protein, 98 aa, Unknown
  Obtained from environmental sample
  misc_feature (1)..(98): Xaa is any amino acid
MPIIAEEVTATDIDSAELAQRVAILKRFKILLSQQRERFKSYLDLLDKQQNVIESGSAEDLLTYVEIEEKIVADIFSIQKVIDPLKKCTIRSLRLVPI

SEQ ID NO: 86017 - protein, 92 aa, Unknown
  Obtained from environmental sample
  misc_feature (1)..(92): Xaa is any amino acid
MAKNGLERVLTSSSGIEGAFGAWSNLFSTMPNPDPVLRRTGKSIEILDEIRRENHVAACAESREAAVLKKKWGIDRLGGLPPPPAEIAGGGL

SEQ ID NO: 86018 - protein, 258 aa, Unknown
  Obtained from environmental sample
  DOMAIN (64)...(228): Conserved hypothetical protein 95
  misc_feature (1)..(258): Xaa is any amino acid
SLAALFAAFTKNPPAHVREWEGLPLREGVLQGTFPEGGIVIFEGDLPFIADLPQGQKTGFFLDQRDNHLLTGKYAAMLQKEAGTNLRILDACSYTGGFGLHALGAGGRLTMLDTSQAALETARRNAALHGAEDRVTTVEANVFDELRNLARRKEQFDMVILDPPAFAKSRSSLEEALRGYKEINLRAIKLIRPGGVFITCSCSQAADEILFKRMITEAAADAQRHLVQLDFRFQAQDHPVLVGYNESLYLKCGFYRVI

SEQ ID NO: 86019 - protein, 73 aa, Unknown
  Obtained from environmental sample
  misc_feature (1)..(73): Xaa is any amino acid
MKILVTGAAGFIGFYLVEKLVFLGHSVTGIDNINDYYDVNLKYARLSRCGIHKDAIQYGKKGGKLRTARLCFY

SEQ ID NO: 86020 - protein, 224 aa, Unknown
  Obtained from environmental sample
  DOMAIN (1)...(220): Succinylglutamate desuccinylase / Aspartoacylase family
  misc_feature (1)..(224): Xaa is any amino acid
MFDLDMNRIFPGSPSGVLAEAVAYDVIRDIEGADMCIDIHSSNIFLREIPQVRVSEQTAAELLPYAVMLNVDLVWIHASATVLESTLAHTLNTHGVKTLVVEMGVGMRITESYCIQLVDGILNLLHELGMWDEPVVQVRKPLVSKDRSIGFLNSDAHGIFIPRAAHGSHINAGDCIGKVIDPLVGVVVEETLAPSTGLLFTLREYPVVFGGSLLARIIGDSDNG

SEQ ID NO: 86021 - protein, 314 aa, Unknown
  Obtained from environmental sample
  DOMAIN (27)...(311): Succinylglutamate desuccinylase / Aspartoacylase family
  misc_feature (1)..(314): Xaa is any amino acid
MDKNVIYSIKSLYRESMNIIGYTFGSGEHSCCVVGALRGNEIQQMAICAQLIDTLKRLEENGCIANGKSIMIIPCANHYSMNIGKRFWPLDNTDINRMFPGYDQGETTQRIADGLFKSIKDYVYGVQMASFYREGEFLPHVKVMDTDCKNRENYDSLTDFGLPYGLIRIPQPYDTATLNYNWQIWGCHAYSLFSNYTEHIGRQSTQTAVNAVLRFLIAKGIIKWALHRGMHTRVLNEELIINVQAHKAGILKKHVYVGEEVSEGDLLCEIIHPLEGNTIGRIKSPTDGTVFFAYNKQLVTEYSDVFNIVPFSYA

SEQ ID NO: 86022 - protein, 88 aa, Unknown
  Obtained from environmental sample
  misc_feature (1)..(88): Xaa is any amino acid
MKVLGIETSCDECSAAVVEDGEKILSNVIATQIPFHAPWNGVVPEIASRKHTEWIYAVTKEALDKVGINSNRYRSGFRNKPSRSLGSL

SEQ ID NO: 86023 - protein, 155 aa, Unknown
  Obtained from environmental sample
  misc_feature (1)..(155): Xaa is any amino acid
MGFLKKQGRNICFAVILIALALMPVFSEGSIIIFLGKCISFAIVAMGLDLIWGYTGILSLGHGLYFALGGYAMAMYLKMQATGGKLTEFMRTGGLVNLPFVWKPFLSAPLSFILVLAVPALLSYIIGYFIFKNRGKGVYFSIFHRRLQGRRIPCL

SEQ ID NO: 86024 - protein, 514 aa, Unknown
  Obtained from environmental sample
  DOMAIN (379)...(507): Anticodon-binding domain
  misc_feature (1)..(514): Xaa is any amino acid
LGDDRRGSALRTERKTLRLPLTDRDIPLIFDAYVERGFGTGALKVTPAHDPNDWELAKRHNLAVINILNPDGTLNNEVPEKYRGFSVTKARAVVIEDLQAGGWFVKDEPINHSVGHCYRCHTVIEPFLSEQWFVRMKPLAEKALASWQKGEIIFYPKKWENTYKHWMENIRDWCVSRQLWWGHRIPAWTCADCGKMTVSRNDIDTCPHCKSKKIEQDPDVLDTWFSSWLWPFSTLGWENADCDTNDFKKYYPTTALITAYDIIFFWVSRMIMAGLEFTGKAPFRDIYIHGLVRDKHGRKMSKSLGNGLDPLELVDEFGADALKFTLAFMCAQGQDILVDKESFKMGSKFANKIWNASRYILMNLEGLNLVPNPDLLPVDKWIYSRLNTAARKMEEAFLSYRYNDAAQTAYEFFWNDFCDWYVEATKLSMKAEEDNTAEKDRAVTVLLDVLSESLRLLHPLLPFVTEEIYGKLPNTDGLLITAMYPSSAKGAAIRRKKKILPFCRNCTHDPHARS

SEQ ID NO: 86025 - protein, 161 aa, Unknown
  Obtained from environmental sample
  DOMAIN (27)...(143): IS1 transposase
  misc_feature (1)..(161): Xaa is any amino acid
PRIRSAREPAGAGGQRGGQGDRVRRDVALRGVKKNKLWVIKALDRGTRRTLAWVLGNRDAATFRRLYKKVRRLKRCTFYTDAWRVFAEVLPKKRHVVGKAHTVAIERDNSNTRHHLARFTRRTKVVSRSSRVVDLTLRIWHAVTTTDLFCRLQEIALSIYK

SEQ ID NO: 86026 - protein, 99 aa, Unknown
  Obtained from environmental sample
  misc_feature (1)..(99): Xaa is any amino acid
WQAAQTPRNIFQRRGRVLRKAKGKTIADIYDFIVMPRDITAKSSRILDIDAELALVKRELDRMEEFMALCENKQDSYEVLDKVNNYYKLNYIGGMDYGI

SEQ ID NO: 86027 - protein, 290 aa, Unknown
  Obtained from environmental sample
  misc_feature (1)..(290): Xaa is any amino acid
MMVNALNRNLQAAIIIDAHERLQLMLDAMPLCCSLWDKDLNIIQCNEAAIKFFHMKNKQEYLEKFFELSPKYQPDGELSSVKAAQFLKKAFEYGSCIFTWMHQMQDGTPVPSEITLVRVSYGDEYIVAGYTRDLREYEQMMKGLEQRDLMLQTVNHVAYILLQSEAEEFKNNLLHCMGMMAGAVNVDRVYIWKNHTKDGRLYCTQLYEWSEGAEPQQGSELTENISYDEGFSYWKETLQAGRCINGPIINLSREEQENLSSQGIVSLLVVPVFLRDEFWGFVGFDDCHRE

SEQ ID NO: 86028 - protein, 121 aa, Unknown
  Obtained from environmental sample
  DOMAIN (2)...(105): D-ala D-ala ligase N-terminus
  misc_feature (1)..(121): Xaa is any amino acid
MLKVALICGGPSKECNISLNSVRSVYDHMRKMTDVMAKIVFINEDSKKYLINEEFLYSNTTSDFKFMLHSQGNCIDDKDFLKFLKSNDLAFPVMHGKYGEDGELQKFSEEKRYTPNRFPPR

SEQ ID NO: 86029 - protein, 375 aa, Unknown
  Obtained from environmental sample
  DOMAIN (157)...(233): Helicase conserved C-terminal domain
  misc_feature (1)..(375): Xaa is any amino acid
FDIDRSAESQPGGSAYEQVIKRFEKIKIVHIVIDEAHCVSEWGESFRPSYLEINKIIKYISDANGGEAPMITAFTATASAPVLEKIKKYIFGEIEAHQIVGNPDRPNISYSAKGCIVRNLAVRDLLVQNARPAIVFCSSRPGTENLARYLRISLGEMGMDWHNEIRFYHAGLSREEKSSVEKWFMGNSRAVLCATCAYGMGVDKADIRTVIHRDCAPSVEAYLQESGRAGRDGSQSKAILLWGPEDKTSLQRAKTDADRTRLSGLLDYARDITQCRRHALLRMLNYDSDGESPETQCCDVCEHEASATLREESGVMDFFRRNKRCYSINEACGKLAQSESHYWSEGEAKQTINHLLAVGRLKESKNPLFKHRIIC

SEQ ID NO: 86030 - protein, 488 aa, Unknown
  Obtained from environmental sample
  misc_feature (1)..(488): Xaa is any amino acid
EGYSKFINVNLRPYITGFLRNKTLFSHDTRSRQGRYMFYRGETAVLKGFNLGSGSISINGTSITTASVGAIGDYGITTANNNHYRQFQVGTGATTGNGLVTYTVSSQNAVNTGSGRAITNGPPIRPTYIQPWNIEYSPGIVGSTLWEDFTQVHIWQSNDTNSGADRGYFPKTGANAQVFDPSMSIDPATGTLWSSHNEGGSGNGSNSGSTKVGNNNGNGAQTVASFIDPIINSDIFISTRQSGYSNNLAYTVWTTYSIIGKPGGGTAWNNFGGIWLSGPNGGNPTLTQGVPAATANNGFSNNGDVAATSQYMAESTYYNSQQNVPASGPTLNQFANPHIVSYWDGNNEHIHVSYYDTKDGSVKYRYNRRGDPGTVNSASAPRNWTNLDGGSDGDDQNIVSTTSRNTIDAGEYNSIALTSQGYPVVAYYDKTNQNIKLAISNSTTPSAGGAWAIRDNVYKDTTMRTAFKGTGLYVSMKIDTKNLGRSVL

SEQ ID NO: 86031 - protein, 224 aa, Unknown
  Obtained from environmental sample
  misc_feature (1)..(224): Xaa is any amino acid
MEIDQEIEQIAAELLSDFQKKRDFAKQPVKAVIIEIIGKLHHLLFPGIFESVLSGGSAKNKLNLMLEEVSNDLAAQTRLALRYDLRYKDTEQDEIDKKAWEITRQFILKIPSIKDFLEKDIEAAYSGDPAAYSKAEIVISYPGIYATMVYRIAHELYLLSVPLIPRIMSEYAHSATGIDIHPGAAIGKYFFIDHGTGIVIGETAVIGNNVKLYQGLGRSDHGQP

SEQ ID NO: 86032 - protein, 503 aa, Unknown
  Obtained from environmental sample
  DOMAIN (1)...(223): Phosphofructokinase
  misc_feature (1)..(503): Xaa is any amino acid
MNLTTRFVQLKPETVMNIQRLGGTVLGSSRGNGERTVEIVDRIEMEGINQLYTIGGDGTQRGTLRIAEEVERRGLNVAVVGVPKTIDNDLSFIEKSFGFETAVSEAVQAVADAHIEAENAVNGIGLVKLMGREAGFITASTAISSGDVNFVLVPEVRFDLEGENGFLAHLEKRLAKRGHALIIVAEGRRPRAPLVRRRVRRLRQQKIRRHRHVPQGLHHKILQGEENRDQLEVHRPQLHNPRAGIQSDRFHLLRSLGHQRRPRRDVGQDEDAREQRQRHLRAHPDGTRGGKAQLHRSGERSVEGRYRGDGNAAFDDKQVIRTMRQTLLYAAYALSVFCLSALPASAQDKGPSSAKEPAAPDSIYKHNYAAVEQINAYINDSLAASIRESMIIAQITQSDSISGKTLKAQLAKQHVADSVKLALRKRAIDSVKQRAMPVAAMLGGDTIMTIYAPTPTLSPQERAALYCNRVQRAVKEFSPKFDTLKIVDNGLSLDVTLVPLVPI

SEQ ID NO: 86033 - protein, 154 aa, Unknown
  Obtained from environmental sample
  misc_feature (1)..(154): Xaa is any amino acid
MMAEVLIRWNSRTVEVFCEGERIACHMRGEEGRKRYTTDPAHMPESHRAVSDWSPGRFISWAAKYGEQTKKFIALLLERKEHPEQAYRTCAGILRLAASVKPLQMEAACIEAMARKLYSYSCFAGLIENLKLQEPLRHENLRGSAYYKEDDHVR

SEQ ID NO: 86034 - protein, 134 aa, Unknown
  Obtained from environmental sample
  misc_feature (1)..(134): Xaa is any amino acid
MGLSMQVKKALAREISKRYQKAGKKEKSQILNELVKTTGYNRKYVLHILANWGKTAVASIDGKSVKVAASPGKRRKGGGRKPTYSGDVVIVLRKIWAFFSYRCGKILAPFMREQMGFLEQPFRITEKDKGLLLS

SEQ ID NO: 86035 - protein, 198 aa, Unknown
  Obtained from environmental sample
  misc_feature (1)..(198): Xaa is any amino acid
GQIRPRLKHHKVYKLPAVVAINVFPNDTKAELELVERKCSELGVNVAISEVWAKGGEGGVKLAEEVVRLCEQPNNFEFSYDVNLSIKEKIEAVAKKIYCADSIVILPNAQKSIKQIEKLGLDKVPICIAKTQYSFSDDASLLGAPRGWRLTVRDVKISSGAGFIVAFTGEIMTMPGLPPVPSAENIDIDSSGKISGLF

SEQ ID NO: 86036 - protein, 94 aa, Unknown
  Obtained from environmental sample
  misc_feature (1)..(94): Xaa is any amino acid
MDQILILDFGSQTTQLIGRRIRDLGVYTEIIPGDTPLKSALTKDVKGIILSGSPESVYDTGAAPDKKLYDCGLPMLGICYGLQRMTHARPILNM

SEQ ID NO: 86037 - protein, 126 aa, Unknown
  Obtained from environmental sample
  misc_feature (1)..(126): Xaa is any amino acid
AYRESRESAAGSFLHHSPGYHLEYEGTEQYKAAIFTDGHAMQIEAAGLLKSAKNKDNAKVFLDFMISPDFQNIIPLTNWMYTVIDIPLPDSFRVNPKSDKPLLPGTVSEADLNEWASLMTSGGQNK

SEQ ID NO: 86038 - protein, 261 aa, Unknown
  Obtained from environmental sample
  misc_feature (1)..(261): Xaa is any amino acid
MTNYREILRLNQLGILKQDIAKSCGCSRNTVASVIKNAQEKGLGWETATGLNNSELAGRLFPGNQKKPVYKIPDWEYIHREMAKSGVTLSLLWTEYCEQCRRNNEIAYKTTQFYQYYSDYVKKTKATMHIGHKPGEIMEVDWAGKTAFIRNTDSGEPIKAHIFVAVLPYSGYTYVEAFLSQNEQAWLQAHVNAFGYFGGVTRILVPDNLKTGITKHTRHETVVNQAYQELAELTVLPYCRAEFVHLKIRQRWRETSASSPL

SEQ ID NO: 86039 - protein, 89 aa, Unknown
  Obtained from environmental sample
  misc_feature (1)..(89): Xaa is any amino acid
VIGEYWRDIVALAVGETHLVGLKADGTVVADGFKDEGQCNTESWRDIVAIAAGHAHTVGLKADGTVVAVGLNNYGQCNTESWTNIGPAS

SEQ ID NO: 86040 - protein, 100 aa, Unknown
  Obtained from environmental sample
  misc_feature (1)..(100): Xaa is any amino acid
GFTIDQIGRVIGSQGIAGMDLAIGNLTTRIADVGSRQERAETVWQRLNREIPDVTANIARESSVNMTDAATDLKMLDFAHKAGLQTAARLLPVSLLDFLR

SEQ ID NO: 86041 - protein, 66 aa, Unknown
  Obtained from environmental sample
  misc_feature (1)..(66): Xaa is any amino acid
GYGEASRNWASGRGKTGDGLFTVETVNCLGACAIAPVMVVDGEYHPKVKPDQVEAILKTYREKKNG

SEQ ID NO: 86042 - protein, 435 aa, Unknown
  Obtained from environmental sample
  misc_feature (1)..(435): Xaa is any amino acid
GCGELGVLSNFSCGPDSFVLSYFRNLMKSKPSLTLELDQHTADAGIDTRIEAAVDIMQSYRRISKSLPPEDTSFIPAVVPDNEMRVRAADGKFYDLRDPKVELMLPSMGRYGTEALAAIFRSLGVDAHALPVADKEVLSIGKKNSTCKECVPYIVTTGSFLQYVWERKKDPDKITLFFMATSDGPCRLGQYCRAIAQNIENLKIPNTAVLTLTDENGYGGMGAASLLKGWQSIIVSDTFSDIRSMLAVAARDKEQALATLEECWGEFIRFFEGKTGGGVMKTIDKVVKRLSKIPLKMKPEDVPVVSVIGEIFVRRDEFCRKNITDYLEERGFAAKVAPISEFLCYSNYVLNSNPPDIEQTLKERIRVRLTSKLQDWWEKRIKTAMAKCGLYKFELVEVEKTLEASRHLIDERLRGEAVLTVGLRSARPNLTLEYP

SEQ ID NO: 86043 - protein, 512 aa, Unknown
  Obtained from environmental sample
  DOMAIN (68)...(281): Bacterial extracellular solute-binding proteins, family 3
  misc_feature (1)..(512): Xaa is any amino acid
MINSRKIINIILSVLFISMTVSSCGKSTASQISKHTEPATLTSFRDVPGITEDEIKAIENLQKNIDHLVYGSTLSTEVFLSDDGEIGGFVAMFCDWLTTLFGIRFQPAVMEWGDIFAQLETGEVDFSCFTPTEERLNMYFMTDPVAVHSLKIMRIKGSPPLDRIALTRPIRYVFLENPVTIKMVTDTFQDGTYEIILAKDNDRVYQLIKSGRADAFIDYNVGEAAFDAYDDVAIEDFIPLTFNTMCMAAENPDLAPVISVVTKALRNGGIQHVNKLYNEGQNNYIRNKFLRSLSAEEKAYLKNTSVVPVTAAPWFYPLDYYNKFEKRWEGIAFDVLDEVTKLTGLSFEVVNSPNASWAEVLQIFNDGASICLDLIASPERLSRYLWSKYIYLSENYALVSRYNFPNISISEIQYAKIGLIKSTAWANMFQEWFPKAVNTTMYPSQDDALTALDRGEVDLVMAGTNALFALTHYYEFSIIKPIMYLTPLLIMLSPTIKAKTFFCLLLTRRLRM

SEQ ID NO: 86044 - protein, 743 aa, Unknown
  Obtained from environmental sample
  misc_feature (1)..(743): Xaa is any amino acid
MEIMRQYKNDVFHLKRSRLNQLFFEAIKYPLVVVYAGAGYGKTSAVHDFTEEHQTTVIWAHVCERDNIRARFWENFINTIGKINAPFAEAACKLGFPDTNEKRNQYMSLMQEFVSMKQRLIILDDFHYLESESVIYFLEECIFFKMPPGTSIILLSRSSPKIKTAGLVSKGLIFNINEDDLRFSENELAHYFRGLNITPYPEHLREIMGDTGGWAFAINLIARSYQKAPHYKAYVSKAMKTNIFQLMEREIWENISKRLQRFLVRLSLIDHLSFDFISLLAEDKELIEELEKQNAYVRRDNYINAYHIHPLFLEFLAEKQDLISEEQRRKTYKTAGVWCGKHGFMIDALSYYEKIGDYDSIVSALLSLPQQIPRDIANYAAAILDKAPEHAFNTVNNLATMHMSTYMYQGLLEKSFRLAEYYEAKFLKLPDNNPFKNQTLGVLYHYCSYLRVLMCITDNRYDFDIYFEKYCKYFSPPVNMSKIHNHSPGPWVIAIGSAKKGEPEKYMKALTRTTSLVTEYFTGIKTGEDELARGELKFYQGDLYSAEIFVIRALEQARNFNQFEIIHRALLYIMRISFTQGNYPKAQQALEETKSCLSEELYINRYTNYDITLAWYYCVLGQPENIPDWLKENFSSYGHALFIENFGNRMKAWYYLMTRNYPPLLSYIHEMKTRESYLFGRIEMLAMEACVHYKMKDRKLAFAALAQAYKDASPNGIVMPFIELGKDMRTLSAAALKESIRTS

SEQ ID NO: 86045 - protein, 185 aa, Unknown
  Obtained from environmental sample
  DOMAIN (2)...(185): Rnf-Nqr subunit, membrane protein
  misc_feature (1)..(185): Xaa is any amino acid
MNLFKIFLAALLIDNVVLMRFIALCPFIGMSTDEDKSVGMGLAVVFVTVIATAVTWPIYRFILEPLGLVFLQLLVFILVIASLVQLVEYFLKKSVPGLYKGMGIYLALITTNCGILAVTLDVINNTCVFTGKPYTFIESVVYAVGVPPGVSAFHAGIAGIRTRSGRARSPISKRDAGLFGRTGLL

SEQ ID NO: 86046 - protein, 194 aa, Unknown
  Obtained from environmental sample
  DOMAIN (44)...(154): Protein of unknown function (DUF820)
  misc_feature (1)..(194): Xaa is any amino acid
MKVLPKEKTYFTYADYKELELNEGERFEIIRGKAFAMPAPNASHQAILAALASQFSDFLQDKPHKVYPAPYDVRLFYKEDESDDTVVQPDIVIVCDEKKRGKEGCRGAPDLAVEILSPSNTAIEMERKLNLYREAGVREYWVVDPENLSLTVYCFRETGSIYNYKNTAKVPVAILPGLNIELERVFKKAMSNEQ

SEQ ID NO: 86047 - protein, 85 aa, Unknown
  Obtained from environmental sample
  DOMAIN (5)...(83): Ribosomal protein L22p/L17e
  misc_feature (1)..(85): Xaa is any amino acid
MESKAVLRNLRSAPRKARLVADAVRGKNVSEALNLLRFGIKKDVAEDVAKLISSAAANLSNNGGDANIEVDGLRVKRFVWTTGLL

SEQ ID NO: 86048 - protein, 260 aa, Unknown
  Obtained from environmental sample
  DOMAIN (4)...(65): 3' exoribonuclease family, domain 2
  misc_feature (1)..(260): Xaa is any amino acid
ELPKHVPGARYAILSDILGEEDHLGDMDFKVAGTVDGITGFQMDIKIAGVNPEIMRNALDQAKRGRLHILSIMNKTISKPLDEISEYAPKIVTLRIDTDKIGALIGPGGKNIKALCEQYNVRINTEDDGTVTIFGKSSIDAEDAKAAVLGIVLDPEVGKLYEGTVKRIMDFGAFVEILPGKEGLVHISKLSRQRVAQVTDVVREGEKIKVKLIEIDKAGRLNLSYIDAIDPGFSGEGSRGPSGGNSSGGRPDNRRDFRRN

SEQ ID NO: 86049 - protein, 555 aa, Unknown
  Obtained from environmental sample
  DOMAIN (4)...(147): 3'-5' exonuclease
  misc_feature (1)..(555): Xaa is any amino acid
NGQIRHEMCRLPRHGVKQDGTAADPLHNDPEKVRVLFAPLLADPEMTIVAHNAKYDYKVSRGWGIDRWKCKIWDTMIAAWLADPERNNYSLDSLAAYTFDYTPLVYHDVVPKGCTFDAVSLETAARYSGEDSDLCLRMMRHLEPQLTDADGMRLFENLEMPLLPILAEMEGIGIKIEAKILTDYGKELEVELDAIQRETWAAAGHEFNLASTKQLQEVLFTERKLKPGKKTKTGYSTDAASLEELAREDPLPALILRHRTLAKLKSTYVDTLAGMADNAGRLHTNFDQAGTATGRLSSREPNLQNIPIRAEKGRRIREAFIAGPGSVLISADYSQIELVVLAHLSQDENLIAAFKEGTDVHARTAALIFGVDIDQVKDDQRRIAKTINFGVMYGMSAFRLSNELGISRTDASNFIAAYFNTYAGVRCFIEDLIKKTEELGYVSTIFGRRRYIRTINSRNKTEKAAAERIAVNTPIQGSAADIVKTAMINLDKRLAAEQSPARLLLQVHDELILECPKNAADETAALVKAEMEQAVSLRIPLRVSVETGKRWGDFH

SEQ ID NO: 86050 - protein, 320 aa, Unknown
  Obtained from environmental sample
  DOMAIN (6)...(320): Protein of unknown function (DUF1703)
  misc_feature (1)..(320): Xaa is any amino acid
GGLFGEKWGQPALGINSLDGEWKKHPVIRIDLNPGNYPKGGVDTLYEIIDIALESCARKYSVSLNGNSCTGRFIRLIETLHETQREKVVVIVDEYDKPLLATMDDPLLHAKMKDELKGFYGVLKSSDDYLRFVFLTGVTKFFHVSVFSDLNHLVDLTLDPRYADLCGITHEEMEQNFGPEIEAVLEDTGKSRETYLGELRRFYNGYRFSRKVLSVYNPFGLLNHFDKSGEFLPYWYETGMPTFLINLIIKQKINIIDMTNMRVGYEDFRKYDIETMRVEPLLYQSGYLTIKDFDEELQQYILDYPNEEVQASSRPLSITQ

SEQ ID NO: 86051 - protein, 148 aa, Unknown
  Obtained from environmental sample
  DOMAIN (45)...(135): ATP cone domain
  misc_feature (1)..(148): Xaa is any amino acid
VVARSQRQVVDSRTSKEGRAVRRRRECLDCGRRFTTYEYIENISLTIIKNDQRREPYERQKLMQGITSACKKRPVSVKKIESIVDKIENRIERISKNEVPSSEIGRMVMEELYALDEVAYVRFASVYRKFKDISDFISEVKGIGSRPN

SEQ ID NO: 86052 - protein, 237 aa, Unknown
  Obtained from environmental sample
  DOMAIN (158)...(237): SpoU rRNA Methylase family
  misc_feature (1)..(237): Xaa is any amino acid
MQKSTIKTAYTKSFGHSRDELGDENPWANKKKEKDEKKAALQWRPAPAKREEKELPWLKAIHSLATEKGREKEGLFLAEGARVVIEIAEHHKDLVQGVYVDETFDDEELRKKIKDTGLRIHSLTQSQMKQASSVVSGQGIFAVCRLANEKPNYDTAHTITLVDAVQDPGNLGSLFRNAVGFGIDGIILGRGTVDPFNPKVVRGSSGCFLRTPFETGIDLQERFLFKAGTSSANLSWP

SEQ ID NO: 86053 - protein, 230 aa, Unknown
  Obtained from environmental sample
  misc_feature (1)..(230): Xaa is any amino acid
DLRGDDRSLVTGNFLIRFISFFAGFSVVASEGKYTLNKEFYYLNGYIDCILEDRRKGSESQDSLVIVDFKTKYMPAHSDCIGLAPKPRSVSYVEPEVRGSSLEGLANFQLPMYIRLAENEFGKPVGTALFFSILDAAPQVLFGVIQDALSGEIIPGKEHDRIMHGSCEYERIMGEFDKKAEKFAAEISNGTFAFSPSHWELCQQCGYNRVCRTLYKVFQGEKQWNQTKKK

SEQ ID NO: 86054 - protein, 108 aa, Unknown
  Obtained from environmental sample
  misc_feature (1)..(108): Xaa is any amino acid
IAAIGRVRGVIPRSTPIFRAIALADPFVLYNLGNIQPVKLTDFIEILETALGRTAEKLYMGMQAGDVTVTMADIDISRDELGWKPKTPITEGLKLFAQWFCEYKHNKL

SEQ ID NO: 86055 - protein, 477 aa, Unknown
  Obtained from environmental sample
  misc_feature (1)..(477): Xaa is any amino acid
MIASGILVANVRARVENVYIAGAITVNWPWNNTIDTSNVWTDRSGTLAYKVMNGGTIQNVVARVNSAASKSYGILSIVGTVESGGTVKNCFLVADNLLKYTAPAANESPSVTRYDVGSVTGYALGVDQNTTKTFQNCVLFLRTNAVSQNYSALTSPYWDTATGDLPKLGTGNDPGTNYGPTMYTITFDKNTTDAVTNMPSSITVASGGTVTRPATNPSRQGYTFDNWYTQASGGSLYNFGTAVNSSFTLYARWQAQTPTDPVRPPGLAQPTAFIDFSGYNGAATALTSHQPNPANPGAFTLANGITGSGMRISNSGDSGNVVISQYGDGKAAKNNQNNFLYFFIDNPTVKAATTVTLEIKYYDDIAGNSGLQYRSASEAFRSGGNITKSGSKQYQTAWIALSNCGFNMADQQNQGAQFRFGGGVIIQSIGIIIGGLPDPTTSAPPAFAPQTAMNTIIGKGIAGYQSWFNAGSGHHWS

SEQ ID NO: 86056 - protein, 131 aa, Unknown
  Obtained from environmental sample
  misc_feature (1)..(131): Xaa is any amino acid
RVRLAESQRQGIPIIAVVDTNCNPDGIDYPIPGNDDAIRAITLFTQIVANAVVEADNEVGLKIIETLGDEDEDMESMMNDVSMKEEDREIDIEKYTTEEAYKAAKADEEVPEDDEDDTKIKVDIDKVYNDE

SEQ ID NO: 86057 - protein, 67 aa, Unknown
  Obtained from environmental sample
  misc_feature (1)..(67): Xaa is any amino acid
MAEIPTWDRPRLIIKGAIIDKNVRIGEGCRIGVDNISRTDGNYGHYHVVDGIIVIPKNTVLYPGTVI

SEQ ID NO: 86058 - protein, 112 aa, Unknown
  Obtained from environmental sample
  DOMAIN (5)...(101): CBS domain pair
  misc_feature (1)..(112): Xaa is any amino acid
MQVSKIMTRNPVFIHPELSLTDARLFMDKERIGHLPVLNKNNELVGLITRADLIKAGPSSATSLDMYEISYLLSKLKVDKVMEKNVIIVQENEVVKKRRGSWRTRGLAACPY

SEQ ID NO: 86059 - protein, 76 aa, Unknown
  Obtained from environmental sample
  misc_feature (1)..(76): Xaa is any amino acid
MIFMDVQMPEMDGYEATRSIRALDTPKAKTIPIVAMTANVFREDVERCIEAGMNSHVGKPLDFNEVMKKLRTYLPK

SEQ ID NO: 86060 - protein, 124 aa, Unknown
  Obtained from environmental sample
  DOMAIN (30)...(124): ABC transporter
  misc_feature (1)..(124): Xaa is any amino acid
MNYAVRLREVSHTYGEHSILRGLDFSLEEGGFCCIMGRSGCGKSTLLRIIAGIEKPHSGEIYADSRLAISFQEPRLVPWLSVEKNVCLGMRGQSRKQQEESARTALADVGLAQKVRAWPLTLSG

SEQ ID NO: 86061 - protein, 115 aa, Unknown
  Obtained from environmental sample
  misc_feature (1)..(115): Xaa is any amino acid
NPAANHFGVISQGRYALVETSAPGIATACLQPLLDSYAKDNPQLIDYIHDEEEVFRLSDEGAKADGRKAAGILLPPVQKSGLFETVARLGPLPRKSFSMGHSVEKRFYFECRSLF

SEQ ID NO: 86062 - protein, 188 aa, Unknown
  Obtained from environmental sample
  DOMAIN (11)...(135): FabA-like domain
  misc_feature (1)..(188): Xaa is any amino acid
LIEKEELQTLIPHKGKMFLLSRVIDYDLAHGIRAEYDITEHCLFYDPAVDGVPSWAGFEFMAQAISVLSGIKCRERSGKPNMGFILSIQSVRMEIPLFKNGSTVQICVKKIDCTDMIYTFEGEVFLGGEKVMEGKAMVMETSDEQFKSLPGSKDNCLVTSGRSGGNMDFIAKKEPPEKIRRADFSLIE

SEQ ID NO: 86063 - protein, 622 aa, Unknown
  Obtained from environmental sample
  DOMAIN (427)...(619): Methyl-accepting chemotaxis protein (MCP) signaling domain
  misc_feature (1)..(622): Xaa is any amino acid
MENLAVQRAAYWQGREDGLFRIARTLANIFGDFEDDPAERRRDMYDSMMQSITRAETTIFQVYTVWKPNAVDGMDSRYIGRPGSTETGQYAAAFRMENGLANITTTTDVADAMAYLTGPDARKDRYVHPVPRNIDGKDTWYFRIMVPIVNRRTSEIVGGVGLLCVIDAIQPTIVNTIRTREEISAAVIYSSNGFIIGHYTPERVGQMMKDTEVVYGNYLDEAFKAVQNGDSFSCSVILRLLKTDVEITIQSFPMGSSGQSWSVMIAATKSYILREVDEMTKFTIIIAAIAILIAAVIVYFTLQSTTKPIVTVADTLKDISEGEGDLTRSISVSSRDEIGDLALFFNKTLGKIKDLVLIIKRQAGVLSDIGAALSSNMTETAAAINQITANIQSIKGRVISQSASVTETNATMEQVIVNINKLNGHVENQSRNVSQASSAIEEMVANISSVTSTLVNNAANVKTLQEASEVGKAGLQEVASDIHEISRESEGLLEINAVMENIASQTNLLSMNAAIEAAHAGEAGKGFGVVADEIRKLAESSSEQSKTIGTVLKKIPESIKKITDSTANVLNKFEAIHSAVTTVSDQEENIRNAMEEQGEGSKQVLHIARSLSELTQQVKSGS

SEQ ID NO: 86064 - protein, 67 aa, Unknown
  Obtained from environmental sample
  misc_feature (1)..(67): Xaa is any amino acid
MLEGSKEVMNESQNLERMTHEISSGMNEMASGAEHVNVAEHHVNEISSKNRESIDNLIQEVSRFTVE

SEQ ID NO: 86065 - protein, 325 aa, Unknown
  Obtained from environmental sample
  DOMAIN (28)...(245): Phosphoadenosine phosphosulfate reductase family
  misc_feature (1)..(325): Xaa is any amino acid
MSVKKYLKKNVYEASVARINIIFKKFEKIYLAFSGGKDSGVMLNLVVDYMRKHKITKKVGILFVDLEGQYEVTIDYVKKTLAKNRDLFDVYWCCLPLNLRNSLSVFEPFWTCWDLDNREKWVREYPDYPCITEKNCPFQFFRKNMEFEEFIREFGAWYAGGEQTACLVGIRSDESFNRFRTVAFKDKNMLENYRWTTKIFKDKELYYCYPIYDWSNKDIWVGNYKLEWEYNKLYDLFYKAGLTLDKMRICQPYGDDQRIGLNMFRAIEPETWAKVVNRVSGANFGNIYCGTRMLGYRHVTLPRGHTWKSYTQLLLETLPQAVRDI

SEQ ID NO: 86066 - protein, 224 aa, Unknown
  Obtained from environmental sample
  misc_feature (1)..(224): Xaa is any amino acid
VYTNSPAVLAARAGVMEFLSVNHPLDCPFCDKAGECKLQDHAYLHGSSDGRAIEEKRHYSYEDLGSKIVLDKNRCIHCTRCVRFTREVTGQGELTVSNRGSRLEITTFEGLTLDSNPFACNIVELCPAGAMTAKDFRFKKRAWYLKPIPTISRHGADAKPIWADIDQNKLWRFRPRFDGELSLQRLISDEERLAWHRYDLEPSQRQCSPTMKGKSAPNMDIASA

SEQ ID NO: 86067 - protein, 199 aa, Unknown
  Obtained from environmental sample
  DOMAIN (4)...(199): Coenzyme A transferase
  misc_feature (1)..(199): Xaa is any amino acid
VFKIISAKEAVGFIKDGDCIAVNSFLALSNPEELHDALHQRFLETGSPKNLRLFCSASIGGWDENRYADPYIRDGAVSEIVASHYRSSPVAMKKALSGEIEAYCLPLGLLSHSIRAAAAGKDWLLSEVGVGIYADPRIDTCALNEKSKRELLQVREIEGKDYLLYHTPKFDIAFIKVLPLTPMAIFLLRKNTCPWTRSL

SEQ ID NO: 86068 - protein, 48 aa, Unknown
  Obtained from environmental sample
  misc_feature (1)..(48): Xaa is any amino acid
MHCIKKVTDDLVWVGANDRRLAFFEGVYSVPAGVSYNSYLLPMKNRTV

SEQ ID NO: 86069 - protein, 601 aa, Unknown
  Obtained from environmental sample
  misc_feature (1)..(601): Xaa is any amino acid
TTYSGTFSVSGSTITFNATGLGTASGGFSLSGTTLTLSNHTWDSSVNGTYTKDSGSGGGGDIAVTFNSVTQNGSSSSTTTQLTLTFSQAITGLTASDISLSGVSGVSKGTLSGSGSTYTLPISGFTSGGSLNVSVSKTGYNISDSQKTVTIYFSPIPVSFNSISANGSSTETTTQLTLTFSQAITGLTANDIYFIGVSPSVTKGTLSGSGPTYTLPITVTTGGTLTVEVDKLGYTINEPQKTVTIFYYTPPIPVTFYNVSANGSDSSATTQLTLTFSQRITGLSADDIALSGVSDVTKGTLSGSGPTYTLPITVTEGGTLNVAVSKTGYDINSSPQQVTIYYVVIPTNAGLYLKADNVYTSVNVDYANLNTVINYVNNNAASGAYLLVVGENITAPSTVQALNQNNANLTIIGTGATRTISLPSSGSLFTVGSGATLILDNNITLVGRSGGTNNNNTSLVKVNSGGKLEMWEGSLVTGNTIRPLSLNDGNTSNGGGVYVSSGGTFTMNGGKISGNTTNAVSLTSSISKGGGVYVEGTFTMNGGEISGNTSSSSTQNGGLCRSYGGGVYVSSNGTFTMSGGEISSNTSSSGQGNSAWGGGSP

SEQ ID NO: 86070 - protein, 483 aa, Unknown
  Obtained from environmental sample
  DOMAIN (37)...(232): von Willebrand factor type A domain
  misc_feature (1)..(483): Xaa is any amino acid
MKFLHALEMAGIFLLFAAAAGPHFVFTEMVWLNRGADIIFVMDISPSMAGMDMGGRTRFDAARSLMIDFADRRQQDAIGFIALGQDAALLVPLTTDREVLYSRLNSLMIGELGDGTALGTGLALAAFHISKSDAPRRAVVLITDGENNAGTIHPESAAAMLGEMGVSLWVVGVGSSGEVPVNYVDPITKMRRTGTFESRYNTEDLKSIADKAHGQWVHAPQAEALSAAFSQLDQREMIIRRSIPVRREEPLYVVFVISAVALLFGVRFVRRYVLGGPSLSFDNSTLLFLLIIPVVLIPIVIVRYIKSRGMAALFAAAAPSNKREQFLKELRLRMIMSDILFLFFLGLLIVALAGPRWGLRIVADYRRGLDVVLAFDVSRSMNVRDCPPNEFYRQDNTSRIERGIGISRELLGYLEDVRFGTAISKGMGILAVPLTFDSDMVMNFLYVLDSQAVTGRGTNLESLLTPLLGVPGILPAKVAYPPK

SEQ ID NO: 86071 - protein, 78 aa, Unknown
  Obtained from environmental sample
  misc_feature (1)..(78): Xaa is any amino acid
CFRNTCLLAAKTGLTSVAFPNISTGVYGYPKDKAAAVAVETVRKTLSETPDIQRVLFVCFDEENYRFYEKLLQETKSK

SEQ ID NO: 86072 - protein, 234 aa, Unknown
  Obtained from environmental sample
  DOMAIN (17)...(183): Ras family
  misc_feature (1)..(234): Xaa is any amino acid
MVQNIRNFCIIAHIDHGKSTLADRLIQKANLIDDRYFMDQILDNMDIERERGITIKSQAVTIPYTSIDGKEYRLNFVDTPGHVDFSYEVSRAINSCEGALLLVDATQGVQAQTLSNMYLALENNLEIVPVINKIDMQAADVPRVKKQIEKDLGLDAESALLVSARQGTGIDELFEAIVKRIPSPSGNSSSPLRALIFDCHYDSYRGVVVHLRLFDGSVKKGMKIFFMSNKFGIR

SEQ ID NO: 86073 - protein, 54 aa, Unknown
  Obtained from environmental sample
  misc_feature (1)..(54): Xaa is any amino acid
MGLLFGMLKSAQPLMQLRQIPREIASIIMGLVVVFIALRPGVQMFVEWREKNKK

SEQ ID NO: 86074 - protein, 361 aa, Unknown
  Obtained from environmental sample
  misc_feature (1)..(361): Xaa is any amino acid
MTGQPKNIVHTYLFTCEVKDMAQVENDIKGKFSNLREEKSKEIYFYNNELFADYVKFIKSHELFIKELHIKEPAVKQIVKIVKKTTPSLEERGLTRYDIMQKAQNVDNDEFYTRYEDIEKELSMYDKRIWKNKVVFCNCDDAVDYDVRRTSAFALYFLRNFEELELKKLICTHYSGHVDLFHQGAKGYIFTKTGYKEIKEYPEEYTGSFDHPLSLKILREDADIVCTNPPFSRAIDYWKILIDSGKKFIIISNESNAVTTAFIPYFKDNKVWAGYNSVYFYLNPKKEIVRAAGRWYTNIKIKNRETYKRLKIMPLKEIPEKYKRYDDSKILLVDGGYIPSDYNKIFAVSSNPVLNGLLEKG

SEQ ID NO: 86075 - protein, 231 aa, Unknown
  Obtained from environmental sample
  misc_feature (1)..(231): Xaa is any amino acid
GGHPLAQYLSSNWRSFLQLDTSGGNVTHACLSLAQNLGAQRITLFGADFSYVNSRTYARGTYIYPYFEKRQNRLAALESHLSAFLYRSPFLPKESEEQNYRETALLRFYRKKLEEKAAKTAARIYCARGQGAPIKLEDKAPQKIENTAGVFHLTKKPVVSGMDFLEQYRNDIAALNAAHLRESGVKNRQILNTLLPAAAAIKHRNPNLKTEEVIEETKCFCIRQIDNALNS

SEQ ID NO: 86076 - protein, 115 aa, Unknown
  Obtained from environmental sample
  misc_feature (1)..(115): Xaa is any amino acid
MAKIARSSAVKEALKALKYGKFPLQIEHAEGAFPGILISLIYASTKGKILAVVPTDTEAALLEQDLRSVNTPVSIFPWWGGMPYRDMASLSAVFGERMRVLASLASNANESRPSS

SEQ ID NO: 86077 - protein, 474 aa, Unknown
  Obtained from environmental sample
  DOMAIN (105)...(474): CO dehydrogenase/acetyl-CoA synthase complex beta subunit
  misc_feature (1)..(474): Xaa is any amino acid
GIGADIARWDCAALIFGSIKEGNLLGPFKIYKRTRFPAFVNAFGPLNEVIVAAGAGAIALGFPVISDWDVVASVAIPGALEHSAGGEEMVKKSLELRSIKVKTKKISIPVAFSSAFEGEIIRKSDMAVEFSSSHNTTCELLVMKDPASIEDHKITLIGNDIGGIKTYPVNMALAVYVEVSGAKMKTDFEPVIERKIHHWVNYIEGMMHTGQRNMFRVRISKETLEKGFKLKDLGEVIYTMVRDEFAAVVDKCQVTLVTDEAKAAEILKKEAMPKYEARDSRLASMTDENAACFYSCILCQSFAPSHCCVITPERLGLCGAVSWLDASATKQLVDTGPCQPIAKTGVQDEKKGIFDSVNEAVKAATNGWIKRMSLYSIMEDPMTSCGCFECICGIMPESNGVVVVNREYKGVTPNGMTFGELATMTGGGAQTPGFMGHGRHFIASKKFVHAEGGVGRISCRSCRSCRSADLTLAN

SEQ ID NO: 86078 - protein, 214 aa, Unknown
  Obtained from environmental sample
  misc_feature (1)..(214): Xaa is any amino acid
MKSKRNAELTRLYIAAVLAAVSYTFFKLYKLFSYSEESVLGASRWGGLLAIGLANTLVIGMIVFIVARALAKTYFEGRSGVLGSKIRAKLVIAFLAVGIVPSAMLFMMGRPFVLKNIERWFAPETDRLIHDGGAISRLYRDETLARVQREADAAARLHQTPQTVLSELALDLCSDSKTTLVRDGLNAPALTGNASIADAGAAALGIWGGTGPGL

SEQ ID NO: 86079 - protein, 53 aa, Unknown
  Obtained from environmental sample
  misc_feature (1)..(53): Xaa is any amino acid
SAETSPYLDTGVFTALRDEKLFNRVKVSFDTIEWPNGIDLDPEVLYEKSVVCA

SEQ ID NO: 86080 - protein, 327 aa, Unknown
  Obtained from environmental sample
  misc_feature (1)..(327): Xaa is any amino acid
MSEITSISLLELILAIKNSIKLSSPPAIWVRAEISELHERDNDHAYFELVEKGAESDRIVAKIRAICWASTYRMLKPFFETAASCPLSEGMKVLVSCSIEYHELYGVSLIIRDIEPSYTVGDLAKQRIETIRRLRSEGVIDMNKSLEFPLLPQRIAVISSETAAGYGDFIHQLTSNSSNLVFYTKLFPATVQGDSAATSIINALDKIYEHSEQFDVVVIIRGGGATTDLHCFNSYDLASHCAQFPLPIIVGIGHLRDETVLDTVAFASLKTPTATAEYLLEKMEEQLDDLLYLERNLIAQADEQIKKNIAQLRKLVKFFCQLGQSVM

SEQ ID NO: 86081 - protein, 127 aa, Unknown
  Obtained from environmental sample
  DOMAIN (11)...(126): Glutamine amidotransferase class-I
  misc_feature (1)..(127): Xaa is any amino acid
MSDSRKPELALVLDFGGQYKELIARAVRSLSVYSEIRPGNMPVDEIKRLSPIGIILTGGPSSVYQPGSPMCDPAIFGLGIPILGICYGMHLMCHTLGGEVTAGGAGEYGRVEVRRQTRPSRYFTKRK

SEQ ID NO: 86082 - protein, 160 aa, Unknown
  Obtained from environmental sample
  misc_feature (1)..(160): Xaa is any amino acid
GVTDNFNKLQKTEQAISSAEIIIKDLLDQIEEMRSSIETLSAESEKANNALEKISVLDDSLAQIEERIEKMNVAREWLGRVETELNTLDKSIRDQLKLTKALVDKEGKKTQTESKGSPPPQIRENVLRLKRQGWTTDQIAKTLELSKGEVELILEVTPRE

SEQ ID NO: 86083 - protein, 341 aa, Unknown
  Obtained from environmental sample
  DOMAIN (1)...(95): Homoserine dehydrogenase, NAD binding domain
  misc_feature (1)..(341): Xaa is any amino acid
GALWPSWNCSQTEEELAPFKAKGYKGFTDANELLEDDTISVICELAGGYELPFKWITKAIEHGKHVVTANKALLAKHGSEIFPIAGEKRCHILFEAAVGGGIPIIRTLQEALVGNKINSLSCIINGTCNYILTRMTAEGLSFEEVLKDAQRLGFAEANPSFDIDGIDAAHKTAILASLCSGRFVDFEKIHITGISGITAQDIKFVDELGGVVRLLGLYNKLGDSVDVRVHPCIVPSEHLLASVKYVLNAVYLQCDNLGPTLQTGAGAGRLPTASAVVADLVSLARSSETGHIEPLPMGWFQKENSATLVPIGETSTRYYFRFVQRQLRVSQNHGIWARSIS

SEQ ID NO: 86084 - protein, 317 aa, Unknown
  Obtained from environmental sample
  DOMAIN (254)...(317): Bacterial RNA polymerase, alpha chain C terminal domain
  misc_feature (1)..(317): Xaa is any amino acid
MARKNLMKGIKRPKSNFEQVEHNSSYGKFVAAPFEPGFGTTIGNTLRRLLLSSIQGYAITAVKIVSYDSNGTAHNVSSEFETIPNIVEDTIEVINSLKQIRLKLPDDVEQDILLYEWSGKREITSDDFCRPGQVDVLSTGQHIMTLMDDAKVEFEIQIDLGRGYVPSEVNERYVEVIGTIPLDAIFSPVKKVKFAVEPTRSGQRSDYDKLVLEVWTDGTVKPEDALAEAAKVAKDHFSIFINFDENNMGVEDDIDEGNEHIRKILNTPVEELELSVRSSNCLKNANITNIGELTRKTEDDIARTRNFGKKSLQEIKE

SEQ ID NO: 86085 - protein, 96 aa, Unknown
  Obtained from environmental sample
  misc_feature (1)..(96): Xaa is any amino acid
MAELSQCAEKSLKAYLLVSKKELPFIHDMVELIRLCISLETNFSTIQSYCVSLNPYAVQVRYPNELAVDDNMARQAIDNAEKVFKFCEKIINDKYS

SEQ ID NO: 86086 - protein, 95 aa, Unknown
  Obtained from environmental sample
  misc_feature (1)..(95): Xaa is any amino acid
MSEGNMNLTIKVWRQKNAQTRGAFETIRLSGISPDMSFLEMLDVMNEHLMKEDKEAFAFDHDCREGICGMCSLVINGIPHGPDRLVNNCQLHMRK

SEQ ID NO: 86087 - protein, 399 aa, Unknown
  Obtained from environmental sample
  DOMAIN (17)...(306): Homocysteine S-methyltransferase
  misc_feature (1)..(399): Xaa is any amino acid
MPKNILKELDVLIRERIVIHDGAMGSMLKGYKLSDLLCLSNPELITSVHEAYLEAGADIISTCSFNANAISLAEYGMADKAYEISRAAGAIARQSADKFSASGKRRFVAGSMGPMTKSASIASDLNDPGKRSIGWDELEAAYYDNARGLLDGGVDILLLETIFDTLNAKAAIASVIRLREERKANIPMIISATVSGAGGRLLSGQTIEAFAVSVSHAEPLALGLNCSFGAEKLLPHLAKLSAFTQFPVICYPNAGLPDSSGAYSDGPEEMAGFMKTFFEQRLVNIAGGCCGTTPAHIAAIAELAKNYQPHQLPEKPKTSYLSGLEVLPLPERGSADFINIGERTNVAGSRKFLQLVQNGEWDEAVHVAEETLPPEQGYRRMHGQPLLDGKLPCSVLITR

SEQ ID NO: 86088 - protein, 195 aa, Unknown
  Obtained from environmental sample
  DOMAIN (36)...(194): Flagellar motor switch protein FliM
  misc_feature (1)..(195): Xaa is any amino acid
MEVLSQDEINQLLTAINAGEAEPEETASDSRKIKIYDFKRPIKFFNEHKITISSIFETFCRLTTDSLSAQMRNMCYLHVSSVDELTYEEFIRSIPTPTTLAIVNMNPLMGNALLEIDPTMTFSIIDRICGGSGNGTEHHHELTDIEQRIMEKIIVSMLEHLRASWAAVLNCALNGTKRYKPALVKTVPPNDPLFW

SEQ ID NO: 86089 - protein, 87 aa, Unknown
  Obtained from environmental sample
  misc_feature (1)..(87): Xaa is any amino acid
AYGEPCFEDSVGNNTYDALITDRVYRKGISHEEACKKILEGRGTRFDPRIVDVFEKIKDKITSLNVTANLTFKDHSWSVYNETHTGS

SEQ ID NO: 86090 - protein, 515 aa, Unknown
  Obtained from environmental sample
  DOMAIN (239)...(421): Anticodon-binding domain
  misc_feature (1)..(515): Xaa is any amino acid
LQKTNHLYINLPGIKDKLEDWIKKASIDGFWAHNAIQMTQAWMRDGLKERAITRDLKWGIPVPKPGYENKVFYVWFDAPIGYISITGTLGEEKGNWRDFVNYWWKSPNDVELFQFIGKDNIPFHTVIFPSSLLGSGEKWTMLHHMSSTEYLNYENGKFSKSRGIGVFGTDAKETGIPADVWRFYVYYNRPEKSDAMFTWSDFQEKVNGELIGNLGNLVNRTLSFVTRYYDGVIPEGKSDGAFWAEVVKREKSITEKLDRAELRDAFREIFELSSFANKYFQDNEPWRLRNDDPEKAKAVIRDLTYIVRDFSVLIEPYMPQAAGKIASFFGLKHRENLDWKDIGKAEGIGNVKITSEVLFAKLEDELVETMRTRFSGSQKERQESEAVQAAESKPFSAVMDLRVAKIEKIERHPKADKLYIEYLEAGEGVTGTREERVIVSGLVPFYKEEELLGKKIIVAYNLKPAKLRGVESRGMLLAASDHKATGADGQPAERVEALTQETAPQEQDSRPSSII

SEQ ID NO: 86091 - protein, 256 aa, Unknown
  Obtained from environmental sample
  misc_feature (1)..(256): Xaa is any amino acid
MYIEFAPNDEGVIEKSFFPDRIPAKVEYSFDKDDNDDQYARLYSADVVNTINELLLPRYGIGQDIYENKTNIKKINPEEVKIKNNLAKAGKQLRGFARTNLFKRLESSGYSFLLSISRHILRNYLFIYAIDENLEFPIGKQEGDIINEILYGDEDTDADSGIEQFVFDTEEYRKLAQKYYNTLSGTKEKYEWIRCELFNKKLKDDLEADTARLLKIMELGKSWDQAKDRQLGALYELLTKKYPKEKVYSCRSVLAN

SEQ ID NO: 86092 - protein, 295 aa, Unknown
  Obtained from environmental sample
  misc_feature (1)..(295): Xaa is any amino acid
VEDLPDLTGDMDSLLASAPEVLSASGTLSAGPPDIDALINEQLASKVEDIPDLTGDMDSLLASAPEVLSASGTLSAGPPDLDALINEQLASKVEDIPDLTGDISSLLASPNLEPSLSASYSKNNQSQSSIDVDALIKEQLSSKVEDVPDLTGDINSLLVSNTPSSPSVPNIDDLVNEQLASKVEDIPDLTGDIDSLLASSTPSSSNVPNIDDLVNEQLASKVEDVPDLTGDIDSLLASMPSGSAEPELMPYVPPTKADIQLAHKPTVTLAELYMDQGLPQKAIGVYKELLMQDPK

SEQ ID NO: 86093 - protein, 316 aa, Unknown
  Obtained from environmental sample
  misc_feature (1)..(316): Xaa is any amino acid
PIIAAWGIGFELQDKKLTLETCKPVSQLLSLWEGILFSEFKIDGNIVKTETFIHPKEDTLYVCAQSPLLKELRITVNFPYGSHKKTGADFSAPHSHKSKILSNKDGSISIERELDSTIYNVTVSGKGFTVSFNENQHALQLIPHDECINFCVKFEPVNIPSFKNTGITLNKLINKDADSSEEAKTKCLSFWEHYWTSGGFIDFKGSTDSRAAELERRIILSHYLTAIQSRGKLPPAETGLTCNSWYGKFHLEMHFWHHAHLPLWNRTEELLKSLEYYKKILAAAKDIAASQGYSGARWPKCAIRPGAIRLHLSPFY

SEQ ID NO: 86094 - protein, 491 aa, Unknown
  Obtained from environmental sample
  DOMAIN (106)...(258): ATP-grasp domain
  misc_feature (1)..(491): Xaa is any amino acid
MHERIIILGAGVMQGPAIRIAKELGLFTVVADGSSTAPCIPMADRFEKIDLKDKEGIEAMARSLQNSGPLAGIMTAGTDFSATVAWVAEKLGLPGVPYEAALNASDKARMRSCFKKNGLPSPEFITINNSDKVDVAPFSFPLVVKPVDNMGGRGCRRVDTIDEYREATTEAIRFSRSGRAIVEAFMDGPEFSVDAIVYHGEITICGLADRHIFYPPYFIEMGHTMPTAIAPEQQDALLETFCAGVRALGLAGDKSVGAAKGDIKLTPSGPMIGEIAARLSGGYMSGWTYPYSSGAEPIRAAILAAIGRKPDCLVPVKTWTSAERAFISIPGTVKAISGIDEARRRPFVKDLFFRVAEGDKVDFPRNNVSKCGNIISAAPDRASAVEAAESAARSILIRLDPSDPETGEFLLSEGKDNREQITDNREQRTVSREQGAGSSERGTGFPPDAYLLGPELKAALAALPDTKLQGQRENLQIVPFPASTRPNLTKA

SEQ ID NO: 86095 - protein, 117 aa, Unknown
  Obtained from environmental sample
  misc_feature (1)..(117): Xaa is any amino acid
MAYINQYMSRLDKLNFKDMFGGDFFLTWEKSYDEIIATFTVADALRWLRENNISTRVFDSGLGVSLFTDNSTRTRFSFASACNLLGLAVQDLDEGKSQIAPRRDRTGNGHMISFMAD

SEQ ID NO: 86096 - protein, 94 aa, Unknown
  Obtained from environmental sample
  misc_feature (1)..(94): Xaa is any amino acid
MELFNDKNKSGDKNPLADRMRPRFLEDIIGQDHIVGQGRLLRRAIQADRLSSIILYGPPGTGKTSLAAVIANTTRAAFENLTRSFPELRHTRSN

SEQ ID NO: 86097 - protein, 316 aa, Unknown
  Obtained from environmental sample
  misc_feature (1)..(316): Xaa is any amino acid
MLPRRLIDTVFTWLFRAFSFTGVAALGAIVVFILIQGTEPFFVPTAKTVRIVTERVDRVTINGELYENPEGFIEFPWDVKSVSFQFINKGEERDLTFLLSPEKNYRTRLLQPIEAGDADVSFPDANTCSVSFPGALPGLNQKIHIILPEPPYNLFKFIAGMEWLPAYRKVYGIFPMILGSILVCFGALLIGVPIALLCALFMAEFLPPKIANIFRSGVELLAGIPSVVYGFFGLMVIVPLVKQTFKTPSGNSLLSAVIVLAIMILPTIITVSEKCLQAVPPVKARGVPGVRRKQDATALHVVLPHAKSGVLAGIIL

SEQ ID NO: 86098 - protein, 850 aa, Unknown
  Obtained from environmental sample
  DOMAIN (45)...(250): Calcineurin-like phosphoesterase
  misc_feature (1)..(850): Xaa is any amino acid
GGGGGGIIAELYRTCGNTEYAYRVGDGSEWSPVYTFKTADPGGAYSFIAVGDPQLLNAREGEAWKKTLERATAKAGNPGFLLSAGDQADKSNNMEQWDFVMAPKTLRSLPVAAAIGNHDTFDFIGEPVEQVALMPIHYNWPNYYELTVDKSDDLYVRAGGNYYFSYGNTLFIVLNSNVKGVEPHRDFMKKAVASHPDAVWKIALFHHDIYGTGDHAGTAYQDAQKMQPDWSPFLDEFGIDFVINGHDHVYGRSMFIKGNKVQSAQMSANLDPLGTNIVKPNAGVYILPAGIQYIALSGSATEKMYAPEAQEWVAYTPGFIGVPEYSVITIDGDTLTFVCYRSDTDAVTDSITLRKTATRADLEKLIPDCEAVKQTVNVTGGWYVFQNAIAAAKAALSGSPANINAAYVALYNAYYAITVNTDKAALKSLIDDVKNTLASTVEGMWEGQYPVGSKAALKAVLDKESLTYIDRLATQVEADTAEAILSVAFSAFKGSVSKIPIPWVDVHNISAAGVNQVELVGWKKGDVYYAYLTKQEFAKNNLGGKRSDPADGPANGLGGRGPSESYITRTHIGEWIRYDLNVERAGTYKAALGAINNSGKAQTILLRDADYNILCTFVVPANAVLPASGWKDAPMVSADKEFYLPAGNYFVELYFINDGVGVNVPSGSNVAFPNDAGNRLYPDGADVDILTLERVGDGTPPVIQKDPSIYVLPLPPNSIQGAPARQKGWASEGYVDDQGNVATGISLETFMAATTLVLEVASKPAATNIQMHLIPEGDGTTWAAHEATSANTPALVIDTLYRDGKLVFPLNEMLGYEAWSNSQIMCMIDVSYYNYCWDELNVMKARPNLS

SEQ ID NO: 86099 - protein, 316 aa, Unknown
  Obtained from environmental sample
  DOMAIN (115)...(224): Glycosyl hydrolases family 2, immunoglobulin-like beta-sandwich domain
  misc_feature (1)..(316): Xaa is any amino acid
VVFEGIDTIADIYLNGEFVSRTANMYLTHRIVDPGLRDGENELVIHILPACLEARKNAVSAGNYHLKYNYECLRLRKAPSMFGWDITPRLVSAGIYRSAGIYLRPTESLRQCYLMTVHTNPERTTAKLELFYEVDIGDNPVSDYSITISGKPVAENRGGGDSGARGFSHSGRLWFTAGKLRFDVTNAELWWPKGYGNANLYDIEVTLLKNGKPVDSYKTKTGLRTVKLVRTGTTDIFHNGAFHFVINGRKVFVMGTNWVPVDSYHSRDKGRIPQIMELLEDIGCNAVRCWGGNIYEDPLFYSYCDKMGIMDAGHNP

SEQ ID NO: 86100 - protein, 261 aa, Unknown
  Obtained from environmental sample
  DOMAIN (4)...(143): Flagellar M-ring protein C-terminal
  misc_feature (1)..(261): Xaa is any amino acid
IIKESLIRGEASSDTNGEGTGFNLEVPGGVEGQTPPAFKDMSNLYGRMTQTTRDTNYEINQRNSQEEISPQINRVTVSVNIDGVWKRKFDEKRNPVITAEGTIEREYVPVPIEELKKVEDLIKGSIGYNPARGDSINVTNIPVDRTKEFMDEDAAYFRKKQMQITIIVFIAGLTLMLFGFMLFRMISREMERRRRLAEEERARREQMLRESAMAEAEQEGEDVSISLEERTRMQLMESAINLAKEHPEDAAQLIRTWLLEE

SEQ ID NO: 86101 - protein, 304 aa, Unknown
  Obtained from environmental sample
  misc_feature (1)..(304): Xaa is any amino acid
MEKLGFDLDLLDRCGAAITKQRYTFYHNKPYPKMIWPGNYNRYAAATMFSLFFAGNTYAPDLRSDGENIQDWLQSRYIAAFKHVQRRLKTCANITGWGSMNEPHFGFIGQKDLNAAENPMIPIGLRPTPWLTIRAASGYQVEVPVYSMISMGKRISHYETFNAEKIPLFKEGFSCPWKQAGVWDNEGGEPKLLKSNHFSLYQNRPAAFADDFLKPFIIKYINAMKEANEQNFFFIEGIPLSTRSESHPSWNKSDPDNVLNAFHWYDGLSLYTKSFRPWFNINLDTTKIIIGKKKVRAYFRDCLE

SEQ ID NO: 86102 - protein, 337 aa, Unknown
  Obtained from environmental sample
  DOMAIN (159)...(333): DNA gyrase B
  misc_feature (1)..(337): Xaa is any amino acid
GLIATEVSLLLHPVEGISALELVMTRLHAGGKFDKKSYKVSGGLHGVGVSVVNALSQWCEAFVHMDGRVHTQSYKTGIPDGPVHEITIDKLPYSADLNRHGTVIRWKADASIFETTTHNFDALSNRLRELAFLNKGLKITIRDERLSTPKIHEFKFEGGVKSFVEYLNENKTVLYKEPIFLDGVRDDGLGGSVEIECAIQYNDGFNEIMYSFVNDINTREGGTHLMGFKSALTRTLNEYLKKSKHAKKLDETLSGDDVREGLTAVLSVKVPEPQFEGQTKGKLGNPEVKGVVEAMINEQLELFLDKHPDIIAHILEKSVLGGQVLHRGPGGAGTLPA

SEQ ID NO: 86103 - protein, 70 aa, Unknown
  Obtained from environmental sample
  misc_feature (1)..(70): Xaa is any amino acid
MIRWHENKLLSIDGVMPSRATIMSGKYIFSNTFYAITTGNEKENAKKLINWILSPEGQYLVEKTGYVPIK

SEQ ID NO: 86104 - protein, 78 aa, Unknown
  Obtained from environmental sample
  misc_feature (1)..(78): Xaa is any amino acid
LRQSRPEGKPVIVLDVHQFPGHIACDSASASEIVIPFFKDGKVYGVLDLDSPTPARFSGEEAEYLGQIAGLLTAWLGS

SEQ ID NO: 86105 - protein, 113 aa, Unknown
  Obtained from environmental sample
  misc_feature (1)..(113): Xaa is any amino acid
MEKKKSVSVSLEGVTKVFKNTKGKSDVIAVHESNFTVEAGELVTLLGPSGCGKTTTLRMIGGLELPTTGKIHIGSEDVTMLPPNAGDTATVFQSYGLFPHLTVGGKCRLRPSA

SEQ ID NO: 86106 - protein, 566 aa, Unknown
  Obtained from environmental sample
  DOMAIN (159)...(272): PAS fold
  misc_feature (1)..(566): Xaa is any amino acid
VSILLMISRKAGTQLEVLVRERTNDLAFQTSKLEAILDSIPDLMYCKDKDLKYTQCNKYYSQYLGMTETDLFGKTNTDGKWLPPEELEMIRVTESTVMEEDRIITIEENIRLPITGIKGVFEAVRSPIRQDGAVVGLIAIIRDITQRKKTEKELSFKTSQLKMIIDSIPDSMFCKDTDLKYIQCNKVFENFMGVSEEHLMGKSDKDGNWLSPDDIERIYRLERAVIDEDRTFTLEETVHSPVTGKESVFETIKAPIRQDGAVVGLIAIIRDITQRKKTEKELSFKTSQLKMIIDSIPDGMFCKDTDLKYIQCNKVFESFTGVREENILGKSDDEEGSWLSQDVVEKIHRVEQAVIAEGRSITFEETVPSLVTGKESIFETTKAPITQDGNVVGLIAIIRDITQRKKTEKELSFKTSQLKMMIDSIPDSMFCKDIDLKYIQCNKVFEKFMGVREENLLGKSDEDGSWLSPDDVERIYRLERAVIDEDRIFTFEETVHSPVTGKESVFETIKAPIRQDGAVCSLIAIIRDISRRKDMERDLALQTSLLKTMISSLPELGFWQDLKFKY

SEQ ID NO: 86107 - protein, 200 aa, Unknown
  Obtained from environmental sample
  DOMAIN (2)...(199): NAD-dependent DNA ligase adenylation domain
  misc_feature (1)..(200): Xaa is any amino acid
MNNDSRRIEHLERVIRKYQKSYYGGEAEISDGEFDLLWDQLRSLAPNSPVILGIGADNTDGFPKAKHLIPMGSQEKAANPDEFLAWAAKHQLPEFLAQYKLDGASLELQYEKGVLVRAVTRGDGIIGDDITANARRMAGVPEKLDLPFSGGVRGEVVMPPEVWRQNTRPGPTAQPAHGIMRRRDRSGCKDFKLIHMMPRQ

SEQ ID NO: 86108 - protein, 184 aa, Unknown
  Obtained from environmental sample
  misc_feature (1)..(184): Xaa is any amino acid
MEDILDVYTRKYDENCILVCMDEVPRQLIGEKRIPIPAGRGKIARYDTEYKRNGTCEIFMFAAPLKGWRRAEVMEHRTGLDWAQQIKKLITVDFPHAKKIVLVMDNLNTHTIGSLYKAFPSEEARNYRNKLEIHLTPKHGSWLNMAEIEINVLVNHGLSKRVPLNRADDKRSLRVEQSPQPERK

SEQ ID NO: 86109 - protein, 521 aa, Unknown
  Obtained from environmental sample
  DOMAIN (1)...(467): AMP-binding enzyme
  misc_feature (1)..(521): Xaa is any amino acid
LIADNRREWMLSDFGVLSIGAIDVPRGCDITTQELIYILGFTGCEIAFAENQKQVEKILSCKAELPVLKTLITFDPVDNQTEAAAKDAGINVLFFANLVAMGEKREKMRSGEVEAEMDKGGSEDIASIIFTSGTTGEPKGVMLLHRNFLYQLPYFILFFEVKPGDIWISMLPVWHVYERLMEYVIFNYSNGIAYSKAISSILMEDFKAIRPHWMVSVPRVWEAIMDGINRNIKAKSGFTKKLFDIAVSMSMVFTHFKDLTLGLLPNFHGRIRVIDSIIGFLPWVLLLPFRGLAQLIVFNKITREFGGRFKAGISGGGSLPAKVDLFFNSIGIRLQEGYGLTETAPLVTVRQYKHSRRGTIGQVLPNTQVKIIDTKGKVMPPGRNGIIYVKGDQVMKGYYEKPEATAAVLSEDGWFNTGDIGMLTHDNEIRITGRAKDTIVLRGGENVEPVPIECKLRESPYIQHCMVAGQDPKYLAAIIIPWQQSIRDFCEEIPIPHVDYELLLQQPENINLNPSGISERV

SEQ ID NO: 86110 - protein, 560 aa, Unknown
  Obtained from environmental sample
  DOMAIN (108)...(131): 4Fe-4S binding domain
  misc_feature (1)..(560): Xaa is any amino acid
LYRGTSAWASCGICIVRIAGGAKMVRACTTPVDGGLEGKEIITHDAEIIATRRVVLELILSNHPNDCLQCPRNGNCELQTLAAEFGIRESPYKKVTNGIPVDDSNPAIILNPEKCVRCGRCVKVCQEVQNVWALEFLGRGIKGKIASAADAPLGESPCIKCGQCAAHCPVGAIYERDDTVKVWTALHNPDLHTVVQIAPAVRVALAEEFGLEPGTVFTKKIYAALRRLGFKTVFDTNFSADLTIMEEGSELVKRLGEKGSAIPLITSCCPAWVDYMEKYYADMIPNFSTAKSPQQMMGAMIKAYWAGKAGVDPAKIYSVSVMPCTAKKWETQRNDDMKSAGSGWDVDISITTRELARMIKQAGIEILKLADEEADSPLGPYTGAGTIFGATGGVMEAAVRSAYFLVTKKELADVNFKPVRGLEGIKEAEVDFQNGTKIRIAVAHQMGNIAVVLDKIREARKQGKETPYHFVEVMACRGGCIGGGGQPYGCTDDIRKLRTTGIYNDDERSQYRCSHQNPFITQVYKEFLGEPNGHKAHELLHTKYGNGSVLKYLFVENSAI

SEQ ID NO: 86111 - protein, 110 aa, Unknown
  Obtained from environmental sample
  misc_feature (1)..(110): Xaa is any amino acid
DPGFSTIYDAVLLAERSGAQMLIILSNIEKVYTADPRTTKNARPIDKITWADFRAMVGDEWVPGKNVPFDPVASRHAEKIGLKVICAAGKNLDNLKKILKNEDFTGTTIY

SEQ ID NO: 86112 - protein, 336 aa, Unknown
  Obtained from environmental sample
  misc_feature (1)..(336): Xaa is any amino acid
SCEESGPLKFCKHSGGTKGNTDYFDVWDNIMSFQQQPTAAEMLDILPKTSTLLERIINSSTNPGDLVFDCFMGSGTTQAVAMRLGRRFIGADINLGAIQTTTKRLISLAAELNKQQLQQPHQQLLPFPTPTDRNVDTTEYHYLQAAEQSNNPSVDNSDDLNILDSVDTDSIGYVPTRDKNTSASASASASDFGQQQLYTGFEVYNVNNYDFFRNPVEARQLIIDMYSIQSFGAGNVYDGELDGRMVKIMPVNRIATPADLEELKANLPYKTFERRREENPNLPVEKITIICMGHTPDLRGSLELDLGGSGYKVDVEVLDILRDHERQFKRESEAEI

SEQ ID NO: 86113 - protein, 87 aa, Unknown
  Obtained from environmental sample
  misc_feature (1)..(87): Xaa is any amino acid
MADAALGTEGTSSRMFSFFRESVPAVAVIIIVVMLILPLPTVLLDALMAMNLMLSLLILLIVLYTQKPTEFSLFPTMLLVATVFSLA

SEQ ID NO: 86114 - protein, 80 aa, Unknown
  Obtained from environmental sample
  DOMAIN (1)...(70): Bacterial export proteins, family 3
  misc_feature (1)..(80): Xaa is any amino acid
MAEGSASVLIIAAPLLISALVIGLVVAILQATTSIQEQTLVFVPKVIVILLVLALLGGWMFTSLGQYTTELFRKIPDMAR

SEQ ID NO: 86115 - protein, 251 aa, Unknown
  Obtained from environmental sample
  DOMAIN (8)...(249): Bacterial export proteins, family 1
  misc_feature (1)..(251): Xaa is any amino acid
MVDNAVLQNILLFGPVFLLIAARALAMIEVAPLLSSESIPQVVKISLAGLAAFAVLPTAEVFMAANSPSGLVTLPGGTISDLRSETFSLRFFLLIIGEGIIGLIIGFFMMIIFSAFSTAGQFFSLQMGFGASETFDPLSQIENPLMGQYLNLVSMLVFVTIGGFHQLFLGGFWRSVQTINIISLVEGRETVVTMIVSGLSRLFMDAMVISLPILGTLFLTSLTTGLISKAAPQNNIPFRRFPYFIFSWRCP

SEQ ID NO: 86116 - protein, 650 aa, Unknown
  Obtained from environmental sample
  DOMAIN (409)...(491): Helicase conserved C-terminal domain
  misc_feature (1)..(650): Xaa is any amino acid
IIAERQRLLANGTFEWEVHLSAEFYAEIREMYPESVKPFRMMPFPVQIIGGLILHEGAIAEMATGEGKTLAAACPVYLNALSGDGVHIVTVNDYLAGRDAKNMGRVYKFLGLKVGLIIHGLDNDQRRESYNSDVIYGTNNEFGFDYLRDNMAVHKEDLVQRVLNYCIVDEVDSILIDEARTPLIISGAAEDATDKYRKANDLVNRLKRDDDYTIDEKHKNVQLTEKGVTHIESIMGIKGLYGEHSDWVHYILQAVKAHNVFVKDVDYIVRDGEIVIVDENTGRLMEGRRYSEGIHQSIEAKENVQIRRENQTLATITFQNLFRMYKKLSGMTGTAETEATEFLKIYNMPTWVIPTHKPCIRNDMQDQIYKTADAKWKAIIADITERHEKGQPILVGTISVEKSEKLSKMLRIANIPHDVLNAKNHGREAEIIQYAGHKGKVTVATNMAGRGTDIALGPGVVELGGLHVLGTERHESRRIDNQLRGRSGRQGDPGSSQYYLSLDDDLMRIFGGENVKKIMDRFGFKDDDVIEHPWVTKSVRNAQRRIEGQNFDARKHLLDYDNVMNEQRRVIYSLRRSILMGEEIKTEISNRIEDAADIKVSKYVTPNSYPETWDMDGLENDLKMSMGIEYKPGPEKLTGMTAEQAGQSIM

SEQ ID NO: 86117 - protein, 59 aa, Unknown
  Obtained from environmental sample
  misc_feature (1)..(59): Xaa is any amino acid
MDICCFNRPFDDLSQDRIYLEAEAVLSIISHCEKGKWVLVSSGVIDFELSRIPDILVPI

SEQ ID NO: 86118 - protein, 230 aa, Unknown
  Obtained from environmental sample
  DOMAIN (132)...(227): SpoU rRNA Methylase family
  misc_feature (1)..(230): Xaa is any amino acid
MRIITYGVPMIPLHKLTQLPRSQRLRKAANLVRGAERHFVFFGRLEAGETEYLEKLVILLTEDEAFPSAALEALKTARKNLADCKTDEKGIRRALNTVHQVLLAETGRYQADWDFFEPAGALDPLKRHTFPGLQLYLEDIRSPFNVGSMFRAADSFGAEKIWLSPLCASPQHKRALRTAMGCVDVVPWEFLPMIHLTIILPCQFFRGPFLHWKPGGTLLADFRLPSPGIL

SEQ ID NO: 86119 - protein, 189 aa, Unknown
  Obtained from environmental sample
  misc_feature (1)..(189): Xaa is any amino acid
MLPIICFISITLLFLDFTGTVHTYLGWVAKMQFVPAVFASNVVIALSIVFLTLLFGRFYCAMLCPLGIFQDIVSFKTRFYYKKPRKRFIILRYVLLAGFVATAFVGGGLVSVLEPYSAYGRIVSQIFGPIYKFGNNLLAYFSEHIGSYAFYSVDVWVKSLTSFVLAILTLVGVSILHTKRPRILHTIAP

SEQ ID NO: 86120 - protein, 551 aa, Unknown
  Obtained from environmental sample
  DOMAIN (76)...(145): HAMP domain
  misc_feature (1)..(551): Xaa is any amino acid
VSKVTDDFIDTLEAFAKRAKNYSPEGVCLDPLPDGLTKVGSQALADLDAVKDYMTKQTRDLADVAASNASSSESQATVILVIVILIAIALGIYLTMSITSPLSRTVGTLGKIEKGDMTVRVNLERGDEFGQLSKSVDNVASRLQSIMKDLHVESDSLATSAEELSVISRQLVTNSEETAGKSKTVLGVTEDASKGVTSIASTAEQASAQINDVASAVEQMTVNINTMASGAEEASANINDVANAVEQVALNINAMASAAEEASVNANEVAGAAEQMSANMNTVAAAVEEMSASIKEISHTAGDASKVAGEATIKSKDATEAMNKLGIAAKEIGQVTDVIKKIADKTNLLALNATIEAASAGEAGKGFAVVANEIKELANQSAQSADDIARRIEGIQSGTSEAVTVINDVSQIIVKINQAAESISNHVAQQTKASNEIASNVAQANTGAKRVAGAIGEVAKGSKDIAQNAGQASSNAKHVSESIGEVAKGSKDMPDNAGEAAKGTADASRNVAEVNKLANDSTSGAHQVDKYAGELAKVAGSLKGVVNQFRV

SEQ ID NO: 86121 - protein, 93 aa, Unknown
  Obtained from environmental sample
  DOMAIN (4)...(93): PEP-utilising enzyme, N-terminal
  misc_feature (1)..(93): Xaa is any amino acid
MITLQGTGASAGIAIGRIVFHEKANLKIEKKPVTDVAGEIERFFDARLVAIEELDELAITMVEKIGEENAMLFEIHRMMLEDTDFTDPISRPI

SEQ ID NO: 86122 - protein, 722 aa, Unknown
  Obtained from environmental sample
  DOMAIN (586)...(687): Glycine radical
  misc_feature (1)..(722): Xaa is any amino acid
MLKSIIKRDGVKQPFHEAKITDAIYKCLEASGNPDRHLAMKLSMDVIDKIKQHYTEDNFTVENVQDLVEDVLGEKGFQKEAKSYILYRANRSRIRDARSELMNDVSEILQETNRDNAHVSNSPSAKVLQISEAASKNYYLKRVIPEKEARAHIEGDIYIHDLSWYGKTMTCLQIPLDKLLREGFNNGHGYIRPPKGIKTAASLAAIILQSNQNDMHGGQSFAYFDRDMAAYVEIEKKRQEKQIRGNLKELGLSELVNEEKIKALVYGLTKEETFQAMEGFIYNLNTMHSRAGAQVPFSSINLGTDTSDAGRMVTECFLLAYEKGLGRGESPLFPNVCFKLKEDVNFEEGDPNYDLFQLSMRVACKRLFPAYSFQDSSFNKPYRDEEVAYMGCRTRVMSNCNGAEVTNSRGNLSFTTINLPRLGIRAERDLALFWKLLDEVIDLTIEQLITRYNVQKNLKVRDFPFLMGQKLYLDSEELSANDTIEKAIRHGTLSIGFIGLAECLTALIGRHHGEGADAQALGLAIVSHMRRRCDEATKKHKLNFSLLATPAEQLSGKFTKLDVKQYGIIPGVTDKEWYTNSFHVPVEYQITAQEKIEKEGVYHKYCNAGHISYVELAAAPEDNIEAYESLIKAMAEADMGYAAINFPIDICHDCGLNGVIPGDTCPKCGGKDITRVRRITGYPFYDDRFYNSKLAEVKNPKIHINLTRRGMRIAGFEEESIA

SEQ ID NO: 86123 - protein, 305 aa, Unknown
  Obtained from environmental sample
  misc_feature (1)..(305): Xaa is any amino acid
VGGLTRIAEPIGLVAAVIPTTNPTSTAIFKSLICLKTRNGIIISPHPRAKGSTCAAAKVVLDAAVAAGAPAGIIGWIDEPSLEMTNTVMKEADIILATGGPAMVKSAYSSGKPAVGVGSGNVPAIIDDSADIILAVNSIIHSKTFDNGMICASEQSVIALQGVYDKVKAEFKRRGCYFLNAEETEKVRKAIIVKGALNAKIVGQKAAKIAEIAGVTVPEETKILIGEVESVDLSEEFAHEKLSPVLAMYKAKDFDDAVDKADHLIKDGGYGHTSSVYLNPITASDKLNAFSSRMKTCRIVLNTPS

SEQ ID NO: 86124 - protein, 321 aa, Unknown
  Obtained from environmental sample
  misc_feature (1)..(321): Xaa is any amino acid
KFGNNVTTGLAQGLHTITITATDYAGQKDIQRFTFTKDTTPPEITLTNLTGEGTPSIEEANASIKLSIYDKYSTIGSKDTVTGSPTQNQYYFTYRIYPSAARNGFDVNVASAKYLLGTNEPGQSITPNINLTGSSTFWPSGLTALPDGLWKVDIEVYDRAGNTSGVVTQEFRVNRAAPKLNVTTTALTDYNGQTPLNNTAVFGVTITVEDGDLNTVDIQVGKLNTPTLTSITKGTYTGSTNQWTVTPTPWTISEALFRQLDDGPNTITVTATDDGPRSATPWTFNFNKDLNPPSISINNWTSPKQISKSDWDAAGSNTSSC

SEQ ID NO: 86125 - protein, 309 aa, Unknown
  Obtained from environmental sample
  DOMAIN (49)...(258): ATPase family associated with various cellular activities (AAA)
  misc_feature (1)..(309): Xaa is any amino acid
ALRRNAKVPRPEKALERRVVGQDQALAAVADAIRRNKAGLSDAAKPFGSFLFLGPTGVGKTELAKTLADFLFNDEKALARIDMSEYGEKHSVSRLIGAPPGYVGYEQGGQLTEVVRRRPYSVVLFDEIEKAHPEVFNVFLQILDDGRLTDGQGRIVDFKNVIIIMTSNIGSDLILEEENTGAIRDSLLELLKRNFRPEFLNRIDETVIFNRLGKNEIGRIVDIQLDRLTRRLAERKITLNTSDAAKEFLAERGYDPMYGARPLKRAIQAELENPLAKLVISGKIREGNVVTADKSGDRLVFIHTRPNLT

SEQ ID NO: 86126 - protein, 485 aa, Unknown
  Obtained from environmental sample
  DOMAIN (306)...(398): Helicase associated domain (HA2)
  misc_feature (1)..(485): Xaa is any amino acid
MTDGMLLQELKLDPWLSKYNVIVVDEAHERSLNIDFTLGLLKRVLESRRDFKVIISSATINAEVFCEYFGGCPVVKIDAQRFPVTLIYDPPVVADIDANGKAAGSDTAMEALLWKIEKIVTRFIGEKREGDILVFLSGEKAIKDCMNRLALCRVGGKLHLLPLYGRLGKEEQERVFETAPKGKTKVVLSTNIAETSVTIEGITAVIDSGLSKLNWYNPNTYTSSLVEAPISKASANQRKGRAGRTCEGNCYRLYARGDFEERPQFTTEEIFRTDLSEVILRMSDLGITDFENFDFISTPGRDGLVAGIETLNLLHALESDRSLSNIGKMMTEFPLAPRQSRIIVEAILNYPKVLRETLIAAAFLSTQSPHILPPGEEIEARKAHSRFRDDHGDFVSYLKIFKAYCDSSNKAKFCERNYLDEKAMAEIVNVVAQLEEILANLKIPVLEGGHVEDYLYCISMGMIQFVCVREGSKHGHVKKASPTAA

SEQ ID NO: 86127 - protein, 84 aa, Unknown
  Obtained from environmental sample
  misc_feature (1)..(84): Xaa is any amino acid
MFLTVCLNPTLQKTLRFPSIYPGTVNRTGVHRLDASGKGINVTRVLTQLGQKAVHLTQLGGELRPLFLSLCEQGRSFPCMGRER

SEQ ID NO: 86128 - protein, 843 aa, Unknown
  Obtained from environmental sample
  DOMAIN (648)...(676): The GLUG motif
  misc_feature (1)..(843): Xaa is any amino acid
GLWTEPDEAGSYTVTVSALGYASKTSEAVTVSNGSADAPFLVANEADLRKVGTGTDGWTLSAHYRQIANIAMTTGSFTTIGDNTNRFTGVYDGNGYAITGLTVTAATYNQGLFGVIDADGTVKNVNLSGTITQSGDNNGVGTGGIAGLNYGTVDNCVFSGTVSGLTSNQVGGIVGSNQSTGIVKNSGNNAEVNGRNNTGGIVGLNQGGTIENCYNTGDVIGVSTVGGITNNSSGGTVINSRNTATVTGNTNVGGIAGINQAKIDNCYNTGTINAAEQAGGIAGGNTGSGVYIKNSYYTGNVTSSDSSTSAGGIAAVNQSGATVEFCYNTGNVTGTTNAGGIVGSSSSGTTVQNCVSLGVKVTGASVGRVAGSIGGSPVSGNLARIDMKTGASGSEALVTTGAAGNKEGANVSLGTALSTVFNTNWLSSLWNIPTGDLTTGDNLPTLKPNTQTPAPTLPAAYNAPGTAENPFLVTNEAELRKVGTGTDGWTLSAHYRQTQNITLTNNLSVIGTNINKFTGSYDGNEKTISGLTMTRTSVSYFGLFGYIGSDGIVKNVTVTNGSITGTASSYFGGIAGQNEGTIENCSFSGTVNGDTTSDDVGGIVGRNTGTIINSRNTATVSGRTRVGGIAGENQGKIDNSYNTGAITGSQQVGGISGGNSGSGNYIKNCYNTGNVISTTATTTSNAGGIVGQSSALVEYCYNTGNVSGTGGVGGIVGYTNTGSAIQNCVSLGARVTGNGTSNGRIAGTNSSTVTGNLARIDMKVGISGSEALVTTGAAGNNAGANVSLGTSLSTVFNTGWLSTLWTIPYRHLTISGYLPTLQTNTQSPAPTLPAGVHGTRHGG

SEQ ID NO: 86129 - protein, 245 aa, Unknown
  Obtained from environmental sample
  DOMAIN (8)...(31): 4Fe-4S binding domain
  misc_feature (1)..(245): Xaa is any amino acid
MSAAKAPVYTELAECHDCYKCIRKCPVKSIKVAKGQASILFDRCIYCGRCVTSCPAHAKQYRNDVEKVKLLLADGRKTAVSLAPSFVSEFTDWKPEELIAALKKLGFAIVSETALGADFLSAHNAHDLASGAAMHAASGKPPSIKLMISSACPVIVDYIKLYNPRLAPYISPHASPLLTHARFLRSAYGGESRAEIAVVFIGPCIAKKHEADLYSEEIDAAIYLCGTARVAAQREHNAPNNFGFP

SEQ ID NO: 86130 - protein, 308 aa, Unknown
  Obtained from environmental sample
  misc_feature (1)..(308): Xaa is any amino acid
MMRARSPKLALHVAVSPFSPKPNTPFQWEGMEPIDVLDGKGRFIKGCLRDKKNVKVSYRDGRMAFLETVMARGDRRLGEVILAAWRAGARFDGWDEMFNLNLWTEAARTVGVDLERYTKPIDIEEILPWSAVSVGVDVDFLKRERERAFKEEPTPDCRTGGCVNCGACDGRVSTRLCVDADKSVSMKKSSDVSTNISTDVSMEKSSTVSTSVSTDVSTESSYGRKPRAAKDQTPSIQTKYRFFYEKMTRLRFLGHMDMVAVFHRAMAAAGFPLAFSQGFNPHPKVSFGPPLPFGFTGQNEASTRARPI

SEQ ID NO: 86131 - protein, 98 aa, Unknown
  Obtained from environmental sample
  misc_feature (1)..(98): Xaa is any amino acid
VEQAAKPQRIEPIEIEKEMRKSYLDYAMSVIVGRALPDVRDGLKPVHRRVLYAMKETGHDWNRAYKKSARTVGEVMGNITRTAMPHLRPIGRMAHPFS

SEQ ID NO: 86132 - protein, 183 aa, Unknown
  Obtained from environmental sample
  misc_feature (1)..(183): Xaa is any amino acid
MMTFASSNGKKKCITLERMPDHVTKKVNVYGGLKIISKTEHAIPIQARLYTNLSIEEKTKLRAEAVLLCPSIVKSGRSKNKYDAAVLYLLTYHGVICHQARDLFSAGSVANPENDDEGGIYIERALKLIEKEIIQASMIMDDALFIEYWGESVPPEQRTKKWLEKADALAHDWIPSKSLFLEE

SEQ ID NO: 86133 - protein, 523 aa, Unknown
  Obtained from environmental sample
  DOMAIN (409)...(523): ABC transporter
  misc_feature (1)..(523): Xaa is any amino acid
MSDNRNSPGRVTGIRSPGLSRGGPGGMFAAMGAKAKDFKGTMRQLASYLKPFRLTIIVVWVLALVSTAFTIVGPWIMGMVTDELVTGISRQMSGVGIIDFGRIASILIMLLSLYLISALCSWLQGFLMTKVSVKVTYTLREDINKKLHLLPFSYFDNVTHGEVLSRLTNDVDTVNQTLTMSLTQIITSVSSVLGILCIMFSVSWILTLIAICFLSLSIIFITLIVKQSQKFFKAQQKCLGNVNGHIEEMFSSHIVVKAFCGEADSVKTFDSLNHNLYQSAWKANFLSGLMMPITAFVGNLTYVVICAAGGLFVLGGMITIGGIQAFLQYIRSFNHPLTNIANISNILQQTAAAAERVFEFLAETEETPDPITALPPPSHRSPVVFDHVRFGYDPAKPVIGDFSARIEPGQKIAIVGPTGAGKTTIVKLLMRFYDVTGGSISIGGEDIRAFKRQDLRSLFGMVLQDTWLFSGTIADNIRYSRTEASDAETEEAAKAAQVDHFVRTLPGGYGMVLNEESDNILPS

SEQ ID NO: 86134 - protein, 224 aa, Unknown
  Obtained from environmental sample
  DOMAIN (8)...(192): ABC transporter
  misc_feature (1)..(224): Xaa is any amino acid
ISFIAESGQTTAIIGATVQEKSTIVNLIMRFYDVTEGSIAVNGVDVRALSQKELRGGIGYVPQKSILLSGPVSFNLRYGKTDASDAEIREGAEIAQIIDFIEEKPEGFESSIAQGGANVSGGQKQRLSIARALVRGPQLLIFDDSFSCLDFATDARLRQALEEKRKSVTKIIVAQRVGTIMHAEKIIVLEEGRIAGMGKHQELMETCAEYREIAESQFSQEAAL

SEQ ID NO: 86135 - protein, 264 aa, Unknown
  Obtained from environmental sample
  misc_feature (1)..(264): Xaa is any amino acid
MAGVHDVTVNYATGETLVTYDAAEISFEEITAAVKKLGYRTLDGKSENTVTQIIGTLVIILALFMLMRAFGTSDLAASFPLAQAGMGYGMLLVIGILTSVHCIAMCGGINLSQTLRKSGETEPASTFSLLLPGILYNAGRLVSYTLVGGLVGALGSVITVSGRFQGAVQLAAGVFMVIMGLNMLDLFPALRRLNLRMPKVFAAKVDEQKIGRGPVVVGFLNGLMPCGPLQAMQLYALSTGSPIRGGISMFLFCAGTIPRPNLTL

SEQ ID NO: 86136 - protein, 165 aa, Unknown
  Obtained from environmental sample
  misc_feature (1)..(165): Xaa is any amino acid
MNKREWLARWLADETLEKTPLGFWFHFAQDELADAFREDGSVDRKIIENNIEGHKKFFNEFQPDMMKIMTDGFFIYPNREFREAMTPQDLWKVKPIGENHPWIEEQVSYAKTLAGAFRQNILLFYNIFSPSTTFKFVRLGNQEFLPRNIDPETLLANLFYKTGEP

SEQ ID NO: 86137 - protein, 160 aa, Unknown
  Obtained from environmental sample
  misc_feature (1)..(160): Xaa is any amino acid
DNKFVALGYDYDENCKIAVSKDGVTWTAVKDSPFGAASIKAIAFGNGKFVAANIKGEMATSTDGLKWTAVDASGFFSIMAIAFGNGMFVAPCISADEETRTINGIIATSKDGKNWTAVSDNTFIDNTIFNEDNIDIVSAIAFGKDKFVAGTYKGKMAYIK

SEQ ID NO: 86138 - protein, 274 aa, Unknown
  Obtained from environmental sample
  DOMAIN (25)...(260): Glucosamine-6-phosphate isomerases/6-phosphogluconolactonase
  misc_feature (1)..(274): Xaa is any amino acid
MRLLIHKSYENTNPLAWDYENASSWVANYIIKRINAFAPGPGKPFVLGLPTGSSPLGIYRKLIAANRNGKVSFSNVITFNMDEYLGLPADHPQSYKRFMKDNFFDAIDIKGENTHILDGMAPDPEAECRAYEEAIKAVGGIELFLGGTGNNGHIAFNEPGSSFSSRTRVVTLTDDTRKANARFFDNDPAKVPERALTVGIGTVMDAREVLVIVSGRQKAKALQAVVEGNVSEQCPLSCLKTHEKAIIVCDEEAAEELKFGTVRHFQEIEKAEIK

SEQ ID NO: 86139 - protein, 532 aa, Unknown
  Obtained from environmental sample
  DOMAIN (1)...(113): MGS-like domain
  misc_feature (1)..(532): Xaa is any amino acid
LDLAAFLAETGWEIISTGGTSKYLKENKIPVTDISFVTGFPECLDGRVKTLHPMVHAGILAKRDEASHMNTLKSLGIETIDLVCVNLYPFFEKVQDGLSQEETIEFIDIGGPSMLRSAAKNFRDVIVLIDTTDYAEVMEGIKAGEVSSETRKRLAGKVFALTSAYDAAIARYLLEPEKQNTDYPAFLPLPLRKAQSLRYGENSHQSAALYLNTDRPGALAGIQQLHGKELGYNNIRDLDLAWKAACAFGLPAKKIAPMGEDEVKCLVPLAAESTAGKVCCVAVKHSTPCGIALGDTPIEAYEKTFAYDPVSIYGGIVACNSQVDEKTASKLGELFLEIVIAPDFESGALEILKKKKNLRIMKAGYAPRDTKEYVSVDGGLLVQDTDKLLLEKWEVATRLAPAAEDIPDLIFGLRAVTFVKSNAILVVKKLAAAGIGGGQVNRIWPTTQALERSAAAIKAAAEKGGPWADGQCARVLASDAFLPFADVVEAAAAAGIKAIIQPGGSINDKLSIEACDRLGLAMVFTGTRHFKH

SEQ ID NO: 86140 - protein, 132 aa, Unknown
  Obtained from environmental sample
  misc_feature (1)..(132): Xaa is any amino acid
LKPEESKNLRNIALRLRYDLLEMIGVGVAGHLGGSSSLAELAAYLYFYRMNFDAQRLPDPDRDRLVLSKGHAALIQYAALCEKGCFPREELKRVKKIDGLLQGHPDLTIPGIEAVTGSSGRDYPSRWAWRWL

SEQ ID NO: 86141 - protein, 463 aa, Unknown
  Obtained from environmental sample
  misc_feature (1)..(463): Xaa is any amino acid
VGCRWRAVGSPLLLTRKPYGSLEVTKPDKHHRADAGRCENGELVACFDVVLDKNGNLESYRSINEKDSATGLKLYAYAETALPSPWFNNQTYVNTLDKESIQEFIRITHDVYKERFGKDFGGIIPAIFTDEPQFTRMGTLNFAREEKDITLPWTFDIEDTFKAAYNGESLISALPELLWDFPEGRVSKVRYHYHDHVAERFTSAFADQCGDWCDKHGIMLTGHMMEEPTLESQTAALGDAMRSYRSFRLPGIDMLCDRREYTTAKQAQSAARQMGVPGTLSEIYGVTNWNFDFRGHKLQGDWQAALGVTVRAPHLSWVSMNGEAKRDYPSTFNYQSPWFEEYPYVENHFARVASVLTRGKAICRLGVIHPIESYWLHWGTREKTAAIREEMDEQFLHLCDWLLKGLIDFDYICESTLPKYCKLEGISEKGFPVREMNYDAVVVPALETIGESTFERLEAFRKR

SEQ ID NO: 86142 - protein, 282 aa, Unknown
  Obtained from environmental sample
  DOMAIN (193)...(281): Histidine kinase-, DNA gyrase B-, and HSP90-like ATPase
  misc_feature (1)..(282): Xaa is any amino acid
MENISKFEWINWKGESVVGYFKTLSNGWRLGLFAQKKIYYEPVYQMAFILGILGFVLASVLIIVLIHVDAARVKSDIENRHKSAFLANMSHEIRTPMNAIIGMTMIGKTASSTERKDYCLTKIQDASNHLLGVINDILDMSKIEANKFELTPAEFDLEKMLRRVVNVINFRIEEKHQKLSVHIDRAIPRILIGDDQRIAQVITNLLWNAIKFTPDKGSVSLSTRLAGIGSDICTLQISVSDTGIGITPEQQAKLFNLLNRLNPAQPVNTAVRDLDSLFPKAL

SEQ ID NO: 86143 - protein, 124 aa, Unknown
  Obtained from environmental sample
  DOMAIN (88)...(121): Rubredoxin
  misc_feature (1)..(124): Xaa is any amino acid
WIYGRGKNTDKFADSDEVLRTENGIRYVSKWTNGVISAEVKESIDCGTHTLFIAEVNQAFSLSRDASVTYQYYFDNIKPKPQPPKGNKKGFVCKICGYVHEGDTLPDDFICPLCKHGAKDFERI

SEQ ID NO: 86144 - protein, 596 aa, Unknown
  Obtained from environmental sample
  DOMAIN (26)...(160): Histidine kinase-, DNA gyrase B-, and HSP90-like ATPase
  misc_feature (1)..(596): Xaa is any amino acid
MESDMPGNSRIAILPPEEALRIAAGEVIDRPAALVREFLDNAIDAGSLNIEISIEEGGCKKVEVSDDGGGMTREDLAICSLTHATSKIKCLDDLNTANTLGFRGEALAAACAVARLEIISSVDGREAWRLATGPGETRAPEIEQTHRTKGSTVRALNLYETIPARKRFLKREGSEATLCRQVFIEKALAFNNINFRYVQDGELKDFLPAVKTKKERFAAVLQTGEENFLHEINVTGDGFFATVVIGGPELYRNDRRQLFVFANGRRVQDYSLIQAVEYGSQGWFPNGTHPVSAVYVEIDPSLADFNIHPAKREVRFRNSGSIHQAISGGVKNFFHSLYLKNSRKDNESAAGDEQTEKDNFLFLNNNFVSKHSPEEHDNISNNNFASHTEGTARLCESSFSYSSQNEKSSSSVSTPAYGDMRYAGRIFDLFILMEWGDKLYIIDQHAAHERILYNKFLREPIPKQELLAPITFTTESDEEDAFLSANSGELSRLGVEIKKDADTWSIEALPADWRMGDSQTVKEILELRQAGENMAKRWAATCCCRAAIKDGDILGDETAFELGREALLLPDPRCPHGRPVWTEISREALFKAVRRE

SEQ ID NO: 86145 - protein, 93 aa, Unknown
  Obtained from environmental sample
  misc_feature (1)..(93): Xaa is any amino acid
MRLEGKTALISGAAQGLGAAMARRFAEEGARVFLGDLKTEAGNAVVAEICGKGGKAAFLSLDVTNEQSWVDAMAAVRQEAGRLDILGTTPRPI

SEQ ID NO: 86146 - protein, 333 aa, Unknown
  Obtained from environmental sample
  DOMAIN (202)...(323): Transketolase, C-terminal domain
  misc_feature (1)..(333): Xaa is any amino acid
MAETITGHPRVGHGKGGDVIMERKMMSLRKAYGETLVELGRENHNIVALEADLGKSTMSCLFKEAFPERYFEMGIAEQNMASVAAGLALAGKMPFYSTFAVFASGRAYDQIRCSISIPQANVRICGSSCGLSDFGDGKTHQSVEDANILCAMPNMTILNPVDAVETAKMMKALTSYRGPAYIRINRNDLPVFTPESGDYQIGKIYPITEGDDAAVFATGVMVSKSIEAAEKLKAEGIAVQVLNVSTLKPLSKEEVLKFARGKKAIITAEESVKSGGLGSAIASLLFGELNAAFAQVAINDQFGVSAHSYEELLVKFGLSAKDVYNAVKTTLGK

SEQ ID NO: 86147 - protein, 552 aa, Unknown
  Obtained from environmental sample
  DOMAIN (242)...(456): Methyl-accepting chemotaxis protein (MCP) signaling domain
  misc_feature (1)..(552): Xaa is any amino acid
GCCGAHGTVTAHFDPSRIGKDLRETEADMTGKYINDFVDAIKTGKFFTFSNHIAALKTDLKIFLIPITVGSTKTSWSYAVGIMRNTIMAPVYQMLTIAIAISVAVLGLLVLASMFLSRSISKPIVKVAVTLKDISEGEGDLTKRIAIKSSDEIGDLGRCYNLTMEKIRNLVGTIKYKINGLNHTSFELSANMGKTSTAVQQISSHLDNMKNLMVKQESGATEAGKAVGEIKVNIDSLKKMIEEQTDSVNKSSSAIEEMTANINSVTRTLAENSKNVAKLTEASENGKTGVQTVAQEIQEIARDSEGLLEINSLMDNIASQTNLLSMNAAIEAAHAGEAGRGFAVVADEIRKLAESSSRQSRTTATMLKKIKASIDNITKSSNDVLTRFGAIDSGVKTVSQHEQNILNAMEEQETGGKQILDSISRLRDITYSVKKGSDGMAESGNSLVKETNEFIKTSKETVDGMNEVLKGINQINISVTHVNDMSLENKNNFDALKQETDKFKDTVVDGKKKILIIDDDTIHLEMVRTRVVKRPYDVTTLDAEFLSHEIFP

SEQ ID NO: 86148 - protein, 186 aa, Unknown
  Obtained from environmental sample
  DOMAIN (48)...(186): RNA pseudouridylate synthase
  misc_feature (1)..(186): Xaa is any amino acid
VNGEPALKNGLTLKVGDVLECDLPDLVPPAAHMEPEDLALPTLFEDDRLWIINKPAGMVVHPGPGHRSGTVLNALLTRLGRSAPVGERCEDDEEGEGEAETAKGWPGLVHRLDRYTSGCLAMAKDEEAKSFLQAQFKARTVEKTYLALARHSRRLPELGSLLVDAPIARHRHDRTKMAIQSSGRSA

SEQ ID NO: 86149 - protein, 84 aa, Unknown
  Obtained from environmental sample
  misc_feature (1)..(84): Xaa is any amino acid
ALVRIGREIVGYIKAMSKNFSVFGVTKDTSLYAMLLKEKYHYSWWDSLVLASALENDCQIVYSEDMQHKQIIENSLKIINPFLE

SEQ ID NO: 86150 - protein, 326 aa, Unknown
  Obtained from environmental sample
  DOMAIN (99)...(203): Shikimate / quinate 5-dehydrogenase
  misc_feature (1)..(326): Xaa is any amino acid
MKKSFGLLGEKLGHSFSPLIHRQLGEYDYPLYEVSPDKLDSFMTEKRFDGINITIPYKQTVIPYCTTLSDEARMIGSVNTIVKDDDGALHGYNTDHHGFRMMLERGGIKASGKKVLVLGDGGAARTVRAVLAALGACEIVTISRRGENHYGNIERHYDAEVIVNTTPVGMYPDNSNSPLRLTGFRQLTGVADLVYNPTRTMLLLEAERLGIPCVNGLTMLVAQAEMASRLFLSTSARPELVDRIAALIIKETQNIVLIGMPGCGKSTVGRFLAQTMGRPFSDIDKRIEAVAEKGIPQIFAEDGEEKFRQLETRVLGRKRRLGQSVM

SEQ ID NO: 86151 - protein, 159 aa, Unknown
  Obtained from environmental sample
  DOMAIN (35)...(152): Carbamoyl-phosphate synthase L chain, N-terminal domain
  misc_feature (1)..(159): Xaa is any amino acid
MVDTCGGEFEAKTPYFYSIQNGTENEALPFIQKSDKQRIVVLGSGPIRIGQGIEFDYACVHCVWTLKSLGYEVIVINNNPETVSTDFDTADRLYFEPLCVDDVMSIIEIEKPLGVIVAFGGGTAIKLTKKLHEARRYHNRHFGGQHRRLRGQASADLYM

SEQ ID NO: 86152 - protein, 82 aa, Unknown
  Obtained from environmental sample
  misc_feature (1)..(82): Xaa is any amino acid
MNTDNSVMVYIQQHGGKAAEVSLELVSKARELADKLGAEVSAALFGDKVSGEVARLASYGADRVYVMEDPRLNFTRPFPTAS

SEQ ID NO: 86153 - protein, 423 aa, Unknown
  Obtained from environmental sample
  DOMAIN (94)...(145): Clp amino terminal domain
  misc_feature (1)..(423): Xaa is any amino acid
MDYDKFTIKAQEALNEAAGIAQKSDHSQIESEHLLLALLRQENGIVTPIIERIGGDAVRLTSDVEALVNKTPKVYGEAAQVFYSPALSKILAKAEVEASALKDEFVSTEHILIAIAASEGRSADMLKKAGVNKDAILGALKLVRGNARVTDQNPEEKYQALDRYCRDLTALARQEKLDPVIGRDEEIRRCMQVLSRRTKNNPVLIGEPGVGKTAIVEGLARRIVAGDVPDGLKGKKLLALDIGALVAGAKFRGEFEERLKPLFTTFKRKTEKSFFLLMSYIRLWEPEQRKGRPTLPICLSQRLREGNYAVSARLLWTSTENISRRTLRLNGDFSRCIRRNRPWKIQLRFCAALKNGTKYTMECGLKTRHLWRRQHCPAGTLQADFYPTRRLTLLMKPQADLKWNWTAGQRNLINLSVNFYSFR

SEQ ID NO: 86154 - protein, 416 aa, Unknown
  Obtained from environmental sample
  DOMAIN (15)...(325): Homocysteine S-methyltransferase
  misc_feature (1)..(416): Xaa is any amino acid
MSVRETLNAIAAKRILVLDGAMGSMIQNLKLGEEDFRGELFAGHKTPLAGCNDLLCLTRPQAISDIHRLYLEAGADIIETCSFNSTSVSLEDYGIGDLAYEISVAAARIAREVADAFSTGDKPRFVAGSMGPTGKSAGLSPDVNDPAKRNIYWDELEAAYYDNARGLVDGGADILLLETIFDSLNAKAALLAIKRLLNERNIDVPIIISATITGESGRLLSGQSLEAFCASILHAEPWAMGLNCSFGAEKLLPHIRRLSAAAPCFISSHPNAGLPNKLGAYDETPEIMALCIEKYLQGGLLTVIGGLWRHTPRGKWPAMAEKSRPKKGPCPITGKTHLPRNSFILGGLKTRGKPKPPKARNPKNPKTPETPKTQNPFFFWGKNPHTLPEKKKNSRAPLPPGGKNLPGPFFFFPGGL

SEQ ID NO: 86155 - protein, 237 aa, Unknown
  Obtained from environmental sample
  misc_feature (1)..(237): Xaa is any amino acid
VLGGDIASEGAHSSGEDANKAHENISPYEQGLICAALVAFSAEHTDQQLGAFFFDNNIEKVFPPHKGRRHIMSLIMAALRYQNKNPPRKDKHGSNITAALAGAQRLLKKRSLVVVISDFFSVNWEHEMANLCRKHDVIALRVVDPPNLPWKGLITLEDPETGVRLEAPAGMESFKESWLQWHKERSGLWENLCRRAGASFLELTTEADAPSSLLKFFGSRGFGAHGFTRHEAHRYKK

SEQ ID NO: 86156 - protein, 303 aa, Unknown
  Obtained from environmental sample
  misc_feature (1)..(303): Xaa is any amino acid
VLETTDRPRSQLAALAWDDEEAIKKKKSVDKRGPKSDEAYARQVLGSMANSQNILVINDEAHHAWRKNPEIKGKYEGLDKKEEQEATIWVSGLDRIHKARKILTCYDFSATPFAPSGKKNESEALFPWIVSDFGLNDGIESGLVKTPRMVVRDDNTPNARNFRSKLNHIYADETVKDNINQPAESTVPLPDLIIQAYNLLGSDWLETYKKWEKNGMDVPPVMITVANRTETSSRIEHAFKSEKILIKELCDPEYLRRIDSKIMEQAEAGNISVDDISTGDGDDSDGKRKLTKKQESRPFYATL

SEQ ID NO: 86157 - protein, 147 aa, Unknown
  Obtained from environmental sample
  DOMAIN (9)...(147): Fructose-bisphosphate aldolase class-II
  misc_feature (1)..(147): Xaa is any amino acid
MAVSYKDLGLVNTKDMFAKAFKGGYAIPAYNFNNMEQIQAIVTACGKSKSPVIMQVSSGARKYADATLLRYMGQGAVAMAREQGFNIPIALHLDHGDTFELCVQCIESGFSSVMIDGSHHPYDQNVELTKKVVEYAHKYDVTVEGEL

SEQ ID NO: 86158 - protein, 227 aa, Unknown
  Obtained from environmental sample
  misc_feature (1)..(227): Xaa is any amino acid
MIDFLQLQEIVKGHLENDRAIRSVDASGPTLEAAVNEAAGLLDTSIRRLEYEILERGSAGFMGAGKRDWVIRAYERVQAKKAQQERESLVDEDAESIEVIQDKDGDAFVRCWPSGVFLKVVPPVGNGKRVHSAYAMQELHSRGVENYDNNLVEKLIDDAGGMYVKVADFNYNPANDTMANIEVDDAEMKVLATIIPPGEGGADFTVDIFKSLLIQNRVYHGVKREYI

SEQ ID NO: 86159 - protein, 231 aa, Unknown
  Obtained from environmental sample
  misc_feature (1)..(231): Xaa is any amino acid
TDKSDIKATQQNLENLLKAAKNKKENDNLAYNDKTSASSNIHENSYTDETVYTGARYVGRLFGLFILIELGDKLYIIDQHAAHERILYNRFLSQPVPKQELLAPIPFRTDSNDEDNFLEAKRDELKRLGIDIEKDGDAWRIEALPTDWRCGDAETVKEILELRTAGENIAERWAATLCCRAAIKDGDYPDDETAFALGKEALMLPDPRCPHGRPVWTEISREALFKAVRRS

SEQ ID NO: 86160 - protein, 302 aa, Unknown
  Obtained from environmental sample
  misc_feature (1)..(302): Xaa is any amino acid
MTDAEISAYISNNSEDFDAMFPTITATVNDNTLTLGDTTYTKSGGSTGPGTKPGTGGSSGGWTTANVGNSFDFVESDGNTYKANINAIAYGKGKFVAGGWNGKMAYSSDNGVTWTAVSDSTFGTGSYSRINAIAFGNDKFVAGSNGGKMATSNDGVTWTAVTNSTFGTNSIAAIAFGNGKFVAVGSGGKMAWSTDGATWTAVSDSTFDESIKAIAYGNNVFVAGGYGEMAYSSDCITWTAVEDSTFGTFDSDINAIAYGNGKFVAGGNKGKRAYSSDNGVTWTASKTTDYSPFYAIAYGNNK

SEQ ID NO: 86161 - protein, 266 aa, Unknown
  Obtained from environmental sample
  DOMAIN (1)...(117): Transglycosylase
  misc_feature (1)..(266): Xaa is any amino acid
MAMLKAGWETYIKKNRRMGASTITMQLARLRYNLYTRNLPGKIVQIFTALFFEICYSKQEILEAYLNMAPCGGNIEGFSTAAWYYFGKDVKDLSLSEILSLVVIPQNPAKRAPFNRRASSELLDSRKILYEAWIEQRPEDILLETEMDMPPFLVNQFPRRLLHLTEYLNTMSMPRANMPPTNRYRTTIDITLQNMCEREFEFYLTRNRGWGIKNGSLLLVDYSNMEVLAAIGSADYFDDDIQGQVTALLPSVAGSHLTFITHSAGA

SEQ ID NO: 86162 - protein, 533 aa, Unknown
  Obtained from environmental sample
  misc_feature (1)..(533): Xaa is any amino acid
AALPPVQQVGNALQFVPGAFRTEALCLTAVQKNSPDFGMALEYVPESLRNEALCLAAVQEHWGELKFVPEALRSEALCLVAVQQTGNVLRYVPEAQKTEAVCLAAVKNCSWKIGQEYGPTIQYVPEALKTEAVCFSAVVRQARALEYVPEVLKTAARCLIDAEEKPHTLKNVPDALKTEAFCLAAVQQNGGALEYIPEAFKTEAICLAAVQQNGNVLKRVPEAKKTEAICLAAVEQDASALKNVPSALKTEAVCLAAVQQDGDTLQHVSDAKKTETLCLAAVQQNGNALQYVPEAKRTEALCLAAVQQNGDTLQYVPDAKKTESLCLAAVQQKGITLQYVPDAKKTESLCLTAVRKNGYALQYVPEVKKTEALCLTAVKDNGMALEYVPNKLKTEAVCIAAVQESYKVLEYVPNKLKTEVLCLAAVQENGNALQYVPDKLKTEALCFAAVDNNYYALEYVPNEFKTEALYLAAVIKDESAWGYIPEELEDSVEAAFTNAFSTEALCLAAVQKDGNTLKYVPNKRRPSPVHLIM

SEQ ID NO: 86163 - protein, 273 aa, Unknown
  Obtained from environmental sample
  misc_feature (1)..(273): Xaa is any amino acid
MAKLTFKLTRDTLFKILFVKHEDLLKDLVSQILCIDIGTITDFKIDNPNIEPEALGQKFCRLDIKMKVNGQVVNLEVQVKDEDDYPERSLYHWARCYSSALSAGKDYIDLPRTIAINIVDFELFEDTKDFHSEFRALEVTRHTELTDKMSMHYFELKKLPEVAESDAENKLKLWLSFFNAETDEELSKIEKIGGKTMVQAIQAYKSVVVSDEFKEAEIQRQIAEHNEAAALRHERSKTNKEFVLKMHPAGTQRLRISEGVSKKPRTSTVTKNS

SEQ ID NO: 86164 - protein, 508 aa, Unknown
  Obtained from environmental sample
  misc_feature (1)..(508): Xaa is any amino acid
VGDEKQSVYLFRGADVSVFRKLKRDLGGSHLPLKTNYRSAPVLIGAFNTIFGGFKFDPEGKAPESAPAAKGKKSPSVFVTTESQLAKLPPAERTYLPPFEASFTPLHAHKKSGGNLTLCILDKQDSSEIDSSGDLEGSESGRLSPEENEARYVAWRIGELLKEKNETGESKYRPGDIAILFRTRSPQYLFEKHLMLLNIPYASEDLNGFFYGGPVDDLMSVLRLPTYPRDSAAYAQMLRSPFVGLSMQGLAFCAPLVAASAGTSMASIPFSDEPLSRLSEDDRIKYMHGKRIYQKILDIAQKKSISSLVSELWYGEGYRYETEWNPKTAAYRELYDYLFHLAALADEKNQGLAEFTDYIQSLYNADERLSDIEIPLERSSAVRLITIHKSKGLEFPVVFLCCCNKKGQNDFSGDLYHTDDSGLTFTPPLPPEYSDNPNIRRSYFWERSLAVRKEKRIAELRRLLYVGMTRAENELFLSGCLDISKTLGLEKRDQDSASTRPSDPGPKC

SEQ ID NO: 86165 - protein, 90 aa, Unknown
  Obtained from environmental sample
  misc_feature (1)..(90): Xaa is any amino acid
MMAEDLGFDGIIISDDFIMAAAGKTSPEEAAVLSIAAGSDMILVWPDNLRKTHQAIITALENGRLPRDRLQDAVQRVIFEKLRMGLIDGE

SEQ ID NO: 86166 - protein, 369 aa, Unknown
  Obtained from environmental sample
  DOMAIN (212)...(360): Thiamine pyrophosphate enzyme, central domain
  misc_feature (1)..(369): Xaa is any amino acid
MQCTGAQIVIESLIEQGVDIVFGYPGGTVLNIYDELYKHRDRIRHILVSHEQHAAHAADGYARSTGKTGVCIATSGPGATNLITGIATAYMDSIPLVAITGNVPTGILGKDSFQEVDIRGISMPIVKHNWIVKHVENLAEVIREAFELASSGRPGPVLIDIPKDLTALSAEWSPHDGGASKKKKGEIKDLALSARAKRLEERTTRVRFTDEDIAAAAKMIREAGRPLLYAGGGVISSGAEEELVALAEKLNAPVALSLMGIGSIPKDHRLCTGLIGMHGTVASNKAAQKADLLIAIGARFSDRVTSSADTFAKTAKVIHFDIDPAEVGKNIETHAWVIGNLKDTLNALLSKLPARLKPNGPRPLGRSDT

SEQ ID NO: 86167 - protein, 75 aa, Unknown
  Obtained from environmental sample
  misc_feature (1)..(75): Xaa is any amino acid
MARFKDTDNTQGQFIAVNLREQLLPGTFEWTIDYLIDKTDMSLFEERYHNDEKGGCRVPAGGLVEGNTVLYSRGI

SEQ ID NO: 86168 - protein, 120 aa, Unknown
  Obtained from environmental sample
  DOMAIN (2)...(117): Pyridine nucleotide-disulphide oxidoreductase
  misc_feature (1)..(120): Xaa is any amino acid
MKYVIIGNSAAGIGAVEGIRQVDKDGEITVVANEPHHTYSRPLISYLLLGKVTEEKMRYRNDGFYSENRVDMLHAVATGIDTGKQQVILSDDKRVPYNKLLIATGSQPFVPPLTGCSRII

SEQ ID NO: 86169 - protein, 222 aa, Unknown
  Obtained from environmental sample
  DOMAIN (1)...(190): Conserved region in glutamate synthase
  misc_feature (1)..(222): Xaa is any amino acid
VLAKTDWQSETAPAGHSLKEATDYKKPIIVKIAAVHNVAAIASGIARSGADIISIDGFRGGTGAAPTRIRDNVGIPIELALASVDNRLREEGIRDDVSIIVGGSIRSSADIVRAIALGADCVYVATSALLALGCHLCRSCHAGKCNWGIATQAPELVKRLNPDIGYKRLVNLMTAWQHEIKEMMGGMGINSIESLKGNRLMLRGVGLNEKELSILGIKHAGE

SEQ ID NO: 86170 - protein, 66 aa, Unknown
  Obtained from environmental sample
  misc_feature (1)..(66): Xaa is any amino acid
NIDQIGRGFGAGLIYGMLQKMSPQESLEFAVAASCLKHSIEGDFNQVSTDEVKKLASGDASGRVQR

SEQ ID NO: 86171 - protein, 353 aa, Unknown
  Obtained from environmental sample
  DOMAIN (115)...(191): Helicase conserved C-terminal domain
  misc_feature (1)..(353): Xaa is any amino acid
MLAVDEAHCISQWGQDFRPSYTRIPEFIAKLSKRPVVSAFTATATPKVRGDILAQLKLRAPQILIAGFDRKNLYFGARKPKNKYDALSAFLKEREGRSGIVYCGTRSYVEILCKRLRTDGYSVSRYHAGLPDKERHDNQDDFLHDRVKIMIATNAFGMGIDKSNVSFVLHLNMPKDIESYYQEAGRAGRNGEPAECILFYSDRDIRMNAWLLENDKEFLYSDKETGQRLKDRSRERMREMVSYSTAAGCLRGFILKYFGENPPDNCGNCDRCNNVAVTAGVADTAKRGVAKKKSVKAKIADKSVAKKKTVTAEIADKVATNKEAVTAQIADQAGEKKEAVAVKIAEQVIAEKK

SEQ ID NO: 86172 - protein, 609 aa, Unknown
  Obtained from environmental sample
  DOMAIN (422)...(607): TonB dependent receptor
  misc_feature (1)..(609): Xaa is any amino acid
MFTFLHKARKFFPAFILLFTSFFFPNGVKGQEIEEDGELSFYEEEGITVTGTAQITQQMAVIEKDEIERRNAPDIATLLQETLGLNITRYGTYGSMALLNLRGLDTKRLAILIDGVPVNSSMDGKFDIEQIDLNSIERIEVIYGGSDSKFNVSGAMGGVINIVTVKKQPAGLRLGASVSNTSVLPGEYRGRNGQTQGPNWEDLADTQNFDISAAYGGSKISISANVFANRAENHFLFIDRYNYTRRKDNNEVWDAGGSVSVTGELPDLLKLIASSHFYYGDKNVPGSGFSGNVGKQQDIFSRNNVMLDMPRAFRDDLAMEASLGFYFTRRDYTSPADIFSRHEQQNITLINRWNWYTSKQLVLRIGFDYRFIYLDSTDIGNRNRHDGGVYLTAEYKPVQRFMIIPSVKAVFTSEGDTLFTAVPKLGLLWNVTDSLAIKNNYFRSFKFPDFEELYWGDGGNVTGNPDLKPEDGWGGDIGLSWRYKNLFSFESTFFTHWLKDSIHWYSGANGIWRPENVGEAMFFGLDGKLHFEIPVSLGQVKKIIPSISYQYLLSYLLSFGYDFADNKRIPYSPTHTISGSFEIPWESGSVIISGHYESLRYNDRANITQ

SEQ ID NO: 86173 - protein, 144 aa, Unknown
  Obtained from environmental sample
  misc_feature (1)..(144): Xaa is any amino acid
DFRLAKKVATGTLKKAATTVSTPTAATPSPNAAAAAKAAALVGSKAGQTATPTPANVLSRAEVESIVEAKVKAKGSPSNWKVSIVDLMSALDMNSSLAARKTLAAKLNYSGSDADGSAEKNMWLHAELLKVLAQNGGKIPANLL

SEQ ID NO: 86174 - protein, 76 aa, Unknown
  Obtained from environmental sample
  DOMAIN (1)...(75): Flagellar protein FliS
  misc_feature (1)..(76): Xaa is any amino acid
MQKGAQAYLSTHIATTDQGQLLLMLYDGALKFLAQAREKILARDMAGKGVLISRSIDIVNELASSLNMEKGGTRPI

SEQ ID NO: 86175 - protein, 134 aa, Unknown
  Obtained from environmental sample
  misc_feature (1)..(134): Xaa is any amino acid
MNMNRDLINRALLATGQTPLTAEDIREKNSAYELCKAFYLSTFLEALSEVEWVGGRKRAKLVRTGRPVIRNDRYLFAYDMPFDCAKPIELQNNEYFIVEDRLILTDDPELRTQIIPVKKYRLHEAPRSAILSCS

SEQ ID NO: 86176 - protein, 287 aa, Unknown
  Obtained from environmental sample
  DOMAIN (22)...(136): Response regulator receiver domain
  misc_feature (1)..(287): Xaa is any amino acid
ESFWPYREKRGLLAPDINLKNVRILLVDDDPDILAYFLDITQRYGAICETAASGEKALELIDQNGGYHIYFIDWKMPGMDGIQLAHEIKARVPENSIVTMISAVEWSAIAEEAKAAGVDKFLPKPLFPSAIAEIMDECLGIDKQMVEETQSADITGIFAGRCILLAEDVEINREIVQALLEPTKMEIDCAENGVEAVRMFSEAPDKYDLIFMDVQMPEMDGYEATRHIRSLDNPKAKTVPIVAMTANVFKEDIEKCLVAGMNSHVGKPLDFEEVISSLRSYLEAGKR

SEQ ID NO: 86177 - protein, 336 aa, Unknown
  Obtained from environmental sample
  misc_feature (1)..(336): Xaa is any amino acid
MAESVVYIPKKSRSEDYEVRLSTSSVPLASGATVSVGGGSRTVFYVRPRGGLAVGDYSGFIGIKAGSVEYASVYVMFEVWGDVEYRLYVNPEVVDFGSRPTPYRQPAAQTVEVVNMGLNSIELTQPTSAYFDIGPLSATVLPRNGATAVFTVRPKEGLPPRTSPPYYDETITISGSGASAEVSVKFKVESEDMYGIRASGLSTFGTRPYRVTSPYYDQPPMQIVTVRKIGAGVGAITVTLPKDTTGKYVIEAYAQSPVPWTSSGANRTAVLPNNLAEAKFTIQPKATGLPAGSNNVAIPVIGVSGIPVVADTLFPTFTLTPTRTMEIVKPDTRSSK

SEQ ID NO: 86178 - protein, 228 aa, Unknown
  Obtained from environmental sample
  DOMAIN (1)...(203): Branched-chain amino acid transport system / permease component
  misc_feature (1)..(228): Xaa is any amino acid
GFGGVIARSVLIFIRGVTAFFTSVINRALTGDATNRFQIGVSMRFTVPGLSKIPLLGNFFKNMYPFEIVILALAAFAWYIFYKTRFGLRLRACGDNPHSLDAAGGDVGMTRVKAIMFTGAFSGLGGMCFAYSIMAQFSPSIYMGYGYLAIAAMIFGNWDILTTFAACLFFGLARSGGYQLCLTLGMSSNFSDLFLVLPYVLTLLSLVFFSRHNHPPRAIGEIFDKSKR

SEQ ID NO: 86179 - protein, 296 aa, Unknown
  Obtained from environmental sample
  misc_feature (1)..(296): Xaa is any amino acid
MKSITKLTATLALAITLTFTACEEKKKQDGADTKPPESASEAAAATQEPVAVAAEKAAQEVASESDEEECADVCGPAWTAEDEAAAEAMKAALAEATAATKVEKAEEVVKGTFTDTRDNNIYKTVKIGKQVWMAENLNYEAKDSKCYDNKPDNCNIYGKLYNWDMAKTACPKEWHLPSNVEWEVLTVAVGGNETAGKYLKSTSGWTDFDGKSGGTNDYGFSALPGGYGNSNGIFIDVGGYSPSDGYFGYAGAHGGWWSNSEFRADYAYYRIMDYMREGFDYYYMGDRATLSGSVAS

SEQ ID NO: 86180 - protein, 67 aa, Unknown
  Obtained from environmental sample
  misc_feature (1)..(67): Xaa is any amino acid
CYGGCFRDNKLNGYILIGNVEKAGIYTSLIRERTPLDAIDFTLVCERPGLMAFTKEDRMVKLGGMAS

SEQ ID NO: 86181 - protein, 127 aa, Unknown
  Obtained from environmental sample
  misc_feature (1)..(127): Xaa is any amino acid
MKDDLESVLQKVCDCDVLILGSPIYFFSVTGEMRSLWEHLLFPYSSYEGKPSSFGKKINTAFIYTMNAPSFALPLLGYTKMFMQNKSLLKRVFGNSESLIVTSTYQFDDYSKYAMFFSADLSMAKQI

SEQ ID NO: 86182 - protein, 407 aa, Unknown
  Obtained from environmental sample
  misc_feature (1)..(407): Xaa is any amino acid
LQYEGLHTILEGIDPSKCHAKFDFTYLLDAAKHSWDDALALGEKHGFRNAQVTAIALTGTIGLLMDCDTTGVEPDFALVKFKKLTGGGYFKIINQSVPPALAALGYNEKEIEAITAYATGHKTLKGCPAINAESLAEKGFTAGIIGVAEEALKNAPSLESVFSPWTLGKDFVEKKLKIPEAAFSQNGFSLLKRLGFSSAEIEEAEQYACGTMCIEGAPGLKKEHYSVFDTATPSGKHGRRSIPWTAHVEMIAACQPFISGAISKTINMPNAANYEDVKGAYMLAWKRALKAVALYRDGSKLSQPLSSYANSNASGAGLGTDLIADTSWVWKNPLPPVFYTKTKQTERKAGGKPGAYGSPCLIGEAAILKSLKSLDIPLLYAPANTMTAASEKFFLICIRKAPRSGAS

SEQ ID NO: 86183 - protein, 342 aa, Unknown
  Obtained from environmental sample
  DOMAIN (46)...(122): NC domain
  misc_feature (1)..(342): Xaa is any amino acid
MAEFREPKKGDVIWADRMDQGRPYYHCGIYEGGGYVIHFAAPEGSEINQKNAVVHQTTLDEFKDGCKLRIVEFPEGFLAEETVRRARSRLGEKGYNFVVNNCDHFATWCKTGEHRSVQADEAKKVITVLGGAAGEIICKAHDIAEDFKAPALNSIDMIQKPKEIAQSLDQNSIMTTPLVPVPEVIDVPQDPPEQEFFEKEPVDVMPEDEGETDEDDLPPAKKSWYEKVGDKLKGWTYPIAGALEVLKRREMLPPFLKQIDYHTLGAKVRNGIDRVVTAINVFTGILNPTQARQELANNETALLGQICSQKQKTPVREMVKKVFGKVGSNTRHIAQQTVARYV

SEQ ID NO: 86184 - protein, 108 aa, Unknown
  Obtained from environmental sample
  DOMAIN (1)...(77): GTP cyclohydrolase II
  misc_feature (1)..(108): Xaa is any amino acid
GIGLVNKIRAYALQDGGMDTVEANEHLGFAPDLRDYGIGAQILVDLGIRKLRLMTNNPRKIVGLEGYGLEVTERVPIEVSPGHENKKYLHTKKQKMGHLFEGSAICQS

SEQ ID NO: 86185 - protein, 229 aa, Unknown
  Obtained from environmental sample
  DOMAIN (136)...(207): Bacterial flagellin C-terminus
  misc_feature (1)..(229): Xaa is any amino acid
ISGTADPASAWSIAVDSTLTAGSVLAAAVLGVGTVISDKNTTVAGSITVKYDTATGNQSYIQFGANGATKLEARLHDAAVGDSITFIFSEYQAASSKLNDSVMAQIGANSGQTAFVSMGDMRAKALGISDISVSTKWGAATAIETVNNALQKVSHQRSSLGAIQNRLEHTIKNLDTAAENLQAAESRIRDVDMAKEIMEFTKNTILQQASQAMLAQANSQPQSVLALLQ

SEQ ID NO: 86186 - protein, 112 aa, Unknown
  Obtained from environmental sample
  misc_feature (1)..(112): Xaa is any amino acid
FFGAVYGRGYNKIRFSFAGSNNVDDVAWYYNNSDKSTHEVGTKAPNGLELYDMSGNVSEWIWERYKFCGGSTDVSLNTLYSTNGCRIVKWGATSSPTTENDCLGFRIVRPAD

SEQ ID NO: 86187 - protein, 165 aa, Unknown
  Obtained from environmental sample
  DOMAIN (2)...(161): Integrase core domain
  misc_feature (1)..(165): Xaa is any amino acid
VFPGEKWVSDITYLRTKEGWLYLTVILDLFDRKAIGWSMSEELTAGQTCLALEMAVGNRHPREGLIFHSDRGAQYCSGEFRSALKRLCPLVRQSMSRKGNCWDNACAESFFKTLKAELDILEKGGSARQIKTAVFEYIEAYYNRCRRHSALGYATPLALTHNNAA

SEQ ID NO: 86188 - protein, 386 aa, Unknown
  Obtained from environmental sample
  misc_feature (1)..(386): Xaa is any amino acid
MAHIASDKTAVAAPEQTRPLSASIRWRPKAPRILVGLISRVFQCSDDAFAELAVAHPDLAFVSPSFVKLPFGPVQVGVEPPKASPLKMLAECDVSRAQRETLLEKLEALEEEKKSLSLKVSEAQSRLTDMQDDSAGAKRSMEDAKGLLASIQRQIKETEEAQARADEQWDLFEAEIAQLKSKARGMDEGHPEEAQQALDAEIRGLEDQQAEAQVHLEERRGILMGAATARQSAWSERDSAERNLQHLQRAAFDMEAEKKRLAAEQEEAEERRTAAVGRISEIEQETQRLLDDRLGVSNVLTGAQPEMERAAESLRVQERMGRELQESLENARQLREEVKLQTMQVRGSMEAVAKEVELALGMSVPEFMASIKAEEKAAWEQGELSS

SEQ ID NO: 86189 - protein, 315 aa, Unknown
  Obtained from environmental sample
  DOMAIN (7)...(299): Glycosyl hydrolase family 26
  misc_feature (1)..(315): Xaa is any amino acid
MNNYLPCNPNTQTEARNVLDYLYSLRGRGIILGQHTQTRAQEELEYIREVTGKEPALCGFELLAYSPNINYKESGAECITEVEENKNTLENAFDWADKKGLITFTWHWFSPLYGADKAFYQKNTTFDARLALKENTPERAAFLSDMDAMAELLKPFCQKHIPILWRPFHEANGEWFWWGSRGPETARKLWLDMYERYTCYHKLDNLIWVWNSPLKEGYVGDNYCDVISRDMYLPEHTHSDYRDAYEELLQLTSADKITALGETGSIPGLAALSETKIPWAWFMTWSKKVCRDAYTSREELRAALTASTASRPILT

SEQ ID NO: 86190 - protein, 338 aa, Unknown
  Obtained from environmental sample
  DOMAIN (1)...(150): Transposase IS66 family
  misc_feature (1)..(338): Xaa is any amino acid
MIPRSIASDSVLVMIITQKFEMHLPYYRQEKQFEQIGVTISRQDMANWQQQVFNVLKPLFILLKAMIKSGPVLRMDETPVQVMGEEGREDTQKSYMWLALGGPPGKTVAWYEYHPTRAAYNAKEFLEGYSGYLQTDGYDAYDSAVKDMPGIIHVGCLAHSRRRFFEAAKASKEAKSAQEGIKHIRNLYDIENELRKTITDNDDKFLSERKARAGPVLEKFKAWLEKRKCEVPPSLLLGKAINYSLGQWDKLVRYLESPYLTPDNNACENAIRPFVMGRRSWLFCQSPDGAKSSCGMYTLIETAKQNGLKPFEYLTALFEKTPLASPPQDWEKLLPWNI

SEQ ID NO: 86191 - protein, 188 aa, Unknown
  Obtained from environmental sample
  DOMAIN (2)...(186): Methyl-accepting chemotaxis protein (MCP) signaling domain
  misc_feature (1)..(188): Xaa is any amino acid
MASQFKTVGEASDEGKRIQKKSGDRIREIVEQSQTLQEANKIIASIAANTNLLAMNAAIESAHAGEAGKGFAVVADEIRKLAENSAAESRKIRTELKQISATIDHIVQDAAVSENAFAEVSRRIDETGKLVVEVDNAVHEQKTGASEVIESLQVMRDLTMKVKDGSQEMNLSSESMVKEISTLPNSAE

SEQ ID NO: 86192 - protein, 72 aa, Unknown
  Obtained from environmental sample
  misc_feature (1)..(72): Xaa is any amino acid
IGRAPVYGFGHAALFKDFIEAVETDRAPLISGESGKKALEIILAIYKSQKTGKAVDLPCDFSTLEMEGYFNQ

SEQ ID NO: 86193 - protein, 87 aa, Unknown
  Obtained from environmental sample
  DOMAIN (18)...(72): Helix-turn-helix
  misc_feature (1)..(87): Xaa is any amino acid
MDETIDGIYVRNLFAKNLKRFRDLLKISQLDLANASGLAHNFINDIENEKKFVSDETIAKLSKALKVEPYKFFLPYVKLNTQGDDII

SEQ ID NO: 86194 - protein, 198 aa, Unknown
  Obtained from environmental sample
  misc_feature (1)..(198): Xaa is any amino acid
MAYQFMKANQNEYAVKEMAKVFGVSRSAYYRWVRNGASQRRKADDAELVRLILEIVANHHRRYGSPRVRRELRDTYGKRVSLKKVARLMRENGLNARRSRKHIPTTDSNHALAVFENVLSREFYAESGGVKWVSDITYLRTINGWVYLTIVLDLFDRKIIGWALSLGMETSETVIAALKWQSKTGALKAASRPIYHGP

SEQ ID NO: 86195 - protein, 90 aa, Unknown
  Obtained from environmental sample
  misc_feature (1)..(90): Xaa is any amino acid
IWVVSRRNPSRKKLERFEGETLDILIEERIDGENMENFLLGRLYCQAPEIDGAAVIADNGAGGNNPHLGKFAKCKVIARRGFDLEVKLLI

SEQ ID NO: 86196 - protein, 54 aa, Unknown
  Obtained from environmental sample
  misc_feature (1)..(54): Xaa is any amino acid
GGVATSARMSAMDEASKNAEEMLGDLQINYNRARQAGITQEMTEIVGGAEALSN

SEQ ID NO: 86197 - protein, 99 aa, Unknown
  Obtained from environmental sample
  misc_feature (1)..(99): Xaa is any amino acid
MPKHKVIVMYSGGLDSTIAVHLLKTQGLDVTALHFRMPFNVGIGTSPTEVMEYADALGVPLRVEEEGEEFVDMVRNPKFGYGKNANPDRLRTPAINPPK

SEQ ID NO: 86198 - protein, 248 aa, Unknown
  Obtained from environmental sample
  DOMAIN (13)...(242): Histidinol dehydrogenase
  misc_feature (1)..(248): Xaa is any amino acid
MKIIESVNFDSYWKNETKRSEDTKTEKAVKNIIAEVRAKGDAAVRKFASKFDKSSPQKLEVPLSEAKHALEQLRANEPSLALALELSAKHIKRFSEKQREQFADFEFEMEQGLITGQRILPVERAAVYVPGGRFPLFSSVLMCMIPAFCAGVEEVILSSPPTQDGLPDKKILAAAAIAAEVVNNNSIRIFAIGGAQAIAALALGTGNRSSRARYSRTRQQICRRRQADIIRRSRDRFYRRTHRCIGYR

SEQ ID NO: 86199 - protein, 184 aa, Unknown
  Obtained from environmental sample
  DOMAIN (1)...(169): RecF/RecN/SMC N terminal domain
  misc_feature (1)..(184): Xaa is any amino acid
MITKWGVKNFKSIREADLELAPLTVFTGVNSSGKSSFLQSIIMLSQSARSDDRDGYITLQGDLLNLGSFEQIYHKNLNEINRSQREEIGINCTIPVNENEDVHFELGLEEGFSEYNKSSKLKSEQGLLEYRKKEESKDFSIKWARPENLPANASEKYYKIFRIESSEIPPKSYFGDKSRPNLSM

SEQ ID NO: 86200 - protein, 392 aa, Unknown
  Obtained from environmental sample
  DOMAIN (62)...(294): Domain of unknown function (DUF1745)
  misc_feature (1)..(392): Xaa is any amino acid
MKGNTGSSVAANPKTAGKEAAEKAKDGLSDIKVVFAYSSVAYDQGELLKGVAEELPGVPVLGNTSFTGVITPEGFIFGDKGFVGLLALGGKDFIVGVAGQAKSGGAVHGGARATGRDVARGAMKNAGKSGAPAYFYMAASPGEEEFYLKGISDVIGRVPYFGGSAADNTISGAWKLFANNHVFADGVAVAFFYTDKPVTNLFTGAYRETADVGIITKVKDNRTLVEIDGVPALKKYAQWAGVDPETLKGDDLLVYTITSPLGVKDRLGDLIAIRHPMNGNDDYSMAIGANLAEKTAVIRMEGSAEELVSSASHTIDALKNKMKTPPAAYHLVHCGGRRAGIGERIDEVVQEVKKAAGGVPFIMEFTFGEYGYEDDGNNTTGGLMLSYTGFAQ

SEQ ID NO: 86201 - protein, 229 aa, Unknown
  Obtained from environmental sample
  DOMAIN (149)...(226): Domain of unknown function (DUF303)
  misc_feature (1)..(229): Xaa is any amino acid
MKDSGLSTLISDGMIIQRDVSFPVWSKEKLTVAFSGKKYESREVNGKWLLTLDPVKAGGPFTMDISSERGSYTVSDIYAGDLWMCAGQSNMEMQMDRLRNVFSEEWENKDFPLIRLFNVPQEWNFSSPCEELTGGSWISPSNETLHEFTGTGWFFAREMYKKYSIPVGLVRTAWGGTPVEAWMSADALKDFPGKIAEGKKYADSAKREQIVKETADAVNKWEKHSGSED

SEQ ID NO: 86202 - protein, 460 aa, Unknown
  Obtained from environmental sample
  DOMAIN (60)...(282): ABC transporter
  misc_feature (1)..(460): Xaa is any amino acid
MWARLGTMHCPTHNRALQKYNASELTRHLYEKGGEDLVVIYSKNEILDRVPLTEKNRTRLLDSIEKAYSENEGKIKIGNQHYSNFLCCPNCDFSFAEELDPKNFSFNSHFGACERCQGIGDIFGSICPECKGERLKPEFLAVKIDGKSISDACKLSISEAYNWLKNIPFNGTQKIIAKPLLKEILGRMEFIINVGISYLGLDRKGESLSGGEAQRLRLASQIGSGLEGVLYVLDEPTIGLHQSDTKKLLDSLYKLRDLGNTIVVVEHDLEFIKAIDHIVDLGPKAGEFGGEVVATGNPKELSNTKSIKKFPNSPTVKYLSGKKALEDTKPLGPPPSPLAPDFALKNLTKNNLKNISVKIPFGAITAISGVSGSGKSTLMECIFSEAEKKRKPVCFIDQTPINSSPRSTPVSYMSILDKLRDLFAKLPESKIRGYDVGRFAYNKEGGRCEVCEARPICHGF

SEQ ID NO: 86203 - protein, 116 aa, Unknown
  Obtained from environmental sample
  misc_feature (1)..(116): Xaa is any amino acid
MNSILVSGHIGIEITAKIDKFPIEYTPIEYEFFGVNTTISSVGYNIVKAIKTLGGDPMFFSITGNDIYRDIIKNEIENIGINTKYVLPIAEKTSQSVILYNENKRKIICDLKNVQG

SEQ ID NO: 86204 - protein, 99 aa, Unknown
  Obtained from environmental sample
  DOMAIN (12)...(98): Nucleotidyltransferase domain
  misc_feature (1)..(99): Xaa is any amino acid
KWPRIDIPEKQEHIVKDLFSRYLPNTRVWVYGSRVNGNSNENSDLDLVVFSSDKQRADLAELRENLEESSLPFRVDLFVWELIPENFKSNIVKTYVEFL

SEQ ID NO: 86205 - protein, 55 aa, Unknown
  Obtained from environmental sample
  misc_feature (1)..(55): Xaa is any amino acid
MKGKQIIWHLDDIFLGYTQNFHEMEARPQPGLRTLTLVDSAGNTIVRRFTVLDSN

SEQ ID NO: 86206 - protein, 173 aa, Unknown
  Obtained from environmental sample
  DOMAIN (7)...(121): Response regulator receiver domain
  misc_feature (1)..(173): Xaa is any amino acid
MNSNSTIKILCIEDNATNYRLVQRLLSQAGFEMFWAEEGMSGFDLALQVAPDLILMDINLPGLSGFELTSKFRSRPEFADTPIIALTAKTQKSDRETALVAGCNGFIPKPIDPFAFVGQIKNYLGGRQERLDKGAEGRALRQYNVRLVEQLEQQLHEAHDAHKKLTEAQRILE

SEQ ID NO: 86207 - protein, 70 aa, Unknown
  Obtained from environmental sample
  misc_feature (1)..(70): Xaa is any amino acid
GFTQGSDWPSLTPFAAAGEPFDPMIHEALMKAPNAQIPADCVAEVFEHGYRLNDKVIKHARVVVSSGNGG

SEQ ID NO: 86208 - protein, 280 aa, Unknown
  Obtained from environmental sample
  DOMAIN (1)...(167): Type II/IV secretion system protein
  misc_feature (1)..(280): Xaa is any amino acid
MDELGLPQAVQSLCDRPRGLVLVTGVTGSGKSTTLAAMVDKINSNEYCHILTIEDPVEYIHQHKKSLVNQREIHSDTSSFKKALRSALRQDPDVVMIGEMRDLETVESALTIAETGHLAFATLHTNSAIQTINRIIDVFPAHQQQQIRAQLSLVLEGIICQSLVPKASGKGRVVAMEILVPTPAIRNLIREDKIHQIYGAMQAGQGKHAMQTLNQSLSELVLKGEIAQDTAMSFSSNQDELMELINRGGWHIAHGGASWWLCPRLADGGAGAPKYKVFLM

SEQ ID NO: 86209 - protein, 554 aa, Unknown
  Obtained from environmental sample
  misc_feature (1)..(554): Xaa is any amino acid
MIIKGRYLQPFENENFYIENDEQAVQLLTGGVRIFFGGLEFILKEERGGGLVITNDGGAFFPVNPESFSITDNTARLGLPGGSTLIFSSLGPEKEPELQINAQFAADVSEVSIPIIPHRSLVRNNGQIGIMYNGNRYMFTGTGQEFENNRIVLSKGNSSVSYRSKGKQRAFDPTNFTIPQAQNYYFALSNWQDLSYTRWYQSASTLRNEDDITGYLSEALRQNNYNAALSSIPRDFTGSTQHTYRSAAYLGGMTSAYRTFVSEENKRLNAINALMKENSLDVLKEEHIIDYLLTRGDTVLAYDIIRLIQDTSSDKLTSDYCPGLLEAYSDIKRWNTSIDNPVEPLIEQILILVSENLSKDTVSNLVYASGSKERDLYYNVRLGNTLINWAEDAKNADWADIGRSLVLSALTNAGPGAGNLYANLKLSEYYPRALWLGEPGFWAWTISPSVKPSWQDGNLNISFAFPVSSTHHVIIRGVKPFLSLRIHDTNWRTDSQYERYDSSGWVYYQQEQILVLKLRHREPVENIRIVYKYAPPPPPVVEEVKEDNDADDID

SEQ ID NO: 86210 - protein, 111 aa, Unknown
  Obtained from environmental sample
  DOMAIN (1)...(104): Diaminopimelate epimerase
  misc_feature (1)..(111): Xaa is any amino acid
LQNVDELDLPKIGQLFENDPIFPDRVNAEFVETIAESRLKVRVWERGSGETQACGTGACASVAAAVLNGYCNKNADVKVQLPGGELIIKYTDETVFMTGECVKVFDGTVEI

SEQ ID NO: 86211 - protein, 437 aa, Unknown
  Obtained from environmental sample
  DOMAIN (265)...(430): GGDEF domain
  misc_feature (1)..(437): Xaa is any amino acid
GPRAELQGIYRKNAFWIGDTDKKYYFNGEYVYTIDPSDESSWWYNSIIENPTPYTLTVNFDVGLKKTMLWIDVPVLNDDHKSVGIVGTGLDLSDFINAINHKNERIEDELYFFNITGELIKAKDIDLVEKKASITDVLGKTGDEILARTKELKIDEIEYFKSKTKRQIIAITSIPVSSVPALSWYITAVRHVTITDFLHTGMTVLFGIMMAVILFVFVFFNIFIAIMLEPLNQMVRTINQTFSDWDMKPQKSDHHKDEIGTLGAFLHLTIIDQLTGIYNRRYLDGSLKKIIKLLSRTSSSLSVLMIDIDYFKKYNDAYGHDAGDECLRAVADALSQCVIREEDFVARYGGEEFVVVLPNTDENGAKLVAERMLGKIRECNIPHEKSDIASHVTISIGGATNVVNHFQHGKDYIKLADEGLYESKENGRNRYTFLKTV

SEQ ID NO: 86212 - protein, 164 aa, Unknown
  Obtained from environmental sample
  misc_feature (1)..(164): Xaa is any amino acid
MERFIVAAVCLALFLIVEGVIYIVLRHITKRQPRFLITVSTVCLAVLPTGATLLSSGCSKTTTPVPETPGTLIDERDGKKYKTVKIADETWMAENLNYQTPSGSWCYGDDTSYCGKFGRLYDWRTAQTVYPAGWRLPTVNEWDNLTQTAGSEKMTVGASADLIP

SEQ ID NO: 86213 - protein, 201 aa, Unknown
  Obtained from environmental sample
  misc_feature (1)..(201): Xaa is any amino acid
GFGAVIAARHGETQTALDSLYGVLTNNFSESIIYDSRGIEEIVIMEINHLIAHNANLDKSKIDKRLIMDFPVDIRVVINWNMNNTDIDLHVKDPNNEDCYYRNHETDIGGRISYDNTSGYGPEQFLLKKAVKGKYRVLVNYYRDRQFTGAGPSTVMAEIYTKYAGKTEQRRIVCLQLSKVMGNDGKNDDEKKYAEVAEFDF

SEQ ID NO: 86214 - protein, 148 aa, Unknown
  Obtained from environmental sample
  DOMAIN (10)...(148): Aspartate/ornithine carbamoyltransferase, carbamoyl-P binding domain
  misc_feature (1)..(148): Xaa is any amino acid
MMETVPDLPKDLLDLDDYSPAQLNLILDLAESFKEISQRAIKKVPTLRGKLVVLFFHENSTRTRLSFEVAAKRLSADTVALSASGSSLAKGESLLDTARNIAAMAPDALVIRHGTSGAPGFLARRLDFPVLNAGDGAHAHPTQALLDM

SEQ ID NO: 86215 - protein, 359 aa, Unknown
  Obtained from environmental sample
  misc_feature (1)..(359): Xaa is any amino acid
VENEAHYVARRIGELLKEKTDTGESKYRPGDIAILFRAHSPHQLFEKHLMLVNIPYACEDLNGLFYGGPADDLMSVLRLAAYPKDSAAYAQMLRSPFAGLSMQGLALCAPLVAASAGTGKAAVPFGDEPLSRLSEDDRIKYTRGKRIYQKILDIAQKESISSLVSELWYGEGYRYETEWNPRTAAYRELYDYLFHLAALADEKNQGLAEFTDYIQSLYNAGERLSDIEIPLERPSAVRLITIHKSKGLEFPVVFLCCCDKKGKPDSSGDLYYTDDSGLTFTPPLPREYSDNGYVKRSYFWERSQALRKDKRTAELRRLLYVGMTRAENELFLSGCLGISKVVGPENGGQDSDVEKFSRI

SEQ ID NO: 86216 - protein, 325 aa, Unknown
  Obtained from environmental sample
  DOMAIN (127)...(325): Peptidase M16C associated
  misc_feature (1)..(325): Xaa is any amino acid
VIARPVCPGLREVSGPVEEMGKKVEALILGELRRLVTEGIPQGEIEAALLFMEFSQREVKRSHGPFSLVWMRRTLRTWLHGGKPWDGLLLTRALETLKRRLAENSRYFESLIQKYLLGNPHRALVMLEPQKDFLPQQEARLAEELAKIEQGLSDTEKNRITEKSAALEKIQSEGDSPEALASIPHLSRGDLSPEPEIIPRGFEDLQGIPALCHDLYTNGITYIDLVFPLDILPPEDYSWLPFFARAAISVGLPGMDYGEVSSLLARTVGGFNAILHTGSAAPVADSPVIQPSMGNPAGAFDLAGRDWIIYRIKCLDEQTAPALDI

SEQ ID NO: 86217 - protein, 86 aa, Unknown
  Obtained from environmental sample
  DOMAIN (1)...(85): Ethanolamine ammonia-lyase light chain (EutC)
  misc_feature (1)..(86): Xaa is any amino acid
MAEAISDATGAEVIVALIGERPGLLTAESMSAYMAYKATANMPEARRNVVSNIHKGGTPAVEAGSYISDIIKKMLDQKASGLDLKL

SEQ ID NO: 86218 - protein, 83 aa, Unknown
  Obtained from environmental sample
  misc_feature (1)..(83): Xaa is any amino acid
MIGTKGIVTAVNGNMVSVRFDGIVSMNEVGYVKVADKRLKSEVIRIRGEIASFRFLKIPKVFPLAMKLKLQGIWSSVELGPGL

SEQ ID NO: 86219 - protein, 151 aa, Unknown
  Obtained from environmental sample
  DOMAIN (1)...(90): N-terminal ig-like domain of cellulase
  misc_feature (1)..(151): Xaa is any amino acid
MENIRLNQIGYYPESRKVATVIMGDDKSAPSEFLVVGVPDGKTVFCGKLSAELFLWEESGERGFRADFSAVSAPGQYKLVILGDVPYKSESYPFAISGRAFKDVAVASMRAYYFQRCSYALSKKNAGKWARAPGHPDLDVTYHPSSGHGRG

SEQ ID NO: 86220 - protein, 322 aa, Unknown
  Obtained from environmental sample
  DOMAIN (1)...(322): Glycosyl hydrolase family 9
  misc_feature (1)..(322): Xaa is any amino acid
ETKQDADGGSLFQSDNLLVPRIHYAEEDKGQRFVIGKSRTSSLNFAAAMAMAGRVYAPFDSVYAKNCVERALSAWDWAVKNPGAVFKNPADVKTGEYKDATFDDEFIWAAAELFITTKERRFADFLKGKDITYAGEPSWQNVHSLAALSLSTVKNGLDQNRLEAVRKSITKTADKWLAEMDKHLYRVPNMKFIWGSNSNFANMGVGMIYAHIISGDDKYLLGAVEIADYLLGKNAVGISFVSAFGTKAMSNPHHRQSVAGKVGAIPGFLAGGPNAGQQDGNNGVTYSSKLPAKSYEDVYKSYASNEVAINWNAPAVFYSADL

SEQ ID NO: 86221 - protein, 133 aa, Unknown
  Obtained from environmental sample
  DOMAIN (4)...(133): AMMECR1
  misc_feature (1)..(133): Xaa is any amino acid
MDPIVQLAEKTIERFVLGAQDSIPNSFMDAIPLKRAGVFVSIHLVSGELRGCIGTISPTCKSMADDIVQNARWACSRDNRFNPVEASELGDLKIKVDVLGEPEPVDSIDELDAKKYGVIVSAKDGQRGLLLPD

SEQ ID NO: 86222 - protein, 60 aa, Unknown
  Obtained from environmental sample
  DOMAIN (1)...(58): Cupin domain
  misc_feature (1)..(60): Xaa is any amino acid
LHTHEGQEFNYMFPGSMEFHIDDMIYELTKGDSVYFDSSIPHAMKATGKHPAEFIAVVIK

SEQ ID NO: 86223 - protein, 186 aa, Unknown
  Obtained from environmental sample
  misc_feature (1)..(186): Xaa is any amino acid
MAADGVIKVKLESIASGGDAIGRLDGKPLFVEGGAPDETILCRSIEEHKTWARAQLLEIIEPSPVRVKSVCPFYGKCGGCSLQHIEYNAQLAAKAAILKDSFLRIGGFKLDRLPKLEIIPSSPFEYRNRMQFHCLREKAKNDSPSFGLKGRGSGEIITVTDCPVAENGIRKLLQEERNLPLPPEKD

SEQ ID NO: 86224 - protein, 320 aa, Unknown
  Obtained from environmental sample
  misc_feature (1)..(320): Xaa is any amino acid
VGMGLLYQEGYFSQYLNNDGWQMERYPVNDFDNMPVTRVTDASGRQVKVKVLFKGLEVAVAVWRVQVGRVPLYLLDTDLNENEPEFRGTTAQLYGGNRETRIRQEVVLGVGGVRALKALGLQPTVIHMNEGHSAFSALERINLLRKDHNLSFDAAREVVQASTVFTTHTPVPAGNDTFDQELARAYFEDYAKELGINWRVLLGYGRINPRDEGEPFGVTPLSLRLSAHANGVSRLHGRVSRGMWQDIWPKNPVEDTPIDYVTNGVHVSSWASREIARLYDSYLGAEWNEDGDPVQIWQQVRQIPCLNCGGLTKTAGTRLV

SEQ ID NO: 86225 - protein, 426 aa, Unknown
  Obtained from environmental sample
  DOMAIN (172)...(391): Methyl-accepting chemotaxis protein (MCP) signaling domain
  misc_feature (1)..(426): Xaa is any amino acid
YGILLNDIIIENNKLGEMSKRIIMAVIIAAIIISFFLSLIITSNITKPILKVAGALEIVAEGDMTHSVDVDTKDEIGDLARDFNNTMKKIRNLVKNVKREADVLSEIGNDLASNMNQTAAAVNEITANIQSIEDRVINQSASVSETHATMEQVVVNINKLNSHVENQSRNVSQASSAIEEMVANINSVTDTLVKNSSNVKILTEASEVGKTGLQEVVTDIQEIARESEGLLQINAVMENIASQTNLLSMNAAIEAAHAGEAGKGFAVVADEIRKLAESSSEQSKTIGNVLKKIKESIDKITKSAETVTTRFEAIDSSVRTVADQEENILNAMEEQGERSDTSNASLTQITHLVKTGSEEMLEGSQEVMKESQNLEKVTQEITGGMNEMASGADQINLAVNNVNDMTVKNRDAIDSLIKEVSRFKVE

SEQ ID NO: 86226 - protein, 217 aa, Unknown
  Obtained from environmental sample
  misc_feature (1)..(217): Xaa is any amino acid
MNISESDIRNLVSDVVRGLSLGNTARPSDSAPKHDAAKSGVMGGDGPGIFPDIESAIAAARQAFHEYGETPVKVRREIVRKIREIAVEYSSRLAEMAVNETGFGNVANKTSKNQLAATKTPGVEDVESAAYTDDGGLTLVERAPFGVIGSIIPSTNPAATVINNSISMLSGGNVVVFHPHPGAKGVSNLPFRSLTAPLRTLAGRKILWSASLPHDEF

SEQ ID NO: 86227 - protein, 272 aa, Unknown
  Obtained from environmental sample
  DOMAIN (44)...(260): Sigma-54 interaction domain
  misc_feature (1)..(272): Xaa is any amino acid
LNFWKNRFSLNKVITICRNAAAIKKLKEENTSLKRASGVASEDIIGTSALIRDIRETVKQAAESDARILITGENGAGKEVIARAIHQCSARAGNPFVDVNCAAIPETLIESELFGHEKGAFTDAVSTRKGRFEMAHGGTLFLDEIGDMSLPAQAKVLRVIQEQKIERLGGEKTIETDVRIIAATNQDLEKACETGRFRQDLFFRLNVIPIHVPPLRERPEDISMLLCHFLNLLNTEITLEADAMELLASHDWPGNVRELKNLAERIAVMHRG

SEQ ID NO: 86228 - protein, 646 aa, Unknown
  Obtained from environmental sample
  DOMAIN (560)...(641): Response regulator receiver domain
  misc_feature (1)..(646): Xaa is any amino acid
MDGGNLSLDHVPVFVKTDIGKKPIGLIGTGVNLTDFSNFIASSYHEFNENITIYMFNKYNEITSAADYELVQNKVRLDEHLGVTGKELIKVAQELSGDESRSFIYDKKIYLINSLQSMEWYLTVSYPAPGLLSLNNAMNTVFFSMLFLILFLFIIINVYIARSENAIAKQNLQLIEANKKTESASRAKSDFLAKMSHEIRTPMNAIIGMAELLLRGELSSEARSYTQDIKQAGNNLVSIINDILDLSKIEAGKLEIVPGNYLLSSLINDTVNIIRTRLMEKPLRFSTNIDGTIPNSLIGDEVRLRQIFLNLLSNAIKYSEKGHIGLTITTDKRDDKQVWLRIAVSDTGKGIKPEDQEKLFDEFVKVDIKNNKGIEGTGLGLAITKNLCTAMGGNLKVESEYGKGSVFTALIPQGIEAETPFAVVDKPEEKKILVYEGRINYAKSVCWTLENMRVPYTMVTNQDDFAAALYREKWFYVFSSYGLYEKIEPIMRQDDAAFHGGKKPPLALMIEWGTETYMPGVRFVSIPVQSISIANVLNGREDDKGYIKTSGIIRFTFPNARILVVDDIATNLKVVEGLLAPYQVAVDTCLNGLQSIELVKRNEYDIVFMDHMMPEMDGIEATAVIRELEMSNEELGIKRKQIPIMR

SEQ ID NO: 86229 - protein, 142 aa, Unknown
  Obtained from environmental sample
  DOMAIN (48)...(117): Bacterial  dnaA  protein helix-turn-helix domain
  misc_feature (1)..(142): Xaa is any amino acid
MMRHSVPSALSFRCAAEISAYTKLTQQDITRQDIKKILKKSGEYTPVEPSDIIRRVAEYFSLSPEEIKGNKRTSSLIFARRAAMYLCREILGTSYPALGHIFGGKNHSTVMYHIKKIEQDLVAHKDTHTTLTKIHNMCAQKK

SEQ ID NO: 86230 - protein, 206 aa, Unknown
  Obtained from environmental sample
  misc_feature (1)..(206): Xaa is any amino acid
GRPRSESAEYSALHECYGKRTGCALEGTELAAHLYFNTDKKSAEEKELNKKIHKNREVLAKLKRQQETPGLKKYTDEEFGHIVTQHKAFFNVRKTGITITDNSGLDVCCSTIEFDNDLGAFKDAMKTKGYMIILTNDLDRQSEEMLSLYRDKEAVENAFDDIKNQLDMDRFNVQSNESLQGKLFAGLLSAGIVSVMRNALRKKRSQ

SEQ ID NO: 86231 - protein, 332 aa, Unknown
  Obtained from environmental sample
  DOMAIN (150)...(321): DNA gyrase B
  misc_feature (1)..(332): Xaa is any amino acid
ATDAEIPVDIHPKEGVRAVQIVMTKLHADGKFDNDAYKVSGGLHGVGVSCVNALSEKLMVSVRRDGKRYRQHYVRGVPQDEVTVVGEIEPDNHGTSVRFKPDEDIFETTEFSFETLKKRFEELAYLNKGLEILCVDERLDEKHLFRADGGIPQFVKDLNSGEGGIHAVISAEGRFENVLVDFALQYNAGYKENVLAFANNIRTKEGGTHLVGFRTALTRAVNGYIKSQADLNKKFKGTVLSGDDVREGLTCVLSVKLPQPQFEGQTKTKLGNSEIAGIVAGIVYERLNTHFEENPKDARLIIDKAADAARARDAARRAKELVRRSADLINVF

SEQ ID NO: 86232 - protein, 167 aa, Unknown
  Obtained from environmental sample
  DOMAIN (6)...(73): SmpB protein
  misc_feature (1)..(167): Xaa is any amino acid
VADGVKVIAVNRKARHDYSVDETYECGIELLGTEVKSFRDGKISFPDAWAEVIDREVWLRSLRVAENPFSSVFNHDPDRKKRLLLNRDEIKRIHRKVEEKGYTLIPLSFYFKKGRVKVELGLCKGKKVYDKRADIRERDVKRDMARRIRIKMNKEKREQGSLFVIEA

SEQ ID NO: 86233 - protein, 320 aa, Unknown
  Obtained from environmental sample
  misc_feature (1)..(320): Xaa is any amino acid
MLLNLDRNNFVSLFPYYWSAVTTFFAVRSRKFLRAAVIADVSILLFIFSVARTGGIEIYRWPIVMIVIFAGIVFFQALALLFSMPPETKLQVKEKLLTVAALLVIIVTGGILFLKPIQEQAAQMGGGLLEPKFFSFDFSKLLKLDPEISVKNDLILIVKKENDDHILLRRAVLSGYSKRNGFYQIEELDEKTHPQKLPGRQVSFFPPAFKDEDVNLSTQEYFLVNVESTAFIGMKEPVKVTPYENWDASSFKSAYAVDSLVSGADISDLIISTINWPSVTELGLSGDEFKIYTNYGNDENIRSLAEFSCRSCRILSFGGN

SEQ ID NO: 86234 - protein, 63 aa, Unknown
  Obtained from environmental sample
  misc_feature (1)..(63): Xaa is any amino acid
MKLDDEYKKWLTDLKSRIRQSQIKAAIKVNTELLLLYWDLGHDITIRQMEKTWGSGFLSSEHY

SEQ ID NO: 86235 - protein, 278 aa, Unknown
  Obtained from environmental sample
  DOMAIN (3)...(191): ATPase family associated with various cellular activities (AAA)
  misc_feature (1)..(278): Xaa is any amino acid
MGSFIFLGPTGVGKTLLARKLAQYLFANEEALVRIDMSDFMEKHNASRLVGAPPGYIGYEEGGMLTEKIRRNPYRVILFDEIEKAHHDIFNILLQVMEEGELRDSLGHTVNFRNTVIIMTSNAGVREITKDSRLGFTSGSGLMSQSEIESAAMSELRRIFSPEFLNRVDETVVFNPLTRKQIDAIFDIELKELSNRLAEQNYAIKITPEAKRVLVEKGWDQKFGGRPLRRTIQKEIESPLSELILEGNWENDTKFVVGVKNGQVKITAKSKENKLAIN

SEQ ID NO: 86236 - protein, 583 aa, Unknown
  Obtained from environmental sample
  misc_feature (1)..(583): Xaa is any amino acid
NDHPGGVSGKTSSGNDLILMDKDMVNSKLKSISPDGTLTFENLDAKYTPVKGDIICSDVSTVAPYGFLYKVKSVTKDGGITVIETEMATLEEAVEEAKVEQSFDLEYIDDDEEIEGVEVELMSVNAPRAALSTAPVKVNINMKVDTGDSELALKGSIEINANINCIVEIEKFKMQHFELSTGPRLKADLTASIGKGGKKEKKIPIKTLKFSPITFWAGPVPVVIKPEDPIEVVFSAEGEVSVSAKLVQWDYSFLFGVQYRKSGKLNAFSRNTSQPAKYMEDFQVEMNGALKIEPQATFMFGLYGMAYTGITGGFFAKLAGEANYSSNINGNLSFSCGLEFSTDAKLKVLGYEIGELSITFLELEWPIWKRSGAIVYNKATWDAAIDSIKEGGNNNNYTINVTGNFSLPGDTAYTFGNVTGLKVTITGDKTITLTGQGSLLNLNSNQTVVIRDTDFVGNNNNNRALIYANGTNTILTMEGNSSVSNNNNSGGIGGGVSFAGTNAIFTMKDNASVRGNTAVAGGGVCVGGTLNMSGNTSITENIATSNEAILSGGGVYVSGTFNMTDGTISGNKANMRGSGVFVF

SEQ ID NO: 86237 - protein, 79 aa, Unknown
  Obtained from environmental sample
  DOMAIN (7)...(64): Elongation factor G C-terminus
  misc_feature (1)..(79): Xaa is any amino acid
MIDWPRQVGGMEQVGKLETITAKVPEAEIQSYSSTLRSLTQGRGFYSKVFSHYEQVPPDQAKKVIEAHQAEIAHHEKTE

SEQ ID NO: 86238 - protein, 72 aa, Unknown
  Obtained from environmental sample
  misc_feature (1)..(72): Xaa is any amino acid
VARYRHPCIPFGSEQFVYTLESRQGLKIACIEEIAVDRGFVTGEKMKTYLESSMPKCPYRDYIFKMFSEKNN

SEQ ID NO: 86239 - protein, 218 aa, Unknown
  Obtained from environmental sample
  DOMAIN (34)...(217): tRNA synthetases class I (E and Q), catalytic domain
  misc_feature (1)..(218): Xaa is any amino acid
MINENNAGANPETLGTDFISEFIKEDLAAGKFNHVHTRFPPEPNGWLHIGHCKAFYIDFNMAERFGGKCNLRFDDTNPEKEDISYVEAIKRDIKWMGYDWEDREFYASDYYEYLYELAVKIIKKGKAYVDDLTDTEMSEYRGTAVADKNNITVTPPGRNSPYRDRSIEENLDLFARMKAGEYADGAKTLRAKIDMTHPNLLLRDPVITNLGQSVIGRP

SEQ ID NO: 86240 - protein, 246 aa, Unknown
  Obtained from environmental sample
  DOMAIN (18)...(160): ABC transporter
  misc_feature (1)..(246): Xaa is any amino acid
MIFQEPRQSLNPLMKIGAQITETLELHSDTSISSAQNRKKTAKSLAANKLAANKLAANKLALEMLEKLQFQQPEKIMDAWPHQLSGGMCQRVMIAIAAICRPLLLIADEPTTALDTVNQNHILALLKQINREFGTAILFISHDISMARHFCGRFMVMYSGKIIEEGPTEAILSSPLHPYTIALANAIPRKENRGRPLANIPGRAGLEEPLPGCRFAPRCPKAQERCRKSLPPVGGKRTAAVMCAAS

SEQ ID NO: 86241 - protein, 791 aa, Unknown
  Obtained from environmental sample
  DOMAIN (195)...(260): His Kinase A (phosphoacceptor) domain
  misc_feature (1)..(791): Xaa is any amino acid
MHTMEFNLEHRLIAESKRLASMVSAEELDRFRSIQDMKRPDYKALRRRMLDFSIEADVRYAYYIRPVDSGLQYIIDNDFNEKTRVGLDTPPFDPRSVPWIVSSLEGQAVCSVLGNYNPGWEGLLSGYAPIFNKDGKVTAVAGVDIEDRHIVRAWRLVSILTIVQFITAAAIFVMGIIYLIYLYRQLEIAREASSAKSDFLAKMSHEIRTPMNAITGMAELALREEMSQTVHDHIITIKQAGNNLVSIINDILDFSKIEAGKLEIIPVNYMLSSLINDTVNIIRTRIMEKPLRFFTNIDGTIPNNLIGDEVRLRQILINLLSNAVKYSEKGYIGLTITSDKRDDKRIRIRIAVSDTGKGIKPEDQTKLFDEFVQVDMKKSQNVEGTGLGLSITKLLCIAMGGDIRVESEYGKGSVFTALIPQGIETEEPFAVVEEPGKKNVLVYEGRTIYAKAVSWSLENMGVPHTMVTNQDDFTEALHKEEWFYVFSGYGLYEKIAMIIEQGDFPGGKKPPLALMVEWGTEAYIPGVRFVSIPVQSLSIANVLNGMADNKGYIKTSGIIHFTFPGARILVVDDLSTNLKVVEGLLAPYQAAVDTCLSGSQAMEMIKQKASENLDYDIIFMDHMMPEMDGIETAAAIRLWERGQQKNDIMCNRVPIIALTANAVMGMREMFIKNGFNDFISKPIDVSKLDEMLNRWIPKEKRASANRVGDSNEQLSDKNTNSSLLSIPGVDTAKGITMTGGTVAAYTEVLSLFRKDAQERLPLLQKAPETDTMNILLPRSRPKSDLSWFPQS

SEQ ID NO: 86242 - protein, 78 aa, Unknown
  Obtained from environmental sample
  misc_feature (1)..(78): Xaa is any amino acid
GLGGGYRQLELKPDMNGYEAAEKLKSSDTYREIPIMFLTSMNDEESKKKGFSLGAVDYVQKPFDATSLLQLLEKHLSS

SEQ ID NO: 86243 - protein, 112 aa, Unknown
  Obtained from environmental sample
  DOMAIN (8)...(91): Acetyltransferase (GNAT) family
  misc_feature (1)..(112): Xaa is any amino acid
VCFAQGSRSARVNHIHGKKFPVDIAEQPWLADYPAHLHIDLLPVLQGKGQGRVLIDKLFNELAQRGIPGLHLGVGSSNMGAITFYKKMGFSVLKEHDWGFTMARRVYGVKPC

SEQ ID NO: 86244 - protein, 310 aa, Unknown
  Obtained from environmental sample
  DOMAIN (10)...(175): ABC transporter
  misc_feature (1)..(310): Xaa is any amino acid
MGLDLTLISGERLWFAGPNGAGKTSLLRILAGNDNNFEGTVKFGSGISVGYFSQDAAEALNGSEQVLEFMEANAPTALIPKIRDMLGAFLFRGDDVYKPVSVLSGGEKSRLALLYMLLKPLNLLILDEPTNHLDLHSKDVLLETLNQFKGTIIFVSHDRAFMEALSTKTLELSPVADTSSRARLFYGNYAYYLEKIGNREWGIGSGDKNDGGNNKTSNNIIDNQKTAMEQRAQNKQRQAELRKLQKQEAELLNAIDGLENEKSRLEAELSLPAVYSNGEKAKAVKQKLDECTAALKTKTAEWEAVAALIN

SEQ ID NO: 86245 - protein, 149 aa, Unknown
  Obtained from environmental sample
  DOMAIN (12)...(149): BPG-independent PGAM N-terminus (iPGM_N)
  misc_feature (1)..(149): Xaa is any amino acid
MEALKKNPSWKGRRGPVVLVIMDGVGYGKYKEGDAVADSKMDHLNAIRAKSPNTKLKAHGKAVGLPSDEDMGNSEVGHNAMGCGRVFNQGAALVSNSIETGAMFQGNAWKELVSNVKNGSGHTLHFLGLFSDGNVHSHRISADLIHELS

SEQ ID NO: 86246 - protein, 187 aa, Unknown
  Obtained from environmental sample
  misc_feature (1)..(187): Xaa is any amino acid
MTRKAYYIGMDVHKTSVQMAVFEETGDDPIYERRLDNDTALLVKEVARFSRKGETEVAYEAGCLGYVIQRAMEKAGITCHVLPANKVAKKRPDRIKTDKRDARLIGRELRSRTIRPIAVPDETDEAARDLQRCREDASEDLRRMKQRLLKFLVRHGHIYGCETGHWTIKHWQWMDKIEFARPSDHAP

SEQ ID NO: 86247 - protein, 321 aa, Unknown
  Obtained from environmental sample
  misc_feature (1)..(321): Xaa is any amino acid
IRLEDVADISLGYNDNAARVQVNGQSGVYIQVTSESGSNQVRVSDRVQAALAGINDTLPQGITLEVLSDNTTMIRSTLNQVYTNALQGAALGMLVLFLFLRSFKGTLIIGLAIPISMLLTLMSMSVFGFTLNLLTMTGLIMGLGMTTDASVVILENIYGYRERGAKPEIAAILGSREMMRAIMASTITTLCVFIPLIIFKNDLKQMGLMFSDLIFTVIISVAVSLIVAITLVPSLSGGILKLYTRKQKPLKFPPLRFIDNIMESFLRFIETQYQTALKYCLSHRFIILFLVTLILAYSFIQFKGVGMNMYVRMRTLVPNLT

SEQ ID NO: 86248 - protein, 468 aa, Unknown
  Obtained from environmental sample
  misc_feature (1)..(468): Xaa is any amino acid
MRAFRGFKIWVAVLLIATASWAQVLNMDGLKSQIQTFNAGNSDMTIPIVADFSITSPLEINNNGYTLTLQSSTDTPRQLTRATTGNLFTIKKGSLTLQNITIDGSNANAPYQTNARGSLVFVGDGGTLNMKDGTTLQNNTIRDDNGSGVYVDSRGTFNMSGGKITGNKTNLSGGGVYIYALRATFNMSGGIISGNSCGTSATSYSGGVHFANTPLTTDTDPDKTASVFRLGGTAVIKDNTKGNGSPSNVYMAGSRYITLGDGTVGIPPPTDGMEVWITKVAEHGLFVKEGAKPPNPPDDPFGDTKYFEADAGSQVYYIDPGQLAMEAGYDISLSTYSLALEEVFDYTTQPEREIMVTNIGGRIGKLTIYLSGVNADNFELDLTRISDAGMNQNEIQKFTVKPKLGLSVGTYSAIVLVVAPQDIDGGPVIMRRLDVDFTVKEYVEDRTLYFNQSDGNFMRAIYSANLIL

SEQ ID NO: 86249 - protein, 140 aa, Unknown
  Obtained from environmental sample
  DOMAIN (3)...(118): Peptidyl-tRNA hydrolase domain
  misc_feature (1)..(140): Xaa is any amino acid
RSESAEAQSIHSFAEASFSRSGGPGGQNVNKVSTKVTLRLRVSELLGLSEAEIERVKSVLANRLTKDGEIILTSEEERSQQTNLERAYSRMETLITGAARLPKVRRPTKPSKMAKEKRLLAKRRQSQKKTERAKQADCFT

SEQ ID NO: 86250 - protein, 248 aa, Unknown
  Obtained from environmental sample
  DOMAIN (62)...(106): Bacterial regulatory helix-turn-helix proteins, AraC family
  misc_feature (1)..(248): Xaa is any amino acid
MLKPYDLLQNILLDIENGVKNNINVSFLCKKYDFSEGHLRRLFKFVFKQPISAYIRSRILTASLNDILETNTNILDIALEYGFEYEQSYIRTFKREFGITPGDLRKTEKIIKIKPPLHLFDERRLDNGILFGPDFVMVPRFHVIGKRHHLSFKDLPTEPLLTKHFWENERKQIKETVNPHACINLSCNLNLEEGHFDYVPSLQVENLKNIPSGLSGETFDTSMCVRFRYIGQHHYYEINGDIVSMMYN

SEQ ID NO: 86251 - protein, 251 aa, Unknown
  Obtained from environmental sample
  DOMAIN (85)...(242): Integrase core domain
  misc_feature (1)..(251): Xaa is any amino acid
VYYAPKESELTLDLMRRIDELYTEDPTYGARRMCAALRGRGVIIGRYKVRRLMEKMGLEAIYRKPKLSEPHPGHKIYPYLLRGVTVTRVNQVWSTDITYIRLRHGFVYLTAVIDWYSRCVLSWRLSTSLDTTFCVDVLEEAIERYGTPDVFNTDQGAQFTSTAFTDVLKKHGVKISMDGRGRALDNVFVERLWRTVKYEDVYLKDYESVAECHAGLTAFFNRYNTRRPHQSLRYRYPKDVFMEGVTHSIAA

SEQ ID NO: 86252 - protein, 137 aa, Unknown
  Obtained from environmental sample
  misc_feature (1)..(137): Xaa is any amino acid
IAVSDTFAFINITGGLNVYPKVIEKHLNEELPFMATENILMYCVKKGGDRQALHERIRLHSVEAAKKIKLQGGDNDLIARILADSSFGMTEKEMNNLLSAEQFTGRAKEQTEEFLSEVKNVLNNNKELLGVDVKITV

SEQ ID NO: 86253 - protein, 175 aa, Unknown
  Obtained from environmental sample
  DOMAIN (2)...(175): Adenylosuccinate synthetase
  misc_feature (1)..(175): Xaa is any amino acid
MLTAVVGINWGDEGKGRMVDLLSEGYEVICRYQGGNNAGHTVINDRGKFILNLLPSGILREGTVNVLGNGMVVDLEHLCGEIKTLKEKGIKVTPDTLKISDKAFICLPYHKAQDILEEERLGDKKYGSTRRGIAPVYGDKYMKKGIRIGDLFDSGTLKQRLSDIIEWKNMTFKGY

SEQ ID NO: 86254 - protein, 81 aa, Unknown
  Obtained from environmental sample
  misc_feature (1)..(81): Xaa is any amino acid
MQRMRGLNIGGWLSQIDAIQEKDPDKFPGTDKHMETFIGPNDFSNVRKWGFDHVRLPIDAYLFFTDQETPVETGLPILTAP

SEQ ID NO: 86255 - protein, 458 aa, Unknown
  Obtained from environmental sample
  DOMAIN (233)...(427): FtsK/SpoIIIE family
  misc_feature (1)..(458): Xaa is any amino acid
MQKKILLPPPLEGENTNETALVLYTNDLQTEIVNENNQETQTTSQTESLETDYNEEIEELDDVDVGMETETEIETEIETETDDDEDEDIDAVTRALEEAEAAAAAHAEQLRKKSKQFNNLRNKKYMVPVDILNEYPDGEYWVIDQATRDAAIALKETLNEFNIQAEVTGIRKGPVITMFEILPAPGVKLSKIVGLQDNIALRLAASSVRIVAPIPGKHAVGIEVPNAKRNIVSFKEIIEGELQRTEKKMEIPVVMGKDIAGEAQTVDLVQMPHLLIAGATGSGKSVCVNAIILSILYQLHPAECRLLLIDPKIVELKLYNDIPHLLTPVITDSKKAFQALQYCIFEMERRYACLDSMGVRDIRSYNKRVKEKNIAQEHMPYIVVVIDEYADLMTTTGKELESTVARLAAMSRAVGIHLVLATQRPSIDVITGLIKANIPSRIAFMVASTRAESVLGLT

SEQ ID NO: 86256 - protein, 312 aa, Unknown
  Obtained from environmental sample
  misc_feature (1)..(312): Xaa is any amino acid
MAGSTGKRKENYERLKGIQDRLQSAFEQKYGKVNFNSPKQLARLFDGERVPYRCKIRIKGYEGEPMFEGSELWEQRKRLKETFNGVRVQKGQLVLYVPKQYAGRTGDDLVRMGYAVTCNPNIDKKALDVSKKGHEVAKAIVDLKQVTSIMDKFLGPKFDRFIVKHGENDWRIHADFSIVGARQTGRFSSANPNLQQVPSKTVLFAKTSDEIKLYTLCREIIIPDEGYVMGKCDYAGQENRLMAHFAVGEGAEDIRRKYCENPDLDFHKYIGEISGLYEEYGAEVGRKYAKNCSFGLGYGMQIQTMMETFGWE

SEQ ID NO: 86257 - protein, 391 aa, Unknown
  Obtained from environmental sample
  DOMAIN (50)...(244): ATPase family associated with various cellular activities (AAA)
  misc_feature (1)..(391): Xaa is any amino acid
MEHEQKYEMLDRYCRDLTALARQEKIDPVIGRDEEIRRCMQVLSRRTKNNPILIGEPGVGKTAIAEGLARRIVAGDVPEGLKDKKLLALDLGELVAGAKFRGEFEERLKALIREVQASDGKVILFIDELHTLVGAGAAEGATDASNLLKPALARGELRCIGATTLDEYRKYIEKDAALERRFQQVYTAEPSVEDTIAILRGLKERYEVHHGVRIKDEALVAAATLSNRYITSRFLPDKAIDLVDEAASRLKIELDSRPTELDKLERRLLQLSIEKQALSREEDAASKDRLAKLEKEITGLTAERDTMRARWEDEKKDIQGIRELKQRIEDLKREETRYEREGNLSKAAEVKHGRIPEAQKQLAALFGQMEEKRQNAAGKARRHCCASKSAR

SEQ ID NO: 86258 - protein, 676 aa, Unknown
  Obtained from environmental sample
  DOMAIN (2)...(550): tRNA synthetases class I (I, L, M and V)
  misc_feature (1)..(676): Xaa is any amino acid
WPRTDSARGFSYDWDREVDTSAEDYYRWTQWIFLKLFDKGLAYEAESPINWCPSCKTGLANEEVKDGLCERCGAKVTRKRIRQWILKITAYAERLLADLDGLDWPEPVKLMQRNWIGRSEGANVIFKIDGHKYELEIYTTRPDTLFGATYMVLSPEHPLVEKITAPEQKQAVTSYIEAAARKSDLERTDLAKEKTGVFCGAYAINPVNDQKIPIWIADYVLISYGTGAIMAVPAHDERDWEFAKVFNLPIILVVAGRTTPTSPLPTPYSPTQCTTADGYSVNSGSYDGLPTAETKKRITQWLEDNKLGKNMVNYKLRDWVFSRQRYWGEPIPVVHCDCCGLVPLDEKDLPLKLPDVQSYAPTGTGESPLAAITDWVNTICPKCGKPAKRETNTMPQWAGSCWYYLRYLDPHNNKAFAAKDKMEYWAPVDLYVGGVEHAVLHLLYARFWHKVLYDAGLVNSKEPFMRLVNQGMIVSFAYQRKDKTLVPSDQVEKKPDGSFIEKATGEELSEVIAKMSKSLKNVINPDEIIKEFGADSLRVYEMFMGPLEVSKPWSTAGLIGVTRFLERIWGIANEKIKENKEERNSAEDMERLTKLLHKTIKKVSSDTVTLNFNTAISAMMIYTNELAKLAEIPRLLWEPLVIMLSVYAPHLGEELWEKLGHKESVSACSWPVFDEN

SEQ ID NO: 86259 - protein, 331 aa, Unknown
  Obtained from environmental sample
  misc_feature (1)..(331): Xaa is any amino acid
EPNYTPGYDGCEWTSQEMRDFYATMGHFTEGVSGYGGGKIIDRVKTMNGESANTTTIHRSAMISTLAKPNIDILGRHNYGSRNDNGAGTGETETDNWIYHATSPREMWMSEHNLNSNSGTSYPNDHTWNYIWLFMNDIDMTVRINHEAAFIWWSSKRFYSMLGDGTYGSRDGEILPRGWGLAHYAKFANESYRVGVGCSGTTKGGAALLEGTNINGRHYADFASDTVKVSAFMKLRGGEVYPVNWRGKSVPISDIAEITMVMFTPTAQSGSGGYDMGTVKLQLPSGFKIAGATAMRSDPAIFNRGKGDRGTPLWEQVQIQRQELGESVMLN

SEQ ID NO: 86260 - protein, 330 aa, Unknown
  Obtained from environmental sample
  misc_feature (1)..(330): Xaa is any amino acid
MRGTLCPKGAAGPITFNIEAKGGALTYQWYQYFTPREYVEQVGRLLYDETEADFTVPSSVSVNEEGMYFYYVVVTNTDNGANGRRKVSVKSLPAVLAVVNPNNAKFPTLTKQPVGGETLIFSTRMTIKPLEVEAEVTPPEASEEIRYQWYVSDIFDNTQGIPIDGATAQRLIPPVLIKGQAEDETKISRPGDYYYYAVVTNYNFNVSGQREASIASIPALVSIVANPDAVEPVITKHPASAIYFNGDTVKELKVEVEDPEDNGELSYQWYSNTKPANTGGRAVDNETRPSFMPPVSLGTPRQYFYYVVVTNTNSNATNIKQLNLQPDRGS

SEQ ID NO: 86261 - protein, 335 aa, Unknown
  Obtained from environmental sample
  DOMAIN (154)...(224): HAMP domain
  misc_feature (1)..(335): Xaa is any amino acid
MAEGSRHGRLFDAAQVLEAIHSIRAEARGCILFTGNRDKVIESKNEIEDHFKQFEASVERFSKALLDHPEAKAMFAEATEKYEKVFRPSVRKIIDGAERGVPKEELLTEMVANAKPAVDLISRNMRKCAEMDMSELHDVVAAGRGLAATGIVVVIILTLLCLAAIVFFGVHISNMISNPLNQAVKMIDELGHGHLDMRLSLGDRRDEVGIMAKTMDKFAHDLRHELLAGLKMVSVGDLSAPVTKMDDNDEIGETLRKTIDSLKVVVDAMKKISVGDLSVKIEPKSDKDEISAALKRTIETLHRLIVDDGGRFLNAAANYDLSQKLTGEYTGQFPK

SEQ ID NO: 86262 - protein, 269 aa, Unknown
  Obtained from environmental sample
  DOMAIN (4)...(225): Type I 3-dehydroquinase
  misc_feature (1)..(269): Xaa is any amino acid
MAKICICLTGKTLARDLELLESNRKYVDLAELRVDCLDPDERFHIRRFPEMAGLPVILTVRRSLEGGHYVGGEGSRISLLAKGLAYAAADQRRNFAYVDLEEDLNVPSLEEAARTFGTRIIRSWHNMEGVDQDLSGKIKKLRRVGDELVKVSVTANSLADVVRVYKAAKETAGIDKILICMGEYGVNTRILSEFLGSRISYTSQACDGLNSAAPGQLEPNVLAELYRFREITTKNKIFAIAGYPLKLPFTRSFHTVFRMEQTDPVFIPI

SEQ ID NO: 86263 - protein, 80 aa, Unknown
  Obtained from environmental sample
  misc_feature (1)..(80): Xaa is any amino acid
GKYGNREWKFLILSGIATGSSWLCYYKALQIGEVSKVVPIDKFSLVIGMVMAFIILKEIVKVKTIIGGMLIVFGAYVLIQ

SEQ ID NO: 86264 - protein, 326 aa, Unknown
  Obtained from environmental sample
  DOMAIN (88)...(202): Histidine kinase-, DNA gyrase B-, and HSP90-like ATPase
  misc_feature (1)..(326): Xaa is any amino acid
MGDEDNLEKHITKNLVKISNAGSNLLNIVNDILDFSKIESGKLTLSPVEYYMASLVNDVITLTITRLGEKPIAFYLDIPDDLPSKLLGDDIRVKQVLTNLLTNAVKYTREGRIDLIIRCTREGDIVWLDAAVKDTGLGIPKKDLNNLFLDYYQVDSTANRRIEGTGLGLPITKSLIEMMKGEIKVESEYGKGSTFSFRIKQGYVDDKVFGADVSDKLRHFCFIDDKRVNNQKLVRVDLSYARVLVVDDMRTNLDVAVSLLCKYNLQVDCLTDGPAAIERIQSGTPVYNAIFMDHMMPGMDGIETADENSRVRHGLRKEHTSCRICH

SEQ ID NO: 86265 - protein, 208 aa, Unknown
  Obtained from environmental sample
  DOMAIN (4)...(207): Glucose inhibited division protein A
  misc_feature (1)..(208): Xaa is any amino acid
LDYDCIVIGGGHAGIEASLATARLGFSTLLITQNPDRIGALSCNPAIGGLSKGNIVREIDALGGEMAKLTDATMIQYRVLNRSRGPAVQAPRAQADKQQYQQLARAVLEKQKKLSIFMDTVTDLIIEDADNHTLGKIAGVITGRGHRISAPAVILASGTFMEGRIFIGEYDAPQGRLGEEAARGLGTNLRRLGFPLGGKNGTRRGSRR

SEQ ID NO: 86266 - protein, 336 aa, Unknown
  Obtained from environmental sample
  misc_feature (1)..(336): Xaa is any amino acid
GTTAYSLKIADNSTGELSGQGNHWVIPAVDVTVKDAKGTVFAWVVTDRGRVTLVDSEMEAVQGFPLLTGLSISSAPTAFMGKLYLCDEDGKVYSVDAAGKQSVWETKFNAALRSPPSFLSVSGKKGNVVYTAVYPKSFFGEMWLLDGEGKALPNWPKPIAIEKNDDEDSGSFGIGFGSPLLFAQNNKVYAAFVNQSGQLLVYDEDAVLVPPFPVALDGVFYQQPVFDGTYLWLVSSNGSFFRVSLEGEILYQTIQGFSVKEEGYITFFDSDGDKVPEIYITGDGNALYAYTRNFRSLEGFPLPAWGRPLFVPAQGNKKAEIFGMGMDKRLYRWQFK

SEQ ID NO: 86267 - protein, 100 aa, Unknown
  Obtained from environmental sample
  misc_feature (1)..(100): Xaa is any amino acid
NTAKLVAECKFSSVKFHPLHIAKGTKFAEEYANGKIGLLSMEDYCKAAAEVIAIVQPDIAIERVSAECPSYMLVAPAWCGQREKIWEGIIANLGLEPEVR

SEQ ID NO: 86268 - protein, 96 aa, Unknown
  Obtained from environmental sample
  misc_feature (1)..(96): Xaa is any amino acid
MNVQFYSLGAAEEVTGSKHVIEVDGESYLIDCGSFQGSRAEADRKNQDFGIEADRIKSVILTHGHLDHCGLLPLLVKEATGAIFTQPPQAVTLQAL

SEQ ID NO: 86269 - protein, 352 aa, Unknown
  Obtained from environmental sample
  DOMAIN (45)...(348): Phage portal protein
  misc_feature (1)..(352): Xaa is any amino acid
MSIFDRISSIFKRNDYRRQINKAALCETDNEPFLPVDDCFSKFYGKPLFGEPFLLNAWVNIAVNILIRNIARADFVLEKDGVEIKSGSLYSLFHRPNPTLSRYDMWKETAAWWLIEGEAFWWYGADYSGGLPKEIYILDPRKIQLEGEGLDMGGSNKTRRWFYNAGAELVPIFSDELVHFRDWNPWNPLRGVNPLVSLSLELEQDFYANKANNTLLKNNAIPQGLLKTDQTLRPEEADALERRWESKYGQVKAGRQIAVLGKGTSFEALSFNPDVIKLFELKKWNLYTILAKFGIPPRVANISDRSTAFSGKDTKEQHSAFWQYTLIPLCGNLSNFRKPIFYALRLPGKRKV

SEQ ID NO: 86270 - protein, 581 aa, Unknown
  Obtained from environmental sample
  misc_feature (1)..(581): Xaa is any amino acid
CRWKSRGGREFFEEIENRRVDPGLLERVEGNNFRTRVYPIPSYGTRTIAIGYEEELALEKNSLNYRLPMAYPDSLEKFAVKATVWKSSLKPLVPDSADGLRFDKVDENYVASFSREKYRPARALNFALPTPVDIPQLMMQPAQGNYYFFASVTPKLETRKKRWENDLAIIWDVSLSGSQRDLKRELDLLNTIFTDKKDANVHLYFLNNKFKKIANKGTSNGEYKVSNGKWDELKEVLETAVFDGGTDFSKINPNDITGNEILFFSDGISTLSDADFLKNANANRPIHCLVSSAKADYSAMKLITGKSKGKFININALSSQKLKDELLNETLQFLGAEHGKSVREIYPSIAAPVHGNFSIVGISDTNDAELTLLFGFGGKVERRIKVKLDAKSADGQVNVHKIWAQKKIEELDLNYEKNNAELIALGQQFGIVTRNTSLIVLESVDDYINYNITPPISEPQLYAEYQRRTKGLQGQKSNRVQPSRLGGAATSDDLLRRGGFATDIDAILSSAGGLRSRGDGGAGRTGVAGIGYGSGYGSRFRGGGGGVDDLLGGLSGGSGLALREKGELRVSSPDFLKGGHL

SEQ ID NO: 86271 - protein, 109 aa, Unknown
  Obtained from environmental sample
  misc_feature (1)..(109): Xaa is any amino acid
MNEKTNMGDSSQITRDYFDSLLVEMRHIDGVLPSTKMELFGEKFSTPIMLAALSHLNETHPNGMFEVARGVKAAGAVMWAGMGDEAELEAITATGAKTIKIINLLALHK

SEQ ID NO: 86272 - protein, 479 aa, Unknown
  Obtained from environmental sample
  DOMAIN (299)...(368): HAMP domain
  misc_feature (1)..(479): Xaa is any amino acid
MVMDMGNKTRLSDKFIRFSIGAKLVTIITILVLVSLGTITFLVSYMVSQDLEISAEENNFEINRRSSAEAEHTLANVRANAQILIKVMNSMGMNSRLLEQTEEFFFEENKQIAAIVFQTPDNDAKFLINESFFYLRDIDSSLVNSYYAKNIEYYQKAAFGESSFLNAYKHFSMHLLALFFPLPNGQTSEGRAVFILFSPEYLNDNLSSGINQSYLINNKRDILIHPDFEMVRTSANISGRDDVRMIRESAIRSRQDLHEIDGVKYFIAFTKLNIGASIVVTSIEYKKIFEVINTTTRRNLLLTAAVVFLSILFIWFFSKTISSALKILSNAARKIEGGDFELDLKPRSRDEIRFLTTSFQRMSQAVSIFGKFTNREIALKPWRAEIKPGGLPKPPRFFSLTSGLYEKSKFFKKNTEGRLLKKLFSGLTKFFPKGNSAGKKKTGFGEKILRAPPLYWAFWGGEGYTPPEKNPPQKKRPFF

SEQ ID NO: 86273 - protein, 68 aa, Unknown
  Obtained from environmental sample
  misc_feature (1)..(68): Xaa is any amino acid
VKKKWNELLAITQTAKELNRVNGLLIASHMQRNAQALSILHANAGNSVYGPNGQQKHNLTKIHSVITG

SEQ ID NO: 86274 - protein, 219 aa, Unknown
  Obtained from environmental sample
  DOMAIN (108)...(170): SAF domain
  misc_feature (1)..(219): Xaa is any amino acid
MSLAHIKIGFALLLAGTAYAQTMPARQDIEALRPIAEQFLITQTAGIAGKSEITLGAVDKRLHLAACQAPQAFLHAGAKAWGKTAVGIRCTAPATWTIYIPATVRVYGDYIVAASALPQGHVIRETDIKLTTGDLTALPAGVMTNTALVIGQTLARSLPIGSPLRPEALQVKKVITQGQTVRIVATGPGFQISNEGRAITNASSGQVAQAVTTSGQIIR

SEQ ID NO: 86275 - protein, 266 aa, Unknown
  Obtained from environmental sample
  DOMAIN (75)...(259): Binding-protein-dependent transport system inner membrane component
  misc_feature (1)..(266): Xaa is any amino acid
MTEQQLSIYAINKIIVNALKYLVALALIMFAVIPFFWIIATSFNPARSLLGARLIPPTLTINNYRDLVTNTNLDFSKWMINSFKISAMSVMIIVLLTCTSAYALSRFRFKGKRGVMMGIMILNIFPGILAMIAIFIMMQQIGNYFPFIGLNTHGGLICIYVAGSMSINVLMVKSYIDTISKELDESAIIEGANYWQIFWKIIFPVIKPMVITVAILAFMSTYGDFVIANLLLKGNDKITVMVGIFQFTQQRLTLTGDRTCLGQSVL

SEQ ID NO: 86276 - protein, 218 aa, Unknown
  Obtained from environmental sample
  DOMAIN (90)...(218): von Willebrand factor type A domain
  misc_feature (1)..(218): Xaa is any amino acid
MRFGNPEYFLLLPAVPLAALFFFIMYRRKAKLLSRFASAPLVRKLNSSAGPARYILKSTFFCLFLTFVIFALVRPKFGVKMEMVERKGVDIMVALDISHSMLAQDLAPNRLERAKLEIRKFINLLKGDRVGLIIFAGESFVQCPLTLDHAAAAIMLQSVSTDWVQLQGTALADVIKQSVRAMGGTNKKHKVLVILSDGEDHEGSVTEAARAAAQARIV

SEQ ID NO: 86277 - protein, 55 aa, Unknown
  Obtained from environmental sample
  misc_feature (1)..(55): Xaa is any amino acid
EASEIILRGGGKVSSSVSSKTDYVLAGSEAGSKLDKALSLGVRVIDEGEFEGMMN

SEQ ID NO: 86278 - protein, 77 aa, Unknown
  Obtained from environmental sample
  misc_feature (1)..(77): Xaa is any amino acid
FIARYYRKSFGECAATLENLGAKITALACVVDRRQTGIEIPWLFYPACRVNAANWEADSCELCKKGIPAVKPGSRKI

SEQ ID NO: 86279 - protein, 240 aa, Unknown
  Obtained from environmental sample
  DOMAIN (125)...(228): OmpA family
  misc_feature (1)..(240): Xaa is any amino acid
GYRERKEEKEDPSSPDTSLQTYGDMVTLLLCFFAVLFNPVTDSEDILNAVAQYFSNIGWGYSLSPGAMVPSGNTIASLPSQTRGNVLGEVLKRAVSLFNPENRSNMVKVTQDERGVVISFASDVFFNEASAAINMEAARGILLNLVALLSSEEVAGRKFRIEGHSDSSPIDPAGPWVSNWQLSTERALSVLYYLIDMGVSETRMNVAGFGSTMPISSDSTPQGRANNRRVDIVIIDDAHL

SEQ ID NO: 86280 - protein, 67 aa, Unknown
  Obtained from environmental sample
  misc_feature (1)..(67): Xaa is any amino acid
MWPWSNFPHPEISATYDVNQAEAAASRRQLLDYAAKNNIPLGGMHIVYPAMGTVGADGNGFRFVPFN

SEQ ID NO: 86281 - protein, 214 aa, Unknown
  Obtained from environmental sample
  DOMAIN (3)...(214): Uncharacterized protein family UPF0007
  misc_feature (1)..(214): Xaa is any amino acid
MEAAAVICAAGASARMGGVKKEYQKLPAGNTVLGAAVLAFSAVPSIEIIVIAVCPDSQDEARASLAPESLSAGKPKVLFVNGGESRRASVFNALSFLSQYSPCYVLIHDGARPWVTVNLINNTLESAKKHGAVIPLLALTDTPKEFGAGFITRHLKRANTGIAQTPQAFKFPDIFYAQSKAAEVKDEEFTDDAEIWGRFCGPVAVIAGDPENRK

SEQ ID NO: 86282 - protein, 126 aa, Unknown
  Obtained from environmental sample
  DOMAIN (29)...(125): ThiF family
  misc_feature (1)..(126): Xaa is any amino acid
MNLSNEEISRYSRHLLLPEIGVEGQEKLKAAKVLIVGTGGLGAPLALYLAAAGVGTIGLVDFDVVDESNLQRQIIHSARDVGRPKVASAKDRIKGLNPLVNVVTHNEMLSSRNALELSPVDILAIN

SEQ ID NO: 86283 - protein, 420 aa, Unknown
  Obtained from environmental sample
  DOMAIN (116)...(146): Putative Fe-S cluster
  misc_feature (1)..(420): Xaa is any amino acid
MGGDIAAGVDSAFGDCLNCEKGCNGGPGTGNVSMSEDKLESLIRKRSAEHERKLTSKQRKRQYKEYHKLLNQYWKPGLYDRSYRNLSGNVVMRQPNEAELTEIYRKMKKFTKEDLYDCGACGYGSCKGMAVAIHNGINKTENCAHYTLDILKEKKDADELVRLLQEQISQGSGLAEGITKLVHELNATIGSQSEAVDQSSAVTVKMIDSIRDTSAVSMKQQESVKGLIENTDKSQKSMKATIQSVDDISQSVDGISQAIKIISAIAANTNLLSMNAAIEAAHAGDAGMGFAVVAGEIRRLSESTRENSQNISRTLKNIINGISVTSKQSGDTDGRITEMSKEINGFAETMTNLIKTLSELSTGSDEITAALRNLRNQSNVMKTNYAEILTKTNQLHTAMLELTDISGHNQLSPAIQAAAR

SEQ ID NO: 86284 - protein, 207 aa, Unknown
  Obtained from environmental sample
  DOMAIN (1)...(144): Methyl-accepting chemotaxis protein (MCP) signaling domain
  misc_feature (1)..(207): Xaa is any amino acid
MAEARSHAAVEAARAGEAGKGFAVVAEEVRNLAMLSAEAAKNTADMIEESVKNADGGVKITVEVAKSLGRIVDRTGKVGDLIAEIAAVCNEQAEGIEQVNIAVANMSQVTQQNAANSEESASASEELSSQAADLASMVREFKLSENSPAKRSAPPPKQQPQNRQFAFMNDKRMMVSKAPEKAPETKSIKAVGAGEIILLDDRELHEF

SEQ ID NO: 86285 - protein, 489 aa, Unknown
  Obtained from environmental sample
  DOMAIN (4)...(119): Response regulator receiver domain
  misc_feature (1)..(489): Xaa is any amino acid
MDKKRVLIFEDSDVFANVLLEFLNAEGCETQRAKNGLEGIKLVYSFLPELIITDVEMPMFKGCGAVRFLKSRPAARNIPIIMLTNPGETKDRFWGEQAGADIYIEKTPENLDELSGQARRLLGENRQVDYERIKKEGEKINDNSLVEMVNNLLDNKLFQATLTSLLAELSGKVISLEETVKGVFALLENACRAEMCSIMIKDADDALVVYNANNAGYTEAIAEDFKAITIADFNTRFSDYKVVSKEVHDFFPAGERNERIESYILIPLTSANEEFATVHIGSSVKEYFSPPILENINVFLSAASPIIANALHLKQMETLQKKTRAAFARYVPIDVMDEIIKKSSSPSSQSESRVVTILFSDIRSFTKISENTPARELVDFLNTYFSVMGDQIIAEGGNIDKFIGDAIMAIFGAPKTLENSAASGVRAAIRMVKALPQVDTSSITLPEGGFGAGIGLNCGECVVGNIGFQNKMDYTVIGDTVNLASRLEG

SEQ ID NO: 86286 - protein, 144 aa, Unknown
  Obtained from environmental sample
  misc_feature (1)..(144): Xaa is any amino acid
MQYSPKIREEELKNKVAVDFFAKYDCTDIIKDIDFAVKLKRPANTINFNDEYLLWAEAKSAPSDILIMLTQLVLTIGKARTFHQVLPPKFLGCFDCEKIAFIPYADIQDIFHHNDFNWKAAPSYRKSKNLGSSSPIDKIITSAN

SEQ ID NO: 86287 - protein, 185 aa, Unknown
  Obtained from environmental sample
  DOMAIN (87)...(185): RNA pseudouridylate synthase
  misc_feature (1)..(185): Xaa is any amino acid
MPDLSQVIDEQLPQPVRLDRYVSENLRILSRSQIKARSLTAKVNGKEVKNSRLVKKGDLLELRWQDCPPVNIIPQDIPLEIIYEDDNCVVVNKAQGMVVHPGAGNRQDTLANALYFRRLNRDGAESGADTDNVRPGIVHRLDKDTSGNIIAAYNEEAHAFSAGQFKARKTKKTIRRLFRLAERNN

SEQ ID NO: 86288 - protein, 110 aa, Unknown
  Obtained from environmental sample
  DOMAIN (8)...(107): Nucleotidyltransferase domain
  misc_feature (1)..(110): Xaa is any amino acid
LIAAAEYVEGLRRRQEVLGDKLKKVILYGSYARGDYNEYSDIDFFVLADIPQEECCDAGSDIYDRIWEYELEQGLMISPHVTGYETFLNWRNVLPYYMNVIKEGVELYAA

SEQ ID NO: 86289 - protein, 323 aa, Unknown
  Obtained from environmental sample
  misc_feature (1)..(323): Xaa is any amino acid
AELLRIEKIYSASAALERQAAYYYYFVVDAELKRGIIARTAELEKGRNYLNGQKRTRADGSSVTDLFPSEALETLTAMLASLSNDLERGNSAIAYYRNETKLVLTDEQITAIKTSCEKSIAELNTLRNQGVTLRTTANSRTTQAEAFRQEGERLLREAQAAYRSQNFDTARDRLQRASERFNSSLEVQQSASLRQSWDTQLFNLGQAINASENESIIAEVRNLVNRARASYFEGNFQQAEDGLIRARSRWRITNVDENEEILYWLGIVRGAMSARSGRVIPVTAPLYPEMSQLLKQARMNYEEGGAVNKRGAAGASGACENLT

SEQ ID NO: 86290 - protein, 180 aa, Unknown
  Obtained from environmental sample
  DOMAIN (37)...(160): CobB/CobQ-like glutamine amidotransferase domain
  misc_feature (1)..(180): Xaa is any amino acid
MTGVINYGAGNLGSVMNALKRLSVQARFVSGVDELALGTTPFERLIFPGDGHFATAMASLAKSGYDQAIREWIQADRPFLGICIGLQLLFDSSEEAPPVNGVEVKGLSVIPGTVRRFPGRKLPQIGWNQTEARLNSRLFKGINEKSFFLYIHSYYADPTDVSVCAAQSRILFALLLPCGT

SEQ ID NO: 86291 - protein, 71 aa, Unknown
  Obtained from environmental sample
  misc_feature (1)..(71): Xaa is any amino acid
GYREDNLSSSDHLSYFKTNPSYSKTNPSYSKTNPSYFKTNLSYSKTNPSYSKTNPSYSKRNLCYYKINSSY

SEQ ID NO: 86292 - protein, 320 aa, Unknown
  Obtained from environmental sample
  misc_feature (1)..(320): Xaa is any amino acid
GFPGSESAERTARQYLAFTHADSPGIKHLRQLRQAGMNTIHLLPTFDIASIPEEPNEQKKPGDLAQYAPDSASQQAEIEKIRDQDAWNWGYDPLHWNVPEGSYAVEADGGKRTYEYRAMVGALHDLGYEVVADQVFNHTMANGQGKHSLLDKIVPGYYYRLCMRTGNVFDSTCCPNIATEHKMAEKLMIDSLVLWAKEYKIDGFRFDLMGHHTRANMLAARRALDTLTLAKDGVDGKSIYLYGEGWNFGEVKNDALFVQARQGNLGGTGIGTFSDRLRDAVLGGTPTEDAAIFAQGFGTGLYWDPNGREAKLGKPQIVNH

SEQ ID NO: 86293 - protein, 49 aa, Unknown
  Obtained from environmental sample
  misc_feature (1)..(49): Xaa is any amino acid
MNFTEDNVIGYFQPILSAETNDIYAYEVLGRYLDTDGKIKSLGPFFNNP

SEQ ID NO: 86294 - protein, 422 aa, Unknown
  Obtained from environmental sample
  misc_feature (1)..(422): Xaa is any amino acid
MALGSFSDWEQSGIDSQLQSVLSAGKKPAPYISETEWGFFLTAREPIYRHDGTTAGYAGANFYMGTVLADQANSFHINIIVTIFVFLTSLVMYFLIVYKLVAAPLRTLTVNVGKLSSGEVLPLVLASRENEFSLLEDTFSDMSKRNAYSNKITDVLNKTAIIFLSQRDGTFDDTMTHGLKLFCDALNLDTVSIWRNFHESDGLHVSQIYRWNRESGGTTKPQPGLEDITYAELAPQWEYLLAVGKFINSPARLLPEAAMLKSFGIASVFVEPLLINNVFWGFALFGDHRDERYFDEDSMGVMRSAALLCANTVVMHEKTQNERKTNEILERRMKYTHALNRMLEIFVSSAEGSTDAVMGNGLWSVMDVTSLDPAPLFSAPKNPAYSKTSNEKKNPGEIYPLGTETGRESASYLMTELKDIGL

SEQ ID NO: 86295 - protein, 95 aa, Unknown
  Obtained from environmental sample
  DOMAIN (1)...(84): Ribosomal protein L1p/L10e family
  misc_feature (1)..(95): Xaa is any amino acid
AHPKTGTVTFDLKSTLAELKKGRVEFRADKSGVLHLAVGKVSMEPSQVAENITAVMTEVKRKRPVDVKGEFIQTVSVSSTMGPGVWVAMKDQDKE

SEQ ID NO: 86296 - protein, 69 aa, Unknown
  Obtained from environmental sample
  DOMAIN (5)...(67): NifU-like domain
  misc_feature (1)..(69): Xaa is any amino acid
MEEQVKAALENVRPSLQADGGDVEFVSVDKEGTVSVKLTGACGHCPMSQMTLKMGIENTSKRLGRSDHW

SEQ ID NO: 86297 - protein, 60 aa, Unknown
  Obtained from environmental sample
  misc_feature (1)..(60): Xaa is any amino acid
LGGLSRVAGRSLAARKELAAELNYTGTDPDGSAEKNIWLHKALMKKLAENGGKIPQDLLK

SEQ ID NO: 86298 - protein, 98 aa, Unknown
  Obtained from environmental sample
  DOMAIN (17)...(98): Thioesterase superfamily
  misc_feature (1)..(98): Xaa is any amino acid
MKTECTLQVRSYECDGYNHVNNANYLNYLEYARYEFLKDIGFDFVKATKAGYGLYIARIEVDYKKPAFTDDTLLIKSRPIKQGAVSGTIAQDSSKSVI

SEQ ID NO: 86299 - protein, 349 aa, Unknown
  Obtained from environmental sample
  DOMAIN (101)...(134): Tetratricopeptide repeat
  misc_feature (1)..(349): Xaa is any amino acid
LGYRDLVFPGKFLLASLRYRQGQYEEAARLADELIFLNRDDSLSWYLKGVSFIRLGRFTEAQSVLSTAANINGDDEFIRTALEELLISRTRIEDSARSRWASWHFARARSFRISNQLEQALFEYRRGLRLNPYAGDRREYAELLRLQGYPARYLEELKFMQNLGLADTALNDAVESYTALLSNALFRRWDVDPVMISKPHWKLAVFSLASQSTFYHADAGAGASSYIKDLLVHERNILPMDVELRQPSFSAAFRTAREIGADYFLVLSVSENERDISIKGELFVARTGSQAAVFNAFRTGTDRLRYAARGIVDQLSSAMPFRAELLLRRQDQGLIDKGRADGVKDGDVF

SEQ ID NO: 86300 - protein, 106 aa, Unknown
  Obtained from environmental sample
  misc_feature (1)..(106): Xaa is any amino acid
IAASFQKNRCGNSSPRPVPGGEDTGLRTVVAGGGVAANSYLRARLAEYTTGERTGQLRVIFPPPELCGDNAAMVAGLGEQYLLRGDRSPLNVTASARVQVFKKRYP

SEQ ID NO: 86301 - protein, 225 aa, Unknown
  Obtained from environmental sample
  DOMAIN (4)...(221): Type I 3-dehydroquinase
  misc_feature (1)..(225): Xaa is any amino acid
LAKICLCLTGKTIKQNLELLDKYRKFADLAELRVDCLDSEERLYIRRFPEMAGIPVILTVRRNVDGGHFTGGEGARLKLLANGLAYANADSRFNFAYIDIEEDFNIPSLEEAARTFGTRIIRSCHDLSGTIIEDISAKMKSMKRSEDEIVKVAISVKNTRDVLNVFHASNSFVNQDKILICMAHYGIYSRNSAGNFGSFLTYSSALSESVIPRSPPDNGRLKSFR

SEQ ID NO: 86302 - protein, 162 aa, Unknown
  Obtained from environmental sample
  misc_feature (1)..(162): Xaa is any amino acid
MYMEDWVEEHESYPVGTMSSQRLSELLGAFGQKERNGFFKAWCAANISDEYMAVDITSISLYSRLIPECERGYNRDGENLEQINFCLLFGERTGLPVYQAVYSGSIGDAATLKATLAEVEAVSGGKRLILVADKGFYSVKNVNMMLEPVSSCRLLSLGQPKC

SEQ ID NO: 86303 - protein, 266 aa, Unknown
  Obtained from environmental sample
  DOMAIN (33)...(237): ABC transporter
  misc_feature (1)..(266): Xaa is any amino acid
MSKPYLRLNVQDLYIEFGGLKVVSGFSCELYQGELVGLIGPNGAGKTTVFNMLSGIYTPTGGEIEFRDHRGLNYLVRDLTPSMLNNLGLARTFQNIRLFSNLSVEDNIRIALHSGRTSGPLDALFRLKPFRVDEERMHAQAGELLSLFKIEKKKDELARNLPYGEQRRLEIARALASNPCLLLLDEPAAGMNPQETEDLMKTIKFIRNEFHLTILLIEHDMHLVMGICERLIVLDYGRTIASGSPEEIRQNPAVIKAYLGTDAVNG

SEQ ID NO: 86304 - protein, 73 aa, Unknown
  Obtained from environmental sample
  misc_feature (1)..(73): Xaa is any amino acid
MDAAYLPILKERMGDPLLALLAYNGGMNRVRRWRNSVPAKFPSDLFLETVEYAETMDYGRAVMGSAAMYRALY

SEQ ID NO: 86305 - protein, 448 aa, Unknown
  Obtained from environmental sample
  DOMAIN (108)...(221): MMPL family
  misc_feature (1)..(448): Xaa is any amino acid
MDDPALTTSRWIDGMFGSSFFILVGLQRQYGTVFDADFINSIKDFTTEIEDIPIVRSVTSLINAEYITSKDDAIIVEKLLKSDFTGTREEIAELKRRLLSWDMYERALFSDDFTATQILIPLSINSEQASSKQTNEYFINIRDIAHKYFDGYATVHVTGMPVIIATVNEAMNADLKLLIPVFILVVLLILCISFRSFTPVVLPLISVVISVIWSVGAMPLFNIKLSVISTVLPVILVAVGSAYGIHIVTHYLLRREMDNSDISPEEHNVLVIEVVNKIKKPVFLAALTTFVSFLSFCFTAVAPCREFGYFSSFGVAVAFLVSILLIPSLLILRRPKKIKTVKSSNTESRGFSGFIADNLFILAMRKKTILFIAFLVVIFSVYGLSKLIIDNVMVEYFRPNTEIYIADKFIRQQFGGSKIVSVVASADSTEIILHPDTSAAMDGLPDPS

SEQ ID NO: 86306 - protein, 337 aa, Unknown
  Obtained from environmental sample
  DOMAIN (223)...(304): OB-fold nucleic acid binding domain
  misc_feature (1)..(337): Xaa is any amino acid
LGGSKYQIGTRDLERAVEYAQKNKEDKLSGQSSLFEDVSDAGLPDFAFEEFPDISRAEWLNIEKQLIGFYFSGHPMDEYKEIWQKAVKVDLGNHAGLKTGNCILVGIMNSIKVITTGKGKMAFATLADYNGEIEVTFFSKVWDKLNTRIKVDKVVILRGKIDYQQDKDRHGFIAEDLLDISEVDSAISEDEEQERNNSVFRNTWTYTADLKSSGLTSVKKGNYTAMGFLKRIREHRDSKGNEMAFGTLQDFEGEIDLVFFSKVWDECRALLKQDEFVALKGSYDPEDKKNQKNASFKVSSIADLAQLTRSAARKATAGEEPPAPAKAQSGLGAQSGL

SEQ ID NO: 86307 - protein, 191 aa, Unknown
  Obtained from environmental sample
  misc_feature (1)..(191): Xaa is any amino acid
MALSKEQENWLDQNDSDGENFANVPEELSTEEFWKVAVAKNVWALKYVPEKWKTHALYQVMRYVAYSSHSLNSYEYDLNRVPEELRTEAVCLAAVQQDGWALEFVPEAARTEAVCFAAVQQDGWALEHVPEALKTEALYLTAVQQDGGALKFVPDAQKSETLCIEAVKQNMNAMMYVPEDKKDTVKAAKKE

SEQ ID NO: 86308 - protein, 120 aa, Unknown
  Obtained from environmental sample
  misc_feature (1)..(120): Xaa is any amino acid
VTKLVYTFKTDILFKMLFVKHTDLLKQLVCELLCIRPDSIGEFYVTNPEMPPDNLTDKFCRLDINMTVNGQRVDLEIQVRDEGDYPERTLFNWARVYSTALPSGRDYKDLPRTVIISIIN

SEQ ID NO: 86309 - protein, 322 aa, Unknown
  Obtained from environmental sample
  DOMAIN (6)...(318): Hsp90 protein
  misc_feature (1)..(322): Xaa is any amino acid
SGSDWPRDHSGTALWRRAKSELKDEDYKEFYKSLGHDSDDPLFYVHTKAEGALEYSTLFYVPKKAPFDLYHVDYRTGVKLYVKRVFITDDDKELMPTWLRFVRGVIDSEDLPLNVSREILQQNKILFNIKNASVKKLISEFKALADKAAAGDEEAKKNWETFVGQFNRPLKEGLYQDFANREAIQDLVRFKSSTVEGWASLAEYVSRMKSDQKNIYYITGGDEKTLKASPLLEAYTAKGIEVLIMDDEIDDIVIPSLHSYRKEVPGADGKTETHTWELKAVNRSGADEELGEKTDKAAEKEIKPVIQKIKKAPGRQVKGRET

SEQ ID NO: 86310 - protein, 79 aa, Unknown
  Obtained from environmental sample
  misc_feature (1)..(79): Xaa is any amino acid
MITHTVGFLMTNDWGLKNGNDDTLLKFLCEMFHPIIRSDKTDWQSVLANINELIKEDGYEIYESGKISGRTIYSYRFNL

SEQ ID NO: 86311 - protein, 321 aa, Unknown
  Obtained from environmental sample
  DOMAIN (142)...(321): Enolase, C-terminal TIM barrel domain
  misc_feature (1)..(321): Xaa is any amino acid
GEIYEYILDVHARQILDSRGNPTVEVEVLTESGYFGRAAVPSGASTGVHEAVELRDGDKSKFLGKGVLKAVENVNTEICEALMGTDVTEQNDIDRIMIELDGTPNKGRLGANAILGVSLACAHAAAEFTNQPLFRYIGGTNANTLPIPMMNIINGGSHADNSVDFQEFMIMPVGASSFAKAFRMGAEVFHTLKNVLHKQGMSTAVGDEGGFAPNLKSNEDALKVIMEAIEKAGYKPGEDIFIGLDPASSEFYLEDEKVYHLKKSTGEKLTSQQMADFWADWHKRYPIISLEDGMAEDDWDGWKYLTDKIGKTCIWWAMICL

SEQ ID NO: 86312 - protein, 349 aa, Unknown
  Obtained from environmental sample
  DOMAIN (10)...(241): Glycosyl hydrolase family 3 N terminal domain
  misc_feature (1)..(349): Xaa is any amino acid
LIGWGYPNTTGGMNACTGLRAPASPPVFPQAIALAATFDDDLVKQVMDAVSDEARAKYNGAIMQGNRGQYWGLTFWTPNINIFRDPRWGRGQETYGEDPYLTARMGIAVVRGLQGNDPENLKLAACAKHYAVHSGPEKDRHTFNAIVSKKDLWETYLPAFKALVDAGVESVMGAYNRTLDEACCASNLLLKDILRGRWGFKGHVVSDCWAIRDFHQYHKITNTPEESAALALNAGCDLNCGCTYPMLTVARKKGMVSEGAIDTALTRLLRTRFKLGMFDPPARIKYRKLGLKVINCEKHKQLVIKAVEKSIVLLKNASKIPPTDWSYKVITVAQPDGGDRPGGAARHQF

SEQ ID NO: 86313 - protein, 64 aa, Unknown
  Obtained from environmental sample
  misc_feature (1)..(64): Xaa is any amino acid
MENKTGYRAVSKYLLGSPFKVRPVADLVRRKPYPEAMSVLENIPHKGARLIRKTVRPPLSWNLS

SEQ ID NO: 86314 - protein, 86 aa, Unknown
  Obtained from environmental sample
  misc_feature (1)..(86): Xaa is any amino acid
VFGGDYRERSVRQAVTESQKADLMLVLGTSLTVFPAAGMPDYTLRNGGKVVIVNNMPTPLDGRALLHFDDLGSVFEELQNCLHSES

SEQ ID NO: 86315 - protein, 314 aa, Unknown
  Obtained from environmental sample
  DOMAIN (21)...(270): Transposase DDE domain
  misc_feature (1)..(314): Xaa is any amino acid
MKNTWKKVKKFVRAYEEEDACLVFDDTIIEKTYMDENEIICWHFDHKENKAVKGVNLLSAFYHSEKNGQSVRLPTGYRVIAKTEEYTDEKSGERKRRSPITKNEMMQEMIKRHMQNKVKFTYILADSWYSSAENMRFIDKRGKVFIFELKENRQVTDSEKERNQGGFERLDTLELPEGKPVKVWIKDLEFPVKIFKQVFINKDGTNGQRFLVTNELSLTEKQFKTLYKKRWGVEEYHKSLKQNASIGNSPAHTERTQSNHIFAAILGYVKLEKLKQATNLNHFAMKAKIYMASMMTAKVTFQELWKNTQNLAFA

SEQ ID NO: 86316 - protein, 135 aa, Unknown
  Obtained from environmental sample
  misc_feature (1)..(135): Xaa is any amino acid
MDISAQLSAELSLQEIQVKNVLALFDEGATVPFIARYRKERTGSLDEVRIRELLHRYGYYKELDERRQAILDSIREQGKLAPELEGRINAALSKAALEDLYLPYKPERSTRAAKAKEAGLEPLADWLFALTEERC

SEQ ID NO: 86317 - protein, 104 aa, Unknown
  Obtained from environmental sample
  misc_feature (1)..(104): Xaa is any amino acid
MLKYLLFDLDNTLYSRHYGLENNVSRRIFEFASALLGIPPEEVRRQRMEMRKQYGTCLEWLMTEKGFTDVEAYFAAVHPPGEADILVPNAELRAFFPASLVPST

SEQ ID NO: 86318 - protein, 107 aa, Unknown
  Obtained from environmental sample
  misc_feature (1)..(107): Xaa is any amino acid
MPLLKVSDESVRQAAAVLVQGGLAAFPTETVYGLGGDAFNPLALAHIFEVKGRPRFDPLIVHIAAFETLEKVADLSLLNTQSRTNLAALTKQFWPGPPHPDFTQTKW

SEQ ID NO: 86319 - protein, 556 aa, Unknown
  Obtained from environmental sample
  DOMAIN (180)...(266): Glycosyltransferase 36 associated family
  misc_feature (1)..(556): Xaa is any amino acid
MIARSPAPWANYLGSPAYGAIISNNAGRVTRFVKSGAAGRLIRYRFNEQDRPGRYVYLRDDEDGDYWSASWQPVGKPLDKYKSVCRHGTGYTQIEADYKDIHSQVLYYVPQDADYEVWKVKVTNTGNKARKISCFGFVELTCESFYEQDQVNLQYTQFITRTYFKEKFILQTINENCLNAVNESRVDTRFFALAGAKVATYCGDRAAFLGKYHDYGNPVSVENGKLDGTLNYNLNPCGALHTAFDLAPNETKEFVFLLGQKREAQVKKLVSRYEDMSLPEKEIDKLKTYWHSRLANLTVNTPDENFNNMINTWNAYQCFITFVWSRAASLTYCGQRNGYGYRDTVQDIQGIIHLDPKMALEKIKFMVSAQVSHGGALPLVKYDHNPGHEDKPEDESYRKNTGHPSYRADDALWLFPTVWKYVAETGNATLLDEVIPYADKGKDTLFKHLKKAIGFSLNNLGIHGLPAGLHADWNDCLRLGAKGVSVFVALQLYYAFEIMIRFAKFKKDSATEKEMTEQKNRFGKIIEKYCWKDDRFVRGITEKDVTVGRKASSPST

SEQ ID NO: 86320 - protein, 284 aa, Unknown
  Obtained from environmental sample
  misc_feature (1)..(284): Xaa is any amino acid
LAAQKRPQPIIGKKKASLNREFWVKDDILNLMNNNVIKQLCAEVKLPKMLRVKQLFDRDRIDPAKIPEAVFAQMSRPELGDYIKPGKRIAITSGSRGVANIAIITKAIADFVKSRGAQPFVVPAMGSHGGATGEGQKALIEGYGVTEEFIGCPIVSSMETVIIGKTDEGQDVRIDKNAACADGIIVAGRIKPHTDFHGNYESGLMKMMAIGLGKREGADICHRLGFGHMAHRVHLFGKAIIKHAPVILGLGIMENAYCETCKFIALKPDEIEREEPSLGRSDHW

SEQ ID NO: 86321 - protein, 95 aa, Unknown
  Obtained from environmental sample
  misc_feature (1)..(95): Xaa is any amino acid
MGNGEWGIRDRYAPSPTGLQHVGGIRTALFNYLFARSRGGTFVLRLEDTDRTRSDARYVQNLYDTFSWLGFSLGRGAGHRRCFRALHAVRTLGVV

SEQ ID NO: 86322 - protein, 68 aa, Unknown
  Obtained from environmental sample
  misc_feature (1)..(68): Xaa is any amino acid
YRESDQCIYIGGDIITSVEGMKIATLSDLYSALEHSKPGDKVKVGILRGDTNLTLEIPLADREEVMNN

SEQ ID NO: 86323 - protein, 610 aa, Unknown
  Obtained from environmental sample
  misc_feature (1)..(610): Xaa is any amino acid
VFWGGLYGRDDTISYCPAWGYTGLFNAQPSIRGGFPGDMNASLDGYYVMNPYHWGGGFSIFDPRMVQSAQLSHGVFSTRYGHTISGLLDITSKTPSPVDTEFELAASSSAVNFNLSFPLAGKGGILVMGRVTYYDPAVWLMQALSIPLYDMGLYTQEQVDILNAVRVAPYIRSATITGNYRFTDNLDLHATGFWGMDGVGFTYAYETQEDKGLSSSSRTALDWTNYQGFVTAALNWNPRNDMLVKFTIGTGYEDAVVDADSLNIVSKDSFSDDFKEKYKELFPLPPLPQLNIRPSPYDVHESMQESDLIFNVQTRADYDWDLGKGFLVASGMQEMFTRYSMKGDQQGFYEIKFKNMEPRDQKRITDLFGPFSFILSDQFKNDLRIAFPVTYSPNAENFLFTTSSYGLVEYSTPDKRFNAEFGLRVDHYYLLGDGFSYGTKPVLNPRLNADYNVLRDKWILESLDISAGTGLFSTIDNTLFMAEKKHDLGEVKPNRSWTSVLGTKITFPEGLILNIEGYYKYIFNRMYIPVNININDIDIRPQFNGEGKVWGIDMMLQKLQSRYWDGWLSYSLSWAKYRDPSSGDATTGYSGGTRGNNCTSQVSPFHTRDN

SEQ ID NO: 86324 - protein, 365 aa, Unknown
  Obtained from environmental sample
  misc_feature (1)..(365): Xaa is any amino acid
VFHVQDAVKCHFSGTQSGNSSFYLDGELVYSCKEAGPYQFECKLQAGQNNFSVVSECPGIESSVHGQRWDFTLEVTPETETPIRMENPFFSSSALPWAFAGPFRETSTAALTGSFDREQLVGAEGERTWWRLDLPACFVRLYNENPLYGHWNYPLGVTLYGLIETARFFKRNDRQAAGSAMGGYVYSHAAHSIRTLDYALFDKEHFGGATAVHHLLTSIDSLDDCGSFGSLVLELAKDADSGALPQEFSRAADYTADHILNKQDRLPEGCFYRRQMMHHFHNNTMWADDLYMSVPFLCRYAAYKKDPAILDLAALQFEGFRKYLFMEDKSLMAHVFDLRRNMNTGIPWGRGNGWAIFSLTELLMV

SEQ ID NO: 86325 - protein, 210 aa, Unknown
  Obtained from environmental sample
  DOMAIN (31)...(168): HD domain
  misc_feature (1)..(210): Xaa is any amino acid
MVYKKTKAIIDLQDGLLKSVSNLVERRDGTTGVHIERVQGSLGILIRGMKKMGVYERESSMWDVDLLMRSSQLHDIGKIAIKDSILQKPDKLTPEEFEEIKKHASIGAQIISEIEEATPEQDFLKYAKIFAASHHERWDGQGYPNGLKGESIPLLGRMLAIVDVYDALVFERPYKEAYPKEKAVKMILDGSGTQFDPDLINVFKNVLDEL

SEQ ID NO: 86326 - protein, 191 aa, Unknown
  Obtained from environmental sample
  misc_feature (1)..(191): Xaa is any amino acid
MDFVTLAAFAVLFMLVILILVKLYSNKTTDLSPQMLDLKNELNELKTKQLESQQAALSSQQKLLLDTQNQLGSQLQNMMNLMNNSFTSNQSNITSQLNNSHKVINEIHTKLGALEATTNHIQELGKDISQLQDILPASKLRGNLGEFFFGELLKQTLPSANYVIKHPFRNATQVDAVIKLRGSLYPSTQSS

SEQ ID NO: 86327 - protein, 163 aa, Unknown
  Obtained from environmental sample
  misc_feature (1)..(163): Xaa is any amino acid
MLDNGGEFINHQLLDWCIKNNIKFTRGRPYRKNDNCFVEQKNGDVVRKTVGYGRFEGQNAFNALADVYRFLNPLLNYWYPTIRLAAKEKLPSGRYKKIYEKDPKTPYQRLLESPCISEECKAELRRRAALLNPVALKRGLDEARDRLLKLSVIESSIPSSRVS

SEQ ID NO: 86328 - protein, 368 aa, Unknown
  Obtained from environmental sample
  DOMAIN (18)...(315): Glycosyl hydrolases family 43
  misc_feature (1)..(368): Xaa is any amino acid
MKKQGFNPYLPSWEYIPDGEPYVFNGRVYIYGSHDKFNGPVYCPNDYVCWSAPEDDLSDWRYEGVIYPKTSDPYNKDGRMSLFAPDVTKGPDGRYYLFYVLNMADVVSVAVCDSPAGEYKFLGYVHYPDGTMLGRRKGDQPQFDPGVLTEGDKTYLLTGICGHDTKTRPGSTAVTLGPDMLTVLDEPVLIAPGVHNSKNTSFEGHEFFEASSIRKRGDTYYFVYSSIAGNELCYAISKNPLKDFVYGGVIISNADLRIDTYKPAEKPMNCGGNNHGSIIEIKNKWYIFYHRHTNGHEFSRQGCLEPIEIKADGSIPQAEMTSCGPNGGPFEGKGEFPAYIACNIFSTEDGNQRACRRWPNLVPNLDQW

SEQ ID NO: 86329 - protein, 111 aa, Unknown
  Obtained from environmental sample
  misc_feature (1)..(111): Xaa is any amino acid
GFVRGQIGRDDNLFLASVTSYTHGIDYTISVPKQFLKESDTVLLIDDFLANGCALEGLIKIVQISGAKLAGAGAVIEKGFQGGGKRIREQNIRVESLAIIESMDENGIKFR

SEQ ID NO: 86330 - protein, 502 aa, Unknown
  Obtained from environmental sample
  misc_feature (1)..(502): Xaa is any amino acid
MGADYIPEDNILGRVNAKRTRKLLEQCREANFNSIRVWGGGYYPDDYFYDICDELGLVVWQDFMFACAVYDLNDEFDLNVRAELADNIKRIRHHACLGLWCGNNEMEWFVDQMRWVGNLKQKADYIKMYEYIFPQVLKEHDPNAFYWPASPSSGGNFDVPNDPNRGDVHYWEVWHGNKPFSDYRNYFFRYVSEFGFQSFPAVKTIESFTLPEDRNIFSYVMERHQRNNSANGKIMNYMYQTFLYPNDFDTLVYASQLLQAEAVKYGVEHFRRNRGRCMGAIYWQLNDCWPVASWASIDYFFRWKALHYYAKRFFRPLMISCHEEGLLTQNPNANHQPQIKAAIEKSFRLSVANETTEEKKLTVKWEIRDKKAGALKEKTIPVKIPALSSLWLDKVLVPEIKINDEYLSYHLYDGKTLVSEGTVIFSLPKYFHWEDPKLRYTINGDTITVKAAAYAKSVEIQNRNQDIVLSDNYFDMNAGEKKVKILSGKPGKLKLRSVWDIK

SEQ ID NO: 86331 - protein, 144 aa, Unknown
  Obtained from environmental sample
  DOMAIN (5)...(67): DnaJ domain
  misc_feature (1)..(144): Xaa is any amino acid
MAKSDYYDILGVPKGASDDDIKKAYRKLAVKYHPDKNPGDKSAVEKFREATEAYEILKDPQKRAQYDKYGHAAFEAAHGGGGGGYGGFSGSFDLSDALRAFMNDFGGDSIFGDIFGFRFAYSARRRARRDPVATTCRVKLGLTP

SEQ ID NO: 86332 - protein, 130 aa, Unknown
  Obtained from environmental sample
  misc_feature (1)..(130): Xaa is any amino acid
MAEELAGFAEFEGCQKNDLQKRGIEGKEIHVVVGMGTCGIAAGAKQTLDAFVTGLDENKLVDSVIVRQTGCMGLCHSEPTVEVIAPGMPTVIYGNVDAAVAKEIIQKHIIGKELLSGRILDRPAADIVKA

SEQ ID NO: 86333 - protein, 423 aa, Unknown
  Obtained from environmental sample
  misc_feature (1)..(423): Xaa is any amino acid
VKLQKGSENYYQDDYSIKYDLKTPLKFSIAEKTIINKKTHLYKEFESDVKNWMFSPHNEEELIKYLSTLLIEYQNFRNGFTDRLKLIKNQSEFIELNELIRRDYIRSTHHIRIGTYIKNLETIFSNYFQQSAWGKKLAHDLSIICRSHGENSNFIEDLDTNAQYYGHESANLQFVSILLRLGDIIHFSFDRAPIDLRTSRLFKSEYSFQQWAIKNNGVNYSIDNGKISFRAYCQNPETYFKLHQYIDCIDVEVQIYFRFQRKWSTNYIDNLQEKVDRSNIKCDEEIFLPKRGLGFSLNQKKIIDLLMGVGLYKDKYACLRELYQNSLDAVRCMLSQNETDGRSATGIIEFSIIKEENRTYLCCTDNGIGMTKEVIENYLLKIGNSYYKSADFYKQQAKWGGKFTPISQFGIGILSVSADLITA

SEQ ID NO: 86334 - protein, 133 aa, Unknown
  Obtained from environmental sample
  misc_feature (1)..(133): Xaa is any amino acid
GWGGYARGECYRSGRFTLAGQIERAGGTYALKGLEGSGSITITMEEFFKQCRDSDIIIYGSSPQYCPDKAFLLETEPLMAEFRAFKNNNIYIYDLGYYMNNAKVVEKFEDMVSIFHPELFPGRKLVMHMKLPD

SEQ ID NO: 86335 - protein, 271 aa, Unknown
  Obtained from environmental sample
  DOMAIN (1)...(271): Branched-chain amino acid transport system / permease component
  misc_feature (1)..(271): Xaa is any amino acid
MPLFIMAVGGIFCERSGVTMLALEGLQGFGAFIGALAVIMLKPVLGEASPFMIYIAMAAAMLGGLIYSLLHAVLCVRFRAGQTISGVVLNILSVALTAFFTSVINKALTGDATNRFQIGVSVRFTVPGISKIPIISNFFRNMYPFEIVILVLAAFAWYLFYKTRFGLRLRACGDNPHSLDAAGGDVGATRVKAIMFSGAFSGLAGMCFAYSIMAQFSPSIYMGYGYLAIAALILRKLGHTDHLRGLPLKGRCGHRQSGRSILECAARGFSL

SEQ ID NO: 86336 - protein, 117 aa, Unknown
  Obtained from environmental sample
  DOMAIN (5)...(35): Flagella basal body rod protein
  misc_feature (1)..(117): Xaa is any amino acid
VIRGWYTGASGMRAQQWRLDAVANNLANVDTTSYKKDVTSFKAFPELLLRRQGDDGVYLHPFGSADEAPIVGKLGTGVELNELFTVFSQGAPKETQSDFDLMLKARDSLRALGNLSM

SEQ ID NO: 86337 - protein, 629 aa, Unknown
  Obtained from environmental sample
  DOMAIN (564)...(616): DNA gyrase C-terminal domain, beta-propeller
  misc_feature (1)..(629): Xaa is any amino acid
VAKIDTTGELPMNEPTGKVIPIAIEDEVKTDYLNYAMSVIVSRALPDVRDGLKPVHRRLLYAMDTLGLRPGGGTKKSALIVGETMGKYHPHGDLSLYDALVRMAQDFSLRYPLIKGQGNFGSIDDDPPAAMRYTEAKISKIGDEMLQDLQKETVNFIPNYDESFNEPSVLPSAIPNLLVNGSSGIAVGMATNMAPHNIGEICDAICALIDNPEATNEDLMRLVQGPDFPTGGTIFGRQGIKEAYKTGRGKLLVRGKFNVETTKQGKEKIIFTEIPYNVNKALLLEKIGQLMRDKIIDGISNANDESDRDGIRIVIELKKGAIVKVILNQLFSNTQLQTTFGIINLALVGGKPQLLTLRELVHYFVEHRVDVVTRRTRFELRKAEERAHILEGLIIALANIDEVIAVIKASRDVAAARLKLQERFLLSEAQSEAIVEMRLGRLTSLEVEKIEQELAELKTRIAYYKSLLADEKKLRGVIKDETREVAEKYGDKRRTEIVAGEVENINIEDLIKKEEMMILISNMGYVKRVPVSAYKNQGRGGKGMQSAQLVEDDFVQQIFVASTHEYIMFITSAGKAYWMKVHELPEGSRTSKGSHIKSLLTVSPNEDITAIVSLKDFSDTEFLFMGTAC

SEQ ID NO: 86338 - protein, 152 aa, Unknown
  Obtained from environmental sample
  misc_feature (1)..(152): Xaa is any amino acid
MKQKHSWDITEEFWAIAEPLIPKKTRDPDKAYKRKQGGGRPPMEPRKALEAIFYVLRTGIQWKALPVSFGSSSAVHRYFMFWSESGFFKAMWACGLRKYDEVKGINWTWLNGDGCMTKAPLVQETVGANPTDRGKKRSKRHMLVDGIGVPVA

SEQ ID NO: 86339 - protein, 154 aa, Unknown
  Obtained from environmental sample
  DOMAIN (1)...(151): Putative undecaprenyl diphosphate synthase
  misc_feature (1)..(154): Xaa is any amino acid
MDGNGRWAQQRGLMRTQGHLEGLQAAKRIVKAASDMGVQYLTLYAFSTENWKRAAEETGFIMGLVKQYLRGEMNFYRQNRIRIRHAGDAAGLPPDIAAEIAAAVADTRKFSGMQVILALNYGGRDEVARAVRRIAAQRHAKAEYLGQSVTAPPV

SEQ ID NO: 86340 - protein, 130 aa, Unknown
  Obtained from environmental sample
  DOMAIN (40)...(92): Helix-turn-helix
  misc_feature (1)..(130): Xaa is any amino acid
MALKLKKWDVTEHMDNEEFISEYLKAAFESGDIPEITRALSDVARARNMTDLAAKMGITRQGLYKTLSENGNPEFATIQKLIAALGLQMSIITPANTVGKGALIKKRCLSRSLGTTFFYRSYVSSYYNNK

SEQ ID NO: 86341 - protein, 459 aa, Unknown
  Obtained from environmental sample
  DOMAIN (310)...(400): Helicase conserved C-terminal domain
  misc_feature (1)..(459): Xaa is any amino acid
VLGGGCRREFGVYVHLPTKPLLPTPYSPLPELFYLYGITGSGKTEVFLRAAEHMIKEGKSVIYLVPEIALTQQTAELIGRRFGSAAATLHSGMSPSERLSQWSRIRRGEAPIVVGPRSAVFAPAPNLGLVIIDEEHDGSYKSGNTPRYHARQTAIRRCAVEGAKLVMGSATPSAEAWKLMAEGKIKRLDLSLRLAGGSLPEIKPVSLEKTDGCLTRELKEEIRLTAQMGRQTILFLNRRGFAYFYHCPSCGYEQKCKRCSVSLTWHKSRNRALCHYCGYSEPPPNACPNCGSLEAGYRGFGTEMVEEEVKRTFPNLRVRRIDADVSAKKGILEDTISLFKAGLIDVLLGTQMVAKGLNFPGVRLVGVVFADTGLHLPDFRAAERVFSLIVQVAGRAGRYFPDGKVIVQTFRMGDPVITRSCAIDVKGFFEAELAQREALNFPPYTRLIRLTPQPNILAI

SEQ ID NO: 86342 - protein, 321 aa, Unknown
  Obtained from environmental sample
  misc_feature (1)..(321): Xaa is any amino acid
FIATFPEKRLEDTSIPILADSKLSYIGEPVAILLGQDKIKLEEFAKQCKVIYDEQTPEFNAIEPAAVVREIQIGDCKSVFEKPGKIIAGSYITGIQDHWYAEPVGAVTYYEKNQKTKDEKAPQNSPKGSPGGGEEKKETKLKKSEKLLIVKTATQWPYHVKRSVARALGIDQSEVSVEPTSLNLHMDGKLMFTSLVACHAALGTFFTKKPVRLILNREEDFFYSPKRCKSNIDIVTTIDDKGSITAAEIDISVNLGAHKVNGEEILDQVCLGAIGYYDIENLKITARANLTNIPPQGPFSGFGLAQGFFAMERHVSPMPIL

SEQ ID NO: 86343 - protein, 98 aa, Unknown
  Obtained from environmental sample
  DOMAIN (12)...(63): Helix-turn-helix
  misc_feature (1)..(98): Xaa is any amino acid
FYWGLDGRGKGFRKVRNISPGKLAEICDTGQNYIEDIEAGKQFPSLDMIEKITAALEIEPYRLFQNNDSTDFKTLATLQKQEIINMLHKATSEIINNY

SEQ ID NO: 86344 - protein, 193 aa, Unknown
  Obtained from environmental sample
  misc_feature (1)..(193): Xaa is any amino acid
MFLSEQVKTGAYSENMSLLSDVSLNLKKMELSLMESKLTLSNLMEFNNKEESFKNYFNGKMNWDSDILRIYMSSNEDSTQSPWFINAKEANGRVSFSMPYLDSPSNKILMDFSTNIYNNKGQDIGVVSHSFYLDKLARTFQRHKKSPEHEIYLLDYSGNLITSSVQNYMKKCTRLLSLAKIGLDDYKDKIFSY

SEQ ID NO: 86345 - protein, 74 aa, Unknown
  Obtained from environmental sample
  misc_feature (1)..(74): Xaa is any amino acid
MQQALLHALLTPFAELKEMQEKGDFTGLLAVSEALKAYPFGDVWDAFCEQQNVPARDEWLPDVRLYDEKTRART

SEQ ID NO: 86346 - protein, 122 aa, Unknown
  Obtained from environmental sample
  DOMAIN (9)...(98): Cyclic nucleotide-binding domain
  misc_feature (1)..(122): Xaa is any amino acid
MSGEFQPVTVNLKKDAYIFVEGKHHADKFYIIKQGNVRIIREALTDETGSVLGPGDMFGLISAMAAHGYIESAVAMTDVALLAVERKQYGSLIRKNHTIAVNSIKAFSQDCGNWISPSRNGH

SEQ ID NO: 86347 - protein, 425 aa, Unknown
  Obtained from environmental sample
  misc_feature (1)..(425): Xaa is any amino acid
VNNTPAHVHQWGDWATTTPANCTTAGSKTRVCALDATHTETQEIPVDPDAHDYRYVAGSGTAPTCTADGSGNEACTYNPSHTKTGVVIPALGHDYDDWTVTTPPTCSATGIETGTCTHDPAHTSTRAVPIDPDAHDWEQLAGVAPTCTTEGSGSRKCTICETVETLNVIPALGHDDGAWHTASEADCEHDGTKELRCTRDNFVLETAAIPALGHDFGNWTQTTAPTCTTAGIDIRTCNHDATHKETRPNSIDPNMHDWGDWAQTTAPTCTAAGEDTRTCAHDATHTETRTGAATLGHDYQNWTATTPATCTTDGVETGTCTHDATHKDTRPIAALGHDWGEWTTETPITSIEQVNVTRTCSHDPEHTETRTESLQEYLSDLPDNTPETAYNIALNVNYIGDFSSHSGTAWNAFYTNRTKYVSLDL

SEQ ID NO: 86348 - protein, 313 aa, Unknown
  Obtained from environmental sample
  misc_feature (1)..(313): Xaa is any amino acid
LREADLGAGYGLEANTIIAEGGEIKNIADSTDVFSAQTPPVTSLVLGEKLTEKELAAVGDGSTLASGSSFTLTADIGIVGIGAATTLSIDNGVLLITDGTDTLARVEAGKSITLDNGTVLKNNGGGMVSVENGSITLDGNDLDNSNTTSFTIATQSTLSGDSQTKLDDTNIVLASNILVKAGTIDKNITVGNSVNLTSTTTNTGTYNGDIEELAKGSVLAKGSTIEMKDSPAGTYALKLEVNGKEIAITYDSSNGILKVGGETVAAGKSITLEDGTVLTHNSNIDTPNTANGKIFVQQGSIKLAEDINAIGAV

SEQ ID NO: 86349 - protein, 256 aa, Unknown
  Obtained from environmental sample
  DOMAIN (81)...(256): Phosphofructokinase
  misc_feature (1)..(256): Xaa is any amino acid
MDLQDLDFTIPTLGPGRRPSPINLSNRHGDMIANFVRDDDFIVYDTRATPGTTIEYKRKHLIERAGPRELIFFNPDKVHAGIVTCGGLCPGLNDVIRAIVLALWYRYGVRRISGVRFGYRGFLPEYEHPFMQLEPETVSNIHRLGGTVLGSSRGNGERTSDIVDRIEIEGINTLFTIGGDGTQRGTLRIAEEVERRGLNVSVVGVPKTIDNDLSFIEKSFGFETAVFEGRHGGRRRARGTQNAVNGIGLVKLMGRE

SEQ ID NO: 86350 - protein, 408 aa, Unknown
  Obtained from environmental sample
  DOMAIN (229)...(406): Radical SAM superfamily
  misc_feature (1)..(408): Xaa is any amino acid
LVLFAGNLSGEAAEPLIDGKNSLILALQRAQSFPGVGKTALLTGPEGDFSSVPAGIYIEKRDSWTVKALLEAIAAHSEGFDLTYFAWADCPFPDPELARKLAERHIRYAAEYSYADGWPYGLAPELLSPGTAAILAKILGDSDGGPVGRDALFSVIQKDINAFDIETEISPVDLRCHRLNLCADSRRNLLLLRRFAECAAGEIPDTAAVERIIAEKPEILRTLPAFYPVQVYGGCPQSCAWCPWPQAAGGAVTERWDYMEARQFESLLEKISAFSGDAVIDLSLWGEVSLHPEKMALIEMVLRRPELALVIETSGIGWKNSELEQCAQLAQTAASVKRNNNLPPLSWIVSLDTTDPAWYKEIRGAGFAEANDCAKTLLSLFPRDAYVQAVRTAGAENDIERFYRSWKE

SEQ ID NO: 86351 - protein, 319 aa, Unknown
  Obtained from environmental sample
  misc_feature (1)..(319): Xaa is any amino acid
MAAETAYKFGRKCIFTAVKTAAYVKELMHPVTRTDICILAALLIVILTPIVINLVYKLEARAKRVNLYLSVTGEEIFGKELMDTLIREFEEKNPDILLKFAYASAGVEPDVLFFNEGDYSAHISSGALMELNPFTNYESGGRQPAIPLVSFMDMLFYNIDILSAAGFDRPPKTRDEFLTYARAVSRGSSGAAGCALSLSAGDRRALSRDVFSWVLASGGNLYSADENGVIVFNKIPANDISFFETLNREGLLAPNVFGTTGEERLEAFASGKTAMMIASTRAIPYLRAKMGDGAFGITTIPVSASAGKYNISLLQFRDK

SEQ ID NO: 86352 - protein, 98 aa, Unknown
  Obtained from environmental sample
  DOMAIN (3)...(90): Protein of unknown function (DUF497)
  misc_feature (1)..(98): Xaa is any amino acid
MDLVFEWDPEKERVNVKEHGIYFDTAVQAFYDYCRMERHDDDSSDKEDRWQTMGFFDDVLFVVYTERKDSIRIISARVAEPFERRIYYGGSEISADLS

SEQ ID NO: 86353 - protein, 802 aa, Unknown
  Obtained from environmental sample
  DOMAIN (121)...(283): Alpha-2-macroglobulin family N-terminal region
  misc_feature (1)..(802): Xaa is any amino acid
VGGGVYGETSYAGEKRRNNGLFLQSGENAGQLKVELIREEWRRVQQRGVNGYIYDEYSPEQVIDSVQNIAIRNGGGSIKITPSGAGYHILRVSARDREGRTALTELDFYVTGSGGYWNMSNPSELRLTPDQEMYNPGDTAKVLLQSTLPEGRYLITVEREGIFTEEVRHFTEPVTVIDIPIARNYVPVVYVAVSSYSVRSGPPTHEYGSPDLDKPKGYFGVTKLHVNPRARAFSVKAESDKKTYRPGDEVTMTLIATKDGKALPNAELTLMAVDRGVLDLINYHVPDPIQYFYNEDLFRLMVAGGDSRSWLMDPVTYSVKNLAGGDAAGESKIEERKDFNPTAVFEPMLITDDSGKVTCKFKLPDNLTTYRVTVFGVRGDIFALKESEIAARNKINVREVLPRRARERDTAEAGVLITNLDSASHTLSVRLDIGPPLPNDDSSGIKKITGQAFVDGIFERRITVKSGENAVVYFDVAAVKEGNVTLNFTVNSDILNEKLIRELVIEHPYIMETVTTTGSVDKDSESEGVVIPSFADNGVGSLSVTLDATRLSLLDSAVTYLFRYPYGCMEQRSAAIMPLVIFGEYLDALGLRSEVANPRQVVENELKSWAKVQLSSGGFPYWPSGTRADFYVSLRIAHIIAIAKSKKMNVPSSLNIAELNSYLGREYQELQKWRNDSSSYYYQSYLQSYMLYVQSLLGEKVDPSRLAEILSRDNVDPSVLAFVGMTYRALRQNTDASNTAQRLRNLVRMTARGADITDPLEENRFNYYGGMVEQLALTLQFFVDQYPGDDITRGSLLGHLIL

SEQ ID NO: 86354 - protein, 290 aa, Unknown
  Obtained from environmental sample
  misc_feature (1)..(290): Xaa is any amino acid
SLGGGVRSFYQRPGRLSRNFRFPVQGGRCSALELARISQKAENDFFGKPCGLMDQAASACGGAAFIDFANPDSVLLRKIPFDPLVAGYALCVVNTGGSHANLTPDYAAIPKEMGDVARFFGKKFLRELELSQVLAAAPEIRKTAGDRALLRAIHFFNEDLRVAEMAALLERAGEPMHGFLELVSESGDSSWELLQNIYSPGDPREQGLSVALAVSREFFRARGMKAACRVHGGGFAGTIQAYVPIDAVEDYGAQMEALFGAGALSRLRVRQAGAVEITGSATDGCTDGFM

SEQ ID NO: 86355 - protein, 417 aa, Unknown
  Obtained from environmental sample
  misc_feature (1)..(417): Xaa is any amino acid
MNGGEISGNTASNSGGGVYVSGGTFTMSGGEISGNTASNSGGGVYVSGGTFTMSGGEISGNTASYGGGVHVYWNGSFTMSGGEISGNTSSSSGGGVYISGGTFTMSGGEISGNTASSSSSSSSGGGVYVSSGTFTMSGGEISGNTASSSSSYGGGGVYVFDRGTFTKTGGGTIYGYTDGDAKSNVVKNSSGVVQNNQGHAVYVSDGLIKRRETTAGLLIDMDSNKIGASGGWENNFGSLAAQLKWLQTNAASDTTYTFEVTADEDLESCTLSYSGKTNVTIHLKGDTVMRTVNLSGNGSLFSIGTGVTLILDKNLTLRGHSSNNYSLVRVSGGTLEMREGSVITGNNSYSYGGGVYVDRMYDYNQGKYVGGTFTMSGGEISGNTSSYSGGGVYVGSGTFTKTSGGTIYGYTDGCCQK

SEQ ID NO: 86356 - protein, 137 aa, Unknown
  Obtained from environmental sample
  misc_feature (1)..(137): Xaa is any amino acid
MKNTLWVIAILTAFTLSTTSCFAQSSGGGATTSPTGIVMVSIPAGTFTMGSPTNEPNRDTDETQHSVTLSSFKMGKYQVTQEQYQAVMGSNPSYFSSNPQAGETQGKRPVEMVSWYDAIVFCNKLSIKGRINSGVQH

SEQ ID NO: 86357 - protein, 574 aa, Unknown
  Obtained from environmental sample
  DOMAIN (66)...(182): Vault protein inter-alpha-trypsin
  misc_feature (1)..(574): Xaa is any amino acid
SGHSAVIGKRPNYFEPQNIRRDAEILPEALKERGDDDDYEDSWVISNMNLPPAKHTTLKLDGEGNPDVYLQSLDIQVEVTGNIASTRYTMVFKNKTNRVLEGNLTFPLPDGRAVTYYALDINGKMREGVPVEKERATEVFEEIVQRQVDPGLLERVAGNNFRTRIYPFLAYGTRTVSIGYEEELPLEKDSLRYRLPMDYPNALEKFSVTATVWKSGLKPLVAKSGDEFSFDKAGENYVANFARENYRPANTLSFSLPAPDDIPQVMTQSTRGNRYFLVSVTPKIETRKKTWDNELAVIWDVSLSAMQRDLKRELEALNIIFAEKKNAKVHLYFLNNKLKKIVNRNTANGEYVVNAGNWDELKSLLKTAPFDGGTDFSQIDLNNIAGNEILFFSDGISTLGDADIIKDIHTNRPIHCIVSSSKTDYSAMKLIAGKTLGKFVNINALSSEKLKNELLNETLQFLGTEHGKTIREIYPSIATPVHGNFSLSGISDTNEAELTLLFGFGATVEKRITVKLNAKNADSLGNVHKLWAQKKIAELDLNYEKNRAELTELGRRFGIVTRNTSLMCFRPICH

SEQ ID NO: 86358 - protein, 93 aa, Unknown
  Obtained from environmental sample
  misc_feature (1)..(93): Xaa is any amino acid
GPGGGGGGGGGGGGGGGGGGGGAPPGPGGRRPGGGPAGAPGGAPGGGLLAPGGRRVGGRPGPARGGGRAFFRPSPPAGGGVGRWAPRLPGGES

SEQ ID NO: 86359 - protein, 80 aa, Unknown
  Obtained from environmental sample
  misc_feature (1)..(80): Xaa is any amino acid
NNDQIGRAGMQINGWPDSEVNDFVAKVDAVTLADAKRIIATYYPLDDLCIVLVGKASEIRPVAEKYSKQLTEKSIAGPGF

SEQ ID NO: 86360 - protein, 104 aa, Unknown
  Obtained from environmental sample
  misc_feature (1)..(104): Xaa is any amino acid
VAAVFEWRSQAAAQRAEARKTQVGSGDRSQRIRTYNFPQNRLTDHRINLTLYKLDLIMQGDTAELFDALKLSAKEELLNSSSSETSSDTKVSKNVNSFEEAEAS

SEQ ID NO: 86361 - protein, 224 aa, Unknown
  Obtained from environmental sample
  DOMAIN (81)...(221): Methyltransferase small domain
  misc_feature (1)..(224): Xaa is any amino acid
MTVCEALAQGGAALKTAGIDTSSLDASVLLANILNISRSSLIAKGTEILKEENLNKFNLFLDRRIKGECTAYITGNKEFFGLNFRVNANVLVPRPDTEILVEAALEKLKTVNMDNGTKDKIHVLDLCTGCGTVAVSIKHEMPEIKVWAADLSAQALETAKENADRLIGGGSICFFHGDLYDALPATDSSFSLIVSNPPYIPTDEIQTLSVRSQKRTFLALDGGK

SEQ ID NO: 86362 - protein, 305 aa, Unknown
  Obtained from environmental sample
  DOMAIN (98)...(234): Phosphoribosyl transferase domain
  misc_feature (1)..(305): Xaa is any amino acid
RVRFGRAYHREQQNKLIAVRDPNGFRPLCLGKNDIGYAVASESCALEICGFEFVRDVKPGEIITIKNGVITYESISLHNKEEGRGFCIFEYVYFARPDSVLDGLSIYEARYNMGAILAKEYPVDADVVCGVPDSGLVAASGYSAASGIPLASGFVKNRYIGRSFIYPTQTQRDSAVRQKLNPLAANVKGKKVVLVDDSIVRGTTCEKIIRSLRSAGAAEVHMRVSSPPFRYTCHYGTDIGSEDNLIANKMAVDDIRQKFGADSLGYISIEGLKKACEKCVLPFCTACFTGHDETATASTRKDIFE

SEQ ID NO: 86363 - protein, 167 aa, Unknown
  Obtained from environmental sample
  misc_feature (1)..(167): Xaa is any amino acid
MFIRSYGDTLDDGAVQLSFTLPVKCDAKGREAARLYVEKMGFSHVDVVHSAELSDGFSFYVAYGKTTLAIDFDQIHVEEATGEKLYSMQEANDAIKERIGRKLVVVGACTGFDAHTVGIDAIMNMKGYNHHYGLERYSEVDAHNLGGAGAQRKADRLRRQSGRGRDT

SEQ ID NO: 86364 - protein, 663 aa, Unknown
  Obtained from environmental sample
  DOMAIN (105)...(185): Cache domain
  misc_feature (1)..(663): Xaa is any amino acid
CGSKINSDLLESRTILDDFAQSIQNLVRRGDGAAELNAYNIDISNHLLFKNHNTISPNGPYGYIEKSPEGPFFFNGTGWEAPDNWLPDDRPWYKGAIEAGDCVAQTEPYLDSLTGDIVFSYSRCIYDNNGNRVGVVALDIEAGHIGEKVANTSLTKGGYGILTSRDLTVIGHINTDFLGMKMYDPRIPVSFLTDELVRTGKITGAEWVNWRGEKVVGFLKTLSNGWTLGLLAPKYIYFKPVYKMALTLSLLGGALASVLIIVLIRVDAAKNKSNMESRRKSAFLANMSHEIRTPMNAIIGMLTIGKTASEIERKDYCFTKIEDAANHLLGLINDILDMSKIEANKFEISPVEFNFEEMLRQAVNVINFRIDEKHQKFTVHIDRSIPRTLIGDDQRITQVITNLLGNAVKFTPENGVISLDARLAGEENGLCTLQVSVTDTGIGISAEQQKKLFQSFEQAESSTTRKYGGTGLGLAISKRIVEMMDGTIWVESEPGKGSTFTFAIQARRGTEVINECSNPDNQKVEEAQAPEIEGIFAGRRILLAEDVEINREIVQSLLEPTRLKIDCAENGAEAVRKFIEAPFKYDMIFMDIQMPEMDGYEATRHIRTVEAKLRQQIPIIAMTANVFKEDVERCLEAGMNGHIGKPVNFDELIGKLRYYCGGT

SEQ ID NO: 86365 - protein, 94 aa, Unknown
  Obtained from environmental sample
  misc_feature (1)..(94): Xaa is any amino acid
MGNYNLEKIIAARTAKTVYRDGDKVIKLLGEEFLAPDVLSEAHNLAAVGETDLKVPRLVEVTKINGKWAIVWEYVEGTSLDRPMEKNRQGTAVP

SEQ ID NO: 86366 - protein, 429 aa, Unknown
  Obtained from environmental sample
  misc_feature (1)..(429): Xaa is any amino acid
MIKQAVIVAAGLGSRLKEKTVSKPKGFLELGGIAIVEWSVQKLLACGIEKIIIGTGYLAEAYNELAKKYPAIQTVLSADYETTGSMATLSVCAPFVTGDFLLLESDLIYDCIGLSVLCNDIHENVILASGATNSGDEVYLEPQPSLTTGKWSGEGSPLEAVNCSFLKALSKNKAELSSVYGELTGISKISPSLLSAMCSYYEKKRVDLPKLDYEHAIMACAVSQPVFIRKVEYYAWREIDDDNHLEMAQREILPRILENESLRQIRREVLLNPGPATTSDSVKYAQVCADICPREKEFGSVMKWICKELTSFAACISEYETVFFGGSGTSADEAMISSCVPEDGHILIVDNGSYGERLAKIASVYKINHTVFKSSTYERIDISALESEFQTGKYTHLGIVYHETTTGLLNPLDIICPLAKKYLGRICQW

SEQ ID NO: 86367 - protein, 453 aa, Unknown
  Obtained from environmental sample
  misc_feature (1)..(453): Xaa is any amino acid
MGNGKKSKDKFRLVDLLVILICLFGAFYSVNMFWSDLFQTLNGQNKTPIGTVSVKKNIVQRRMSDRVVWDRLIRESPVYSNDLIRVGDNSEIDLHVGGNSLNINENTLLRLHYDNETGEFQIDLNSGSIGLDVSPEGGGVVLNVMGKKMKATPGTALNAAASSDGVALQVSKGSAVIDEGGQSREMQAGSAISMDSEGSILSEPAVFVIQPKPNALYRKNAGEQFNVVFSWNRLNLQPDETLRLEIAEDQNFSRSVRTLNGLNNSARAALSSGIWNWRLAYNGAILDSGRFTITDAEELELLSPARNRKFSYESETPELFFQWTQMEDVLYYIAEVDDTSEFRTPVIKKQTAAESFSDSSLGEGIWYWRVTPVFSQTNEGGVTASRSSSFYIIKNKEQQTPSLVFAEESPANSSPNPNQTQVPPIPFLPAPAWRQPANGYRIGIELGQSDLPK

SEQ ID NO: 86368 - protein, 90 aa, Unknown
  Obtained from environmental sample
  DOMAIN (1)...(88): Ribosome recycling factor
  misc_feature (1)..(90): Xaa is any amino acid
WLPTDQIGRAYEERRKELVKLAKNQAEQTRVAMRNIRRDGNDELKKLLKDGKLTEDEESKVSEELQKLTDGYIVKVNQTLEKKEKEIMEV

SEQ ID NO: 86369 - protein, 84 aa, Unknown
  Obtained from environmental sample
  misc_feature (1)..(84): Xaa is any amino acid
MARLPLSKSGKLKININELYAFTQKYDFTELPLTGDCLKAYLDLPNIHKDPFDHILLAQALTFPMRLITGDSLLADYSSLVMVI

SEQ ID NO: 86370 - protein, 144 aa, Unknown
  Obtained from environmental sample
  misc_feature (1)..(144): Xaa is any amino acid
MQRILNNPDDIVDEMLKGFVKVHSDIVAVTDNPRVIRRKNIPDGKVGVATGGGSGHKPAFIGYIGENLCDAVAVGEICTSPTAAAFLDAFRAANKGKGVACLYGNYSRRHMNVKMAIKMAEKEGIHVKTVIANDDPASAPQDSR

SEQ ID NO: 86371 - protein, 82 aa, Unknown
  Obtained from environmental sample
  misc_feature (1)..(82): Xaa is any amino acid
MGQDLHEKISVLSGAAKYDASCATSGSDGFKGKGGKKFGTSLPMGVCHSWTQDGRCVSLLKFCIPMCANTTALTASTALPPT

SEQ ID NO: 86372 - protein, 455 aa, Unknown
  Obtained from environmental sample
  misc_feature (1)..(455): Xaa is any amino acid
MHDNQTQTLEFPYGKDFLRFSVSGERLKGTLVSRLHHYKAEKSQEALVRDALAQPLGTPPLRELAKGKRKVVLIASDHTRPVPSKVIVPPMLEEIRRGNPLADITILIATGCHRETTAEELEGKFGPEIIKGIIPQGKPCTRRLRRLPRQSRGVLYLSVPHSFGHVRASTAATSLRSSIKNEKIVIHDCDSPDMANLGKLPSGGDLILNRAAAEADLLVSEGFIEPHFFAGFSGGRKSVLPGIASRKTVLYNHNAEFINHPRARTGIIEGNPIHIDMQYAAKKIGLEFICNVVINAAKAVIFAVAGDCDSAHRAGSEFLLSQCRVTPSVADIAITSNGGYPLDQNIYQAVKGMTAAEATVRKGGVIIMLAKSNDGHGGPEFYKTFKEEKNLDRMLDTFMKTPRDKTRADQWESQIFARILRHAKVIYISDAPDEMIRDFQMIPAHSIEEAVKKPK

SEQ ID NO: 86373 - protein, 551 aa, Unknown
  Obtained from environmental sample
  DOMAIN (399)...(499): PEP-utilising enzyme, mobile domain
  misc_feature (1)..(551): Xaa is any amino acid
MNYMDSRIHFFSQNTSISSKDKAELLGIRGRQANEFAELSFPILPGIILDTNIASDIDIKKIKKDIIDLLGKCSKLVAKTYGDPQNPMLLKVVISSNLAITNYPALHNFGLVKPTIDGFAKWVGADFAANEVLFLISGMMMIQERIKELEGKTKDKEEISEKIKLLKRLLGVKGPSNELHNKEEKTPEPKKKSAKEYMEEYSKYFPKGFFEDAESQLLITLSEISKMLSIDEQNDNDTAIMIQPMVYGNYGKNSCAGGFYTRNVVSGEKKLQGNFFRNKFNEIGAEGHEINKIDALHLKQLEKIASTLEERFKEIRYVRFTVENEKLWLIEQRLVDQKSTQADLKLLLDLLKRKIVDEAYVIKAIDPIRLNEILHPVINMSSVKDLKSWKGGIAGAPGAAIGQVYFSTDALLEAKRQAAQKGKDDRFILVLESSFAEDVKAIEVSTGVLTAEGGYSAHASVVARQYGKVSLVSPELKIKGNKASLGEFNFSEGDYITINVPFYGESTVYEGVTDLIEPNPKESGLLDFISLSKKFLKSFQSASADLINEFT

SEQ ID NO: 86374 - protein, 358 aa, Unknown
  Obtained from environmental sample
  DOMAIN (35)...(357): DNA topoisomerase
  misc_feature (1)..(358): Xaa is any amino acid
STRQIAELDQPVRRFWVSEALTPSVIEAGIKNAKPLSEYDSLAAQGFARQRADWLVGINLTRLMSVGNPPPPLSVGRVQTAVLAAVAARNGEVKNFVPVPYRKLEASVKSKDGVVIKAFLENPRLGNTSFFECDWPYICEAMEDCKNSIFGIDSVDVSSVEKKAKPPKLLNITALQKEAFRRHGLKPEETLDIAQALYETHKCLSYPRTPSRVMGDNNADLFREKFDLLKGESSLSGFSDLSLIDAGNRHVFNSAQLEDHHALIPLAKIPDSATDMERKVYSIVLESFFTVCMPDYVYTKVAAIPRFKIFVLVQNTRDFPERLEGSGPGTKRRRRRTRRGRGPALRRVRLRPAGFETA

SEQ ID NO: 86375 - protein, 341 aa, Unknown
  Obtained from environmental sample
  misc_feature (1)..(341): Xaa is any amino acid
VFDKWTGGRVADAGSAVTAVVMDSNMTITANFRPIAYGMLSDKRDGRTYKTVKMPDGMVWMAENLNYAPSEGNGWIYRNNTAYSDKYGRLYDWPTARTACPEGWRLPTRQDWNRLGAAVGGKQRVDSDGNITWRGAGRRLKAVSGWGKYNNRGSGDWNGTDDYGFSALPGGYLCGAECYGGGYYGAGDDYTLSSTESGNWWADSPAPKTKRGGKQAYYRRIFYNSVDLKENNTYMSDGRSVRCVTGADGFAASTGAASYSLTVKAANGGSVTVNPVKTAYTSGEKVSITASPNCGFVFSKWIGGENVDAASSSTVVSVNSNMTLTAKFTRVTAVHCLRDLY

SEQ ID NO: 86376 - protein, 390 aa, Unknown
  Obtained from environmental sample
  DOMAIN (240)...(372): Domain of unknown function DUF147
  misc_feature (1)..(390): Xaa is any amino acid
GFLGGLMAGGHYDAARGASAHILVLLVSREDADNARQIEILSEIANFFKTEVVRENILSQDNVVDLRVLSAAVKKGLFEKRQRRRTQAKSTGSPLLTAAGLLARDHKASAVIVFADVVKDNDFLDQLGDKHKLIIVTNNKTRFDLAKDKRVLGLVQAPPIPVSRTGQLKIGILLALSRGFVSKEDNVICVSGGGNGSTFDTIVCVDIAKEYEFFFLTAQNLLPPDIKPEVFERVIGLAGEIAVEGREGKPVGTIFVLGDTNSVNANVRQLIINPFRGYSEAERNVLDPGLVETIKEFAAIDGAFIITGDGVILSAGSYLRPQPIDMSDKTLPGGFGTRHAAAAGITNCTHALAITISESTGMVNVFKNGAIMLSLSKPVVHEKETIKHMG

SEQ ID NO: 86377 - protein, 412 aa, Unknown
  Obtained from environmental sample
  DOMAIN (5)...(35): Flagella basal body rod protein
  misc_feature (1)..(412): Xaa is any amino acid
MMRSLFSGVSGLQNHQTRMDVIGNNIANVNTYGFKRNRVNFQDIFYQQLQGAARPTEDVGGVNPQEVGLGMSVASIDTIHLQGAFQTTGVPTDLSIQGMGFFVLDDKGSQLYTRAGTFALDENGTYVNPGNGMKVQGWMAQEIDGVQFLDTSRALEDLIIPVGVKDPARATTTVNFACNLDKRTPEVPEGATALQAREGIWSTQEKIYDSFGDVHVLQVEFTRVPGQNNSWTARVSVDPQNEAPTNASAGLGDVPPAAGGPDIFTINFSNQGTILNAIDGAGNESNLGQILMNVAYDVQSATPGDDGAMVRQTFQLNLGTVGSNSNSMTQYAERSSSKIVNQDGHAMGYMENFKIDGSGIITGIFSNGTTRTLGQVALASFPNQGGLEKAGGQQFQKDQNSGTSADLILGKT

SEQ ID NO: 86378 - protein, 330 aa, Unknown
  Obtained from environmental sample
  misc_feature (1)..(330): Xaa is any amino acid
MSELLSRYCPRIEFDSYEDFYANYSCKVPDDFNFARDVVDEWGRLNPQKLALLWTDDSGAMKSFTFTDIKRLSDKAANALIALGIKKGDVAMLILKQRPEVWVMMCALEKIGAVCIPGTYQLTAKDLEYRCNIAEVKLLVTVDDPTVMAVIEATRPKCGKLKHIAVVYDKEKNGGAASGDYIDLQSETEKASENFKYPAAKTEEPMLIYFSSGTTGMPKMVLHNHSLPLGHIVTAKYWQCVEDGKVHLTQTDSGWAKFAWGKIYGQWLCGAAIGAYDTEKFTPQGMLDALQRLKPTTFCAPATIFRYLIKEDLSGYDFGLSATLRLRANP

SEQ ID NO: 86379 - protein, 472 aa, Unknown
  Obtained from environmental sample
  misc_feature (1)..(472): Xaa is any amino acid
MTGGSFTLSDSVFTSCDVYCSATEAVPVIVKDTDIRSAKTANGLYAATGNAMVTIDKVTIDGVPKGRGIYASSGNTVKVSNTDVKNCVTAWNGGGINISGSGSAAISSVTITGCKADGSGGGMYFDNSGNVSVSNITIDTVTLTASSGYGGGIYRTDGGLTVVNSAIKNITGNGAACAGIYHNASANLEVSGLVLQNIPGNGIYSTESGVRKFSGITAVTNIGGDYGIYSADMTGGSFTLSGDSAFTSCGVYCSATGAVPIQVIDTEIISAKGPYGLYASTESAAVNINRIIIDGVPNGRGIFISGESDAAISDANINNCVTDGNGAGINIDVSGSANISAATITNCQAGGSGGGISISGSGSADISAVTITNCTANQYGGGMYLTCSKNVSVSNTTIDTVTLTASSGNGGGIHRTNGGLKVVNSSIKNITGAGAAYGIYHNASANLEVTNLELQNIPGYGIYSTRSARPSI

SEQ ID NO: 86380 - protein, 651 aa, Unknown
  Obtained from environmental sample
  DOMAIN (429)...(647): Alpha-2-macroglobulin family N-terminal region
  misc_feature (1)..(651): Xaa is any amino acid
GQDRPRDQGAVSWQDEYTLVFTPEENYKPGQRYDVAVNITGIPPFNFDFTAAVPVFSVELEPVQLGDNNNVLISGIVTAEQDAEISKIEQTVSSRELGKPTWTHTDGVHRFSFAPVKRGEASRTAEVTWKGKPVGSEADGGTTVMIPGLDIFQMLDLKFANNIIEVSFSSNLKANQDLRGFISLSGSTDVRYTMEGNVVKIYGNNTGGIPSGAELLIQDLIDIDGKRLITPIQFTVPDKWELPEIRFTGNGAILPTSQGAQLVIETKNVSGILVEAFQIYNHNTFQFLQVNSLEGTSQLDRVGEPVWTKAIDFQWAPSDQNRWVRRGLDMAELSKKFPGGVFHIRISFRKRHIKYLCDKNHQDFSGLNFPDDSFSRYSTTSSSESSYWDNYDDDDDYSWSEWYNYRNDPCHPAFYVNMSGHNITKSRNVLVSDLGLIAKRSLDGSWIIATTNLITARAAPNTEYKVLTYQGRVLHQGKTNSNGIASIPASSDTASGSRLFVYAESNLGRAYLRANDSLALSVSHFDISGGTPSSGIRGLIYGERDVWRPGDNIYLTFLPADPLGTLSSNHPVTFELEKPKRENWPSTAIFTFFRGRDFYAASAAAYRISTLSQRETWALPKWRCGCAKNNFTKKPVRDWYPLMRPKKLLNL

SEQ ID NO: 86381 - protein, 303 aa, Unknown
  Obtained from environmental sample
  DOMAIN (1)...(298): Glycosyl hydrolases family 8
  misc_feature (1)..(303): Xaa is any amino acid
LIARLLRFRHPEDGDNATDGDMDIIYSLIIADRQWGSNGRYDYLEIARIMLADFWQYCVHPAYKTLLLGDWASKGGDKGDPTLAALQMNATRPSDFIISHLKAYKAVDSAHNWQEVIDATYGVIKDVYADVKAKHGTSRGLLPDFVIRNDANTAWVVPEGHVLEADTDGSYSYNSCRIPWRLGTDYLLYGGNTTLPGFDTFTETIQPLDKLATEIYGSADLDIFGPLTITGDGIWNTENWDEFWDDPQSFTAPFLITAAATGNKALVNEMWKWDGLEDFWCDTWGDYIKMLVMLTASGNYWKP

SEQ ID NO: 86382 - protein, 150 aa, Unknown
  Obtained from environmental sample
  DOMAIN (1)...(145): Acyl-ACP thioesterase
  misc_feature (1)..(150): Xaa is any amino acid
KIRDCRGASAWLVVDMEKRRPLRPQSVMENIPQNEGINALAPEDNGTASLEERKDLQKAAERKALYTDVDFNGHVNNVRYIQWIEDTLDPQLLEKADKIRIDINYMNEIMLGENAELLSAPIAGENNAFAFEGRKKESGQTAFRAELRLW

SEQ ID NO: 86383 - protein, 574 aa, Unknown
  Obtained from environmental sample
  misc_feature (1)..(574): Xaa is any amino acid
MDIRTSTLSELAAWAKSLKLSEAGTSADLAKRIRDYYKIAEQGQTVTDEKRKIITIESARTTEYFKIEVVDEEYARLSGEVRVSLKDGEAIHQIRAWNILFNRTRNILTASGGVEYIKTEGDKIETFRGDSITVDIDNWSSVFLGGVSERSLQSDNTTYLFAGTVISRDEEEVTVLNRATISSANNPESLWSLNASRVWLLPGSDFAILNAVLKVGEIPVMYIPFFYFPADEVIFHPVIGSRTREGHFIQTTTYILGRPKASSASQSSLTKILGNSSDMEKKREGLFLRSTGKKMKDPDKVSLKAMFDHYVNLGTYIGADLTLPAYKIIGATNLSMGIGLTRTVALQNGSYTPFFPTYDGDTDWNHSNLFSFDVPFRYRFKSSNTISGKYGSFSWSLPYYSDPFVDSDFLKRAEEMDWINMIQQGAASMEAQDSSESQQSHEPWQFSGQLNPKFPNMSPYINSISIGSISSTIAFKTVDTRSINKIASNDIKYYSPSSWFFAPDTSTLYQVSASVSGIPLSLGETASRASAANTDKNETEDPLKGIGIPRSPFEDKTDEEVPKKTRRNNWYPRV

SEQ ID NO: 86384 - protein, 182 aa, Unknown
  Obtained from environmental sample
  misc_feature (1)..(182): Xaa is any amino acid
LISSEYFFNKLTEKGVGFFSGVPDSLLKDFCAYITDHCDTNHTDKQNHIIAVNEGAAVGLACGYHLATKRIPLVYMQNSGIGNAVNPLLSLADGEVYRIPVVLIIGWRGEPGVHDEPQHVKQGKVTRSLFESMGIPHAVLEKDENHADGQIETCFKTIAETGSPYALVIRKDTFSPYVLQKK

SEQ ID NO: 86385 - protein, 131 aa, Unknown
  Obtained from environmental sample
  misc_feature (1)..(131): Xaa is any amino acid
MGNYKLEKIIAVRTAKTIYRDGDKVIKVLGEEYPAPDVLSEALNLAAVGETTLKVPKLVEVTKIDGKWAIVWEFVEGTTLGQLIEKNKDKEEQYLERFVDIQLDMHSHSATRLPLLSKRGAQIKLSMGPKI

SEQ ID NO: 86386 - protein, 692 aa, Unknown
  Obtained from environmental sample
  DOMAIN (34)...(99): His Kinase A (phosphoacceptor) domain
  misc_feature (1)..(692): Xaa is any amino acid
MLNAKEVLEGIILLFYDLTEIMAAKEQAEQASRAKSVFLAQTSHEIRTPMNTVIGMSELALRADTLPQAQEYLGSIKQAGLNLLAIINDILDISKIEAGTMEIENAPYSLSTLINDVVTMIQIKVAEKPIIFLVDVDASLPNMLKGDEARIRQVLVNLLSNAVKYTHKGFIRLTLTYHVDPFDSNVIRLVYEVSDSGVGIHKDDLRNLFRSFTRLDMKKNQGVEGAGLGLAISKSICMAMGGDVSADSKYGEGSIFTAVLPQIIDGKEPIALVENPNEKSVLYYEKQPLYAKSMVFALGNMGVPVTLKTNAEEFLQALSGGNYHFAFISADIAEKAREAKKNKSLATTLVLLANTMETITFRNMPVLFRPAYAIPLANVLNHQTGTVSKSQGLHFIAPDARILVVDDIQTNLVVTSGLLAIYKSHVDTCTSGAAAISIVQNKRYDIVFMDHMMPEMDGIEAARIIRGMEGEYYRNLPIIALTANAIMGMKEMFLSNGFNDYLSKPIEVLKLDDTLAAWLPAEKQIQNTEAQEPIESKAVIPDGFPVEGIDIKAGKTRYTEKAYLDVLRSYYQHTPGLLEKISHIKYRDLPEEAIKEYTITVHGIKGASFGICADTVAKQAEALENAAKSRDLQFIEMNNVRFIEEVEKILGRLKELFTLLMNQSGAKPMCEKPDSGLFWKGLPRPPGAITSR

SEQ ID NO: 86387 - protein, 614 aa, Unknown
  Obtained from environmental sample
  DOMAIN (357)...(572): Methyl-accepting chemotaxis protein (MCP) signaling domain
  misc_feature (1)..(614): Xaa is any amino acid
MNGPVVREPAGYEGWQGHLARVTVKGLTSTTGADPAFQELTDPYWANVAGKGNVPIVSAIFTFKNDAGRIVGLIGINFISAVQTVVDDLVKEVYNGAGMAAIYSDNGTIVAHWDKDRVKDNIKTNAKEKKLFGNDISRLANAILHGGENGGNAVTLEKYSPDLKSNVYFIFEPIPVSGFETTPWSMQLGIPTSEIKKPVNAMISYSVIFAVILLVLAAVITLFVATRIVKPIIGVTNTLKDISEGEGDLTRTIAVSSKDEVGDLAKYFNKTLEKIKGLVLLIKKQAGVLSEIGSDLSGNMTETAAAVNEITSNIQSIKGRIINQSASVTETNATMEQVVTNINKLNGHVENQVRDISQASSAIEQMAANINSVTNTLINNAANVNTLKEASEVGKAGLQEVATDIQEISRESEGLLVINAVMENIASQTNLLSMNAAIEAAHAGEAGKGFAVVADEIRKLAESSSEQSKTIGAVLKKIKGSIDKITNSTGNVLTKFEAIDSGVKTVSQQEENIRGAMEEQEQGSKQLLQSASGLNEITQKVKISSGEMFNGSKEVMNESQNLEKLTQEITNGMNEMASGADQMNTAVHHVSEISGKNSEAIETLLKEVSRFKVE

SEQ ID NO: 86388 - protein, 336 aa, Unknown
  Obtained from environmental sample
  misc_feature (1)..(336): Xaa is any amino acid
DHDRIPNGRFFEDFRRRSRETEKDNEKQIALFRQSVDDISKELSAQKRIFDQTGALKKDLDKKIEEMNDDLNRLEQRKSEITQLENKLANVRRTEDEINNKMTRFLNEQHRIEQMEKDFNNLIKTSQSVKEKLEQVSSSDDILSAVQVQIRKLEDSIKETNEKYQRIEKKNEVLEQTNEGIDRNFKDLQKTEAAIKNADKIITSLSKQFEALRTSIELLASQNEKASNAVDKIASLDESLAQIEKRINDLNVAREWLARTETELIALDKDAKSLLKITKGAIDKEKGKTPQKSEGSVTPQEREDILRLKGQGWTTEEIAQAVHRSRSEILLLLELA

SEQ ID NO: 86389 - protein, 311 aa, Unknown
  Obtained from environmental sample
  misc_feature (1)..(311): Xaa is any amino acid
MNSQGAYSAVYNASTGKITVEGTASIETQDSRGSTIAIDNRDSGTLDIKGGRIHVYGSGYAVWNRSTGTVNISGGTVSVEGSGEAVRNSSTGTVNMSGGTILLYGSSRPSSGMVYNASTGTVNISGGTIDSGTAAAVGIGSTGKVIVSGTAHLTSRNTSDGNARAAIHLFNNGTDTDDRLVIEGGTVRNTGPAVWNASPGSVSISGGTVSGGGGTNNGTVRNDSTGAINISGGTIQGQTAVYNRSTGTVNISGGTVSGNYDDTRISIASAVYNYSTGTVNISGGTVSGGNSSAAVKHNSTGKINVSGTATI

SEQ ID NO: 86390 - protein, 315 aa, Unknown
  Obtained from environmental sample
  misc_feature (1)..(315): Xaa is any amino acid
MAESLGAPVAVTANNAQVYEENGVHSTDYGFALTNRSGTEGGSAAAVERRDYQWNERNLMKRSVNKTYQSEYRYGADGQRALKYTVSGTDRSEVRYYNRMFQVSALNGYAAESKHIYVGETRIVTKRKDAGNTGSVSQESRLMYYYHGDHLGSAQLVTDFEGKIYEHLEYTPYGELWVDHAVGDVALSPTEFRFTGKEFDKETGLYYYGARYLDPKTSRWISGDPAMGEYIPQAPVNDEARKRNKNLPGMGGIFNIVNMHVYHYAGNNPIVMRDPDGRQSVDDLILFSILKENKYFDTPVKHPIFHFGQESGTRT

SEQ ID NO: 86391 - protein, 95 aa, Unknown
  Obtained from environmental sample
  misc_feature (1)..(95): Xaa is any amino acid
MSGNADFTVETLGTCSIKSPITMSTTAGDGVANYVTDEQFVRLSVVANIGAQQTLNRADILERAGPREMIYFSPAHVHAGIVSCGGLSANLSWEN

SEQ ID NO: 86392 - protein, 235 aa, Unknown
  Obtained from environmental sample
  DOMAIN (80)...(235): E1-E2 ATPase
  misc_feature (1)..(235): Xaa is any amino acid
MHFPLPYAIVQLALVIPIIIAGNRFYTVGFKNLLRRSPNMDSLIAVGTTAAVVYSVYNLIQIASGNHHAVESLYFETAGVIITLILLGKSLEAVSKGRTSEAIKKLMGLAPKTAIVIDNGNEKEIPIEDVTPGDIIVVKPGAKIPVDGVVTEGQSAVDESMLTGESMPVDKKPGDPVYGATINSNGVIRFKAEKVGNETALAQIIKLVKTRKALKRRLRKWRILVRFLCLCLGQS

SEQ ID NO: 86393 - protein, 93 aa, Unknown
  Obtained from environmental sample
  misc_feature (1)..(93): Xaa is any amino acid
LITAEYFYNKLTEKGVGFFSGVPDSLLKDFCAYITDHTDKQNHIIAVNEGAAVGLACGYHLATERIPLVYMQNSGIGNAVNPLSPCGSADLIL

SEQ ID NO: 86394 - protein, 161 aa, Unknown
  Obtained from environmental sample
  misc_feature (1)..(161): Xaa is any amino acid
MKLSQMSIKKKMLAFSGLFFLVVTVLGTAAFFFSMSQIVRSSAAQKLTRFIETKVFQLEKSVIKEIAIAVKMADSPLIKEHFLNPADQTLKGLAFREFAGYRRAFTGNNIFWISDTDKRYFFGDEYVYTLDISEPDSAWYPATLKQKELTPQKPAINPPQK

SEQ ID NO: 86395 - protein, 166 aa, Unknown
  Obtained from environmental sample
  misc_feature (1)..(166): Xaa is any amino acid
MKNKVSLFLLCAIASGLWAQTIQENQLPLKKVVILTSGLAYYEHSGSLSGNAGLNLQFRLDAVNDALKTLVINDPSSANPSITYQSEQTLLQTLRSLKIDLSDEPGMAVILSRLRGAEVEIAAPTAHTGRITGIEYRPAFSAQIYENEPWLLLSAKRGMEIFHLKE

SEQ ID NO: 86396 - protein, 94 aa, Unknown
  Obtained from environmental sample
  misc_feature (1)..(94): Xaa is any amino acid
MSEKEKFITLIEKFIALTAVRLSDDVMARLEEMRKAEDSPLQKSIYDSYFENLALAEKLNRSCCQDTGMLQFFIKAGTAFPHWTYARPICHVGK

SEQ ID NO: 86397 - protein, 660 aa, Unknown
  Obtained from environmental sample
  DOMAIN (71)...(235): Trypsin
  misc_feature (1)..(660): Xaa is any amino acid
MEKIKLSLGILAVTGLVSCASGPRISGAGLLTPATLSLVQNAVFEVVLDKPAEDPTVYEKELNWSLVPYVIRNDKYYSIGTAFAISKTELVTAFHVINLGFESMIFSKFHIRDSKGNVYEVDQVTGGSNEKDYLIFTVKGKTFDEFFEFEKKFKTGDTVLSIGNALGEGVVVRNGLVLGTVPEEDSGRWNLLKSSADGNPGNSGGPLVTPEGKVVGVVNSLRENILYSVPAEVILGGSRSELPYRQKSRVGHLILSNKLNYIFEYQARLPDNYTKVRASICEAYNGFYDDTMTKLFKEAPEYLSGPNNAYLLNSSLSTIFPEVSFVDPNDDNWKLSGLDKKNYPLDDDGRLYHASVSGIDFYKIKRPLSVSVEKICTDPKYIMDLILRNIRTDRSLWGNDKYRILSYGEPSSKGSFRDALGRTWISAHWVIGFEDEVLIMYILPQPNGPAIDSTKQDSSYLHIYEWDLRKTCDHLFSAYDGSFEEWSSFITLEQFIPDFLKDIHFDWNSGEQSFSFGSGPLSISADKQVFDWNARSELFLAHSWYKLNGKLEFGIRRVILYGDQRGKEYAHIYRNIKPDPKLGTNAMENWNDLIKEKPPFDEKPILSPKDNNGFVGAILKARRPNPDTLFTLYLSMENPQNEEDLYRRFESLKTGVSVEY

SEQ ID NO: 86398 - protein, 149 aa, Unknown
  Obtained from environmental sample
  misc_feature (1)..(149): Xaa is any amino acid
MDKPKIYLETTIFNFPFADDAPQLRADTIKLFDEIKTGKYEPYTSAYVIDELENTVQKDKLVKMNGLIEEYNITKLPMSSEAEKLAELYLAEGAVNKKFITDAYHIAITTVNELDFIVSLNFQHIVKQKTIRETARINELVPIAVRRPP

SEQ ID NO: 86399 - protein, 160 aa, Unknown
  Obtained from environmental sample
  DOMAIN (44)...(154): Protein of unknown function (DUF1538)
  misc_feature (1)..(160): Xaa is any amino acid
VSIFTKLRDNLFPRRKDKIILSFKEIFSLIKVYAFSKIKPQFRAVLMVSVFLTAVQYFILETPLKNAISVVICVAAAILGLSFFLEGLFLGIMPLGEQCGMRLPSKIGAAGVTVFSIIVGITATLAEPAVAVLQQQGSVIPAWNAPLLYLLLNRGTSWLV

SEQ ID NO: 86400 - protein, 160 aa, Unknown
  Obtained from environmental sample
  DOMAIN (43)...(122): Biotin-requiring enzyme
  misc_feature (1)..(160): Xaa is any amino acid
VVQSIVDASGSTSEASPVAQIYAVNTIPAASGQIRDYLALSGDIIASSLVDTYSDAAGKVSRLYVSVGSKVKKGDPVAAVDPSRPGMEYVASVVRAPVEGTIIALPAQLGMTVSQAVPLARISGGAGLETRLYVAEMVYLQSQPKPALRNHPHQDHGAVD

SEQ ID NO: 86401 - protein, 216 aa, Unknown
  Obtained from environmental sample
  misc_feature (1)..(216): Xaa is any amino acid
MFLLSKVGKRIEDFWYTDANGERQKLVNGKETVYKSQGRPAVLDVPRKQWPRELALSLVLSVIFSSFFLLQKKNYRAGKILAGISMSLAGFVFGIMSLLLYFMNLFTNHDYTFQNYNMLFGTPLLLAAIPLGICYAFTKKSEKLILYNALLRLIWLITALGIFISMLIKILPMFYQQNLTDQMLMLPLALLFAFHPAGLTEVWEKYLTGFFHRSKE

SEQ ID NO: 86402 - protein, 184 aa, Unknown
  Obtained from environmental sample
  misc_feature (1)..(184): Xaa is any amino acid
LKKKTSFYIAIRYLWGRAKEGVRYLRGAAAGIAVSLVPIIVTLIVADGMIRGITDRYLELGTGHIQVFDYNNFMGSENTKREINEIDGIRGIWAEQRGMGVLAGKKGKTGVSVRAVESSFWDDSASAVLLKVIDGENKPRTDRDIVLGETLANNIGVKAGDTVRLMTIMSEEGGRIPPRPILTL

SEQ ID NO: 86403 - protein, 147 aa, Unknown
  Obtained from environmental sample
  misc_feature (1)..(147): Xaa is any amino acid
MRTSNKGMKDFESLKIARDRKRVYHAVGDKLSGLAEAHKGIHGYGAFGAVVGCTERDEAAEIRKKYSNLFFLIPGYGAQGGAADDAALLLREGNGGVVNASRSILKAWETELKKSGGEGSAITNSFAAEAARRAAIEMRDAIRAVKH

SEQ ID NO: 86404 - protein, 96 aa, Unknown
  Obtained from environmental sample
  DOMAIN (24)...(82): Collagen triple helix repeat (20 copies)
  misc_feature (1)..(96): Xaa is any amino acid
LASLLNNPVCKTTAAEFPAEFVAAAGAAGFAGIGGMIGPSGSADAAGLGGSTGVTGLSGSVGAVDLGGSADTAGLGGSQARRTWAVQRIRAALGTQ

SEQ ID NO: 86405 - protein, 138 aa, Unknown
  Obtained from environmental sample
  DOMAIN (78)...(133): ANTAR domain
  misc_feature (1)..(138): Xaa is any amino acid
GYCDSRFRMIGRAFPSKPRQRRIPGYSHVKDEAFDSVSAACEEDGVLIIAKPADKSLLWSALSLAKSVQSRVKRIQAENTQLKQNIEDIRIIDRAKCILISFMKMSEQEAHRYIEKQAMDMRSSRRFVAEGILKRYEN

SEQ ID NO: 86406 - protein, 218 aa, Unknown
  Obtained from environmental sample
  DOMAIN (1)...(211): MraW methylase family
  misc_feature (1)..(218): Xaa is any amino acid
GYGEGFFTTKKRQGDSSFEKDEYLDMRLDTSTGLTAAELLARLPERELADLLYNNADERYSRRIASLIVNERQKSTITTTSALANLVARAVPASYRHGPVHPATKTFQALRIATNGELSRLPSILEAALRLIEPGGRLGIISFHSIEDRIVKNFLRTMNKDCICPPNAPICKCGGHRSINILTKKGITPGKDEIERNPPSRSARLRVAEKILERSDND

SEQ ID NO: 86407 - protein, 379 aa, Unknown
  Obtained from environmental sample
  misc_feature (1)..(379): Xaa is any amino acid
DELLQGDRIEVEYYPTDYNYGIRLSQGFGRSYFSVGAGESVRGKVRSPYFTLNSSHAFGTDFRVKSHQFSASVNAGMSSRYIPPVEETDADDSLEFDWSYGGVLGWRWSNNATGAGTQAYSANVRFVNDQNPTASATLRHTYNRARLSANYDLTFNDYTDYDRQNHALRAQLTGSLMFADGLWALGQQMSSSGGFALVDTRGDLKSAKVHINRSRVTGNELSHSGWMGAAYHNRLMAYSPTELTLSLTDVPVGAFMDQSRYYVMGSYKQGFALKVGKKSQVIAIVPFVEKHGGRPLGHTYLTIEMELENAGETDEDDSRAPRAAFTSGDGILQIGGLTPGYTYRVKFRASSRLKDVLIEIPAGAYGMYEHPEVEVEREE

SEQ ID NO: 86408 - protein, 178 aa, Unknown
  Obtained from environmental sample
  DOMAIN (1)...(36): WD domain, G-beta repeat
  misc_feature (1)..(178): Xaa is any amino acid
LRHHEGHTYWVKSVAFSPDGTQVLSGSWDKTVKLWDTTNGQEIRTFMGHTSEVESVAFSPDGKQALSGSYDKTVKLWDATNGKEIRTFGGHTSAVESVAFSPDGKQILSGSYDDTVKLWDANTGREIRTFSGHTEGVNSVAFSPDGKQIFSGSSDKTVKLWDIASGKEIRTFKGRIAS

SEQ ID NO: 86409 - protein, 122 aa, Unknown
  Obtained from environmental sample
  misc_feature (1)..(122): Xaa is any amino acid
MGLDMKTRKKICARIYRRYQKADREGKAKILDEYAPVLEYNRDYLAHLLANWGKTVYAPCDGQPVKYTAKPPIKDRDRAPKSKKTGRPRKYHKAFVEVLKAVWELFDFQCGELLSPPGQGMM

SEQ ID NO: 86410 - protein, 424 aa, Unknown
  Obtained from environmental sample
  DOMAIN (2)...(250): Starch synthase catalytic domain
  misc_feature (1)..(424): Xaa is any amino acid
MKVLMVSSEAVPWAKTGGLADMVSALSINLAKLGHEVKIVIPRYYSIDRDKLKLLPGAMGTPMGGGIEEWSAVYYTDMPGTNKKNPVKIYFIDHEIFFGRNGIYGSHADTDFIDNPRRFSFFCRAAFQLCRKIEWYPDVLHAHDWPAAIAPVYLKFAERVPGGDKGFKKTISILTVHNLGFQGIYGKDNFNYMGLGWDVFYNGGFEDWSMLNMLKAGLYSADKINTVSPNYAEETKTQPGGFRLDGVLRYRSADYCGILNGIDTNVWNPAKDKHIPEPYSVKDMAGKAKAKEALQREFNLPPDPDVPVIGMVTRLTEQKGVGELFGPTYGSAWSICRDLELQMVLLGSGEYWCECEISGLASRLSNFKAKIGYSEKTSHLIEAGSDFFLMPSRYEPCGLNQMYSLIYGTLPIGAEQLGRICHCL

SEQ ID NO: 86411 - protein, 66 aa, Unknown
  Obtained from environmental sample
  misc_feature (1)..(66): Xaa is any amino acid
MKKTLRFSKFFLPAAIISAIIVILSISGYFINKGFALGVDFQAGLIQEIKVAPDGVQSPLERYIKR

SEQ ID NO: 86412 - protein, 468 aa, Unknown
  Obtained from environmental sample
  DOMAIN (96)...(467): Na+-transporting methylmalonyl-CoA/oxaloacetate decarboxylase, beta subunit
  misc_feature (1)..(468): Xaa is any amino acid
MLNQKKDPILIVKVCLLILIGAFAFSFISSLFNARAMAQTKSSEELNAIIPNSSDLPRVNLKEFIIDLGKTTGIYAFITDVLEKTTPSNETFTVKGWYELIMVLVGFLVIYLGAARGFEPLLLVPIGFGIVFANIPFAGMGEQGVWNDSFKLWDHQGFLNVIYNAGIGNEFFPLIIFIGIGAMTDFGPLIANPKTALLGAAAQFGVFGTLFLISVANYLPTVAFNLKEACGVAIIGGADGPTTIYIAAKLAPHLLATVAVAAYSYMALVPMIQPPIMKLLTTKKERLIKMKQLRPVSKTEKIAFPIIVFSLAILLIPAAAPLIGCLMFGNFIREIGVVDRISKTAQNELMNIVSMFLSLGVGSQMTPEKFLNSKSLIIVVMGLLAFAIATATGVLVAKFMNLFLKEKINPLIGSAGVSAVPMAARVSNKVGLEYDPGNFLLMHAMGPNVAGVIGTAIAAGVMIAVYAR

SEQ ID NO: 86413 - protein, 191 aa, Unknown
  Obtained from environmental sample
  DOMAIN (29)...(95): Biotin-requiring enzyme
  misc_feature (1)..(191): Xaa is any amino acid
GLGGVIAEVPLSQPLLHLRRRSAPTAGGATIPAPVAGTILRYVASEGAQVKSGDTVLIIESMKMELEIKATSSGPIHFLVPTGTQVAAQQPVAQIGGGAPAAAPAPAAAAPAPAAAPAPSGGGVTIPAPVAGTILRYSVNEGTTVSAGDNVVIIESMKMELEIKATSSGKVHFLVPAGTQVASQQPIAEIM

SEQ ID NO: 86414 - protein, 519 aa, Unknown
  Obtained from environmental sample
  DOMAIN (254)...(443): Adenylate and Guanylate cyclase catalytic domain
  misc_feature (1)..(519): Xaa is any amino acid
GLWPRDYPWEHYLDAEEIKKAAFEHSGAADTLWLAARENFLNSCEELLNGNYEETILADVGDDKETADFVREVFSACRDQFNRMTVIRKEAYVLKDSFCVIGSDATSMTDNGLITFQENYPNVGTYAVAANMMLSNEFITDTPRFVPAIIALIYSLLLGFLLSRFDTRLSIITGISGLLLLTGAFAVFFMISKIYIGFAVPLSATALTFIMMITVKFLTASREKAFLHNAFSRYLAPEVITELINDPDKLNLGGEKREMTAIFTDIQGFSTISEKLDPVRLVQLLNRYLTAMSNIIMENLGTIDKYEGDAIIAFFGAPVFRENHPALACRSALAMKAAERELNKAVLEEKLSPSPIFTRIGINTGEMVVGNMGAENKMDYTIMGNAVNLAARLEGVNKQYHTGGILISEYTREKLGDEFLLRRLDRVRVVGINTPLRLYELITINNEQLTTNREEIEKWEKAIDLYEQRNFREALELFKSLMENNPDDKVAELYANRCMKYEANPPPEQWDAVNNLTEK

SEQ ID NO: 86415 - protein, 200 aa, Unknown
  Obtained from environmental sample
  misc_feature (1)..(200): Xaa is any amino acid
LPHIFDNIRGDNLATALKQTLNGAKRADFCIGYFNLRGWNLLIDSVEQLTSGQLNEKYEDDSTYKARVLIGMQKTPQDELEEYFSLRQTQIDLAAVNEIKKAKAAEFRTQLTIGLPTNKDEATLKKLSRQLREGIVKVKLHLAFNLHAKLYLAYREDYKRPNNRVLGEQHPYFLTAFKTGELNVDVTRFTPASSLRNGIR

SEQ ID NO: 86416 - protein, 800 aa, Unknown
  Obtained from environmental sample
  DOMAIN (309)...(332): 4Fe-4S binding domain
  misc_feature (1)..(800): Xaa is any amino acid
MVKAVFDNLSGKKIASFIVGVNDDVEHKSLDYDPHFVLEEEGLNEALFYGLGADGTVGANKNSIKIISEAKPELNAQAYFSYDSKKSNGFTVSHLRFGTGRIRRPYLINSADFLACHKFSYMEMYDMLKSVKAGGTFLLNSPFKAADVWKNLPVEAQQRIIDKKLKFYVINAAEIARNTGMGNRINTVMQAAYFKISGILSEADAVKRMKEHIEHSYGKKGKDVVEKNYKTVDASLNAVEEVKYPSKTEGDIHMKKPFATAKDSWIRDVLGTMSIQEGDSLAVSKIPEDGTFPTATTQYEKRSVAEQVPVWNKDVCIQCGNCTVVCPHACMRFKNLTDDQVAKAPKGFQAAEIKPKAVPGQKAALVIACEDCYSCGVCLNICPMSNKGQEKPALAWKHYSDDHEFHAEQVAVWDYFLSLPETPAGELKNAKALAYKQPLFEFSGACGGCGETPYVKLMSQLVGDRALIGNATGCTSIYGGNLPTTPYCKRADGRGPVWSNSLFEDAAEFAMGFRLTSDKLAVHAREVAEKAKGEGIAVAIIDKILSNDQADEAKIEEMRKSKDELKAAIKNDSKPTAKLLYSLADFFVKRSVWGFGGDGWAYDIGFGGLDHVLASGKNVNLLCLDTEVYSNTGGQMSKATPVGAIAKFANAGKEITKKDLGAIAMSYGYVYVAKVSLGADMNQTIKAFREAESYNGPSLIIAYSHCINHGIDMSKGLEHGKAVVTSGLWPLFRYDPRLKDEGKNPFQLDSKEPTTSIEDFMYSEVRFKSLKQADPARADALLAKAKAHAERFERSQYRPP

SEQ ID NO: 86417 - protein, 449 aa, Unknown
  Obtained from environmental sample
  DOMAIN (220)...(318): 5'-3' exonuclease, C-terminal SAM fold
  misc_feature (1)..(449): Xaa is any amino acid
MKNPLYLIDAYGLIYRSYFAFMTFPLKNNAGKNVSALFGFARTVISLLNEGAPVLKENGKHAPAGGYLKETPKLLAAVFDSRTPTFRHKMYSEYKATRQKAPDDLHAQVPLVEEFLAALNIPCLRADGFEADDIIATLAKKCQEEKRQCYILSSDKDLLQLVGNGTFELRPTKVQKNAAPGGSAPAGGAPTGGAPTGAAQNAGPAWEIIGPAEVKAEWGVPPEKILDFLSLVGDSSDNIPGVKGIGEKTALEHIKRYGSLDGIYQNIAGLGSARGKKIAEGKKDAYFSQSLIKLVTDVPLPITDIDKLSAEALNRKAAALVLFREGIRQSAKQLDPNISVTVASIGTKEQTDEQQGYIGTTYSADKSLFGGGVYKIINDIGELKTLLDEAEKQKLLALDFETDSLDAWNSRPIGISLALKPRRRTTRPLPRMAYRKNEPPRTPAHLIPK

SEQ ID NO: 86418 - protein, 401 aa, Unknown
  Obtained from environmental sample
  misc_feature (1)..(401): Xaa is any amino acid
MSMRRFSICLCLIAVLFLSCNGNKVAQIWTDHPEFALYGDYFNTSQNQYKVIVKYIENPSAQLGRENRGKSNNNPDIVVGSWLKNTSTGVNFKSLDYLFGANKLSRSIFYPRLLSVGRIDRNQYLLPVSFNVSALIFSKEKELEISSPFTIGFEEIKKLSVAYNILNKGSYTRMGFSPLWNDDFLMITAVLFDSSFKEASPLAWDNAALNRSMDFVNDWTILINTDNQAEEDFTFKYFIEPQEKLIQSGRILFSYMESSELFILSEESKNILDFRWIMEDEKIPIAEDAVFLGIPNRGKAPGAAKAFVQWFFKIENQRLLLEFSKANRISESVFGICGGFSSIGAVTEQIFPRYYPSLLGRMPPSEFLCRPNILPRDWAIFRSAWFFLPHDAPAQANKESC

SEQ ID NO: 86419 - protein, 303 aa, Unknown
  Obtained from environmental sample
  misc_feature (1)..(303): Xaa is any amino acid
DFIDVIDGYTDDQVRFLLEIKGQIDTLNDKFNRSKVMNFRSLKDVDKVIEVLRNQKIDLKLFPHLNSDATRQKAEIVNRAIDNLLEKASILQGKINIQKLHIDKIIQENNEEINGFLKNAGYNYSVDIKEDTKNHYCLKLIHNDITNEITDVKNHLSFGEKNAFAVILFMYDALKSNAELIILDDPISSFDKNKKYAIIDMLFRKGEKSFRNKTVLLLTHDFEPIIDMVYHHSDRFDKPYSCFVENDHGALSEKEILKENIKTFIEICNENLQKNINDITKLVYLRRYYEVINKKRNGISTYF

SEQ ID NO: 86420 - protein, 585 aa, Unknown
  Obtained from environmental sample
  DOMAIN (194)...(280): Glycosyltransferase 36 associated family
  misc_feature (1)..(585): Xaa is any amino acid
MKYGYFDSEKREYVIDKPDTPAPWANYLGSPAYGAIISNNAGGYSFVKSGAAGRLIRYRFNEQDRPGRYIYLRDDEDGDYWSASWQPVGKPLNQYKSICRHGTGYTQIEADYKDIHSQALYYVPQDADYEVWKVKVTNSGSKARKISCFGFVEFTCESFYEQDQVNLQYTQFITRTYFKEKFILQTINENCLNAVNESRVDTRFFALAGAKVTTYCGDRAAFLGKYRDYGNPVSVENGKLDNTLNYNLNPCGALHTTFDLAPNETKEFVFLLGQKREAQAKELVSRYEDTSLPEKEIDKLKTYWHSRLANLKVNTPDENFNNMINTWNAYQCFITFVWSRAASLTYCGQRNGYGYRDTVQDIQGIIHLDPEMALEKIKFMVSAQVNHGGALPLVKYNHNPGHEDKPEDESYRKNTGHPSYRADDALWLFPTVWKYVAETGNAALLDEVIPYADKGKDTLFNHLKKAIGFSLNNLGIHGLPAGLHADWNDCLRLGAKGVSVFVALQLYYAFEIMIRFAKFKKDSATEKEMTNQKKRFGKIIEERCWKDDRFVRGITEDDVTVGKKGDPEANIWLNPKAGSADLSWG

SEQ ID NO: 86421 - protein, 475 aa, Unknown
  Obtained from environmental sample
  DOMAIN (361)...(472): L-fucose isomerase, C-terminal domain
  misc_feature (1)..(475): Xaa is any amino acid
MTAKRFQGDWPKIGIRPTIDGRMGGVRESLEGQTMNMAKSVVALLTAALKYPDGTPVQCVIADTTIGRVAESAACAEKFKRENVGVTITVTPCWCYGSETMDMDPHTVKAVWGFNGTERPGAVYLAAVLAGHAQKGLPAFGIYGRDVQDASNTEIPSDVKEKLLRFSRAAMSVAIMRGKSYLSIGAVCMGIAGSIVSTDFFENYLGMRCEGVDEVEIIRRMSEGIYDKGEYEKALAWAKANCKEGEDTCNRKDLQKPRAEKDKDWEFIVKMTLIVRDLMVGNPKLKEMGFGEEALGHNALAAGFQGQRQWTDFYPNGDFTEAIMNSSFDWTGVRQPFVLATENDALNGTAMLFGYLLTNTAQIFADVRTYWSPEAVERVTGKKLTGRAANGIIHLINSGAASLDGSGRQSDKEGNPVIKPFWEISEAEAKACLDATTWVPANREYFRGGGFSSQFPHPRGDALHYGAPEPCSGPG

SEQ ID NO: 86422 - protein, 310 aa, Unknown
  Obtained from environmental sample
  misc_feature (1)..(310): Xaa is any amino acid
MTDRHEIAPSLDLAMRVICEADFSDRRRINDLVLEMKNEINSSLAPMGHIYSSGRAGRFKSRSKSVEEKYGGISQIEFVHRLAGYDTGEIINKLQYIREKIIKAGLIVNITGSALNAAGAEIAQRFNRFGPPLPRLSAEIGADTQAAQVQEVFASRSLQVGFAALTLNSAPHDTLESTAEYVLTHQLSTGALWEDIRMKGGAYGAVINSNPLENCVSFATYRDPNPVRSLDVISSIFKDAAYGKCSEDYLVKSIIGCYSKETRPQTAAEKGLVDFYRFLYGIEESYHKRKLDRLISISTADIEAVFSTLN

SEQ ID NO: 86423 - protein, 61 aa, Unknown
  Obtained from environmental sample
  misc_feature (1)..(61): Xaa is any amino acid
SPEEIIRLKKMTIQYFADHTGKSIEQIAADMERDLYMSAQDAVDYGIADSILKREKNGKAS

SEQ ID NO: 86424 - protein, 132 aa, Unknown
  Obtained from environmental sample
  misc_feature (1)..(132): Xaa is any amino acid
NPRFIAELLQRAIDWAHNHGIKAHLHSCGYIMGRIPQLMEIGLDALNPIEIKAGNDIKALKRDYGEKLVLHGGADALLLDKTEKILPYIEETLPELKQKGGYIFSSDHSIPNTVSLENYKTIVEAVKRIGAY

SEQ ID NO: 86425 - protein, 109 aa, Unknown
  Obtained from environmental sample
  misc_feature (1)..(109): Xaa is any amino acid
MNSSKSFKEITAAELVNNINVGWNLGNSLDASRSILLNSESSVSEWETAWHNPVITKAAITAIKNAGFNAIRIPVSWAKCTDSNYNIRSDWMTRVIEVVNYAADNDFYI

SEQ ID NO: 86426 - protein, 249 aa, Unknown
  Obtained from environmental sample
  DOMAIN (2)...(221): Pyridine nucleotide-disulphide oxidoreductase
  misc_feature (1)..(249): Xaa is any amino acid
VIARVSQGGAFGASFLCEEVSELKKEGDLFTAVLASGQTRRAPAVIFATGAKHRLLGIPGEKEFSGRGVSWCATCDGAFFKGKKIIAVGGGDAACDGAQYLSRLSGQLILVHRRDRFRAQKALADRVMRNKNIEVRFNTVIKEIKGDKKISSAVLECEGRVYEEPADAVFIFAGMIPQSSLAGVAGLRVEMDDGGCILSDQKMATSVPGLFVAGDVRSGSFRQVIVAAGEGAVAAHNAAAYIEQLGMRN

SEQ ID NO: 86427 - protein, 444 aa, Unknown
  Obtained from environmental sample
  misc_feature (1)..(444): Xaa is any amino acid
MPPQMPVPQAYDNAAAGEAHPSGDDVAGQLDSLFGGDEAASVPDVSAPLDDLSASADAADVSDGSQLSGDDVAGQLDAMFGGEEAADVSVPDDQLGLAGESALSTADESLSIDQPELTEESILAGLGGEDALSMAEGAVPDGHPGGDDVVGQLDAMFGESEPAVSADESASTDQPELTEESILAGLGGESALSMAEGAVPEGHPGGDDVVGQLDAMFGGSEPAVSADGSVSTDQPELTEESLLAGLTDEAALSMADGAVPDGHPGGDDVVGQLDAMFGGSEPAVSAEESASTDQPELTEESLSAGLTDEAALSMADGAVPDGHPGGDDVVGQLDAMFGGSEPAVSADGAASDEHPGGDDVVGQLDAMFGGSEPAVSAPAGESVSAAGESVPTAPPDQLDELFGGQSILSADSAPDGATPISIASMVHSGNAVVRQLDELFRGGG

SEQ ID NO: 86428 - protein, 343 aa, Unknown
  Obtained from environmental sample
  DOMAIN (1)...(308): Glycosyl hydrolases family 28
  misc_feature (1)..(343): Xaa is any amino acid
GILDGAGRYWWDALREKRSVGQQEPQTPQELAWAALNPTYETQPSGGGGRKTQFLRPPLVQFLNCSKVRLEGVTLQNSPFWTLHPLYCRDVVISGLTIKNPFDAPNTDGMDIDSCEDVLIENCMVSVGDDGIVLKSGAGEDGIRVGKPCRRITVRNCTIEDGHGGIVIGSETAAGVCDVLTEECLFRGTDRGIRIKTRRGRGGKIHDLEFRNLTMENNLCPFAINMFYRPGAALTDGYFNQSALPVNAATPSIKNIRISDVKASGCRASAGFIAGLPESPVENITINRCEFSTDERSGVSPDESDMFLGIPAIKEKSIRLLNVKNIQFNEVNVKGPLEAFIYR

SEQ ID NO: 86429 - protein, 354 aa, Unknown
  Obtained from environmental sample
  DOMAIN (59)...(252): Calcineurin-like phosphoesterase
  misc_feature (1)..(354): Xaa is any amino acid
MAGDSAPCRKRHVRDLSRGLRSLQKEGFRYVHILRGQEEVDSAEIVRTKLWNDKRDETGPFDIIGDIHGCYDELTELLEKLGFSVDRKSHTAQPPSGRRAIFLGDLCDRGPANADVLRLVMNMAESGAALCVPGNHDVKLLRKLRGSDVKLTHGLDLTVKELEQESQEFIDKVTQFIYGLVSHYVLDQGKLVVSHAGLCEKFQGRSSGRVRGFCLYGDTTGETDEFGLPVRLNWAEEYRGRALVVYGHVPSAESLSLNNTICIDTGCVFGGKLSAYRYPEGELVEVPAKREYYAPIKPLDYNANIAANGCSEPDIADILGEAAGSEPRLYREISVPGEASSFTPGNMSRFSPNP

SEQ ID NO: 86430 - protein, 80 aa, Unknown
  Obtained from environmental sample
  misc_feature (1)..(80): Xaa is any amino acid
MDWLKGMNAIIGHIEENLTQPIRYESLSKIVGCSVYEFSRIFSFMQPCPFQSTFAAEDPRKPFESSKPEITHSNALPGDF

SEQ ID NO: 86431 - protein, 52 aa, Unknown
  Obtained from environmental sample
  misc_feature (1)..(52): Xaa is any amino acid
MPILEDLYSLMRNQPETAAPRIAPALEIYVTGSVNVFNHRTNVDITNRLVCL

SEQ ID NO: 86432 - protein, 119 aa, Unknown
  Obtained from environmental sample
  misc_feature (1)..(119): Xaa is any amino acid
MTIFCKKQRILAVLLVFLFSACASTVKISDDMSSAELVQRAQEATDKNRYNLALQYYEALYDRNPDNIYLIITAEYEIAFIHYKQKKYYQAREELTSLLEYYNIPDEELLPHQFKRLAQ

SEQ ID NO: 86433 - protein, 552 aa, Unknown
  Obtained from environmental sample
  DOMAIN (328)...(551): Glycosyl hydrolase family 67 C-terminus
  misc_feature (1)..(552): Xaa is any amino acid
VGLAHGTVFGTRRRACQPAANGYHWDNIDGTIERGYAGPSLFYHNGRFDYEKQRIEDYARLLASIGINRISINNVNVRGNAKLLITSEYLEDVAALASIFRPFGIRLLLSINFGAPWSLGKLPSADPLDPVVAAWWKERADLIYHYIPDLAGFLVKADSEGEPGPFQYNRTHADGANMLAKAVKPHGGEIIWRCFVYNCQQDWRDKSVDRARATYDHFMPLDGAFDYNVILQIKFGPYDFQVREPVTPLFGALKKTRHIMEHQITQEYTGHQIDLCYLPWLWEDVMRFDTAGEPEGRIKDLIGAYSAGHSRIEGFAAVVNVGRDRNWTGHTLAQANLYGYGRIIWNPSLSAQEIAREWSVLSFGAGRVAQTVTELLLKSYPAYEKYNAPFGVCFMVTPGPHYGPNIEGYEFSRWGTYHRANAHAIGIDRTPAGTGYTTQYAAKNAAMFADPAACPENLILFFHRLDYDYKMKNGETLLQNIYDTHFEGYEEAAAMLEQWKGLKDSLKEEVYQSVLSRFERQLANAREWRDQINTYFWRKTGIADKRGRKIYD

SEQ ID NO: 86434 - protein, 559 aa, Unknown
  Obtained from environmental sample
  DOMAIN (434)...(510): Domain of Unknown Function (DUF349)
  misc_feature (1)..(559): Xaa is any amino acid
VQIRKIWKECPPKDKEELLTVAKSTEVRLDLISNCTKQGVLAGVAKSDAQEEVALAALAKVERENLLEEIKKDAVCNVARIKAKEMLSSMQVAKTDPVKDQADLLSQKQKALLSHATRLLENKNPLAVDSEMQRLYQEAQNLGKEASTLGSPQNEELNSVFQKHKESVLAEKARLAEEKAKQEAKLKEEEESKKQAPVQAQTQHVQEQTTEMQDLSPESAEEKSAETKEDRLSEEEYHAKLPLLQTIIEKINALDENGDFNEISQSVRQAFYEWKEIVGEKKSQFKNIYKEFRTATSRFQNLQEWASWHAEQIREQLIKEIEELANMPVVLENRTKAFAMLEQWKAAGYMPATKIQELWPRFKTGLDKVMDSVLPLLKEQEKGQEENLKTKEDICAQIEELAGAAGEWAEQLKKIQELQAKWKNTGFVPKVQNHAIWERYQAAINSFFKKQEAYKKRIDEQIGERIAAREKLCEEAEALAKSTDWRNTPKAFTKLSADWKNAGSVPSEQYEKLLQRFKAASDFFFEKRNAHFDSARKAREEICAKIEALDLMPPVHSAI

SEQ ID NO: 86435 - protein, 63 aa, Unknown
  Obtained from environmental sample
  misc_feature (1)..(63): Xaa is any amino acid
MAGKLTHIQNMIYEIRGQKVMLDSDLAILYGVETFNLNKAVQRNIERFPGDFMFSLTKMNGKT

SEQ ID NO: 86436 - protein, 208 aa, Unknown
  Obtained from environmental sample
  DOMAIN (5)...(205): Phosphotransferase enzyme family
  misc_feature (1)..(208): Xaa is any amino acid
MSNYKLNTLLADRGTKKIYRDGDKVIKLRDEGYPAPYVLSEAHNLAVVGETALKVPRLVEVTKIDGKWAVVWEYVEGTSLDKLMEKNKDKEQQYLERFVDIQLDMHRHSATRLPLLIEKMERKIKSSELDSTARYEILGRLASMPKHTKLCHGDFIPGNIVITEKDEAYIIDWCHATQGNASADAAHTYLLFRLAGNAALRTSILRVR

SEQ ID NO: 86437 - protein, 341 aa, Unknown
  Obtained from environmental sample
  misc_feature (1)..(341): Xaa is any amino acid
ELSDSAEAGDLRTPEICLVAVQKDGMALQYVPEALRTQEICFTALQKGGWVQYVPEALRSIYFNTPSACLEMISKDYSKIQFVPESILTEEFCIDAIEVDVEVIRYLPVALRTEKVCHAVIEADWIWKLKQPPPQIDSLELCIELVKRNGEAIKFVPGKYLTEELCHIATGQSAKALKYVPWELRTPEMCLAAVRQNGTLFYHVPRGLRTPEICLAAVRYNHSIFEDVTETLRTPEFYLAAVQTLNSWTLEDVPETLQTPEFYLAAVKKYPGALEYAPETLQTPEFYRAAVQQNSQVLKYVPWAFRTPEICLAAVRQDSMPLEYVPETFRTPEFALAACDQ

SEQ ID NO: 86438 - protein, 104 aa, Unknown
  Obtained from environmental sample
  misc_feature (1)..(104): Xaa is any amino acid
MSEDNITIDAATAKHKMMTTSPVEPLICKLAVPTITGMLVSSLYNMADTYFVSSLGTSAIAGVGVVFSLMSIIQAVGFFFGHGAGQFNLPFSWRKEKPKKREKM

SEQ ID NO: 86439 - protein, 394 aa, Unknown
  Obtained from environmental sample
  DOMAIN (134)...(349): Nicotinate phosphoribosyltransferase (NAPRTase) family
  misc_feature (1)..(394): Xaa is any amino acid
MANGYWKRNLNETAVFEMFFRQQPFGGGYSVFAGLGTLLEKLLNFSFGEDDIDYIKSLSVFEEGFIDYLKTFRFKGSLWAMDEGTVIFPNEPLIRVEGSLIECQIIEGLLLNVVNFQSLIATKACRVWLASGKGNIMEFGLRRAQGYDGAISASRAAFIGGASGTSNTLAGKVFGIPVMGTMAHSWIMSFDTEEEAFDCYASLYPDRTIFLIDTYDTLKSGIHSAIKAGKKLTAKGKNFGVRLDSGDIQYLSTEVRQLLDEAGLEKAFITVSNDLDENIIETLVKAGAPVNSWGVGTKMVTGAQAAAFTGVYKLSARIEGKKAIPVMKFSDNPEKTTNPGVKQVWRIRDKNGEAVADVLGIDGADEITTGQRFCFWHPSADYRHLPPGIKRPQN

SEQ ID NO: 86440 - protein, 93 aa, Unknown
  Obtained from environmental sample
  misc_feature (1)..(93): Xaa is any amino acid
MPDLPKKVVVETNAVFKHDKIEPVITCGIPVDIRALVTHHILSQEGIIEAVFEDDTEKAFRVFSHDLAVQKLPLGEAHSLFDEMRRANNTKKG

SEQ ID NO: 86441 - protein, 181 aa, Unknown
  Obtained from environmental sample
  DOMAIN (17)...(181): Pyruvate flavodoxin/ferredoxin oxidoreductase, thiamine diP-binding domain
  misc_feature (1)..(181): Xaa is any amino acid
MTDRHLATLDGNEATASVAHRVNEVIAIYPITPSSNMGEYSDEWSAQGKTNIWGTVPAVVEMQSEGGAAGAVHGALQAGALATSFTASQGLLLFIPNMYLIAGELTPFVLHVSARTVATHALSIFGDHADVMACRQTGFAMLSSDSVQCAHDFALIAQSSTLRSRVAFLHFFDGFRTSHEE

SEQ ID NO: 86442 - protein, 172 aa, Unknown
  Obtained from environmental sample
  DOMAIN (5)...(35): Flagella basal body rod protein
  misc_feature (1)..(172): Xaa is any amino acid
MMRSLFSGVSGLQNHQTRMDVIGNNIANVNTYGFKRNRVNFQDIFYQQLQGAARPTEEVGGVNPQEVGLGMSVASIDTIHIQGAFQSTGVPTDLSIQGMGFFILDDKGSQLYTRAGTFALDEHGTYVNPGNGMKVQGWMAHELTECSFLTLRARWKVLLFRLGRKTPAGQLL

SEQ ID NO: 86443 - protein, 315 aa, Unknown
  Obtained from environmental sample
  misc_feature (1)..(315): Xaa is any amino acid
AARLAPGTDPLADTILKVERGLDLPPPQIVDRKTAVRGLRRPLPSRRMGYTQKAKISNHSIYIRTGEYEDGSLGEIFLDMHREGAAFRALLNSFAITVSLGLQYGVPLEEYIDAFTYSRFEPNGVVQGHDYVKMATSVIDYIFRDLAISYLKRTDLGQVKPEDLLPTATKSEIPDSVESKQRVNEKQSAGFRPYNPPAAATGGGPQTEQKTTPPGTASPGLSGRGETTKGLAGSAEAYRQTAKPAEDRASSTQPAQPPVQVLAQPHPEQNELYKIAQARIKGYEGDPCPSCGSFTLIRNGTCMKCHTCGGTTGCS

SEQ ID NO: 86444 - protein, 101 aa, Unknown
  Obtained from environmental sample
  misc_feature (1)..(101): Xaa is any amino acid
MKRLFVFPAWILIFSLTIFSGGCLRTKPEKPNDKINVVSVIFPSYDFVRAIAGNRVNLVMLLPPGSESHSYEPTPQNIIAIKNSNLFIYQGGENSAWEKEY

SEQ ID NO: 86445 - protein, 472 aa, Unknown
  Obtained from environmental sample
  DOMAIN (17)...(206): ATPase family associated with various cellular activities (AAA)
  misc_feature (1)..(472): Xaa is any amino acid
LKDPKKFDKLGGRIQKGVWLVVPPGTGKTLLARAVQGEASVNFYSMSGSDFVEMFVGVGASRVRDLCETGKKNAPCILFIDEIDAVGRQRGAGLGGGHDEREQTLNQLLVEMDGFAPNEGVILVAATNRPDVLDKALLRPGRFDRQVVVGLPDLVGREAILRVHLEKRKVPLDKEVNVKDIAKGTPGLAGADLENLVNEAALMAARFGNPTVTQLDFEEARDKLWMGAERKSLLMSEEDRRMTACHEAGHALINLLCKNADPLHKLTIIPRGRALGVTLSLPEKDKVSMSKEAAEDQIAILMAGRLAQMMVFNKQDTGASNDIARATELARKMVTEWGFCDKLGPIAYSKNNDEIFLGREISKPKEMSEKTAEMIDDAVNDIIQTQVNRVSEILLENRDKLDALSEALFEHEVLNREEIDKVIAGQSLASTQKSRQYQQRKERETETQKKVEPPPEPNLGEKGSKTRPILSL

SEQ ID NO: 86446 - protein, 594 aa, Unknown
  Obtained from environmental sample
  DOMAIN (153)...(317): Alpha-2-macroglobulin family N-terminal region
  misc_feature (1)..(594): Xaa is any amino acid
VEATVTDADMQTVSARHTVIALPPFILGIRANRHITNGNTISAKIAAIGVKDSLIAGQKVTVELKRVTWASYLTDSDFSSGKPKYMTNESVDLVEEREVVTGTNPTAIEFKNQQPGVYILALSSRDRLGRLQTVKIDLYLAGGEQQQAWKKAEQSVFETVMDRNSYEPGQQAKVLLKSPYKKALALAVTEMPNGELSYKWVSVDNGQGTFTLDIKQEMAPRVPVSFLLMRPRAAAPRRTSDGSSVDAGKPETVGNTTWLTVNPVANMLDVKLSHVPTVTPGSTLEVTINLRDIQGKARPGEVALWLVDEAVLSLRKEHSLDPLEAFLKEVDTHVSIMDSRNIIIGDLLASENPGGDGGDEEDDGLGKITPRKNFKVVPYWNPSIKVDKNGIAVVKIKMSDDLTNFAVRAMAVSGPDRFGMAKSRVSVRLPVTVQPALPRFVRLGDKLRAGGIARVVEGGGGAATFMITAKGLSIKNTPDKQIQLDSVRPMQLYADLTVEMQPFKRGRLLLDSASVKMAVKRSTDNAGDAFEVKIPVLPDRQFMEETQFSQISKGGNFSWQALPAPARPNTITGNLFISENQYLPKIIRSADLII

SEQ ID NO: 86447 - protein, 74 aa, Unknown
  Obtained from environmental sample
  misc_feature (1)..(74): Xaa is any amino acid
MDSRIHFFSQKDVISGKVAPELLGIRGRQANEFAELGFPILPGIVLDTDIASDIDIKSIKKDILELFGKMRKKW

SEQ ID NO: 86448 - protein, 681 aa, Unknown
  Obtained from environmental sample
  DOMAIN (375)...(483): Miro-like protein
  misc_feature (1)..(681): Xaa is any amino acid
MAEEIENIQKPKAELIKHTQADHSNAKSPAAQEGGQPESQERRKSKVIVVKRKPAISTGSTDQGSQPPASLGARKKLIVATHPKDETPESMDKQATRDLHTSEPQSQANGTPVKPYDAASSATGNRGSSGSASTPFPFTQRPAVAVGRVGGKQVGRKFHDDNRGGVSAGGGSGGTSQRPVNKGPGQPRHPAPPPRQQGQGFRQSPGAPQHSAPRPGFQNRPGFTPRPPQGRGGQSSGSPPPSALPEGKSGAKRSFRAKKPTYNRKEKELEMEEKLRQTRKKITYVANPVPKSIEIMENISVSELARKMNLKASDLIQKLMKLGMMVTINQQIDADTATILAAEFGADVKIISLYDETIIDTGTDEGADMLPRPPVVTVMGHVDHGKTKLLDAIRKADVVSGEFGGITQHIGAYMVETPHGRITFLDTPGHEAFTRMRARGAQVTDIVILVVAADDGVMPQTIEAINHAKEAEVPIIVAVNKIDKPEANPDRVKSQLSELGLMPEEWGGQTMFVELSALQKTGIDKLIDAILLESELLDLKANFHRGAEGKILESRIDHGRGIVATVIVQRGTISVGDSFVAGIWPGKVRAIFNDRGDKLKHASPSMPVEILGFEGIPNAGDPLQAVEDEKIAREYSSKRQELKRFEDAKNFKQVTAETLRDRISDGTIQELKVIIKADVQG

SEQ ID NO: 86449 - protein, 488 aa, Unknown
  Obtained from environmental sample
  DOMAIN (353)...(383): Putative Fe-S cluster
  misc_feature (1)..(488): Xaa is any amino acid
MCIGCGHCIAVCTHKARSYIDDTPRFLSDLNNGKKMIAVVAPAVASVFPDKYLNLNGWLKSLGVDAFFDVSYGAELTVVSYLDYIKTKNPRTVIAQPCPAIVTFIEIYHPELIKYLAPADSPMLHTIRMIIEYYHQYSDHRIAVISPCIAKRREFDETRLGDYNVTMLALKKHLESKKIDLSSFPEVEYTSPNPERAAGFSTPGGLMDTAERFIPGISRKIHKIEGIHTIYQYLVELSELLHTDEELSPLVDCLNCEKGCNGGPGTGNHNKPLPVLENPIRKRKAKLEGQLKPQKGDAGIKKYNQNLEKYWKKNLYNRTYKDLSGNNALKTPNEEELKAVFKRLKKFEKKDIYNCTSCGYQSCELMAKAIFNNLNKPENCAHYNIELLKEQTKTEELNRLLKEHINRTTGLIERISHTVHDLNETIEMQAQSVKDSSQKTASMIESLSSTSEVSRNKQNDIQELLDNATQGQKSMKETILSVQSISQS

SEQ ID NO: 86450 - protein, 261 aa, Unknown
  Obtained from environmental sample
  misc_feature (1)..(261): Xaa is any amino acid
MNQDNVKQKLLSIEDAPLEFSLIYSGKKSKKVNGLYKPATREIIIHNRNFQPDDTGQNLLLYTAIHEYAHHLHACSRGGTLSPRAHNSEFWAIFHALLEKAEKKKIYSDVFSVSPELLKLTDVIRSKFLKNNGELVKEMGKHLLKAHDLCTGIGVRFEDYVDRMLRIPRTAANMAIKCLSTILPPKSEPIICAFLPVSATAMSGKPPRARLLKARAPTVLRFRCVTRTKKKTPLFCWKKKKQDLRGQLQLSVNVLMKLKRN

SEQ ID NO: 86451 - protein, 125 aa, Unknown
  Obtained from environmental sample
  misc_feature (1)..(125): Xaa is any amino acid
LKNFNYVIYVLLVVLGLLGGWLIFGEKSHKNHNDIKSAKETIYTCSMHPQIRLSDPKSKCPLCGMDLIPVAIENENSVQDDDSFTMSAAAVALSNVEILKAKKSEPQKMLRLYGSIQANLGRSVS

SEQ ID NO: 86452 - protein, 188 aa, Unknown
  Obtained from environmental sample
  misc_feature (1)..(188): Xaa is any amino acid
IDRFGRGAAERAIEAEKRAIEADKMHEKLREDIELVNSNYGGIGRGLGQLVELIVVPKIRLDINKFGHEFKRTRANKIFRLNRHTPNRKETTVEVDLFLYNGTETMAVEIKTSLSVQDVEKHINQLKTMRKYEDETDMQGKKLYGAIVGVFVDYHARKLAMKNGLYILEIIEEENRLKTSAPKRARAW

SEQ ID NO: 86453 - protein, 289 aa, Unknown
  Obtained from environmental sample
  misc_feature (1)..(289): Xaa is any amino acid
LRLSFSLGSFVEKRVDPKGALGAGGSVSTTAWDFARILGSKEIWIAGLDLAFPGLKTHFRGAVFETRSNTASTRFNPAETWVVRALRDGYPFKAPCVSGGQVLTDRRLSLYAAWFENRFRQYPETRNYAVFQDGLAIAGIQAATTETLLSLPERRAEIDKKLQAAFSQTDGDFNNPEEKQKRADRYAKAVSSLINGLEEIKNAAQKGAGIAQQALKGKLDAGKQNKILKELDEIMRRITDSEVKEVAGFLFPSEKTNSENESTAKNSFQVYLNPQINFFLVAQTGSGHN

SEQ ID NO: 86454 - protein, 159 aa, Unknown
  Obtained from environmental sample
  misc_feature (1)..(159): Xaa is any amino acid
MILGIDIGTTTTKAVTIEGGKLTRKVKTKAVDAVTAATGAFGKIVLENGIDIKSIEKIKITGAGASKIKNDIFGIPTDRINEIDAIGIGGMFLSGERNIIITNIGTGTVIIEAGDKGISHFGGSGVGGGTILGACKKTSSYCGVCRYFRTCRDRKYESG

SEQ ID NO: 86455 - protein, 315 aa, Unknown
  Obtained from environmental sample
  misc_feature (1)..(315): Xaa is any amino acid
MAEETENTQKPKAELIKHTQADHTSAKSPAVQEGGQHESPERRKVIVVKKKTTTPSGAPSGGTDQGGQSPAVGARKKLVIASHPKDEPPETVGKQAAKDLQTSEISSQADGKPHDAAPGVGKVSQGAASSPFPFTQRPAVAVGRVGGKQVGKKFHDDNRGGAGGGSGGAAQRSANKGPGPGQPRHPSSPPPRQGQGGGFRQNFNAPQHNAPRPGGSQGRPGFVPRPGGPGRGGQSGSPPPSILPEGKSGAKRTFRAKKPTYNRKEKELEMEEKLRQTRKKITYVANPVPKSIEIMENISVSELARLVPILVPCGE

SEQ ID NO: 86456 - protein, 283 aa, Unknown
  Obtained from environmental sample
  misc_feature (1)..(283): Xaa is any amino acid
LHFGPREIGQGVDQHTMKEFIRLLEFCSGPAKHEKLTTRALSILLYRDSKRLEDLLSLCAPLLSRAEKTASIPDLSFLERSYPETMIAGKIFFTFKKDYIEINEDSSLFNDNAFIMGFPLETVEKINGIGYMSGKDKPYALTIENKETFYALARPQRRGTSELLSMFDCFLYVGGYSNRASAAMIKKLAMSNFTFYHAGDLDPDGVLILQHIQELAKRPVTPLRMDAATFDQYMDWARPLTKPMLRQIAKVRDETKANPELAGLLRRIEETGMGVEQEIIDYR

SEQ ID NO: 86457 - protein, 115 aa, Unknown
  Obtained from environmental sample
  misc_feature (1)..(115): Xaa is any amino acid
NQVSDRPSRPWAADIGPHTEQTVKAIIASRKVEQQGYKTCIALLKLADSYSPGRLETACEKALSYSRCPSFRSIRTILKTASKQQAPSRQRPDESVQKFAFTRGNAYYGGKKDGE

SEQ ID NO: 86458 - protein, 562 aa, Unknown
  Obtained from environmental sample
  DOMAIN (276)...(341): His Kinase A (phosphoacceptor) domain
  misc_feature (1)..(562): Xaa is any amino acid
MAEWGYSAIRQYFMNPADPVLKSLAHTEFALFQEHFENKVVFWVNDTDRIFYSTGSAPYVVNPDDPASYWYNLTLYETEKFNLNINYNPDLDQINLWVNVPVFDETNDGRKPIGMLGAGINLTDFSNFVASSYREFDQNITPYMFNKYNEITAAVDYSLVEKKVRLDELLGETGEELIKAAHELSKGESQSFNYDNKIYLVNSIPEMEWYMAVSYPLPGMFSLNRAMNTVFFCMLFLILFLFIVINIFIARLENAMAEHNLQLLEANRKAESASQAKSDFLAKMSHEIRTPMNAITGMAELLLREELSGEALDYAQDIKQAGNNLVSIINDILDFSKIEAGKLEIIPINYLLSSLINDTVNIIRTRLLEKPLRFFTNIDGTIPNSLIGDETRLRQILLNLLSNAVKYSEKGHVGLSITVDKRDEKQVWLRITVSDTGRGIKPEDKSKLFDEFVKVDIKKNQSIEGTGLGLAITKNLCIAMGGNISMESEYGKGSVFTAIIPQTIETGTPFAVVEEPEKKKVLVYEGRGIYANSVCWTLENMKVPDIPTSFFFYFASALYEEE

SEQ ID NO: 86459 - protein, 79 aa, Unknown
  Obtained from environmental sample
  misc_feature (1)..(79): Xaa is any amino acid
LNKPGFRPVRLKGVNIRERWWEAYGKRNKNARMTAMDEAQKNAEEMLDILRINYNRARQAGITQEMSEISGGAAALADR

SEQ ID NO: 86460 - protein, 51 aa, Unknown
  Obtained from environmental sample
  misc_feature (1)..(51): Xaa is any amino acid
MAFQKRIPTIEQMKNEVAAWTEARNRSAGKINWKFTTDDARIKLKRLYPQL

SEQ ID NO: 86461 - protein, 816 aa, Unknown
  Obtained from environmental sample
  misc_feature (1)..(816): Xaa is any amino acid
VFWGLSRERQDRSLQILACPDLSREVEEARELILDMANDNAIRSFSDIAVYMPDPNKYAPYIQRVFGAFPQNHPEYIPFTILGASGGSSLTARAFSALLSIAGGEFNRAMIFELLDNPIVRESRSFSHGDLERWEEWAEGYGMFRGYNAEQRCLMGDKGGAVVNDHTFEHGMRLAEESAEMIKEGARQCAELFLSLLRELSDLSAFFAGNNGLLNIREAAETVRRAIWSWFGHIGGGSADEAAETRVRREALNGLAQIELQHTCAGRIDISKEEFLTLARGCVPGELTAPSAAWRGVTFAPLRASMVLPHRAIFAMGLCAAEFPGTNEAPTWDLLPSKRIVGDSDRVRDNRFAFLELLHAAKERLILSYRARDMQKDEELQPSSVVLELEEYLIGQGLVDSEVNSRKCSVRREIPWVVHETLNKAMEAGRKHGSWDKEQRILAAESLKDRVEHRHNLAVNRRLSTNGDLPANIDSSAKTADLRALKKFLSNPLEYHLSMTLGIRDDDDTGDMTATDEPIDSGYNISKLRKKVWIDILSVIFKDTETEPPPSNDIIVKSAFDSADKIADDMYDDHIDSGQAPEGHVCRMEREELKEWAKECVGASIKLRKAFPNHQFEEKRDSFLSCGDFTINVRHEFAIVPKDGDNQRNTIGVIAFGKKVKPTDNIKLWLDGLTMWLEEMREGGKRRPVVLIGLSYDDKHQVKKLPMTVKVRKSDMTMDAGKLQDVEKWLTGILTQMLIDKRCEHLPYDAINNIEELTTGSLKDYLLTKYTTYTDGFNLTDANAKPPEVDDELRELAESRYAPILNKWIPRPILSL

SEQ ID NO: 86462 - protein, 225 aa, Unknown
  Obtained from environmental sample
  DOMAIN (7)...(174): short chain dehydrogenase
  misc_feature (1)..(225): Xaa is any amino acid
MLDVKGKWCFITGASRGVGRQIALCMAEHGANLILHSRSVAHTEKVLNEAGKFGIEAFAVEAELSNPDEVKALLQKIDKSGKNVGIVFNDAGVQVAYRQEYFQTPVADFTQSFLINTIAPAIICYHFLPKMIANGFGRVINTTSGIRNEPQQAGYSASKAALDKFTTDLASVLDGTDVIISLADPGWIRTDLGGPNAPGAVEAACPECLWRVVTTKKRRLFPRAI

SEQ ID NO: 86463 - protein, 94 aa, Unknown
  Obtained from environmental sample
  misc_feature (1)..(94): Xaa is any amino acid
NQDRLERSFWRRYWLVTPGAEAVISRNPDVILTNVNYIDDPIGEIKSRPGFNHISAVINNRIYQIDTDSSVRPSSRIILALRQMSRAVYPELYE

SEQ ID NO: 86464 - protein, 67 aa, Unknown
  Obtained from environmental sample
  misc_feature (1)..(67): Xaa is any amino acid
MAKDFSNLPAIFSGSDASSSLGKNVEVVEGERVVQGAVQAVTRGETPQVLVNGTFYNWDKVVKVFAE

SEQ ID NO: 86465 - protein, 483 aa, Unknown
  Obtained from environmental sample
  DOMAIN (6)...(72): 2Fe-2S iron-sulfur cluster binding domain
  misc_feature (1)..(483): Xaa is any amino acid
MNMITITVDNKEVQVPEGKNLIEALKAVGIETPHLCYHPDLPVSGNCRQCLVEVDGPRGMALTIGCYTPVRAGMKVATPASSPKVAEARKAVLEFLLVNHPLDCPICDKAGECLLQENYILAGASNSRLNPDVGKQYHGNPEHSSTDGKGQHRGGKRIDLGPRVVLDEERCIQCSRCVRFMRSVAGDEQLQLAARGGHTYITTFPGEKLDHPYDRCVTDICPVGALTDKTFRFRKRVWAMSRVPTVSMDDSLGANIWADQADGVVYRVMPRCNPEVNRSWLSNAAKDVAQKIHENRLLGGNVSEAAKIIKETKGKKAIVLGGSCTMEDIAAFKKLAESLGSTAELFGGSLLPIQKADGIARSGDPVANRAGLEKAGINTNLTELSKRADEFELLITVAADLWDENPKEASNLDKIPKHIALSPFNGSTAKKATVAIGILHWLENTGTMLNCKNMEQKLQGVPTNEVAQAEEAKIIAEKLKDAG

SEQ ID NO: 86466 - protein, 432 aa, Unknown
  Obtained from environmental sample
  DOMAIN (345)...(427): Phosphoribosyl-ATP pyrophosphohydrolase
  misc_feature (1)..(432): Xaa is any amino acid
MVIASIDILNGKVVQLKQGAELVLERDNAVELAAEFDRYGEVAVIDLDAAMGKGSNIEMIKPLLRKAECRVGGGIKTPEQAKELVSLGARKIIVGSGAFRSGSEFKANIPFLKLMADEIGRERLIVAVDARDSEIVVDGWKTRTGLDLFDTAKAVEPYVSELLFTCVEREGEMKGTNLETVRKLREAVSCQLTVAGGVSSLDEVAELASLNCDVQLGMALYTGKILLADAFTRSLNWKKGCPPATDINKSLLPIIVQSPDGQMLMTGFTDAEALAETFMQGNVCFHSRTRNKLWMKGETSGNILQLFKIRADCDRDTLLAVAEPVGPVCHTGAWSCFEMDRKFTWEFLQSIIVERFNNPPPGSYTATLDDKLVREKLMEEAEEVCTAKTHDEVVWEAADLLYFTTRADNPRGTHRSGSLDELTATQTRPICH

SEQ ID NO: 86467 - protein, 90 aa, Unknown
  Obtained from environmental sample
  misc_feature (1)..(90): Xaa is any amino acid
MKKLISGKVREVYDFSDEKPSKVYDDKLVIVTTDRISAFDVILSKPVKDKGKVLNAVSLFWFDYTKNIIPNHIISSDLKDMPRIFSERRI

SEQ ID NO: 86468 - protein, 308 aa, Unknown
  Obtained from environmental sample
  misc_feature (1)..(308): Xaa is any amino acid
MDDIRKIIDNDLVMAHRTRGLNPENPHIRGTAQNPDTYFQGREGVNPYYSRVPGIVQAEMDKLAKITGRQYHIFDYHGAKDADKVIVIMGSGAETCEETVDYLNSKGEKLGLVKVHLYRPFDVSLFVKALPSTVKAIAVLDRTKDPGAIGEPLYEDVRTAIAEAQAAGQFSANPVVLGGRYGLGSKEFTPTMVKAVFDNLSGKKIANFIVGVNDDVQHKSLDYDPNFVLEEEGVNEALFYGLGADGHGRSEQELNQDHQRGETRTQRPGVLLLRLEKVKRLHRFAPPLRQGPYQKAIPYQLRGLPRLP

SEQ ID NO: 86469 - protein, 163 aa, Unknown
  Obtained from environmental sample
  DOMAIN (84)...(161): OB-fold nucleic acid binding domain
  misc_feature (1)..(163): Xaa is any amino acid
FGLATDQIGRAARGVSTAFDAAQKSIIAPRVKKTLKSDNDLWEEYDALGFLRNTHPLALWKNEVLAVKHRVKALHIGEYVGRNVKMVGWPVTQKDVWTKDGLTMCFLSLEDETALYETVVFPQVYERYNRLLFDQLPLLVFGLVTNDEGAVSLEINRIEVLGK

SEQ ID NO: 86470 - protein, 414 aa, Unknown
  Obtained from environmental sample
  misc_feature (1)..(414): Xaa is any amino acid
GLSTAAEAFPPYRLSRPVVPLAIAGYAESRTYESGYNFGARAPEAAPMPSTAMRMQSTADSKAMAERDYYEMEMPQSSVTSVAGGAVDTASGRAAGDQFEFTLKNPVTLDRRQSAMLPLVEGSIKAEKILIFSGARALGGATINPAISAELVNNSGMKLPAGPITVYEDGTYAGDALIEFFPENEKRLISYGEDLSVGGSVASSGTRFITAVNISGGVMTITRRQSYEKVYTIKNVSGQAKKIIIEHPITSGSELMEPKEADDRTGSLYRFNRNLNTNETFTFTVREETPVFERITLAQLRADTFLSYASNQEIPANVREVFVKAIKLKKVADDASAAQSRLEIQMTRLTSDQDRIRRNLEAAGNQTPQGQEYLKRMAALDDEIDDLKKQIDAATQETQRAKAEYDSYLATVKI

SEQ ID NO: 86471 - protein, 426 aa, Unknown
  Obtained from environmental sample
  DOMAIN (55)...(414): Beta-eliminating lyase
  misc_feature (1)..(426): Xaa is any amino acid
MANVKFYAGESFPLEMHKVRIIQKLNLIPVEERGKAIAGAGNNTFLLNNRDVFMDMLTDSGVNAMSDRQLASMMKADDSYAGSETFTRLDKSVKHFFGCKYFLPAHQGRACENILSQTFVKPGFVVPMNYHFTTAKALITVNGGTVEELIIDEGLKIRSDCPFKGDIDIGRLNEVIKRYGADKVAYVRMEAGTNLVGGQPFSLANYEEVSKLCRASKIPLVLDASLLADNLYFNKRREERCKKMTLHEIVLKFAELSDIIYFSARKLGFARGGGICTNDHDIFLRLRELVPLFEGFLTYGGMSVREMEAIAVGLDETLDEDMISQGPIFIDYMVKELDKRGIPVITPPGGLGCHVDAMAFLDHIPQEQYPAGALGSAYFIASGIRGMERGRSASSAIRTVRSTSQIWSCCVWRCLGACSRFRRSTT

SEQ ID NO: 86472 - protein, 368 aa, Unknown
  Obtained from environmental sample
  DOMAIN (9)...(359): Chorismate synthase
  misc_feature (1)..(368): Xaa is any amino acid
MSSQYGKKIKISIFGQSHSPAIGVNIDGLPAGIKIDTDELRAFLKRRAPGQSDISTARKEDDAPEILSGLAGGITCGAPLAIIIRNEDARSADYRELRDIPRPSHADYAAHIKYGGHQDVAGGGHFSGRLTAPLCAAGGICLQILRSLGIYVGAHILRIGGANDDPFDPVDVSAGDFDVIQRNPLPVLRREAGEAMRLRIMEAREKSDSVGGVIECAAIGLPAGLGDPMFDGIENRIAGIVFGIPGAKGIEFGSGFTGAECRGSENNDSFYMDGKNVKTRTNNSGGILGGITNGMPVLFRVAFKPTPSIGKEQNSVSLLREENAVLQVKGRHDPCIVLRAVPCVKAAALSPCMTLILIDNKLRRNSNG

SEQ ID NO: 86473 - protein, 155 aa, Unknown
  Obtained from environmental sample
  misc_feature (1)..(155): Xaa is any amino acid
MNEENWSLIIKPKRKLLEIPIREIIRYRDLIFLFVKRDFTTQYKQTIFGPLWFVISPFFSTIIYTFIFGRLANIGTDGIPHTLFYFSGTILWNFFSNCFNESCNVFINNAGIFGKVYFPRLVVPINYVLSHCIKSFIQFLMLVILFFFYFWDPRT

SEQ ID NO: 86474 - protein, 83 aa, Unknown
  Obtained from environmental sample
  misc_feature (1)..(83): Xaa is any amino acid
CVRIGRAGTLTLAAGGFRDVTRIASAKYDIWHDIFSTNKEAIIPLIDSYINILNELKTLLSNDALRERFEEARAIKESISIRN

SEQ ID NO: 86475 - protein, 914 aa, Unknown
  Obtained from environmental sample
  misc_feature (1)..(914): Xaa is any amino acid
MAGLCRAIVENVFTKVVRIANPARLGNKIVVQGGTLRNDAVLRAFEQYLGKFVVRAPFPGEMGAIGIALLTKREISENGYSSPHGPSDRTRFMGFEALKTFEYKQEANLLCPFCANNCNRTLLRFSNGQTWVIGNRCERGEVVGDPNDPAVREQVKNITGLMNAAPDMIRLRNELLFKDYRYTRLLPSKDITIGLPRVLDFWRSMPFWKVFWSALGYKIKVSRKSSRQLYEKGLQYIASDTVCFPAKLVHGHIQDLIESKVDRIFFPQINRLPPDNPEKIGTFTCPVLKGYPLSIRCSDNPEEKHSIPLDSPICHWFSDRDMRFQLSRYMLEAFNIPKKITLAAIKQGEKAMAEFYQLMLEKGKKVLEDVEKSGKIAVVVAGRYYQYDEQINHNLSHYFTSMGIPVLTLDSLPNLGKIPLAKSRIEITNDNHARLLAGAIAAAKHPSLEYVDIFSFGCGHDAVYSDEIIRVMDEISGKAPLILKMDESDIAGPLRIRVRSFIETVMIRRKIKAHNVKPLGDPYPVKFTKREPMRTLLVPNSSRAFCLVLSGALANEGVLVEPLPMGGLEAIAMGKKYVHNDMCLPAQLVIGEGILALKSGKYDPDKTMIGMAKVLCDCRLSNYMPLARKALDEAGFPQVPIFSTDIKDSKNAHPGKRFTEITYIKGIWGMVQTDALEFLRRRIRPYELQKGETDRVVENAFVEIYEGLAKRGIPGSNVAFKKAMNDLCAVRYDRSKLRDPVFIQGEYYLTFHPGSNFEIENYLEKNGMEVILPRMNTVYRHLFLQHSLAEMKEFNVRLPLYDNLFARIGNKIMDIAEKYVDKIASRHPLYEPEISLEEAAKYSDDIIHHSILSGESFLIAAHTLHHAEKGIRSFIILQPFGCLPNHICGRGVIKRIKELHPDIQILPLTRPILS

SEQ ID NO: 86476 - protein, 94 aa, Unknown
  Obtained from environmental sample
  DOMAIN (9)...(65): Oligopeptide/dipeptide transporter, C-terminal region
  misc_feature (1)..(94): Xaa is any amino acid
AQGGGPSIRSAEIIYKLLKESVPAPDPADKTGWAKRIGLSTTEVKEYSREGCKFHGRCPNAMEQCMQAEPPDVEAEGRVVKCHLYAKKDAKQGS

SEQ ID NO: 86477 - protein, 573 aa, Unknown
  Obtained from environmental sample
  misc_feature (1)..(573): Xaa is any amino acid
FGGDDREGGSGLVDRIPALGAKDAAGLLELIGRLSSGVSPESFFATGQTLPRLGTSIGGGADLLQSLVKAAFSEAPNALLNLVKQIDTSSVMLGAQLPPTEAARVVREITNVLPAQAAAKPGSLHDAGQMSPRVLETNAAPAPKTQTPASAVPQIRAGYSELTEATVRVLLGGGGKADAAAVGERINALREAVARMPVTPPSSNGQGHDTAARDGGISSNRAESNAAAANTQSAVSRLSVPAGGTNVNAAKAPEAFPHVNAQLAVHRASSVPSGDINASAGSAKVMDAYPAVNRGFAPQQPQQPQQPQQFQQSSAQTGGVGIGAGGVGIIDNQNMSGSVGVNKSIPVDSIRGMGINVSGINTSGVNSTDNQNIRADVGVNNKQVAVDNSRGVNNPGGIGININSNAKPVDNIGNTSINVRGINTNSINPADNQNIRGDAGAYNRQGAVDNSRGVNNSGNVGINTNSNAKPVDNVGGMSVNVRGINTNSVNTNNINPADNRNIRGDVGVNNSQGVIDNSRGVNNSGGIGINTNSNARLVDNVGNIGINARGINTIGINPADTQITRLCRICHWK

SEQ ID NO: 86478 - protein, 582 aa, Unknown
  Obtained from environmental sample
  misc_feature (1)..(582): Xaa is any amino acid
LAETRNPDFEGFVIEEINFAKQEIIFTNQSILSKKNTSGLTLSEREVYRVEIEEAIKQHFRKQKYLLGKGIKVLTLFFIDRVSHYKGEHDPFIRRYFEAAFDKYKTGDDYFKRFDASEVHAGYFAPKKEQKAVKDGMNEDFFDYVELDDYKGKDKKEIKEAEKEAFSLIMQDKETLLTFPNAIAGTDNEIVKASKKNVAFIFAHSALREGWDNPNVFNICLLKEPRYDTANQKNTRRQELGRGLRLCVNQEGERIQDDSINILTVICPEEFSQYANALQQEYRDSGDIPPPAPTDAARKPATRKDDIFKGDEFINFWKNLSRKTKYQINIDSNKLIAECAARLNDLNTIFPEPRIVITKGSYSMSEYKIALLGTNNGKAKIRITITDTDGRNDVLFGNYYKVGDNFGRKSKDKNLMGFQIVDINDDKKDPFVLFSNKQILTLTDPKVFSGAPEAGYEPITVKEAQANYPVFNIIERACKSLSLTRPTILSIFKSLNADRKNKLFRNPEGFSTVFISEIRDELAKHVAEKIEYTLSRDFKLFKGNKKNIEVSANAEDYALYAAESAPAYGEEEIPQYRSCRSV

SEQ ID NO: 86479 - protein, 589 aa, Unknown
  Obtained from environmental sample
  misc_feature (1)..(589): Xaa is any amino acid
GLSRARHSATAISESQTIPQQVQVPQQTQIPQQAQQQAQIPPQQIQVSQQTQIPQQAQQIIPQAATTTMQTFQTILNALQELKELGIPIELKNAPLKELETVVLQKTGIEIDQNFPNIRNLQNFFYEKPTYATISLLPANQTVHFENAANVVEIPLPKDFPVQKIFSNILQIQPPIIPQSQPILQPQQVLPEQPIPQSQQGTPPPIPPQQPIPQPQQVLPEQPIPQQSTPLPIPPQQPIQQQPQVQPQQPIPQQGMPPSILPEQPILQPQPQQPPAPPQQPITQPQPQQTTPPPQSQPPPIIPQKIEMAFSLHQITVPQNTATTTNTSPSPNTPQPAPKFILQPWPVSTIIPKEERNFWLKTDLPLTPQILNIRETILSFGKLPENPEIVKLFANNLHEMSLQTESGTYVSKEQANLLWRVMQLAHPVSFAATPLEAGTILNSQLSTLNSQLLKYQAAGNYEGELFKNLPEPVKRELQHELPAGKTWQPEALQKAVEKVLEKYTEAEQQQLNKASQNEHTAKHNEEIKQVLQHLKETIQWTRIDQDTRVQNDRENIFYFMHEGHLQKGRLKVKDERKGGSQKQQASFIS

SEQ ID NO: 86480 - protein, 172 aa, Unknown
  Obtained from environmental sample
  misc_feature (1)..(172): Xaa is any amino acid
VKGSDIDKLTKLVISKPGRPGDEGATNKKYVGMDPWRIAADIGLTVPKSTRLLICDVPKDHPLVWTEQLMPVIPVVRCPDVDSAIDLAVECEHGFRHSASMHSHDVMKLSRMARLMNCSIFVKNGPMYRGIGFGGPGYTTLTIASPTGDGLTRARTFTRERRCVLVDAFRIV

SEQ ID NO: 86481 - protein, 110 aa, Unknown
  Obtained from environmental sample
  misc_feature (1)..(110): Xaa is any amino acid
MSSTANIQIQGDGFQEKIKAFVADFGWPRLIIFFFVVALFIVAPFVGINIDSSFKDVLVRFGQNGIMVLALVPMMQSGSGLNFGLPVGIVAGLWARPWQCSLGQSDHWFS

SEQ ID NO: 86482 - protein, 359 aa, Unknown
  Obtained from environmental sample
  DOMAIN (9)...(350): Major Facilitator Superfamily
  misc_feature (1)..(359): Xaa is any amino acid
MKQVTGRSFIPTYVMTFTVFAVITPYLAIMVRGLGYSPILVGILLGIFEGSAIAGPFLFGYWADKIGNFRIPIIVSCILPAVTAIPLVRFINPIFSALLLAGMAFGFRSTASLLDSITTVRIGKSGDYGKIRACGSIGFIVFLLFLQCAPFLKPDSSKNIAFWIVITSFAAVIYLLVLPRSMFDSIEHEHDKINGGGKGIPLLSFYFIGGFAIIFLCRFAMSSVYTYFPLYLTESLNWNAVGIMFALSAASEVPIMFISIKLLRRFGALSLLAVSAGGIALRLLLWAVFPNKTRHHCGGSFSTLYASALIIRRRGNLFHRFPRQTTRHKNAPGTLRSARVSPLCLGNMARGKNTGRVSA

SEQ ID NO: 86483 - protein, 85 aa, Unknown
  Obtained from environmental sample
  misc_feature (1)..(85): Xaa is any amino acid
GISRVSAFDGALHVHAGGAWDNAKKHIEGGTHGGKGSDAHKAAVIGDTVGDPFKDTAGPSLNILVKLISVVSLVIVPIIAAIHGK

SEQ ID NO: 86484 - protein, 81 aa, Unknown
  Obtained from environmental sample
  misc_feature (1)..(81): Xaa is any amino acid
NRLVELAERSDWDQKNYQDYGIDEKDFLARLDEMSEQAFDDQCTGANPRYPLIEEIKEMYLNAYYGKNIHLGGSKGKKERA

SEQ ID NO: 86485 - protein, 261 aa, Unknown
  Obtained from environmental sample
  DOMAIN (5)...(218): Phosphotransferase enzyme family
  misc_feature (1)..(261): Xaa is any amino acid
MGNYKLEKIIAVRTVKTIYRDGDKVIKLLNEDYPAPDVLAEALNLVVVEQTSLKVPRLVEVTKINGKWAIVWEYVEGTSLDRLMEKNKDKEQQYLERFVDIQIDMHRYSATRLPLLAEKMDRKIKASGLDATTRYELLGRLSGMPKHTKLCHGDFNPSNVIINDKDEAYIIDWSHAAQGNASADAAQTYLLFWLAGNITLAEKYLALFCKKSDTAKQYVEKWLSISGALHTASQGKAGRKRIFTALGQCSGIPIERQLSRM

SEQ ID NO: 86486 - protein, 88 aa, Unknown
  Obtained from environmental sample
  DOMAIN (18)...(87): Transposase IS200 like
  misc_feature (1)..(88): Xaa is any amino acid
MSEIIRKEHNGSTLMYHIVCPAKYRKAVINEEVDKKLREICQGIEARYEIRFLEIGNEPDHVHFLVQSVPTYSPEQIVRTIKSITAKE

SEQ ID NO: 86487 - protein, 344 aa, Unknown
  Obtained from environmental sample
  DOMAIN (148)...(327): Carbohydrate binding domain (family 11)
  misc_feature (1)..(344): Xaa is any amino acid
FLTRIRFGRGTAKAAGIGFWARGGEGVSNVGIGLLDNQGQNSSGAEMKVQTKLILSDFGKIEPVWKYYMVPIRSFRPEGLYWDDGKKAEVSAKVDWAKIQEVRFSVGKGENKIAASDPVAFYVKDISFIEEIPGYVNPEDYWNAFKSNAPDVKLHDFETEGDQKWESSNGPKSEVAFKYSESGAPNGGGKALEISYRLGDWVDVLFNYRDRGRPADQRDWTKHWGLKFDFYTDKPYQPITVQVQDKGNEIFVAPSGGNKGWTEVIVPFKNFSKFPYYQPEDAQQNGKFDLDGVIVLDFKPAGEGSRGTFRVDNIRLTNDKAGQVKEDPANVAVTLTGNDRVITK

SEQ ID NO: 86488 - protein, 491 aa, Unknown
  Obtained from environmental sample
  DOMAIN (428)...(485): Bacterial regulatory proteins, luxR family
  misc_feature (1)..(491): Xaa is any amino acid
LGPGDGSEFGTRILDELTTQVPHSIAQFAAPILDRAPEDTFDKVEFLAEMHLRTHMCQGHWHKSLDLLRFYEAKFLKLPEDDIVRNRTLAQLYDCWAYIRALMSTIDDIFDFGIYIEKANKYAPNMGEPSKFGPYYPGTWSNYSGSSRKGSPDEFVAAQTRIVKSMPRVFFEIKLMGQLELLQGELGFYRGDVNSALSLLTLAVKEARAGKQFAFMNRALIYMLRIAVSQGNFVLAEQALKEIKAQLDETAYLHRFIYYDIAVSWYYCFLGMPEKATRWLQEDFSPYIHAAFIENFGNQIKARFCYATSNFSPVLAYIEEMKARESILFGRIEMLAMEACIHYKMKNKKKAFSSLAEAYENAHPNGILMPFIELGRDMRTLTAVALKHPGGIIPKPWLEDVNRRAASYAKRRTHVIAEYKKAYGISDGIVLSPREADILTDLSHGLSRVEIATNRNLSVNTVKMVINMLYTKVGAENLADLVRIAIEQKLI

SEQ ID NO: 86489 - protein, 82 aa, Unknown
  Obtained from environmental sample
  DOMAIN (7)...(74): Nitrogen regulatory protein P-II
  misc_feature (1)..(82): Xaa is any amino acid
MAEERCTKGYTELVRGQQVDYALRPKVKFEIVVSTEEWAEKTIKAIQEAAYTGSVGDGKIFAYDLRSVMRIRTKETGTQAIN

SEQ ID NO: 86490 - protein, 147 aa, Unknown
  Obtained from environmental sample
  DOMAIN (1)...(142): PET112 family, N terminal region
  misc_feature (1)..(147): Xaa is any amino acid
MKWETIIGLEVHAELSTKSKIFCACTTAYGGEPNTHVCPVCAGMPGVLPVLNRSVVEYALRLGLALGFNITKYCKFDRKNYFYPDLPKAYQVSQLYAPICRDGHLDIEVDGKKKTINIREIHMEEDAGEVDSRRERAQYFYGLSPLW

SEQ ID NO: 86491 - protein, 137 aa, Unknown
  Obtained from environmental sample
  misc_feature (1)..(137): Xaa is any amino acid
APSGGGACIAEGHEGFGINVNVFIFMDQIAAFFKLSPEAHDMCLTFLKIHCITSTLFWCFSFVLPNALKAAGDARYVMIVAASTMWLVRVCSAYIMAFPLGLGPVGVILAMGADFLFRGIFFGARWFSGKWMEKRVI

SEQ ID NO: 86492 - protein, 59 aa, Unknown
  Obtained from environmental sample
  misc_feature (1)..(59): Xaa is any amino acid
MNKVYSKIESITGSVITVKADGIRYGDLAEVDTVFGTSLAEVNRLQGDTVSLQVSPARR

SEQ ID NO: 86493 - protein, 486 aa, Unknown
  Obtained from environmental sample
  DOMAIN (4)...(486): Bacterial protein of unknown function (DUF853)
  misc_feature (1)..(486): Xaa is any amino acid
MAEVKNLWIATGKEPVYMLPKMINRHGLIAGATGTGKTVSIKVLAEAFSDIGVPVFLADIKGDVSGLCKAGEPNKHVEERIQSMNISDFAYKGYPVRFFDVYGKNGIPVRTTISDMGPLLLSRILDLNDTQNGILQIIFKIADDNGLLLIDLKDLRAMMQFVCDNAKELSATYGNIPTQSVGTIQRNLLTLASSGGDIFFGEPALDMNDWIGCEESGRGFINILDCVKLFQSPQLYSTFLLWMLSALYEMMPEVGDLEKPKMVFFFDEAHILFNDAPKALLQKIEQVVRLIRSKGVGIYFITQSPSDIPDTVLSQLGNKIQHALRAYTPKDQKAVKAAAASFRSNPDFSSEQVLGELSTGEALISLLDEKGAPQIVQRAFMLPPRSFMGAVEPQMITELTRSCPLYSRYGQAIDRESAYEVLEKQKKQQANAPQPKQPAQQKQAAKPKTSKRGTSMASKAASSAMNTIGREVGKALIRGLLGNMKR

SEQ ID NO: 86494 - protein, 106 aa, Unknown
  Obtained from environmental sample
  misc_feature (1)..(106): Xaa is any amino acid
MKKTIFAFSFLFAAFLYAAPQKVERYLLVAGANNGGTDRVKLRYAESDANSFAGVMSQMGGVDKSMFCEFLTQVPRLCKMVLSSLKDACRVRKSGVPREVIVYYSG

SEQ ID NO: 86495 - protein, 108 aa, Unknown
  Obtained from environmental sample
  misc_feature (1)..(108): Xaa is any amino acid
VRIGRAVIVITHNRKTVAGAGTLLGVTMEESGVTKMISVRLENEDLAIAEESPPQQGLWDSDGNFEEEDVENEEGRQLPTGVNDPKKVSEEQLRPIRAKVKQPTEEAK

SEQ ID NO: 86496 - protein, 171 aa, Unknown
  Obtained from environmental sample
  misc_feature (1)..(171): Xaa is any amino acid
MKTLEIDIETYSGVDLAKCGAYKYAESPDFEILLFGYSVDGGEVHVVDLVGGETVAQDIIDALTDDAVLKWAHNAAFERVCISRWLRDQGVSLDPFADNHFSSEYLGKAKFLNPENWRCSMVWCAYMGLPLSLEGAGNVLKLETQKMTEGQRLIRKFCTPRAFIPPWRVVG

SEQ ID NO: 86497 - protein, 144 aa, Unknown
  Obtained from environmental sample
  misc_feature (1)..(144): Xaa is any amino acid
FWGGLIARIRHYRVHIFSVENNNQLSDRQWPQHNIKLPKISQDGRDGDEEIGYVTNILNNYGIGFKYFDCKGVKKIKIKTRGYNSGVFHVKTKWDGEPLACIKIEYSNIWTEYSSDINLPDGIHALYFIYKGTGCATMASFTLE

SEQ ID NO: 86498 - protein, 409 aa, Unknown
  Obtained from environmental sample
  misc_feature (1)..(409): Xaa is any amino acid
MEDEFAGLDCNSSRLEKRFIRTMETLSKQPDKSIWSCSENRAEAKAIYRMLGNGNLDREEILRAHREATVRRMVQSGGTILAVQDTTSLNYNTHEKMEGIGYIGEKTLGVNIHSCLALTTEGLVLGVLEQTSYNRTQAKDDSRSHDSKKTRTLRKKESYRWVQTLWESTNGLPDGMHVVTVCDREGDMYALFDEADRWGQAFLIRIAQNRITAENHKILDKIREKQCMGKVKTNIPRDSRKGLAERHAVLQIRYGGFEIKRPQILNKNKKLRGTQEANKIYVREEQQDKAVEPLEWFLMTNEPVRTVEDAYEKAVWYMQRWKIEQFHYVLKSGCTVEKLQERSIRKNNDVGLDVFHNSFGNYEHNLCCTNTPTASLYDIFLRKTNGRYCIAPQIRQKKYLKSRIRLLKR

SEQ ID NO: 86499 - protein, 84 aa, Unknown
  Obtained from environmental sample
  DOMAIN (5)...(72): Protein of unknown function (DUF497)
  misc_feature (1)..(84): Xaa is any amino acid
MARGDAQYVFADPDRIERVDRSEGNTSGETRWQTIGRVGAHLFVVYAESGEDTRLISAREAKKHERRSYNGYYQIDGKGWSKAT

SEQ ID NO: 86500 - protein, 67 aa, Unknown
  Obtained from environmental sample
  misc_feature (1)..(67): Xaa is any amino acid
SRVRIGRGDKESRNLDQVTQEITGGINEMATGAEQVNISVNRVNEISAKNRENIDLLVREVSLFKVE

SEQ ID NO: 86501 - protein, 179 aa, Unknown
  Obtained from environmental sample
  DOMAIN (52)...(168): Glycosyl hydrolases family 2, sugar binding domain
  misc_feature (1)..(179): Xaa is any amino acid
MKANLMPPIWENPEIQEINRLPMRSPLLPFPSAKDALADAIAGPEFRAPGRNEYYKSLDGVWRFKLLSNPMDDSADGLNVPEWAAPSYGAGDWAELSVPGTWTRQGFDKPHYTNVQMPFQAEPPHAPEANPTGLYRRGFTLPPFLEKIAGGASSGFCGKLRHYLRERPICKSKKKNPAS

SEQ ID NO: 86502 - protein, 168 aa, Unknown
  Obtained from environmental sample
  misc_feature (1)..(168): Xaa is any amino acid
MAWETKIVDAIYTSPSGKEATFKFDETSRETQLKTGVFTFPDRDGARVQHQGAGAKTHPMICIFEGADCMTLADDFEAMLIERGIAEFQHPIYGILKVVPTGNIVRKDNLVATLNQSIVTVTLTETITDENVPELDAVTADNINSMLDDFTESAVADFAEGLTREIFR

SEQ ID NO: 86503 - protein, 686 aa, Unknown
  Obtained from environmental sample
  misc_feature (1)..(686): Xaa is any amino acid
MLYIIEVKKLDAQRILNTLREGGSIASSLEYFEPRQAQLDLMELVIRCFNENAIGAAEAGTGVGKSFAYLLPAMHFAVETGERIVVSTATITLQQQLFGKDIPLVKDAIKAKVKAVLVKGRGNYLCRRRLLDSLREPELSGSDEQEQLEDISRWAETSKGGGREELAFVPLEQVWSRVCSDTELCMGKACPEQSRCFVLALRREAAAARILVVNHHLLFADLAARREGAGYEAAAVLPPYSRVVIDEAHTIEKAATSFFSKEFSRIGILHYAGRLYRKRRAKKSGLLVRFCSLLAEGDDSLKTLAAALDDIRKAAGELDRPGLDLCGMDGVFRFSPSRGEGAESALFPPLLALRKKLLAFTARAREIIELLPENDTDDPSAAGAFTSVWELKSVLRRFDGIADICSAFTNYRERPGEVMWIERRGSGGNGHGRGRSADVWPVFTQSPVDLAESLKESLFLPNKTVVCVSATLAVSENFNYWAVRCGAAFVADRPFFTGCFPSPFPYSSAVLLAAPDDAPLPDEPDYQAFVDRAVGQLVSVAGGSALVLFTSYQSLQSAWLSAQPELTALGIRCLKQGDDDRTRLLQTFLNDTQSVLFATDSFWEGVDAPGDTLRLVIICRLPFRTPNDPVFEARREAVEKNGGNPFMDLSLPEAVMKFKQGFGRLMRRSSDRGVVAVWTGSADSDH

SEQ ID NO: 86504 - protein, 308 aa, Unknown
  Obtained from environmental sample
  DOMAIN (50)...(217): Glycosyl transferase family 2
  misc_feature (1)..(308): Xaa is any amino acid
MLLRIFEAMFWGSLVVVAYSYLLYPAMLTLFAWLFKRPVRCSDDYLPTVGILVPAYNEEKVIARKISNVLSMDYPPDKISVWVGSDCSDDGTDGIVKSIIGSDPRVHFWRSPERGGKTGIINGLVPQMEGEVVLLTDANTMHRRDCLRAMVKHFFDPTVGGVAGHIEHKLSAGSENAETVYRSFESYQKVMEGCLHSTISAFGGSYAIRRSLFKPIPKNAYSNDDVLIPMNIIRQGYRVIYEIDAVSEEDMTDKVSSEFQRRVRIGAGNFQSFLWLLDFFNPLRGWPWFCYISHKVTRWFRPRPNLTM

SEQ ID NO: 86505 - protein, 617 aa, Unknown
  Obtained from environmental sample
  DOMAIN (2)...(209): Alpha-2-macroglobulin family N-terminal region
  misc_feature (1)..(617): Xaa is any amino acid
MAYNANGRNLDYSAFDVGGIYGASDPKILRAFLFSDRGLYRPGDETRIGLVIKSGDWAVNLGGTPLEYRVTDPRGAEIVNKRIKLSPEGVEELRFRTHDWSPTGIYTTSVYVIQEYKQGDELKERHIFLGSQTVKVEEFLPDTLNVSAVFDPAPQDGWIAPGELKAKVAVRNLFGTAASGNEVKAQINLSPGHQYFRQYRDYQFRDPYLGKNSFQEFLGTKTTDTEGTAEFNLNTAKFEKATYRLSFYTEAFEKGSGRNVSAEASVYVSPLPYLVGYKADGGLSYIARNTVRNLSFIAINPKTEKTNVNELTLTITELRYVSALVRQPNGVYKYQSIQKEYPVSSRQLVIPASGLEYGLPTDTPGEFKLSITGPGDLEYNSLNFRVAGSENIQRSLNRTAELEITMNKNDFRNGEEIELMIKAPYAGAGLITIERDRVYAYRWFRSGGETSMQTITVPAELEGNAYVNVQYLRSQDSPEIFMSPLSYGAVPFSISRENRTNRIRLDIPGEAKPGEDFVIKYSTARRGKIIVYAVDEGILQLAAYQTPDPLAFFFKKRALEVKTAHILDMVLPRYSVVQNLAAMGGGSGFDQLARNLNPFSAGKTPRLPTGPEYRRGP

SEQ ID NO: 86506 - protein, 259 aa, Unknown
  Obtained from environmental sample
  DOMAIN (29)...(236): ABC transporter
  misc_feature (1)..(259): Xaa is any amino acid
MAFVQFSKVSLAFGDRDILKDVSLHLASGSRAALGGANGSGKSTLMKVLAGELPADSGDRAVQRGTRISYLPQSGIVHRGKSLRDEAETAFAHIQELIDQAEKIAALLQDAKSDDSSKALLEDHHRLQEQIENSGYYHREAEISSVLAGFGFSSKDLDRDTGEFSGGWQMRIALAKALLEQPDILLLDEPTNYLDIEARTWLENWLAKFRAAASWFPTTATSLMLPSTRSTKFSRAILNATRATTALMKKRGSWNSPLL

SEQ ID NO: 86507 - protein, 944 aa, Unknown
  Obtained from environmental sample
  DOMAIN (298)...(323): The GLUG motif
  misc_feature (1)..(944): Xaa is any amino acid
KRTRIRQVGGIAGVNTGNSNYIKNCYNTGNVTSTEATVASEAGGIVGSNQSSATVEYCYNTGNVTGTSSAVGGIVGNNANNCTVQFCVSLGARVTGTSNVGRVAGTVPGLGNNRARADMKIGASGAEATVSGNGSSSNGASNSIGTAQTSFYLSWDSSIWNISGDMTIGVNLATLKTNTQSPTPTLPAEYLVPGTAENPFLVATEADLRKVGTETTTGGWTLSASYKQTANITLTSAFTRIGTFTDTGKFSGTYDGDGKTITGLTITGSAYQGVFGANSGTLKNMTVTGTVTNTGTGVNNSTGGIAGVNQGTIDNCSFSGTVNSANANQIGGITGYNYDTVINSRSGATVSGVTSVGGIAGQNQGKIENSYNTGNVSGTNQVGGITGANSGTGSNIRIRNSYNTGDITATTTSTANAGGIIGMNQSSSTVEYCYNTGNVTGSTAVGGIAGANQSGSTLQNCVSLGARVTGTGSTNRVIGIANGNMNDNKARTDMKIGASGAEATVSGTATNGNGASVTVGTAMSTFFSGWDTTTIWNTGGNLSVGVNMPTLKTNTQSPAPTLPATYFVLGSEGNPFLVATEADLRKVGTETATGGWTLSAYYKQTANITVTSTNNCPAIGNNSNRFTGTYDGDGKSITGLTQVTTSSYSGIFGYIGDGGTVKNVTVINGTITQNGSNTSFTGGITGYNLGTIDNCSFSGNVNGNTTNDVIGGIAGRNNGTVINSRSTATVSGRICIGGIVGENTGKIENSYNTGNVSGTNQVGGIAGALSGSSSYIKNSYNTGNVTATDSTSNVGGIAGNCTTGSLVEYCYNTGTVSGAQYVGGIVGTGGSTVTVQYCISLSTRVITTTNSTYAGRISGIQGVTMTGNKARSDLLLGPSTQTTPVTTGTGSNKDGENVSLGTTVMNVFTSFDANIWYIWNTPMNTGGDLPTLRKKEQSPAPKLP

SEQ ID NO: 86508 - protein, 243 aa, Unknown
  Obtained from environmental sample
  DOMAIN (2)...(132): Toprim domain
  misc_feature (1)..(243): Xaa is any amino acid
MLILTEKPSVAKAFADALGVARKDNFYENSEHCIVNALGHLLEDYSPEDYDPALKKWSLEGLPIIPEQVKYKAVDKTKAQLAVVKSCFTRYKNAPFLLATDAEREGELIGAEILDYVGFTNYSGAKRFWVSEALTPEVIKKGIESAKPLAEYKSYREQGFTRQFADWLVGMNLTRLVSLKTNKTLHFGRVQTAVLGAVYAREKAIQNFTSEKFFEIQASFDSGTSVFSVKMVNRTMRNFLHAF

SEQ ID NO: 86509 - protein, 54 aa, Unknown
  Obtained from environmental sample
  misc_feature (1)..(54): Xaa is any amino acid
GWGDMRGASSLRGVDDKGVASYLLSMYCSAAVLADDALAVLEDVEVGSYHEYNR

SEQ ID NO: 86510 - protein, 313 aa, Unknown
  Obtained from environmental sample
  misc_feature (1)..(313): Xaa is any amino acid
MIEEVLLPYQKAWIEDEAKVKVWEKSRRIGASYAEALASVLEAAKSKEAGGQSSYYLSYSKEMTQQFARDCAFWAKHINAAAKELEEIVLKDEDKDITVYRIRFASGYEIWCLPSVARSLRSKQGRVIIDEAAFVEDLDALLKAAMALLMWGGCVRILSTHNGDDNPLNELIKEIKECKKDYSLHRTTFDEALAQGLYKRICLVQKKEWSQEAQEAWRKEIIDSYGDGADEELFCIPVRAGTRFFPSALLEAVSDPSAKVLRKSCDDSFTFESKAKRVKEFETWLKNKVRDTLLLHTNPDLPGRGLRPLRRPY

SEQ ID NO: 86511 - protein, 938 aa, Unknown
  Obtained from environmental sample
  misc_feature (1)..(938): Xaa is any amino acid
WEELEGYAEGWEREVGKWRVGGKRLKTKIGWKKYEGRDGGEGTDEFGFSALPGGVYSPKKGFSQIGEVAGWWTATDYNDGKSAYRRYIVFNGNSVQSYPYHRSLGFSARCVSDKEGHIPAPAALKLKLIAATGGTVSANPNKASYVAGERVTISAVPNRGYTFAKWTGGKVADTGYAVAIVTVNSNTAITANFNKRKAPPVVYGSLNDTRDGKKYETVSIGGRVWMAQNLNYEAPDSSWCYGDSAGNCGRYGRLYAWNAARTVCPTGWHLPTVQEWDDLVNAAGGAKTAGNKLKATSGWTFFGSGWVRTGNGTDDYGFSALPGGKRAGDAFHYINQDGYWWTATEDEKDVEKAYYRKIDEYKGEVKWGEWGDKIKSSGMSVRCVVDEAAPYSLTLIAANGGTVSANPKKASYKAGEQVAISAVPNNGYAFAGWTGGRTADADYAVTTVIVDSNITITANFKKSDAPSVAYGTLSDTRDGKKYKTAVIGGKTWTAENLSYQTPENSWCYDDKTDNCAKYGRLYVLETAKKACPAGWHLPTRDEWNDLISAAGGENAAHKRLKSISGWSRTGNGTDVYGFSALPGGYRNHLGRRAKLEFEEAGNEGYWWTATEGEFISSQLGAFVGMASDSVNVFLDAYYKSGGLSARCVMNEDGALTLIATTGGTVSADPSKASYKAGEQVTISAVPSDGYVFTDWTGGSVADVNAATTTVAVNADMTIFANFRRIVSGALSDTRDGKTYKTAKIGRKTWMAENLNYQTDDGSWCYQNDAAYCDKYGRLYDWKTAKKACPTGWHLPTRAEWDSLAATAGGWCHNQPYNNDIGITWYEAGKKLKSKTDWGQGVSKRGGNGTDNFGFSAMPGGFRDGGSSGKSERFGLAGSVGFWWSSAQRIIRGDGFFKPVTQKDSGSAYMREMDNILDVFGEHDRDKSHGYSVRCVMDK

SEQ ID NO: 86512 - protein, 219 aa, Unknown
  Obtained from environmental sample
  DOMAIN (7)...(219): UvrD/REP helicase
  misc_feature (1)..(219): Xaa is any amino acid
MLDTLVLNDVQRAAVAYIDGPELVFAGAGTGKTRVLTAKIAYLIDQGYRPHQIFAATFTNKAAREMRERVERFVSVPVSGLWIGTFHSLCAKILRREAEAVGYPPGFTIYDTADQLSIVKKVLAALNIDEKTTTPKAMLSVISSRKSSCLTPSECEARASGMWEREAASAYSLYQKALREQQAMDFDDLISNVVYMFRAKRGHSRQVSGSIRYVLSAIN

SEQ ID NO: 86513 - protein, 305 aa, Unknown
  Obtained from environmental sample
  DOMAIN (1)...(302): Predicted permease YjgP/YjgQ family
  misc_feature (1)..(305): Xaa is any amino acid
MAREILAKQVPFGQVVLLILFSLPQVIALSAPFASLVGTLMTVGRLSSDNEILVFLSSGLSFRNVFVPAITVGIVISILSFIANDILMPGGYVKFAQLYRRILLSTPALELEANSVKKFKNTVIVTGNVSGNAIDNVLILDKTSDGERRVIMAANAELKDSGKDGLSLDLGRAFIQSSKEVAREDYDYASAGYLRYWVPQEDLIQAMSSVSPREMSSIDVYKEIKKRTIDLNNRMNEKRNKVSSLAFAFENSLRAGPSSYEWNRRTNQFTAFQREAQALQSMSKDAGSFAVLAGILQEISRANLS

SEQ ID NO: 86514 - protein, 128 aa, Unknown
  Obtained from environmental sample
  misc_feature (1)..(128): Xaa is any amino acid
MGDSLLALSQSQLDVDYILINARGVKLPPVMENFFVAASHEIRSFHVSLFVDYNNLCNVYRKNDDIVEVCMLAGRDHSTILKGMSDHTSTPKTGIKVHVELVAADAVMPAEVAGHGTDTALTMPQIDP

SEQ ID NO: 86515 - protein, 173 aa, Unknown
  Obtained from environmental sample
  DOMAIN (48)...(170): ABC transporter
  misc_feature (1)..(173): Xaa is any amino acid
MIVLNQIRKTFRVAKRKKGTAAALFSLFRREYTEIHALEGISFSVEKGEVVGFVGPNGAGKSTAIKIMSGILAPDSGECTVLGMCPWKSRQKYVSHIGVVFGQRTQLWWDVPIQDSFELLKDIYRIEKKRFRENLGELSEILELEPLLSVPLRQLSLGQRMRCSSSHKTPPTP

SEQ ID NO: 86516 - protein, 742 aa, Unknown
  Obtained from environmental sample
  DOMAIN (690)...(740): DNA gyrase C-terminal domain, beta-propeller
  misc_feature (1)..(742): Xaa is any amino acid
MSVIVSRALPDVRDGLKPVHRRLLYAMDTLGLRPGGGTKKSALIVGETMGKYHPHGDLSLYDALVRMAQDFSLRYPLVKGQGNFGSIDNDPPAAMRYTEAKISKIGDEMLQDLQKETVDFIPNYDESFMEPAVLPSAIPDLLVNGSSGIAVGMATNMAPHNLGEISDAICAYIDDPNLNNDDLMRFVHGPDFPTGGIILGRQGIIDAYKTGRGRLLVRGKFNVETTKQGKEKIIFTEIPYNVNKAQLLEKIGQLMRDKEIDSIANANDESDRDGIRIVIELKKGAIVKVVLNQLFSNTQLQTSFSIINLALVKGKPQLLTLRELIHHFVEHRVEVVTRRTRFDLRKAEERAHILEGLVIALANIDEVIAIIKASKDVATARLKLQQRFKLSEAQSEAIVEMRLGRLTSLEIEKIEKELAELKVQIAYFKSLLADEKKLRGVIKTETREIADKYGDKRRTEIIAGEVENINIEDLIKKEEMMILISNLGYVKRVPVSAYKNQGRGGKGMQSAKLAEDDYVGQIFVASTHEYIMFITSAGKAYWMKVHELPEGTRISKGSHIKSLLTVSPNEDITAIVSLKDFSDSEYLFMGTSHAVVKKVKTSEFVNAKTRGIVAINLDDGDKLVSALLTKGDDEVVLISRKGQALRTHEEHVRAMGRSSRGVTGMKLSEGDELTGMLRVDTGKDSPPEKVEKMLIISEYGYGKRVDFSEFSSHGRGTGGQKIYTVSEKTGEIVRCVSVFDDD

SEQ ID NO: 86517 - protein, 273 aa, Unknown
  Obtained from environmental sample
  DOMAIN (37)...(229): ATPase family associated with various cellular activities (AAA)
  misc_feature (1)..(273): Xaa is any amino acid
MRPENAVAALLEGAQRIIKGKREFLELLVTAALAGGHVLIEDNPGLGKTTVAKTLAKLIEGKKGLVFKRIQFTPDLLPYDITGVDVFDPKTLKFRFVPGPVLANIVLADEINRATPKVQSALLEVMAERQVTIGQTSHRPPEPFLVLATQNPIESEGTFPLPAAQLDRFMMKLSMGYPDKDAELAILNENPAEKGLVNLKPVIKLSDFLSAKKAVSEVFCHKALKEAVADLSATPGFTGPLPWGQAPAPAFIFWTRQGRWLWCAGGIILLMRI

SEQ ID NO: 86518 - protein, 454 aa, Unknown
  Obtained from environmental sample
  misc_feature (1)..(454): Xaa is any amino acid
LFRFIALYAILYQIRFIAADLADTAVFSAALFIAAGGGFFVAEIKIKEKKINIFTGLVAVALIPWVARVFIAMPRIFVSGPAVGLDALLLNFDRNNFVSLLPFYWTAASTFLAVRSRLFLRAAVIVDALLLIAIAGIARVSDLAIYRLPIVMIITLAGIVFFQALALLFSLPPELKIKKTEKTIAVATLLLLVFIGGFLFLKPSQRRAAQKGGGLLEPKLFSFDFSQVLRLDTEISMNDDLVLIVKKDPADNHILMRRSVMSGYSKKQGFYRMEEIDEKIHPLRLPSRPVEFQREGFKMASQVRQEYFIVNFDAAAFIGMKEPIEIIPYENWDASSFKTAYLVESLTSDAGYEHYSQSTYNEDGDLFWPGPAELGLSEKEFALYTAYGNDERIRALAEEITADYERYGDKAEVIYEWLKYGDFRYSLKPGIAPDGDQLAWFLFQSKKGYVPRPI

SEQ ID NO: 86519 - protein, 172 aa, Unknown
  Obtained from environmental sample
  misc_feature (1)..(172): Xaa is any amino acid
MKEYFKSSGDVFNWLSGFINLERGQTPKCFRVDRMEFLTRMAGDPHGLVPSIHIAGSKGKGSVTGMLASMLAAAGYRVGRYMSPHVVDIRERICLNDSYFSEDVYCAAGNELRDIAERLPLAANPLFDPSTADGCEPTYFELLTLFFFLCAKHGNCDVMTVENGMGGRLDPN

SEQ ID NO: 86520 - protein, 68 aa, Unknown
  Obtained from environmental sample
  DOMAIN (1)...(60): ErfK/YbiS/YcfS/YnhG
  misc_feature (1)..(68): Xaa is any amino acid
LEPGVNAAPQIDSYERYVYIHGTNREDKIGTPFSHGCVCMRNDDIITLYSMVEEGTYVYIDGRFDSAQ

SEQ ID NO: 86521 - protein, 196 aa, Unknown
  Obtained from environmental sample
  misc_feature (1)..(196): Xaa is any amino acid
VGGVVGVWCGCFGVGFCFWGVGCFGVGVVCVWCFWFCGLGGWLCVVLVWLGVCGVGVVCGLWGFWVWGFGGFVGVLVWGCGWWWCWVCGVGVFWWFGGGECCCVGGGVGVWGLFGVVWCVGGCFCGCWGVGLWWWVFFLGGGVLGCWLFWGWGLGWVVVFCLWGCGGGGGVGGGGGGGGGGGGVVGGGGEAARADT

SEQ ID NO: 86522 - protein, 195 aa, Unknown
  Obtained from environmental sample
  misc_feature (1)..(195): Xaa is any amino acid
NIFFRLTARKWASGELIQNFARCTPGDPAVIAPLYLNVFRLEPGEAVFLKAGILHAYIHGFGVELMANSDNVLRGGLTSKHIDIPELMKVLDFNPLKPQIIKPEPGFSCFTYPAPCEEFSLTVIRGTGGMMNMPETSPLALAQSASIGIVTEGEVSVSGMILKQGESVFFPPANNSESPLTLQGHFTLYVASVPQ

SEQ ID NO: 86523 - protein, 84 aa, Unknown
  Obtained from environmental sample
  DOMAIN (16)...(70): Nitrogen regulatory protein P-II
  misc_feature (1)..(84): Xaa is any amino acid
DYRRELPLSPLEKCYRGNSAIAKRFFTLIIDDKDVDKAVKVIIGANQTGNPGDGRIFVLPILETYSVRTGEGGLHISPEEGDEE

SEQ ID NO: 86524 - protein, 187 aa, Unknown
  Obtained from environmental sample
  DOMAIN (12)...(101): Cyclic nucleotide-binding domain
  misc_feature (1)..(187): Xaa is any amino acid
MAMDLAAFQRFSRTFKQGEIIFSEFELGDTFYLIQSGRVQLVKLVGDIERTLDILQPSEMFGEMAILENSPRSATAIALDELKVLEFNSQNFEILLLGNPQIALKLLKMFCKRIYDSKRRFMILTLPEPQAKIADVFLMLDETQPDIDKTSERREFKTHCGRSSALGGNERKRSTGHSGLSANLTIF

SEQ ID NO: 86525 - protein, 176 aa, Unknown
  Obtained from environmental sample
  DOMAIN (1)...(90): Cyclic nucleotide-binding domain
  misc_feature (1)..(176): Xaa is any amino acid
NVDGRALIYYTGEDANKIYILQSGKVSLVYTDIETGENVRGSVQPGEFFGVKSALGHFPREENAIVMANNTVVVAFTVPEFEALAMSNTRIILKMLKVFSNQLRRVHAQVASLTKSESVEPEEGLFALGNKYLKNKRYAHAQYVFSRYLIHYPTSANAKQAEKNLQLAETALAKGR

SEQ ID NO: 86526 - protein, 131 aa, Unknown
  Obtained from environmental sample
  misc_feature (1)..(131): Xaa is any amino acid
LIAVLSDLKKPGASGVGVASSQGLSLLRRNYVSSFVTGPNPEPLDGTSGERVIKLRLTRRSVSEGFREIILSINPTTKLIRRVEGRTIGEGELRLDFVNIRTNVGIPEARFAYDTPPSANMYNNFLFRDTN

SEQ ID NO: 86527 - protein, 324 aa, Unknown
  Obtained from environmental sample
  misc_feature (1)..(324): Xaa is any amino acid
MESLGEKLKTARNEKGLSIDQISRDTNISIRYLEALESENFSIFPGEPYLIGFIKNYGAYLDLDIQKLISLYRALKIQEQPIPVEQLLKSPPQAPRFLLPTIIILAVLGLSGWLVYSLIINNKDRPSLSIPTGRTSAEYIMEGNSMERRLYKNDSVLIPVDNETYKLELYNMGEAVTIRTPAGMEILDLSQEVNIDLNNDGIPELRITVADFAKNNADMGALLHFYLMDAAVYTGAEIDQNITHTVNTVNAASTTVFPASATAYPFTLQAGFQGYCMFRWEILNEGIAKALLSVISSGQRFLIFRLKTAFAFGYLTLRPQNSRY

SEQ ID NO: 86528 - protein, 64 aa, Unknown
  Obtained from environmental sample
  misc_feature (1)..(64): Xaa is any amino acid
MLNNLFSIDNALLILRLATPLILVSLSSTVSERAGVMSLGTEGLMLMGAFGAVFGLLGRICHAP

SEQ ID NO: 86529 - protein, 691 aa, Unknown
  Obtained from environmental sample
  misc_feature (1)..(691): Xaa is any amino acid
LLFGFGNKIEKKIKVKLDAKRASSKGNVYRIWAQKKIAELDLNYEKNSTELMELGQQFGIVTRNTSLIVLETLSDYISYGIEPPATEPEMRAEYQRRTKGTKGTKEKIVQWDGSELRDTRSRRSNFSAYNLMKDKNFAKDIDKVLKNVAGLQTSGKTELGGRRGSATGGTGGFNDGYAEGGSGGIGDMLGGLMGGSPGGLGTKAKGSLKAPSARDIDMGAGDGSRSKAEIMAVVNARMPGLRNIYNKYLKLKPEFGGKITLKFTIAPSGDITSINIVSSTTGYAEFDEAIEDMVATWKWKVIKSGNTTPTIPFTFDDFGNGSRTQAVPPSPQPPQPPRPPRPRFKEIYGGSMLDKAVVASENIKGWWNIDFTPQKSKYPTPDEKALSIDSAKDNFVKGNEYLSKLTGKTDEDYQIYLKLRNDYANSPTFYFDMADWFYKLGNREIALRILTSIADLELENSSLYRLLGYKFKEYGEYALGKFVCQKVVQWRPMEPQSYRDYALALADNGETQAALDSLYSLLLKHYSENILRRSRGIEEVVIMEINNLIAKNAKLNTSKIDKRLIMKVPIDVRVVVNWNMNNTDIDLHVKDPSGEECYYGHRQTSIGGHMSANKGGIGPEQFILKKAIKGKYRIYVNYYGDRQFIDAGPSTVMAEIYIKYSDKTEQRKIVSLQMSKAGQKDGKIEVGGFEF

SEQ ID NO: 86530 - protein, 254 aa, Unknown
  Obtained from environmental sample
  DOMAIN (155)...(247): Anticodon binding domain
  misc_feature (1)..(254): Xaa is any amino acid
DGEDRCYTPDHAPVGFAGPVGLTTLPIIVDHTVTVMNDAVTGALAKDLHYKHVAYGRDFQPWMTGDLRTVKAGDLCPLCGGELYEKKGNELGHIFKLGYKYTRSMNVHYLDENGKSQTPTMGSYGIGVDRALASVIEEHHDEAGIIWPVSVAPYHVIIVPIKYDGEVKTAADLFAAELEKAGVEVLLDDRNERPGVKFNDADLTGIPWRVVIGDKGLAQSQVEIKRRGEKESRMAPLDTAAKELAGKINKEQYE

SEQ ID NO: 86531 - protein, 535 aa, Unknown
  Obtained from environmental sample
  DOMAIN (133)...(198): His Kinase A (phosphoacceptor) domain
  misc_feature (1)..(535): Xaa is any amino acid
MFNKYNEITAAVDYSLVEKKVRLDELLGETGKELIRAAHELSKGESRSFNHDNKIFLVNSIPEMEWYMAVSYPLPGMFSLNRAMNTVFFCMLFLILFLFIVINIFIARLENAMAEHNLQLLEANRKAESASQAKSDFLAKMSHEIRTPMNAITGMAELLLREELSGEALDYAQDIKQAGNNLVSIINDILDFSKIEAGKLEIIPINYLLSSLINDTVNIIRTRLMEKPLRFFTNIDGTIPNSLIGDETRLRQILLNLLSNAVKYSEKGHVGLIVSADKRDDKQVWLKITVSDTGKGIKPEDQAKLFSEFVKVDIKKNQNVEGTGLGLAITKRLCIAMGGDISMESEYGKGSIFTAVIPQGIEKEVPLAVVKEAEKKKILVYEGRAVYAKSVCWTLENMGVPYTMVTNQDDFAAALYREDWFYVFSGYGLYEKIEPVMGQSSASFFGGKKPPLALMVEWGTETRIPGVRFVSIPIQSLSIANILNGKEDNKGYIKSSGVIRFTFPRARILVVDDIATNLKVVEGLMLSADLILGGT

SEQ ID NO: 86532 - protein, 88 aa, Unknown
  Obtained from environmental sample
  misc_feature (1)..(88): Xaa is any amino acid
MDVYKTLRDESFEANLEIKRRNLAIYTWGNASAFDPAKGVFAIKPSGVEYDELTPKKMVLVDLEGKVINGKLKPSSDTKTHPVLLAIK

SEQ ID NO: 86533 - protein, 582 aa, Unknown
  Obtained from environmental sample
  DOMAIN (98)...(163): His Kinase A (phosphoacceptor) domain
  misc_feature (1)..(582): Xaa is any amino acid
MYDPEVPLSALVEELLREGKLSEVEWNNWKGEPVIGFFRTLPNGWRLGLFPLKKVYYQPLYNMLIILSLLGIVLASVLIIVLVRVDEAKNKSDAENRHKSAFLANMSHEIRTPMNAIIGMTTIGKSAGDFARKDYCFTKIEDASNHLLGVINDVLDMSKIEANKFELSPSEFEFEKMLRRIVNVINFRVDEKLQKLSVHIDSAIPRVLIGDDQRIAQVITNLLGNAVKFTPERGVISLTARLVEKAEDLCTLKISVSDTGIGITPEQQEKIFHSFEQAESSTTRKYGGTGLGLAISKRIVEMMGGSIWIESEPEKGSVFFFTIKVWCGTEEKYVSLSPEINFSNVRILAVDDEADVLAYFKEITQDLGIMCDTAMSGEKALELISKNNGYNIYFIDWKMPIMDCIWLAREIRLRRYDNSIITMISAAEWGDVAEEAKTAGIDKFLSKPLFPSAIAEIINECYGVNKRHIEKAPSEEIEGVFEGRRILLVEDMEINREIVRALLEPTKLKIDCAENGAEAVLMFEKFPTQYDVIFMDIQMPVMDGYDATRRIRIIEAELEKTLQRIMVTMKFAQANSHCCHDR

SEQ ID NO: 86534 - protein, 389 aa, Unknown
  Obtained from environmental sample
  misc_feature (1)..(389): Xaa is any amino acid
TAGTTFPTVAQSGTEYEVTFTPNTDNYNAATQNVAVTVSKSSALHATNPLNQMISTGDTDPNTFDLSTIVLNETDHGTLSYALGTFADQAGANKILTAQPTLSGHTLTYTGTGKESGTATQVIKITSQNYADITATITFEATKKTEVEISGIEAQDHEYDGNQKKGYTGTATSGAYTGTLTYTYGGTGDYGPTETPPTNAGDYTLQVSVPETNPYYTGSERYTFKITKVKIAKPTVTAASLAYTGGEQSAGIAENAAYTVTGDKSSSVGSHTATVVLKDIVNYEWADGTNTDLTLNWSIGKASGLANTVPVEIQISTSNTETHTYNLHALAFNKSDHGTLSYALGTLTDAGGILASAPTLADGILSYKGAGKTEGRATQNITITSQNYA

SEQ ID NO: 86535 - protein, 103 aa, Unknown
  Obtained from environmental sample
  misc_feature (1)..(103): Xaa is any amino acid
IQDQNRPSGRALLWRFQGASIGHVSPEAAMGGNIGIINEGDIIAIDIDGLSINVKLSDEEIARRRKSWQPLSKTHTGYLARYAAQVGSAAQGAVFNSLPDRGD

SEQ ID NO: 86536 - protein, 128 aa, Unknown
  Obtained from environmental sample
  DOMAIN (2)...(121): LeuA allosteric (dimerisation) domain
  misc_feature (1)..(128): Xaa is any amino acid
GYGEGVWFRKWKLDHWAVNTGSALGAAGVIRLRHKDGEFKKLVCLGDGPIDSIFKAINDITGQEPELELYEIGAVTGGSSSQGEAMVKIAMEGRRWNGRGVSTDVIEASIMAYLSAINAMEWDLTSEK

SEQ ID NO: 86537 - protein, 372 aa, Unknown
  Obtained from environmental sample
  misc_feature (1)..(372): Xaa is any amino acid
MRDTIKCIFRTKNPTPYSRLPIPFFTLLIAHCSLLIGCYTLKQGTTMLGYLSRAVPLESLLKSENSGADGSEAEKNRRFVERIQDIRRYAQEELGLNLGKNYTRYVKIDRDYLASVVSASAADSFLRHEWKYPIVGAMPYKGFFNIEDARKERAKLEKKGLDVWIRGVDAFSTLGWFRDPLYSYMRDYPPDRLADLIIHESLHATVFIKGQAQFNEELAEFAGSEGARMYMASRYGAASAEYRNMHKDEADNKRYVSFLQGLIRELNKLYESERNGEEKLIEKEKIISAAKKRFAAEYENMFSGAGYRGFTEMPVNNAYLELYRLYYTEDAYIANLFARSGKSLPEFIAAAKTISKKGDGRKMLAQALGLEQ

SEQ ID NO: 86538 - protein, 156 aa, Unknown
  Obtained from environmental sample
  misc_feature (1)..(156): Xaa is any amino acid
LRGFATWQKKPIPLCTLTLCAGLPGEGMEPFGKGFDALWAALASGTHYSRVEIQLGILKLLPGAPIARHIEPFSLMFNSLPPYELIESAAIPASSLDRIKNFARFWELIVNRGLLDIGPSPVFDRFMALSDCLLAKFGRNWGIDKCQLQKQITGNR

SEQ ID NO: 86539 - protein, 94 aa, Unknown
  Obtained from environmental sample
  misc_feature (1)..(94): Xaa is any amino acid
MQQTIFGKTNLSVGRTGFGCIPIQRISYDESTALLQYAYDNGVTLYDTANGYTTSEERIGIALHHVRDKICICTKSAAQTPDKLMGHIENSLRM

SEQ ID NO: 86540 - protein, 348 aa, Unknown
  Obtained from environmental sample
  misc_feature (1)..(348): Xaa is any amino acid
MFVRFHFVPLKAVLLFFLTSLSGYATPVVSLETGGSYESAWKGKGGYFPRIYFTEVIEAARKAEDASPYWANTQAEQEAIDRITTDYTSLILNNDILAFYGHPRSTVMGILGRFPIEELDKKLTALANDYKAASGGRNVIKAFYIIYGTVWPEGEIGIINSELLTSWIEYALKRDMLVFIDHQIGRYDPVASLRRMLPWLKYPNVHLALDPEWRTTKPMKEIGSVTADEINRAQKEMEDYIIANDIPGERLLVIHQFNWRMIRNRETVKSDFQRVRLVHCADGFGSPRIKRDSYAYNAEAANMPVKAFKLFYNFGTPGAGYDNPLMSPSDVYARNRGLSLSASSAPHN

SEQ ID NO: 86541 - protein, 259 aa, Unknown
  Obtained from environmental sample
  misc_feature (1)..(259): Xaa is any amino acid
MGTNLLQINHRPPPPHLRTPGTRISAFTREDLEKLKAESSFAIAISGIVQNNNADVIGGEGSVQVRLQGVEPDFQIIRNWNVNAGYFFDDEDLLLRSTVVVMGRTTAKNLFGNAENALSQQIRIGTVYFTVIGLLESKGADFEGRDQDEIVIVPMDTAMTRLYNSPYLNMIVMSVFSRDYMDAAQKETEMLLRESRSIPDGITPDFAIMNQSSMISMASETSNILTGLLTAIAGISLLVGGIGIMNIMLGFVYRAHAGR

SEQ ID NO: 86542 - protein, 310 aa, Unknown
  Obtained from environmental sample
  misc_feature (1)..(310): Xaa is any amino acid
MFTGGTALFTLSVRALAERLITAGCLNPTDDISVIRAPRGVVFGSPNTSKSVILDKIASVWNAGAQEYTTLDAVDSGVKYALITIKTGGEMFFGRIVNDSIFTIPESGIFIFKLSMFLTLFLTLYFLISFKPHPITLVQNRIKTLRTNLFEELYIKKTGQDRAKWILELEQRRGEIRSELKSRLGIKRSLENKIDEIIDKAWDELLAVMKSGYDLASLEEIVKTRAVKVEKPKTEGPKTVWDEIKELEEVDEAEPVEEIEQAEPVDEIDEIEEIEEVEEVEEIENADEIEAALTGAKKITAASVQKPRPI

SEQ ID NO: 86543 - protein, 408 aa, Unknown
  Obtained from environmental sample
  DOMAIN (1)...(399): Protein of unknown function (DUF1703)
  misc_feature (1)..(408): Xaa is any amino acid
GLWPRSADSPASQFKYLIEKAREKIGEKAVVIIDEYDCPLTSTLNKRDVHIELRNALKTFYGVLKSYDEYLRFILLTGVSKFSQVSIFSELNQITDLTLDPRYADICGVTQEELEANFGPEIEDVLEKNGRNRDEYLDDMRRFYNGYRFSENPLTVYNPFGLLKHFNSGGKFSEHWYETSTPTFLADLIEKHKVNILELGNLRVKAADFGKYDIDNMEIAPLLCQTGYLTITDYDEKSQRFTLDYPNEEVRAAFAETLVKHGLRVPPNKGDALYNQLTDALYGGDVDAALNAIKMFLAEIPYDLVLDKEIHFQALLRVIFKMLGFDCRTEERIATGRIDMLVKTDDFIYCFEFKLDGSAEAALAQIDNKEYAVPWAESAKKVFKVGVNFDSKKRNIAEWVTNAMTSEP

SEQ ID NO: 86544 - protein, 335 aa, Unknown
  Obtained from environmental sample
  misc_feature (1)..(335): Xaa is any amino acid
GGTQGSDRPRKLKEQECREEQERIEREPTAEDETKREESIPVISDVRKRIAKYQNCISANRFNTYGLKEDSTVIATRTNIEDQCNTGSWRDIVAISTYNGPTASIIVGLKADGTVIALGDNKYDRCNTGSWRGIIAIATGGYHTIGLRADGTVFAVGNNDNGQCNTEGWRGIVAIAASEYHTVGLKADGTVIATGRKDEGQCNTGSWRDIVAIAASEIRTVGLKADGMVLTVGEKDEDQCNTGSWRGIVAVTVGVFHTVGLKADGTVIATGRKDEGQCNTGSWRDIVAVTAGSFHTVGLKADGTVIAAGDNKYGQCEIGSWRGHRPLFQKKAYAN

SEQ ID NO: 86545 - protein, 56 aa, Unknown
  Obtained from environmental sample
  misc_feature (1)..(56): Xaa is any amino acid
MIFLSRSQFPGNAKGLTNAVIAGSTDYLRGLKENIIIGHPIPAGNWHEALSQCKTL

SEQ ID NO: 86546 - protein, 969 aa, Unknown
  Obtained from environmental sample
  misc_feature (1)..(969): Xaa is any amino acid
MTGTSTSETKSFILDSTPPFVRFTLPAKVLNKGFGDDGENKKPEPPTTANGFASVLVPGGQTAVITGETGDKPNAADNTANPPKPEGEKGSESGVDQMWFHLGYIDGITNNTNYPFPTKQAIKDWETLLIQRHFPAADIANLTVKQRSAYMDTIANYRASGDADDKGNAWFKLGGTEKPTGFIINNPNIYDWRMEIPENYAKADADADADLRATVTAQNTPTATINSVVYYQIGGLKLYGDTITVKGRQYTVGSGNYQMVQAVAGQAGVYRLPLWVRLVDIAGNVEYYCHDIWIYPDGDIPSTTIESPSNRPSGAARGGTISVDGVAKSNTSVYDVIFRVFADNVANTNLDGYSNTDANGTDVFNATKVVGTLPYATPANRDANLVKINGNYPVVDATTLAKLPDIYKPGGTYGTAWQRASLSLTGGAGEPLIPWSIMLNTERQISDFIPTKGFNGKTPSDTTAVKDTIRVWLEVFVFNGEGAPIRSSIYSNDNLGTGGGTLYGTADTPKPYVRAFYIMSGASKITHPNVGTWTANYKAPVPVPTPAPFARDNFTWNGEDAGDLGGYKGAGTETRSNRFAFSVTLDPSPSGGAGLGEAAYRIKLNGDGWSTWTTVVTRTNNNLPTFPVTLNGARVSVRDTPAGKGTRYYFDYAVNSRAATPGNTTESGTTLTSISNERGEFVNWANTGGTITLQVRMKDNSTPPNEAEQTIQVAVDNFTPLADTGYRTNPKVAGTNVNFVGRVYDYANPASPLPTGGLSDSMNNEFTPRKLARVSVWFTKGTGNNLRYVNMNQKNTTTTTNAVPNPRSDVSVAPVNSRTAMIVGGGVNDAVTNITVTNRGGAVAQFTYPGLGGKAEHLADYVRDITPTTGQPQNKMLWAPVNAADYDVRWSLTLDSTLLPDGEMTLHYIVVDAAGNASYYTQTGITVRNNYPEITRVTLYTDNNGQGAQYTMDDTIEYDLTIPSCRSDP

SEQ ID NO: 86547 - protein, 67 aa, Unknown
  Obtained from environmental sample
  misc_feature (1)..(67): Xaa is any amino acid
VKRDRYRELPDGRAKGWTLTVRNIKLSAGAGFIVALTGDIMTMPGLPPVPAAEKIDVDSNGRISGLF

SEQ ID NO: 86548 - protein, 316 aa, Unknown
  Obtained from environmental sample
  DOMAIN (53)...(192): FAD binding domain
  misc_feature (1)..(316): Xaa is any amino acid
MSVNDKYGFKQLTGEIIEELKNIVGKGSVIVDGEKLEAYSHDETDAHEYGHSPDVVVLPASTAETAAIVKLANRELIPVTPRGAGSGLSGGAIPEYGGIVVSLEKMNRLIEIDRENMVAVVEAGMVTNDFALAVQEQGLFFAGYPMSLQTCVIGGNIAENAGGGKAVKYGVTGRYVLGLTLVTPLGEIVELGGKIAKDVTGYDLKSVIIGSEGTLGIVTCAIIRLIGYPTAKSDLLALFKTPKNAIDLVPEILCRGVTPTSIEFMDKLSVQTSCKYLNESLPYEDCGAMLLIELDGSDPGQVETDLMKPARPNLSM

SEQ ID NO: 86549 - protein, 75 aa, Unknown
  Obtained from environmental sample
  misc_feature (1)..(75): Xaa is any amino acid
VAVFRYDPRLKRKARTLSADSKEPTTALEDVMYKEVRFKSLKAADPARADMLLAKAKKHAERVYKEYKYLSERPF

SEQ ID NO: 86550 - protein, 652 aa, Unknown
  Obtained from environmental sample
  DOMAIN (75)...(216): Histidine kinase-, DNA gyrase B-, and HSP90-like ATPase
  misc_feature (1)..(652): Xaa is any amino acid
LSKAFPAQGTTTPRAALPKAAPPGGKKRSPPEAPQVPQTASPGVYDEYKVKTLSSLEHIRARTGMYIGRLGDGSNPDDEIYVLLKEIIDNGIDEFIMGNGKNIEVGIKDGEKPGSASVKVRDYGRGIPLGKLVDCVSIINTGGKFNDDVFQFSVGLNGVGTKAVNALSIYFRVVAIRNGEFAEAIFERGKLKSDRKGKLKDKQKDGTYVEFTPDPEIFKDYLFNIEFIEKRMQNYAYLNAGLTLSFNGKHFVSKRGLFDLLCEETGDDCLYPVGYYKGEHSANGQLEFAFTHTNNYGEEYFSFVNGQYTSDGGTHLSAFKEGFLKGIQTYFKKDYRSEDIREGTASAIAIKLKNPVFESQTKNKLGNSDIRAWVVQETRNAVEDWLHKNPEAGKKLEQKIVSNESLRTELNAVKKEAREAAKKIALKIPKLKDCKYHLEDGKDGAESTIFITEGDSASGSIVSSRDVMTQAIFSLRGKVENMYGKKRAAIYKNEELYNMMMALGIENDVEGLRYAKIVLATDADFDGFHIRNLLLTFFLSFFEELVTAGRIYILETPLFRVRTKKETRYCYTEKERDEASAALGSQCEITRFKGLGEISPKEFGQFIGKDMRLVPVSINTLKAVPQVLTFYMGKNTPERRDYIMKNLIEDAG

SEQ ID NO: 86551 - protein, 150 aa, Unknown
  Obtained from environmental sample
  misc_feature (1)..(150): Xaa is any amino acid
MEEKMSRKSSFKSVVVVILTAFILAAAGCDLGNFPDPFFIRVAFIEGMPENGEAGTPLTLTGTVRPVFASNVDIIWSVKDAGTTGAVINGNVLYANADGTIVITARVQNGIVIGKDYTQDFIIVIGPSIADKNKEHTMKFYALGRICTWL

SEQ ID NO: 86552 - protein, 874 aa, Unknown
  Obtained from environmental sample
  DOMAIN (96)...(355): BadF/BadG/BcrA/BcrD ATPase family
  misc_feature (1)..(874): Xaa is any amino acid
GCADGGITLNRHIIRFIREKAPQIEFIIPETAPVFEALGAAVMAPQSGSPLPSVDKLLKTNEIRFGALGALRDWKDKVQFFDKGEGKVRADHRYILGVDGGSTTTKACLVDMETDEIVASHYGRTHGDPVKALKECLGIIQKKVIADTGDKKLDIGLVSTTGSSREILGVFLETPGVYNEIIAHSVGTTFFDKEVETIFEIGGQDAKYVLLKNGVPIDYAMNEACSAGTGSFLEESAAGDLSIHSAKDIGPIALNADAPLKFGEHCSAFINSDIRKAVQQGASRENITAGIVCSIVANYLNRVVGNRTIGGKIFLQGGVAKNPAVPLAFAMLLDKKILVPPSPELTGCFGVALLAKRKNADGLLAEQAVVIDDIINREIGYERVFTCQACENRCPIQVLNVNNHKYMFGGRCNKYTNMRKQVKDVPVFDYVEKRQKMLFETFAAPGKNKEQLTINNEQRKTDKRDFVIGIPRAFSVHTLYPLYSWFFHELGIKTFLSTEVAHEGVARSESTYCFPAEIAHGAVQDCLDKGADFVFLPHFRDMPSYEDEVHANFCPITQSLPYYIEKAFPDIDKNRWLPLVVSFKFGEGKALELFCNMTRRLGIDEAETKAAFTLAMSKQQAYFDAIHAMGKTALEEARKADRPVIVPLGRPYNAFTPEANMGIPRKFTTRGYSIIPFDILPFHDEVIFPNMYWYYGQQDLKAANLLKKEDNIYLAFITNFSCAPDSFILHYVKWMMGQKPFLVLELDSHSADAGVDTRVEAFLDIIDGYRAKKDELEAERFDNGWRFISEKKPKGKFDLRIDNVKTGEKVPIVGNKRVKLLLSNMGAISTEYMGAAVRSQGVTPRLCRWQPRKQYRSPAPTRREGGSRHNPPQI

SEQ ID NO: 86553 - protein, 169 aa, Unknown
  Obtained from environmental sample
  misc_feature (1)..(169): Xaa is any amino acid
MNSEQLKKINIRGFKSIKESSVELDMLNVLIGSNGAGKSNFISVFTLLNNVIKKELQTYIAACGGANTFLFNGSKETTSIHLIFEFGRNSYCFDLSKTDDDTFYFENEWFGYSGNIDYSRSISSGHSESKWKKGIGNRIDDYVIPVLKNLTGEYIISRSSRNARIKALA

SEQ ID NO: 86554 - protein, 485 aa, Unknown
  Obtained from environmental sample
  misc_feature (1)..(485): Xaa is any amino acid
AVKQHHAELSTAISDIKQETNDAVKQHHAEIKSAINDIKQETNDTVKQHHAEISTAISNIKQETNDTVKQHHVEISSAINEIKQETNDAVKQQKDKLSAVMEEIGSALSKQQKEMNAEISKEQETINSSLIQLQKDWKTNISEFRKMAEKQQKELEASISGFRNELTQSIADLKTKSTVSIKQQQDELKSAITGIKQETDSAVKQQHEDLKSAISGIKQETNAAVKQQHDELASALSDIKQKSEAAIKGQNVELTSYLNDIKEKLNAAISSQYNEINTTLENQMETWKSLCKDTEQNIITATEKRLDEYQKIHTESISRLNNLADDAVELENELRRAMQDAVTRVNNDICAFKTETDAAIETSNSEIGAMAKALKQEIKDMNDGLDGIRQQAFNNVSEKLNSFENEFTLEIGKRTGDITRQIKDWQDNLEDRLKKSAEKINEEWEKAREETVTEQRKDIAEINEKLASDMRKLRETRSYLKKYQE

SEQ ID NO: 86555 - protein, 191 aa, Unknown
  Obtained from environmental sample
  misc_feature (1)..(191): Xaa is any amino acid
MSLDRRVSTGMPGLDQAIDLLRLGDNVVWQVQSIDDYLKVLRPYIQQAIKDERRLVYFRFGNHEPLMANNEPSVTYKFDTSEGFELFALKVHDIIAKEGLKAFYVFDCLSDLLESWCSDMMVGNFFRITCPFLFILDTIAYFALIRGAHTHDTIARIRETTQLLLDVYNVDDKFYIHPLKDLGRICHWNFP

SEQ ID NO: 86556 - protein, 153 aa, Unknown
  Obtained from environmental sample
  DOMAIN (12)...(145): dUTPase
  misc_feature (1)..(153): Xaa is any amino acid
MQPQIKVVKAHARIELPVYESEGSAGMDLRAFLEADVTLPPLGRVKIPTGLKLEIPEGYEAQVRPRSGLAIKNGLTVLNSPGTIDSDYRGELEIILINLGADSVIIKDGQRIAQLVTAPVCRARFVEAHTLAETGRGGGGFGSTGVIQRASGA

SEQ ID NO: 86557 - protein, 365 aa, Unknown
  Obtained from environmental sample
  misc_feature (1)..(365): Xaa is any amino acid
GLQTDREGVYSSKNWVSYQKNASAQWQVTSNRFTEQAYRLFTLALAGEADLGSMNRLRSHKLPFQASWRLAAAYWLAGQRDTARNMIKGLALPESDYRELSATFGSTLRDKAMILETLILLNSQEDVGRTKQLFEEITKELSRDKWLSTQETAYALIAIVPYMSNNAGSGALSLDYSVDAKTGNIAFNTPVAERSFGNMTGTSAALSVTNRSSSPVYISFTAKGLPTEGKEPALSEGLSLTVEYHDAHNRVIAPESLKLGEDMEISVRVRNTFSQSVEEAALIIPLPASWEIVNTRIGGGESSSNFRYQDIRDDRVMTYFNLNRGEERTVSFKVNKSYEGSFFRPAIHVYAMYDESIRALIPGVR

SEQ ID NO: 86558 - protein, 295 aa, Unknown
  Obtained from environmental sample
  DOMAIN (2)...(208): AICARFT/IMPCHase bienzyme
  misc_feature (1)..(295): Xaa is any amino acid
MAKAVCAFGLESDGTEPIGEADVRRLVPSAASGKEVCCVAIKHNTPCGIALADNQLDAYHKVFACDSTSIFGGIVAFNVKLDKAVALRLGELFLEVVVAPDFDDDALEVLKKKKNLRVIRMKKAPKEKHEYVAVDGGILVQQSDRTLLEKWEVVTKTAPQECDLKDMVFGMRAVTFVKSNAILIVKEQSATGIGGGQVNRIWPTKQSLERSADALKAASEETADTGGSPWNDNLPARVLASDAFFPFADIVEAAAKAGIKSIIQPGGSVNDKLSIEACDNHGIAMVFTGTRHFKH

SEQ ID NO: 86559 - protein, 116 aa, Unknown
  Obtained from environmental sample
  misc_feature (1)..(116): Xaa is any amino acid
MDTSKLLEILRITLPVFAMLALGNVLSRAKKMDEGHQAFLNWLVYYISLPALIFVGMATQPIRNLLHADFIWTTLASMLLIMILFIVIALCMRLEKKTAVIMVFTTTGLMRLYGLP

SEQ ID NO: 86560 - protein, 273 aa, Unknown
  Obtained from environmental sample
  DOMAIN (105)...(181): Bacterial Ig-like domain (group 2)
  misc_feature (1)..(273): Xaa is any amino acid
MKNKQKMFGIIAASVAIIGFSFASCTINVPGDENNSSSSNNNNGEQLYNHCITAAGLCLDGPYTAAQCNGTVSNSCPSNPGGSSPSSSPSGGGSSSSIASGSNVAVTGVTLNLNSLSLPVGNTVTLTPTVAPSNATNKAVTWSTSDATKVTVVNGVVTAVAAGTAIITVTADGGKTATCTITVPAWTAIPENTFGTTLISAIAYGNGKFIAGGASGKMAYSTDGTTWTAVAESTIGGNQINGITYGNNKFVAAGNNSKMAYSMDGTTWTARDI

SEQ ID NO: 86561 - protein, 128 aa, Unknown
  Obtained from environmental sample
  DOMAIN (1)...(125): Cytidylyltransferase family
  misc_feature (1)..(128): Xaa is any amino acid
AWLFGSYSEKTFANISGKPNKSVAGFIGGALGSVMVAVGAAFLFPNIFIYLNLEIPLGKLAIMAAILGFCTGIAASLGDLAESAIKRSCDSKDSGNLMLGRGGVLDSIDSIAVAAPVFFLLFNIFFRV

SEQ ID NO: 86562 - protein, 283 aa, Unknown
  Obtained from environmental sample
  misc_feature (1)..(283): Xaa is any amino acid
LALSSLPALDFFWEEPARFTNRPGNFPISASSENSTGDNFSVLAWQESTPNRNQINVYLAVKLPDEEWKERGMIAGPYAYSGTEPSIISLVIDKKNRILIAIAASGSRTDILISEDRGQTFSRQAINAEAEGSVAPRIFVRADGGYFLFVTRGLSQSIAINYARSNDGINWTPFEVFAPENNLALNFLPVHASYGSRDIVFFQSLVSDIETSSSFQLYFKTSDNGGQTWTPAKRFTTFNDPVTQTQTNPNYFDNQRPHLSRYGSNFLLVWERHTLLLGRSVMV

SEQ ID NO: 86563 - protein, 143 aa, Unknown
  Obtained from environmental sample
  misc_feature (1)..(143): Xaa is any amino acid
MNKRKIAKKSRVSKPSKISKVKKAAKASNVKKVTKVAKAKKVSKAPKVKAVAKTANVKTPSKAPKVAEPLNAAQRTSLKSEIKAICDIMRRFNCAGAMQYVPEMTWLLFYGYLMYANQKKRKSPKRLVILLYRRLQARIGGAI

SEQ ID NO: 86564 - protein, 65 aa, Unknown
  Obtained from environmental sample
  misc_feature (1)..(65): Xaa is any amino acid
MAENVSVFIAFGAGTLSFLSPCVLPLIPSYLCIIGGSPPAGGGEYRPRPVARTISFISGFSVFYV

SEQ ID NO: 86565 - protein, 114 aa, Unknown
  Obtained from environmental sample
  misc_feature (1)..(114): Xaa is any amino acid
MAKIKLTKNELKNQKDSLKMFQRYLPTLMLKKQQLQGEIRLTELRIKELHAQKERLDESFKSWIGVFGEKGVFTKDILKITKLKTGMGNIAGVAIPIFEGAELKSRPTIFARDQ

SEQ ID NO: 86566 - protein, 711 aa, Unknown
  Obtained from environmental sample
  misc_feature (1)..(711): Xaa is any amino acid
LDDLTKLKIAWFNKYSERNAFIDTAVQTEYGDSLRVYSKTRVAPSLSNVSWIAFGVQSGSNVYFGDVRINGFRATGISDYNGWALRASMKLNWSDFIENSMDFKYTDADFRSMSDDIHKESNARISSGLSSNIKLDKFLPDRFGVQIPLGGEIAASMQRPQIRPNSDIKLNNKRGEADGLSDMVGDFGRIISNSSEKGEITPSEKYEMHGRNRSAYTGYHKNNTSEKVVPRLTADRIGVGYRVIIGILLPGRGEVPDNEVDKINREGFEKYHGEINTSRQHNMKLDYDFSPSKKVIETLSWSPLKDSKNSNISKKTKGMSFNLFPERVMFDFMDVNYQRREQYNSIQDVIDTSGQYFLNKKPIEEVAMTHGFNMTYKPINPFVAINYNLGVNRNFDRYIKNWGQSGVGNFANSAVFRIDDEYRQYNVLFSEQRRNQDIKLSFTPEITRWLTFSANGAGGYTQNMDLIFDTTYMRANINSSFDFNTQFNVRRLFEDFSKGIKKGESFAKGLSNIAKGFETIGFDGINFGYRANMGLTNSYLDVPYLNYGLDGGNKNYMLYSFGIFNRSFKDFVTGNMNDTDAFGGVQNRNDWYLNGDIKNKADTRNTSQNYTVSTSMRIPKPVEISVNNMSLGWTRTYSITPEVDRLDTSIVFPDIRIGVSSSALEQLDVVKQNFSNFRLDCGYNYRQTYSRSGMPSSSIEKNRTISGFFPL

SEQ ID NO: 86567 - protein, 109 aa, Unknown
  Obtained from environmental sample
  misc_feature (1)..(109): Xaa is any amino acid
GYREDRRKPSGAFYVSAVFDSILNENPGSRSLPVIDVSLKNYISAEIAGLKPDKQFTYWLLASTGICVVPLSGFASDLPGFRFTLLEYNDEKRRWIYKTLAEAVQSYLR

SEQ ID NO: 86568 - protein, 483 aa, Unknown
  Obtained from environmental sample
  DOMAIN (391)...(480): Penicillin-Binding Protein C-terminus Family
  misc_feature (1)..(483): Xaa is any amino acid
VKYPRPRFQLFAEEELAMEISLLSNKRISNGAILAIENETGAIRVYIGSGSWFNEEASGKIDGVRFRAQPGSCLKPFLYAMALDTGFSPNEIMPDLPTVFGSREAYVPSNFNNRFNGPVRLRIALASSINIPAVYVLERLGVRTFEEYLVSLGFDSIRETMGTHGTGLALGNAEVSLEEMVRAFSVFPRMGLPVELRWTEDAKPVQTAKGQAAPSVMSPYAAWMIADILSDRSSRFVGFGPAPTLATPFESMFKTGTANQFQHIWALGATKRFTVGVWMGNFSGETVIGSTGSSIPARIAAKLLGALEKSAGQEKGQRSTSKVTENLAGPVPQGTTEVQICALSGMAAGPYCTGFTKEFIRNEKIPTVCNWHTQAGLFYPGEYRSWLSERFRSGGVRQEGTGRIRTPVTGAVFYLDPSLPAEAQALRVETTGFSESALIFVDGELAGSLNHAGVYALPLLRGRHSITVADNEGSSASADFEVK

SEQ ID NO: 86569 - protein, 315 aa, Unknown
  Obtained from environmental sample
  DOMAIN (5)...(53): Prophage CP4-57 regulatory protein (AlpA)
  misc_feature (1)..(315): Xaa is any amino acid
MTNVETFLDVSQVARMLGLSRATIRKWVLTGFIPCKKIGRAVRFSASEIQGWAESKSKGKAQSEKEGGAANVNESNTRTTTGTFIPACIAKGRRGMGAKMVVVASDSRDVQNWLYRYLEPYGLKGYAFYLVESEEVFSEYVGKIDTVMAFVEDIFFGERTVGMLGNIRKQYPKLKLALFSASVLPLGLATRYLYWSMGSYLSLRDSEKEIREAVEAIFGKRLAVPSYLIGCLDEYGRLSDRKPHLTHREVEIVRCTGEGKTGKETASVLMLSRRTVQNHISNIYQKFGIRNMVGVLKLAVSKGILPVEELMSFRD

SEQ ID NO: 86570 - protein, 125 aa, Unknown
  Obtained from environmental sample
  DOMAIN (5)...(114): Transketolase, C-terminal domain
  misc_feature (1)..(125): Xaa is any amino acid
LPNIHRRPLQRSSGSGGNPNTERIEADLYNLRFLKPVDEDYIAGLLNEYKLTAIIEEGIKEGGFGEYLTSLAGLRNCKSKTVILAAESDFFEGNMALGTREELLAENGLDGKSIAGKISKIYIRD

SEQ ID NO: 86571 - protein, 309 aa, Unknown
  Obtained from environmental sample
  DOMAIN (155)...(289): MutS domain II
  misc_feature (1)..(309): Xaa is any amino acid
GRRRGRDSSPAPARPGKSHHKKKPDAADPSQAAATPLMRQYNDIKSRNPDTVLLYRMGDFYEMFNEDAKIANKVLGITLTSRYQGGPENTALAGFPHHALDRYANKLVRAGYKIAICEQTEDPKSAKGLVKRDVVEVITAGTATEDSFIEERANNFIAAVYYSAKSNVCGLAVCDLSTGFFQVDEMEREAAEHELVRVDPGEILVATEQAETLEQCTRSLYRRIYISKYEDWKFDTDTATEALTKHFDIASVQGLGLEGIECAVRAGGALIRYLKEQKKSDLRHITAIAPRAAKQFAELDPSTIRNLNS

SEQ ID NO: 86572 - protein, 412 aa, Unknown
  Obtained from environmental sample
  misc_feature (1)..(412): Xaa is any amino acid
VAGFPTTRSVKPKSTIAQSNITIDNATAGYQIGQYRKVTPSVGTSFASTLSADGGAAVFHVTYRDAGNTIVSGAILPADSARTANYGVLNAGTYQVTVRAFNRYWEGTKTTTLTVLPRDISVTSNNVAPTATTSGTLIYSGTSQKGNVAVLVKDGNTVLTEGVDWEGTYTGASPIKDGTNAGVDTVKVKGIGNYTGTRATTYTINKLRIYVDTSSMTKYTKKYDGTAAFDTAKIAPAVAFSSSASETAALVGQMSKGNSGVTLAHRDQYLITAGSFVSASGSPATDSATANRVKLTVKLVDSLNYTLATAATASSGGSLDFYKFAEIERVDPDTLHFKYTRPDSLFHGYTGKARGIGDVTVKQGLSGISKFRVLYGADTTKPVNVGSYPVSISVDSAVANLKRVSDLGRSDH

SEQ ID NO: 86573 - protein, 668 aa, Unknown
  Obtained from environmental sample
  DOMAIN (164)...(245): Cache domain
  misc_feature (1)..(668): Xaa is any amino acid
MIYSLRTKILAIGLAFFALIGTAFVLYSMATTVHYKRLRLEGIRKTVEFETEKVNKVIMGMEQGAEILALDGLISHQLQAHAINETLVIGYLNGFKEAVGGGFWFEPYADREDKLRSNYYVFFDKSTSKIRFDDTFDSDEYDYHSKGWYRELIGGITRSYQVVWTKPYVDDSGSFSLMTTAGAGIYSQNRLIGVSTIDWEIDKVIKELTEIKPTKNSFILLCAPEQDYVISGTRANIVTGASIKSLPWDINADSFTLDDIQYLRFGRYMDNGWLLSVQIPKTEIFDEVEEQNNRYSLLIAFATAIMIGLAYYLISKFVNDPIKRLTEDVSRLALGNLDTRIEINSNDELGMLAQAFNKMTSDLKKSIEESARERAEKERIGAELGVAAAIQASMLPNIFPPFPERTEFDLYASMIPAKEVGGDFYDFYLIDKDNLAVVIADVSGKGVPAALFMMITKTMIKDGSPGNSLKDLFESVNKKLCEGNEADMFVTAFMGVYNIPSGRFVFVNAGHNPPLLKKHGSGYEFLETEPGYVLAWMKNSQYKEKEISLEPGDVLYLYTDGVTEAMNRRKELFGEQRLFDALNANRDVPLKKLLPAIKREVDNFEDGTEQADDITMLALKINNGSSGEAPDDMKKLELASNLENLNKALAFVIRSWNSTNVPRTYREK

SEQ ID NO: 86574 - protein, 659 aa, Unknown
  Obtained from environmental sample
  misc_feature (1)..(659): Xaa is any amino acid
LIQSDHGDLVYVLGKEADAANLEEGKILQRIPSLTEGTLLNYQGSGKTTGTATQEIKIVSRNYDTAFVTIVFKATAQTTYAVTVVSGAGGGSYPAGAKVTITASAVSGKVFDKWEVTAGGVTISDVNEPSATFTMPAKAVTVTATYKTAVYTVTWMTNGGTPHLSETSVLHGGTIPAPATAVTRVGYDFGGWYNYPDTLTQASFAIADVDRNMTFYAKWTPKTYSVIWNANGGTPIPAPQTSVDHGTIISAPRLMTKTGYTFDGWYTDAGLTVEASLPMRVTENLSFYADWKIKTYAVKWNVDGGFPIPAQTSVDTGGTITAPAAMTKDGHTFVGWYINSGLTWPAVFPVTNVKADAEFYARWTPVVYTVTWNAGGGTPVPEQTTVNHGDDITAPDSIKKANYAFGGWYANPNFTGKATFPIVNVTENKEFYAKWTPVYRISWENSVFYGQYPPTSVDSGGTITAPPAMTWAGHTFDGWYTDAGFTSSAVFPVTNITSDKVFYAKWTSTPIIVTWVTNGGAPAPSNTTPTQTLDGYYIFAPSLEVKKTGYVLDGWYTTSNFTPESKVSFPITRVAVNTTLYAKWLPVHTITFNPNGGNVSTTSATTDAAGKLFSLPTPTKTGSAFVGWYTSATDGAEVTYTRSSPPTTPSTHIGRRASP

SEQ ID NO: 86575 - protein, 199 aa, Unknown
  Obtained from environmental sample
  misc_feature (1)..(199): Xaa is any amino acid
LQASLRVSGCRSLDGLPALEPYLRAYNFSYTIVDSHGLLFANPSPCKGTFFPVKTPNGTFVLARDLYAAREMEKIAGDEIYRNNDRDAGYELPPETVNAFLSAEGERHRTGYKYWSRINGNGNYNPQTACNHAAEQAKMFIRSTTARLEEASKYMEEAPLSLYANNAAYFGSLWHEGFEFIETLFRTACDIKLGRSDPT

SEQ ID NO: 86576 - protein, 328 aa, Unknown
  Obtained from environmental sample
  misc_feature (1)..(328): Xaa is any amino acid
MASLSFHKDYFNEKEKNTDKILQDFGLTEDDIIYRKHGFRGIMFHAIFMHFFQKKYFDKIKVCPKKIDQINFTPSRFILLYLNTKQYYHNDKYILHDIGKVSLYELYEKTKILFHDDEKIATNIFLESLIGMYSLRKEDTWNHLITFDSIGTVALEQLDCQNIEKAGQEIYLRITCAGRSYVRFIASHFEFYSIRFSSNNVALFSNRALTFFSVENKYLFEKILDDVCSAVEHCCINMDKLTRKKMLERYDNYTIDKLFDDKEFLFVQMNEDEPDEIEYVMFHEERYIHQHITYVDSFRMFFDNPINGRFKTDVENINKRLLPFLERY

SEQ ID NO: 86577 - protein, 168 aa, Unknown
  Obtained from environmental sample
  DOMAIN (1)...(161): Dehydratase family
  misc_feature (1)..(168): Xaa is any amino acid
YRGRLHAEHEGPARVFDSEEAAFDAIMGKKINAGDVVVIRYEGPKGGPGMKEMLAPTASLAGMGLDDKVALITDGRFSGASKGASIGHVSPEAAMGGNIGIINEGDIIAIDIDGLSINVKISEEEIARRRKDWQPVSKTHTGYLARYAAQVGSAAQGAVFNSQPIRGD

SEQ ID NO: 86578 - protein, 706 aa, Unknown
  Obtained from environmental sample
  DOMAIN (643)...(700): Bacterial regulatory proteins, luxR family
  misc_feature (1)..(706): Xaa is any amino acid
MEECILFKMPPGTSVFLVTRSTPRVNLAGMIYRDQIFDISENDLRFTEGELAQYFHSRNNSIKPESLREIMRDTGGWAFAINLIARSYQKAPGYGGYLQSAMKTNIFQLIETEIWDEISEHLQAFLIRLSLIDHLSVDLIFLLAEEDEALIAELDRQNALVRRDSYVNAYLIHPLFLEFLRKRQGLLSEDQREKTYAIAGDWCSKNGFRIDALSYFEKIKDYKSIIFILFGLPAQIPDEISRYAASIFDRAPAEDFDKVEFLAEMHLRTYMCQGNWQKSLELVEYYEKKFLKLPEENLVARRTLARLYVCWAYIRALVGLTDDVYDFDIYMAKACKIISPSIDPGKFGPHCPGAWMNCVGVSRKGAPEDYIAALERNQVNISPSYISGYMAGEAELACGELAFYRGDAAAAIPHVTLALKKSRDKKQPGLIHRALYCALRIAASQGIFAQAEQIMKENKDILNDTEYLSRFVDYDISLSWYYCFLGMPEKTVDWVKEDFSFFTHPGFIENFKNQIKARYYYITRKYTPLLIHIDEMKRRESFLFERIEMLAMEACIQYKIKNKRKAFSIFLEAYENALPNGILMPFIELGKDMRTLTAVALKQPGGKIPKPWLEDVNRRSASYAKRRTHVIAEYKKAYGITDGIVFSPREADILSDLSHGLSRVEIATNRDLSVNTVKMVINMLYSKVGAENLADLIRIAVEQKLI

SEQ ID NO: 86579 - protein, 363 aa, Unknown
  Obtained from environmental sample
  DOMAIN (285)...(361): Pyridoxal-dependent decarboxylase, C-terminal sheet domain
  misc_feature (1)..(363): Xaa is any amino acid
MTGMIKALPFSNDEITAIANRHETPFHIYDEKGIRENARRLKAAFSWAPSFLEYFAVKAAPNPFLMNIFKQEGIGADCSSLAELSLAGRCGISGENVMFTSNDTPSAEFKAAKSMNAVINLDDISHIQFLEEHAGLPELACIRYNPGTARTGNSIIGNPVEAKYGFTREQVFEGYKILKDKGVKRFGLHTMVASNELHYKYFVDTALMLFELAAEVYKELGIRIEFVNLGGGIGIPYRPDQKAVDLEAVSAEMKAVYDRIIVPAGLHPLKICLESGRMMTGPYGFLVSRVLHVKNTYKNYVGLDACMANLMRPALYGAYHHITVIGKEFEPADHLYDVTGSLCENNDKFAMTEDAQNVPLPGK

SEQ ID NO: 86580 - protein, 339 aa, Unknown
  Obtained from environmental sample
  DOMAIN (2)...(272): IMP dehydrogenase / GMP reductase domain
  misc_feature (1)..(339): Xaa is any amino acid
VKDMDKHASYPYASIDPSGRLIVGAAVSPQDYTQRIPLLKNAKVDFVVLDTAHGDSKNVMDAIRGIKKDFNIPVIGGNVASKEGTRRLIEAGADAVKVGIGPGSICTTRIIAGIGMPQFTAVLDCAEEASKSNIPVIADGGIKFSGDITKAIGAGAGVVMIGNLFAGLKEAPGREIIFDGRIFKEYRGMGSMGAIADGAGDRYQMGKDEEPVPEGIEGRVPYKGELSRYISQLVAGLRKGMGYCGCHNIEELRKYRKFVRITAAGLRKATRMILQSPRKPRIIRAHEGLRPSVPHSFGHVRASTAATSLRSSIKGFALRFLSRSVMSVQARPRPHSVRQ

SEQ ID NO: 86581 - protein, 552 aa, Unknown
  Obtained from environmental sample
  DOMAIN (167)...(387): Bacterial extracellular solute-binding proteins, family 3
  misc_feature (1)..(552): Xaa is any amino acid
MTSPIAERSVKIFRIKDSTPLNELRLFKRKPKYAFMAGSIVNVDVVENAGYDFETVYINDYNTAYRMLKNGEIDAYFGMDTSDAAFAGFSDVVTEDFYPLIFKSSCLAAERTDLTPFINVVEKALTKQTLDYLVGLYLEGHRQYLGKKLNEMLTEEEKTYIKNNPEIPIAAEFDNYPVSFFDINTEKWDGIFIETLDEISKLTGLKFKRVNEQGTKYADLVIMLENGKALIMPELFRIKENEGRFLWADIPLVTDSFAFISKSYVPNIAISQIPNTIIGIRRNSIYAEVFKKMFPGHKYSIEYDSQEEVWNSLKQDNEVDVIFGCNRRLITYTNFYEDAGYRLNLILNYTFDASMGFNKNAAVLKSITDKALGIINVNNISNQWMHKSYDYRKKLTEAQRPWFIGAAGLFLTILVLVLFFLHKSRSFGKQLETLVRHRTSELSLKTSQLQMMIDSIPDLIFCKDNDLRYTQCNKIFEDFIGVSEAELFGKTDKEGSWLSIDSEKRISAVEESVLKDKNVAQYEEYVSSIVTKKGYYFETIKPRFVKTRVLSG

SEQ ID NO: 86582 - protein, 380 aa, Unknown
  Obtained from environmental sample
  DOMAIN (120)...(262): Radical SAM superfamily
  misc_feature (1)..(380): Xaa is any amino acid
MTDRPRDCDFVAISMMLSTQVKRGWAIADEYRRRGKQVIFGGISTMLHAEETMQHADSVFLGEAETRMEQVIADWSEGKLQKVYNFMPQQPPIESIGPARRDLYQKELYNHKGVQMVDLFHASRGCRFSCYPCAVSYLGGRSFRPRPLDKVIEELSAIENNRLFVVDNSLAQDKEWEMNLFREMIPLKKKWISHTIEDDPEVLELAARAGAWYVYQAIYDTSDYIKERVKRYHDHGIGVEGTILLGLDNQTEDDIKRLIDFLLEINLDLAEFTVMTPFPHTKAWDDLNRQGRIFDRDWDHFNAGQVVFTPKHMRVERLQELYDDAWKIFYQDESQEEKMFHLFSTVVSREMDDGTYHPRNQRLIHKSFGKDIVRNTGAGT

SEQ ID NO: 86583 - protein, 422 aa, Unknown
  Obtained from environmental sample
  misc_feature (1)..(422): Xaa is any amino acid
TSINSENPENPLILANRGSDNVLLNTERLKFIDEISRLILELKEQFPKLAQYLSKAMDNFSANQENIPIKILTNLLTQIQQNLNKPTVAEPETVKNLVDEVIKILQPSKEAPPEYKLVLALSKNDFASANIAVKNIVQAAVIPQQNQTPLQIQTPQQIQVPQQTQIPLQTQTPQQIQVPQQTQIPLQTQTPQQIQVPQQTQIPLQTQTPQQIQVPQQTQIPLQTQTPLQTQIPQTAATAMQTFQTIFNALQELKEFGIPIELKDAPLKELETIVLQKTGIELDKNLQNVRDLQNFFYEKPTYATISLLPAKQVVHFENVASVVEIPLPKDFPVQKIFSNILQTPPPIIPQQPQQQPIPQQQSILQSQPQQQPVPQPQPQQPQFIPPQPQQQQSIPQPQPQQQPVPQLTTATANTAAAHSTKN

SEQ ID NO: 86584 - protein, 222 aa, Unknown
  Obtained from environmental sample
  misc_feature (1)..(222): Xaa is any amino acid
MSNFGITGLYGIMEAMSKEKKPRRKSMPKAALARLCFIDEQIASRSYPNTARLAKDCGNASLSTIGRDISFMKNVLNAPIKYDMIKRGFYYSKPKYRVPLGFYGGDELLALGMVKSLLVMYKDTPIFDTAYNHLKSITTPVDSKGNSDWYENRIAVLQPPLAHVKPEVWEAIITALRENRILTFDYKDNGDRTYINYRFCSYQLLFDNGIWYYTLGRSDHSV

SEQ ID NO: 86585 - protein, 116 aa, Unknown
  Obtained from environmental sample
  misc_feature (1)..(116): Xaa is any amino acid
AEGAVIARLVFRFIGDTATLRAMEFAWTKYGMLLDPHGAVALAAARDYFDKDKNAFDHIIVLATGHPAREAALVREATGQEVMLPEKLALLNKEAEPIAVVDPHLDTLEGLLASCL

SEQ ID NO: 86586 - protein, 359 aa, Unknown
  Obtained from environmental sample
  DOMAIN (1)...(330): Polyphosphate kinase
  misc_feature (1)..(359): Xaa is any amino acid
NLDSRQIDESISLNGAFRTGGGSGTFQTVSPIVRSLEQAALNGKHVTALVELKARFDEERNISWANRLEKAGVIVVYGLSQLKVHAKVTMVLRRENERVRRYVHLSTGNYNDKTAKLYEDICLFTCREEIAYDAGLLFNMITGYSLRQAMRYLVIAPYSLKPKFLELVEREATRSSHLYSGKIIIKCNSITDNDTINALYRASRAGVKILVCVRGICALVPGVPGLSENIRVISVIDYYLEHSRMYYFANGGAGELYLSSADLMHRNLERRVEIMFPVQDEKIREELLDVLNAYFMDNCQARVLDSAGTWKQISPSPGEKQFRLQKDMLSRAARNSDSPAAVKQEFTVRRGQGSGTGVQ

SEQ ID NO: 86587 - protein, 550 aa, Unknown
  Obtained from environmental sample
  DOMAIN (2)...(120): Type I restriction enzyme R protein N terminus (HSDR_N)
  misc_feature (1)..(550): Xaa is any amino acid
MPRNEAQTRFDLIDPALFQRGWTRDHIKVEHSTGGIFINDKGKAIRRKGRTDYLLRLIIKKDTQPHAIALIEAKAEDKSPGAGLEQGKRDGDFNRLNVKFIFSTNGHQFVEYDKFSGIISKPRPINEFPTHDELRKRYEKYMGIDMEAENAKPLLIKYANGEDQRRYYQDAAIRAVFENVAQGKNRALLSLATGAGKTFIAVNLLKRLDTAGQLKKALFICDRDELRNQANNAFMGLFGSNAAAVENKNPQKNAKVIIATYQSLGISNENDDSSFLLENYPENYFSHIVIDECHRSAWGKWSLVLKRNDQAVQIGLTATPRNLIVNEKTPEAEKDNEITADNIKYFGEPVYEYDMLQAIEDGYLAVCEIQRRDVNIDEDGLSIDEVWERAPCYVTTGEPVPSKEELKDYYEKADYETKLMLPDRISRMCKDLFDSLLYKGTAEQKTIIFCVRDRHSELVANELNNLYNQWCKINYKKQCGHYAFRCTSQSGGSDYIDDMKGSKSDYFIATTVDLLSTGVDIPAVRNIVFFRYVKSPISFHQMVGRGTRLA

SEQ ID NO: 86588 - protein, 346 aa, Unknown
  Obtained from environmental sample
  DOMAIN (80)...(331): DAHP synthetase I family
  misc_feature (1)..(346): Xaa is any amino acid
MIAVVKQGASEQQLDNLLSWFHSRKLKTHVSKGEFTTIIGLIGDVSQLDIDLLEGLEIVESVKRITEPFKRANRKFHPADTVVDVGGLKIGGGNFQVIAGPCSVESPEQILSIAESVKASGATLLRGGVFKPRTSPYAFQGMGPEGIDLLLKVKAKTGLPIVSEIMNAMHLPLFEHVDVIQVGARNMQNFELLKEVGQSKKPILLKRGFANTLQELLMSAEYIMSEGNDNVILCERGIRTFETYTRNTLDLSAVPVLKELTHLPVIIDPSHAVGVSRYVKPMALAAVASGADGLIIEVHNDPPNAACDGAQSLTPEQFVDLRGKDTTDSRSYCVVIGAKREAAMNI

SEQ ID NO: 86589 - protein, 378 aa, Unknown
  Obtained from environmental sample
  DOMAIN (46)...(111): His Kinase A (phosphoacceptor) domain
  misc_feature (1)..(378): Xaa is any amino acid
TEYYFEITVIPIKDDSTGGVTGVILTMHDETGLHEAVLNAERSNKAKTNFLAKISHEIRTPMNAIAGMAELILREHISGLVREHALSIRQASGNLMAIINDVLDFSKIESGKLEIVESEYQFSSLINDVISIIRMRVIDKQIFFTTNIDCDIPGRMIGDEIRMRQILLNLLSNAFKYCDRGFISIHVSSEKASDGAVTMVFDISDSGIGIKPEDHGRLFTDFVQLDKVTHKEVEGTGLGLVITKSLCEAMGGSIDVYSVYGEGSTFTVRIPQKFADYERFANVDDPDSKNVLIYETRQPYSASIICSIDNLGVKCKLVSNQSMFLEELNKNKYTHVFVSSFLLRARKKIVRNWGIDITVVLLAEYGENVVNTEAVKTL

SEQ ID NO: 86590 - protein, 80 aa, Unknown
  Obtained from environmental sample
  misc_feature (1)..(80): Xaa is any amino acid
METDLMGIGELSGLLEARHISFSPNLGFSSVAIDSRAVKDGSLFFALAGSSHDGHKFVQNAFNSGASGAVVDSQNWIFLI

SEQ ID NO: 86591 - protein, 67 aa, Unknown
  Obtained from environmental sample
  misc_feature (1)..(67): Xaa is any amino acid
DDGREIFRHEFHLTILLIEHDMRLVMGICERLIVLDYGRTIATGSPEEIQKNPAVIKAYLGTEAANG

SEQ ID NO: 86592 - protein, 151 aa, Unknown
  Obtained from environmental sample
  DOMAIN (12)...(132): DnaJ C terminal region
  misc_feature (1)..(151): Xaa is any amino acid
MVTIPAGVENGKRVVIPKQGDAGPNGGPPGDLYVFIRIKPHEYFERQSYDLYCAVPISIMQASLGAEIHVTTLDNKTIKVKVPPGIQNGKMLRIRDEGVPMGGQRGNLYIKLMIQIPEKLSRRGKELLEELARIEGQNDSPKPIALSQLGN

SEQ ID NO: 86593 - protein, 47 aa, Unknown
  Obtained from environmental sample
  DOMAIN (1)...(45): GTP-binding protein LepA C-terminus
  misc_feature (1)..(47): Xaa is any amino acid
MAETAATLRANANWLEKQKEGKKRMKMVGDVELPQSAFLAVLKAKDE

SEQ ID NO: 86594 - protein, 144 aa, Unknown
  Obtained from environmental sample
  DOMAIN (21)...(113): Eukaryotic integral membrane protein (DUF1751)
  misc_feature (1)..(144): Xaa is any amino acid
MTQVFGADFRYFLVTRMSMIPATVVHGWVWTFVTYMFMHGGFSHILFNMLGLFIFGIHVERQMGSKEFLLYYFVTGILAGVFSFLVYYYTGNRVIALMGASGALFAVELAYAIFFPDSILYIWGILPLRAPVMLLGFTALELFF

SEQ ID NO: 86595 - protein, 574 aa, Unknown
  Obtained from environmental sample
  misc_feature (1)..(574): Xaa is any amino acid
LTAGLTDIRAEIYIKYAAKDPRLKIVRPDDSGAAAARHAGLRTATGAYIHFMSAQDVIPADYYAKMLIPAFTETDADLVSGGVNDEQFPERSFKFSAEEILRSPAEKMHWGCYKQGGAAGGYLFKLKFAKHCAAAESEDALFAVTAVYYANRIILAPGCVYFCRANPLREIDPVYLRNKIRQFCQERGLDFRNIDYAFVSAVTCALPFDNCRVDADGNVSLCRVPWIKNNYLGNIYAESFEQIWNSHLAQTIRTSVLDGAYTYCDRRICPCPTRPVQPADLEFISPYPQRVNIVTDREGPVCRPEPDRNYQAYKPLLENAGQVYISGREEPFTSRYGRLLIRHIARDYPGLRFAFMTNGLLCRRKTWERLGISGRVDEIYVSLHSVPKSYDTLFRNLGALAAMKRNGELQKLQFNFVLTSANYAELADFVRLAENFSAVAWIEEAPAICRPEYKDYEILKTILKDPVFDLPHVFLLPGLSKIRQEPLHPSDSKTLSVIIPVHNAEKYLAECLDSVLGQTYKDLEVIVIDDGSTDNSAEIYAQYAAQDPRLKIIRQDKAGPSAARNAGLQAVVGT

SEQ ID NO: 86596 - protein, 93 aa, Unknown
  Obtained from environmental sample
  DOMAIN (1)...(75): Uncharacterised ACR, YggU family COG1872
  misc_feature (1)..(93): Xaa is any amino acid
MNTVALQIKVIPNASKTELIKTDAGYKARIQCPPVDGKANDALIMLLSKEFGVAKNSIEIVKGKTSRNKTVLVKTQTPHKLPEPHNFQNAPNL

SEQ ID NO: 86597 - protein, 510 aa, Unknown
  Obtained from environmental sample
  DOMAIN (280)...(429): Phosphoribosyl transferase domain
  misc_feature (1)..(510): Xaa is any amino acid
MYRFGRALAGRGNQVKLFDNDKLNEECAVFGVSLTADQAVGFAYNGLLALQHRGQEGAGIAVTNGPQMLCRKGVGLVSEVFPAEELEKMPKGMVAVGHTRYSTTGNNTKENVGPFVTEYLTGRIAVAHNGNVTNAIEIRKELSGQGLLFNATSDSEVVSSLIAYHITKEKDVLAGIVKATGCLQGAFTLVIACSDDKLVAVRDPNGFRPLCIGKNEIGYAVASESCALDVCGFEVVRDVLPGEIVVFESGEITSQGQSLTNKETDRGLCIFEYVYFARPDSVMDGLSIYEARYNMGIILAEEYSIDADIVCGVPDSGLVAASGFSTQSGIPVMSGFIKNRYIGRSFIYPIQTQRDGAVRQKLNPLSSNVKGKKVVLVDDSIVRGTTCARIIKSLKAAGAKEVHMRVSSPPFRHTCHYGIDIDSEDALIANKLDLDGIRNAIGADSLAYISIEGLKRACWKCSLPFCTACFTGNWVSESTKKEIFDQRVRMGSIVANQPQHKSACRPYKEF

SEQ ID NO: 86598 - protein, 74 aa, Unknown
  Obtained from environmental sample
  misc_feature (1)..(74): Xaa is any amino acid
CGQDSARAMIVNLIGSRKIGEGNKVECVIDRHKYEWGIEISDEEFNAINIKHHKFHGEWNYGSSGNIVERVKKW

SEQ ID NO: 86599 - protein, 64 aa, Unknown
  Obtained from environmental sample
  misc_feature (1)..(64): Xaa is any amino acid
FGLWRAWHGFPCLPHTVGTGGPTAINPLIVSISVIFAALVGVVFGYYPALKAARLYPIDALRYE

SEQ ID NO: 86600 - protein, 105 aa, Unknown
  Obtained from environmental sample
  misc_feature (1)..(105): Xaa is any amino acid
GFDGRDRNVRDNLQQAVNLRSSLNSAQAAVTEAERQRAGFVSEQDRIRKNLEAAGSTTQQGQEYLKRLLSLDDSIDKLDAELQTLRETARTAQKVYEDYIGNLKQ

SEQ ID NO: 86601 - protein, 177 aa, Unknown
  Obtained from environmental sample
  misc_feature (1)..(177): Xaa is any amino acid
LLALRFFFPFRRNIPNSKAVIVRTLLKEAPVLGACGLGYAATMILFVIANKLTASANAIMLQYTAPVWAALLGWLFLRERPRFEHWAAMALVGFGMFLVFRGGFAAGSFLGDILALVSGITFAANSVILRAREDNNPADIMLFSHIICAIISIPVFFSHPPAPGVKYFLSVIFMGIF

SEQ ID NO: 86602 - protein, 658 aa, Unknown
  Obtained from environmental sample
  DOMAIN (77)...(111): Gram-negative bacterial tonB protein
  misc_feature (1)..(658): Xaa is any amino acid
MQIKKPFKHIALIAAITAILAPRPALSQNAAAPAVTATSEAVIDLSDDAPIELMEEIEYLDPEGALEKMPALTRFVEAKYPDSLIKSGIEGAVLLELLVSETGAVDSAAVVRPLHPALDASALTAARQFKFSPAQAKGGEFVAVMLQYEYRFSLRDVITAPKSYVNLSGTVVERGTRRPVADALVVLQFVDTLSDTALSVPFSLYMEQIGAIEGQSWEDSRLAATTDSAGAFRFYSLPSGKVKVSVQSPEYETYTTYERIGKLEEVKVLYYIARLDYSGYELVVYGKAEEKEVSRHRISIAEVKRIPGLGGDAVRVVQAMPGVARPSFGGTEVVVRGAPSWASRYYIDGMTVPMLYHMSGSTAIYPSDALDGVDFYPGGFSSRYGGAVAGVIEMNTRSPKADRLQGYADFSMLAGALFFEGPVNEKVSFMASARRYFAGDLLGLYFDISDPKHTSISMAPFYWDYLLRTDVALDKNHRLSVSILGSRDSIGVFVPAMDRGSSEIDGQLDEMTMMITFHTLTAGLSSRLSDKWKNTLRLSGTYVAQNTSAFGFANIRERPLLGHLRDQATFTANDNVIVNIGADIEIINENMELEFTGGQNLIMRTKLEDQRYGLVGGYANVEWKPTDKLLLIPGVRYDYYPELTRGIRVPLRHLPGPQ

SEQ ID NO: 86603 - protein, 458 aa, Unknown
  Obtained from environmental sample
  DOMAIN (284)...(458): Domain of unknown function (DUF323)
  misc_feature (1)..(458): Xaa is any amino acid
MIAEDSGLASAGPRYALVIGNGAYRHVDSLPNTVNDASGIAKKLSGLGYSVELLFDSDLAGMGRAVSAWIRQLSTNRASEGFFWYAGHGMQVSGENYLLPVDINAEDEAGIVYGSYPLGRILLSLEQTARNKLNVVVLDACRDNPFKNLPGGSRGLSRGFVTVEHPPQDIFVMFSTSPGTTAADGDNGRNSPFAEAFLKYMDSDEILPVMAGLVTRETMRLTGGKQRPYQNGSIVSELYYSLSSGAPAREPLAGSGTASLSAAPSGMPPSSVPLVGNPPSVAISSPVMAAIPAGSFTMGSPVIELDRDPFGETRHRVNMSAFYIAAKELSVGEFRRFVEDTGHVTTAETDGGAQAYDEAKSEWVFRAGANWRNPGFRQGDDHPVVCVSWFDAVKYCNWLSVKEGLKPAYTITGRTVNWDRNANGYRLPTDAEWEYACRAGTTTPLLQARAFHKPLGRF

SEQ ID NO: 86604 - protein, 252 aa, Unknown
  Obtained from environmental sample
  DOMAIN (28)...(146): Type I restriction enzyme R protein N terminus (HSDR_N)
  misc_feature (1)..(252): Xaa is any amino acid
MTRQAGKETVYKLVDDFEKNECQYMSKSFQETEARNRLIDPFFTALGWELNQTSIARKFWDVHREYSQRDNSTTKKPDYAFRIKEGAKYREKFFVEAKAPHVDLTGNIPVFQAKRYAFSSHGKTPIVILTDFQTFKVFNGLEKPIFENPLQGLIKWLDLEYHIYLDKWDIIWDNFSKEAVTEGSIEQLIGKVNRNVKSLDDEQPQGKPHGIEDFSLKSLRMRGNTSPAPPAMKRPKGRGIKPQKGYALKKEQ

SEQ ID NO: 86605 - protein, 134 aa, Unknown
  Obtained from environmental sample
  DOMAIN (14)...(124): Histidine kinase-, DNA gyrase B-, and HSP90-like ATPase
  misc_feature (1)..(134): Xaa is any amino acid
VLPPQEARRIAAGEVIDRPAALIREFIDNAIDAGATVIEVSIEGGGAKKAEVSDNGSGMDRENLEKCVLPHATSKIRSLDDLDTVETLGFRGEALAAAAAVARLEIITATGGGGATFSGEAWRLETGPGGENCT

SEQ ID NO: 86606 - protein, 204 aa, Unknown
  Obtained from environmental sample
  DOMAIN (17)...(192): YjeF-related protein N-terminus
  misc_feature (1)..(204): Xaa is any amino acid
LPTPTEMARWDEAAVALGLPEMLLMENAAREALHTLEKQVGTLCGKRVLLYMGAGKNGGDAACLARLLLDQGAHPLVLHARPWGFYRGVTAKHARLARVCGVPFLPAFAPEKRLPVPWRRPDIVVDGLLGTGFAGQLKERTRALVDAINVLGEHCTVFALDIPSGLDPMSGRPCPVAVRAHATVCFEAAKPGLVLPEAAPYTGQ

SEQ ID NO: 86607 - protein, 706 aa, Unknown
  Obtained from environmental sample
  misc_feature (1)..(706): Xaa is any amino acid
FFNNDQIGTSVSVGELADGLLINLDKVTKKYEGLDGTELAISESQERMSVVTTEKDAKEFIELAAAENLEAVVIAEVTPEKRLVMNWNGKTIVNLSREFLNSNGAEKHAKARIFPPTVDHKKKEQDAERLEKFIGGLNICSQKGLVERFDSSVGAATVIAPYGGKYQLTPSQVMAAKIPVLNGETKTCSLMSWGFDPEISTVSPYHGAVFAVIMSLAKIIAAGGSRKRCWLSFQEYFERLRDDPLRWGKPVSALLGALDAQLGLEIAAIGGKDSMSGSFTLKNGENIDVPPTLVSFAVSTAKIDGILTPEFKRAGNYVYLYTPPRSVFEKTDFIALREYFDTAEKLIKEKKILSAWAVGSGGTAEAVVKMCAGNRIGFKTEQTLFYEPGFGGLIFETDAPLQTGSLLGRTTDEYTLSTKTFNIPLDKLQSAWEKTLEPVYPYNIEQEGKTEAFFYDKGVTIKAKERYAKPKFIIPVFPGTNSEYDTAKAIEKAGGKAQIFVIRNLTPSFIAESVNAFEKAVRSAQGMVIPGGFSGGDEPDGSGKFITAFIRNPAVRDSVMELLQKRDGLVCGICNGFQALVKLGLVPYGEIRAMTQDSPTLTFNTIGRHQAVLVRTKVTSNKSPWLSRLELGAHYIVPVSHGEGRFIASEEQIRTLAANGQIATQYVDPDGSPSQDIRFNPNNSNFAIEGITSPDGRSANLIIGKP

SEQ ID NO: 86608 - protein, 259 aa, Unknown
  Obtained from environmental sample
  misc_feature (1)..(259): Xaa is any amino acid
DWASLFLTAEWATLKKAKIGGHSIFIRTGEYEDGNLGEIFLDMHKEGAAFRSLLNGFAITVSLGLQYGVPLEEYVDAFTFSRFEPNGMVQGHDYVKMATSVIDYVFRDLAISYLKRSDLGQVKPEDLVATATKNEIDMPDGKQRSEKQEKQAAGFRPHATVAASPAPQSLPPSSGKSVTKGQAGTASGAKASVYSAPAAQPQAAVLEESYPEENEVIKIVQARIKGYEGDPCSSCGSFTLVRNGTCMKCDTCGSTTGCS

SEQ ID NO: 86609 - protein, 128 aa, Unknown
  Obtained from environmental sample
  DOMAIN (7)...(96): Cyclic nucleotide-binding domain
  misc_feature (1)..(128): Xaa is any amino acid
MDSQFQLNSYKKDAYIIIEGKQEADFFYIIQQGKVKIFKEAKLEGEDDVLGPGDIFGVISTMSSHSHIETAQALTDVALISVHQNQYVGLIQKNTQVAIKIIQQFSKRLKHLNETLCRDTLKKNAEDG

SEQ ID NO: 86610 - protein, 96 aa, Unknown
  Obtained from environmental sample
  misc_feature (1)..(96): Xaa is any amino acid
LAQEVLDVRLKFPTSSLADLYDPLAMPKELLKAHQKLDKAVETAYGRTFDNDSERVAYLFELYQKLTDQELSSSALFTVTKKTGKGKKIKTKKKRD

SEQ ID NO: 86611 - protein, 159 aa, Unknown
  Obtained from environmental sample
  misc_feature (1)..(159): Xaa is any amino acid
CGEAFREASESKVEAEERRAREKEEREKALKEAEEARAKMEEEKKAAEEAAAKKAEEKKAAESAAKVGADYSARDGSATGTAQRARPVSGKQVTVDPLVQEKAQEFKKAQEEMNKARKEFVEAIQLSRRKNTGEDDTDIPSSDAYKAQPQPGTKVNTSV

SEQ ID NO: 86612 - protein, 146 aa, Unknown
  Obtained from environmental sample
  misc_feature (1)..(146): Xaa is any amino acid
RDRELRNARHSYLVNAFRDKKLISVTIPNSVTHIFDAAFADNQLTGVTIPGSVTSLGQYAFFNNQLTSVTIPNSVKEIEAGTFARNKLTSITIGAGVELAIYKNFDEFNIYPSFDNGFEEAYINGGKRAGTYTRSDINSTAWTRQP

SEQ ID NO: 86613 - protein, 162 aa, Unknown
  Obtained from environmental sample
  DOMAIN (11)...(151): Radical SAM superfamily
  misc_feature (1)..(162): Xaa is any amino acid
SIADGPGWRYVISAQGCIHQCPHCQNPSTWDVNGGNEYSVKELKRKLTKLKKQSKSLKGVTFSGGDPFLQAVDFADLAQAVRKTGWDVVTYTGYTYEELISLVKDGDAGAEALLAATDILIDGKYVHAQYSADLQFRGSSNQRIIDVAKTREKGQVVLWRKR

SEQ ID NO: 86614 - protein, 465 aa, Unknown
  Obtained from environmental sample
  DOMAIN (11)...(462): tRNA synthetases class I (I, L, M and V)
  misc_feature (1)..(465): Xaa is any amino acid
GWQKYNQNGGDILEENNTFQTPEPKEKAKKFYCLDMFPYPSGAGLHVGHPEGYTATDIICRYKRANGFQVLHPMGWDAFGLPAEQYAIQTGTHPATTTQKNCDTFRKQIKGLGLSYDWEKEINTTDPKYYKWTQWIFSKLYNTWFDAEQNKGRPISELPSNENIEEKRLAYYANAQVWWCRKCKTVCANEEVLADGSHEKCGTFEVEHRNLKQWLLRIPLYAERLLSGLENLDWPAGIKDMQRNWIGKSKGAEVDFAVPAGKLRVYTTRPDTLFGATYMVIAPEHPQTASLTTPEQKEKVEAYVKAAALKSELDRTELSKEKTGVFIGSYAINPVNGKEIPIWVADYVLTGYGTGAIMAVPAHDTRDFEFAQKFDIPVICIMEPDNSCPPELKEKVLSGEACWTSDGKYICSSNDELNLNGLSKKEGIAKITEWLEKKQIGKATTNYKIRDWLFSRQRLGRSDPW

SEQ ID NO: 86615 - protein, 183 aa, Unknown
  Obtained from environmental sample
  DOMAIN (1)...(181): D-alanyl-D-alanine carboxypeptidase
  misc_feature (1)..(183): Xaa is any amino acid
LSKAAVLIDAHTGALLYSKNPNEEIPPASLTKLMTMHIVMNEIDAGRASWDEIVPVTVQSWARSQPPRSSLMFLAPGQIVTLRELMLGMAIPSGNDAAVAVALRFAPTVEDFASIMTSEARRMGLNVTRFTEASGISEYNMTTAEEFAFFCRQYVRLHPHAMVELHSVKEFSYPTAANVSQAF

SEQ ID NO: 86616 - protein, 111 aa, Unknown
  Obtained from environmental sample
  misc_feature (1)..(111): Xaa is any amino acid
VVKTYAKDNIECPSVYEGTIPSAGGSGINVSMELFKDQSFEMSYDYIDKGTEPFICKGKFKWDDTGNIIILDTKDAPNYYKVERTKLIQLDMKGKPITGKLADDYVLNRVL

SEQ ID NO: 86617 - protein, 65 aa, Unknown
  Obtained from environmental sample
  DOMAIN (11)...(65): PASTA domain
  misc_feature (1)..(65): Xaa is any amino acid
AAEPPLPAVDETIPDFTGVAKRLLLPLLLRDDLQLQIVGDGWVVRQSPAPGTPITPETVIVLELE

SEQ ID NO: 86618 - protein, 460 aa, Unknown
  Obtained from environmental sample
  DOMAIN (317)...(392): Mur ligase family, glutamate ligase domain
  misc_feature (1)..(460): Xaa is any amino acid
VFWFYHDRLAERRRQSGVAAAKYFLARGSRVFISDVCDRGRLDDTLNENQLYDGGMLLESEAGGHTDKILDYELIILSPGVRGDLDILKSAASKGIPVWSEMELGYRVSAAPFLAVTGSSGKSTTVSLLTSAMRAAGFETALAGNIGTPVIDVTPFLSKEAVVVAEVSSFQLETIDKFKPKVAAVINLMKNHLDRYDCEEDYYNAKKLIAKNLTMGEYLVLNADDSRLSRWADEFKGQTRIFMFGSRDCGGDCVYLSGKGINYRMNGVSGVIIDDTSAMKIAGRHNSINACAAAAAALCAGADPKLIGGGLCAFGGLPHRLEIVGEVDGVSFYNDSKSTTAESIECAVNAFGSKIVLIAGGKDKGCDFASIVDSVRQNVKSIVLIGEAKERMAAVWDGAAPITKAAALEEAVDIAFKSAAGGGQVVFSPGCSSFDMFRNFEHRGDMFRETVNRLASRKAR

SEQ ID NO: 86619 - protein, 440 aa, Unknown
  Obtained from environmental sample
  DOMAIN (130)...(303): Integrase core domain
  misc_feature (1)..(440): Xaa is any amino acid
MTKYREILRLHSQGISSRSISESLKCSRNTIRKVLERAEKEHIVWPLPDSESDLLLGQKLFGKRISSEQRKMPDLEHLHREMAHRGVNLSLLWNEYCETCRMEGSRPLMYTQFCYHYQEFAAKNKATLHIEHKPGERMEVDWAGDTASFADNVKGQPIAVYVFVAVLPCSGYAYAEGFLNQTMESWITAHVHAYEFFGGTTRLLIPDNLKTGVEKADWHSPVINKTYHEMAEHYGTAVIPTGVRKPKENASVERAVGMLSTWMIAALRNRQFLSLWELNEAMRQKLSDFNRKPFQKKPGNRESTFAEELPFLMPLPQKPFELSAWKIATVQLNYHIGADQMNYSVPYEYLKHKVDVRLTQMGEEALYHGKRIASHKRLLRVCLGSTAPTLSMCLKSIGNIPKGTPKRFPQWARYLSPLTEQNVKVIIGFPKGGTAGPKKL

SEQ ID NO: 86620 - protein, 706 aa, Unknown
  Obtained from environmental sample
  DOMAIN (368)...(547): Carbohydrate binding domain (family 11)
  misc_feature (1)..(706): Xaa is any amino acid
VIAATIFGRLRLLIHMMYDLTPYISTGALQFWVKGSNGAEIAWAALVDDENGDGKKTVVRLPMNNYGGITKDWTLVSIPLVDFGKRGVFWDAKKRVEVPEPFQWDKVCEFRIEIKKNENPSFRIWVDDIFIVSNVFEAKVVEDVKYWDDRDEVLDDVPVANKPAVKETDKFIAGGDPIGFAYVYGGKTAFKVQKTKSGAPVFTNYMDGSEYSGVTVSLGEGRFANLTNARTAKAAGIAFWGRGGEGVGNVGVGLLDNQGKNSAGVEVKVQTKVLLGDFGKIEPVWKYYMIPIRSFRPEGLYWDDSKNAEVSGKVDWTKIQEVRFSVGKGENKVPEGEPVTFYVKDLSVIEEIPGYVNPDDYWNAFKSNAPEVKLHDMETEAEQKWESSNGPKSEVSFKYSESGAPNGGKSALEVTYRLGDWVDVLFNYRDQNRPAEQRDWTKHWGLKFDFYTDKPYQPITVQVQDKGNEIFVAPSGGNKGWNEVIVPFKNFAKFPYYQPEDAVQNGKFDLDGVIVLDFKPAGEGSRGTFRVDNIRLTNDRVAKVKEDPANVAVTLTGSDKVITKKINEGLFGINVALWDGDMLLPATEKFVKDVNHHVLRYPGGLRADEDHWEEVLKKKDWMVDTDEFLEFCKKTNTTPMITVNFGTGTPEEAAKWVNHVNKVKKANVKYWEIGNELYGSWHANHCTPEEYGKRAREFAKQMKAAD

SEQ ID NO: 86621 - protein, 76 aa, Unknown
  Obtained from environmental sample
  DOMAIN (1)...(60): UDP-glucose/GDP-mannose dehydrogenase family, UDP binding domain
  misc_feature (1)..(76): Xaa is any amino acid
MAECSGQIQLTEDPYEAAKDAHAILLCTEWQQYASLDWKKIYNSMSKPALVFDGRNILNGEELKKMGFEFISIGKA

SEQ ID NO: 86622 - protein, 199 aa, Unknown
  Obtained from environmental sample
  DOMAIN (100)...(196): SpoU rRNA Methylase family
  misc_feature (1)..(199): Xaa is any amino acid
MRNKLTDELAVCGLKAALALAEFHPETINRLFVREDRFPLFTKVCKKLAERKRPYKICENEELERLCKTVHHQGVVMMIEEPAVEPLTREDLDLWATEGKTGLVLHEVGNDHNLGAIARAAAFFDVHFIVLNKNDEEARLTTSAYRVAEGGMEHVTVRKIGTQPGFLKTSQKKSCHRNLTSRAGAHRRLFCIPKDWAVK

SEQ ID NO: 86623 - protein, 306 aa, Unknown
  Obtained from environmental sample
  misc_feature (1)..(306): Xaa is any amino acid
MKTDKVLKIERHGYDFIPAEYLPQGADEYWQRNAQQAELFSKKTDSWRKLKPAEIEILVQNRNTCAKWDDFLVTDPFDPSLIRDSSFFGLVRIGVLQNVLLKHHDFCIPAGIRNSTIVSCDIGDDTAIQNCAFISNYIIGNNCILSRIDELQTTNHAKFGNGALKDGEDEEVRVWIDVMNEAGGRSILPFDKMITADAYLWAAYRDDTALTTKLAEITQKQYGSLRGSYGVIGSKAVIKSCLIIKDTAVGESAYIKGANKLKNITIHSSTDEPTQIGEGVEMVNGIVGYALPRFLRLPGCAFYHGK

SEQ ID NO: 86624 - protein, 97 aa, Unknown
  Obtained from environmental sample
  misc_feature (1)..(97): Xaa is any amino acid
MQNEGQVRIPSGCAISGIIDRSGRRMSGEAIIKSIGVMHDRSNGLGGGFAAYGIYPEYKDYYAPPLVLRINISKKRMRAIFGRHFDIINLFKIPPEK

SEQ ID NO: 86625 - protein, 323 aa, Unknown
  Obtained from environmental sample
  DOMAIN (7)...(323): Phosphoglucose isomerase
  misc_feature (1)..(323): Xaa is any amino acid
MSTQNISYNDKFLSTFLSASELESYNPAVAQAEKQLVSKTGLGNDFLGWLDLPAKTPRDLIKSVADKAGDIRDKIKDGFLISIGIGGSYLGAKAAIEFCSPSFDDLRKPRVLFAGQNINSDYLADMLELVKDREVAVNVISKSGTTTEPAIAFRIVREWMEKRYGRKGAAERIVATTDRAKGALRKLAKEEGYTAFEIPDDVGGRFSVLTPVGLFPLAVAGLDINKLLEGAASASAFCSGESVEKNLAGRYAANRNILFRKGYTTEVMATFQPPLHYVNDWWKQLSGESEGKNQTGIMPRGLDYTTDLHSLGQWMQDGLRNVF

SEQ ID NO: 86626 - protein, 378 aa, Unknown
  Obtained from environmental sample
  misc_feature (1)..(378): Xaa is any amino acid
GEFPTTEVSAQNPTVLLTSDSVVAKIVADDISGDTVVASGLIFKNLDRKVTSVFVQPIFNNLEQIEMRIKWTDEESTREFIKTLYKALPHENHTAVQTCGNVSELTITFSGRIFFDEISQIAVNRQIPFYFSGLRILVVSLLFFAIILFVYKPLRAKTAYYLFEYKFDTVNKKQNIVYVCLVILTILFSGFCVYTSISEQYSNTTMNHQYNRYLVDAFLAGRTNIDFGHPEKLLNAEKPYDYYWLATNGYERGVDWSWDVAYYKGKYYTYYGPIPAALLYLPYKLITGNYLSHHTGVFVFAAISVLFLALLWRFLVKKYMPNARFAFYLLSFLALFLVSHLSYGIRHPSVWLVVQVAGFAFIVAGTFFLSKSVDKESV

SEQ ID NO: 86627 - protein, 401 aa, Unknown
  Obtained from environmental sample
  DOMAIN (246)...(389): LeuA allosteric (dimerisation) domain
  misc_feature (1)..(401): Xaa is any amino acid
VIAGCDIFLTAGKNPEYALTTLKTAKSSGADRIILCDTNGGAFPDMIEKAVKEAAKIVSEADSSSGGDGSHCALGIHAHNDADMASANTITAVLAGCRHIQGTLVGFGERCGNTSLAAVIPSLELKLGFRCLPEEKMEKISEITRIIAETANVAVPGSMPYVGSHAFTHKAGMHADGILKLSKSFEHIDPSLVGNDRHIVMSEVGGRSAIAERAKKIDASLTRDHPVTAALAQKLKNLEAEGWQFEGADGSFDLLVRRELGRYKPLFNIEAYRVVSEHPTGETIACSHAWVKVHVDGQEEIAAAEGDGPVNAMDGALRRALKHFYPELHDVRLTDYKVRVIDGGAATAAKVRVLITSSDGRQNWTTVGVSEDIIDASRAALVDSIEYKLIDDIERRFKAYL

SEQ ID NO: 86628 - protein, 71 aa, Unknown
  Obtained from environmental sample
  misc_feature (1)..(71): Xaa is any amino acid
MGTISVEYSSNLYWLGRYAERAYTTLNTFFNYHDKSLDKDKNAYKEFLETWTSRTSTAITSCQSVHGPPNG

SEQ ID NO: 86629 - protein, 239 aa, Unknown
  Obtained from environmental sample
  DOMAIN (57)...(214): Bacterial regulatory proteins, deoR family
  misc_feature (1)..(239): Xaa is any amino acid
GQTPRRRNTLAQLLEVSQVTVRKDLDHLEDRGLIRREHGYACLHKMDDIGKRISFNYDIKRRIAKAAAAMVEEGETVMIESGSCCALLAEELALAQKDVTIITNSVYITNFLRNAPHTKIILLGGYFQPASQTVVGPLTRKYGEVFFSDKFFVGTNGIMPNYGFTGRDHMRSQTVMDLAEYARYIFVLTDAEKFNRQGVLGMLRFEKVTGVFTDTRIPAETEKLLLDKKVVVNKVAERE

SEQ ID NO: 86630 - protein, 100 aa, Unknown
  Obtained from environmental sample
  misc_feature (1)..(100): Xaa is any amino acid
MSDRPRTSALLVLSCWEPVCRDPKAEGYGDEHQRFGFPNGSNDTAQVLEYLRVLKNEGFFNTENPYVFSFEVKPFKDEDPDTVVANAKRVLNRAWALLED

SEQ ID NO: 86631 - protein, 80 aa, Unknown
  Obtained from environmental sample
  misc_feature (1)..(80): Xaa is any amino acid
MTNKYLIIGAISGDIIGSVFEWHNVKSLDFNLFCPRNRFTDDSVLTLATMHALVNNIDYAQAYHTLEENSQTQVMAICRT

SEQ ID NO: 86632 - protein, 75 aa, Unknown
  Obtained from environmental sample
  misc_feature (1)..(75): Xaa is any amino acid
AALYDLKKKCQVYKNGLLIAPETRTSSPLRIVRKESGESVSVAGIYPVGEGAGYAGGILTSAADGLRLAFSMLWQ

SEQ ID NO: 86633 - protein, 56 aa, Unknown
  Obtained from environmental sample
  misc_feature (1)..(56): Xaa is any amino acid
MGDTLQINALELGKLLADHNGLKVVVMDMRSLNFWTDFFIIATVTSNTHLSGLQRQ

SEQ ID NO: 86634 - protein, 520 aa, Unknown
  Obtained from environmental sample
  DOMAIN (24)...(49): Tetratricopeptide repeat
  misc_feature (1)..(520): Xaa is any amino acid
MAEEDWYAAAEYLIETLRINPAHADATSALAECYYELGEFDQALVWVRRARSLSRTDTSLTNLEASILVALGRLDEASVIVNQVLQREPYNKEALFTAAELDIARGRAGDAVLRYRSAVNRYPDDRRLLVSLALVLGSLGDVDSARAYIERALLAHGGDYRVHYYAAYLASQAGRLADAVAHVQNSLYYRPGFTPAKFLLASLRYRQGQYEEAARLADELINLNRDDSLSWYLKGVSFIRLGRFSEAQSVLSTAANINGDDEFIRAALEELLITRTRIEDSARSRWASWHFARARAFRINNQLEQALFEYRRGLRLNPYARDRREYAELLRLQGYPARYLEELKFMQNLGMADTSLNDAVESYNALLSNALFRRWDVDPVMISTPHWKLAVFSLASQSTFYHADAGVGASSYIKDLLAHERNILPMDVELRQPSFSAAFRTAREMNADYFLVLSVSENERDISIKGELFVARTGSPAAVFNAFRTGPERLRYAARGIVDQLSSALAFRAELLLRRQDQGL

SEQ ID NO: 86635 - protein, 96 aa, Unknown
  Obtained from environmental sample
  DOMAIN (2)...(95): Sigma 54 modulation protein / S30EA ribosomal protein
  misc_feature (1)..(96): Xaa is any amino acid
MNIDIKSLHFTMNDDVRDYLNKKIERIHNAESMIVDLLITIKKEKDFDAEATVNFRWGVSIHVKEADFDITAAIDKMMDKLELKIIKEKEKVKEKR

SEQ ID NO: 86636 - protein, 240 aa, Unknown
  Obtained from environmental sample
  misc_feature (1)..(240): Xaa is any amino acid
MQTRKSTKSAPQYKTKSNFRFADFFIIVFFLSLAFISIILFRQDLLQTLGIQNKDPAGIVIVKKNIVQRRLGDRVLWDRLVNDSPVYLGDLIRVADISSALLDIENNSIDLDENTLVRIARSADGEGFQIELSSGKVSVSSGADAKSVSLEINGQNIKTGGPGTVMSASAGKAGVSVQVTEGSAQITKSDATSRAAGSPARNITSGEKIVMDTAGREVFEKTVAVMRPGSNARYLESDNS

SEQ ID NO: 86637 - protein, 89 aa, Unknown
  Obtained from environmental sample
  misc_feature (1)..(89): Xaa is any amino acid
LGISLPHLANITGWLLAEVGRQPWIIYGLMPTDKAVSVGISRGEVIFSLLAFLAIYGILSAIMVYFMRQEILRGCINKKITKKLTNTNT

SEQ ID NO: 86638 - protein, 684 aa, Unknown
  Obtained from environmental sample
  DOMAIN (1)...(164): Glycosyl hydrolases family 38 N-terminal domain
  misc_feature (1)..(684): Xaa is any amino acid
VGKKVNKELLGYEADTLWLPDVFGYAAALPQIMAGCRIKYFVTSKINWNDTTRFPYETFIWRGIDGTGVKTHFLSTIGPGAGYNGRVVPEELSAVWNAVQHKEVQSACVKSIGEGDGGGGTLRADLEMARRLGDLEGTPRAAWKTVSAALAEIFESGEFPEWRGELYLELHRGTYTTQARTKRNNRLLEFALRRAEFFCSLAVIGNQGEYPHEILLDCWKHTLTYQFHDIIPGSSIGRVYKEAEADSAEMLTKLAQTCEIGKHRLVKAMYTSKETAVFVFNDLSWERETVVTISEDLAEKAAALQSADGEVYPVQRYIDYDGNKRGVFSPKMPSLGWTRLAVLNENKEEKTPFIWKKNILESPFYIITFDMVGRITSLVDKRQSREMVMPGGAFNALITAEDVPVFWDAWDIDADWTKHIRQETRLVSTELTAYGPVCFRLRRTYEIGEASRLVQDMVCYAGDPRIDFETKVSWHEKWRLLKVEFDTAIDAAQVRCEVQYGHILRNTHRNLMQDRARFEICAHKWISLEEEGCGIALMNNCKYGHDVEGGRMRLSLLRSPIAPDPEADRGEHYFTYSILPFAGHFGDSGVIRSAYELNSPAEALVIPVSQIADDHDAESFCTVDGNQVIIESVKAPEDKTPNELILRLYECLGGKSRYSFCISAGNCALRPRPICWKRIQKSYS

SEQ ID NO: 86639 - protein, 324 aa, Unknown
  Obtained from environmental sample
  DOMAIN (71)...(121): Flagellin hook IN motif
  misc_feature (1)..(324): Xaa is any amino acid
VYRPHKRIQQRSLRRERHYPQQFSFPNIRFVANVNGNTDRSGDGVFDSSYIYRINGQNSLESQAQPGFEGVITLSGAEGDINVPYYPTDTVMDIITRINNSGAEVVARLNREGKFSLKGTPAEMIDGRRENPDFVIRHVEDSGHFLVGYAGVLLASGAEGAYSWDRADAVTSLRGGAQDYALAPVAHPSGWIEVNPALLKDPTSVAAGFGYNGRAANPGNGDAAAEMALIRNSPVMVGKLATFDDYFADSVGRIGLLGEQAASALETENKIMKYLTDWRSSISGVNINEELSNMLRYQQGFNAAARFITTVNSMYDTIINRMGV

SEQ ID NO: 86640 - protein, 512 aa, Unknown
  Obtained from environmental sample
  DOMAIN (344)...(478): HD domain
  misc_feature (1)..(512): Xaa is any amino acid
MARAAKEVITFTKINMILSIIKVMIVPFLFSFIHILSKIKSKGMRILQHVLLSVNTLVVSAIFIIIAASIDAISILSNYLFNSSVLLMVLFSLGCLVFLQYKWIKSASLKRDCSQAKTILIGSLIALVSLSGDLAASRSHYLFNWMELIPFMWLLTLVFILNNYANQYNNFSFNVANLAAYVYTAVKLPVLILDDKGDIMLCNTASESFFKKNAEQLTILKLFDLFDFAENSLSDASLSLHRHKKDASVFNCDAVCRIEGQKCQISLNYVYDKFDEMICTVVIVTDITEKEELIRQLNESHAKIEQFNKELQSEVDRQTESIRNLQKAIVYSMSDLIEKKDGYTGVHTKRVSEYVAILLRELARRGHQFTESEIQRMAESSLLHDMGKIAIPDSILLKNGKLTDDEFDVMKSHSAKGADSLHKSMQFAKDNDFLNNAFIMAKHHHEKWNGGGYPDGKQEEEIPLLARVIAIADVYDALRSQRSYKSPFSREKANQSYWKKTGASSILSWLTC

SEQ ID NO: 86641 - protein, 116 aa, Unknown
  Obtained from environmental sample
  misc_feature (1)..(116): Xaa is any amino acid
IQELESAKKAKFKNLSLLYYNFRSSNNLQRVKNRVENGGHDVPGDKIHDRYFKTMNNLCEAFKLADRAYFFDNSKEEVNGFFDFFAEKNKNQLFLSDPDSIPKWFGKFILDRLRNE

SEQ ID NO: 86642 - protein, 155 aa, Unknown
  Obtained from environmental sample
  DOMAIN (1)...(111): Beta-ketoacyl synthase, C-terminal domain
  misc_feature (1)..(155): Xaa is any amino acid
GYDATGDAFHLTHPALDGEGAQAAMRMALSSAEIAAGDIDYINAHGTSTPLNDKYESIAIERVFGEAAKKVNISSTKSMTGHLLGASGGVEFVASLFAIRDGVIPPTINYEDPDPECALNYTPNVAVKREVKYAMSNTFGFGGHNASVIIGRYDS

SEQ ID NO: 86643 - protein, 72 aa, Unknown
  Obtained from environmental sample
  misc_feature (1)..(72): Xaa is any amino acid
GYHDRSDERNIGFHPLDDEPVRLVFMIAAAQNQHAYYLQTLSWISARLKNKVLRDSLLQAQTPQEVYNLLTA

SEQ ID NO: 86644 - protein, 181 aa, Unknown
  Obtained from environmental sample
  DOMAIN (4)...(142): Glycosyltransferase family 28 N-terminal domain
  misc_feature (1)..(181): Xaa is any amino acid
MKKILLTGGGTAGHVTPNLALIPGLKSAGFDIHYVGTSAGMERGLVEKAGLTYHCISAGKLRRYFDFKNFTDAFRIAVGFFQSIFLLIKLRPAVLFSKGGFVSCPVVWAAWLCNVPVIIHESDMTPGLANRQSMPLVKKICSQFPGNGGALARPQADIDRPAGALRTVRRRRRYGAGAIRV

SEQ ID NO: 86645 - protein, 579 aa, Unknown
  Obtained from environmental sample
  DOMAIN (144)...(578): Bacterial DNA polymerase III alpha subunit
  misc_feature (1)..(579): Xaa is any amino acid
FYYRPRIDEELLSKYHGGLIALSACASGEIARLIQAGKTDEAEKKAVYYRDLFGKDENGNPNFYLEIQDHGIPSGGLRGSDLSQKDINKFVADISQNTGIPLVATNDVHYLDKDDNIAHDALLCIGTGKVRTEEKRKKYYGDQFYFKTGDEMAALFSEYPQAISNTVLIANRCDADIPKISVKELPGYLPEFEIPDGFESTDKYLRHISDRGLGERYAKDKAAGGKEWEDIQKRAEYELNTIINMGFTGYFLIVWDFIKYAREHGIPVGPGRGSGAGSIIAYALRITDINPLKYNLLFERFLNPDRISMPDFDIDFANEGREEVMNYVIQRYGKERVAQIITFGTLGAKAVIKDVARVLGISIPESEMITKLIPNRPNITLDKAVSEEAKLQELEKESRFTELFALARKLEGLNRHSSIHAAGIVIGKTPLIDFVPLYQEREDSKNDRGGSIATQYSMNFLEQCGLVKMDFLGLKTLDVIKHSQELIRLRKGKYSDFTIENIPEDDKAAFKMLGEGKSFAIFQFESDGMQNILKQTKPASIGDLTALNAMYRPGPMQNIPRFVEAKNGKQKISYPDAKP

SEQ ID NO: 86646 - protein, 259 aa, Unknown
  Obtained from environmental sample
  misc_feature (1)..(259): Xaa is any amino acid
LNGENTNLTSVTIPDSVTTIGNSTFGYCINLSSITIPNNVTTIGDDAFSSCRSITSVIIPNNVTTIGSSAFSNCTSITGIIIPNGVTSIGRNAFQGCTNLTAITVDANNNAYSSDDGVMYNKNKTILVAYPGGKTGAFIIPSGVTSIEDYAFMSCKITSVTIPNGVTSIGDSAFYSCSSLASVIIPASVTSIPSRAFAGCLQLNSVTFEGTISSDKFNNDTIFPAFPGDLRAKYLAEDGGVGTYKSTGIGNNKVWTKQN

SEQ ID NO: 86647 - protein, 378 aa, Unknown
  Obtained from environmental sample
  DOMAIN (1)...(348): TraG/TraD family
  misc_feature (1)..(378): Xaa is any amino acid
MIADILTSPADGKVDGSSRHWVDTAKDLLTGVILHVKFSNMSDKSLYGCLEFLSQAAAGNDKGAAMLDSMINAIHCDAKIHEIIANVARRNKSRPDDERGSVFSTAVTALQVFEDPMVRNCSSSSDFCLNDFKVFENPISLYVTVPFPDLDRLSSFLRIIVTFILRKFSQDEVQFGEQKLKHPILFLIDEFPTLGTFTTLEIMMGILAGYGITFYLICQSPSQIYKLYGEHTAIFDHCKFMMTYAMSDPKGAEMFSKMTGVESVTFANVSNSGNKHEAGTNNFSISEQTQQRNLMNADEIQHLPANQLLVFPQGAPAIIAKKNVYYSDPRYKDKINLPVPKNRSELLRECAGTTKTGWRQIMINSGEKTKDGNLDKNA

SEQ ID NO: 86648 - protein, 106 aa, Unknown
  Obtained from environmental sample
  DOMAIN (2)...(95): Sigma 54 modulation protein / S30EA ribosomal protein
  misc_feature (1)..(106): Xaa is any amino acid
MNTDIKAVHFTMHEDAKEYLNQKLERIHNAENMIVDLLVTIKKEKDFEAEATVNFRWGVSIHVKENDFELTPAIDKMMDKLESKIIKEKEKVKEKRKKGSADLIRV

SEQ ID NO: 86649 - protein, 352 aa, Unknown
  Obtained from environmental sample
  misc_feature (1)..(352): Xaa is any amino acid
VLGGVIASLERTSGGQGQKKSSKRSSNTKGEDNIISNGSGIVVNKGQAVLIIDNGRIAELCAEEGRYTFDQSSEPSVFYGGLGKGIVEIFKNVGERFKYGGQPGKEQRVYYFNTKEIMGNKYGTPSPIPYLIVDPNINLRLTISLRANGEYSYHIMNPIAFYGNVTGNVEDVFTRDKIDSQLKSEIITVLGPSLAKLGAGLEYHMISAQTDKLAEILNEALTAKWREGPGHRNRQLRNYLYRHGGRRNTAQAASDGGGNARPHNGCRVAGERAERRYAYCRREHQRRDGGLHGHGHGKHGRRHELPEPVCDGSGAAGKRAAGCGAANCGRGSCRSRQLGLFLRTRGKRRQVL

SEQ ID NO: 86650 - protein, 766 aa, Unknown
  Obtained from environmental sample
  DOMAIN (646)...(733): Hpt domain
  misc_feature (1)..(766): Xaa is any amino acid
MEWYLTVSYPIPGFLALNKAMNTVFFSMLSLILFLFIVINVFIARLESAMAEHNLQLLEANKKAESASRAKSDFLAKMSHEIRTPMNAITGMAELLLREELSDDALGYAQDIKQAGNNLVSIINDILDFSKIEAGKLEIIPVNYMLSSLINDTVNIIRTRIMEKPIRFFTNIDGTIPNNLIGDEVRLRQILLNLLSNAVKYSDKGHVGLTITADKRDDKQIWLRIAVSDTGKGIKPEDQEKLFDEFVKVDVKKNQGIEGTGLGLAITKNLCAAMGGYISMESEYGKGSVFTAVIPQGIGKEAPFAVVEEPEKKKVLVYEGRINYAKSVCWTLENMKVPYTMVTNQDDFASALYREEWFYVFSSYGLYEKIEPLMGQSDTAFRKGKKPPLALMVEWGTEAYIPGARFVSIPVQSLSIANVLNGREDNKGYIKSSGMVRFTFPRARILVVDDISTNLKVVEGLLAPYQAAVDTCLNGLHAIEQVKLKASQKLEYDIIFMDHMMPEMDGIETTAAIRAWEKVEQENGVMRKQIPIIALTANAVLGMREMYMENGFNDFLSKPIDVSKLDEILDRWIPREKREQGIAIGDQRTDYDSALNLYPDNSNRNPQSQVASPKSLSSPQSLIPIPGVDITKGIAMTGGTLNAYRQVLDIFCEDAKKRLPLFQTVPEADTLPAFVTQVHALKSASASIGAAELSALAAGLEAAGKAGNMTFIRENLPVFADRLVELAVEIRDWEKAMKKPDSEKPATADRLDRKTVTLLLHELAAA

SEQ ID NO: 86651 - protein, 204 aa, Unknown
  Obtained from environmental sample
  misc_feature (1)..(204): Xaa is any amino acid
MESIRDAGACDWVVKNGQILGCIVFKDTPRDDAAEAVNQLKSLGVSKTCLLTGDHFQSAKKIQDAVGIDEMQCELLPEQKLKYVEKMMESHTVTVIGDGINDALALSQAHVGIAMGAMGSDTAIQSADIALMNNNLSNIPFVIRLAQKTKNIIYQNIILAFSVSIVMIFLAGAGIITPIMSAFFHNIGAFLVLLNSGRVMSKNK

SEQ ID NO: 86652 - protein, 435 aa, Unknown
  Obtained from environmental sample
  DOMAIN (54)...(425): PEP-utilising enzyme, TIM barrel domain
  misc_feature (1)..(435): Xaa is any amino acid
VSACGTGILKSKGKKGYAWAILLSPRGIILPWKFPFYGQSNVYAGTATLIEPDPKGSGLLDFIALSKSFLKKFHVRCNADTPKDAALALSFGADGVGLCRTEHMFFKAERIHVFREMLLSTDNKEREKTLAKLQVMQRDDFYGILKVMAGKEVTIRLLDSPLHEFMPHNDDELAAYMAHVAKGKKTKPSKSEILAQIDGLHEFNPMLGHRGCRIAVSYPEIYAMQIRAIFEAAYKLRAEGVDVRPEIMIPIVMNASELKLIAYGKKIEGANYKGVVDIEDELRTQKKAKPVEYKIGTMIELPAAALGAGEIAKYGSFFSFGTNDLTQTTLGISRDDFTAFMPDYTLFDLIQGNPFSTLDPRVKELIAMATARGRLTRPDLTCGLCGEHGANPGNVKFCMEAGLDYVSCSPYSVPIALLAVAQSELEGSPANSAIM

SEQ ID NO: 86653 - protein, 58 aa, Unknown
  Obtained from environmental sample
  misc_feature (1)..(58): Xaa is any amino acid
AWGSKFTFKDAYGKTFKMPMQGKTGTPQNWSDAWTIGYSAYYTTAIWFALTNPEIRWA

SEQ ID NO: 86654 - protein, 64 aa, Unknown
  Obtained from environmental sample
  misc_feature (1)..(64): Xaa is any amino acid
MAKKKIALVGAGQIGGTMALVLAQKQLGDVVLIDVVEGVPQGKALDIMEGRLQSIPSADLSWKT

SEQ ID NO: 86655 - protein, 466 aa, Unknown
  Obtained from environmental sample
  DOMAIN (201)...(462): Penicillin binding protein transpeptidase domain
  misc_feature (1)..(466): Xaa is any amino acid
MQLARLISDNAQQTGGGGLGRKIVETVNALRLEARFSKNEILEMYLNSLPFGFNTEGAASAARNFFSGELSMLSPAQIFCLAVIPRRPSLYNPLENPETCVKAAEELQAAFSKNKKLKDAWPLLAEINGEDWKYAASSARRFAYPFALPHLIRYINAGLTPDRKNPRGEIHLSIDLALQRYIEGLIAGNVDRYYNSRLTNGASIVIDNDNGEILAWVGSADFNNSEAAGQIDGVVALNQPGSGMKPFLYAMALENGFKPIDIIADIPVNFGESELYIPRNFNNRFNGPILFRAALASSLNIPAVYLLYRLGVQNYSNLLFSLGFDSLEQSAEDAGLGLALGNAPVSLMELVRAFSVFPRDGVYMPLTWELGGTEQWNRVTARREVAQKRIFSADTARLICSFLSDSNARVMAFGRARNFQTPFTSMFKTGTANQYQSIIALGATPKYTAGVWMGNFTGETISARPI

SEQ ID NO: 86656 - protein, 83 aa, Unknown
  Obtained from environmental sample
  DOMAIN (23)...(52): IstB-like ATP binding N-terminal
  misc_feature (1)..(83): Xaa is any amino acid
MFTENTLTKLHEIRLGVMADRFRQQTLDPAMNGLAFEERFGLLVDAEWSARKSNRLKRIIKNANYAISGACVEDMLPFRPEAG

SEQ ID NO: 86657 - protein, 630 aa, Unknown
  Obtained from environmental sample
  DOMAIN (338)...(430): Helicase associated domain (HA2)
  misc_feature (1)..(630): Xaa is any amino acid
METPLGGLVGYKMRFEDRTSLQTKIKILTDGMLLQELKLDPWLSKYGVIVVDEAHERSLNIDFTLGLLKRVLESRRDFKVIISSATINAQVFCDYFGGCPVVKIDAQRFPVTLIYDAPYSGVPPHFAGTDNGADNGGDTAAEALLMKIEKIVTRFIAEKREGDILVFLSGEKAIKDCMNRLSLCRAGGKLHLIPLYGRLGKEEQERVFDPAPKGKTKVVLSTNIAETSVTIEGITAVIDSGLSKLNWYNPNSFTSSLVEAPISKASANQRKGRAGRTREGSCYRLYTRDDFEERPQFTTEEIFRTDLSEVILRMSDLGITDFEGFDFISTPGYEGLEAGIETLNLLHALESDRTLSNIGKMMTEFPLAPRQSRIIVEAILRYPNVLRETLVAAAFLSTQSPYLLPPGEETEARKAHGRFRDDNGDFVSYLKIFKAYCDSPHKTRFCEKNYLDEKAMAEIVNVVAQLEEIIANLKIPVLAGGNANDYLCCIATGMIQFVCVREGAAKGGGGARGGGGKHGASKKNVTYRSLTADRITIHPGSVMFRTDPIYIVAGEIVRTSRMYAMSVSPLSKEIMEKLGLGTRDWGLGTGEERKEKKSHAEAHRTSGTRHKGRKGEKRKKSKKRDRGDEQ

SEQ ID NO: 86658 - protein, 183 aa, Unknown
  Obtained from environmental sample
  DOMAIN (1)...(173): RecF/RecN/SMC N terminal domain
  misc_feature (1)..(183): Xaa is any amino acid
MLEELSIRNYALIDSITLNFRRGFNVLTGETGAGKSIIVGSLSFLMGAKAEIDVIRSGCEEAAVSAVISLNKNNADANEWLKARDIECEEDTVIVRRNIKTSGRGSVFIQNIPVTQKDLSEFMGLLFDLHGQHNHESLLRRDSHRRYLDSFAGIENEVKRFSSLFLGTDGQAQNYGSFPKKRT

SEQ ID NO: 86659 - protein, 291 aa, Unknown
  Obtained from environmental sample
  misc_feature (1)..(291): Xaa is any amino acid
MEASLKSEREREDRLKILNYAVDEIPKAAIHAGELRELENEAQKLSDFEKLAGFINTAASCFTEGEQSALSLTRRAKNALDGASLVDTSLGEINRRFENLYYEAEDIASEFRTYKENLAFDPQRLEEVNERLAFLNKLKKKYAKDSQPGNEEEAILSYKTNAQAEIEALSGAEENRDKLKEAIGVLEKAIVSKAQVLKEKRTAAAVKLSQLITEILKNLGMPNARFQAAVLPRKNEGQISYGPYGTEDIDFLISANTGEPLKDLAKIASGGELSRVMLAIKTRPFIRYAAR

SEQ ID NO: 86660 - protein, 123 aa, Unknown
  Obtained from environmental sample
  misc_feature (1)..(123): Xaa is any amino acid
MSLDRRVSTGMPGLDQAIDMLRLGDNVVWQVNSIEDYLQVVRPYINQAKKDKRRLVYFRFGNHDPIMEDDEPSVVYKLDTSEGFELFAAKIHNFIDKEGLEGFLCVRLPQRFIEELAFGHDGG

SEQ ID NO: 86661 - protein, 264 aa, Unknown
  Obtained from environmental sample
  misc_feature (1)..(264): Xaa is any amino acid
MSFCIEELFAVICNNDLPCAKREEDLFGFVQENTVLERQYVQSDIDLLSDYFSRSFNIAVFSEPAQKIFELSPSVFDLIFHAWMSELPIETEIIAFVRRALAAAQACGEQKRKAAENAASDRGNESVRVVLAAASKVQFEVHRMRGLLRFSPDSNGTYIAFCEPDHFILPALGEYFSSRFGETPWVIVDVKRKLCLSRRLGEKVKLTAIKTAEDISASGGVFCNDEWEELWRHYHRTVNNESRKNLRLQRQLMPKRYGLGQSVM

SEQ ID NO: 86662 - protein, 171 aa, Unknown
  Obtained from environmental sample
  misc_feature (1)..(171): Xaa is any amino acid
RGKGEGERRGGEKGGGGGEKEGEGEGGEGKKGGGGEGGEGGGEGEEGGRKGKGEKGKGGGGGGGKGGEGGGKKGGKGEGGKRGRGREGREEKKKGGKRKGGREKREGGGRGGEGKGERRGKKKGGGGEEGGGGLGEEGGKGWQGSGGGGIPSGHLGGFSKTRRSSLKARMG

SEQ ID NO: 86663 - protein, 541 aa, Unknown
  Obtained from environmental sample
  DOMAIN (448)...(536): Response regulator receiver domain
  misc_feature (1)..(541): Xaa is any amino acid
MRKTYNYSAKLALLHRFWLIVASILLSSVLLLMFILFQKSHRAEKRLETLVKKRTNELVLQSATINAAFDVTPAMVCCKDLNLRFTRCNKAFEKYFNLREADIIGKGNVDGLGIPAEVAAQYIELDRKVINDGVMVVVEEHIPSADGTGQLFETSKVPLVQNGQITGLLVISHNITHLKAMEEQALSASRAKSLFLSNMSHEMRTPLNAITGMTVIGRKAKDIERKNYALDKISDASTHLLGVINDVLDMSKIEANMLKLSPIEFNFEKMLQKVVTVINFRVNEKRQKLDVRLDDAIPQTIIADDQRLAQVVANLLSNAVKFTPEEGSITMEASYIGEENGVCTIQVSVSDTGIGISGEQQKILFNSFQQAESNTTRKYGGTGLGLAISKSIVEMMGGKIGVKSEIGHGSVFTFTVQAQKGSYIKDAPDPEDAADKGKADFTGIFEGHHIMLVEDVELNREIVKALLESTRLAIDCAENGMEAVRMFKESPDKYALIFMDVQMPEMDGYEATRTIRAMDIPKAKTIPIIAMTANVLGLGHQ

SEQ ID NO: 86664 - protein, 348 aa, Unknown
  Obtained from environmental sample
  DOMAIN (39)...(184): GAF domain
  misc_feature (1)..(348): Xaa is any amino acid
MGKKTASQQAPQELAWRRAAIVEALNKSVEIFTLHEEKTFEQVMTNGIRPFADAVGLDRVVFYKTVDIQEGKRLGQIYRWDKSEGGLMSLADELKILPNIPVMEHWIAVAMKGECVRMRESNYNKDQAAFLRVYGIKSILMMPIFTHGDLWGIVTFQDHTNDRYFDEDCFDLLYTAARIFTNAVIREEMKRREKAEAALNRAAIMFLSQKEETFEATMTAGIKEIADLFKLDRFSIWRNSPKPDAVHVSQIYRWDRESGGTTMPTKGLVDVTYAQLAPRWEKLLASGETINSPGRLLPEAAMLNSFGCVTALITPIFINNVFWGFALSEDRRNERFFEKGDIDMLRSA

SEQ ID NO: 86665 - protein, 298 aa, Unknown
  Obtained from environmental sample
  misc_feature (1)..(298): Xaa is any amino acid
VGELLLFIPRRFARKYLAGGAGTYTRPSGESDTWTKQSATAKTATPTQTATSTERPNAEADFSVGLTVDGKGVVITGYKGTATTVRIPATIQGLPVKEIGERAFWGISSPGFNYAVNQNITSIMIPEGVTTIGERAFEDCTALRTVSLPDTLTSIGYAAFDDCKALDSIKLPVGLKEIRSSVFRGSGLTSISWPAGLTRIPYETFQRTKFRNVTIPEGVIEIFDNAFYECTNLTSVTLPTTIREIGSWAYGNCSSLTTISIPETVTKIEFGPNPFEGCRNLKLESQAALRRVGYTGSF

SEQ ID NO: 86666 - protein, 63 aa, Unknown
  Obtained from environmental sample
  misc_feature (1)..(63): Xaa is any amino acid
MVIIGNEAKGMSLGLRKICNKIVKIPMEGNTNSLNVSCAASIIMWEIYKNSPVVLSNQEKIPQ

SEQ ID NO: 86667 - protein, 97 aa, Unknown
  Obtained from environmental sample
  misc_feature (1)..(97): Xaa is any amino acid
MNLCAKAEISAMPILVKYRKFPVSLIRPLAYIEERQVIECADEKNILKAACTCPYGINSKRRDIRQRIMALTGGSGAVKRRILKALSAAKQDFLYEA

SEQ ID NO: 86668 - protein, 378 aa, Unknown
  Obtained from environmental sample
  DOMAIN (163)...(303): ATPase family associated with various cellular activities (AAA)
  misc_feature (1)..(378): Xaa is any amino acid
MAKILVVDDEEIMRDMVADSLELNGHRCTVAANPQIALEQIAVVNPDLIISDYKMPGMTGLDLLKAVKKDRPSQPFLMMTAFGSIEMAVEALQNGADHFIEKKDFEHAEIIEHAVAMVLEKYKYRMENSVLKKRLCEKDFIGHSEKFVALNKFVETVAPTNASVLITGESGVGKEVLARALHYQSLRAGCPFIKINCAALPESLIESELFGHEKGAFTGALKTRRGKFELADGGTLLLDEIGEMPLAAQSKLLRVLQERTVVRIGGDDEIKVDVRIICTTNRDLKKEVENGNFREDLYYRLSVVPVHIPPLRERTDDIPDLLNYFIGKSTKKMVVLWKKQRRNSVYAFRANVARPYSSAGKCIARAMVSARHTLTPDF

SEQ ID NO: 86669 - protein, 858 aa, Unknown
  Obtained from environmental sample
  misc_feature (1)..(858): Xaa is any amino acid
IHGDEITASSAGTKDGYVFDAWYSGYTLRAGSKMTFPYVVESDLHLYANWKPSEEGSKNYTVKFDPNGGTFTAGTQTEFLVPAGDKLVSFPTPALSGDYHFDGWYTAPTGGTKVTTSATFDKNTTLYAQWKPLYVITFKAGDGATASKASDRTGPDGKLASLPTATKSGFTFNGWYTSSSGGEKITMGTEFTSNTEVYAQWINEVSVVYTITFNANGGSVSPSTGTTAGEGTLAVLPMPTRTNYAFAGWYTTAVGGTRVTESTVFPSNTTIFAHWTQLYTVTFNADGGSVSPSSAKTDADGKLAIDLPVPTKANNVFDGWYTAKTTGGLEVTESMVFTANTTIYARWTQLYTITFNANGGTVSPASARAEVDGKLESLPTPARAGYDFDGWYSTSAATGGTEITESTAFTANTTIYARWTLLKYTITFDPSGGTVSVESGVTGAGGKLASLPTPAARIGYNFGGWYTSADGGTKVETSTVFTADVTIYARWTLISYAITYSLGGGTATPANPTSYNIETSDITLNAPVRAAYEFDGWTGSNGTVKQADVTIPQGSTGAKSYTANWTALIFNITFDANGGRGLTTSTAKTAVGGKLSSLPTPTRDEYAFDGWFTGDGVKVTTSTVFEEDATIYAQWSVVRKITFDADGGTVLPASANTGSGGKLASLPTPTRKDYAFVGWYTAKDGGDKITVATVFDDDATVYARWSLFTDAAVTFSAGANGTLRVTVDNVPIASGASVKIGKDVAFTAIPNDGYKVAGWTINGVAGTDTSATYVEAGLSNVISVSVSFERRISVAAPNREIPSGATGEVVAIAPVKAVSGVMTLGPNPVKAGSVVALYWTGGKAVAATSGRPNLSWGP

SEQ ID NO: 86670 - protein, 329 aa, Unknown
  Obtained from environmental sample
  DOMAIN (124)...(168): RHS Repeat
  misc_feature (1)..(329): Xaa is any amino acid
FLGGVIARVLFSCGGDNDNGNGNVNGNGNGNGNSNGNNNGNGNENGNGNIQKIINEISYNANGVLSSYEEYEYDSKGNRTKYSIYSNGVLSQYFEYEYDSKGNLTKQSNYDANGVLGSYYEYEYDSKGNLTKQSNYDANGVLGSYYEYEYDSKGNQTKLSLYDANGVLGSYYEYEYDSKGNQTKWSIYIANGVLGQYNEYEYDSKGNRTKYSIYNANGVLSSYEEYEYDSKGNRIKSISYNSNNEVSGYTIYIYTSGVVLTGTSGDFLYSTNMDGTTISISYSGNGGTVIIPSQIDGKPVTGIRQQAFYNCTSLTSVTIPDIKEIADFT

SEQ ID NO: 86671 - protein, 130 aa, Unknown
  Obtained from environmental sample
  misc_feature (1)..(130): Xaa is any amino acid
MPKIEVNEEVFHELIGKRWSNRDEFEEALTCAKAELDEDSDKSLPAHERVLKIELNDTNRPDLWGTAGCARQLRIYQDGEIPEYPFFSRPGVPKQAGYEVHVEKAFNRYGLTWRGLSRMARQFPIRRYAT

SEQ ID NO: 86672 - protein, 505 aa, Unknown
  Obtained from environmental sample
  DOMAIN (442)...(499): Bacterial regulatory proteins, luxR family
  misc_feature (1)..(505): Xaa is any amino acid
GLVKKNGFRIDALSYYEKTKNYQGIVSLLGELTTQIPQDIVNYAAAILDRAPEDACYNIAFFADMHLRSYICQGLLQKSLELVKFYEAKFLKLPDNDIVKKRNLTRLYICWTYIRCLMSVTDDIFDYDIYTEKACKCVHEADSGKLDINYPGAWLSYAGSSRKGSPEEYIAAITRNQAHISQSHLKGFMAGELELAKGELEFYRGDTSSALSNIILAVKQTRACKQFGLMHRALFYTLRIAAAQGNFAQTEQVMQETKAQMDEVEYINRFMDYDISLSWYYCFLGMPEKTTEWLQEDFSPYNHAAFIENFGNQIKARFCYATRNFAPLLAYIEEMKARESILYGRVEMLAMEACIHYKMKNKKKAFSGLAEAYENAEPNGILMPFIELGKDMRTLAAVALKYTGNKIPKPWLEEVSRRAASYAKRRTHVISEYKKAYGISDGIVLSPREADILADLSHGLSRVEIATNRGLSVNTVKMVINMLYTKVGAENLADLIRIAVEQKLI

SEQ ID NO: 86673 - protein, 123 aa, Unknown
  Obtained from environmental sample
  misc_feature (1)..(123): Xaa is any amino acid
VFWGGVVDSEERYWRYLIFSYSDGTQRDLFISSGFVSYSKPYLFTYNSRPKKIKITTNKGKFKIIQLQDTPNFQFVDIRELFIDEESMLIEGVNELKIELIEVYHGTKYTDTCINSFFDIFSQ

SEQ ID NO: 86674 - protein, 376 aa, Unknown
  Obtained from environmental sample
  DOMAIN (263)...(302): WD40-like Beta Propeller Repeat
  misc_feature (1)..(376): Xaa is any amino acid
VQAWIRSARDSAPVPVVLYESPALFEQTNIITELLPEEVGGFTEIFKNRVVVPHNGSLADLRHVLHHEFVHAFVFGMIYGGSILRAAGAQVPLWFNEGLAELLSSGWERQADMFMLDRMLNSTVPPPSPALDGYLAYKGGQSFLYYIYSAGGDSLFNRMLVEFRLTRSAEAAIERIYAKKMEELGKDWLNELRRVYWPEVGRRINPETQASPVTAKGRSHINVRPRVSPDGRRIAFFSDKHDYTRIIITDTAGKELRRIGGEHSLGNSFESFRPMNGAIAWSPDGKRIAFIAKRGGKDEVRIVGAAKNGKTLRAVRPPLSSIGGLDWSKDGKFLTFTGTSYGQTDLYLYDLASNELNVLADSYESKDSPRFSPGRR

SEQ ID NO: 86675 - protein, 279 aa, Unknown
  Obtained from environmental sample
  misc_feature (1)..(279): Xaa is any amino acid
MVVNLAPTKVFTALAEAYNTGKYSLYALQGGTRSSKTYSILQLLILICAKADRLLVSVVSETLPHLKRGAIRDFHKMFGIFTGSPGWHGTDHVYTFPNGSRIEFFSANNESRLRGAERDFLFLNECNNITREAARQLMMRTRRETFMDWNPQAKFWFHEKYLNLPETWFHISTHWDNYHLEESIRTRIEATKYTDPDWYRVYGMGQIGKWAGKVFKNYRLEDLGEVYGAIDPYCLRYGLDFGYFPDPGAFVEAGLDGGNIYVFRERVVDEADTTSSRRY

SEQ ID NO: 86676 - protein, 478 aa, Unknown
  Obtained from environmental sample
  DOMAIN (202)...(336): ATPase family associated with various cellular activities (AAA)
  misc_feature (1)..(478): Xaa is any amino acid
MCLLAFVMLKMYSENPVKEISRTQLMEWMTNPTIKIDSLSLRTTPDGIEILGKRKLSANEKPRVVKPSLFGPEAVPTNEEPFRSYMLYVPDSVIAQWEALGKTVRVLHDENTWVNHILAFLPVLMIMGLFWFMMAKQTGGMGGRGLFSFGRSKAILINNDKNKTTFKDVAGCDEAKQDLEELVSFLKDPKKFDKLGGRIPKGVLLVGPPGTGKTLLARAVAGEASVNFYSMSGSDFVEMFVGVGASRVRDLFETGKKNAPCILFIDEIDAVGRQRGAGLGGGHDEREQTLNQLLVEMDGFAPNEGVILVAATNRPDVLDKALLRPGRFDRQVVVGLPDLVGREAILRVHLEKRKVPLDKEVNVKDVAKGTPGLAGADLENLVNEAALMAARFGNPTVTQLDFEEARDKLWMGAERKSLLMSEEDKRMVAYHEAGHALINLLCKNADPLHKLTIIPRGRALGVTLSCQKTSSDLINAWT

SEQ ID NO: 86677 - protein, 252 aa, Unknown
  Obtained from environmental sample
  misc_feature (1)..(252): Xaa is any amino acid
VQAYPDKKYSGTVSQVRLQPDVVQNVVTYTVVILPDNDDGTLLPGMTANVEFIEAREVNALTVPASVFRFQPPKEAQEKLKKMIDERKAARDGGGGGMDGGMIPDGGAGMIAVKDDGGMTGGGGRGDGQFKMDRERRKDGGGDGRRQGGGDGRGEGRREGGQGGGGKRPPAGVMGSRGVLWTLDENGTFKPVFVKIGLSDGVTTAVTGRDDLTEGMKIVVSEVRSDKDKKSSDKKKQNNPLMPQGGGGPRRM

SEQ ID NO: 86678 - protein, 71 aa, Unknown
  Obtained from environmental sample
  misc_feature (1)..(71): Xaa is any amino acid
VAVVRTGYLNFYAYSAVCPETGEDFTLRLPRVRTDVMNVFLGEMAAFLGGRECILVMDRAGWHVSRNCGWR

SEQ ID NO: 86679 - protein, 132 aa, Unknown
  Obtained from environmental sample
  DOMAIN (1)...(48): Ribosomal protein L9, N-terminal domain
  misc_feature (1)..(132): Xaa is any amino acid
MKVILNKDLATLGEEGDVKEVAKGYARNYLFPRGIALPYTPRMIKVIEGRRAEIEARKEQKRLDARGLKEKLNSFELSLTMPAGTNGKLYGAVTNQTIADELAKNGFQIERKRIELAGNGFKNVGTRPNLIP

SEQ ID NO: 86680 - protein, 482 aa, Unknown
  Obtained from environmental sample
  DOMAIN (221)...(376): Protein of unknown function DUF115
  misc_feature (1)..(482): Xaa is any amino acid
LSFWESNRKILIEKYPGLLEEITSQEDTLAPEDIKIETALSGDTSLCVKGIYVHSQRDPEREGQRLVQSVASGKEPVVVLGFGLGYAACNAAELGQPLIIVEKYKNLLLKALELRDITGLLQKKNIVFVIGGSGDGIINALGIVYDLVYPEHTEKRSAPAVIKNKALTELDKTWYGAIEEKIRTWAMKDEVNAATLKRFGKRWVRNLSRNKGAIRDYPGISRLENLAAKNGASSAVPVFLAAAGPSLDKISFLLGEIHKRCIVVAVDTNLRFFVKNGTPPDFVLTVDPQFWNSRHLDRCVSERTVLIAEPAVYPSVLNLPFKRIFLCGSLFPFGAFLEKHVDQKGRLGAGGSVATTAWDFARSLGAQEIWIAGLDLAFPCLKTHFRGARFEEISNSNSVRFKPVESWVSSALRDGGPFFARSSSGGQVLTDRRLSLYAAWFENQFSKYPQVRNFGIFQEGLAMTGLNLPMTNALSADLIMRS

SEQ ID NO: 86681 - protein, 83 aa, Unknown
  Obtained from environmental sample
  misc_feature (1)..(83): Xaa is any amino acid
MTDVKNIIAARAAKELRDGDVVNLGIGIPTMVVNFLPPGIDIILHSENGIMGMGPTPSPDEVNPDIVNAGGPAGYDKNRSHVL

SEQ ID NO: 86682 - protein, 189 aa, Unknown
  Obtained from environmental sample
  misc_feature (1)..(189): Xaa is any amino acid
AHLGAQDQIGRAFTARTDTWLRVCAMQLCALLRLGFPTAPGLPSLSLAAHRNSQAHSTKGTPSPSFPGFDMLRVCGFRFSFTPLAGVLFAFPSRYFCSIGRISYLALDRGRPGFRQGFSCPAVLRYRPGVLAISRTGISPSLSGFPNALPLCRGFLLTPPLSGGRPYNPAVAGGLGSSDFARRYSRNLF

SEQ ID NO: 86683 - protein, 317 aa, Unknown
  Obtained from environmental sample
  misc_feature (1)..(317): Xaa is any amino acid
MKYQTFARTTLEGGENHKKNNKPCQDRSFKFSGEGMHIAVVADGHGSDNCFRSEYGAQFAVNAARKGINAFIKDPRDDESKIPLKDLREENFAREVKKLAGTIVDNWIYMVSEHYKRYPITEENKDYTTPEGKTEHFKGLNNFQVDKTYRDLYLQEAAGGTSGRGGLLADDERPVTRHAYGATLIAAAVTEDFWFGIQIGDGKLTAFYPDGSYDQPVPWDDNCYLNVTTSICDDDAAERARVYVKKRNGSAAAIDAIGAIKKLEDSRPLPSAVFLNSDGVDDSFPIEDNMDHMAKKFYYSVLRMFIEEEANPAVRSS

SEQ ID NO: 86684 - protein, 255 aa, Unknown
  Obtained from environmental sample
  DOMAIN (156)...(210): Transglutaminase-like superfamily
  misc_feature (1)..(255): Xaa is any amino acid
RQIGESWVPSPASEHWFLLRILPQSDNRQKVKSLLWRIEPSPLDTLWQTSDSFGNSALAGQISVPHSYFHFEIEGAADVSGEPYTASGEPPRILLYPTELTRAHSGLTDFYNDTGRSAPSSAIDRIQHFSRAVHNRLRYERGATENSTSAAQAFDAGAGVCQDYAQILLAVLRLDKVPCRYVAGLASDYGETHAWVEAWTGDRYCAVDPTRDKLVDEGYIALSRGRDFAGSSIERGVFKGACRGTQKISLNMEIS

SEQ ID NO: 86685 - protein, 412 aa, Unknown
  Obtained from environmental sample
  DOMAIN (287)...(368): Helicase conserved C-terminal domain
  misc_feature (1)..(412): Xaa is any amino acid
MSDGADSFTSLGIEELLTDKLKERSIEKPTAVQSLVIPRLLAGKDTVFRSATGTGKTFAYLLPALQRVACEGGSLLICAPTLELCSQIKAEVDFLTQSLPASCRNTALLIGSVKIEKQIENLRKAKPVVIVGNPGRLLVLAKMKKLRVNNLRFLILDEADRLTAPECLEETKELLAIIESVTKRSSSREPANSVQSRLCAAACSATVGKKTSAQLGSLFESAEIVECADHEILRERIEHWALFSEKRRKAQMLRSLLSALQGKSKKARVKALVFTSRGDEADLILSRLLYHHVSAAGLFGKVNKKPQASAERTEALDSFREGRVVVLVSTDLAARGLDIPDITHVIALDVPADGEVYIHRCGRTGRAGKKGIMVTIGDETQMRPSCLSGEKLKIRVMPKELYQGRVCVPQID

SEQ ID NO: 86686 - protein, 198 aa, Unknown
  Obtained from environmental sample
  misc_feature (1)..(198): Xaa is any amino acid
MSEKKREKIFYTTAFDKNGFLVKAKDAEKKEDYICPECKDFLMLKKSGKTGKGSRRPHFAHHAVSPNCTPEGVLHKSFKLLLLEKIKKQITEKTPINIEWECLFCHTKLKGNLLFYAADIKEEYSFENCRADLALLDRDNNAFAVIEIIVTHKPEEVAIEFYKNNKIILIQIELENNAELDNIDAKISILFSVKYWFN

SEQ ID NO: 86687 - protein, 619 aa, Unknown
  Obtained from environmental sample
  DOMAIN (1)...(260): DNA methylase
  misc_feature (1)..(619): Xaa is any amino acid
VGERSGSVFVQISDENVHLVRCLCDEIFSKDNQVATICYKKPGQRSSNTLSILTDFIIWYCKDKEKVKYNQLYLEKSLSGLGGSHYNQVELKDGSIRTIKQEEIINPKLLPDGAKVFETTALTSAGSQSGDDCFNFNKKDYYPPPHKHWSCSIEGLKNVAKAGRIVPTNTTIRYKRYFNDLNVMELDNRWNDVGLYGESIYVVQTGILSIQRCLLMTTDPGDLVLDITCGSGTTAYVAEQWGRRWVTCDTSRIAITLAKKRLMTATFDYYKLAHPEQGVSSGFVYKTVPHITLKVIANNEPPEQETLYDQPEIEKRKVRISGPFTVEALPAPVVKPLDDDTHPAPFFHENAAKKQSDWMQELKASGILGRQGEKIQFSRVEPLEGTKFLHAEAETKETDRKKAVICFAGETRPLDIRMVTQALNEAETIRPKPVYIVFAAFQFDPTAAKHIDDTKWPGVTLLKVQMNPDLMTADLKKKVSSSQSFWLVGQPDVELIHIEKGADKGKYKIKVKGFDYYDIKQGIVNSGGTDKIAMWMLDTDYDGMSIEPKQVFFPMEGKNEGWDKLAKTLKAEINPDLIEKYRGTESLPFTIKDNTQIAVKIVDDRGIESLKVISVGANG

SEQ ID NO: 86688 - protein, 98 aa, Unknown
  Obtained from environmental sample
  misc_feature (1)..(98): Xaa is any amino acid
LRRVLKLLPNRSERIFLFSEDTWRLSGDKFVTEEMPAVSVKGKAKPVRIFAVVNFSGEDKGPQSLNEVRALLGIDPPDLSKVDVNADEKKYKIGEAQK

SEQ ID NO: 86689 - protein, 247 aa, Unknown
  Obtained from environmental sample
  DOMAIN (64)...(244): Adenylate and Guanylate cyclase catalytic domain
  misc_feature (1)..(247): Xaa is any amino acid
LASAARQIEYGKFDVKLYSKANDELGVLTKSFGKMCSALNVFGKFTNKDIAVKAMRGEIKPGGLPKHGTIFFSDIREFTAKSENFTKFFGAEASDKIVFWLNQYFTQMVDCVEKTSGCVDKFIGDAVMAHWGTASSAGSPRKDAFNCVKAALMMRKALYFMNSQRRAGDPANPSIRIGCGINSGVVTAGQLGSDLRMEYTVIGDPVNLASRIEALTKPLGADILIFRRYMETVGGQICHRGNAGRVS

SEQ ID NO: 86690 - protein, 276 aa, Unknown
  Obtained from environmental sample
  DOMAIN (1)...(258): Glycosyl hydrolase family 1
  misc_feature (1)..(276): Xaa is any amino acid
MVHNVLMAHGLSVQALRSLSPETKIGYAPAVGANYPVSDSPEDIEAARKSMFAINKDVPSLCASIWSDPIFLGKYPDELFEKYGQYMPKIGPDDMKIIAQPQDFVGQNIYNGDQIRADGKGGYESAPRETGYAFTAAKWPVTPESLYWGPRFFAERYKVPIFITENGLSCTDVVSLDGKVHDPNRIDFLHRYLRCLKKAADDGVDIRGYFHWCFTDNFEWGKGYTERLGLVYCNFTTQQRIIKDSGYWYRDIINQTAHNCKKPKNNFPIVVCFRVK

SEQ ID NO: 86691 - protein, 133 aa, Unknown
  Obtained from environmental sample
  DOMAIN (2)...(121): Ribulose-phosphate 3 epimerase family
  misc_feature (1)..(133): Xaa is any amino acid
GGTKVRFGREGRAPHRLLQEIKGLGKKAGISIVPSTPAGMLSELLPYLDLILIMAVNPGFGGQRLIPECLNKLRFLAEERRKHGLDYLLSVDGGINGETAASAVAAGADVLVMGSAFFAANDKKAFVDRLRSE

SEQ ID NO: 86692 - protein, 354 aa, Unknown
  Obtained from environmental sample
  DOMAIN (263)...(353): GMP synthase C terminal domain
  misc_feature (1)..(354): Xaa is any amino acid
MSGSAETPKGGREIIKRFLYDVCGASGDYKLGNYINTQIKQIREKVGDNHVLLALSGGVDSSVCAGLLSQAIPGQLTCIFVDHGLMRLNEGDEIERAFSKRNLKFIRVNAQKRFLAKLEGVTEPEKKRKIIGEEFIRVFEEESAKLGNIPFLVQGTIYPDVVESGGEPRPTGSAEYPGGKHGAVIKSHHNVGGLPEKLKFTGIVEPLSRLFKDEVRELGRKLKLPASLVNRQPFPGPGLAIRVMGEITEEKLDILRRADAILREELDAMKRRPNQYFCVMTGTRSVGVKGDDRTYDFVIAVRAVITDDFMTCEYAPLPHNLLSRISSRITSEIPQASRVVYDITSKPPATVEWE

SEQ ID NO: 86693 - protein, 389 aa, Unknown
  Obtained from environmental sample
  misc_feature (1)..(389): Xaa is any amino acid
MKMKLTAAIIAAFVIIMGCAGGPKASKADELDLAIRDTSDYLNDNIPKGNKIIILNIQSDYASLSDYIIDELIANAVNDKIFKVVDRAQLEQIRAELNFQWSGEVDDKSALEIGKFLGAQTIVSGAISELGDRYRMRLRALNVQTSQVQGQYNRNIAAGKTIAALMKGGKSANTVYGGRTASGNANDTTAANQTPSRQPATPSSPQGSTKPVTTTYKIGDTGPAGGLIFYDKGNNIGGWRYLEAAPSDLGPNKFITEDPGSLPKNLYDLWEKTDGDKGRGVGKGKYNTEFLMGIAQARGGFNWAIRLCDEYELNGYNDWFMPSRDELNFMYGNLHMKGLGNFRLEQYWSSTGWQDTWGSYSAWYINFEDGTAAYQNASQPRRFRPIRQF

SEQ ID NO: 86694 - protein, 181 aa, Unknown
  Obtained from environmental sample
  misc_feature (1)..(181): Xaa is any amino acid
LTERHIISEVPTSNKQILNEYLILKEQYDLLVYKRFARSAEQLLADEKQQLLFAEEAEQPETNEEKPLGLQAVKSFTRNKGGRKPIGPSLERRPRVIDIPESEKTCACGANLTRIGEETSEKLVIIPMQIYVDQIVRPKYACRQCEGTEEEDKPAVRIAPVEPAIIPKSIASPSLLATVFG

SEQ ID NO: 86695 - protein, 228 aa, Unknown
  Obtained from environmental sample
  misc_feature (1)..(228): Xaa is any amino acid
GLGVGISRAASLRITGEREMASQNAFWDVLIWLECPPAPRGVPQIEVGFDIDAYGVVHVSAKDLGTGKEQNIRIESSSGLNEQDIDRMEKEAELHAEEDKKEREKAEVRNEADSMIYATEKNIKDLGDKVSAADKAKAEEAMADLRKALEGGDLQVIKDKTEALKQASYKIAEDIYKQQAAAQQGAGKQPGGDTNMGGMGGGSSQTGSGGNSNNKGAEDADYEVVDDK

SEQ ID NO: 86696 - protein, 124 aa, Unknown
  Obtained from environmental sample
  DOMAIN (36)...(124): Hsp20/alpha crystallin family
  misc_feature (1)..(124): Xaa is any amino acid
MTLTNYSPVHNLNRVFDTLMDYARGEEAKAYAPKSYLAEKDGVYTLEVELPGVKKEDIQINVEANLLKISAIRKRENEEYKYEREFHLSDEVDSTNIKASNENGILTLALSRKPQAQSKKIEIT

SEQ ID NO: 86697 - protein, 418 aa, Unknown
  Obtained from environmental sample
  DOMAIN (166)...(307): HDOD domain
  misc_feature (1)..(418): Xaa is any amino acid
VIAAQRESEFAARESFLNSKEKTLRTKDNELSRILAQQNERLEKISQMTQEEAKKILLGNLEGQVRYECAQMIKEMKDQAKADAEKEAKEIIIQSIQRCAADTTVESTVSVVHLPNDEMKGRIIGREGRNIRSFEEATGIDVIVDDTPEAVILSGFDPIRREVARLALEKLITDGRIHPGRIEELIKKSEKELDKIMKESAEEVIFELDVHGLRPKLVEMLGRLKYRTSYGQNVLQHSKEVAIIAGLMATELGLDPKVAVRAGLLHDIGKSIDRETEGTHSELGAELASKNGENEIICNAIAAHHEDVPPISMYPILIQAADTISSTRPGVRRETLTNYVNRLTNLEDIADSFRGVQKAYVIQAGREIRVMVEPEQINDAQAQELAGQISQKIQDEMEYPGQIKVTIIREIRFTEFAK

SEQ ID NO: 86698 - protein, 162 aa, Unknown
  Obtained from environmental sample
  misc_feature (1)..(162): Xaa is any amino acid
GLTNDQIGRGAAPDRFVFENFLPNKGTQRRKIFEALKDEPRTVIFYETPHRIVKTLEDIKEVLGDVRVVIARELTKIHEEFLRGNAEELLKHFATRQPRGEMVILFNTRITSPSTPLRDRPSTPLRDRPSTPLRDRPSTPLRDRPSTPLRDRPQPPDTPKGR

SEQ ID NO: 86699 - protein, 75 aa, Unknown
  Obtained from environmental sample
  misc_feature (1)..(75): Xaa is any amino acid
PRQIGRVNLGFALLRAIQQLGKKVIVLSVLNPVYIESVPWVSGAVAVYSYAPESFAAGFSAIIGRIPAQGILPYE

SEQ ID NO: 86700 - protein, 66 aa, Unknown
  Obtained from environmental sample
  misc_feature (1)..(66): Xaa is any amino acid
MTDNLAEIKTAYHLYTDEDIAQKLIYVESTRGCPFECEFCLSAVKSDGQGSAVREFPLSRLATSRP

SEQ ID NO: 86701 - protein, 97 aa, Unknown
  Obtained from environmental sample
  misc_feature (1)..(97): Xaa is any amino acid
KVIASCSLLLGIDDQGKAFEPSPDPLYESLAAGLSGIALGQNDQAAIHSKLEPILSNPALFGLNLYEAGLGKQVEDHFAEMIAGAGAVRKVLSRVVG

SEQ ID NO: 86702 - protein, 73 aa, Unknown
  Obtained from environmental sample
  misc_feature (1)..(73): Xaa is any amino acid
MGHYERIKSLKEGDFKRLTGVKPRTFEKMAEILRAAFAGKKRLGGRPNKLCIEDMPLMALEYLRECRTYSQLT

SEQ ID NO: 86703 - protein, 732 aa, Unknown
  Obtained from environmental sample
  misc_feature (1)..(732): Xaa is any amino acid
GPPCTDWPRESDAYTEASGLSAGTLTIAKATPVLAHYDIANLIQRYPAVNNTTVAAVTTTLKTPRTSYGTVKVYYEGVTTSGTTYAKSETKPDKIGTFAVTFDVAEGTNNVAATGINAGTLEINVFKAIDELGTWLGQQTANNAATAFPVALNVSSFGGIAGRADQEGSVGAMLLANLTKFVTLDLSGSTTFTAIPNNAFSVMTGPTSFNTCTNLVSVTIGNNVTSIGQDAFVRCTNLASVTIGNNVTSIGRMAFYLSGLTSVTLPTNTGFKTIGEGVFWDCTSLASVTIPDSVTSIGYGAFYQCTSLASVTIGNGVTEISERAFYQCASLASVTIPASVTSIQSNAFSNCPNLASITVDPNNPNYASADGIVYNKAKTQIIVVPQGITGNVTIPASVTGIGNGAFYNCTKLTSVTIPDSVTDIKADAFRDCTSLASVTIGNGVTGIGNSAFYGCTGLTSVTIPNSVTSIDNYAFIDCTSLASVTIGNSVTSIEEAGFRGCTSLVSVTIPASVTSIGDHAFYGCDSLAAFDVNSANSAYSSVDGVLYDKDKTILIQYPRGKTGSTFTIPASVTGIGGYAFWNCTDLASITIPNGVTGIGKDAFYYCRSLASITIPDSVTSIGEGAFGCTSLASITIPNGVTSIEYATFWFCTSLASVTIGNKVASISKDAFSGCRNLASITFVGTIPSSGFNANAFYELGDLRDKYYATDADNGTPGTYTATAPARPICHGP

SEQ ID NO: 86704 - protein, 724 aa, Unknown
  Obtained from environmental sample
  misc_feature (1)..(724): Xaa is any amino acid
MNDNVGMSGAFIDMKDSSIIALRADTVAPSRTLRRTFNIVSGQWTSVFVWVNEAGSYTFTPGSGIGYQWRVKRFYIATPQNYTPPKWATGRGSVSLTKGLHEIEIMPSGDKGSAEFLFGGGNKAPDQQGAGPSPKATFGPFDLKKGRSYRFYFNTIPAELASIIMDKYPPPVKESVADAYLTGAAADKADSASARATELSIGVTKYVTLDKRSSADYGFKIKEPGIYRVETTGRLNTKLTLRDRFGGLSKSQSGNGVGRNALVVEFFLPGDYLAIAETVGESAGRMGISLSKGELRKGGTLQDGVDKRAAVKANSAVVYDFKANKKARYRFESFGAAGGQDIRLEDSDGWPLVRHGSEAPQELALDKGSYKLYSLPCQYENYRVTRVDAVKEPLKFTGAGPHNIAVNEPIAATWLESGTGAPARFLFEVSAPIDAKVSLTPDFKGTLKQQGNKDAKPINVSGGYGGMLQKGKYELTVTPLKPQNYSPYEVSVTTEDLVAGIGYDVNRDQTLRVQVGERGGYEIFSQGRSEVAARLYASDKKTEIARSGGDQLDWNFFISERLDSGSYYLELTGFESNPAKVFMRRAEDTVTTQIKLADAAVEKKSVPLSWKQVVIPIENQTGDILNVSVSSGSQLVCNLEAVNNPNPAKLLGANIGRRRGKRVNMSAVIVKGASYILRIWSEDRVEDAAAIEIWATEAMPLTFENARSGVPDKYRRRRESLSPR

SEQ ID NO: 86705 - protein, 151 aa, Unknown
  Obtained from environmental sample
  misc_feature (1)..(151): Xaa is any amino acid
MSVEKIKEIIKKCLKETPCEISLYYNEPLKYHTTFKVGGPVDCLLSPRGNGFKAFCINILNTCRAHNVPVFILGGGANIVVSDKGIRGIALDMNEWKGRLQSQREFFAKKDEIIFKSGTSIEEVVNTACAEGLSGIEFLAGMPSADSDPGP

SEQ ID NO: 86706 - protein, 420 aa, Unknown
  Obtained from environmental sample
  DOMAIN (366)...(420): PASTA domain
  misc_feature (1)..(420): Xaa is any amino acid
MMAEYAYPGTDCLKTLNETRAEAVMLLAMDPRSGDIIGSASLPNFDLNNIRASDELSRMNRPVIWAYEPGSVFKVFTLSALMDSGAITSSSAFTCNGYYVTGSGSHINCLGAHGRVTAREIIIHSCNAGAAYASDQINSSSFYKLLTDFGFGSRTGAGSPGETSGYLLGSEQWSDRSKPTIAMGQEISVSAYQMLQAASAIANDGVLISPRIVSNIISPDGRVTEWKPIERRRILKAETAKDMRSYMVDTASGIGTGWRAAVEDLSLAVKTGTAQIIDPSTRRYSETDFIASCIALLPAESPSLILYLAIIKPRGEILGGRIAAPAIREAAESLIDYIGIPRGRNPQVDHPSIVNIPARRLPAIGSHLPDFSGISKRMLIPLLLRDDIHVELRGEGWVRRQSPPAGTPVTDGMQIILELE

SEQ ID NO: 86707 - protein, 457 aa, Unknown
  Obtained from environmental sample
  DOMAIN (226)...(387): Protein of unknown function DUF115
  misc_feature (1)..(457): Xaa is any amino acid
VSVWEKNSKVLIDHYPGLLEEITGEEDNTFTPEDIQIIPASCGDPSLCVKGINIHSGRDPMREGLRLAQSASGGGTVVILGFGLGYAATACADAAAQAVEKGRPIIIVEKHRKLLVKALETRDLSDFLSNNRIIFVVGGTGEGITNALSIADGFISAGERTEPPAVIRNRALIELDKEWYGIVEEKLRTWSMRDDVNSATLKRFGKRWVRNLSRNISAIRDYAGISRLAGLAAGINEGIAAGVTEGAPVFLAAAGPSLDKVRPFLLEIHKRCVTVAVDTSFRFFTDNGIQPDFVLVVDPQFWNSRHLDRCPCGNTALIAESAVYPPVLRLPFKNIFLCGSLFPLGSFVEKRVDPKGALGAGGSVSTTAWDFARTLGSKEIWIAGLDLAFPGLKTHFRGAVFETRSNTASNRFNPAETWVVRALRDGYPFKAPCAQGGQVLTDRRYPSADLIHGPPQW

SEQ ID NO: 86708 - protein, 373 aa, Unknown
  Obtained from environmental sample
  DOMAIN (1)...(233): Pyridoxal-dependent decarboxylase, pyridoxal binding domain
  misc_feature (1)..(373): Xaa is any amino acid
VVFRVLCREDDAQPVPDEHLQAEGIGADCSSLPKLSLAVRCGISDENVMFTSNDTPAAEFKLAKDIKAVINLDDISHIAFLEEHAGLPELVCIRYNPGTARTGNSIIGNPVEAKYGFTREQVFEGYKILRDKGVKRFGLHTMVASNELHYKYFVDTALMLFELAAEVFKELGIKIEFVNLGGGIGIPYRPDQKPVDLEAVSAEMKAAYDRIVVPAGLHPLKICLESGRMMTGPYGFLVSRVLHVKTTYKNYVGLDACMANLMRPALYGAYHHITVIGKENEPANHTYDVTGSLCENNDKFAIDRRLPKIVPGDLVVIHDAGAHGHAMGFNYNGKLRSAELLRRENGEVIEIRRAETLDDLFATLDFEKLKSFE

SEQ ID NO: 86709 - protein, 189 aa, Unknown
  Obtained from environmental sample
  misc_feature (1)..(189): Xaa is any amino acid
ANIGTYSFVFFKKAKHIYAFEATKETFDCLCNTIEINNIKNITPIFAAVHSKDGEEVTIYADFPDNCGGNSMHIGHNVANTVKSITIDTWALDNGISNIAVVKMDIEGNELNAFKGMQKSLLKFRPIVFCEISPGGSKASGSNVVELYTYIINNFNYTAKILKGNKYIEIDEKYIGEITKNINCYFFPI

SEQ ID NO: 86710 - protein, 587 aa, Unknown
  Obtained from environmental sample
  misc_feature (1)..(587): Xaa is any amino acid
AGVMSQMGGVDRANVLRVFDPNAQAMQNGFAELEKRLQSKENGVRKEVIVYYSGHADEKGLRLGGDVYSWADFRKNVNSINADVKVAILDACGSGAITRTKGGVSRPAFMQDASSEMKGYAFLTSSNENEASQESDRIKGSFFTHALVGGLRGAADMTGNGKVTLSEAYQYAFDETLRNTQNTSAGSQHPNRDMNLAGTGDIVMTDLRETSAVLTLDSNLEGRLFIRDEQGNLFAELNKIRGRQIELGMPVGKYSIQMEVPSKIWMAKEVQISEGKKNVLSMGDMQSIEREKAVARGNADSTTMTGLDSARAKPFKFNLNAYAYNKEPANEVQLGFFAHAKKALSGTQIAVFGNLATDDMAGAQISSFVNISTENIYGLQASSSFNIATNFNGVQASVYNIAGIGNGVQLGVMNIISDTLYGVQGSVFNIARKVSTLQGGVMNIAGNVGKVQGGVMNIAGDAGLVQGGVMNIAGKVEKLQGGVLNIGGHVGRQIGIINISAESDHTPIGLLNIVGNGIIDGTFYLDETGRTGIALHMGTPYLYTVLDCALDPTDKWPQSSGFGLGTRFGMRGNHLSLTILSCRSCPS

SEQ ID NO: 86711 - protein, 100 aa, Unknown
  Obtained from environmental sample
  misc_feature (1)..(100): Xaa is any amino acid
MSDTTPFFIHESSYVDDGAEIGEGTKIWHFCHIMSCAKIGKNCSIGQNVNVGSRAIIGNGVKIQNNVSVYDDVIIEDDVFCGPSCVLPMDNLGQSCHAVT

SEQ ID NO: 86712 - protein, 465 aa, Unknown
  Obtained from environmental sample
  DOMAIN (220)...(399): AIR synthase related protein, N-terminal domain
  misc_feature (1)..(465): Xaa is any amino acid
MLFIRGSLAVSNFRLSQFPVKGINAEYLHIAETTRDLNPEEHKKLEILLEYGTPSTNTNFNSQLIVAPRAGTISPWSSKATDIVHICGLSAIKRIERAVVWTFADGVPPESSLFDRMTEQIFHDKEELAALFTHNEPKPLSRISVLEQGKAALKKANSELGLALSSDEMDYLTERFTGLKRNPSDVELMMFAQANSEHCRHKIFNAEWEINGEKQDLSLFQMIKNTYKCSPDGILSAYKDNAAVMEGFEAARFYAEPKSNEYAWHRESVHILMKVETHNHPTAISPFPGAATGSGGEIRDEGATGIGSKPKAGLCGFSVSNLKIPGYVQPWERDFGKPGRIESPLQIMIDGPLGAAAFNNEFGRPNICGYFRTYEQEVNGKIRGYHKPIMLAGGIGNIKARHVQKGSLKEGDLLIVLGGPAMLIGLGGGAASSMATGSGGEDLDFASVQRGNAEMPRAESVIVQT

SEQ ID NO: 86713 - protein, 309 aa, Unknown
  Obtained from environmental sample
  DOMAIN (120)...(306): ATPase family associated with various cellular activities (AAA)
  misc_feature (1)..(309): Xaa is any amino acid
MAKLRNGPEAFERICSFCGKSADMARRLIAGPNDVFICDECIEVCRKILYEEDHELTNQFTGDIPTPKEIKNYLDLFIIGQDNAKKALSVAVYNHYKRIANPSAENPILQEDAVEIEKSNVLLIGPTGTGKTLLAKILAKKLKVPFAIVDATTLTEAGYVGEDVENILLKLIQNAGGNIAAAERGIVYIDEIDKIARKGENVSITRDVSGEGVQQALLKIIEGTIASVPPQGGRKHPNQEMIRIDTTNILFICGGAFVGLEKLIARRVVQNQLGFGSAVGGKEKTLKELYNAIHPDDLFNSARPSTPPK

SEQ ID NO: 86714 - protein, 249 aa, Unknown
  Obtained from environmental sample
  misc_feature (1)..(249): Xaa is any amino acid
MTWKKTKEWEYFPFVLLAFMVLIMHILMKGGWGDDVDFSKVKVDSNLIDHLINEYFTWSSRTIIELCIVFLSKVNFLIWRIFNTIVYTSVGVMLSKLLVKSNNKEMNYFIAGMMIIYPFYHLATAGWVTTCTFYLYPLFCIIYCLLTIKKIFENKTILWYEYLFYAVALIYGSSMQQAVVIMTMFFAFLMVYIIVNKLNYRHIVGISLIVSVAQVINAIVCPGNKLRTWKAFICFRYCLGRSDPWPPPP

SEQ ID NO: 86715 - protein, 69 aa, Unknown
  Obtained from environmental sample
  misc_feature (1)..(69): Xaa is any amino acid
MDFPLHKAIGGARAGFADAVGVALGLYKVMIPIIIVVKVLVELDLIRYLAMPLAPLMSLVDSRPSIQKP

SEQ ID NO: 86716 - protein, 105 aa, Unknown
  Obtained from environmental sample
  misc_feature (1)..(105): Xaa is any amino acid
FANYAYDKEAPREALVECGIVPAPAGSTMTVVFRDRGRPFNPLEHADPDTHAPLEDRKIGGLGLLIVKKTMDTIYYSRENDANRLEFSKSWRSHDSHGEAWRSEK

SEQ ID NO: 86717 - protein, 107 aa, Unknown
  Obtained from environmental sample
  DOMAIN (64)...(100): Ribose/Galactose Isomerase
  misc_feature (1)..(107): Xaa is any amino acid
MRTIVIGCDNAAVPMKAMLINFLEAKGVIVENMGCDSADDPTNYPTVAKRVCEKIIASNYEKRGILVCGTGIGMAMTANKFKGIRAAVCHDNFPPSVLFSAESVPGG

SEQ ID NO: 86718 - protein, 82 aa, Unknown
  Obtained from environmental sample
  misc_feature (1)..(82): Xaa is any amino acid
KLPFFDRNVNCGMIACEISAVDLDELFKEFSNVKTTLTVDTGKGSLFFKAGGKEKTIPFTLKNFEKALVDAGGWVEYAAQHY

SEQ ID NO: 86719 - protein, 309 aa, Unknown
  Obtained from environmental sample
  DOMAIN (94)...(298): Phosphoribulokinase / Uridine kinase family
  misc_feature (1)..(309): Xaa is any amino acid
MVRFGREDGFLLRFPGIGKGKTIAPFVDEPDLFQVYSDYKKWGRMVGVRVVGELNSKIADRTFLDYIRISEAHQARELSKIAEKIYSKHDKIKMILIAGPSSSGKTTSAKRLSIELMVLGLNPIAVSLDDYYRGTAATPKDENGEPDYECLEALDVPYLNEQLQALYRGEEITLPVYDFKSGERKTTGGKKIKLDSRNVLIVEGIHGLNDALTYSINRDTKFKIYISALTQLNLDDHNRIPTSDNRLLRRMVRDSQFRGMQAAGTIKMWPKVQAGERKYIFPFQDTADATLIPLSITSFQYSNTLPTRC

SEQ ID NO: 86720 - protein, 90 aa, Unknown
  Obtained from environmental sample
  misc_feature (1)..(90): Xaa is any amino acid
VAQSAGRRAQVHFPLSGHRRRHINSALDYELSVFKYFADPLLKAVKPGMNEYAEAIRLLSFLENFTPIPPEYVPGTSILREFIGGSEFKY

SEQ ID NO: 86721 - protein, 591 aa, Unknown
  Obtained from environmental sample
  misc_feature (1)..(591): Xaa is any amino acid
MDEGMKESRLALNPVLAPVLAPYTDDISSLLPAAQNITPDKTDKQNLSLFDDRIMAALLSFVSQNETFYIKGVRIRQKVLNSSAALFPGLQLESVIGGLRVLGLFFANGDMLFPDFNRFAAFGKLDRLERTEYCAAGILCYYEAPDNELSPWLFRSKIRKYASFIHNFYISLDPEQQYPLVTIRRIVFILERNNNEINCDMLIKAMRQTGLLVSDSKHNWRKAPSASEPAGTGATIAMDSPFSLLMYPEIAYNDAVEIASISRITGTGLNVSFEINKDASVSAFNRGISAAAAIELLQRLSGNRIDGNTAFTLLDWEKRHKEVALSKGLVLSLSPERGYLAETKPLSKYISAKLAPGIYLIPENMEEKVYAALKKAGVTIFARPDSVGAPNCRADDGNTFSADSRIYFPHITPHTEKIRQFMSDKKEDVINTSTTVVSQSNAPSQSDTPSASALIEGFHSIINKMHLGAEQREELTARIDRRLVLCESQLKDAVVRYEKLEARGLDYAGKIMIAKQAIARQSPVEASWPGRKKQESVIGIPTALEKTDGESVLVMEQAGNSIRIPGNTIRIPLGKINLLRRIKKSIFENNN

SEQ ID NO: 86722 - protein, 116 aa, Unknown
  Obtained from environmental sample
  DOMAIN (8)...(112): Response regulator receiver domain
  misc_feature (1)..(116): Xaa is any amino acid
MAFFKKKKKILAVDDSEIDLELLEFMLKDKYTVLPTKSGKEALDYLLHFGNVDLILLDLIMPEMDGWETFSRIRDLGNITYVPIAFVTSVHGEEEQSRAKEIGAADLFTRPICHGF

SEQ ID NO: 86723 - protein, 340 aa, Unknown
  Obtained from environmental sample
  DOMAIN (163)...(240): Acetyltransferase (GNAT) family
  misc_feature (1)..(340): Xaa is any amino acid
MQNYTKVMDMINSSNGFYPLMISTINKDLDGIICVDEKEQAALIINSLDWIYLIGDTAENDKFKNDVVNLFKEHNKNKYMWWGLNEKWEKIIKSAFSVKINDFPRYRWKFNESTFQELAEINNTYKIKNINENNINKVLKNENNSITDVWNSIETFLQKGFGFFIDDGNEVISFIYSAGVYEKEVEIDIATNENCRKKGLGKILGKRFIEYCLSKNLTPKWDCYKYNEGSISLAKRLGFEIIDEYHVKQIVFENKTNKKIRQNCTSHNRSVCASPPYGGSGYAKMQSGLRPLCIFAPPHFLCAGIASQFLYRAQKTTHTAGTLCGVATDVKGAIVYQFNM

SEQ ID NO: 86724 - protein, 582 aa, Unknown
  Obtained from environmental sample
  DOMAIN (263)...(407): GAF domain
  misc_feature (1)..(582): Xaa is any amino acid
LLDDEPEVIAHPEPWMLGLLLNEVKSNIAVYSDELQRTGSVSEAVTADYRGIQSIVFMQRLYNGWYMGLVTPRANYFQSTKHLAVILSAFGVVFAVLLGWMLLTISAGKAASDERIQLMSDCNPIGMSFWDSNLHIIDCNKTTLDMFGLSSKKEYYEMFEELSPERQPDGSISRIKCYELLREAMGTGFLCFEWVHKKPDGELIPCEMTLVRTKYKKDFTIMAYVRDLREQKRIMRMMEWHTHLLDMVNSAATILLSSNNAGSFESSMMRSFELVGHCLDVDRVQIWRNEMIEDEMHYVLRYEWLSEYGKKCKSVPIGLHFPYSLKKEWEDLFLYGDHINMPLKDMSPEDQAFLGYYEMKSIVMIPMFLENEFWGFFSIDDCRNERVFTSEEISILSSAGLMMSSAVNRNLQMNKMREADERMHIMIDAAPLCAIFWDKDLNPIDCNQETIKMFELSGKQEFIDKFGLLSPEYQLDGKHSREKGGELVKKALEEGFSNFEWMHQKLNGEQIPAEITCVRVKYKDEYTVTGYVKDLREQKAKLAEMRKAELAEESSKAKSDFLARMSHEIRTPRTHSAILTLG

SEQ ID NO: 86725 - protein, 142 aa, Unknown
  Obtained from environmental sample
  DOMAIN (19)...(104): OB-fold nucleic acid binding domain
  misc_feature (1)..(142): Xaa is any amino acid
MKRTHNCGELRKGDVGKIVSLCGWVDRRRDLGGVIFVDLRDKYGKTQVVFDPARNADVHKIADSLRNEFVIQVTGEVQSRPEGMQNEKLSTGDIDVKIDELVILNKSENPPLAINDPKEECKENDDLRFALSLVPILSCPGP

SEQ ID NO: 86726 - protein, 50 aa, Unknown
  Obtained from environmental sample
  DOMAIN (2)...(42): Bacterial regulatory helix-turn-helix proteins, AraC family
  misc_feature (1)..(50): Xaa is any amino acid
TIWLNTDLKIVDIALYYGFEYEQSYIRAFKREFGITPGKLRKSENFVIKQ

SEQ ID NO: 86727 - protein, 338 aa, Unknown
  Obtained from environmental sample
  DOMAIN (151)...(338): Competence protein
  misc_feature (1)..(338): Xaa is any amino acid
LTVGIIIGICAAHSWQNKVAFGLPEKQITGIEGVLLEDPRIISGGKAIVSVSLRKCAAGSTLRAIGGGEITIFFTQENAEKLKHFGRGTVVFAEGQLRSSERGDVRSWSVSAKSLHIVEPPPPIERMRTGIRINLIKRFSGKSWGGLALALLLGIKDNLDTDLAVMYRNAGLSYILALSGMHLAILAALITFLLKKPLGLKASAICGAAIILLYCFLVGSMPSLNRAAMMYILGVLAVIGALPKKPMSILSLSFIIQIIVTPSAGNSISFILSYLALIGILIIGKPLSSLFTGKAPDILLQPLAMSCGAFLATSGICGSTFGILAPRGIITGLVMVPL

SEQ ID NO: 86728 - protein, 209 aa, Unknown
  Obtained from environmental sample
  misc_feature (1)..(209): Xaa is any amino acid
MGLFAIIAAFAVLFVLVILILVKLYSEKASDVSPQLIDLKNELNEIKTKQLESQQIALAQQQQLFLNSQNQLGTQLSQMMNRMDQNYNSSQSNITKQLDNSNRVINDIHTKLGSLEQTARNIQDIGNNISTLTDLLQPPKLRGNLGEYLLEDLLKQIFPAANYKTKYSFNNGTQVDAVIKLADGIVPVDSKFPLESFKGNSADLINRYP

SEQ ID NO: 86729 - protein, 286 aa, Unknown
  Obtained from environmental sample
  DOMAIN (33)...(286): Histidinol dehydrogenase
  misc_feature (1)..(286): Xaa is any amino acid
MPATTARKRSAASARLRQIPIADANSREGKSLLKKINEARECRDDAVMRAVGSILSDVRENGDAALFKYTKRFDRALPSKSLRIPPAEIAVCARLASSELKNAIRETARRLRQYHGCQGLQMFKINTPDGELRQAVRALNRVGVYIPGGRTVYPSSVLMNVVPAQSAGVKEIVAVTPPQSGGIDAGVAFALNHLGVTEVYQVGGAQAIAALAYGTETIAPVDKIVGPGNAYVATAKRLVYGKGDIDCVAGPSEVVIIADKSAPPQLVALDLLAQRSTAPATRAPSA

SEQ ID NO: 86730 - protein, 617 aa, Unknown
  Obtained from environmental sample
  DOMAIN (411)...(617): Methyl-accepting chemotaxis protein (MCP) signaling domain
  misc_feature (1)..(617): Xaa is any amino acid
MGGYIDVLQTVSNIMNFYENLPPEERRQTYEDTMMSVFEDMPDFVRMFTVWKPDAIDGMDAKNIGRMGSTETGQFAYALARDTGEIKPLTAVVVNEVMAQIAGPNARAVGMSDPAPFKNMGKDTYAVRIAVPILNKRLNEVVGAVGCQLDISMIQPRIEQTIKDFDEVTSMVIYSDSGFVLGNYLPEFIGKQIDAETQYGPYLNDVKAVIKSAQEWEGTAYDPELKTNMVMAVANIPIGVSPTTWSVMVGSTEAYILKDVNVMRNFVIVLASAALVAAVALIYLVLSRTTKPIVTVAETLKDISEGEGDLTRAITVSSKDEIGDLALYFNKTLEKIKNMIIHIKDEANGLTGIGNDLAGNMTETAAAVNQITANIQSIKGRIISQSASVTQTNATMEQVITNINKLNGHVEDQSSNISKASSAIEQMVANVGSVTQTLVRNADNVKTLEEASEVGRNGLREVAGDIQEIARDSEGLLKINAVMKDIASQTNLLSMNAAIEAAHAGDAGRGFAVVADEIRKLAESSGEQSKTIGAVLKKIKEAIDKITRSTENVLNKFEAIDSSVKTVVEQEDNIRNAMEEQGEGSRQILDGVSNVNEITRQVKGGSAEMLEGSKEVI

SEQ ID NO: 86731 - protein, 233 aa, Unknown
  Obtained from environmental sample
  misc_feature (1)..(233): Xaa is any amino acid
EPRSESAEGRFWRGIFHEACGHPLETEAIRRQASPFCGKLGEQVAQPILTAIDDGTMSGVWGSLAVDDEGTPTQKTVLIENGILKNFLSDIVGAKELDLPLTGSARRESYKYAPVSRMRNTFIAAGNSTLQDMIATVDNGLYAAKMAGGSVNPATGEFNFAVEEGYEIKNGKLGEAVRGATLIGLGHEILPKISMVGNDLELAAGMCGASSGHVPVTVGQPSIKVDSILVGGR

SEQ ID NO: 86732 - protein, 552 aa, Unknown
  Obtained from environmental sample
  DOMAIN (121)...(276): Alpha-2-macroglobulin family N-terminal region
  misc_feature (1)..(552): Xaa is any amino acid
MLLTDTEHKAEIVIVDEDGKLLQGKVDLDCAIYKLDWHWWWEKSEDESAEFASTLSRNAISRQTVSATNGKAVFNFNIKYPDWGRYIVIARDSKGGHAAAKVAYIDWPGWAGRARDEGQGSTSMLTLTAGKPQYNTGEKVQITFPSNKDAAALVALEKGGNIIKSEWVTCQDGTTKYEFIAEPSMVPNIYMHITLVQPHLQKQNDLPIRLYGIVPVMVEDSRVVIYPQIKTQDNWQAESKVSFTVSEANGRPMAYTVAVVDEGLPRSYPFYIPNPKNTFYARDASFIKSWDLFQEVMSAYSGKLETLLAIGGGDDGEDNSQKETQRFKPVVRFFGPFEIGKNGQKTETFDLPPYIGAVRIMVLAASATSEPQTGRLLRGYGTTQATVKVTSDLMVFASLPRILSPGDEFEVPVYVNSQKGGKRNVKVNLTVPGAAIQGPSTQDVSFDKIEEKLIRFKVKSPDNPGSLKFTVTAESSGLKTAQHVVDIEVRSTAIPVTKTVQSLLTAGETWKGTLDYPGRDGTNTLVAVSQDCPRSTLKKRLDYLNQYPHGLR

SEQ ID NO: 86733 - protein, 263 aa, Unknown
  Obtained from environmental sample
  DOMAIN (175)...(262): Histidine kinase-, DNA gyrase B-, and HSP90-like ATPase
  misc_feature (1)..(263): Xaa is any amino acid
LNAASCEKTANTVITGLPASAYATRTGNAIRAAGALVDITESKKLLQEKDRQKAEAEAASREKSHFLANMSHELRTPLNVVIGLTNLILEDEHLAKHVTENLEKINNAGNSLLNIVNDVLDLSKIESGKLTLSSEEYHMSSLLNDIITLTLTRLGEKPVKFILDIPDDLPNKMYGDELRLKQVLTNLLTNAIKYTSEGSITLKVRGEIEDNVIMLMEYAVIDTGSGIPKDSIKNIFLDYSLVDDKANRRVTARDWACPLPKDW

SEQ ID NO: 86734 - protein, 422 aa, Unknown
  Obtained from environmental sample
  DOMAIN (330)...(407): Signal peptide binding domain
  misc_feature (1)..(422): Xaa is any amino acid
MFDKLTQKVTDALRFVTGKSTISEKNIEDAVDAIKMALLEADVNLRVVRRFVNSTIEEAKGEKVLRAVNPGQQFVKIVHDKLVGYLGGDDPEERKLKLRGPDVISTVLMLGLQGSGKTTSSAKLALRLKKEGRKPLLVACDLIRPAAIEQLAVLGAQIGVPVHREDGATDSAVVYRNALAWAKQNLIDTLIIDTTGRLQIDEDMMAELSRLKEAVRPDEMLLVADSMTGQSAVDIAKTFDEKIGLTGVILTKFDSDTRGGAALSLKTITGKPLKFTGTGEKPENFEPFHPERMAGRILGMGDVVSLVEKAQEVIDQEEALELQKKMEKDTFTLEDWLMQLRSVKKMGSLQSMLEMIPGMQGQINEDDIDKANLKRQEAIISSMTHKERANHLIIGPPAPHPHSQRFPYLGSGSRPPFLNSLK

SEQ ID NO: 86735 - protein, 574 aa, Unknown
  Obtained from environmental sample
  DOMAIN (440)...(571): Methyl-accepting chemotaxis protein (MCP) signaling domain
  misc_feature (1)..(574): Xaa is any amino acid
MKETQDNEKKTSIKVRYIIFSISLFLIIFIGGSAAFIFSMWKMLHTTVGYELEQAMELEKAKLETSVNSEIAIALKMATSPIIQRHFLNPADGELRKVAFEEIAAYRSAFKGNSVFWCGDIDKEFYFDDENNHYTLDAESPDNYWYKMTLYETEKYNFNINYNPDLQKTLLWINAPVFREGRPIGILGTSIDLSGFIDSLYAEFDPSMPFYLFNKASEITGARDHALVTGKKTIGDYFGTAGTSILKSAEQSAKAPQAFFLNNSEYVVGNIKSLDWHIAAILPITASDTLNNGMTVFFMIMLAVIAVILVISFIFISSLLKPMRYMVQTLDQIATDWDLTKRLEFRNHDEIGTVGEFFNRTFEKIRILVGTIKYKINGLNHTSFELSANMGKTSAAVQQISANLDNMENLMIKQENGAVEAGNAVGIIKTNIDSLKKMIEQQTDSVNVSSSAIEEMTANIHSVTQTLAENGRNVDVLVEASENGKTGLQLVAQEIQQIALDSEGLLEINSVMNNIASQTNLLSMNAAIEAAHAGEVGKGFAVVADEIRKLAESSSNQSKTTAATRADLIMRPPN

SEQ ID NO: 86736 - protein, 359 aa, Unknown
  Obtained from environmental sample
  DOMAIN (66)...(359): AMP-binding enzyme
  misc_feature (1)..(359): Xaa is any amino acid
MPLYEKFTGRHRDDFATLEDLQKNYKLTVPNNFNYAFDCLDALAAESPDALALLWVSNEGKEKRFTYEDIRRLSVKAANFFIAQGIEKGDMVMLTMSRDWRYWPVLMGLHRMGAVAVPATYLLTKKDLEYRINAASIKMLVTTPRFGVIQAMEEALPACPTIKKLAVFGGNLPNDRWVDLDAEWEAAPETPVKRNNVKTDMMLMAFSSGTTGYPKMVWHDYTYPLGHIMTGCFWHRCEEGGLHFTISDTGWLKSLWGKMYSQWLAGSAIFTYDFDKFIASDILVKMEHYKIPSFCAPPTMYRYLIKEDLKNYDFSSLRHCTKAGEALNPEVYKVWQKATGIKNIWRLLGRKKTTLSCWK

SEQ ID NO: 86737 - protein, 554 aa, Unknown
  Obtained from environmental sample
  DOMAIN (9)...(263): BadF/BadG/BcrA/BcrD ATPase family
  misc_feature (1)..(554): Xaa is any amino acid
VKAGDDCVLGLDVGSTTTKAVLMRRGDKAVVASVYLRTNGDPIGASRNCYKAIREQVGSMKFDITGLGVTGSGRQIAALHALTDNVINEIIAHATAAAYFDKDVDTIFEIGGQDAKYTFLTGGVPSDYAMNEACSAGTGSFLEESARESLNILTEEIGERALLGKQPPNFTDQCSAFISSDIKTAGQEGIGKDDILAGLVYSVCMNYLNRVKGSRQVGRKIFMQGGVCYNKAVPVAMASLMKHQIVVPPEPGLMGAFGVAMETANRMDIGLSAAAKFDLDELSNREATRESSFVCAGGKEKCDRKCEISRIRVNDKLYPFGGVCNKYYNLRLHKEVDVEDLDLVAVRNKLLFEQFGVMEGLAHKGHAKTTDGHGTNPKTVGIMRTFLTHALYPLYSNFFREMGFKVVLADAIDPEGIARIEAAFCLPAELTHGSFLNLLKKNLDYIFLPHVSQIPVKNPSSYSKTCVFVQGEAYYLKTTFRHEIEAARTAVLSPVLSLKRIMTAPAPATSLSIWRCRPCIYPKRPPRRRFIGRWSVNAPSTTSCRPTADGRSNI

SEQ ID NO: 86738 - protein, 95 aa, Unknown
  Obtained from environmental sample
  misc_feature (1)..(95): Xaa is any amino acid
VIASTAVCGRRQEAFDAFLDEIDALKLSDVAVTQTGCMGLCHVEPTAEVIVPGMPEIIYGHVKADIAKRIVNEHIVGRKLVDGYVFDKPAADILK

SEQ ID NO: 86739 - protein, 541 aa, Unknown
  Obtained from environmental sample
  DOMAIN (284)...(497): Methyl-accepting chemotaxis protein (MCP) signaling domain
  misc_feature (1)..(541): Xaa is any amino acid
LGLIAERGGVGCLCVIDAIQPMVMDTVKAREEISAMAIYSSNGFIVGSYIPDRVGKAMKDVDTAYAQYMDEAVKAVQNGDSFACNSYAPALKSNIEITIQSFPMGNSGRSWSVMIAATESYILKEVNFLTKITLIIAAIAIVIAAVIIYFVLQSTTNPIVKVADTLRDISEGEGDLTRTIAVSSKDEIGDLAKYFNKTLDKIKNLVLLIKKQAGLLKDIGNDLASNMTETAAAVNQITANIQSVKGRVINQSASVTETNATMEQVITNINKLNGHVENQSRNVSQASSAIEEMVANIGSVTNTLINNATNVKSLQEASEVGRSGLQEVASDIQEISRESEGLLEINSVMENIASQTNLLSMNAAIEAAHAGEAGKGFAVVADEIRKLAESSSEQSKTIGQVLKKIAESIRKITSSTDNVLKKFGAIDSGVKTVSDQEANIRNAMEEQGEGSKQVLQSVGDLNGLTQQVKSGSEEMLNGSQEVIKESQHLEKVTQEITGGMNEMASGADQINTAVHNVNDMTQKNREAIDALIKEVSRFKVE

SEQ ID NO: 86740 - protein, 220 aa, Unknown
  Obtained from environmental sample
  DOMAIN (9)...(220): Chorismate synthase
  misc_feature (1)..(220): Xaa is any amino acid
MSSQYGKKLRISIFGQSHSPAIGVSIDGLPSGIKINIDELRAFLKRRAPGQNDISTARAEDDAPEILSGLVETVTCGAPLAIIIRNKDARSADYRELRDIPRPSHADYAAHIKYGGFQDVAGGGHFSGRLTAPLCAAGGICLQILRGLGVFVGAHILRIGNAQDDPFDSVAVSNAEFEAILENPLPVLNREAGRGNEKTNSGCEKKRRLGWGHCRVRGNR

SEQ ID NO: 86741 - protein, 64 aa, Unknown
  Obtained from environmental sample
  DOMAIN (6)...(35): IstB-like ATP binding N-terminal
  misc_feature (1)..(64): Xaa is any amino acid
MAALYRQQMDDRESAKLSFDERFGLLVDTEWTNRKNNRLKRIIHSADFPASGACIEDFEYRARP

SEQ ID NO: 86742 - protein, 102 aa, Unknown
  Obtained from environmental sample
  DOMAIN (1)...(95): SpoU rRNA Methylase family
  misc_feature (1)..(102): Xaa is any amino acid
ISRAAPFLGRSAETPNLVRAADDLKEAGFWIYGADMDGDPIYEKDLSGRTALVLGSEGSGISRLLRERCDAMVGIPSLGRIDSLNVSVAAGVLLYEVRRQRA

SEQ ID NO: 86743 - protein, 85 aa, Unknown
  Obtained from environmental sample
  misc_feature (1)..(85): Xaa is any amino acid
MALGTTRADLCVVYDGRKYPIELKIRQNMGSAALGVKQILGYMDKVGSDDGWLVIFDKNPEKSWDEKIYMREETVGGKRVMVVGC

SEQ ID NO: 86744 - protein, 155 aa, Unknown
  Obtained from environmental sample
  misc_feature (1)..(155): Xaa is any amino acid
MDNYKLEKIIAVRTAKTIYRDGSKVIKLMGEEYPASDILSEALNLAAVGETTLKVPRLVEVTKINGKWAIVWEYVEGTTLDKLMEKNKDKEQQYLERFVDIQLDMHRHNATRLPRLTEKMERKVEASGIDATARYEIFGKAGKYAQTYQTLPRRL

SEQ ID NO: 86745 - protein, 217 aa, Unknown
  Obtained from environmental sample
  misc_feature (1)..(217): Xaa is any amino acid
VDGETRRSADIVNITIPGDEALAAALITAKALVPKGDFELSNVALDPWASQAASFLKKMGAKINTEEQAKTAFGPTGTVTVQKSERVGRKARCVPLYHYLGQLPCMTIAAAFAEGKSVFRDLEPMRLFDPDGLEQLEQCLRPLGIRHGEMPDGMVIEGAKEFDGFDISEPLPAHIAVAFCVAGIKCMGKTSIADDLVVARWPDFERMINEIFEFRGK

SEQ ID NO: 86746 - protein, 596 aa, Unknown
  Obtained from environmental sample
  misc_feature (1)..(596): Xaa is any amino acid
WFAKDRFGRDVHAGYFAPKKEQKTAAKTGGAEEFFDYVELDDYKGKDKKEIKEAEKEAFSLIMQDKETLLTLPDGKDPKKNVAFIFAHSALREGWDNPNVFNICLLKEPRYDTTNQKNTRRQELGRGLRLCVNQEGERVQDDSINTLTVICPEDFSQYANALQKEYRDSGDIPPPAPTDVSRKPAVRNDDIFNSVNFINFWKNLTRKTEYKINIDSEKLISDCAARLNNPGTVFPESRIVISKGDYFMSEYKITLFGTNMGAAKIRVTITDSTGRNDVLFGAYYKTGYNFGRARKDKNLMRFQIVEIHDDKKEPYVLFGNKQKLTLTDPVIFSGDPVINEYPRTVQEAQTNYPVFNIIERAGRALCLTRPTILSIFKAISADRKKKLLNNPEGFFSVFIGEIKDELAGHVAKKIEYTLSRDFKLFTTGYHAEPLADALYAAESAPSYGEEETPQMFDVDGNPVTLKDYFPKEKPFPQRELIPGSKHSLYDFIQKDSDVEERFVKNRLCEDDKEEKILCYFKFPANFKIHIPKIIGNYNPDWGIVCKHPDGKTSIQLVRETKGKEDTKGLHFPNEGRKIMCAQKHLTLGYRPRPILT

SEQ ID NO: 86747 - protein, 217 aa, Unknown
  Obtained from environmental sample
  DOMAIN (150)...(207): Bacterial regulatory proteins, luxR family
  misc_feature (1)..(217): Xaa is any amino acid
RVLIVDEYPLFCIGLSSLIKLIPGYSVVGEAATIADAIKIAEKEKPNLVIMEIHLGNENGMELIPQIKSKCPGIYVLVMSMHNERYYSERILRMGAQGYIMKNAPANDVKNAINTVMSGKVYLSENERERIFEAITGDNYRGMKDWANSMRKLSDRELQVFSLIGKGFGTIEIATKLNLSTKTIDTHKEHIKIKLHCNTSQELRQLAIEWTNYSASL

SEQ ID NO: 86748 - protein, 270 aa, Unknown
  Obtained from environmental sample
  misc_feature (1)..(270): Xaa is any amino acid
MCQDAYKKSLFANAYNSHAPTDKQLGSVNGWNMKSDLIDEYAAQVLAAKERWRGKLNVFLGLEVDYIKGKRSPLDSDIVKLNLDYIIGSVHYLFPENGAKGFTVDGSQEEFDTGLKDGFGGDAQKLMHSYYDAVAEMIKIGGFDIIGHADLLKKNTLGKNLWPPEAEAERQKEITNIAKKAKLVFEVNTGGINRNKIQETYPSLSFLKIIKKFNVPVTITADAHRARDVNGNYTIALNTLKEAGIKKHFIFKEKTNKKKSVWLKEIIINN

SEQ ID NO: 86749 - protein, 329 aa, Unknown
  Obtained from environmental sample
  DOMAIN (1)...(121): Domain of unknown function DUF21
  misc_feature (1)..(329): Xaa is any amino acid
LIGNTIVNVVTSALATMLFMGLFGAKGVSIASVVVTVLVLVFGEISPKTLAKESPELTALRSAPLLRFFIIIFRPLNYLASAWGNIIVKIFPPNANRHITEDELLTFVEEVRQEGGINRREEHMIRQAIEFDDITAAEIMTPRMDMAAVSETDTAGHIESLFEETGFSRLPVYRDNIDNITGIILLKDFYREVTKKGKSPSEIIKPVVLVTKTMKIQRLLQTLKEKQSHMAVLVDEFGGTLGIVTVEDIVEELVGEIWDEHDRVVEPVKRNSDGSFSALGRTQFQDMVGFIGGKTSNSDLSESGEIPSTTVGNWGNGDQGQSSPWWGSI

SEQ ID NO: 86750 - protein, 196 aa, Unknown
  Obtained from environmental sample
  misc_feature (1)..(196): Xaa is any amino acid
MAQDILSKQVPLGQVVLLVLFSLPSVIALSAPFASLVGTLMTVGRLSSDNEILVLLSSGLSFRNVFVPAITVGIVISILSFIANDILLPGGYVQFYRLYRRILSSTPALELEANSVKKFKNTVIVTGNVTGHAIDNVLILDKTSDGERRVIMAANAELKDAGKEGLSLDLDRAFVQSSKEIAREDRLRLAIIPPKS

SEQ ID NO: 86751 - protein, 359 aa, Unknown
  Obtained from environmental sample
  DOMAIN (31)...(342): Poxvirus D5 protein-like
  misc_feature (1)..(359): Xaa is any amino acid
SAEPHEGLEVASWIPELNINTDNLDTDPWLFNVKNGTINLKTGEIGEPKPEDLITRIANVTYDTHADCPNWKKFVMEIMNYNADLIHFIQNAAGWAISGDTSEQCMFILFGTGANGKSTFLNTIMNLMGDYAIATPTETFMKKTGDQISNDIARLRGTRFVTTTEAEHGQRLSEPLIKQITGNDRMTARFLYGEYFNFVPTFKIWMATNHKPTIKGTDHGIWRRIKLIPFTTRIEEEKQDKHLEQKLMEERAGILNWLIEGAMRWRKEGLRTPTIIISATAEYRAEMDIIGNFIRERCVQGTEGSIRARELFKNYQDWCIDNNEHAVSERFLGLRLKELGFEQKRSNDGRYWQGVQLKG

SEQ ID NO: 86752 - protein, 70 aa, Unknown
  Obtained from environmental sample
  misc_feature (1)..(70): Xaa is any amino acid
MKVPFYDAVREYNLYKKEFDNAVTDVFNSGAFILGKQVQDFEEAICRYTGAKYSVGVANGSDALLIACDI

SEQ ID NO: 86753 - protein, 68 aa, Unknown
  Obtained from environmental sample
  DOMAIN (9)...(46): Sigma-70 factor, region 1.2
  misc_feature (1)..(68): Xaa is any amino acid
MKKTQKDSEDLLDTYCKQIKVFPLLSFEEEVELSKQIQEGNTAAFHTLVNSDLRLVVKIAGMFNIPGI

SEQ ID NO: 86754 - protein, 115 aa, Unknown
  Obtained from environmental sample
  DOMAIN (7)...(115): IMP dehydrogenase / GMP reductase domain
  misc_feature (1)..(115): Xaa is any amino acid
MPVNHGKALTFDDILLLPDYSEITPDRTDIETWLTPAIPLRIPLLSAAMDTVTEAAMAISLARMGGIGIIHKNMPIARQRLEVEKVKKSESGMILDPVTVASGDSVRHALDLMKD

SEQ ID NO: 86755 - protein, 597 aa, Unknown
  Obtained from environmental sample
  misc_feature (1)..(597): Xaa is any amino acid
MSDRMIWDRLIRETPVYSNDIIRVGDNSEIDLHVAGNGLAINENTLLRLRQDKDTGEFHIDLTSGSIGVVTSDVGGGIVLNIMGKQMKANPGTVFNAAAGGDGVSLQVSKGSAFIEDGVFEIGAGAAITMDREGSLRTEPSVYVVQPRPNALYRKGTDDPLNVVFAWNRINLEPDETLRLEIAEDMNFSRSVRTINGLNDSAQAALNAGLWNWRLSYNGAILNSGRFTVREAERFELVSPAKNRQFVYEAEPPTVYFQWSQIEDVSYYIAEVDVTSEFRNPIIKKNMTAASFSDSSLGEGIWYWRVTPVFSQIGENPHADGGTYGVINSPSSAFRIVKSNEPQSLVFLEEQVPMPEPAPTPVSAPKPSPAPPPKPVALESPSNNTTLPGLTALRQQTVFRWSSNEAVAKSRFVLSRNANPLSGQAVIEILDPNRTLRIDRLEQGVWYWTVEAQTPEGVNITAQAPRRLRVSPIPFLPSPSGRQPANGYSVGIEELKRTNINFSWSQVQGANGYILTIYQETGGERRQVMQMGPENRTSWSTAIKTLGRGNFIWRIEAVNVGRNNVIEQHGSPAENRFVIDIPRAGPVKIIGEPEIKP

SEQ ID NO: 86756 - protein, 200 aa, Unknown
  Obtained from environmental sample
  misc_feature (1)..(200): Xaa is any amino acid
MFKEFLFPLYRHFTPFNVFSYLTFRGAYAALTTLLICFLFGGKIIEALTRLKIGQSIRSDGPATHLVKSGTPTMGGIFIIGSVIISMLLWGDFVNKMVWLAIISFTAFGIIGFMDDYLKVSRHNSAGLPAWGKLAGQFVVALGVVLYLYFSADPASRGDVTSLYIPFFKNPVVNLETLWIPFGVLLIMGDSANLSCNPPW

SEQ ID NO: 86757 - protein, 371 aa, Unknown
  Obtained from environmental sample
  DOMAIN (130)...(332): ABC-2 type transporter
  misc_feature (1)..(371): Xaa is any amino acid
GLGGLSRVGGLSGVLQIFRRISDKGHTLILITHTLERLELCDRLVYIQTGKILFSGAPDAICGHFGVPSLSQVYEKSGDRSIADAAEGGRPAGAANASTHAVAASAQDLPRRDWTATLRHPLRALRFFSRQSYALAERYAKVYVRDKRNMLLLMAQTPLITLLLGFVYKMSILQLPISFFFCLTVTGIWVGGLDAVREVASELPLLAREARCGMNRWAYIIARIAVAAALSAAQALLFTVSAVVIFRQLEFSWPLLALLYTAIFSGNLLGLAVSVCSGSVGRAISTLPIVLIPQIFFSGILVMFEHMAELGRQISRLTISRPVFGIMKKVFFLDRPLFWHSEWVELILLCAGLIIIFWIALRSRTGRRGAA

SEQ ID NO: 86758 - protein, 65 aa, Unknown
  Obtained from environmental sample
  misc_feature (1)..(65): Xaa is any amino acid
VGSKEVMNESQNLEKITQEITSGMNEMASGADQMNVAVHHVNEISGKNRDAIDVLLKEVSRFKVE

SEQ ID NO: 86759 - protein, 84 aa, Unknown
  Obtained from environmental sample
  misc_feature (1)..(84): Xaa is any amino acid
VASYYYLMAQLPYLIYEQKPPISSAGFKALAETQLIEEDAALLNCLSIDPDPEGKTIPSYAELTPSTGCEFIDSWAGMGALFKA

SEQ ID NO: 86760 - protein, 370 aa, Unknown
  Obtained from environmental sample
  DOMAIN (137)...(217): DnaJ central domain (4 repeats)
  misc_feature (1)..(370): Xaa is any amino acid
VAKRDYYEVLGVPKNASKDDIKKAYRKLAIQYHPNKNPGNKEAEEKFKEATEAYEILGDDQKKSAYDQFGFAGVDGMAGQGDFSQTFRGFEDLFGDFSGIFDTVFGGGGRRRSSGGVRQGANLRYDIEIPFKDAVFGTKVEIQYTKNDACPSCKGTGAAEGSGKKVCSVCQGSGQIRHSQGFFSVASTCHNCRGEGYIIEQPCRDCGGGGTQRKRQKIMVTIPAGVENGKRVVIPHQGDAGPGGGPPGDLYVFIRIKPHEYFERQDFDLYCAVPISITQAALGAEIHVSTLDGKKLKVKIPPGTSNGKMLRIRDEGVPSGSKKGSFWIKLIVKTPEKLSRRGRELLEEFSRTEGENDAPKPIPLSEMAEQ

SEQ ID NO: 86761 - protein, 384 aa, Unknown
  Obtained from environmental sample
  misc_feature (1)..(384): Xaa is any amino acid
MTDSARGRCGKSTLFELYIEQLKADGVSDDQIIFVNLEDEDLSELLDHKKLHEYIKARIMKDKWMYIFIDEIQNCKNYEKTVSSLYLKKNLDIYLTGSNAYILSGELATKLTARYIEIDILPFSFEEYSEAVKNSDKRERFNQYMNRGAFPYATRFTDNSLAHSQYLEGIYNTVLVKDVMTNKNLKDITLLKSIAAFLASNVGSPVSAKKIANTLSSAGRPTGSATVDTYLEALCDAYLFYKVNRYDIKGKMHLKSESKYYICDTGLRNMILGTTNKDIGHQIENIVFLELLRRGYTINIGKSGRGTEVDFVAVRDKKTEYYQVSASVLDENTLKRELAPFKEIKDNYPKYLITLDDFTGDNEGIQQVNLIDWLLAKKASKIIT

SEQ ID NO: 86762 - protein, 98 aa, Unknown
  Obtained from environmental sample
  misc_feature (1)..(98): Xaa is any amino acid
AKKSGNGKTCERWELYYNGIELANCYSEETDPQKVKEFFIAESAQKEKTALVKHKVDYDYYKTFENFPRCSGVALGMDRLIMALTNRSTIDSVLPFAL

SEQ ID NO: 86763 - protein, 178 aa, Unknown
  Obtained from environmental sample
  DOMAIN (1)...(178): Domain of unknown function DUF140
  misc_feature (1)..(178): Xaa is any amino acid
MKFFANIGRYVLLMLRVFSKPQRWRIFYGQIVSEMMSLGMNSLPIVSIVSIFVGAVIAIQTAYNLQTAPTYMIGLATRDTLIVEFCSTMIALILSGKVGSNIASQLGSMRITEQIDALELMGVNSASYLICPKVIALVMLAPFITIFSIAIGIMGGLVGMALTDYITVTRQEYQSLRD

SEQ ID NO: 86764 - protein, 399 aa, Unknown
  Obtained from environmental sample
  misc_feature (1)..(399): Xaa is any amino acid
MKEFGAKNYDSTAYITFDIDNTYKNIFEKDFNVPRIIHELSIASGIKITPDTLIIFDEVQECPRALTSLKYFNENAPEYRIIAAGSLLGVMTLEGTGFPVGKVDMLTMYPMSFYEFLEAVEPRYVQILKTPDLSAISAFHDAITALLKQYFYTGGMPAAVKKYCETRDFGEVRDVQRIILDSYYADFAKHIPSANITRTRDIWDSVPTQLGRENKRFLYSGMKEGSRGRDYEASLNWLTNTNLIHKLYRVSLPNMPLIGYKEPAVFKLYMNDVGLLSTRAGLDIKLYIDDNDRTFSHYKGGLAEQFVLQELIATGDKLPIYYWAAEKNTAEVEFIIQYTDKIIPIEVKSGKNVKSQSLNVYRNKYAPSHAVRASLKKYGIMDGLYSVPLYLIGNLSAII

SEQ ID NO: 86765 - protein, 157 aa, Unknown
  Obtained from environmental sample
  DOMAIN (11)...(156): Protein of unknown function (DUF1016)
  misc_feature (1)..(157): Xaa is any amino acid
MADIIPAEDTVYQSIRTVLAAARQMVYTAVNSAMVEAYWDIGRQIMEAQEGQRAEYGTGLIKYLAERLTKEFGKGFDESSLRRMRQFFQVFPIRAAVRHELSWTHYRLLMKVGNEVERDFYSKNVSNVTGVPVSLNGKLRLFITNGSLPPEKKARNR

SEQ ID NO: 86766 - protein, 867 aa, Unknown
  Obtained from environmental sample
  misc_feature (1)..(867): Xaa is any amino acid
MPDGPKVYYVRATNTTGAITVKSYMFLIRNDAPSLEIYTPAPGEAVFDTFMLSGKTEARTGIARLSYEWGSIKGDIDIRPGDPYWSVPLQVAKGATGSIKVTARDRSGKTASLTRKVDLRITGGGDFSRQTKIQFVSPTRNEVVRGGRTVMGFIEHPVPIQTIAYTQNGFQFQEIPFISRAGKAWFSYYCDFSTFNPMWEKLSFRFTDVNGANYDQAPEYTLGTDEPGGAAPRLILNTPFDGEVITSAFDITGIASGVGIETVHWRFLGPKLDSITKGEAGKTATEAARAFMANSNPPFEEKTTRQNITIPIDFTMITDGEYNCEVYVQTRDGVKSETVYRTIKISTSAPVTRIITPPISRYSSHMILVRGHSADANGIGRVTVSMDRGLTWQDVTLRDDGTWELPLNTGIYTDRVYSALITAEDIYGITSFATAMINIDNTPPAVFITSPLSGDYVGADMPVIGRIADNIELKSLNFQVISVVDPSNRLALDIEPRPVIFETFNLSTFKAGEYILRVVAKDLADNETVISRKVFYDPLDIDAQVAIYSPLPGEEHTGPVYVAGIVTGTVLPEKIQLMLDGNEFQELPLDRFGVFRYDISEEELATYGQHKIYAFYKTERGRTVASANHSVYYYHYGPILLIDSHRDGDVITNRPWLRGRAMFGRPPHPDGREYTRAEASEFAVNKVEVSYDNGRTFRKALGKGDWKWRLEPLDLPPGTQPVVVRATFENGEEAVRRVLLFMDPDVPKVETVSPEEKSRQRDELKVYGDASDNFDLTDVKVTLRPYHKFWYSVPDAIRGLYFDVKTLGATYFDVGAGLSFFDHNVRVQGQWGISPPLGAYSVMVTGGRYVGQVAGIKLVANIITIPL

SEQ ID NO: 86767 - protein, 82 aa, Unknown
  Obtained from environmental sample
  misc_feature (1)..(82): Xaa is any amino acid
MQIVTPQACFHLWPEEDRENTWCACPACRAFSPAEQYIIAVNTAADVLAKLDPNARLSFIDYGEETGKAGIAPRKNMFKVKK

SEQ ID NO: 86768 - protein, 659 aa, Unknown
  Obtained from environmental sample
  DOMAIN (442)...(559): Response regulator receiver domain
  misc_feature (1)..(659): Xaa is any amino acid
VEEKTLLTIEEYQARISELEKTVRKKDREISRLQTGIEQEKIFANVKANMVAAKTVAQRIRDHYLQLLLDNSSDIIICLNNLKRIVFCSKVLIKLAGAEADSESGRQIDEFLKGVCDDRCIETINANLSEVFAGNGARTVPLEICFSSSTEVRQCEIDFIPMSSSEIGNEGAMVIFNDVTAIEHAREDAELASAAKSEFLLDMSHEMRTPLNAIIGMTAIARKSDSAERKEYCLKKIEDASTHLLDVINDILDISKIETNKLELSLESFVFERMIQKAVNIINYQVEEKHQYFSVNLNDNIPHTLTGDSKRLIQIITNLLSNAVKYTPEGGSVHLDARLAATENGVHTLQIEVTDSGIGISAENQSRLFHSFHQTDANSSHKFGEAGMGLAISRHLVELMGGRIWVDSELGMGATFGFTFLAKPGDESENKILSNNSYWANKRALVVDDAPNILVFFRSEASRLSISCDVMLSGEAAIEQIEKNGLYDIYFIDWKMQGMNGIETAGKIKGLNAGKPRPSIVIMSSAAEWKLIEADAKAAGVEYYLQKPLFRSDIVDCLNNFFGLKNIEESQAQEIKDNFEGFRILLVEDIEINREIVLAYLEPTGLTIDCAVNGKAAVKMFTSAEKPYDMIFMDLQMPEMDGYEATYKIRLGRSDHWFS

SEQ ID NO: 86769 - protein, 983 aa, Unknown
  Obtained from environmental sample
  misc_feature (1)..(983): Xaa is any amino acid
ALRGYFQITEQEEAATDEKRKIIPIESARTTEYFKIEVVDEEYARLSGEVRVSLKDGEAIHQISAWNILFNRTRNILTASGGVEYIKTEGDKIETFRGDSITVDIDNWSSVFLGGVSERSLLSDNTTYLFAGTVISRDEEEVTVLNRATISSANNPESLWSLNASRVWLLPGSDFAILNAVLKVGEIPVMYIPFFYYPADEVVFHPVIGSRTREGHFIQTTTYILGRPKASSTSQSSLTKILGNSADMEKKREGMFLRSTGKKVKDADKVSLKAMFDHYVNLGTYIGADLTLPAYKILGITNLSVGIGLTRTLVLKDGSYTPFFNNDDETDWNHSNLFSFDVPFRFRFKTANSISGKYGSFSWSIPYYSDPFVDGDFLKRSEEMDWINMIQQGAASMEAQNTSESRQSHEPWTFTGQLNPKFPNMAPYINSISIGTISSTIAFREVRNNYSTNDIKYYSPSSFFFAPDTATLYQVSASVSGAPLSLGGNRASRSSAPGTDGVEAEDPLKGIGVPRSPFEAKTEEKNIIKDTADRLVPPALTQRFELPRVGSTNFNIDYRLAPQSSSTLRFDSNKWKEYSDIDWGDISNIRTNFRGDANVNLNFSHSEGIYSNSFSFAGNGAWSQFSYLNEEAQEYLSGTETDRRQKISNDKLQEARSSFFSTSYGATTTIRPFYKNAIFGQSSIAYNLRGIAVRSKFIEKDLSAITNPGDKADLLESWAENPEWELEWADWDKDKISAHSLAATLSASVLEKTQTLSMTADLPPRDAKLSWNTGINIWITSTNASWGIQLPEKREEWKLDPFTFRESFNFGSYGSLSFNMTMDTEGWDSPETGKMEKRLSSITTSLNLTKWGVSASYSASRMLGYEYKVGTSNADTGWFQRTGDENMILRPMNFNLSYSKNIAMKELWKKNIDFTVNTKSSLNINLQQYTSSNFNFSLGFTLGINRLLSMSVAAESSNSRIYQYFHDWPGFDDAPIELPPRPI

SEQ ID NO: 86770 - protein, 107 aa, Unknown
  Obtained from environmental sample
  misc_feature (1)..(107): Xaa is any amino acid
SKIFVKNGNKTAFNYFLNVIAALKGVLRVIRAIDNCNIYTLWMDGVLNDKAYIMPGLGDAGDRINGHDIGANPRNIIQLLADYGTGIANLYRSQFHEIEKIVLNRSV

SEQ ID NO: 86771 - protein, 308 aa, Unknown
  Obtained from environmental sample
  DOMAIN (1)...(308): Major Facilitator Superfamily
  misc_feature (1)..(308): Xaa is any amino acid
MVVQYAIFWHITLKSKSGGMMTLFALIGLLPMCVISPFAGVWADRYSRKRIINIADASVALFSLIAAVMLTLGIDSYAMLFVCALVRGLGTGVQNPAVNAFIPQIVPREHLTRVNGIQGGIQSFVALATPMIAAALMAAAPLQTLFLIDVATAIIGISIVLFFVKIPEWGRTAPVRKDTGYLHEFREGIKYIRGHGYLLRMIAVSAAFMFLAAPAGLLTPLQSVRKFGDEVWRLSAIEVAFSLRHDGRRHPDRRVGRPEKPRLHNGALVRPMRAAGHRPGRRPSFWPYIANMGLIGISLPLYKAPSMA

SEQ ID NO: 86772 - protein, 568 aa, Unknown
  Obtained from environmental sample
  DOMAIN (110)...(137): The GLUG motif
  misc_feature (1)..(568): Xaa is any amino acid
GITGANNGSIENCSFSGTVNGGSGNDNIGAFAGWNNGTVINSRSSATVSGRTDVGGIAGRNTGSIENCYNTGAVSGRNRVGGITGINLNNSANIKNCYNTGDITAAGATTASYAGGIAGTNETGSTVDSCYNTGNVTASTNAVGGIVGSSINSTLQNCVSLGARVTGTNNVSRVGGTSGSSTLGNNYARSDIKIGASGAEAAVSPAGANTPNGGNISITSGASLTVVFSGWDTALWNISGTFAIGGNLATLKTNTQSPAPTLPEAYNPPGTAANPFLVTNETDLRKVGTGTDGWTLSAHYKQTQNITMTTSNFTPIGNDANRFTGTYDGDGKTISGLNITGTGNNLGLFGVIHSAGTVKNVSASGTVTQNADTSFTGGIVGQNNGTIENCSFSGTVTGSACDMVGGIVGQNNGTVINSRNNATVSGRSQVGGITGRNQGTIDNSYNTGAINGKRYIAGIAGVNTNTGKYIKNSYNTGNITATEATESSMAGGIAGLNQSGATVEYCYNTGNVTASTNNVGGIVGSNSGSTVRYCVSLGARVTGGNNTCRVVELCREQQLSPTTKPARI

SEQ ID NO: 86773 - protein, 282 aa, Unknown
  Obtained from environmental sample
  misc_feature (1)..(282): Xaa is any amino acid
VTRTEKSVNSLLENYDAYGMVNHSGVMNLPGRESVQSIVRDIEDLIFPGFLENVRTDRESLRKNTAKKVKKISLALRREVEKSIVFSVRRETLNCKQETCRAAAALVIEDFFEELPKIRVILGKDLEAAVRGDPAAKSANEVILSYPGFKTITVHRIANFFWTRQVPIIPRMMSELVHGWTGIDIHPGAQIDESFFIDHGTGVVIGETSVIGKNVKIYQGVTLGALSVRKEESDHKRHPTIEDDVTIYANATILGGETVIGSGSVIGGSVWITQSVSAESDL

SEQ ID NO: 86774 - protein, 589 aa, Unknown
  Obtained from environmental sample
  DOMAIN (333)...(520): ATPase family associated with various cellular activities (AAA)
  misc_feature (1)..(589): Xaa is any amino acid
MQKEGYILRNNEYIRILPAWAQELAAKYGSKTANLYILHGNIRDLLPHRKKEDEFVFTRVQEYISEILFGNRDIIAYYDRSGGISFCEPQMESDYLAAAPKFAVSPDIDKSDFVSSDPEKSFPYLEKYFLSCIPVDRREKCRMVFIIDYAEHIVPAGDLIRLSDTDRYCMVTFNRWATDPKFINGDISIILLTENLADISSRLTGSPSTVKISVPFPSIQVRESFLRSREKEGKLLLERGLTPDKLAMVTSGVNLMNLNRLAAESFEENKPISLDFMRMKKKEIIETEAAGLLEFMETSFNLSHVSGHDFVKKRFKNAAKAIKMGRPDVLPMGYLIAGPVGTGKSFMVNAFAGEIGIPMVKFRNFRTKWQGETEANLEKVLNILIAMAPVGVMIDEADAFLGDRDQEGDSGTSNRVFAQIASFMGNTEYRGKIIWFLITCRPDLIPIDLKRQGRAEEHLALFYPESDEDREDLFKTLVRKLDLDIRNFSVSDLFKKYKHEYSGADLEAVLVRAKLLAAMDDRVFVKREDMEDAMSDFVPAAYPHEVELQNLVAVLECTSREMIPKQFQKLPRSKIISDIQELKALLGER

SEQ ID NO: 86775 - protein, 393 aa, Unknown
  Obtained from environmental sample
  misc_feature (1)..(393): Xaa is any amino acid
MKIFNRQGRALLLTAAAMVATGFASKVSAQGDTAYVPFVVNVGAAVKAVPETGTTAVVDSVKITVTANQQANLKIPLPKTSGVLNGAQNRLSAPAVISNHSGKVTVNLSAQSYKNAEISLYTVNGKRILRHETAVSEAAKTISRGNLTAGAYLLSVKGADGGTVTSRLTHNGGNLDISVAVNAENISSVPRLAKQAADGKWKITVSASGYSDSTYTLTPVKGTHAVQNITLKTTTTPPNQTPPSQRSWTNVDYAPTASRRHSRQRYDIKLPSSGNGPFPLLIYVHGGGFSGGDWELSKNNNGLVSRANSNGYAVASVGYLLMGQSGWSGGQRAFPENVEDVLAAVRHLRANSDTYHIDPGKFAISGYSAGAYMTAIVCALSNATNHGYNITDL

SEQ ID NO: 86776 - protein, 272 aa, Unknown
  Obtained from environmental sample
  DOMAIN (81)...(269): FGGY family of carbohydrate kinases, C-terminal domain
  misc_feature (1)..(272): Xaa is any amino acid
LRRYGDASGMAIFDVRERKWARDICKLISPDLESWLPPLIEADAVAGKVSKEAEKIYGIPEGTLVSSGGGDNMMSAIGTGTVRDGFLSMSLGTSGTLFGFSKTPVIDPTGNLAAFCSSSGGWLPLLCTMNCTVASEEFRALFGLDVKAFDAEAAKAPIGTAGVLVLPFFNGERTPNLPNGRASVNGITAGNFKRENLARAALESAIFGMMIGMEGFNKLGFKAKEIPLTGGGAKSPLWHSIARQCNESACQGSGQHRGRRDGRGYSGVVVFA

SEQ ID NO: 86777 - protein, 85 aa, Unknown
  Obtained from environmental sample
  misc_feature (1)..(85): Xaa is any amino acid
GLFAEGTGKREIDFIVERDDGALLGIEVKAGHNVSRKDFAPSEWFRDNINKSKKPFIGIVLYSGDRTIKYSDSLIAVPTASLWTE

SEQ ID NO: 86778 - protein, 520 aa, Unknown
  Obtained from environmental sample
  DOMAIN (440)...(468): The GLUG motif
  misc_feature (1)..(520): Xaa is any amino acid
LNVNAGGTVVITAKISNGIAKGKDFTQDFKIVIGAGVPPITKEDQEYTIVILTFDNESGDTLTVSPNKGVEGAAVTLSYTVADTAHYNQLDFGGVSTNIASVTSAGSGTRTYTINASDASSSNVITITAIFTHTDLEIDHIAFSEHDGGHITKVYGDEPFTNAITTAHKGTGAITYHSSNESVATVDSAGTVTILAVGSTVISAEKAADDKYAHAITTYTLTVNYKPGTAENPFLVTNEADLRKVGTGTDGWTLSAHYRQTANIMLTSSFTRIGNNTNKFTGSYDGGEHTITGLSMTISSTYIGLFGYIGASGTVKNMNVTGTVSSDSTNRTCIGGIAGGNEGTIDNCVFNGTINGSATTNDNVGGIVGENSSTGTVSNSINNATVKGRDQVGGVVGQNNGTVINSSNNGSVTGNNQTGGIAGTAQGKIDNCYNTGTVTGSQQVGGIAGTNVGSGNYIKNSYNTANVTSTAGTSSNVGGIVGFNQANTTLEYCYNTGNLFGSSAVGGLRELAPAAIITPQ

SEQ ID NO: 86779 - protein, 412 aa, Unknown
  Obtained from environmental sample
  misc_feature (1)..(412): Xaa is any amino acid
ADRINNEDTIKNVAFTIDRKPPKLTVTKPIHLLRTNSTFSAPFTLDVTVNELNFKKLTVDVNGEKFDYIASFVSGDVYRWVWDLNSTFNDGVNTAVKAWWSSLNAGSNSITITAEDYAGQKASDTFNFTKDEGKPEITLSNLEGNTPSITETAAAIRLSLFDEYSKLGKFTGTSTDNTGTVDNTYKYRIYRPTDSSVTQTTITGPADLTGASPAWESVKFKVEVGGNMVDDPDPGKSFNDSIPLTGANAKNRFWGGVLNYIPDGDWVVQVFVEDRVGNFHSVTQLFYVNRNAPVIRKQDNSIGVDKSDSNSNKGSFYSNKESLFSGTGTNKYLFKLSGTVTDGDFKELNIVIIDGNKTERPVATFSRTTWETNTNFTKDDDTCVYTWEWFFYKEKEANFDSLPQGESYVVIT

SEQ ID NO: 86780 - protein, 62 aa, Unknown
  Obtained from environmental sample
  misc_feature (1)..(62): Xaa is any amino acid
ATRVKPAGNRICGFEWGDIAKAMARYDVHKLATGWNTGPDGEKYFFVPNPALGLWALRDTFK

SEQ ID NO: 86781 - protein, 169 aa, Unknown
  Obtained from environmental sample
  misc_feature (1)..(169): Xaa is any amino acid
KDQIGRGIFCHTTPGFDSGTGLGRGNRAFETYAKICPAYREDDSELRRLEPYVYAQMVAGKDAVNHGEAKNSWLTGTAAWTFVSISQYILGVRPVFDGLMIDPCIPSTMKDFTVTRHFRGADYHITVDNNAGAEKGIKSITVDGKPLNGVVLPVFGDNKVHKVVVTLGK

SEQ ID NO: 86782 - protein, 168 aa, Unknown
  Obtained from environmental sample
  misc_feature (1)..(168): Xaa is any amino acid
GFAIDQIGRAATQGWIILAEALLGHGNRAVEYYLESCPAAQNEIADTRLMEPYVYSQFTESVDSPFEGRSHVHWLTGTASTVMVGSVEGILGLRPDIEGLRLSPAIPSSWKSFTMEKIFRGKKLNIKVNNPNGREGGCNKLTVNGKEVEGNYIPASILKAHNEIILDM

SEQ ID NO: 86783 - protein, 501 aa, Unknown
  Obtained from environmental sample
  misc_feature (1)..(501): Xaa is any amino acid
MNIKQSVNNFKTRVLSSYIMIPAVILALLLIAAISNNYLTNIINRKLLSNARTTLDALETELITDLKESRTALSKQSEYVRGMILNGAGEEEVRTYLYDTNEYILQNDGKRLLGFGGIFGCFNIFGGQMLDGQDRYLPEDYEPAEQPWYKEAVAAGGEIVYLPPHTGELTPVAVITYARGLFDNNGNLLGAIAMDTEFKRIREYIVNENLEKLWLGILLNEQYEYISQRNPEMEGKKFEDDSSDAARLVAELKLRRDVSEFRMKNNQNVKSIAFIRKLDNGWHLGIITPEKIYFEELRRVRALIILLVIVLSAVFTIIILRFLLEKNKVSATTISKIENISFHSLNTCFLLLLSFITLYPFWTTIAVSFNDALDSIRGGITFFPRKFSLFNYEVIFRTGAIPHAFFISVARTSINLVTSVFFTAMIAFALSRREFILSKPFTFILVLSMYVNAGLIPTFLLIRNLGMYGTFWVYIVPGIVNAFNFVVMRTYMRTIPESIID

SEQ ID NO: 86784 - protein, 77 aa, Unknown
  Obtained from environmental sample
  misc_feature (1)..(77): Xaa is any amino acid
SASRVVDITPLNKNIPLNAETASIIDEERQRIESGAFNVFSGVMKTNDGKSIGREGGNLTDDEIRNEMNWYYRTVIR

SEQ ID NO: 86785 - protein, 775 aa, Unknown
  Obtained from environmental sample
  misc_feature (1)..(775): Xaa is any amino acid
MTDWPRISESQERMAVVVAQKDANEFINFAAAENLDAVVIASITEDGDGASLKMKWRGKTIVDLSRKFLDTNGAPRSAQALLTAALGGDDANEALPGISDGAENVHPVVLLDCLERELMSLRTGSRRGLQERFDGSIGSASVLFPWGGAYQGTPECGMAALLPSLDKQSRTASILCFGYDPFLMERNPYDGAKGGIREALAKYACLGGDFRKARLSLQEYFQRPLSPESWGLPASALLGALEAQIALGIPAIGGKDSMSGNYRDAAGGIDITVPPTLVAFAAGIAPAASIRSGALSGETGNVIVLLAQAESFPFKTANPACNEWDIFKANMDALASLGAIGCVRSAYPVVSGGVATSLALTAFGNSAGLEMKSRAFTIIDGSSYQGSVLVEIDGAAFRDNPRVGEILGGTGCWEIAAFTIEEPVFRVTKETDDEMQIAEVPLEVLRRAYEYPLTKVYPQIGTGEQGLGTGEGTIRNEELGIRNKEQQSSLFIPHSSLLIPNSLLTPHSLATPLVLLPVFPGTNCEWDMERAFRDAGARTRIVVFRNRNREDIAESKKELAQAIGECQILALSGGFSAGDEPDGSGKFIANVLRSAVIADAVNNLLENRDGLILGICNGFQALIKLGLVPYGAYRMAESSMPTLTFNRIGRHVSRMVRTLVIPNCSPWLALDKPSAVHVLPVSHGEGRLVISRTEGEALFKNAQVPFCYADENGRPTMREPDNPNGSDFAIEGLCSPDGRILGKMAHSERRGEYVHINIPGDKKQNIFKAGVRYFN

SEQ ID NO: 86786 - protein, 409 aa, Unknown
  Obtained from environmental sample
  DOMAIN (208)...(383): Glycosyl transferases group 1
  misc_feature (1)..(409): Xaa is any amino acid
MKMKKICIFCSLSSFGTGMPISTYKLAVGLVDRGGVGVCVLLPEEGELAERLRGAGVDVGIVPFERVKRDSWKRPWRLLAFVSAGWRLYKYVRGGHVGIVHFSDAIDAPFYPFARIAGAMAVAHVRVCVDAPAVRYLYRVWTHLFCSRIVVVSHFVKRYYKFGRRATVVYNPGPDRGVFDPKRYPKTRDGKNGRGTVGADVIDANNIINTNADIHNTYGDCPIVVAVSSFRRDKGLHNFVEIAADIAERLSGVRFIIVGGMVRGHEEYYYEVIESARRVGLGERLTVIGNVKHEEVAAHLAGASVLIHAPDWEKALGGVVLEAMAMGVAVVAYDCGGIGECFHNGISGYLVNRGDKTGAAMRVTSLLNNPKRLEDMTENAKKELDEKFTLESYLNGVLAVYDRIWNDKQ

SEQ ID NO: 86787 - protein, 106 aa, Unknown
  Obtained from environmental sample
  misc_feature (1)..(106): Xaa is any amino acid
DYREGILRHGVTIVQSVGSGMVNFYAPVFTGIKYRMAKAVPNYAEELNNHLADFRDANSVFSCNCILNFLYGELEGKSIELFRGPITFGEIAYQLVNQTLVYVSVL

SEQ ID NO: 86788 - protein, 500 aa, Unknown
  Obtained from environmental sample
  DOMAIN (65)...(325): Protein tyrosine kinase
  misc_feature (1)..(500): Xaa is any amino acid
MNIPPPPPPTPPAPLQPGLPPQPGQQPGQPGQPGQAGAKGGFKIRNVLNTVNRTILQAGAVLGKYNIIEEIGRGGMAVVYKALQTDLKREVALKVMPANITLNYSVVERFLSEGQAVAKLSHPNIVNIYEMSSENGVYYIAMEYITGTNLYQHLNENKPKLVDVLEIVSKLAEALAYAHSQKIIHRDLKLNNVIMKDPLTPVLIDFGLAKALEESDSGGGITRTGEIMGSPAYMAPERLMGKEVDHRSDICSLGIMLYEMLTFKNPYLDQRNLHQTTYNVMEANPIPPKKLIPWLPVEIEAITLKAMAKDPDARYQTMDELRQDIIRYQNGEAVTARPPSFKKRTASYMRKRWAPIAITLLVLIFSGIIGGGYYIQRKRVYSYWQLFYAQSLSATASEWTLVNSDSLHPGKLEDGNKSFTLSSQGFSYLRLEQRFNRDVMIEFDISAPSDNLHRAGLFLFGDSPENAHCIHINRDGFGESGKLPRKPILSRPNLYMAQQC

SEQ ID NO: 86789 - protein, 55 aa, Unknown
  Obtained from environmental sample
  misc_feature (1)..(55): Xaa is any amino acid
AIFWGISTENTGGMNEMASGADQINVAVHNVNEITQKNRDAIDILIKEVSRFKVE

SEQ ID NO: 86790 - protein, 116 aa, Unknown
  Obtained from environmental sample
  DOMAIN (4)...(66): DnaJ domain
  misc_feature (1)..(116): Xaa is any amino acid
MKRDYYEVLGVAKDASLDEIKKAYRKLAMQHHPDANPGNKESEELFKEAAEAYGVLSDADKRRQYNQFGHAGVGGGGFQFDPGQFADFQDIFHGDIFSNLFGGLFCSFFGGDRVAS

SEQ ID NO: 86791 - protein, 217 aa, Unknown
  Obtained from environmental sample
  misc_feature (1)..(217): Xaa is any amino acid
MKFRNGYWEIRGGFSQIKPAEFWDVEIRGRELHLFSTAKKVNHWGDTLNTPLLTTIISSPMPDIVHVKTFRHKGIKKFPPEFNLVPDLSGSDETGITIGEKDGLWRFTAGKLAVEIDTKGSFDLCFSREEKKLTTAPGKLSGLFTDTDGEPHMVQYLGFGVGETVYGLGERFTPFVKNGQTVDIWNEDGGTSSEQAYKNIPFYVTSGGYGLGRSDTW

SEQ ID NO: 86792 - protein, 97 aa, Unknown
  Obtained from environmental sample
  misc_feature (1)..(97): Xaa is any amino acid
MEKQYHVDFDDSHGALYAILPGDPGRVEKIASFLEKPRFFHQNREYTTWLGELSGRTVMVISTGMGGPSTAIAVEELFKQACAILSGSALAAEWLFT

SEQ ID NO: 86793 - protein, 197 aa, Unknown
  Obtained from environmental sample
  misc_feature (1)..(197): Xaa is any amino acid
LSTRKTIGTNNESSLHRALKFQYAGPGGKTEAEVGAFVADGIRKDGEYIEVQTGSFGPLKKKVKEFAAVGKVRIIHPIAVTKTIEVYTKDGKLLYRRKSPVHGTPWEIFDALLYAPELPLIRGVTIEIAMIDIIEKRVKDGKGAWRRKGISIKDKEMSAFHESILLSKPKDYLRFIPFRKRKSLPYHPTPKKPVVKN

SEQ ID NO: 86794 - protein, 65 aa, Unknown
  Obtained from environmental sample
  misc_feature (1)..(65): Xaa is any amino acid
MPLLFRAAFKPTPSIDMEHDSVSLSRSENAVLQIKGRHDPCIVPRALPCVEAAAAIALYDAFLDR

SEQ ID NO: 86795 - protein, 220 aa, Unknown
  Obtained from environmental sample
  DOMAIN (2)...(51): Tetrahydrofolate dehydrogenase/cyclohydrolase, catalytic domain
  misc_feature (1)..(220): Xaa is any amino acid
CLSREASGLLSLIDELNKNDKVHGILVQSPVPKHIDEEKINAAVAPEKDVDCFHPVSVGNLILDRPGFLPCTPHGVLVFLKEYNIPVSGANVVVVGRSNIVGKPLANLLIRREYNATVTICHTGTKDLASHTLQADILIAAAGKAGFIKPEMVKEGAAVIDVGINRVPDSSTEKGYRVCGDVDPSVAEKAAFFTPVPGGVGLMTVAMLLQNVVEAAERSL

SEQ ID NO: 86796 - protein, 80 aa, Unknown
  Obtained from environmental sample
  misc_feature (1)..(80): Xaa is any amino acid
GVRHGQIGRVMRIASHDIELTNILAEKYDNYHFCEQITDDEITFDYKLKQGVSRTRNAIKLLKLMGFNSEIVKKAEELSL

SEQ ID NO: 86797 - protein, 176 aa, Unknown
  Obtained from environmental sample
  DOMAIN (1)...(175): Transketolase, thiamine diphosphate binding domain
  misc_feature (1)..(176): Xaa is any amino acid
LSKGHCGVALYVTLAHAGFFPRGQLDGYYIDDGVLPGHLDMSATNGVECSAGSLGHGAAIGLGMAIAKERDGRGGRVYVLMGDGECNEGSVWEAVMLAATLKQKNYTLIVDFNHLQGMGRDVIDQRNLGERFAAFGFHVLEVDGHDTGALASALTDDRRGPLGRRRSHGGKGAAYH

SEQ ID NO: 86798 - protein, 207 aa, Unknown
  Obtained from environmental sample
  DOMAIN (1)...(199): Arginosuccinate synthase
  misc_feature (1)..(207): Xaa is any amino acid
VGSHGQIGRDHAGRAPDKPEYVELGFEKGIPVSLGGKKLAPLELLESLNKTGGRNGVGIVDLVENRVVGMKSRGVYETPGGSIVYAAHRELENLCLDRQTTSFKATVGQKLAELIYSGEWYSPLREALSAFVDKTQETVTGTVRLKLYKGNITPAGSKSPYSLFNMELSSFTTGSLYDHRDADGFIKLLGLPMTVRAFMKKAVEEKR

SEQ ID NO: 86799 - protein, 163 aa, Unknown
  Obtained from environmental sample
  DOMAIN (6)...(85): Sigma-70 region 3
  misc_feature (1)..(163): Xaa is any amino acid
AFAFRTERKRFFARLIRHTTVLTQRNKRPPKYSEIADEIGIPVKDVEFVLSLSSDIIPLETEWGTNENSFMIEHLADHTYSPEPVLMKKSSREETFRMLNELKENEKNVLIYRYELNGSKRRTLKNISTKLGLSTETIRQIELRALQKLRDNAKDLKLYVESS

SEQ ID NO: 86800 - protein, 177 aa, Unknown
  Obtained from environmental sample
  DOMAIN (1)...(174): Rhodopirellula transposase
  misc_feature (1)..(177): Xaa is any amino acid
MLQVMKEHPDRDMQFRFINDKAKRFLKAGIPVISIDAKKKENIGNFINNGRAYRKKKDPTKVVDHDFPIKELGKVTPYGVYDIGRNEGFVNLGISSDTSEFAVESISRWWLTLGKNTYPKAKKIYINCDGGGSNGSRNKLFKFQLQQLANHSGLEIHISHFGLYPNRRTQFKRGYLS

SEQ ID NO: 86801 - protein, 125 aa, Unknown
  Obtained from environmental sample
  DOMAIN (2)...(123): Pterin binding enzyme
  misc_feature (1)..(125): Xaa is any amino acid
MAGSLKFAKMIRENNWSEAISLSVAQIENGAQIIDINVDDGLLDSREKMRHFVNLYVSEPAATKCPVMLDSSSWDVLVAGMECFPGKGIVNSLSLKEGEEVFLKKASEVKRMGLHCVLGRSDPSL

SEQ ID NO: 86802 - protein, 100 aa, Unknown
  Obtained from environmental sample
  misc_feature (1)..(100): Xaa is any amino acid
MDKVEVHAERTANLDGTGKENLKPASLQWEAIDWFKVEEFINKAQARIAKATVKGNKKLVRELQRMLAHSYYAKLWVIRKSTSTVGERTAGIDNEKWDTP

SEQ ID NO: 86803 - protein, 131 aa, Unknown
  Obtained from environmental sample
  misc_feature (1)..(131): Xaa is any amino acid
MKEKIFRPVEFWKSAVMTLPDNSFFELIRSVFGKIKTPFNKQQLTDDLEKFLMRDDIQKTIAAYIDRNDANIIAAAALFGEPAPGELESFFCGEFSYAQIQDIIVNLEEAVYSVPFSAKESVGPSRAEICF

SEQ ID NO: 86804 - protein, 77 aa, Unknown
  Obtained from environmental sample
  misc_feature (1)..(77): Xaa is any amino acid
MHIAADHMMMCVQDLGLSSCWITYFDPKIVRKEFNIPDNIVPFNILAIGYGADAPQSPDRHGETRKPLDSIVKYSSF

SEQ ID NO: 86805 - protein, 711 aa, Unknown
  Obtained from environmental sample
  DOMAIN (122)...(147): The GLUG motif
  misc_feature (1)..(711): Xaa is any amino acid
MTTSNFTRIGINTDTGNFSGVYDGGGYTITGLTITGTSFQGVFGAISGTVKNMNVTGTITQNGTGTNVSTGGIVGLNMADGTIDNCSFSGTVSGTGCDQVGGIVGQNNGTVINSRSAATISGRTSVGGIAGVNNGTIENSYNTGNITGTNQVGGIAGANSGTGSFIKIRNSYNTGDITATTTSTANAGGIIGVNQSSSTVEYCYNTGNVTGSTAVGGIAGANQSGSTLQNCVSLGARVTGTGSTNRVIGIANGNMNDNKARTDMKIGASGAEATVSGAATNSNGASVTVGTAMSTFFSGWDTTTIWNTGGNLSVGVNLPTLKTNTQTPAPTLPPAYVLGTAADPFIIATEADLRKVGTGTDGWSLSAYYKQTADIAVTSANNCPAIGSNANRFTGTYDGGGKTITGLTQVTTSSYSGIFGYIGEGGTVKNVTVTNGTITQNGSNTSFTGGITGYNLGTIDNCSFSGNVNGNTTNDVIGGIAGRNNGTVINSRSTATVSGRICIGGIVGENTGKIENSYNTGNVSGTNQIGGIAGALSGSSSYIKNSYNTGNVTATDSTSNVGGIAGNCTTGSLVEYCYNSGTVSGAQYVGGIVGTGGSTVTVQYCVSLSTRVITTTNSTYAGRISGAQGVTMTGNKARSDLLLGPSTQTTPVTTGTGSNKDGENVSLGTTVMNVFTSFDGSIWYIWNTPMNVGGDLPTLRKNEQSPAPKLP

SEQ ID NO: 86806 - protein, 817 aa, Unknown
  Obtained from environmental sample
  DOMAIN (747)...(816): TRCF domain
  misc_feature (1)..(817): Xaa is any amino acid
IRKLEHQWKTVGDLDGAEWFLHWFGLNSASILDYLPTDAIVLWDDIVPIRRRLGEAVDNYAHHQERVPEAFAPLVSPPSELLLDEKTIAEELSCYDVVYLDTVDFPKDTTIFPVSFLPQPPLQQEMSLIVNDLRERAGDGYRCVIACHSAGHAERMAELLGNDVGAVTEVVTGALHSGFICSDIKLLAYTESQIFNRPYQAVKVKKQKTGIPLGSFDQLSVQDIVVHEEHGIGRFVGVERVKTGDSVSDCMVIVYADNAKVYVPIEDFHKVQKYVGKEGFAPPLSKLGTQAWERLKERTRESLREMAQELIALYAKRQFLEGICFAPDSVWQREFEDSFVYEETPDQLRAIKEVKADMESAKPMDRLICGDVGFGKTEVAMRAAFKAVMSGYQAAVLAPTTILAAQHFATFSERMSSFPVRIEVLSRFQKGKEVKTTVEKLASGEVDIVIGTHRILSEDIKFKNLGLLIVDEEQRFGVKHKESLKQLRYKADALSMTATPIPRTLHMSLVGARDLSIINTPPRNRLPIETVVAEYHDELVKRAIENELDRGGQVYFVNNRIKNIPALQDKLELLAPKAKTISAHGQMDESELEAIMKEFIAGRYDILLSTVIIENGLDIPNVNTIIVNRADTLGLSQLYQLRGRVGRSSEQAYAYFLTPPFNEVKEDSLKRLRALEQYTDLGSGFQIAMRDLEIRGAGNILGTRQHGFIAAVGFELYCRLLQDAVEEIKGGGQSEENKTAMPDTRLDVPMQAYIPTEYIADGQTRIAVYQEMSSLKSTEELSDMERGLSDRFGALPEPVGALILLMRLKIQLGQSVF

SEQ ID NO: 86807 - protein, 374 aa, Unknown
  Obtained from environmental sample
  DOMAIN (331)...(364): Tetratricopeptide repeat
  misc_feature (1)..(374): Xaa is any amino acid
MSRKQKIIIISAGVALTALIVLGIIFFVKGKKQDPDGEGTAIASQSDSKRQNTLKLIERYLTQGEFDRALDLVDRLLIENPDDEEANELQQRILMADRHKDSDGLTELQRQLLEEQRRQNERIAASMQKSMSSPGLASGESEAAAERRAAAEAEAARKKAQEEELAKVSRELQDKMRKVNELVADAKAKLNAGDLAGAERIFSEARKIMPENEPRFESQKLADMADAYYEYNTKNTNTANGKEAARRAETLASEAVTKDATQALPHHTLGKLARDEHKNDKAITEFREASRLDSNNYLYSHDLGRSLFIAKRYQEARDAFQNAVKHNPNFEPSWYNLGGTLRVLNRNDDALAAYKQAVAVKARYYPAHRELGRD

SEQ ID NO: 86808 - protein, 826 aa, Unknown
  Obtained from environmental sample
  DOMAIN (651)...(781): Thiamine pyrophosphate enzyme, C-terminal TPP binding domain
  misc_feature (1)..(826): Xaa is any amino acid
MAGVDAAALVAALPDTVKKIAVLDRTKEPGSLGEPLYEDIRTAIGESLEESGSKFKAMPKVVGGRYGLGSAEFTPGMVKAVFDELGKDKPKNHFIIGINDDVTKASLDFDHKFTIETHEVHRALFYGLGSDGTISANKNSMKIISDTTPFYTQGYFVYDSKKAGTMTTSHLRFGPKPIRSPYLITSAQFVACHNFTFMEKYDMLKNLEEGGNFLLTSEYDKDAVWDHLPGWVQKQIIDKKVNFYVIDAVKIATEVGLGNRVNTIMQTAFFEIAKVIDEKVAIDHIKHAIEKTYKKKGDDIVNMNIASIDGAIKGIQKVSYPSAPTKPVEERKVVSDDATPFVKDVTATIIRQEGENLPVSKMPADGSWPSATTQYEKRNLAEGFSIPVWVPEGCIQCGTCSLLCPHGCIRPKAYDPSKLSGAPATFKSADVKGSKELAGLKYTLQVAPEDCSGCGLCVKVCPVNAKNKDSALKMEHQTPLRAPEAANWSFFLKLPETDPAKFKVATVKGSQFVRPLFEFSGACQGCGETAYVKLLTQLVGDRLYIANATGCSSIYGGNLPTTPYAQRADGRGPTWNNSLFEDNAEVAYGMRLSVDKFAEYAKELAKKVSESGSSDLKAVLGEILSADQSSNELIEAQRARVAKAKDLLKKGSDEASKELLSVIDYLVKKSIWALGGDGWAYDIGYGGLDHVLAAGKNVKILVLDTEVYSNTGGQASKSTPMGAVAKFAASGKPTKKKDMGMIAMSYGYIYVARVALGANQNQAIKAFAEADAYDGPAIILAYSHCISHGINMINGYDEQKKAVESGHWPLYRYNPALVDQGKNPWS

SEQ ID NO: 86809 - protein, 477 aa, Unknown
  Obtained from environmental sample
  DOMAIN (230)...(344): GTPase of unknown function
  misc_feature (1)..(477): Xaa is any amino acid
LRDGHAYNDDNPIAAFATIPGSGALTLIRCSGKGAIEAVSSVFAPDKLIGAPGNSVIHGWIVKDGEKIDEVLVSVFRAPKSYTGEDSLDISCHGGASAGKAVMAALNSAGFRDALPGEFTFRAFINGKLDLTKAESVMELVSAKTDISRRRAVSRLSGSLQTEIEEIKKSLVQVLSGAEIYLDYSEDEVGADINEDEGKLPYLNIALEALERLKKLSSSWRMERIYQEGVTVVIAGRPNAGKSSLFNALLKEDRSIVTEIPGTTRDWIEAWVSVDGLPVRLVDTAGLRDSSEAVEKIGVDRSRKLLQEADIVLYLIDGVQGVTGEDRDFIDNDGRRFLIWNKADIAPSPPTQNYISVSAKTGEGLAQIYAAISSAIRGQAASQQAVAQQEAAQLSSAQVSLQDAPITAAVGTERQKKLVDAAISALEEALDLARREEPLDLIAPLLREAVNSLGEITGEVSTADILEEMFSRFCVGK

SEQ ID NO: 86810 - protein, 312 aa, Unknown
  Obtained from environmental sample
  DOMAIN (38)...(311): Phage portal protein
  misc_feature (1)..(312): Xaa is any amino acid
VNIFERLLSNRKRQKGGVSLGEKSFANSSFSLSDDDFNSNLYIDPFTTDTYLCSAWVNIAVNILIRNVARADFILERDGIELKNGPLYSLFHRPNEHLSRFDLWKETAAWWLLEGEAFWWFGADYGGGLPKQLYILNPRKLQLEGEGLDVQDSVANRKRRWFYHAGTELVPIFSDELVHFRDWNPWNPLRGVNPLVSLTLELEQDFFANKANSILLKNNAIPQGLLKTDQTLRPEEADALERRWESKYGQAKAGRKIAVLGKGTSFEALSFNPDVVKLFELKRLELCTRYWHKYGIPPRVTNISLGRSVIGK

SEQ ID NO: 86811 - protein, 67 aa, Unknown
  Obtained from environmental sample
  misc_feature (1)..(67): Xaa is any amino acid
MLEGSKEVITKSNNLEKATQEITQGMNEMANGAEQVNKSVNHVNEISVKTREGIAILIEEVSRFKVE

SEQ ID NO: 86812 - protein, 436 aa, Unknown
  Obtained from environmental sample
  DOMAIN (10)...(109): Flagellar hook-associated protein 2 C-terminus
  misc_feature (1)..(436): Xaa is any amino acid
MSDVYIPGVKSRFNSEKIVEDLMKIERIPRDRTQNNLDNLRVQKTYWQEVGRRITSLRDSSRLLYSFQNPFNEKLGRSADDSVITATATRDALEQSLSFTVKQTAQADRFLSQPLDEKTRIEAGNYSFSVGNDEISINYRGGTLRNFAETINNRGRNKIAASLITVKPGTISLLIESKATGSQNRLNFSQDASDLAVKIGMMEVNNDTQKDIVLSEGLIRKTGQNSANISINDGVVNVAPLSTVSVPINITVGSDSPLVLRLQTQTKVGTEGVNVVQPPPGPDVPSSSVTYGGITIDNLPSNAPLPEFTPPPVPKRVDDMAVLNLVFSDGTTAKLPAITDSNLFTARQYNLAEVARGKTITSLNIENTNTHREVSIGKVEVLDPTSSGGLKPLNAVSNARDAIIAMEGIEVTRPTNIIDDLIPGRYMNVTRPICPW

SEQ ID NO: 86813 - protein, 107 aa, Unknown
  Obtained from environmental sample
  DOMAIN (4)...(100): Response regulator receiver domain
  misc_feature (1)..(107): Xaa is any amino acid
GWGGDDGREMRGNGAEAVRKFSEAPDKYALIFMDVQMPEMDGYEATRRIRAMDMPKAQTIPIIAMTANVFKEDIEKCEAAGMDSHLGKPLDFEELLNKLRGYLLQNP

SEQ ID NO: 86814 - protein, 527 aa, Unknown
  Obtained from environmental sample
  misc_feature (1)..(527): Xaa is any amino acid
GQLKILPDPSEYLPKRKELFIKKVNLQTAKPAPLDGLSDIDRFSKAFTKKTECKAVEIPLNVLAVLPEKLRNDDSTPSQQSGASADSGFFPEGEVQVFYFMENDIAKIIDVSKKPQKAYGIAVDIGTTTVALWLVDMEDRKVIAVHNAYNDQIECGSDVISRINYAKKFLPELKKRILKTINELLIAACKDAGIEANRVICVSAAGNTTMIHLLLGVIPEYIRLSPYTPAVFLPQCYTAGQVGIGACESAPILFAPSVGSYVGGDITAGLLCTALSSPKKYSGVILFIDIGTNGEIVLGNNDFIFACACSAGPAFEGGGIKHGMRACSGAIERVVIDENGKPQIFTIGGAEPIGICGSGVISAIAELFRKGIIDSAGKFSQKKGEYFLCDGISLNENDINNFIRAKGAIFSACQIMLDNAGMSFNDVEKFYVAGGFGRFLDLEDARTIGLLPRLPNEKFAFLGNTSVLGAYLSLVSEESRKRIHGLAGKITYLDLSSEANYMDRYTGALFLPHTDKELLSDIYAGHK

SEQ ID NO: 86815 - protein, 597 aa, Unknown
  Obtained from environmental sample
  DOMAIN (237)...(476): Methyl-accepting chemotaxis protein (MCP) signaling domain
  misc_feature (1)..(597): Xaa is any amino acid
MIALKRFLDEKKISLSSFPQLEYTGDSAERAAGFPIPGGLLDTAERFEPGIRRNTEKIEGVFAIYPYLKEICEILNTDDELPLLIDCLNCEKGCIGGPGTGNAEKPLADLKAPVRKRMAKLEKEHNSQKGIKSFKKYNDVLKKYWKKGLYNRSYRDLSGNNTIKHPNEAELTKIFHSLKKFKKEDIYNCTCCGYGSCAAMATAIYNKLNKPDNCAHYILALLTEKTNTEELNRQLQEHIAMASGLIEGINKLINKLNAAIISQADTIAQSSAATEKMIDSLRETSEISRKKQVAIKGLIEDTAKSQTSMRETIQSIEEISKSVEGISEAIKIISAIAANTNLLSMNAAIESAHAGEAGRGFAVVAGEIRRLSDSTRENSVNIAKTLKSIINGVTVTEKQSGDTGTRITAMAKEISSFAETMTGIINTFGELSAQSGEITNTLDELQSQSEMVKTDYADILTMTEKLHTAMHDLTMLSKKKVLVIDDDEPVLIMVKDALQNNCNVTTINSGKAALDLFLQGYIPHLVLLDLNMPEMGGWDAFVRIRNITQLHRIPIAIFTSSDDQKDKEKALELGAVEYIHKPISIDELLEKIAKLTG

SEQ ID NO: 86816 - protein, 142 aa, Unknown
  Obtained from environmental sample
  misc_feature (1)..(142): Xaa is any amino acid
MEIKQNKKGFIMAGELQLKYPIVLVHGIIAHDRPSFNKFWGRIPQTLRETGTKVFFGNTDAWGDIKSNAKILKTSIDKILDETKSEKVNIIAHSKGGLDSRYFIWKYNYGDKIASLTTISTPHHARDYPIYLQTKIYSLTDR

SEQ ID NO: 86817 - protein, 62 aa, Unknown
  Obtained from environmental sample
  misc_feature (1)..(62): Xaa is any amino acid
MPLLTVSHLHKRFNLEAGFFARYGRFVNAVNDISFSIGKNEAYGLVGESGCGKTQLRVFWFE

SEQ ID NO: 86818 - protein, 525 aa, Unknown
  Obtained from environmental sample
  DOMAIN (137)...(202): His Kinase A (phosphoacceptor) domain
  misc_feature (1)..(525): Xaa is any amino acid
MSDNLKKIIVVDDNAENLTAIKNALKVFYDVYPTNAVSHMFELMKRFQPDLILLDVDMPDINGYEAARMLKSSDNFREIPIIFLTSMDDPESEMKGLNVGAIDYIHKPLIAPLLLRRIKTHLDLIEHQAEALKASQAKSDFLSHMSHEIRSPLNAVIGMITIAKDTDDILKIKHCLDRADNASRYLLGLINDILDMSKIEANKLELSYDELNIERMLAGIFNVISVRAGEKHQEIALNVNANVPPNIISDGLRLSQVITNLLTNAIKFTPENGKIVLSMEKPDEKDGEITLRIEVADNGIGISPEQQKRLFTSYSQADSNISQTFGGTGLGLAISKRIVELMGGEIWIESELDKGSKFIFTIKTKRGTDNAVTWGSGGEEESDEGEYNLSDYTILAAEDIEINREILSALLEKTGVSIDYAENGKTAVSMFRENPEKYNLILMDIHMPEMNGYDATQAIRAIETELRSASIASSFTSGETRAAGEEGMEFPKETPKQLWECPKSIPIIAMTANVSGKLGHLIMAH

SEQ ID NO: 86819 - protein, 360 aa, Unknown
  Obtained from environmental sample
  DOMAIN (272)...(344): Cold-shock' DNA-binding domain
  misc_feature (1)..(360): Xaa is any amino acid
MDKKLLEVLRIGIFYDGYYFYKISNYYKYEHEKKSRISISGLHEFIRGEIASLTSMDMRKCQIIDAHYFKGRSLAKDMGEKVQSERTFEDILMRENIVSHYLPLRYAGEGTIGQEKGIDVWLALEAYELAIYKHFDILVLIAGDGDYVPLVRKLHTLGTQVMLICWDFSYHNENGDIVETKTSRQLLSEVYYPVQMSQKIDQNNCEHMKDLFVTERPQEWTFNFGSKAASSALTDASASADMPTWTSSPSWANAAALHEKQNTSPETPEAIELVSTIFSVSPNGFGFIKDEEKNNIFFHYSRLTNCDFSELKTGMKVRCTIEEDPERSKREEMPVYRATKVTLMNKGLGRSANLIMSKQK

SEQ ID NO: 86820 - protein, 66 aa, Unknown
  Obtained from environmental sample
  misc_feature (1)..(66): Xaa is any amino acid
NRIRSAEPFPRRNHKKTVIDFSPEEPQAEEYRQLARKIDANDMFVIPKPMPIERLEAILMEHGMVA

SEQ ID NO: 86821 - protein, 307 aa, Unknown
  Obtained from environmental sample
  DOMAIN (1)...(267): DNA methylase
  misc_feature (1)..(307): Xaa is any amino acid
MYPRLELLRELLAKDGSIWISIDDDEGHYMKVICDEVFGRNNFVANIIWQKKHTRANDAKWFSDNHDHILCYARHKETWRPNLLARNESSLGNYSNPDNDPRGVWASGPCHAKTPNEKDIYEIITPTGRKIFPPPGTSWRFNKTKIAELIADNRIYFGEKGNNIPRYKRFLTEVQDGFVPLTIWPRDEVGDNQEAKKEVKEFNANEVFSTPKPERLIERVIMLSTQSDDLVLDSFLGSGTTAAVAHKMGRRYIGIEMGKQAKTHCVKRLKKVIDGEHGGISKSVNWQGGGRLSLLHPRRPRIQRGWP

SEQ ID NO: 86822 - protein, 202 aa, Unknown
  Obtained from environmental sample
  DOMAIN (7)...(202): Glycosyl hydrolase family 26
  misc_feature (1)..(202): Xaa is any amino acid
MNNYLPCNPNTQTEARNVLDYLYSLHGRGIILGQHTQTRAQEELEYIREVTGKEPALCGFELLAYSPNINYKESGAECITEVEENKNTLEKAFEWADKKGLITFTWHWFSPLYGADKAFYQKNTTFDARLAIKENTPERAAFLSDMDAMAELLKPFCQKHIPILWRPFHEAHGEWFWWGSRGADTRAKTVAGYDSAIKPPPK

SEQ ID NO: 86823 - protein, 67 aa, Unknown
  Obtained from environmental sample
  misc_feature (1)..(67): Xaa is any amino acid
MKAKLYQQSGAVIGDVDLPDSVFAAEVNESLLHQVIKSYQANLRQGTAKTKRRGEVSGGGKLGHLII

SEQ ID NO: 86824 - protein, 816 aa, Unknown
  Obtained from environmental sample
  DOMAIN (470)...(764): Glycosyl hydrolase family 10
  misc_feature (1)..(816): Xaa is any amino acid
MAIAQNIKNALAGSSMIRKMFEEGINLKKQHGENNVFDFSLGNPDIEPPPAFHKMFVKSAKKDEKGSHGYMPNAGYLFVREALAKKVCKEQNVNIDGSHIVMAVGAAGGLNAVFKAICNQGDEVIVPRPYFMEYRAYTANHGAKLVEVDTQEDFNLDISAIGAALNEKTAAVLINSPNNPTGKVYSAQTLASLSSLLTEHGKKTGRFPYLVSDEPYREIAYNIDVPPFLSCYNESIVVSSYSKSLSLPGERIGFIAVNPAASEKDDLLNGLIYATRILGFVNAPALMQRIVASLTEERVDVSIYARRRDAFMKVLNNAGIEYSMPQGAFYLFCKVPKSKTGRQETDDKAFVEHLKKHLILGVPGSGFGKSGWLRFAYCVDEKIINASQNAFSRRRKAGNWNENMELNFNHRKANINLRLVTQDGQRAANQEIKIEQRSHQFLFGVGGFEALELAGGNPDGGAIDEKRAAFLQEKLDKLFALNNYATLPFYLGRYEPQEGKPDEKRLKAAASWFAQRNIITKGHPLCWHTVCAPWLMNYSNAEILKKVIERIERDVSAFAGLIDIWDVINEVVIMPIFDKYDNAVTRICKEYGQVRIVKEVFEAAKRANPNAVLLLNDFDTSKEYEILIDKCLQAGIPIDAIGIQSHQHQGYWGAEKVNNVLERFSRFGLPLHFTENTLISGDIMPEHIVDLNDWQVEEWPTTPEGEERQKRELIEMYELLFAHPQVQAITTWSGSDNAWLHAPAGFLRTDNSEKPAYKALRSKIENEWRTVKTTRTDANGVVNMEGFKGAYEISCMGKNALFELDGKSNALKLQLE

SEQ ID NO: 86825 - protein, 420 aa, Unknown
  Obtained from environmental sample
  DOMAIN (268)...(420): Glycosyl transferase family 2
  misc_feature (1)..(420): Xaa is any amino acid
MKCQKSSGKKCLFWFVKRYMGVFCSRANHEYIVTCYQERKLEKSGEHDAINEELMPYNYNGRKYHHTKYIKTMMSNFATKINAKYTNEYIHQLTELNEMISNLMTKGEEKVLNSQYEKTNIEDEISKVGKNTASIRVLETEIKRIIGDCITELTTYNTNGNEAMNKAKRLLEEYSISYGRARFIAPFRLKMILKNLTLKTKSHYYLEAFILIATAVLGKSAITQIVFALGMLMVIGDFAATLFTIAYQRFIYKKRRASYDPSYTPPCSIVVPCKGVPKNFGDNLRGFLQFDYPDYEVIYVTESADDAAVPEIKKILSEDSRAKFTVAGLSERCAQKNHNMLAALREARSDSEVFVFADSDIKPGVHWLRDIVLPLQSDKVSVTTGFRWLLSAKGTIGELCHTYVNIFIYTCFCTASYVGG

SEQ ID NO: 86826 - protein, 424 aa, Unknown
  Obtained from environmental sample
  DOMAIN (188)...(394): Mechanosensitive ion channel
  misc_feature (1)..(424): Xaa is any amino acid
IDGRGLFVASDEAVVEGEAEAYHLGFFARLGIALAIIAAQALLIWLLWKLFNSISGKVSESGKDRIKPLIIKKLKILSTKHIIDVILVLLRILKYVVSGFLLFLTIPIEFSLFPETRHLATTIFGYILNPIKDIVIGAVRYIPNLFTIIVIVVITHYVIKFLKFFSTQIARGKLVLHGFYADWAEPTFKILQVLLWAFTVAIVYPYLPGSESDVFKGVSVFVGLIFTLSSSSAIGNLVAGLVITYMRPFKIGDRVQIKETTGFVVEKNLMVVRLRTHKNEYVTFPNMLILSSSITNYNTSSTDETEGLILYTEVTFGYATPWEKVHEILINAALETDYVQKKPKPFVLQTGLDNFYARYQINCYTKEVDKVPRIYAMLYENIQNGFHEAGMDMTCSNYGVYVQKKEGEERRTSRRGAKTMNNEQ

SEQ ID NO: 86827 - protein, 209 aa, Unknown
  Obtained from environmental sample
  misc_feature (1)..(209): Xaa is any amino acid
TIDQIGRESNYPFLAAVTVVTNKNYMDLHNLAEASKEYNLDIHVFNLGTYTNDKIVETQRRFMREKLDTDIDCLEAYNTGYNLGIDGAKLHDILKNIHNNDYGHTMLTVPVLNPDKTHTYYADLEVPVRNHCIVPWCQANVNYNGDVHFCADYPDYILGNIKEQSFKDIYNGDRANKFRKTIHECEGGMFPGCLRCYQNMLFGKRIKGF

SEQ ID NO: 86828 - protein, 562 aa, Unknown
  Obtained from environmental sample
  DOMAIN (21)...(178): Penicillin-binding Protein dimerisation domain
  misc_feature (1)..(562): Xaa is any amino acid
LLIHYALLMTRGVSSVARQNLNLPERGSILDRNGRFLAIQIRFADVSIWRPSIKDVDVLANEVAAILDMTPSEILEKINSSESNFLYLKRHIDDAMARNLGVLLEEKKIRGVMIQPIVGRIYPEKNLASQIVGFVGDRNEGIEYAFNNELSGVESHGKGSNVVLTIDTYIQYILQQISARTMEETKAEAVMFVAMDPRTGDILGSVSLPDCDPNNVRASDANGRMNRPAIWACEPGSTLKVFSMAALLDSGAISDNSVFTCNGFYTTSRGAQIKCEGRHGRVTVREIIINSCNAGAAYASDNISASKFYQLLSDFGFGSRTGVGSPGETAGYLVRSENWSDRSKPTIAFGQEIAVSAYQILQASTAIANDGVLVPPRIVSKIVSADGKKETEWKGAEKRRVISAETAIDMRSYMADTASSIGTGWRAGVQDLSLGVKTGTAQIIDPATKKYSETDFIASCLALLPAENPTLVLYLAVIKPKGVTSGGRIAAPAIREAAESLIDYLGIPRGRNPQITHPPSVNIPAGRLPPIETQVPDFTGIAKRVLLPLLLRDDIQVEIIGD

SEQ ID NO: 86829 - protein, 947 aa, Unknown
  Obtained from environmental sample
  DOMAIN (502)...(626): B12 binding domain
  misc_feature (1)..(947): Xaa is any amino acid
IMPRFVAPPERGTSNKLGAYDESPESMASCVEKYLQEGLLNVIGGCCGTTPAHIAAIAAKAALHKPRPLPQSPSPRPLLLSGLEQLEIKISKPDTTTPNPEPRTLIPVGERTNVSGSRKFLRLISEGKYNETLAFARSMIEDGAKIINVGMDDAMLDAEKSMGAFLDLALSDPEIAKVPVMIDSSRWNVIEAGLKRLPGKGLVNSINLKDGEAEFLRRASLIKWYGAAAVVMLIDEKGQAVSYDRKIEIAGHAYKLLVDSGFPPENIVFDPNVLAVATGISEHDSCAVDFIRACAWIRDNCPGVNISGGISNLSYSFKGNNKVREAMHSVFLVHARAAGLTMAIVNPAELIASNVIEEDLRNAVENVILNRNPGVAERLLALAEKISAASSITHSSFLIPHSSSDWRNQPVETRIIHAMLRGIDDFIEVDALELLKAGKTALEIIEGPLMDGMKEVGKRFDEGTIYLPHVIRSARVMKKAAAALEPHMGKANKGDSATAIGPKIILATVKGDVHDIGKNIVGIVLACNGYQVIDLGVMVPAEQILDAAEKEQAVMIGLSGLIAPSLDEMAHIAREMQKRRMKIPLLVGGAATSLVHTSLRLVPKYSGPVVYVPNAGKSAETVRALLSDLLRPRFLRELEKNYQNAAWRHEELLSRVEIISLENARANRVPPAAYKPAAPKKAGIIDLNNYPINRVIPYIDWQSILRGWETKGPQSREPAKDRAPAPAADAILDDAKRLLELVEAKGLLQLRGVAGIFPASSENEEIRYQISNSGVRYRFCFRRNLQKKPAGIFNPCLADFILPAQNGQTVDWLGLFAISAGFGLEAAAEQYRSSGDDYSALLLASLANALAEAFVEELHLRVRREWWGYAPDESLSVDEILKGKYTGIRPAFGYPSCPNHQDKRIVFELLEAEKRCGLKLTDTAMIIPAASVCGMFFASPSSYYFSV

SEQ ID NO: 86830 - protein, 109 aa, Unknown
  Obtained from environmental sample
  DOMAIN (61)...(105): Bacterial regulatory helix-turn-helix proteins, AraC family
  misc_feature (1)..(109): Xaa is any amino acid
MKPYQLLENILIDIEEGIKQNIDAFTLSKRYNYSEIHLRRLFSFAFNKPISGYIRSRTLSESLNDLFNTDKNIIDIALEYGFSFENSYSRSFKREFGLSPDIYASQDKL

SEQ ID NO: 86831 - protein, 225 aa, Unknown
  Obtained from environmental sample
  DOMAIN (12)...(139): 1-deoxy-D-xylulose 5-phosphate reductoisomerase
  misc_feature (1)..(225): Xaa is any amino acid
VTDMCNDNNKKLLILGSTGSIGRSACNCVRRFRDRFSVTGMAAGSNADLLIEQIKEFSPSSIYITDSKNAAMIKDLFGDKISVYSNDDGDGLERIVNETDYDILLNALVGAVGFKPTVAALKRGKRVSLANKESLVIGGDCIRAIVNRNRSPKTPTLLGATPLIPDLLPIDSEHSAILQCLPARGGAEAAESIIITALRRPVQKPPERVPSPKSRRNRGFTPPTW

SEQ ID NO: 86832 - protein, 72 aa, Unknown
  Obtained from environmental sample
  misc_feature (1)..(72): Xaa is any amino acid
MGLYPIGSIVKLNDGSLARVVSLHIEAPMRPNVQMLTDNMGNALGAGNMPVVDLLENRKLFIKEAIDPANYA

SEQ ID NO: 86833 - protein, 440 aa, Unknown
  Obtained from environmental sample
  DOMAIN (21)...(429): EPSP synthase (3-phosphoshikimate 1-carboxyvinyltransferase)
  misc_feature (1)..(440): Xaa is any amino acid
LGSPRSDSAEAVTSSYEQYLIEGGYPINGTIKASGNKNAALPCIAAAILTDETVILRNIPDIEDVQVMLAVYCSLGGKVESLGPNTLRLNTGNIISSEIPVEYAGKIRASILFAGPLLARTGRVVLPPPGGDVIGRRRLDTHFLALTELGAQVEIKDTFIFSGTGLKGADIFLDEASVTATENAVMAAALASGETILTNAASEPHVQDLCHMLCAMGARIEGIGSNILTIRGVEKLRGCDFAIGADFMEVGSFIGLAAVTRGELFIEGAKPSDLRPAKTAFGKLGIVWEQEGNTIHVPASQALEVNCDLGGMIPKIDDAPWPGFPPDLTSIVTVVATQVKGTVLIHEKMFESRMFFVDKLIGMGARIVLCDPHRAVVSGPTRLTGSELQSPDVRAGMAMVIAAMTAEGKSQIDNVYQIERGYENIVARLSSLGGKISAVP

SEQ ID NO: 86834 - protein, 105 aa, Unknown
  Obtained from environmental sample
  misc_feature (1)..(105): Xaa is any amino acid
SMSDWTVESGKTWYSSDNGVTWTAVANSTTFYSIAYGNNKFFAVGYEGKIATSPDGTSWTAVTTTAFDIPEKGYTWGASINAIAFGNGTFVAGGSRGKMAYSTGN

SEQ ID NO: 86835 - protein, 63 aa, Unknown
  Obtained from environmental sample
  misc_feature (1)..(63): Xaa is any amino acid
VSVEDGAGAVHIAPSFGEEDFVLGQEIGLGLFDPLDAEGKFTSKVPQWQGVGAKDLEDFKECA

SEQ ID NO: 86836 - protein, 133 aa, Unknown
  Obtained from environmental sample
  DOMAIN (2)...(123): D-isomer specific 2-hydroxyacid dehydrogenase, catalytic domain
  misc_feature (1)..(133): Xaa is any amino acid
MKLVADKQIYKVEEAFADMGDVTAVSGGMISRELLSDADILLVRSVTQVNAALLEGTPVKFVASASIGVDHVDVDFLRENCIGFAHAPGSSADSVAEYVVAALIEICAKSGRALGETTLGIIGAGNVGGRVGP

SEQ ID NO: 86837 - protein, 261 aa, Unknown
  Obtained from environmental sample
  DOMAIN (215)...(260): GTPase of unknown function
  misc_feature (1)..(261): Xaa is any amino acid
VASKETTTIVALATPPGTSAIAALRVSGSAVKNVCKAILPNFKMQPRVASLTEASFNDKIIDELIAVFFSAPNSYTGEDVLELFPHGNPFIVRKLIEAICKVPGVQLAQRGEFTQRAFLNGKLDLTQAEAVGALLAANNSKSLSDAQRLLSGEISSEINALAESVKGASALLELEVDFAEDTEGETTSEVLLEHKILQHLQNLKKRFRASQSELPKAALFGAPNAGKSSLINALVKQNRLLVSETPGTTRDFVEVHCIAQR

SEQ ID NO: 86838 - protein, 164 aa, Unknown
  Obtained from environmental sample
  misc_feature (1)..(164): Xaa is any amino acid
LTTPASPRLSSARCRSSPAAVSSGPNSSQLRPGQPSPGRVSPHASSLETKNGTGIITSFPSATGFPLALGADLPWADDLYPGILRLPADGDLTVLSSTYTCILLSTASSSLRRLRLSARGMLPYRLAIACETRGFGCMLSPATWSARHDSTSELLRTLLRNGCF

SEQ ID NO: 86839 - protein, 129 aa, Unknown
  Obtained from environmental sample
  DOMAIN (66)...(129): D-alanyl-D-alanine carboxypeptidase
  misc_feature (1)..(129): Xaa is any amino acid
VVDESSQNIVEQEDKKEEDAISLELLRILKGDLYLWVLVDKTHPIGDYEPQDLVVLKSVNYDNTAGIQLREIAAAALEEMAVAARKDGVKLSVSSAYRSRSYQANLYDRYVKTMGQEETDRVSARPVTA

SEQ ID NO: 86840 - protein, 210 aa, Unknown
  Obtained from environmental sample
  misc_feature (1)..(210): Xaa is any amino acid
MFKRLFNIAGPCVPGDHYMIDPLRGIGSELMNLIDTKQYFVIHAARQSGKTTLLKQLARDLNAAGEYRALYCSLEAIQGFGEPEKGIPAIVNKVASYIKRQEWPGEFVKSADCRDISDMLNLALVDYCRSLDKPLVIFFDEADCLSGGTLITFLRQLREGYVNRPDVPFVHSVALVGMRNIRDYKGQIRKESETLGSSSPFNIASKALNL

SEQ ID NO: 86841 - protein, 287 aa, Unknown
  Obtained from environmental sample
  misc_feature (1)..(287): Xaa is any amino acid
ESVSVILESVASDLPALASEFSKWKGVDLVAAYHHPDLGLLIANPKIAEELANCGMLRKRELLVLYAGKGASPADDTCQKAAELAVKFFEGKKAKALPEFLKGSFVVKKLKKGEEEAADKAEAKAAKVVKVPTKGRKAAPAKAAKRAVRAATAAPRESVRVAPPVVTAAAPAISKGPMKMTPMYSVVVANELFHNGNVEAWKRIVASYSAKYPELQVYIYYEGERILDINSLFKWGKVKHGSSIQFAVSGNEIKDVAKLQRYLIQGASKQFEAFLHGPVNNVLKLFG

SEQ ID NO: 86842 - protein, 255 aa, Unknown
  Obtained from environmental sample
  DOMAIN (2)...(163): Transketolase, thiamine diphosphate binding domain
  misc_feature (1)..(255): Xaa is any amino acid
MFFDSNDIQLSTTTDQVTSEDTEAKYRAWGWSVYVVDGNDDGQIRGALKAAVNERERPTLIIGKTVMGKGALAKDGASFEKKVSTHGQPISDAGASAEETIKNLGGDPADPFTVFPDVAEHYRAALDKKRAYAREKKAEQAAWEKANPELAKKFAAYMNRELPDIDWASIKHKPGVASRAASGTVLAEFSSKIGNMIVSSADLCNSDKTDGFLKSSKALKKGDFSGGFLQAGVAELIMGVVMTAYPPRRSAGCLR

SEQ ID NO: 86843 - protein, 287 aa, Unknown
  Obtained from environmental sample
  misc_feature (1)..(287): Xaa is any amino acid
GVAQGSDRPSQVRGKEAPPARSSAAEYLTFAAVAGEDPQSVEMRYEDENIWLTQKMLATLYDVDIRTINYHIKKIFNDSELQEDQVIRKFRITADDGKTYDAGHYGLQMIIAVGFKVNSERAVQFRKWVNKIAKDYTIKGWAMDKERLINGGSVLTTEYFEQLLDQIREIRASERRFYQKITDIYATALDYDRDSKTTRDFFATVQNKLHWAIHGHTAAEVIVERANANKPFMGLTSWANFLDGPLAKVRFTSAPGHPLSLAGRGIMLVCSSFAPEPATVGRSLQLR

SEQ ID NO: 86844 - protein, 82 aa, Unknown
  Obtained from environmental sample
  misc_feature (1)..(82): Xaa is any amino acid
MAFAFGRALQRFFCKGKRGNSKFAKNGKPKIPENIDYSKINALSIEARQKLSAAKPLTLGAAAKVAGVRAGDIEVLRFLLTH

SEQ ID NO: 86845 - protein, 85 aa, Unknown
  Obtained from environmental sample
  misc_feature (1)..(85): Xaa is any amino acid
MIIVDYGAGNLTSVHNALEFLGIKNEISSEPDEIENAEKIIFPGVGAAAAAMENLNKIGIGASLERAFKKRTPILGICIGCQIIL

SEQ ID NO: 86846 - protein, 54 aa, Unknown
  Obtained from environmental sample
  misc_feature (1)..(54): Xaa is any amino acid
SYPPKGETEWSPEERLLRAIFGEKAGDVRDSSLKAPPGLKGRGYRYARLLPQGA

SEQ ID NO: 86847 - protein, 92 aa, Unknown
  Obtained from environmental sample
  misc_feature (1)..(92): Xaa is any amino acid
VKLRSILEIDYLLLLPVIVLMMLGVFFIYSSGITSDGIQVSNEHYKQIIWASVGVVIAIVMSLINYRRVYTLFPYILLVSILALIYTLLFWS

SEQ ID NO: 86848 - protein, 85 aa, Unknown
  Obtained from environmental sample
  misc_feature (1)..(85): Xaa is any amino acid
MVTDSDLDKLRSLQEIIYEKIGLEKNIQEIPKLLSTQEELLNRLKKTFIEKNSEYEKIKAEELTLKTNSAKLNPLEKNPKKIWTW

SEQ ID NO: 86849 - protein, 283 aa, Unknown
  Obtained from environmental sample
  misc_feature (1)..(283): Xaa is any amino acid
LEINPPENFSVPAGFYPVISADLLPGKDAAFDAGKLHLDLFPALGRLSVPAGLISPGALPLALKGERVDSFRQTYANMPPFPEPITADPGLVLAWPVENWRDKRYEVFRWEKFPSLLIFDFADYAMQDRMLKRLAFFVEKKGFRGRLAPDSEIAELHAWNAHDYRAEDLARFFQKARDLQFPLLAEERELERMLLNADIIRSTEGADGAGGKITAGEGGIISISRESNDYLRSLFMAHEGFHGLFFIDGDFRDFSPEALEAASSPGKAVYSLVFRLSAIRHCR

SEQ ID NO: 86850 - protein, 163 aa, Unknown
  Obtained from environmental sample
  misc_feature (1)..(163): Xaa is any amino acid
MRALVTIQRVKKITPIPDSDFLETAHVMGWQCVVKKGEFREGDLGVYFEVDSFLPVEERYEFLRKSSYKENPDNGEGFRIRTAKMRGQLSQGLLIPYSSFSELQGMAEGDDVTEKLRVKKWFVPETATAGGIVIGERPHGIPTSDETRIQSAPDSCRSADSDL

SEQ ID NO: 86851 - protein, 719 aa, Unknown
  Obtained from environmental sample
  DOMAIN (151)...(517): Glycosyl hydrolase family 57
  misc_feature (1)..(719): Xaa is any amino acid
MAAPKSGGTKNAETAKSVFSKIVSVTHPAEIFVDEKTGRSPAFEIRFSADGDVPFPQVIVREFGNEHIFNGAAVVEEKPHNYLVSVPAGKLPVGSFQVQVEGCKKADWRGSGGGDWVKALSEVKVSFPKTAVKKSARVSVGDSRGVKMFFGIHKHMHQPYYRAADTAYWDGEKDGIFGSRAGNYTQFLKDAVDQYVSGGLPRAGLSTSWSGSLIEQLNRCAAEGLCGGVFGSWSNALREAAKYGTQSGAKRMAFSDFGFFHPLMALVPGRDIVTQIEMHRKIIRDVFGVETSRTLFPPETAFHVRMIPWLNKAGVKAVIYDSVHRYRACKDYPYAGKEEGMLPPNAAEQENAAIGGWMRLSNIWAPSHINPSMLRPEYIKYEDVDGTVHKIVGVPAERYIGNEDARGGYGALQYEHVLGQIYEHIAQTGSFDPAHPPFFLLHSDGDNHGGGADSYYRHNTGRLVEWLKNDGRFELCTVDDYLKDFPPDPNTAVHVEPGSWAGADNGDPQFRKWFSMYDQPYSPDLNSWSVLTALQNCIYTVQDAGNGGGDIDRAVRLLLTAETSCYWYWTGQEIWDRQVTDAANAAMSIIRSDLDKVISSGKDKTPPVIFPPWVTPENPGGKTWGQGCLKDAEKVGTVHTFVYDASGLSSVVLILRVNGKEERITMNGGAYPSRTSPTVTGEYYTAKLPQGAGDISYYIEAVDKKGNKAVSSLERIFLA

SEQ ID NO: 86852 - protein, 700 aa, Unknown
  Obtained from environmental sample
  DOMAIN (419)...(601): Anticodon-binding domain
  misc_feature (1)..(700): Xaa is any amino acid
MKRRLITSALPYVNNEPHLGNLIQVLSADAFARFCRLSGYETLYVCGTDEYGTATENKAAEEGISPKELCDRYHAIHRDIYNWFNIAFDKFGRTSTPIQTEVTQDIFLKLDKAGFICERTIEQFYCSNCKRFLADRYIRGVCPICGSAEARGDQCETCGKLLDPTDLKEPKCSSCGGTPSLQKTNHLYIDLPAIRERLEEWIKIASVKGFWANNAVQMTQAWIRDGLKERAITRDLKWGIPVPKPGYENKVFYVWFDAPIGYISITGTLGEEKGNWRDFVNYWWKSPNETELFQFIGKDNIPFHTVIFPSSLLGSGENWTMLHHMSSTEYLNYENGKFSKSRGVGVFGTDVKETGIPADVWRFYVFYNRPEKSDAMFTWSDFKEKVNGELIGNLGNLVNRTLSFVMRYYDGIIPEGKSEGAFWAEVVRLESSITEKLDRAELRDAFREIFELSSFANKYFQDNEPWRLRNDDPEKAKSVIRDLTYIVRDLSVLIEPYMPQAAEKIASFLGLNLRSNLSYKDIGKTDGIGNIKIKSEILFNKLEDELIETLRVRFSGSQKERQESDNVQATAAKPFSSVVDLRVAKIEKIEKHPKADKLYIEQLEVGEGVTGTREERTIVSGLVPFYKEEELLGKKIIVVYNLKPAKLRGIESRGMLLAAGDKDGIGPDGQPVERVEVLTPETAPRNGFSEALPSDHAAPP

SEQ ID NO: 86853 - protein, 148 aa, Unknown
  Obtained from environmental sample
  misc_feature (1)..(148): Xaa is any amino acid
MDMDTTIESRIALLQAFDPLFPTGSYTMSGGMETYTQKGLVRDKFSLVSYLKAQLYILPYGDLGVCAKTAQGEDFILMDNLCAAMKQPYEIRTGSEKICTRFLKAQETLCSYPSLAAYRLAIKQEKCKGHYPVAVGLSYATKSDSAIN

SEQ ID NO: 86854 - protein, 829 aa, Unknown
  Obtained from environmental sample
  DOMAIN (64)...(179): PAS fold
  misc_feature (1)..(829): Xaa is any amino acid
MSDNAKLHPDIAALQKENKALARKLKETEYLVSSYEQYAIFQKSIYESIKKQKSEQDTYLRLIFGNTPDVILVLDANLMYVLGTKNSMRVLGINTDALTGQDVSAVFLQIMPMDWVSALTNDLRGVLSSGISKRFGKFVATVHGSEYYFETSIIPIKDDSTGAVTGVILTMHDETTLHEAVLSAERSNKAKTNFLAKISHEIRTPMNAIAGMAELILREHISGLVREHALSIRQASGNLMAIINDILDFSKIESGKLEIVETEYQFASLINDVISIIRMRVIDKQIFFTTNIDCDIPGRLIGDEIRMRQILLNLLSNAFKYCDRGFISIHVSSEKASDGEVTMVFDISDSGIGIKPEDHARLFTDFVQLDRVAHKEVEGTGLGLVITKSLCEAMGGSIDVYSVYGEGSTFTVRIPQKFISYERFANVDDPGGKNVLIYETRQAYSSSIICSIDNLGVGCTLVSNQSRFLEELNKNKYTHVFVSSFLFESTEKIVRNLGIDITVVLLAEYGENAVNKETVKTLEMPVHSISIANLLNGAMDVVYAENPQGGTPFMAPSARVLIVDDLITNLRVAEGLMLPYKMQIDVCQSGAEAIEQVRGKPYDIVFMDHMMPEMDGIEAAQKIRDLGGDEYKRLPIVALTANAVSGVREMFLQNGFNDFLAKPIEMMKLNAILDAWLPAEKKMPYVAEEGDAYAPAFEIPGIDVSSGVQMTGGNERNYLRALSAFYKDGTDKLSQLSESFERGDTKAYAACAHAVKGAGASVGAVKLSSFAKALELAAKNENLNYIKNNHETFMDEFKTLLGNIRYVVSPEGKQTNAVYALGHHPPHKN

SEQ ID NO: 86855 - protein, 134 aa, Unknown
  Obtained from environmental sample
  misc_feature (1)..(134): Xaa is any amino acid
MTTNNNYSSFLIPHSSFLVVPACEPGRGGGHLVRSMALVRELRSLGRDAWLYITSSNADAVLDTARFDRTWLLAESGLPEKSWQCIILDRFQTSAEELARWQKIAPVIGIDEGGKYRGCFDFLIDILSHCDKIT

SEQ ID NO: 86856 - protein, 437 aa, Unknown
  Obtained from environmental sample
  DOMAIN (8)...(195): Domain of unknown function DUF21
  misc_feature (1)..(437): Xaa is any amino acid
LDGDGFTAIIVYMVGALILSAFFSIIKIIFASAEKGDVGADDERLRYYASKISEILKNRATLSDTVVVGKTLCNVSFAVLSLKLHSMFAFELYGDSVPPQMLWLVPIVVSFLCLLLTHYVTRAFALRFYRGVVKPAYYIYSLLSWLLRPFSWIFSAIHSTILKILKYNVKLSFLSEEEKARITAEDATEALGEEEREMIRSIFDLSDTTVDEIMVPRINVIAAEVRSDLQTILRIIREEGHSRIPIYKDTIDQITGILYAKDIFPWISEHNKSEWNLDTIVKKCHYVPMGKKIKDLMKEFKLKHLHLAVIVDEYGGTAGIVTMEDILEEIVGDIQDEYDEEEKEIVPIENNVYFVDPHIDLHDLNDELGLALDEEAEYNTLSGLIYHEFGDVPVEGTQIECAGVRINVVKMDNQRIEKVKLEVCRAARRPGEPRDNP

SEQ ID NO: 86857 - protein, 224 aa, Unknown
  Obtained from environmental sample
  DOMAIN (19)...(143): Thiamin pyrophosphokinase, catalytic domain
  misc_feature (1)..(224): Xaa is any amino acid
VWFVVMALGENLLGIIFTGGQGPKAQIVKRLLENEAKGAMFVAADSGLAAALNADIKPDWVIGDMDSLEDQSSLSAVAQERVIRHPHDKDFTDTELAFSLAAEKGCDDIWILGGGGGRIDHLFGIRSLFERERFPCRWITETEDIHCIDSKAKQNELSLKLEKGAVVSVFPLGEGKWEASSKGLKWQLDGLRWDRGFFGLSNEAVDGNFSVTAKALGRSDHRLT

SEQ ID NO: 86858 - protein, 220 aa, Unknown
  Obtained from environmental sample
  DOMAIN (5)...(35): Flagella basal body rod protein
  misc_feature (1)..(220): Xaa is any amino acid
MLRSLNSGVSGLLNHQVRMDSVGNNIANVNTTGYKARRTTFSESFSQLVKGASRSESKAGGTNPMQIGLGVAVGSVDMIMGQGNLQNTGRLLDIGIEGNAFFGVSDGVGTYYTRCGAFQLDAQGYIVLPTNGMVLQGKMADSMGNFPPGTAIGNLQIPLNQQSPARATTEVTLARNLNMDGDAKGSVTYTQRLLHAADGERSYGANGLNDNGRGKHDTVL

SEQ ID NO: 86859 - protein, 226 aa, Unknown
  Obtained from environmental sample
  misc_feature (1)..(226): Xaa is any amino acid
MSSNADPLIINISIDTKNGRKTISPYIYGINGTPSKNQLSAKACRLGGNRTTGYNWENNFSNAGQDWHHYNDLHLVPKDTDSSTPGITILDFVKKANNLGAYALITLPMAGYVSNDGYGAVDKNDTAPSKRFAPVKDRKNGELSLRPNLSDGAVYSDELVNYLISKLGNSSNGGIRGYSLDNEPALWYRTHPRIHPVKVTVAEILEKSISLSSAVKDFDSAAEIFG

SEQ ID NO: 86860 - protein, 779 aa, Unknown
  Obtained from environmental sample
  DOMAIN (520)...(548): The GLUG motif
  misc_feature (1)..(779): Xaa is any amino acid
MIRSAERLNQADRHCSFSGTVSGGTTNDDVGGIAGRNSGTIINSRNFATISGRNNIGGVTGFNNGKLENSYNTGAVSGNQNIGGIVGTNTGSGNYVKNCYNTGDITATSTSTTANAGGIVGLNQTSGLVESCYNTGNVTSAGATVGGIVGQNDSTCTVQNCVSLGSRVTGINSVMRIGNNSGTFTNNKARADMKTGTNGAETIKTGGTGNGTNGADVSLGSTQSGVFNGAGGGTAGWQGSVWNITGTLTVGVDLPTLKSNTQSPAPTLPAAYSPPGTAENPFLVATEADLRKVGTETTAGGWTLSASYKQTANITLTSAFTGIVYTSSKFNGSYDGGGYTITGLNITATSSNLGLFGYIGSGTVKNVNASGTVTGTGSVAGIGGIAGANEGTIENCSFSGTVTGSTTSLQVGGIVGRNTGTVKNSRSSATVSGNDQVGGIAGRNEGKIEASYNTGAVSGNQYIGGIVGTNTGSGNYVKNSYNTGNVTASATSNTYAGGIVGANQSNALIEYCYNIGNVSGPASVGGIAGTNDTGCTVQNCVSLGARITGTGTSSIGISRVSGTYGSGSTLTNNKARADMKVGLSGAEATATGASNNGNGADITVGSTTTQTSVFSGWTAVWSVSGNLTAGGALPTLTANTQSPAPTLPAAYSPLGSADNPFLVSNETELRKVGKETTAGGWTLSAHYKQTADINMTGGNFPVIGTTATRFTGTYDGGGYTITGFSQSYTSSNVGFFGIIGTGGTVKNMNVTGTVTNNGSSTSAIGGIAGMNEGTMKMLA

SEQ ID NO: 86861 - protein, 285 aa, Unknown
  Obtained from environmental sample
  DOMAIN (10)...(142): FAD binding domain
  misc_feature (1)..(285): Xaa is any amino acid
VYGEMYGGPARYYAEPRSESGIVEACRFAVDNGMPLFILGNGSNVLISDAGFGGLVVNLSKNFSALSWDGATAFVLSGYPLDALTAAAAEKGCAGMERLSGIPGTVGGAVVMNAGAFDADVSHTLRSVRVFKTSAYTVETVSAKDLNLGYRTSVFKNSGDVVLEATFDFTLGDAAQLKSLRDEIIGKRKAKQPVDSPSCGSVFKRPPNGFAGTMIESCGLKGFKVGMAEVSEKHSNFIINTGSAKAEDVRSVIRHVQKTVFEKHGILLEPEVIFLGEFQEPLYKC

SEQ ID NO: 86862 - protein, 214 aa, Unknown
  Obtained from environmental sample
  DOMAIN (20)...(214): Protein of unknown function DUF45
  misc_feature (1)..(214): Xaa is any amino acid
MLLTISGILINVSKKSVKEMRLYVKPPNGEVTVSAPLSMSNEEIELFARSKISWIKKHVERFDNQPRHSKRKYVSGETLYVWGEPYYLQTEYGSRNSLVLSGGKAIFTVRKNSDATQREKFIREWYRKQLKSEIERLLPKWEKITGLKCNSWQIKYMTTRWGTCKPKAKKICLNLQLAKKPPECLEYIILHELAHILEKYHNERFKSLSARFSR

SEQ ID NO: 86863 - protein, 974 aa, Unknown
  Obtained from environmental sample
  DOMAIN (632)...(657): The GLUG motif
  misc_feature (1)..(974): Xaa is any amino acid
VDSAGKVTILAVGSTVISAEKAADAIYAHARTTYTLTVNHKPGSAENPFLVTNEADLRKVGTGADGWTLSAHYRQIANITMTGGNFTTIGDNTNRFTGVYDGGEYTITGLTVTATTYNQGLFGVIGADSTVKNVNLSGTITQTGDNNGVGTGGIAGLNYGTVDNCVFSGTVSGLTSNQVGGIVGSNQSTGTVKNSGNNATVNGRNNTGGVVGLNQGGTVENCYNTGDVIGVSTVGGITNNSSGGTVINSRNTATVTGNTNVGGIAGINQAKIDNCYNTGAINAAEQAGGIAGGNTGSGVYIKNSYNTGNVTSSDSSTSAGGIAAVNQSGATVEYCYNTGNVSGTGGVGGIVGYTNTGSAIQNCVSLGARVTGNGTGNGRIAGTNSSTITGNLARIDMKVGISGSEALVTTGAAGNNAGANVSLGTALSSVFNTNWLSTLWTIPTGNLTINGNLPTLKTNTQSPAPTLPAEYTVLGTADNPFLVSNEIELRKVGTETTAGGWTLSAHYKQTADITLTSAFTGIVYTSSKFNGSYDGGGYTITGLNITATSSNLGLFGYIGSGTVKNVNASGTVTGTGSVAGIGGIAGANEGTIENCSFSGTVTGSTTSLQVGGIVGRNTGTVKNSRSSATVSGNDQVGGITGRNEGKIENSYNTGAVSASNQYVGGIAGTNTGSGNYIKNSYNTGNITATTSSAACYIGGIAGVNQTSATVEFCYNSGYISATNNVTGGIVGQNNAGTVRNCVSLSARITGTNNIGRVAGLNSGSGNLSDNTARADLKIGRNNAEAVPTTDLGATAINGASVTVGAAQSSFYLSWDSAVWNMGGNMTVGVNLATLKANTQSPAPTLPAVYFPLGSAENPFLVANQTDLRKVGTETTAGGWTLSAYYKQTADIAMNGAFGRIGDNTDRFSGSYDGSGYTITNLNMGPAASYVGLFGYIGDGGTVKNVNVTGTMTPNGSNTSFTGRIARNNAGTIDN

SEQ ID NO: 86864 - protein, 474 aa, Unknown
  Obtained from environmental sample
  DOMAIN (347)...(474): N-6 DNA Methylase
  misc_feature (1)..(474): Xaa is any amino acid
GDGGLKSQLLSRKVTEITHNHPEGLKGAEATVVCIFLARTGSNILEIRDHVNEYYYPMNFTLDGIRDSYKFNETCQDTVPQAIMAFLESTSFEGAVRNAVSIGGDSDTLAAITGGIAEAYYGVPASIRKHALTFLDERLLKILTAFENVYQPSLEKTVKQATVKIVRKNKKIKIGDRAETMQMSFDMIDEDFAETLTVHEETSSEQLFRHLFEACNILRGPINQDEYKSYVTPLLFFKRLSDVYDEETAKALEESGGDEEYAAFPENHRFSIPNGCHWNDVRACHENVGTAITDAMTGIERVNPDTLFGVFSSFDDAVWTDKGKLTDTRLKDLVEHMSKIKVGNKNYDADVMGDAYEYLIKKFADLSKKNAGEFYTPRTIVKLLIMLLAPKAGETVYDPAVGTGGMLIEAIRYMNDDRQTYGRIYGQEKNLANAAIARMNLFLHGARDLKSRKAIHSVHQTLSIVDNCKRLTAL

SEQ ID NO: 86865 - protein, 192 aa, Unknown
  Obtained from environmental sample
  misc_feature (1)..(192): Xaa is any amino acid
LGYIIPALRERFKESKILVLHIENFKEESLQNVYSLTSLDTEEIYKFLETHIQKINAEHIKIIEWRPSLNYFKDSYVKILSAVTAFLKRADAEKRTTAVFGKRWIKNFFKNIGNINHTLLYRQMKNPVIITGSGPSLEQALPVIRKAQDNCLIIAASSSVLALSSAGYTADIVITTDGGGWALKHIYPFYRN

SEQ ID NO: 86866 - protein, 66 aa, Unknown
  Obtained from environmental sample
  misc_feature (1)..(66): Xaa is any amino acid
VATLPRETQEESYYTFDGQVGYPYFGQLILDCLNRTENAMTQEHAFKAAELCVKAQMQAVKIGSLK

SEQ ID NO: 86867 - protein, 271 aa, Unknown
  Obtained from environmental sample
  DOMAIN (58)...(242): ABC transporter
  misc_feature (1)..(271): Xaa is any amino acid
TRSESAEPLRDDRCKPIIESGQNPVSFNDKIEFADVCFSYPECGETVLKDISFEIKKGSVAALVGASGSGKSTTLDLLPRFYDITSGKIAIDGADIRGMNLPGLRKLFGIVAQETFLFNDTISANIAYGLQNADRESIVTAAKAANAWEFIEKLPNGLDTAVGERGVMLSGGQRQRLSIARALLLNPPILILDEATSSLDTESERLVQSAINNVMENRTVLVVAHRLSTIRHADQILVLEAGRIAERGTHEELLAQNKRYKYFYDIQFAGG

SEQ ID NO: 86868 - protein, 125 aa, Unknown
  Obtained from environmental sample
  DOMAIN (7)...(116): GtrA-like protein
  misc_feature (1)..(125): Xaa is any amino acid
MLIQFIKFGIVGFSNMTIAYIIYFALVYYVNAHYIAANIAGFFVSVLNSFFWNNKYVFKQRDNEKKRDIRGALIKTYISYATTGLVLSSILLYIFVNVLHISKYSAWLLCFDRQTNPDQTFNLYT

SEQ ID NO: 86869 - protein, 119 aa, Unknown
  Obtained from environmental sample
  misc_feature (1)..(119): Xaa is any amino acid
MKSDSVNKGIARSPHRALFKALGFIEEEFKRPLVGIACAKSEIVPGHLHLDNIAKAAADGIRMAGGTPVIFPVIGVCDGIAMGHEGMRYSLPTRELIADSVECMATAHALTPCLTQRPR

SEQ ID NO: 86870 - protein, 547 aa, Unknown
  Obtained from environmental sample
  DOMAIN (22)...(526): TCP-1/cpn60 chaperonin family
  misc_feature (1)..(547): Xaa is any amino acid
MAKQLLFNEDARRKLLAGVEQISKAVKVTLGPKGRNVLLDKKFGAPTVTKDGVSVAKEVELADPYENMGAQLLKEVATKTNDVAGDGTTTATVLAYSLVKEGLKSVAAGMTPIELKRGIDKAVEIAVEEIKKNSKDIKDKEEISHVASVSANNDSEIGNTIADAMEKVGKDGVITVEESKTMETSIEFVEGMQFDRGYISAYFVTDRDTMTSVYEDVFILIHDKKISSMKDMLPLLEKVAQSGKPLLIIAEDCDGEALSTLVVNSLRGTLRTCAVKAPGFGDRRKAMLEDIAILTGGEVISEEIGLKLENTDISQLGKAKTVKVDKDNTTIINGSGKQKDIQDRIAQIKAQIEDTTSDYDREKLQERLAKLAGGVAVINVGAATEVELKEKKHRVEDALSATRAAIEEGIVPGGEIALIQAALALDKADTETLTDDEKVGFKIVKRALEEPLRQIAENAGLDGAVISERAKNEKKGVGFDAAKMEWVDMVKAGIIDPAKVTRSALQNAASIASLLLTTECAITDIPEKKEAPAMPGGGMGGMGGMDY

SEQ ID NO: 86871 - protein, 296 aa, Unknown
  Obtained from environmental sample
  DOMAIN (13)...(293): Histidinol dehydrogenase
  misc_feature (1)..(296): Xaa is any amino acid
MKIIESVNFDSYWKNETKRSEDTKTEKAVKNIIAEVRAKGDAAVRKFASKFDKSSPQKLEVPLSEAKHALEQLRANEPSLAQALELSAKHIKRFSEKQREQFADFEFEMEQGLVTGQRILPVERAAVYVPGGRFPLFSSVLMCMIPAFCAGVEEVIFSSPPTQDGLPDKKILAAAAIAAEIVNSNNIRIFAIGGAQAIAALALGTESVPRVDVIAGPGNKFVAAAKRILFGEVGIDFIAGPTDVLVITDDQDGNIEKQPILSPRICWGRANMTRTHARGRWFQTKSLPNKILRPLS

SEQ ID NO: 86872 - protein, 109 aa, Unknown
  Obtained from environmental sample
  DOMAIN (7)...(108): 5'-3' exonuclease, N-terminal resolvase-like domain
  misc_feature (1)..(109): Xaa is any amino acid
MKNSTLPPLYLIDAYGLIYRSYFAFLTHPLRNNTGKNVSALFGFARTIISLIDDGAPVVDNDGKDLNHLKPLRLAAILIRALPPSATRCTASTRQTGKKRPKTFTSKFR

SEQ ID NO: 86873 - protein, 279 aa, Unknown
  Obtained from environmental sample
  DOMAIN (38)...(135): S1 RNA binding domain
  misc_feature (1)..(279): Xaa is any amino acid
MIKKILFNATSAEKRAALLENDKVVELVVERPDYFRLVGNIYRGKVVSILPGLQAAFVDIGLDKCAFLHASDVDPSLLLEEDEMMDRFAGRGARNAKSRKVPRIPIEKVLTKGQEILVQVAKEPIRTKGAKVTTQISLAGRFLVLVPDTDFIGVSKKTSDSARRSKLKKLISQIKPPGIGFIVRTNGLKVSETEFVNEIHILLDAWRKTQEEALSGSGTKLVHRELGITTRVIRDLFSEDVTEVYADQEEELQEIKNYVKALSPEMAKCVFHYKEQNAS

SEQ ID NO: 86874 - protein, 139 aa, Unknown
  Obtained from environmental sample
  DOMAIN (2)...(132): Homoserine dehydrogenase
  misc_feature (1)..(139): Xaa is any amino acid
MIRFGRESREGIGLSLEFSAVKIEPILPPSCLKAKDIDSFFKELEKSDGVFEKRRAQEAAKGNVLRYVVVIESGKAKLSLRGEPEGSPFRSLVDSDNIIVITTERYSKLPMVIKGPGAGAQVTAGGVFADIVRTARAIV

SEQ ID NO: 86875 - protein, 75 aa, Unknown
  Obtained from environmental sample
  misc_feature (1)..(75): Xaa is any amino acid
MEKAILIGIATQRVKPAQAQEHLQELQRLAETAGASVAETFLQRVQAFNPATLIGEGQIEEVRLAREKTRCTLLF

SEQ ID NO: 86876 - protein, 159 aa, Unknown
  Obtained from environmental sample
  misc_feature (1)..(159): Xaa is any amino acid
MNLIVLDTNVIVSALWNRNGKPAILLRMFFENEIVLFYDEEIFKEYNRVLRRDKFKFLEPEINDLLHFIETNGIPISNTEKSIEFMIDESDRKFYDVAKKCKAFLITGNKKHFPNESFVLSPTDFLNLYLKQVTLFQKFKRFIKAFIRCRNLGRSVMAT

SEQ ID NO: 86877 - protein, 174 aa, Unknown
  Obtained from environmental sample
  misc_feature (1)..(174): Xaa is any amino acid
KNRLRGWDEKQRISVFNQLTAIGSLTGIQYYSSSRGGMRVFYDYSSVMDLETKKLLPDPVFTQLPAALTLYARQKDLTFGDNIYRYDYVNNESAVFFIQENITSISYGIVPVIGKGSLRSVMAVIDCGDSILIYAASMAKAASVSGLSERISASFSNRAMAIIRWFSENINVNL

SEQ ID NO: 86878 - protein, 128 aa, Unknown
  Obtained from environmental sample
  DOMAIN (21)...(124): Toprim domain
  misc_feature (1)..(128): Xaa is any amino acid
MAAETKAKKPKGTKKEKPEKQTLVIVESPGKVKTIEKYLGSSYNVKASMGHLIDLPKSRTGIDIENNFEPEYITVRGRAKILKELKSDAKKSGKVLLACDKDREGEAIAVAFKKCLSPEIGFSPLLNG

SEQ ID NO: 86879 - protein, 409 aa, Unknown
  Obtained from environmental sample
  misc_feature (1)..(409): Xaa is any amino acid
METSISSIICIADMNIVPALDQVLTDMALPEVFIQRAKQTFLLDKRGFLGLRPVTKLDESRALIYRMYVPAMYEESVMRRIIEATDLGLGGRGSIFSQHIGIMRGTPLSFDMEKLEKSCEKKDKLAHEEHALITCTVSRGSGEALARAVLELGIGVPVVFYGTGAGLRDRLGLLRITIPVEKEIIWFIVPRSDAELVEKNLVPRAKLDVPGNGFLYRCFVHAPVVNLRIRHGERAHAATMEQVIAALDEVRGSNDWRRFGSRRHEHKSGEKKSVHTRGLFFIGDEEEIELFRKVAIENGARGATFNPVEMRSYKAFKHEKAMESKSRQLCDIITTSVTEEKICASTVKNKLLKKVKPACLRLLMLKCRLLFTESKGSKCRASGSFVDKIKSMNTVRDYYICLKFFPDIA

SEQ ID NO: 86880 - protein, 290 aa, Unknown
  Obtained from environmental sample
  DOMAIN (10)...(289): Protein of unknown function (DUF1016)
  misc_feature (1)..(290): Xaa is any amino acid
MKKNVKKKSLFDDIKTLIEQSKQQISVAVNSTMTMLYWRVGNRIKTEILQNKRAEYGKEVVKQLADDLTRQYGNGWSEKHLRHCLRFAETFPDRKIVSTLWRQLSWSHIKLFLYIEDNLKREFYIEMAKLERWSVRVLDDRINSMLYERTSISKKPKETVKHDLELLKNEQKLTPDLVFRDPYFLDFLGLRDKYSEKDLETAIIVELQNFIIEFGSDFAFMDRQKRISVDNEDYYLDLLFYHRRLRSLVAIELKLGNFKASYKGQMELYLRWLDKNMKLDDENSPSANLS

SEQ ID NO: 86881 - protein, 206 aa, Unknown
  Obtained from environmental sample
  DOMAIN (119)...(188): Peptidase S24-like
  misc_feature (1)..(206): Xaa is any amino acid
MKSNDSCIFSNYPDYRKQILARLWDLSKSQMSHVISGRTKRSREVLVKMALKYKINLNWLISGKGHPQEEAETTLIELFNQEAAAGRGILIEDYPEISAIPVPQTLIHPHKPSGLKAVYVSGDSMIEEKIYDGDIVIFCPKLTSGDAVYVVSVGDSLLVKRVHFDGIKNTITLISANSCYPPRILTEDEADNVKIEGKVIACLHRM

SEQ ID NO: 86882 - protein, 208 aa, Unknown
  Obtained from environmental sample
  misc_feature (1)..(208): Xaa is any amino acid
RYDDRAADTPFGVNTGGSHADLTADYASIPAEMKSVAAFFGKSVLSELEKETFLARAAEVRKSLGDRAFLRAIHFFNENERVDAMTEALLEMEKAATTADKQRVFSRYLDLVNESGDSSWELLQNVFSPTRPKDQGIGSALALTKNFFRKQKLRGACRVHGGGFAGTIQTYVPVDAMNAYRAYIEAVFGTGSLTVLRIRSRGAVELEF

SEQ ID NO: 86883 - protein, 256 aa, Unknown
  Obtained from environmental sample
  misc_feature (1)..(256): Xaa is any amino acid
RGGGRYRENIAFSGDAVIDLSLWGELSLHPNKLKLIEEVISRPELALIIETSGIGWKNDEVEKCADLVKNAGARKNVLPPLSWIVSMDTCDPQRYTELRGAGFAEAETFAKKLFSLFPNDSYVQAVRVKGSEDDTEKFYRYWKTASPKSEKNIIIQKYDDFCGILEKKQASDISPVIRQSCWHIMRDLPVLINGDVPLCRENLSVLKGEKKDILGNVFADSLETIWQNGDKYYKEQCMKKYNGLCAGCDEYYTYNF

SEQ ID NO: 86884 - protein, 219 aa, Unknown
  Obtained from environmental sample
  DOMAIN (1)...(143): ABC transporter
  misc_feature (1)..(219): Xaa is any amino acid
DIGVTPQDSYLFQINKKQHGYAVEIDEGMKKCCQGRHPLPLEQRFLAFQDGWNTLSGERGLTLQGGQKQRTAIARSVAADREILILDDSLSAVDAETEKKILDALFELGREKRRSGLPWAMIIISHRVSALSRADEVIVLEKGRITERGTPAELASGNGFYAHTAALQSLGGSVQHHQLKPKMKVFGCTCTCSNASTCEGSFSVSAPVQCTVPCQQSTV

SEQ ID NO: 86885 - protein, 400 aa, Unknown
  Obtained from environmental sample
  DOMAIN (250)...(400): FGGY family of carbohydrate kinases, C-terminal domain
  misc_feature (1)..(400): Xaa is any amino acid
MRTVCGIDLGTQSCKIVVYDYEKKAIIAKSQAPVDIIANNDGTREQKTEWYDAVIKTCFDKIDKNIKKDIAAIGVSGQQHGFVPLDEKGKPVYNVKLWCDTSTTAECEELTKAAGGEKRLIEKAGLPMRPGYTAPKVLWLKKHKSAAFAKLRHILLPHNYINFLLTGEYWAEYGDASGTALFDVRGRKWSSEICKLISPDVEKYLPPLTTSEKTAGKVSKAAAALYGLNEGTLVSSGGGDNMMGAIGTGAVKDGFLTMSLGTSGTLFGFSNAPVIDPTGNLAAFCSSSGGWLPLLCTMNCTVASEEFRKLIDLDVKAFDAEAEKSPVGADGIVILPFFNGERTPNLPNGRASVNGITAANFNRKNLARAALESAIFGMRIGLDGFKSLGFKPKEIRLTGG

SEQ ID NO: 86886 - protein, 434 aa, Unknown
  Obtained from environmental sample
  DOMAIN (139)...(341): Transposase IS66 family
  misc_feature (1)..(434): Xaa is any amino acid
MLNQAIQQENFSPEVINYIKELETNHAQQIKELETIHKQSYQQLYNKYLTVKEQYDLLVYKRFVRSAEQLLADDKQPLLFIEEAEHAETKEEGPQEFETVKSFTRKKGGRKPLGANFERRERTIDIPENEKTCACGAELTRIGEEISEKLVVIPMRIYVDRIVRPKYACRRCEGTEDENKPTVRIAPAEPAMIPKSIASPSLLSTVFTQKFEMHLPYYRQEKQFEQIGVEISRQDMSNWQQQAFEGLEPLFAILKKTVKDGPVVQMDETEVQVIGEENRSDIQKSRMWLARGGPPDKKVIWYEYHPTRAAYNAKAFLEGYSGYLQTDGYDGYDSAVKDMPGIIHVGCMAHARRKFFEASRINKKPQSAEEGIKHIRKLYRLEDALRGKWKDNLERFNEERKKEAALLLDEFKSWLLKRGMKARRRLERVSRSVL

SEQ ID NO: 86887 - protein, 88 aa, Unknown
  Obtained from environmental sample
  misc_feature (1)..(88): Xaa is any amino acid
DYREISPLYLIPQNSTQKMPSAFFATDLGNRQQATGNREQGTGNREQGTGNREQGTGNREQGTGNREQGTGNREQGTGNREQGIIHIF

SEQ ID NO: 86888 - protein, 396 aa, Unknown
  Obtained from environmental sample
  DOMAIN (178)...(391): Methyl-accepting chemotaxis protein (MCP) signaling domain
  misc_feature (1)..(396): Xaa is any amino acid
MMNTKARLPLLVDCLNCKKGCIGGPGTGNAEKSLAMLTEPVQRRMAELEEKQHFKIGNNAYKKYHNVLKKYWKKGLYDRSYRNLSENNTIKHPSETEITEIFHTMRKFKKEDIYNCTCCGYGSCKAMATAIYNKLNKHENCAHYILALLKENQEHIANASNLIEGINNLIQELNDIISSQAEAVDHSSAETEEIVASIKNTSEMSLKQQESVKGLMEVAGHGQESMRKTIQSISEISKSVEGISSAIHIISSIAANTNLLSMNAAIEAAHAGDAGKGFAVVAGEIRRLSENTRENAVSISHTLTNIINGISDTTKQSGETDTRIAQMSKEISGFAETMSVFMNTFNELSAKSGNITASLVSLKEQSSAVKTSYAQMIEMTNKLAKALKDLSDLSKR

SEQ ID NO: 86889 - protein, 42 aa, Unknown
  Obtained from environmental sample
  misc_feature (1)..(42): Xaa is any amino acid
GLIAEPSYGELIHPIAMEKGLRFAIREGGKTVASGQVVEIIE

SEQ ID NO: 86890 - protein, 115 aa, Unknown
  Obtained from environmental sample
  misc_feature (1)..(115): Xaa is any amino acid
MRFIIDKNRSAEFNMAADLYLLRRCGGGAAGAGGDVTIRLYSWLRPTVSIGCMQSPDTELDPEALQAAGAVWIRRITGGRAVLHDGDITYSVTFPKAYARWAAAYGRLTTLSRNA

SEQ ID NO: 86891 - protein, 181 aa, Unknown
  Obtained from environmental sample
  misc_feature (1)..(181): Xaa is any amino acid
NTDQIGTRRLGDRHNDNAMDGCREMQTCLCSPEEISRYWRKFGGALLDRIEIRVAVFPPGVNEIGITNSSEERSADIAMRVKAAVEIQQQRYKGMGIRRNALIPAGKIEKFCGMDHQARDAFHKALTRLDLSGRAYHGILRVARTIADLDGKETIGTVHILEAVQHRRYGEDPYEIVTMGN

SEQ ID NO: 86892 - protein, 405 aa, Unknown
  Obtained from environmental sample
  DOMAIN (9)...(99): Cyclic nucleotide-binding domain
  misc_feature (1)..(405): Xaa is any amino acid
MENQLQLGSLNYKKDAYIFVEGERNADCFFIIQQGKVKISKEAKVEGENDETLGPGDFFGVISTMSSHSRIESAQALTDVVLISVRQNQYVGLIRNNTQVAIKIILQFSKRLRYLNETLAKLTLKNTADNGPSHLYDVAEYYLGQKQYNQAGHAYAQYVRHCPNGEKAASAKDKLARLASRIDQPKFAPDDVNRIYRKDTMLFAEGEPGDQLFIIQKGSIKITKIVDHKEVLLAMLKPGDILGEMAVLEGKPRAASALAYEDCDVMVVNKANFELIIKNQPQIIAKITTLLADRIWLMYKQLANALIENPKGRMYDALLIQLEKNRITLDGETSYIFTFGLPELINMVGLPEKQGTAVFTQMLENKEIQIVGSKIRTTSTAEILKQSEYFRKMDKIEKTRLQNNN

SEQ ID NO: 86893 - protein, 415 aa, Unknown
  Obtained from environmental sample
  DOMAIN (1)...(410): 4-alpha-glucanotransferase
  misc_feature (1)..(415): Xaa is any amino acid
MGLLSEAELQTYPRLPEGRVDFGAVISEKEKLFRMAFDNFKPTPDFKAFCTKEASWLDGYALFRVIKTIHGEKPWWEWKEPYKKREKSVLANVSEKFASDLTYHKFLQYLFDRQWQKVRAFAAKQGISLIGDVPFYTAYDSSDTWMEPKYFLFDKKLKPTEVAGVPPDYFSKSGQLWGNPLYNWETLKKNSYSWWCRRIQKALEFADYVRIDHFRAFDSYWAIPYGNLTAVKGKWCKGPGKNFFDTLKEKLGKLPLIAEDLGDITADVVKLRDAIGAPGMKILQFAFDSNTNNPYLPYNIPRESVTYTGTHDNDTSLGWFSTLPEENKKRVCDYLGCYRTEDKFLDAFIRCALASPSWLCLIPMQDVLALGSRYRMNTPATTQGNWQWRMTQKMPVYEKLEKLSELTQTYGRARG

SEQ ID NO: 86894 - protein, 371 aa, Unknown
  Obtained from environmental sample
  DOMAIN (207)...(354): Acetohydroxy acid isomeroreductase, catalytic domain
  misc_feature (1)..(371): Xaa is any amino acid
IAGVNGSIEFGGKKEKVVTRKEFSVAKARAALKGEVIAVIGYGVQGPAQALNLRDNGFKNVIIGQSKKFKKDWDRAVKDGWVPGKTLFEVEEAAQRGTIIKLLVADAAARIIWPTIKKYLTKGKALYFSHGFSIVYKEQTKVIPPRDVDVIMVAPKGSGTSVRRNFINGVGINSSYAVFQNATRRAEERCLALGIGIGSGYLFPTTFEKEVYSDLTGERGVLMGALAGIMEAQYDVLRKNGHSPSEAFNETVEELTQSLIRLVDENGMDWMYSNCSATAQRGALDWKPKFKKATLPVFKELYEAVKSGAETKRVISACGKPNYKELLDRELADMGNSEMWQAGKAVRALRPKEKAREITKETKGIAGRGKN

SEQ ID NO: 86895 - protein, 762 aa, Unknown
  Obtained from environmental sample
  DOMAIN (1)...(469): UvrD/REP helicase
  misc_feature (1)..(762): Xaa is any amino acid
LETGVVANSDWETELPPSETRLAIKKYFDYYSAVVAARIPGRYGDAYTPLVENFKILKGKDGDGLYYELEAIANYAFNFGLCAGVFELIKKFQDEFNAKKRETGFLSFNDIARLAVDALKDHPDIRKAYKDSLSMIMIDEFQDNNALQRDLIYLLAENPGRTEKGIAQAEELENNRMFFVGDEKQSIYRFRGADVAVFRSLRPAMGMENGIELIHNYRSQPGLIAAFNHIFRDVFLPPGPGVPDYEAAYSSMRPRESANESDNSPLAHFCFLNGEALPKDDTSGLKSQDLEAVFIAARIRDMVRNEEEIPRRDGTKTGWVKCTWSDFAVLERSYTHQGTLEKHFREFGIPYRTDRPTGLFNDAPVLDTRAFLRLLVYPEDRIAYAALIRSPFMRLSDLSLAVCMLAINANAKTPGKSPEPFAEENEALIPEDELVLYRRARTCYQSLREASRTLPVTELLTKLWFEEGYRCETLWTESAQVYESLFDLFFSLAAECDAKGKSLADFIEYLEDVMNREEKPDDRDIPGEGEGGVRIMSIHKSKGLEFPVVFIYDCSHAGNVKRSTDLITNHAQYGIILGIPQAEELREGGNYFRRFMEKEEKAKAPAELRRLLYVAMTRAEYKVFLTFTLPRQTGKEKEDWDMMAEEFTDERIRRRLSQLDEKSEAKRDTFLKLLAGILQGSPPSLCALEVIPPLTRDEIKKAASLGRENADRRELGNNRKEAALAAESFYNGADLLCEGKAAQPYLTASKLRTSADLSCPDP

SEQ ID NO: 86896 - protein, 187 aa, Unknown
  Obtained from environmental sample
  DOMAIN (30)...(184): Flagellar basal body-associated protein FliL
  misc_feature (1)..(187): Xaa is any amino acid
MSDTDALDMEEGEAPESGPKKKKGGLGALLPTLLKFAAIGIGALLFIVTVSVITYNIMNDGGKTQTNVTDPSSPYIGRKPIFAWYTDIGTVTTKTRDDPEKMHTVSVVMNLGYDLTDPTAYSELSGRKFELQDFVRRYFAGKYADELKTENEEKLKMEIKEQRNKRLLENARIRDITFTKLDVMEAF

SEQ ID NO: 86897 - protein, 484 aa, Unknown
  Obtained from environmental sample
  DOMAIN (227)...(440): Methyl-accepting chemotaxis protein (MCP) signaling domain
  misc_feature (1)..(484): Xaa is any amino acid
MKDVDTAYAQYMDEAVKAVQNGDSFACNSYAPALKSNIEITIQSFPMGNSGRSWSVMIAATESYILREVNFLTKITIIIAAIAIVIAAVIIYFVLQSTTNPIVKVADTLRDISEGEGDLTRTIAVSSNDEIGDLAKYFNKTLDKIKNLVLLIKKQAGLLKDIGNDLASNMTETAAAVNQITANIQSVKGRVINQSASVTETNATMEQVIANINKLNGHVENQSRNVSQASSAIEEMVANIGSVTNTLINNATNVKSLQEASEVGRTGLQEVASDIQEISRESEGLLEINAVMENIASQTNLLSMNAAIEAAHAGEAGKGFAVVADEIRKLAESSGEQSKTIGTVLKKIAESIKKITSSTENVLNKFEAIDSGVKTVSDQEDNIRNSMEEQGQGSKQVLQSVGDLSEISRQVKGGSNEMLVGAKEVIQESNNLEKATQEITGGMNEMATGADQINLAIHHVNEISNKNREGINTLIKEVSRFKVD

SEQ ID NO: 86898 - protein, 285 aa, Unknown
  Obtained from environmental sample
  DOMAIN (1)...(235): Histidine biosynthesis protein
  misc_feature (1)..(285): Xaa is any amino acid
MVISSIDIQNGKVVQLKQGEELVLQRENSLELAAEFDRYGEVAVIDLDAAMGKGSNLEMIKPLLRKAECRVGGGIKTPQQAQELISLGARKIIVGSGAFRDPAKKGAGIAGGEFAVNIPFLETMSKKIGRERLIVAVDARAEEIVVDGWKTPTGLNLVEAAKQVEPFAGELLFTCVEREGTMTGIDLAPARKLREAVSCQITVAGGVSALAEVEEIAALGCDVQLGMALYTGKINLADAFVVSLNWKKGGSPPLRCETFGFYAIPPSGGNPRNAPVARPIYLGQP

SEQ ID NO: 86899 - protein, 154 aa, Unknown
  Obtained from environmental sample
  DOMAIN (1)...(90): FAD binding domain in molybdopterin dehydrogenase
  misc_feature (1)..(154): Xaa is any amino acid
MGKIVPQVLCDCLENIGGVQLRNVATIGGNICAAAGLLDISAPLVALDAQYEFRNAQNSRWVSASRFHSEEDRSALGKKEILTRIRLPLHQWDYSMYKKFFSENMYNHKTITFLAKAQKNILSDIKVIVKGIRLSETRALKVFNRRPLLGRICT

SEQ ID NO: 86900 - protein, 294 aa, Unknown
  Obtained from environmental sample
  DOMAIN (47)...(293): Pyridoxal-phosphate dependent enzyme
  misc_feature (1)..(294): Xaa is any amino acid
MSEGRFGEYGGQYIPETLMNEVQALEKAYTHYKNDPEFTAELNALFKDYAGRPSMLYFAEKMTHDLGGAKIYLKREDLNHTGSHKINNVLGQVLLAKKMGKTRVIAETGAGQHGVATATAAALLGLECEIFMGKEDTERQSLNVYRMALLGAKVNAVTSGTMTLKDAVNETMREWTRRVSDTHYVLGSVMGPHPFPMIVRDFQSIIGREARQQILEREKKLPAAVIACVGGGSNAMGMFYPFIEDKGVKLIGCEAAGKGVDTPHHAATLTKGKRGIFHGMKSYFAKTKTRPICH

SEQ ID NO: 86901 - protein, 86 aa, Unknown
  Obtained from environmental sample
  misc_feature (1)..(86): Xaa is any amino acid
MLNKGFFGENAIVEDNDDMVHSYLMIDPSGRFFQNGNKEDYIYSDPIHEVGLEKALSQIKFSKEKFMSRYKDTTKNEEVLVPNLSL

SEQ ID NO: 86902 - protein, 129 aa, Unknown
  Obtained from environmental sample
  DOMAIN (1)...(127): PIN domain
  misc_feature (1)..(129): Xaa is any amino acid
VFDTDTASFFMKDNPKSVRKKAADIQKDEFCISAITYAELMFGLKRNYSKQLDFWLNEILAKLNVIAFDDASAVVYGDIRTSLEKSGQILDNMDMLIASSAISVNAILVSHNIKHFSKIKGLKVEDWYR

SEQ ID NO: 86903 - protein, 423 aa, Unknown
  Obtained from environmental sample
  DOMAIN (329)...(422): Phosphoribosylglycinamide synthetase, C domain
  misc_feature (1)..(423): Xaa is any amino acid
MKVLVVGGGGREHAIIKSLKNNERITKLFAAPGNGGISRETECVQIKATDIQAMTEFSVKNKIDYVVVAPDDPLALGMVDAMEEKGIRCFGPNKAAARIESSKVFSKGLMKKYGIPTAAFETFSDSKKALDYIKLYSSSFPVVIKADGLALGKGVIIAENKDEALSAINTVMLEKKFGASGSNIVIEEFLTGPEVTVLAFTDGKTVVPMVSSMDHKRAFDNNTGSNTGGMGVVAPNPHYTNEIAEVCEKTIFLPTIYAMEKEGCPFKGCLYFGLMLTPCGPMVIEYNCRFGDPETQAIIPLLETDLLDIMEAVTDGRLDTVDIRWKSAHSVCVVLASGGYPAVYKTGFAIDGLDADGKIKDGEAVVYHAGTEYKDGLFYTCGGRVIGITACAPSLDIALEKAYKAAGTIRFDGAHYRKDIGKY

SEQ ID NO: 86904 - protein, 84 aa, Unknown
  Obtained from environmental sample
  misc_feature (1)..(84): Xaa is any amino acid
MMAENVGAVIKKSAIEVPPVFGLIASAGKIPERDMFNTYNMGVGMCVITASNNADEALRILKSSGEKAAIVGEIKSCINGVIIE

SEQ ID NO: 86905 - protein, 231 aa, Unknown
  Obtained from environmental sample
  misc_feature (1)..(231): Xaa is any amino acid
MRYKTIYMLFPVFFLLFSCEITPKSILAVIFNTNDASGIDSYYITGTRENKEHLKELINLLKQEEPGSEGEFAVIREIAAGFVREKDFNRLIPFLTARTINNPADPYNAYYLMMIAYAYIQLDSLPIAAMYFDLIVNNYPDLSINEESIHLICLRQLIELNRNPERQVWYYNELITRFPEQIDLGTAYFMLGQACEYIGDWNGAIQAYTNYLPYTGTLSTVPKRRPLVPSS

SEQ ID NO: 86906 - protein, 458 aa, Unknown
  Obtained from environmental sample
  DOMAIN (24)...(253): Protein of unknown function (DUF1538)
  misc_feature (1)..(458): Xaa is any amino acid
LSFKETFSLIKIYALSKIKPQFKAVLMVSIFLAAVQYFVLGTPLKNALSIVVCVGAAILGLSFFLEGLFLGIMPLGEQCGMRLPSKIGAAGVTVFSIIVGITATLAEPAVAVLQQQGSVIPAWDAPLLYLLLNRGTSWLVAAIAIGVGVSVVLGVYRFMFGWAFKPPVFIIIPAIVAVSCIFDENPILRPLVNLAWDTGGAATGAVTVPIILALGLGVVKISGKSSNASGLGLVTLASALPVASVLFLAAMLGPKVPLPGGAMSFFSTDPEQRSKAVYVAGNSEELYNMALMAVSSGDLLIEEFEICFPERQLAENQGIEELSVFAPQAFLRYAKSALLAVLPLGLVLIIAIGLIARDRIFNADIVALGILFASLGMFALNLGMTGGITVLSSQAGNSLKQTYTETLNENKTVTVRGVNENSLITVPGENGPETYIWVQWKDKPTLKNCLGRSDQWVN

SEQ ID NO: 86907 - protein, 486 aa, Unknown
  Obtained from environmental sample
  DOMAIN (410)...(465): BFD-like [2Fe-2S] binding domain
  misc_feature (1)..(486): Xaa is any amino acid
MVILLIRLYDISMDFDVAIIGCGVSGANIARRLSAYNIKTAILEKAADVSFGTSKANSGIIHGGFHHNRKHLKARLEIQGNLMFDQLRRELNFPFRRCGIIVAALHEEEMKVIEHLYLQGVENEVIGIELCSRSRILELEPKLSADTVGGLYAPGGGIIEPYRFVFALVESARKNGTELFTNFKVDEASRSGDFWSIRAEDGRVVKARYAINAAGLFADEVSKAFKAEDFTITARKGEYFLLDRLTKACPSRVVFPVPTTVSKGMLVIPTVEGTALVGPTADAVEDKNDFSTTAKHLEQIIVSGKTMIPSLSHNDVITNFAGLRPCLGEDFYIEASKKVPAFVQVAGIQSPGLTASPAIAEYVKNILVDMGLQLTEKPHWDPYVEDHPKARELDFEELDNCIAKDSAWGSIVCRCENVSEAEIIQAVRLGHTTLDGVKYFTRAQMGRCQGGFCTYKIIKIIMREANLSWEEVTKHGGKSRILDGVL

SEQ ID NO: 86908 - protein, 89 aa, Unknown
  Obtained from environmental sample
  misc_feature (1)..(89): Xaa is any amino acid
LRDFTAKSNRETGCGRYDIVLRHISGRGKAVILELKCTPDMREIVKKCEEAVKQIEDGKYAKELETECYTDIIKYGIAFCKKSCEVRKG

SEQ ID NO: 86909 - protein, 1418 aa, Unknown
  Obtained from environmental sample
  misc_feature (1)..(1418): Xaa is any amino acid
LTKTKSGAELDNGVHILSISVKDSLGNGSETDSTIGGLKKDIAFLIDKSVPVLKVTDYPDKAINKTEKFKGKITETINVKQLTVKLGNDEIATIDVENNTPPKYPLVNGNQYGVSIKVTPTPGTGMSFDFEVEINPAVGGLEDGPKSLMFSAVGSSGQSGMTTSSFTLDTKGPSIAIGAPISGNVYVTNPEWGILEYAVIEDDFSSASSVDSIYNEVFAARIKDISPSFALTFTDEASFVFVTGKDKFWYKFDNDSSWLPVTVGSSDLNKTSVSLSLPLPADKQKDGVHRVSIRATDSLGNGYDNLKADTAPEKENGVGYQSNLVFMIDTGIPELFVKDNNGKKVPSEAQDFGIHNKSFNISGEINKTYDVQDLSVKIGSTVVAQRTNNGATMNNMTFTKKPNGKRTYYFTNVNIDPLLGASITDGSKDGSYTISVSVKGSSEQSVSNVSTVTLDTQGPKITVNAPIKEKIYLSDSQRGTIEDAITANNIESLKNVTFTGNTTTTLEKVYYDLLRYNVKDASSKLSGSFADTYSDVGTQYWYKFNNGSWETGNTIITNAGNLKSKDWEIALPSTLPDGMNRLSIRVKDTLSNGYDTGTAPSSDNSGGNGYESNINFIFDTISPALTEIGGGIADTSAGKDPTVKGPPEFFTVTGQVTGTFMVKRLSVSIGGAAEVEQGQSATVLQTVDGVTTPLGGNFFIENFSLTPAGKKTFNYSFNVITKKSGGELAYGSRTITINAVGSSDNSDVKTLSFIYDNKGPTVNVSVPSSKEYLNKDEKDSLNYVLDNGKPYLTGQEEIYKKLDAMVISDASAKLSGTFNDDYSDVAVTGSNTFWWDIDNSGIWKTGILGVNNKSVSWEVDIAGLGVGVHILSLRVKDSLGNGYDKNSGLTGKGGGAGFETDIAFLIDNNPPVIEDIVVPEAAINSQFPVTGRVTDTYGVKKLSVKLGNDEIAYAEKNSLGNYVLTRKPGVNYVESIVIDRTNGVGKSFDFTVTIDPRAGSMEDGPKSLTFTAIGSSNQAAIGVDSFTYDTTGPKVTIGAPINGSIYVVGNEWTDLEKAVRTDVFTNTGIPTGNGSTYDKLFQARIKDNTASFTVTFADNYSNVFESDKNTSFWYRFDDGAWQEGLAPIGEYNKNSASVKVQLPDGGTWTDGLHRLSVRVKDSLKNGYDKKTLDGVISTLTGDKKNNDYGHETYRTFMIDSGKPTIAFTNDKTELGVFSKTESPGISGTITGTYKVQELNAKIGSSTKNIDLKSFLIDIPGSMKTYNFNVDINPSDIYEATKFAEGSYTISLTAKGSSDQSDMKVSTFILDTQGPAISINAPINKVYLTSGPTGQISTFEDALLNNNTGLIASLDRPIYYRLLNNSVKDISAGLSGSFSDTYSDIGTKYWYRFNGGAWREEDTNVSTADNKKTVGWKIN

SEQ ID NO: 86910 - protein, 228 aa, Unknown
  Obtained from environmental sample
  DOMAIN (27)...(219): PP-loop family
  misc_feature (1)..(228): Xaa is any amino acid
MIMNALLSAKATASLSRFRAARIQPFLAWALSSIRSALKFNYELAALHISTDFCFCCKKTALSERLEEWNIPYNDLYVPVIGRLKEGKKMNCYWCSTQRRTELLKYAVENGFNKIALGHHLDDIIETFFMNMCAKGALLAMPVLLNYRKYPVSLIRPLALLEEKQVIACAAQQNILKNACTCPYGQNSKRRDIRKRIGEFTTGKDSGDIKRRILQALGGGEIDYLKEE

SEQ ID NO: 86911 - protein, 550 aa, Unknown
  Obtained from environmental sample
  DOMAIN (442)...(537): Fibronectin type III domain
  misc_feature (1)..(550): Xaa is any amino acid
GFGGGLYRRAAEVYIFLFVCGSISAIGEKTLSFGGEKAWNIAESRNGVTETVSIRPYPVLLLSSSTVTSVAGYQTADGVLGKYSSLSEHALDLAISFDEKTPALFRDSTGNYSLTIPPQVETVDRVLARAGAGAAYFVHGGHDSLSTPIVIHPQSRNALFTSGNRIKDFTIEFWMYPLNMENGEQIFTWVSTLPDNVSRVQRIDCFVAKNKMSWSFTNFFTSVNDSKRHNIEFSNLTPIIPKTWSHHLIRFDATTGMLEYIVDGRSEAIVYATSTGRENSEVHNPVLGVNGRFLLGERFSGLIDEFKIHSICAGRSSIQRYSARGGRIETRAIDLGANASGVVRINASGGRTSIKGARVQNEYRENGRFKFSDDGEMNFFIRAGENPYLLRNNPWVMFTPGSDIKGISGRYAQIAVDFYPSADGECSPYLEQIHIVFNQGEPAQPPRNLTAVAYDGGVQLKWRQSITAGMAGYLVYYSPVRGELFGTDSTSGASPIDVGLTNSFYVDGLKNGTLYYFRVAAYDLITGDINPNVGEFSAEVTARPLLGLSR

SEQ ID NO: 86912 - protein, 194 aa, Unknown
  Obtained from environmental sample
  DOMAIN (55)...(194): Methyltransferase small domain
  misc_feature (1)..(194): Xaa is any amino acid
LNFDRPLSEQELAKLRPMVARRAKREPLQHIIGSVSFRGHEIKCDKRALIPRHETELILDILMDSKIPAFSGVSAKQTGCAVEILDIGTGTGAIAIAAALELNAKVLATDVSKEALELAKENVALHGLENKISLIHSDLLSDVPSDVKFDALLANLPYIPLSDESKLQPEVLNGDPHLALFGGANAWSNTKLLN

SEQ ID NO: 86913 - protein, 95 aa, Unknown
  Obtained from environmental sample
  DOMAIN (8)...(79): Histidine kinase-, DNA gyrase B-, and HSP90-like ATPase
  misc_feature (1)..(95): Xaa is any amino acid
FFGGLFAGKRDTDSVCDTGTGISQENLKKIFEPYFTTKSSGTGLGLTLVYKIIREHQGEMSVDSREGEGTDFEIILPVYQKKQNLINYSGAKNEI

SEQ ID NO: 86914 - protein, 351 aa, Unknown
  Obtained from environmental sample
  DOMAIN (62)...(210): Carbamoyl-phosphate synthase small chain, CPSase domain
  misc_feature (1)..(351): Xaa is any amino acid
MVISLLATWKKRGFTQTLSASKLLLTPSTSSLSAKNPGLWRLPKKPEWRNWEKRRLDQRIGMKGYLVLQNGTVMEGSSFGAQGEITGEVVFATGMTGYLETLTDPSYYGQIVLQTFPLIGNYGVIPPDFESSNVGARAYIVKTPCQNPSNFRSEKNLDNFLKERSIIGLYGIDTRALTRIIRENGVLNGKIKMSPPTDADIAEAKAYTIVNAVAAVSSRDTAKPETKGDGTAARRVALFDFGAKRGIARALAARGCEVRYFSYNASAEEILAIKPHGIMLSNGPGDPAEPAHNGIVEALRILQKSKTPIFGICLGHQCWRWATVIRRTNFSLGTRSPSAWLRPIDGARVYY

SEQ ID NO: 86915 - protein, 110 aa, Unknown
  Obtained from environmental sample
  DOMAIN (51)...(84): Tetratricopeptide repeat
  misc_feature (1)..(110): Xaa is any amino acid
MLFIFFVSFLFAFSYGAEDFFKKANELYDAGKYTEAVPAYRAAIKNEQMEPYAWFNLGNTLVHLKQNHVAMVAYKRATELAPSFASLGFFWAIFRILMENMGRRWRIMAG

SEQ ID NO: 86916 - protein, 78 aa, Unknown
  Obtained from environmental sample
  misc_feature (1)..(78): Xaa is any amino acid
MIRHILFDLDNTLYSINTGVEDIFLRRLKEFTSSWLGITWEECEPLWRAGLKTYGTTLEWLMKKKAYRQEGVLCLYSS

SEQ ID NO: 86917 - protein, 199 aa, Unknown
  Obtained from environmental sample
  DOMAIN (15)...(198): yrdC domain
  misc_feature (1)..(199): Xaa is any amino acid
MEMLSTSNTDLEKAASALAAGLLVAFPTETVYGLGADAFNQSALARIFEAKGRPRFDPLIIHIADPQTLWRIADKSSLNKATVERLSVLAERLWPGPLTLILPKRSEVPELATSGLSTAAIRFPSHLVAHKLIRLSTGAVAAPSANLFGHLSPTRAAHVKAQLGDKVDYIIDGGKTQVGLESTVLDLSRDIPAIFEQGG

SEQ ID NO: 86918 - protein, 964 aa, Unknown
  Obtained from environmental sample
  DOMAIN (3)...(964): AcrB/AcrD/AcrF family
  misc_feature (1)..(964): Xaa is any amino acid
MNIGDYSVKRPVTIVILYALAMGIAVTLVLNLAVDLYPSTARPVLSIYTRFPGSGPADVEKNVTERLERALSTSVGLVNMTSNSQFESSFINLEFAYGTDMDKAANNAQLLVNRLANSLPDDVQTPTVRRFDMSAMPIMRLVVRGNYPPDQLRLFAEDEIQSNIEKLEGVASAEVTGGTTQIVKVAVSLNRLAAFNLTLNDITNSLKGQSVLASGGNLRRGTREYQIMTQEELVSLDQIKRLVVKTVNLAASGGASAGGAASAIAHANRSQAIRIEDVADVSLGYNENAARVNINGQSGVYIQVTSESGSNQVKVSDNVRAALGEINAELPQGITLEILSDNTNMIRATLNQVYNNAWQGGLLAMLILLIFLRNIRGTIIIGLSVPISMLLTLMFMAIFGFTLNLLTMTGLIMGMGMTMDSSIVILENVHKYRERGAKAAIAAILGSREMMRAIIASAATTLCVFIPLIIYKNDLKEMGQLFNDLIFTVVISLTCSLLVAITLVPSLCGAILPLQTRVQKPLKNRLLRKTDDAMERAFKAMENGYGKALDYCLSHRLLIVTLVILILIFSLMQFGGIGMNMYTRIRVDDNVTINVAMPQGTAIDVTEDMLFRLEEIVKREVKNYNHLVLTARRSGTNQGVLQIILPEPAKQTDTPDSIIRKLTPITSQIPGIRATYRAGRGVGTTSAVEIAISSRNYPAIMDTANEIHGIIERYLPDIENPTVNIDEGAPQLQIEIDRDRAASFGLSLAAIASEIRTAMDGTTATTMTRGERLVNVQVQLRDDDRQGLPNLDAVFVMSRNGSRVSLSNVARIRESRAPTSIRHERQERVVRVTGDLGPGIAATDMQRRLISTVNNYLVPREGVRVRFLGEAQEIQSYFWRYVLIIGTAVFLVFGVMASQFESFVDPLIIFFSIPLLSIGVVWIYKIGGQAMSMFSIVGIVALVGVVVNNGIVLVDYTILGRSVM

SEQ ID NO: 86919 - protein, 89 aa, Unknown
  Obtained from environmental sample
  misc_feature (1)..(89): Xaa is any amino acid
MTTKTTTIGILGAGQLARMLALAGHPLGLRFVVLDPAPDACAAAVAAHVVGKYDDRETLRRFAGMADVVTYEFENVPAESGSYLAERLP

SEQ ID NO: 86920 - protein, 679 aa, Unknown
  Obtained from environmental sample
  DOMAIN (515)...(581): Biotin-requiring enzyme
  misc_feature (1)..(679): Xaa is any amino acid
MPKVKLTDLVLRDAHQSLFATRMVTADMLTICDKLDKVGFFALEAWGGATFDSCIRFLNEDPWERLKKLKKALPNTKIMMLLRGQNLLGYRHYADDVVEKFVEYAAKDGVDVFRIFDAVNDPRNLKAATEAAKKTGKHIQATISYAVTPFHTIEKYAEFAKQLADTGADSICIKDMSGLLKPYEGYELVKAIKKVTDLPIEIHTHATTGMSVATLTKCAEAGAEILDTTISSMSMGTSHSPTETMVEIFKGTEYDTGLDTALLLEIAAYFRDVRKNYKKFESSFLGADTRILASQVPGGMLSNLESQLKEQGASDKIDEVLKEIAVIHKDSGYPPLVTPTSQIVGTQAVFNVLFGRYNKLSGEFQDLVTGKYGACPASKNPDVVKKALEALKMEKEITHRPADDIPPEYSKLEEEAKKLLGTSTVTTEDVLTYAMFPKVAPDFFKKRANGPVVFKPEAEGAAAPVAGQAARYSVNVNGANYDVVVAPAGTVAVAPAGGASAVATPVASSGGVGSVNVIAPVAGIVLRYAVQEGADVEAGQTIIILESMKMELEIKANASGKVHFIAPTGTSVVGKQPVAEISGADIAVPASLAAPAPAAQAAPAPAASGGGTIVGAPVAGIVLRYSVNEGDTVSNGQTIAIIESMKMELEIKANASGRVHFIAALNTSLVSKQPIAQIS

SEQ ID NO: 86921 - protein, 279 aa, Unknown
  Obtained from environmental sample
  misc_feature (1)..(279): Xaa is any amino acid
MEELQAAGIWAKHEKSGAEVFHVLNDDSENLFSFTFKTFPQDNTGAPHILEHSVLCGSQRYPLKDAFMVLAQGSLQTFLNAMTFPDKTVYPASSTNEHDYFNLMSVYGDAVFRPLLPEWTFMQEGHRYEYQDGRLSVTGVVYNEMKGAYSALDSYASTWSVKAILPGTPYAFDSGGDPQEIPQLTWEGLKDFHRSRYSPANCKVFLAGNIPTEKQLSFLNDQFFSRLKAEKNARRLTRLNAGTNLKNLLFPARRTAKLNRQYFYHGFVPMLPMYTKVSR

SEQ ID NO: 86922 - protein, 304 aa, Unknown
  Obtained from environmental sample
  DOMAIN (8)...(168): Peptidase M16 inactive domain
  misc_feature (1)..(304): Xaa is any amino acid
LQSVPRRKYPDRETAFIFKRSIFFKIEGGKECAPVNKTERWNEPKKFTVPCPADGEAKSTIFLSWLCSDVTDVYESIALAALTEILLGHDGSPLTRTLIESGFGEDITPVSGLEGEIRETLFVVGLKGVSGDLQQMSQKIEKLIMDELNRLVTEGIPPQETEAAVLSMEFSQREIRRSGGPFSLVWMRRSLRSWLHGCKPWESLLLLPSMAKIKENLAADNRYFEKLIKKYFLDNPHRALVILEPKEDFLQKQEEALSRQLADTEKNMSKDARQNIIKKAEELEKIQGQARLPAGACDNSASFA

SEQ ID NO: 86923 - protein, 252 aa, Unknown
  Obtained from environmental sample
  DOMAIN (139)...(250): ATP synthase alpha/beta family, nucleotide-binding domain
  misc_feature (1)..(252): Xaa is any amino acid
MAKTGSIIQVVGPVVDVSFSASGGTESVPGILNALEVKADSRSGGDRKVVLEVLQHIGDHRVRCVAMEATEGLSRGMEVSDTGHPIQVPVGDEILGRMFNVTGKSIDDKGTFNAKQYASIHRSAPDFADQKPATEVFETGIKVIDLIAPYAKGGKIGLFGGAGVGKTVLIMELIRNIATEHSGYSVFSGVGERSREGADLWKEMNESGVIEKTALVFGQMNEPPGARMRVALAGLTMAEYSATRSSPSSPKK

SEQ ID NO: 86924 - protein, 85 aa, Unknown
  Obtained from environmental sample
  misc_feature (1)..(85): Xaa is any amino acid
VLTEAALEGRVDYLRGLKENVILGRLIPAGTGMAKYRNVQIEEGQYPDIVAEPTDGDEDIDDEYSRMAAHVEETYGLSEAEFDEI

SEQ ID NO: 86925 - protein, 610 aa, Unknown
  Obtained from environmental sample
  DOMAIN (473)...(603): Alpha-2-macroglobulin family N-terminal region
  misc_feature (1)..(610): Xaa is any amino acid
VLVSDLGLIAKRSIDGSWLISTTNLITARAAPNVEYKVYNYQGRVLHQGRTNANGIASVPASADTASGSRPIVYAESSLGRAYLKVNDSFALSVSHFDISGGTPSSGLRGLIYGERDVWRPGDDIYLTFLLADPLGSLPQNHPVIFELEDPRGRPVINRTYTSSVDGFYSLAAVTTSDAPTGDWTARVRVGGKAFNKNIKIETVMPNRLKIDLDFGANEFIKSGSQKIPLESQWLYGAPASGLKADISAVYADKETTFKGYEDYSFRDPSRGISTERQNIWSGNLDSEGKAIVTMNFNPGSAVPGRVTARFMTRIFEPSGVFSSEQISKEYSPYSRYVGIRLPKGKTESSRDMLLTDTDHIADIVILDEDGKLLQGKIDLDCAIYKINWRWWWEKGENESAEFTSALSSTPISRQTVTASNGKAAFTFNIKQPDWGRYIIIAKDGKSGHAAAQVVYIDWPSWSGRNRGSGQDSQSMLTLTAGKQTYNTGEKIQITFPSNKEAAALVVLEKGGNIIKNEWISCQEGTTKYEFNAEQSMVPNIYAHITLVQPHLQTQNDLPIRLYGITPIMIEDARVVINPQIKHRKTGKPNQKFHLLSAKATADQWRILLL

SEQ ID NO: 86926 - protein, 255 aa, Unknown
  Obtained from environmental sample
  misc_feature (1)..(255): Xaa is any amino acid
VVRFFGPFEIGKNGQKTETFELPPYTGAVRIMVLAASSTSEPQTGRALRGYGTAQTTVKVTSDLMVFASLPRVLSPGDEFEVPVYVNAQKDGRRNVKVNLSAPGAAIQGASTQDVPFERSEEKLIRFKVKSPNNPGNLKFTVTAESSGLKTAQQVVEIEVRSTAIPVTKSLQILLSAGETWKGTLEYPGREGTNNIVASFSRLPPLNLESRLEYLVRYPHGCAEQTTSGAFPQLYLDKVLSWTTSRADTYSSAFP

SEQ ID NO: 86927 - protein, 78 aa, Unknown
  Obtained from environmental sample
  misc_feature (1)..(78): Xaa is any amino acid
MKTTRNRLVFAAVFAALIAVSNFFQIPTPLGVPIVLKNMFVVLSGTILGRWYGGIAALILIGAGIIGIPGARPILIKV

SEQ ID NO: 86928 - protein, 522 aa, Unknown
  Obtained from environmental sample
  DOMAIN (353)...(518): ABC transporter
  misc_feature (1)..(522): Xaa is any amino acid
MAFVQFSRISLSFGDRDILKDVSLRLAEGSRSCLTGANGCGKSTLMKIIAGKITADSGDRAVQKDARISYLPQSGIVHQGKTLRDEVEGAFGFVHALLEKMEKTGELLEKSNNNDSATQTLIEEHHNLQERIEETGFYRREGEIAAVLSGLGFSVKDINRNTEEFSGGWQMRIALAKVLLEKPDILLLDEPTNYLDIEARSWLENWLNDFKGGYLLVSHDRYFLDTCVNEVYELYNGELKRYAGNYSAYEKTRKVELATLLKRYNEQQEEIEKTEALIRRFRYKASKAAFAQELIKRLEKMERVEIPESFKKIDISFPPPPHSPNIALTLEGIGKSYGKHPVLSALDLCLDAEERLVVAGPNGAGKTTLLRIIAGADNDFTGNVKLGTGIKTGYFSQDAAEAMDSNLSILEFMEEEAPFSLVPKLRDMLGAFLFRGDDVYKSVSVLSGGEKSRLALLKMFLKPMNLLILDEPTNHLDLYSKDILLDALKKFFGTIIFVSHDRAFREELSTKTLELMPVVITF

SEQ ID NO: 86929 - protein, 339 aa, Unknown
  Obtained from environmental sample
  misc_feature (1)..(339): Xaa is any amino acid
MYQIGRGIEAPRIGSALVMTSKMENQTLHTLFIIEEDVGIPGRNDYSFNGVFQVVTNSATGISWNEYYYIPVTIGITGKGKLFLTSDGYLLNINGQTLIIDGEVTLEGRKNNNLPLIFVKNEYSVNAVTKLELRNGTLRGNGHGAVEIHSGEFTMSGGAITGNSSLNGGGVCIMGNTDEVRFTMSGGTISGNTAVYNKSAEGKGGYGSDSRTGSGGGIYIQGGRSYFTGGTISGNKAVRGGAVFIYGAGGGGLINKSRGVIYGNDARAPERNTASGGDTWGHAILFEEKSAGFPEYFMGNYYPNTTLGEADTIRTDFRSHSPDLLPTAGEKTKNGWTKQ

SEQ ID NO: 86930 - protein, 189 aa, Unknown
  Obtained from environmental sample
  DOMAIN (9)...(182): haloacid dehalogenase-like hydrolase
  misc_feature (1)..(189): Xaa is any amino acid
MKKKSAGGDTFYTYPLYPLPYGFVINEQKVSWIKHNENDRIKRYINLRKGDKRLRPIGTKKELYSGKLFYFTCIGEKKELIDIYNYFKESDEFTCTLQQELYREEYWCEIMPKKATKGNAILALKEELKCDKIISFGDSINDIPMFEISDESYAVENAVDELKKHATGIIMSNEKDGVAHWLEENYKRI

SEQ ID NO: 86931 - protein, 1489 aa, Unknown
  Obtained from environmental sample
  DOMAIN (617)...(822): DEAD/H associated
  misc_feature (1)..(1489): Xaa is any amino acid
VQAQAWPLIENGAHVLALAPTGSGKTLTAFLSAISRFCRNGTMYPEGTQYPANKLTVLYVSPLKALNEDIRRNLLKPLEAIRSRFEQAGLQFPDIKVETRSGDTPQSQRRRFYLATPSILALTPESLAILLLNPKGRQALSNVKYLILDEIHAVLGNKRGAFLSCQIDRLSLIAGEFQRISLSATIRAPEIAAAFVAGIDQNGQGRKISIVAPAAEKKIELTLSFDDRENNNDLPLIDKYGRRYSNLINYILNRISGRSTILVFTESRRRAERLCYFINNEAALHETALQKAGVNGTVAFTHHGSLSKELRQSVERRLAAGSLFCVVATASLELGIDIGSVDEVVLAGSPGSVSQALQRIGRSGHGVGMVSRGTLFPFHGMDLLLATALKGAVEDRDIEEIRPIENPLDILAQMILALCIEKKRNIDELYKLLKGFYIFRNLNREAYLRTVRMLAGLSSNGEGKIRLRDVKPRIWLDNIAGEIGALDGSLLLLYSSGGVIANRGLYSLRLADGTKIGELDEEFVWERRPGDRFHFCGRGWRITAIEAESVQAAPLETSSDFMPFWKADTAFRSPRLTERVLAILDGYNSGITTAPPEIEALASFLDSQRNAQGGLPLSGSNRITVEVIDSPENRGDLYAVVMHSFRSGAVNYPLVLALAQELEETLKLRVESFSNDDSLLLLIPRLGIEGNIKRIEHIFRNAVTELNKSGGGGLCRGERLFRNRLEASGVFGASFREAAERSLLLPKAGFGKRTPLWITRQRSRRLFDAVRGEEGFPVTAEAWRSCLVDLFDMEGFRELLGAINDGSVVLSFFYSSIPSPFSRDMVRQETNTLMYEYDERKDIYGSGATLSDKVIQEALGDASLRPLIKPELAGSFSARLRREEPGWTPDDQLSLYEWVKERIAIPLDEWETLCESLPENLKQELSQTSSNDRLVMVKRNGAAIPSMVHREWEESWRLEPLPLLGPWLRYEGPISLSRIAGVFGLSVAAVEIAVNALAEVEELVCDVRLAGEVSPLICDSRNLEMLLRLSRRKQRPEISERPAAVLVPFLALRQGLLSMSKEQGAMNKGNTALSEAAIKKLYACCAPVKLWETEFFTARCAHYNPEIINQEINEGRLVWYGAGKEKIGLCRPDDLELVSMNNVHKPKQKIHSEDGLLAQLINNGFFDRPRDFWEIKDAINAGAQQYISGKDCAEALWQEAWQGRLSSDSFEPLRRGIQYGFTIKNTETAELAVQSSSGSPRMPHIPRSLRDRWRSGAPVSGRWFSIVLNDDENTAEWWDAPLNEEDRNRDRVRLLLVRWGILCRPLLEKISKGSSASGDPSPFSWSGLLPTIRRMELSGELVAGRFFAGINSVQFALPSIARDLENAEAVDSIYWMNAVDPASPAGLDIEGLDSRLPDRLLSSRIYFRGAQLIAVSNRNNKELHIFIAPDDPGIPALIDLIKIPRARKIFPENKIVVDTINNKTAGQSEYARGFQDCGFISDRGRLCFW

SEQ ID NO: 86932 - protein, 93 aa, Unknown
  Obtained from environmental sample
  misc_feature (1)..(93): Xaa is any amino acid
MAGVCIGTFALIVALSAVNGFEAEVTTQMIGKDAHFEIVDFRGEQILEPDSIAQSLMKVDGDITAYSPFIIYKVGVSSKKVNDGVGLSRPICH

SEQ ID NO: 86933 - protein, 266 aa, Unknown
  Obtained from environmental sample
  misc_feature (1)..(266): Xaa is any amino acid
MSLLRYFNKIKEKDEARAREIYRNKICYIFLAPYAIVFILFFVAPVIISIFFSFTYYNILEPPKFLGLRNYINLLLGDDVFLISLKNTFIMAAITGPIGYIAAFLFAWFINELPRYIRAFVTLIFYAPSISGAVYMIWALIFSGDAYGYINGLLMSIGILDQPVLWLTDPRYMMPVMLIVILWMSLGAGFLAFLAGLFTIDPSLYEAGLVDGISNRWQELWYITLPKMKRNVDVSARSWLLLIISELRMLPSRLPALQVRIMPCIP

SEQ ID NO: 86934 - protein, 151 aa, Unknown
  Obtained from environmental sample
  DOMAIN (11)...(142): LeuA allosteric (dimerisation) domain
  misc_feature (1)..(151): Xaa is any amino acid
MMAETCRQKKVVSDRDIEALVMDRAVSVPETWKLDHWAVNTGSALGAAGVIRLQHKDGEYKKLVCLGDGPIDSIFKAINEIVGQEPELELYEIGAVTGGSSSQGEAMVKIAMDGRRWNGRGVSTDVIEASIMAYLSAINAMEWDLAQSRED

SEQ ID NO: 86935 - protein, 343 aa, Unknown
  Obtained from environmental sample
  DOMAIN (53)...(331): Glycosyl hydrolases family 18
  misc_feature (1)..(343): Xaa is any amino acid
MKYPLVIVILSVFLLTQCKTPPKETEVDAEASEQDIKEFIPNTDKTLPVTAFREVWGYVIAGQESALKKNIPLTDIGYFGMEVDIYGSLTNIQTRQNLSGFGGRVHLVAVCNGNALSYFTLLPESPQRKKLITDLISAAKNYDGLNIDYENIPPRSGEAFISFLRELREGLPKDKIFSIALAARTKKLTNDVYDYERIKPLVDKIFIMAYDEHWSGGPPGSVASLRWCRSVADYSMRVIGSEKLVMGIPFYGRAWEEQNHHRALIYSTTEKLINTHNIKEIKRENGIPTFDYVPNVNVKVYYEDEYSISARMEMYKSMKINAIGFWRIGQETPKVWEIIQIEK

SEQ ID NO: 86936 - protein, 91 aa, Unknown
  Obtained from environmental sample
  DOMAIN (13)...(59): RNA-metabolising metallo-beta-lactamase
  misc_feature (1)..(91): Xaa is any amino acid
GLTCQIGREIHGEWFKLKAHVEEINAFSAHADYFEMLEWLNALDRSRLKGIFLVHGEKKSQAFLQKYLKENGYQDVDVEIVKRGKTYELTS

SEQ ID NO: 86937 - protein, 274 aa, Unknown
  Obtained from environmental sample
  misc_feature (1)..(274): Xaa is any amino acid
MKRFFILLFFIPVVSCAEPMYSPTWGFFLDLPEGYEFVDGDARDRFSFQGPSGAVFDIAVYYGRYPGIREMVSDVNKRIGNTGDVDFFRYNNRQAAIIKLTFNKNEGLAFAVELDKNNGQQPILIALAYGPIGQKELELFHISALDSICPSQAERRYPGPLIDYSFPRGGQKKVVIQPGNVNVTIRENDAEASQVYIEREFQLLQNYVNSQKWQEAWIRYYRSIYRDSYDRVANAAELIVRSWGGPSSGGDAEKRAFAQRALNCAGYRLKTSAI

SEQ ID NO: 86938 - protein, 267 aa, Unknown
  Obtained from environmental sample
  DOMAIN (8)...(263): Glycosyl hydrolase family 57
  misc_feature (1)..(267): Xaa is any amino acid
MEFRYALSLVLEAHLPFVREYQKEDDLSQAGEESRFFEYVSETLLPLLEVFHRLENDHVPFRIALAISPILIHLLTDDHLQKKYLSYIDKQIEFGRQEIERTANNDEINKLAQHYYNTIVDRRIAYTERYEKNILKAFDSYRRKGKLEILASCATHAFLPFISHNGESLQAQMEIPVAAYRRYFAGVPQGFWLPELGWSSALEPYLRDYNFSYTIVDSHGLLFGNPQPEKGTFYPAKTTNGTYILARDFYAAREIEKYQDISADSDP

SEQ ID NO: 86939 - protein, 768 aa, Unknown
  Obtained from environmental sample
  DOMAIN (483)...(564): Fibronectin type III domain
  misc_feature (1)..(768): Xaa is any amino acid
MKNVFKIKMFGNLNRDRRSKVPLLIIALLAIIMFSLATCSNDDASGNNPFIGTWESDELDLTLTLTDSTWTNGYASGTYTYNGNTATLIDSDGDKYGTITISGNTITIKLAPNYWGLEGKLTKSDGKPKTPTAAHFTISGAGTVYFDPKVATPPVTVTAQTGKTTGKITVNYEGTGGTVYPKVEAVPVFFGTYKVTFDVAAATGWNEAKGLNAGTLTIADGTPGTPTGLNVAIGSANSLKVSWTSVDRATSYKVYYITNGTNTNPAPVDPTPVDPTPADYTVTNPSFSGWGGLGSVTGSTFNMEKEPSNTYLCRTTYSFPTQASSYSNFAVSYTVTKTKDTDKRIKLKFTDVAKDDWDETSKTFDGWMDHESNGTYTYTHARTNKNTFSIEINKYDDNETTADFTIVINSIKFSNPSGNSGNSGNSGNSGNALKLAGTVNTNSLTHSNLTLNLNDIYFYYVIAVNSSGESDYSDFKSIVIDKPQAPSSVVATAASDTKINLQWSSVTNATEYEVYYSKTENSSSSIKHSDTFTSASASLTGAEAKTTYYFWIKAKNPFGTSDFSPVGKGKTFLKQNWNAGLKTDAVSSTGILLSWAQQSVDFSLEYTYHLYCSVDTQDNFKVVQYGTPSYPKAGVSASPNTTYYFYVTLAHKGSNDPSYISETIMVRTGSPPPPPPPTPPTPPPAAASTPPSGGGSGEKMCSSCVGSGMCNYFTNGCSSGKVKCTTCRGSFSKIDTKDCKTCNGSGDVTCGICSGSGKCKVCKGSGYR

SEQ ID NO: 86940 - protein, 219 aa, Unknown
  Obtained from environmental sample
  DOMAIN (10)...(219): Protein of unknown function (DUF1016)
  misc_feature (1)..(219): Xaa is any amino acid
MPLTNNQLNFIASIKEKIRLAQYEALKEVNTQLIKLYWEIGKDISERQAESWGESIVSVLSKELQNEFPGISGFSERNLWLMTQFYNEYQNAEFLQPLVAEISWTKHITIMSKCKDNEERRFYIMATNNFGWTKNVLIHQIESKTYEKYLLGQTNFDTTLPDSIKNQAVLAIKDEYTFDFMDWPITQRTAVGSGISQQCPVISSGNGITIYVYWKSVQN

SEQ ID NO: 86941 - protein, 1658 aa, Unknown
  Obtained from environmental sample
  DOMAIN (1427)...(1452): The GLUG motif
  misc_feature (1)..(1658): Xaa is any amino acid
MTNAGGIAAVNQSGATVEFCYNTGNVTSGRIAGGIVGSSSSGTTVQNCVSLGARVTGGYSTGRVVASIGGTMTNNKARSDMKVGQSGSEAIPTTSIAANGGNGANFGLGTALSDVFAGWDTSLWNISGNLNIGDNLPTLKPNTQIPAPTLPAAYSAPGTAEAPFLVANEADLRKVGTGTDGWTLSAHYRQTANIVLTSNFTRIGNNTNKFTGSYDGGEYAITNLSMTIASSYTGLFGYIGASGTVKNVNVTSGTISVSTGSYVSIGGIAGENEGTIDNCSFSGTLSVSPHDQIGGIVGQNNGTVKNSRNFANVTGGNQVGGIAGTNQGKLDNSYSAGTVRGSQQVGGIAGTNVGSGNYIKNSYNTGNVTSTAGSSSNVGGIVGFNQANTAVDFCYHTGNVTGSTAVGGIVGNSSGSRVVDNVSLGLLITGTGSLGRVAGIANGGTQIDRNKSRADMKLGTSGSETTIPSGSTGANNVYGADVALNTSLATVFDTSRWDTTLWNISGNLTIGNELPTLIPNTQHPAPLLPGSNPSPGTAANPFLVTNETDLRKVGTGTDGWTLTAHYKQTQDITLTSNLSVIGTNINKFTGSYDGNEKTISGLTMTRTSVSYFGLFGYIGSDGVVKNVTVTNGSITGTASSYFGGIAGQNEGTIENCSFSGTVNGDTTSDDVGGIAGRNTGTIINSRNTATVSGRTRVGGIAGENQGKIDNSYNTGAITGSQQVGGISGGNSSSGNYIKNCYNTGNVISTTATTTSNAGGIVGQSSALVEYCYNTGNVSGTGGVGGIVGYTNTGSAIQNCVSLGARVTGNGTSNGRIAGTNSNTVTGNLARIDMKVGISGSEALVTTGAAGNNAGANVSLGTALSSVFNTNWLSTLWTIPTGNLTINGNLPTLKTNTQSPAPTLPAEYTVLGTADNPFLVTNEADLRKVGTGTDGWTLSAHYKQTQNITMTTSNFPPIGYVSGTGTTKFSGVYDGDGKTITGLNITGTANYLGLFGSIDAIGTVKNMNVTGTITQNGDTSYTGGIAGTNFGTIENCSFSGTVTASACDMVGGIVGQNNGTVINSRNSATVSGKSQVGGITGRNEGAIDNSYNTGTVSGSRYIAGIAGVNTNTGMYIKNSYNTGNITATPIITTESSMAGGIAGLNQSGATVEYCYNTGNVTASTNNVGGIVGSNSGSTVRYCVSLGARVTGGNNTCRVVGVMSGTTTLTNNKARADMIIGASGSEALPTINIGANEREGADVSLGTAQNSVFSSFFTTTIWTLGSNLTVGGALPRLQMNTQSPAPTLPAAYSAPGTADNPFLVSNETELRKVGTETAAGGWTLTAYYKQTANITLTTGSFPTIGTNSTNSFTGSYDGDGKTITGLSMTGTANNLGLFGYIGAGGTVKNVNASGTITQNGTTNAGGIAGANAGTIDNCSFSGTISGGASSNQFGGITGYNLDTIKNSRSSATISGNNYVGGIAGVNNGTIDNSYNTGAVSGNQYVGGIAGSNTGSGNYIKNCYNTGDITASATSNTYAGGIVGANQSNALIEYCYNIGNVSGPASVGGIAGTNDTGCTVQNCVSLGARITGTGTSSIGISRVSGTYGSGSTLINNKARADMKVGLSGAEATATGASNNGNGADITVGSTTTQTSVFSDWDIGGWNTSTIARPICTGPKKA

SEQ ID NO: 86942 - protein, 117 aa, Unknown
  Obtained from environmental sample
  misc_feature (1)..(117): Xaa is any amino acid
VINYFSKKCNIPRFDRSADGELKLASFCSSGVLFGAPGRAEFVQLQPLNGLLSEMRGSRAEFFGSTSVDLQARELQLLFPLVRDNFELGVLKVIAVSWVKLLSAHNSNNKRPGSIKV

SEQ ID NO: 86943 - protein, 243 aa, Unknown
  Obtained from environmental sample
  misc_feature (1)..(243): Xaa is any amino acid
VFGGEDYGRMSRLYHPELGLLIANPKNADELADFGELRKYELLAIYAGYYGSETDENCEKAAELALKVFEGSKVKVPPALARGKYAVKKVSKPKKEAPPPKPVKVKAASSKPQAKRAAPVVVQAAPEVKPSGGPMKMTPRYAVIVQNELFHNGNVEAWKRIIASYSAKHPDLQVYIYYEKERILDINSLFKWGKVKHGSAIEFAVAGNNIQDVAKLQRYLTQGASHLFEAFLRGPVNTVLKLF

SEQ ID NO: 86944 - protein, 167 aa, Unknown
  Obtained from environmental sample
  DOMAIN (5)...(167): DeoC/LacD family aldolase
  misc_feature (1)..(167): Xaa is any amino acid
MTDQEIFSCIDHTLLKAVSSWEEIKILCDEALRFKTASVCVPPSYVKPIQNTYGTAINICTVIGFPLGYNITAVKNLEAERAVFSGANEIDMVINIGDVKNGNFDYVLEEIKILKKTCGEKILKGINGTLYLTEEKKSACVRIVQKPELTFIRPLPAFGPADRRWRM

SEQ ID NO: 86945 - protein, 60 aa, Unknown
  Obtained from environmental sample
  misc_feature (1)..(60): Xaa is any amino acid
MINGINHITISVKNIDSAFLFYKDILKLKPVMKSNRSAYFLAGKVWLALDQQEKYMELIL

SEQ ID NO: 86946 - protein, 852 aa, Unknown
  Obtained from environmental sample
  DOMAIN (1)...(264): Alpha-2-macroglobulin family N-terminal region
  misc_feature (1)..(852): Xaa is any amino acid
VAGAVVTVLGLNGNPIFSVSTDSGGRARIPDFGNTYKNERAPTVYTVVSGEDMSFMAYNTNGRNLDYSTFDIGGIYGASDPKTLRAFLFSDRGIYRPGDEARIGLVIKSGDWAGNLGGTPIEYRVTDPRGAEIYNKRIRLSAEGVEEIRFSTHDWSPTGTYTASVYVIQEYKQGDELRERHVFLGSQTVKVEEFLPDTLSVSAVFNPVPQDGWIAPGELKARVAVRNLFGTAASGNEVKAQINLAPGHQYFRQYRDYQFRDPYLGKNSFQEFLGTKTTNSEGAAEFSLNLAKFEKATYRLSFYTEAFEKGSGRNVSTEAAVYVSPLPYLVGYKADGNLNYISRNSVRALSLIAINPKTEKTNVNNLTLTITEMRYVSALVRQPNGVYKYQSIQKEYPVTTKQINIPAAGLEYRLPTNNPGEYKLSITGADDLEYNSLSFSVAGSDNVQRSLNRTAELEITMNKNDFRNGEEIELMIKAPYAGSGLITIERDKIYAYSWFKSNGETSMQTITVPSDIEGNAYVNVHYLRSQDSPEIFMSPLSYGAVPFSISRENRTNRIKLEIQGEAKPGEDFVIKYSTARRGKIIVYAVDEGILQLASYQTPDPLSFFFKKRALEVKTAQILNMVLPRYSVVQNLAAMGGGGGFDEDEYLSRNLNPFKRKQNAPVAYWSGIIDAGPEVKELRYRVPDYFNGTLRVMAVSVSESAIGVGEDRALIRSAFIISPNSPMMAAPGDEFDVSLTVTNNQKGVGEKGKVRLRVIPSEHFTITGNSEFNLPIPEGKDQTLNLPVKAAGPVGRCTNTPLSLSMDNETSGTFRLYGGLAPRTSVPGIAFIRGAVKKIKAVETGNRPSIFYE

SEQ ID NO: 86947 - protein, 430 aa, Unknown
  Obtained from environmental sample
  misc_feature (1)..(430): Xaa is any amino acid
MYEISEDAKAQNDVVLENNFLNLRFLPSTAEIILTDKSSGVQWRSNPPNPAADHMADVVTRQLMESQFSLDYADNSGVGMTLQSGAYSVQRGAYEYEVVDGALEVRYTVGDLARNYRIPPAMSEERMNVYLDQMDWEERGIVESTYRLYDINNLRMNDDKEKLLAEFPELAKIKLWVLRVVSPDFMKEEAEESFRKAGYTMEDFVEDSLRYELSGGAVKPAFSITLRYLLDGRSLIVNVPFDKIGFRAVYPITQLALLPFMGCGSTADSGYMLVPDGSGSLIYFNNQKQNQLPYNIRVYGWDEAMPREAVISDNKALFPAFGIHKNGSSLFCVIEEGSAYASVRADVSGRNSSWNIVYPFFDIVHGALMDIAGRNQRAVYLYEPALPEGENITLPYTPCAESGYMGMAKRIRSWLMNYIPFFRTACYRRS

SEQ ID NO: 86948 - protein, 163 aa, Unknown
  Obtained from environmental sample
  misc_feature (1)..(163): Xaa is any amino acid
LASGPWHATHYFALFRLGFPPAPGLPSLSLAAYHDSQAHSTKGTPSPSRPGFDMLRVHGFRFSFTPLAGVLFAFPSRYFCTIGRALCLALDRGRPGFRRGFSCPAVLRIPLPRRHHFGYGAFTPSGRLSQNRSPIMTTKLSRSCNPIRPLKCFKKFIIIYKCH

SEQ ID NO: 86949 - protein, 941 aa, Unknown
  Obtained from environmental sample
  DOMAIN (103)...(322): Bacterial extracellular solute-binding proteins, family 3
  misc_feature (1)..(941): Xaa is any amino acid
LLKNGRADAFFGLDTAEGAFDIYDDVVSEEFFPLIFRSSCLSTHNEEFQPIINVLDKAMNDNVLVYLTEMQKKGLRQYQENKIYASLTEEEREFLKNNAKTPIPVVAEFSNYPISFYNNNDNRWEGIFFEALEQVSKLTDLKFEVVNEQDTPLLKLIDMLENGDAYILPELHKTMEYDGRFIWSDIPIINDNFAILSRSDFRNIDVNDVFHLHAAIRRDTIYSEMFKRIFPAHRNFTEYDTMEDTWDALRKGEVDVIFASRRRLVIYTNYYELADFKLNLVFDHVFNSYFAYNKDAVILKSIVDKALRLVNVNNMANQWIYRTYDYRVKMAAAQRPWLIGSSVSFFIVLTLVTILLIKSRSSGKELEKLVALRTGALEFETSKLQSVLASIPDLMYTKDKDLRYTQCNHAYEKFMGASEEILLGKANSDGTWFPAEDVDKIQLTDEIVINENRIISHETRIHSPATGKEGFYETVKAPLIREGKVVGIVSIIRDVTKRKEMERDLSLQTSLFKTMLSSLPDAVFCKNLDFKYTLCNNYLADLVGKQIEEMLGKDDIAALGLSAETAKISFENDLKVVNEQERVAYEEPIPCADGVTRLFETVKSPLILDGDVVGIMAIGRDITRRKEMEEEALAANRAKSSFLANMSHELRTPLNVVIGLTDLTLEEDLETSTKENLVKINNAGTTLLSIVNDILDFSKIESGKLTLSPVEYYLSSLINDIITLVLTRLGEKPIKFKLNIKDDLPNKLLGDDLRVKQVLTNLLTNAIKYTREGSIELIMRSTKINDKVWLDAAVCDTGMGIPEEDISSLFLDFYQVSSNATRNIEGTGLGLAITKKLVEMMEGEIGVASEYGKGSTFSFRIKQGFVDDSVLGAEVSEKLRTFNFFDDKRVVSKKLIRVNLSYVRVLVVDDMQTNLDVAAGILRKYKMQVDLLTNGPAAIDL

SEQ ID NO: 86950 - protein, 194 aa, Unknown
  Obtained from environmental sample
  DOMAIN (3)...(194): tRNA synthetases class II core domain (F)
  misc_feature (1)..(194): Xaa is any amino acid
GFWGGYRESDCGTFYISENSVLRTHTSPVQIRVMEARKPPIRIIAPGRVYRNEAISARSYCMFHQVEGLYVDENVSFADLKGTLLAFSRRFFDENTKIKIRPSFFPFTEPSVEVDVECFLCKGKGCNICKHSGWLEILGAGMVHPNVFKACKIDPEQYTGFAFGMGIERIALLKYGIDDIRLLYENDVRFLKQF

SEQ ID NO: 86951 - protein, 226 aa, Unknown
  Obtained from environmental sample
  misc_feature (1)..(226): Xaa is any amino acid
MSKVLHILSIFIILLAIIASGFGLFYKTDGQSFDFMNQYGDIIKIYGNGIYKNDSYFMAPIFKGTDCTILFLAIPLLIIALIMNIKKETIKTNLFLTVIIALFVYYSASISFGVIYNVLHLIYIALFSCSIYALIIGFMLLRKYTINIPVKMYTNGIKIFLFICGLSLFVAWLPDIIVSLINKKSLGLIEIYTTHITYVLDMPIISPLIFICLYNLSKNNNCRIFL

SEQ ID NO: 86952 - protein, 134 aa, Unknown
  Obtained from environmental sample
  DOMAIN (2)...(134): Histidinol dehydrogenase
  misc_feature (1)..(134): Xaa is any amino acid
RDVCEYAVPRDNNLRHEVAQRELGLCDAIAPEHLQLMTETANDDAWHVSNAAAIFIGVETPVALGDYFIGTNHVLPTGGTARFASPLGVESFQKRISMAKVSLKGLKAAMEVVPTFARAEAFHHHAVSVEARME

SEQ ID NO: 86953 - protein, 239 aa, Unknown
  Obtained from environmental sample
  misc_feature (1)..(239): Xaa is any amino acid
LWRDYGSPHNRFTVTSSTKNGISANYNVSGYELTIAYDDGDSAKFVIKEKYEEHRKKKNDERIENLSTYFTDSRDGRKYRAVKIGGKTWMAENLNIKTNNSWCYDEENSNCAKYGRLYEFETAKKACPSGWHLPNPQEWKDLITVAGDAAAGKNLKTITGWNKNGNAADSFGFSALPGGGINNFGLFVSIGEVGAWWINMDAEYKGGPVRSKRMFDSQDIVEEHYSGKDYGFSVRCVAN

SEQ ID NO: 86954 - protein, 68 aa, Unknown
  Obtained from environmental sample
  DOMAIN (12)...(47): KOW motif
  misc_feature (1)..(68): Xaa is any amino acid
VNQVSDRPRVYFNENSRIVVVEGPLIGLEGRIIKVDKRKGRAKIKLDLYNDSFSIDLAFEVIGSLDNG

SEQ ID NO: 86955 - protein, 88 aa, Unknown
  Obtained from environmental sample
  misc_feature (1)..(88): Xaa is any amino acid
GYGEPELLRRGFRVLREEKEKENEKYSQEKKDISWGHQIRSYVFQPYTMVKDYRTKVEKGNIQAVMDGDIDPFIEEYLRFSWRNGEMN

SEQ ID NO: 86956 - protein, 990 aa, Unknown
  Obtained from environmental sample
  DOMAIN (469)...(534): His Kinase A (phosphoacceptor) domain
  misc_feature (1)..(990): Xaa is any amino acid
MNIKQAVKTIKVRVLNSYILVLVVVLAFALMVALSSYFMTDIVKRQLASNAHAALNSLETDINTDLKEPRTVLGNQSECIRNMILRGADKEDVRTYLNDITEYIIQNEEKQLSGFDGIFGFFDVFGGVMLDGRNRPPPENYNPRERPWYKEAAAAQGEIVFLHPHTGAVKPNVVITNSRGLFDNDGNLLGAIALDVEFKRIRDYIVNEDSEKFWFGILLNEQYEIIAHREQSMEGTKYEDVNSDAARIVAELKMGHNVSEFRMRNYQNDTSITFFRKLENGWHLGIVTPEKEYFKELRRLRFIIILLGAALTIVFNIIIIRIVMGKEKADAILKETDGLLENINVMQRILNSLDAIIYVTNPETGEIIFVNDNSKKYYNIGDDCTGELCYKVFQEDANCVCDFCPCIKLDKDPNKVIEWIEFSAKTKRHYRNTACYIKWPGIDKAHLRYSVDITELYDARGQAVTANPRKSDFLARMSHEIRSPMNVILGIIEMQLEKDLPPDTLEALDKVNNSGYLLLNIINNILDLSKIESGKMELILVSYDVASLINDAVQFNLLRFGGKPIQFVLNVDENTPAKLFGDDIRIKQVLNNLLSNAFKYTDSGQVSLSVSVEVAPINIITLIFRVSDTGRGMSKDQVAKLFDDYARFNLETNRQIEGTGLGMSITKNFIDIMKGELKVESEPGKGSTFILRLPQGYVSSAVLGKEGVENLQQHNLDKKTKQKRIKQIQREYMPYGKILVVDDMEPNLYVAKGLMSPYGLSIDTALSGEKAIEKIKSGLVYDIIFMDHYMPEMDGMETTKAIRALGYKEPIIALTANALVGQAEVFMANGFDGFLSKPIDTRQIDSTLNRLIRDKYPAETVEAARKLKKKMETGESAEPLDLSEVKTLVVDDFLPNLSVAQGILQEYKMQADGLTNGKEAVERIKSGEPRYDIIFMDIMMPGMDGIETTKQIRAIGTEYANTVPIIALTAIITKETDEQEKMLYSADLIM

SEQ ID NO: 86957 - protein, 148 aa, Unknown
  Obtained from environmental sample
  misc_feature (1)..(148): Xaa is any amino acid
TTDSAEISHVLPALIRKFHEAKNTGQDKVILWGDGSPRREFLFSEDLAEALVMLMQKYNAKDLSNPEGDFVNIGSGKDLTIRELAEIIRDIVYKGISDRTCHIEWDTSKPNGTPQKLLDITRVTNLGFSPKIELTRGIEIAYKDYLLK

SEQ ID NO: 86958 - protein, 206 aa, Unknown
  Obtained from environmental sample
  DOMAIN (8)...(195): Domain of unknown function DUF140
  misc_feature (1)..(206): Xaa is any amino acid
MINPVAPVKKAFYNLGFFARTLKGAANFIRYSRASFKILIMQILFTFVYAMGITTLLALAIGAAVNIIGVPFLTMLNQQQLIYTLLIIIITRELGPLLTAFIVIARSATAIATEIAGMVISHEVEAYISIGIDPIEHLAVPRFLGVTISLVLMNIYFSVFGLAGSYIVTKIFSSTPMDYYFTSLLQHLSINDIFFHVPGHKAPPKT

SEQ ID NO: 86959 - protein, 732 aa, Unknown
  Obtained from environmental sample
  DOMAIN (180)...(568): UvrD/REP helicase
  misc_feature (1)..(732): Xaa is any amino acid
MKVKSDKRCRIAGIIIDYLYSKVSDTQESQDTEDVKVDFSILELKKEYDRYLLGENVKTDEIEDALYYLLKIGAMKIEGGFLIIYNAMRIERLKMDNEAKYKKEHYAQLEEYYQNKRQQIHIVGEYANRMINDYDEAMNFVNDYFEIDYGNFLNKYFKGRKYEIDRNITSKKFNQLFGELSQAQLDIIKDQDSKYIVVAAGPGSGKTKLLTHKLASLFMMEDVKHEQMLMLTFSRAAATEFKKRLMTLIGDAANFIQIMTFHSYCFDLLGKVGSIEKSDEIINYTVKKINSGEVELTKLTKTVLVIDEAQDMSEAEYSLVKTLMKENDNLRVIAVGDDDQNIYEWRGSSSEYLKSIVKENGYEAKKYELIDNYRSNANIVEFANQFAESIKNRFKTIPIKPIKDENGNISIGKLFSENISIPVVNMIQKIKPSGSTCIIVKTNDEALNIVSLLNKNGITARKIQANDEFDLYNLAELRDFIDDIDKNNNSYAITDDIWQQAKDNLKKKYSSSNNLVSVLKLIADFEEISNKTKYKSDFKQFVLESKLEDFISASEGSILVSTIHQTKDREFDNVFLALSHSPKLDDARKREIYVAITRAKYNLYILYNGNYFDKINVENIERTTDNNNYPAPDEISLQLSHRDVALGYFAFRKREIDSLMSGRELSICGESCFLGDTQILKFSSKFCNQINGLKEKGYSPVRAIVRHIVFWQDKDKEEEIKIILPDVEFSRK

SEQ ID NO: 86960 - protein, 78 aa, Unknown
  Obtained from environmental sample
  DOMAIN (7)...(74): Ribosome-binding factor A
  misc_feature (1)..(78): Xaa is any amino acid
MATPKWHVERLSELLHREIGTVIAQDVRDPGIPGIITVTEVKLSKDLRNATIYVSVMDGDREEKESVSALGQSVTAPN

SEQ ID NO: 86961 - protein, 159 aa, Unknown
  Obtained from environmental sample
  misc_feature (1)..(159): Xaa is any amino acid
MNQAVKRNIERFPSEFMFQLTKIEYENLISQIAISSLKTKIAPRNLKSQIVTSSWGGRRKLPFVFTEHGVIMLSSVLNSKIATKINIAVVKAFIDMRRYLSKPVHEKLVDLEKILMLHIDDTGNNFSKHAKMINEIVNNLNNLIAKPPKTGRIGFSVGD

SEQ ID NO: 86962 - protein, 1438 aa, Unknown
  Obtained from environmental sample
  misc_feature (1)..(1438): Xaa is any amino acid
RFMAGRLRRDNFDNEIEFDLEVFEEGIESDKITIPGFNDLTIGSTPLSEKLTLLEAKDEEDALMYKITAELRKKSTVNDNSGTAYGGSDKLLVGDDVIAVVGIELEDGYYIPALEATTAAAKRAYIEQFLPPGGSAKVNWSATSLYDVDPTNGTMIFRIPLGKVPQPKITFFPSGNSGATGDVNEPIIYGSDNTAFNRTIFGTITGPKIKAGVKLGATDVTDYAFSPSTPVGFPLASDGATPVSITSLTVNGSLDADGNPTSNAEEIVYEAGRTFAVAFTGDVNKIAAKTYIPTITYKNDALGIGGGEPWRLYVDTKELDVTQFAPANIIGPGDDGSGWPLLIGATLPKATFDAAVKAENLVGGHATTGDSLLSVVVTYAAREPNLAATPAESWSFVDQTYGSSLVKIGYYGLKFTVVPKANFKFPTMTEAQVLEFAKSYVGATNGFKVVSATLTNNQLVFTYRTGEVVKPNLAQGIDYAAVDGDGNNLLKVIRFTYGDTSAATITAKKLYGVGASEGIAVFRDTSSLAQKFTKVNISIQIPGTTPGTYNTDATFGSSDNTIKTASSNFIMPGSTTYTIPESMLGIPAGTYPGAKIRVTNADIGLADSILGLTFVVDKQVIKNVPQDALVTVPIPVIGASKTSDVYSYTNKPIVSADGVTNPYYTVSLNWEDVEGPTFTKDTKNAVARIKLVANPNYRFAVGTTDPPGCGAGPNQKPCFTDPGYTASYFVLNGTTYSGSNLYGLPAIDLANDIAGGDSLLIKRDFSGAEPKVQITGTPINFKKIGPSGSVDFSIPFLGRTPTGLPQNASEGLGQSAAVAGYTPWNAGNSTGSPCAAPGASEGFSCADSLAGGKWKVVWMGWVDTTYDAQTKKSSWTTQTDGKPVATTRFSSTGSRFMAGHQYGIRVYIQENGGFTFGSKSAATLADEFKPTVTGATVQIVEPKLEVVDLTTNSGGIPGVNGPTLSFTVAYPNIDQPKFAVEQVSSYEYGTNRGTDPAAGVEYHDWTNVPVGKITMAKGYYEGTPPVIGLSFSESDFGNWTSTGLAFEARGNDLTAEFAPDGTKSFHTYNAKAYNVKVGIGDANLGIKTEYADSATYSLTIKPRNISNAKFEGVIGATDWSSTLANSVYSDIKMVYSPTPELPSLTALKNVTGLGQPVVSNSNALSTELISNLALNWSNFNKVQVPDPVTGITPKSYLWLEAPTSGGNFTGRGQEVEFTVIPATIKNPAAPPLTVKIPVLGDNANDAGYTRIANTGAMKDQFSVRSDDLISVKWSLGSAMTYWFDEQGVAHTTASDPWDGVFRDKVDNNHACATGLSGTQYAYAACAYVVEIPLMPTTNYKFGAGATYDYKKFVGNLDITANSITGGWSYQTEVNGVPMTLTDNNVLKLALTLPTMGDALAAATREINGALAGMRTEFEQWEMNKQTDASADLINGPTE

SEQ ID NO: 86963 - protein, 140 aa, Unknown
  Obtained from environmental sample
  misc_feature (1)..(140): Xaa is any amino acid
VWGRAKEGVRYLRGAAAGIAVSLVPIIVTLIVADGMIRGITDRYLELGTGHLQVIDFDNFEGFEKTNKELSEVDGVRGIWAEQRGMGVLAGKKGKTGVSVRAIETSFWDDPSTAALIKIIDGDRKPQFGQDILGQSVMGK

SEQ ID NO: 86964 - protein, 318 aa, Unknown
  Obtained from environmental sample
  DOMAIN (17)...(299): Ppx/GppA phosphatase family
  misc_feature (1)..(318): Xaa is any amino acid
CCREGAYRHRFNTIRLSVYDISSGGDIKQTYKQKSVAGLAGHVDKRSFLTDEGVRETCAALNRFRASVSGMNITETHVFATASLRNVLNASRVIEDVKRETGYDVIIISGEEEAICDYIGANNRAPMSDGLLIDIGGGSTELVIIKDGRIDKAASLPIGALSMYSKYVGSVIPTKAQREKISLETLKKLEVIKGKSLQTMCGVGGTMRALYKLNNLIFGAPPDNRAVLVRNAKKILSLIATDTKLMVGRILQIAPERIHTITPGLIILNTVIKKYNCKTISVSESGVREGYLIRNVLHRDIGKSGSPVTLTAYNCKGS

SEQ ID NO: 86965 - protein, 556 aa, Unknown
  Obtained from environmental sample
  misc_feature (1)..(556): Xaa is any amino acid
MNRSKSKLLTVVAAIFAIAAYSFAALPELKVNTKNNAAITSKSANFAQATANNCQNHLIYVHNYVPMTLTLTDPANSANNINVTGYKDSIRGRGNSTWAGDKKPYRIHFDEAKSMFGSKHKHKSWALLANWYDQTFALNAVGFELGKRMKIPGTPNQWLVDFYLNNEYKGIYQITDIAHVNKGRLNIDEKEGWLVEFDYHCPSKPDEVDFATDYPNSPSGSKLHTFIKSPEDLPKLSDYDFVKKDVNGLMNAMFNKSGFPENGYRDLIDLESVAKYLMLEQFLDNYDFNNKSQNVGFPASNFFHKDVDKKITAGPIWDLDLTGGIDNSSFPTHYTTYRTPLMPRHAFYKKFFDDPVFKAKFKKSWIKYKPDIQAMPAFIDSIANVVQGSVVKNFELQLGSNKTCNDNNTNTCKRGAGGFSGMAPIVLGNLQAYNNEITKLKTWWDNRITFFEQELNSMNIDTTKDIPDYKSPTPTAPSVPQPSKYKAGVTVIKNGVTVNAVTNADVAIFSLNGNVLRKQTFTSGSHSVRMGDLPQGMYLVRVDLDGVKKTVRVAVR

SEQ ID NO: 86966 - protein, 483 aa, Unknown
  Obtained from environmental sample
  DOMAIN (1)...(355): Fibronectin-binding protein A N-terminus (FbpA)
  misc_feature (1)..(483): Xaa is any amino acid
MSLNWKEINLILDELALEGAQIQSAVQSAFDVIILRLHKKGETKQVLVSLSPGACRLHETFRAVPKSEKPLRFAQFLSSKIVNGWITEAAQIGDNRIVRLTVKRTISADDGKDSSETAIYKLYIRLWSNAANFIVTDDSGVVLDAMRRLPKRGEVTGGSYLPENIEAKTDKPVREFEIRELPGEGSFNKKVDEFYAAQGGTLSLEALREQARKTCEGSMGRISAALERLREKEASFADSHRLKTYGDIILSNIANIKTDDKWLETEYDGENIRIELEQRVNPSAQAQKYYDKYRKAKNGLADVQREIESGERELKEVTERLERLLCENNPLILAKLLKTGVSAPRAASGKKEKARPGLAFKRGDWIIIVGRDANENDELLRRHVKGNDMWLHARDYHGSYVFIKQRAGKSVPLEILLDAGSLAIFYSKGRNNGEGDLFYTQVKYLRRAKNGPKGLVIPTQEKNLHVKVDDERLRSLENCKIVQ

SEQ ID NO: 86967 - protein, 97 aa, Unknown
  Obtained from environmental sample
  misc_feature (1)..(97): Xaa is any amino acid
MENSFSESYKNAGVDVTAGYRAVELMKKHVQRTRIPGVIEEIGGFGGLFALPKIDYKEPVLVSGTDGVGTKIKIAMLADKHDTVGIDSRPNLILGQT

SEQ ID NO: 86968 - protein, 166 aa, Unknown
  Obtained from environmental sample
  DOMAIN (2)...(164): DNA methylase
  misc_feature (1)..(166): Xaa is any amino acid
MACALALQDNGWILRSDIIWYKPNAMPSSVKDRPTVDHEYIFMFSKNKEYYYNADAIREPHITFSEKSKTMGGRNHFGKRNGTPEKGKNGGNPNLHNGRWDQAFHPNGRNKRTVWEIPLGKFRDAHFAVFPEKLVENCLLASTKINDFVLDPFCGSGTTGLGQSDH

SEQ ID NO: 86969 - protein, 165 aa, Unknown
  Obtained from environmental sample
  misc_feature (1)..(165): Xaa is any amino acid
MTDWPRHQGQATAITLLGKMMGPNDQHMVLMLLGDEDKRVRANTVEALESMGNPTMIPILVQYHKDPNNRIRGNVLKALYNLGYADIEDDLMDMLTSSEPLQKASALWVITQLKYGSSKRVVDAAGSCLLCDNKMVHRNAEAALTAVGTPRCIGYMNYLGRIFRY

SEQ ID NO: 86970 - protein, 76 aa, Unknown
  Obtained from environmental sample
  misc_feature (1)..(76): Xaa is any amino acid
LSKICLCLTGKTIKQDVDLLSKYRKYADLAELRVDCLDAGERLYIRRFPELAGIPVILTVRRDVDGGYLQAAKAQD

SEQ ID NO: 86971 - protein, 93 aa, Unknown
  Obtained from environmental sample
  misc_feature (1)..(93): Xaa is any amino acid
TTDRPRFYGHTHKLCYATGDNPYGPFTYEGIILTPVVGWTTHHSIVEYKGKWWLFFHDSRPSGGTDWLRSMKVIELRYNDDGSIQTIKGGGFW

SEQ ID NO: 86972 - protein, 84 aa, Unknown
  Obtained from environmental sample
  misc_feature (1)..(84): Xaa is any amino acid
EREGILGLRPTIEGLRLSPRNSLFMENLLQWKKSFRGKKLNIKVNNPNGRESGCKKLTVNGKAVEGNYIPASILKAQNEIILDM

SEQ ID NO: 86973 - protein, 295 aa, Unknown
  Obtained from environmental sample
  misc_feature (1)..(295): Xaa is any amino acid
MPSEKKRVGLVLASIHTGISQNVWNSFVRTAASENISLFIFPGGRLDARRNFENLRNSVYSLVNDENLDGCISHSSTIHYNQSREEFEHFHKNFDPLPYITLGFKLPGHPCVEFDAYNGMKALVNHCIRYHGARKIAFLRGPDFHQSAHARFEGYCDALIECKIASGHAGKKTVIQSPLVSGPFNWDAGAAAAAQLYKDRSLIPGRDFDTLVGSSDFMVLGAINYFAEHGYHVPGDYRCVGFNNSEESRITKSPLSTVQVPYKDMSVESLKISVKYGQEKNSPPATFCFLRSDYR

SEQ ID NO: 86974 - protein, 53 aa, Unknown
  Obtained from environmental sample
  DOMAIN (1)...(52): Ribosomal protein S15
  misc_feature (1)..(53): Xaa is any amino acid
NQLTEHCKQFKKDRAGQRGLLLLVGKRRRMLKYIQNTNLEGYRKLIKELGLRK

SEQ ID NO: 86975 - protein, 901 aa, Unknown
  Obtained from environmental sample
  DOMAIN (354)...(625): Domain of unknown function (DUF323)
  misc_feature (1)..(901): Xaa is any amino acid
LCGRNISTNGIYHVETLDLSGLMVMLIFDNGSTEDVAYDNFGAYNILVSLTQGTPLTLAHNGTHITVTASGKTANTGNLSVNKASAPDVTFPTTSAITYGETISSSTFSGGTTGRGTFAWSDGRIVPLAVVSDEYDVEFTPNDIDTYDYTNVPGWNISRNMVIRLVPIKINKKSITITPTAGQSKVYGTADPTFTYTPSEALLPGNSFTGALAYAGTNVGTYPFTLGSLSAGGNYELTLAGSVTFAITKAPGSNVTKPSGAWTFSTKTINVTAVSLSTATGQDIEYAISTSGSASAASLTWTVNKLTFDITAIDTTYFIYARSRESPNYSAGTANVSEGINTPSIPSSIISPTTGIEMVSIPAGTFTMGSPNGEKDSQSEEHPPHSVTLNSFYMSKYQVTQAQYQAVMGTNPSNFYSNPQTGENQSKRPVESVSWYQALVFCNVLSVTDGLTPVYSIDGSTNVADWGLAPTSDNPKWNAVQIVDGSTGYRLPTEAEWEYACRAGTTTAINNGNNDYTDVDSVGWYAGNSGNKTHEVGLKSANAWGLYDMNGNVTEWCWDWYDTSFYTTSYSSSPVSNPMGPSTGNYGKVKRGGSFDSAMTYMRSAARGSGYPWTKWDVHGLRLVRKIAENPLLSIDMVSIPAGTFTMGSPVSEGSDDRERPQHSVTLSSFKMGKYEVTQKQWIAVMGAGSDYTSASYGKGDNYPVYSVSWYDVIVFCNKLSIKEGLTPAYSISGKTDPAAWGTVPTSSDATWDAVVIVAGSTGYRLPTEAQWEYACRAGTTTAYNNGNNDYTNAALVGAVAWYYGYSGSEITHEVGLKSANAWGLYDMHGNVWEWCWDWYGNYSSNAQTDPMGASSGTYRMRILRGGSSWTLPEELRSAFRHVSDEFYRGDSDIGFRLVRP

SEQ ID NO: 86976 - protein, 183 aa, Unknown
  Obtained from environmental sample
  DOMAIN (110)...(181): Cupin domain
  misc_feature (1)..(183): Xaa is any amino acid
GQSIAREWRKAFGFAGILNISAKQMAQTMNIPVEEYLAFEEGQRDFSFSFLQNAAQIFGVDVVDIISGESPKLTKCAIVKKGEGYDIERRKAYDYKHLAFTFSNKRAEPFLVKVEPKEDEKLTLHSHEGQEFDYMLSGKIEFHFDKAFYVLNEGDSVYFDSGVPHAMKALGDKAATFLAVVIK

SEQ ID NO: 86977 - protein, 417 aa, Unknown
  Obtained from environmental sample
  DOMAIN (273)...(379): Peptidase family M23
  misc_feature (1)..(417): Xaa is any amino acid
VRLRIVKNEVGRGGDERADVKARTINVNRRFLDSLCEQVAVRNDSGLALLPQSIMFDLEIPESAAIRDAQDAGKSVHEHGGDPAAAKAFDLLAQNVQQVLNGIHRENISAAALEEKVVLAFKAAAAVVLLAIVAVNPAIPDAAAPRPVAPQQIVERSDAAFVHTFGKGDNATRMAKYAISVFRAMVPSQKEISQYLTETIDAYNMTRMPSEPKIVDPSRIPEGTKLTFYPPMSIMNKQEKALAPAYKFFMDMVNDPYPYVTGDWCERGTGGGQPHYAIDVAGTYGSEILSPVDGIAALKTEPAGGRTVAVMFGNEVIAFSHLENRFVKDGDAVKKGMPVGTIGMTGRTSGPHVHVTYGIMSLSRHDINFAQNNYRVTDPKHLFYKMAFGGMVEGVDGEPLPLPMQQLTSPSSVPILE

SEQ ID NO: 86978 - protein, 1626 aa, Unknown
  Obtained from environmental sample
  DOMAIN (3)...(175): Alpha-2-macroglobulin family N-terminal region
  misc_feature (1)..(1626): Xaa is any amino acid
KRGARYQIGRGHRGLIYGERDVWRPGDNIYLTFLLADPLGSLPQNHPVTFELEDPRGRPVINRTYTTSVDGFYALAAATASDAPTGDWTARVRVGGKTFNKNVKIETVMPNRLKIDLDFGANEFIKSGSHKIPLESQWLYGAPASGLKADISVTYSDKETTFKSYTDYSFRDPSRRVSTERHEIWSGSLDSAGKALVTMNFNPGSAVPGKVTTRFLTRVFEPSGASSSEQISKEYSPFSRYVGIKLPKGDAARGMLLTDTDHKAEIVLLDEDGKPFQGNVDLDCAIYKISWRWWWEKGDEESAEFASSLSRSAISQQTVTAVNGKASFNFNIKYPDWGRYVVIASDSKGGHAGAQIVYIDWPGWAGRAQDGGQGSQSMLTLTAGKQTYNSGEKAQITFPSNKEAAALIVLEKGGNVLKSEWVTCQEGTTKYEFVAEPSMVPNIYVHVTLVQPHLQTQNDLPIRLYGITPVMVEDTRVVINPQIKTQDNWQAESKVSFTVSEMNGRPMAYTVAVVDEGLLGLTRFNLPNPKNTFYARDASFIKSWDLFQEVIGAYSGKLETLLAIGGGDDDNEVDPEKETQRFKPVVRFFGPFEIAKGSQKTETFDLPPYIGAVRIMVLAASATSESQTGRSLRGYGTAQTTVKVTSDLMVFASLPRVLSPGDNFEVPVYVNAQKDGRRSVKVNFSAPGAAIQGASSQDVSFDKSEEKLIRFKVKAPDKPGSIKFTVTAESAGLKTAQQVVDIEVRSTAVPVTKTLQTLISAGGTWKGNLEYPGIDGTNTLVASFSRLPPLNLESRLDYLIKYPHGCAEQTTSGSFPQLYLDKVLALDDKQKADIRTNVNGGIERVLGMQLMSGGFSYWPGESVVNDWCSSYIGHFLLEARRLGYEVRTTAIKSWVNYQKNAAAQWQTSSSKFNEQAYRLYTLALAGETDLGSMNRLRSQKLPVQASWRLAAAYWLAGQRDTARNMIKGLALPERDYRELSATFGSTLRDKAMILETLILLNSPEEVGRTKQLFEEIAKELSQDKWLSTQETAYALIAIVPYMSNNAGSGALSLDYSVAGKAGNISFNTPVAERSFGIMPGTSAALSVTNKSSSPIYIRYTAKGLPVEGKEPALSEGLSLTVEYHDANYRVIAPESLKLGEDMEISVRVRNTFSQTVEEAALIIPLPASWEIVNTRIGGSASSSNYRYQDIRDDRVMTYFNLNRGEERVISFRVNKSYEGSFFRPAIHVYAMYDESIRALIPEYGNASGAFVRIPKYVTKKRLIIGAGTVILLLAFIFSLPRPLFDVPYSPVLFDREGNLLGAQVTSDGQWRFPGTEIINKKFTLALIETEDHRFRTHLGVDPLAIARAAYQNIRGKRVISGGSTITMQTIRLARGARKRTLFEKFIEAYLAVRLEAGRSKNKILALYAANAPFGANVVGLEAAAWRWFGRNSNDLSWAEAATLATLPNSPALIHPGRNRKTLKAKRDSLLNKLFKKGYFDEETLTLSVEEPLPGEPLSLPRLAPHLLDRLVLEAEKKSSLKKSAAFVTTINRDIQLRVTDILNRASDRFALNGIFNGACVVLNTQTGETAAYVGNTNTLHAPDVDIASSRRSSGSLLKPFLYAAMLDSGNILPSSLVSDIPTRMEV

SEQ ID NO: 86979 - protein, 95 aa, Unknown
  Obtained from environmental sample
  misc_feature (1)..(95): Xaa is any amino acid
VGKNPVLDSEAETNITSTRITAHLSKSFFRDKLENSISCIWGIEDSDYYLIPSLTWTEGNLKTTIAAGFFLGKEDGEMGQYHKNNFVKIALSIVF

SEQ ID NO: 86980 - protein, 326 aa, Unknown
  Obtained from environmental sample
  DOMAIN (17)...(273): Protein tyrosine kinase
  misc_feature (1)..(326): Xaa is any amino acid
MSKNKYLDILPASIGPYRILGKIGKGGMGDIYKAMQEPLNRVVAIKVLPLQLSRDDEFAKRFVIEAKAISLLQHQNIVTIHEYGEDDGYRYIAMQYIDGMDLGNYIAETKVIAVSDIIDFSKQICRGLLYAHHHNVVHRDIKPQNILLDKDNVIHITDFGIAKIFSTTDITVDGSTVGTPEYMSPEQAQGKKIDAQSDIYSLGIVMYEMLTRKPPFVANNSMAVAYKQVHEPPMPPSVKRKDTPKQLELIILKAIKKEKRDRYESVEELLTHLDMVDPSERVDRQTQLFHSRSGICLPWPKIRESPTAVAAIGAAEYWTACTNRFS

SEQ ID NO: 86981 - protein, 424 aa, Unknown
  Obtained from environmental sample
  misc_feature (1)..(424): Xaa is any amino acid
LSTFIKPLVALLISILLFAGLIFLANGDLLDFVESRFYNPSVVNSYVKENSVDSQIVQKHINNLKSKFYATLTVTAIRSSFLYNQSPNDIFERSKIYGILMESTTGLQSVQFVDSNGIRIHYSTSPRDIMSQDQRSTAYRNYNENQASLPYEIVGVEDANHAKLTMDDKNDRIIFSFPFRDSMDVFRGTALFSVSIGAFAERLIEAGRFKKSDSISLINEPAGIILGSPETSKAAILKRVAEAWNEDIKDYITLDAEDSGAAFSLISTKTDQNLFFGRLVNSDLFSISEPMKLILNVSIFLTFFLAFFFLINLKPNPAAVVRSRIRRLRESFFEQIGDEKSVQEKAKLVLELEQRQDEIYSQLKRGIRLNRRLEAIINGIIDKSWEEILIYLKVSSGHELSSIQPVKDAKKAEASRQNEECFSY

SEQ ID NO: 86982 - protein, 234 aa, Unknown
  Obtained from environmental sample
  misc_feature (1)..(234): Xaa is any amino acid
MKRIIFLLTLTAAVLFTLGCSKRSREAGEWENNSFTVTHGLAYDEAPSPRAAKATMAAAEAEYPREEADGGGSPSANFPEAERKLIKRANVSIRVENLAAADDAVTAMMKKYDAYAASTNVEENTHYYSLRVPANYYDIFLAETGGMGRLINRYENTEDVTLRYYDLEGRLATKKELLKTFQAYLGQAKTIEEILSVEARISDLHTILREREIHSVTLPNRYDTPRHDLCCSAP

SEQ ID NO: 86983 - protein, 447 aa, Unknown
  Obtained from environmental sample
  misc_feature (1)..(447): Xaa is any amino acid
MIIFAARCEKPVAAERSSTSGVMDEGEWYPVKPKPGATGSHYVDWSRLLDAPAGKHGFLKAKDGNLYFEDGTPARFWGTNLVAKDVFAPNAQLDSAVSRLAKMGCNMLRLHHIDAPWTSPNIFGNAEGTRALSAESMRQLDYLISLCKERGIYIFLDFLVHRGFTSADGVEADPLNLGGKQVGFFSRKLIDLQKEYIANLLNHVNQFTGVAYKDEPAIAASEFINESTVFTGFSGDMLATAYRKELENLWEDRLLKMEAMESAPAKRNLMRPAVKKSSSAKSAAKPPYSKTAAAKAEFAKFKSAYGRSPAKPEPETAEPELGPSGFAKIDPPEFVNLASTSAYKSLAVFGIDWKGDRRAWLKRASDSGDVKESIKFLSELERGYFTEMRDHFRRLGGRYVLAGSNMPLPLLAMIRDNAELDLICSNDYGTIRKYEEDKARRICHGPP

SEQ ID NO: 86984 - protein, 351 aa, Unknown
  Obtained from environmental sample
  DOMAIN (258)...(329): Bacterial flagellin C-terminus
  misc_feature (1)..(351): Xaa is any amino acid
VYRETPSGQKDTTDSSDTGDISLLAENSILAHGSIIEMIQGSATPTSIKILVNNNEVTVTYDETAQTLKVGNEVVSPGKSITLEDGTVLTHMTTLAEPNKATGKIFIDTGRIKLAEDITADAGGNVKNVESFTLAKDSILAAGTKLNTEVPQAGTKLMAGTVITAPSKFYPGSVTLAHEGKRLQFSANSNVSLEARYYESAVSESLTFIFSRYEPASSNLKDSVMAQIGSNSGQLAFISMGDMRAEALNVHNVDISTKWGAATAIETVNNALQRVSHQRALLGAMQNRLEHTIKNLDTSAENLQAAESRIRDVDMAKEIMEYTKDSILMQSSQAMLAQANQIPQSVLQLLR

SEQ ID NO: 86985 - protein, 306 aa, Unknown
  Obtained from environmental sample
  DOMAIN (5)...(128): Aspartate/ornithine carbamoyltransferase, carbamoyl-P binding domain
  misc_feature (1)..(306): Xaa is any amino acid
MLKGRSLVEPEDFSLTEMDGLFTLAEKIEKDEKYMRDSCRGKLLATLFFEPSTRTRLSFEAAMLRLGGSCLGFADPGSSSAAKGESLADTIRMASSYADTIVMRNPKEGSALLATKYSSVPIINARRRGASPPYPDFNRSSYIKRLLGQIGNLTVGFCGDLKFGRTVHSLAKALARYENIKMIFISPEELVLPDYIKSILKKQNVQFFEREKLEESMPEIDVLYMTRVQRERFFNENDYIRLKDTYVLNTEKMQAGKDTLIVLHPLPRVNEISVEVDSDRRAAYFAQARFGMFVRMALLSSVLGVV

SEQ ID NO: 86986 - protein, 126 aa, Unknown
  Obtained from environmental sample
  misc_feature (1)..(126): Xaa is any amino acid
LIRSAEHSIIAVVDTNCNPDGIDYPIPGNDDAIRAITLFTQIVANAVVEADNEVGLKIIETLGDEDEDMESMMNDISMKEEDREIDIEKYTTEEAYKAAKADEEVPEDDEDDTKIKVDIDKVYNDE

SEQ ID NO: 86987 - protein, 86 aa, Unknown
  Obtained from environmental sample
  misc_feature (1)..(86): Xaa is any amino acid
MFDAKKTKDKIIDWLRDYFEKNGGDCSAVVGISGGKDSSTVAALCAQALGKERVYGVLMPQGQQHDIDYSRELVEFLGYKALGSQH

SEQ ID NO: 86988 - protein, 82 aa, Unknown
  Obtained from environmental sample
  misc_feature (1)..(82): Xaa is any amino acid
MNKKIAIIDYKAGNAPSVMHAVERLGHEAAFARGAGDIEGASHIILPGVGSAGATMSSLREMGLIPALKRPLTREEGALHLP

SEQ ID NO: 86989 - protein, 141 aa, Unknown
  Obtained from environmental sample
  misc_feature (1)..(141): Xaa is any amino acid
NEEEALDAAQDVFVTVIRSQGQLHGQFMSSLLYTIATNICLNRLRQRKRQGGSIDNLSSSQTSPLLAENDSGLERVEDSMLMDAILQDESESTRAICFMYHGDGMTMREIGDVMDMSVSGVRKRLISFNDRVKLKLRGDKL

SEQ ID NO: 86990 - protein, 291 aa, Unknown
  Obtained from environmental sample
  misc_feature (1)..(291): Xaa is any amino acid
ERHENTFDREFDDSGRLFAASIGTKQELFYLKTSVAHKQQDFFTLPSSFQASPFEDGGRRDNSDSKNKAVNFIVGWTPTEETDIMFGFVRQSMEKGQPLDAAQSASYRPDPASNRNTVYPFPRFWYWNTYDTERYYLNGNVNLTDQAHLKALLYYDGHKDGNISFTDETMSTRLYGSTNYKNIPAPNNTTMYSGTRYEQYTAGGQLTFDYTFNEANKLAVSAGYRELSHKSFAERSVANNRPTEFLDQPLDGHMVDEIYDAGAEYTLKPIDPLTLVFGASYSYLTPKTLER

SEQ ID NO: 86991 - protein, 226 aa, Unknown
  Obtained from environmental sample
  misc_feature (1)..(226): Xaa is any amino acid
PTVIDDKPILGVTKPVAGETPVTAITNSAQYNGTVSWAPPISPGGKFAPLTDYTATITLTAKTGYTLDGVTEDFFTVANASSVSNPANSGVITAVFPQTGAIIINIAAIPGVTVPVTGATPVSVITPTDQYTGMVSWYPTINPGETFAAATDYTATITLTAKTGYTLIGVSANFFTVAGTSPAATNSVGSGIITAKFPKTAAPTEGNASITINFDIDELASTVLHL

SEQ ID NO: 86992 - protein, 99 aa, Unknown
  Obtained from environmental sample
  misc_feature (1)..(99): Xaa is any amino acid
AYYLEKELGTPAEIYYKFEGTNTSGSHKLNSAGPQAYFAKEAGLTSLTTETGAGQWGSAMSMACDFYNLKLTVYMVKVSSEQKPYRTALMETYGAHVIP

SEQ ID NO: 86993 - protein, 121 aa, Unknown
  Obtained from environmental sample
  DOMAIN (3)...(95): Dinitrogenase iron-molybdenum cofactor
  misc_feature (1)..(121): Xaa is any amino acid
EHEGFFVNLHLGEARKVYIFEKSQDDYHFVETRDTPAKGGGVARWEELATKTLVDCQAILVAGIGENPMKVLQQNGIRILQMSGLISNGLDAVYFNLPIKPLCQGEYTQCEACRITNSGCK

SEQ ID NO: 86994 - protein, 278 aa, Unknown
  Obtained from environmental sample
  misc_feature (1)..(278): Xaa is any amino acid
MQHSFEFAGESKPQQDQYGGKTGGGQQVFRGGRMTTKKAFLADLESLASALRQRVEASVSGFDPSPEAREKRKARAAKDLGFFAREYFPHYVSGKPSVLHTYLFERLPKLLNERGRKLALAAPRGEAKSTICSQIFVIWCVVHGRVHYVPIIQDAYDQAAQMLEAVKVELEANPRLQMDFPKACGQGRVWNAGIAITANDIKLQALGSGKRLRGLRHGPYRPDLVILDDIENDQNVATPEQRVKLETWLNKAVLKLGPPDGSLTVLYIGTILHYDSVL

SEQ ID NO: 86995 - protein, 190 aa, Unknown
  Obtained from environmental sample
  misc_feature (1)..(190): Xaa is any amino acid
FTRWKRSREISRAYDAKPKPVRAIKPIKPVKPPKPVKVAVVDKPVKVVKAVKAVKPVKPAKPPKPPRPVRPPRPARKPLNIAAALPYAVKGAKFLGIAVAVAALVFGAVFAFQRISVAVAAARADSNKASADDNAVAAPPVQNIPEDAVLPEAAVLPEGFAENAATAVPADTTPMEMPPPQTDRQAAPPP

SEQ ID NO: 86996 - protein, 278 aa, Unknown
  Obtained from environmental sample
  misc_feature (1)..(278): Xaa is any amino acid
VDNNITLKGRSGNTGSLVLVRADATLEMREGSVITGNTYSTIGTTSIGDSMPQSKGGGVYVDTGGSFTMSGGKISGNTASASSASAGIINPISYGGGVYNKGTFTMSSGEISGNTASTSSNNYDSSSYGGGVFNTGTFTMSGGKISGNTCSATKSSYSSYDNSPTSCGGGVCSMGGSSFTMSGGEISGNTCSSSSKPGTYGGGPQGGGVYGIITKTGGTIYGYTSGNANSNAVKVGSTVTSSLGHAVYVNDTKRRETTAGTTVNLDWSIEGSAGGWEN

SEQ ID NO: 86997 - protein, 144 aa, Unknown
  Obtained from environmental sample
  misc_feature (1)..(144): Xaa is any amino acid
IYRIAEKALNSKIPLLIVSASGGARMQEGIFSLMQMAKTCAAISMLNEKNIPYVSVLTDPTTGGVSASFAMVGDVNIAEKGALIAFAGRRVIENTIKQKLPDEFQTAEYLLEHGFVDKVVSRSEMKKTISDILSFYNRQSGGSK

SEQ ID NO: 86998 - protein, 78 aa, Unknown
  Obtained from environmental sample
  DOMAIN (1)...(70): C-terminal regulatory domain of Threonine dehydratase
  misc_feature (1)..(78): Xaa is any amino acid
RAPCLNFWTACPPRGTSRLFHYRNHGSDYGRVLCGLQVPPEDDRQFIAALDKLGYTYREETANPAYRFFLGGQGLSLP

SEQ ID NO: 86999 - protein, 54 aa, Unknown
  Obtained from environmental sample
  misc_feature (1)..(54): Xaa is any amino acid
VPDNILFVAESGIKTREDILALGNVDAVLIGETLMRSKDKKLELDKLRGVECSP

SEQ ID NO: 87000 - protein, 121 aa, Unknown
  Obtained from environmental sample
  misc_feature (1)..(121): Xaa is any amino acid
KHSDSNGCFQKKRGEGRRMKIEIPELCLVALVGASGCGKSSFAKKHFKATEVLSSDYFRGLVSDDENDQSATDAAFDSLYYLVRKRLERGKLTVIDATNVQQFARKKIIETARAYDVIAAA

SEQ ID NO: 87001 - protein, 97 aa, Unknown
  Obtained from environmental sample
  misc_feature (1)..(97): Xaa is any amino acid
ITLARQPVSTWGFLHPPTGMPRFNTAAAQIQTLFYYISREYEVQEASDPRFIPGRSAALVYKGRPIGVFGEIHPEVLENWGVTMPCTAGEFDIEALL

SEQ ID NO: 87002 - protein, 113 aa, Unknown
  Obtained from environmental sample
  DOMAIN (4)...(113): Thiamine pyrophosphate enzyme, N-terminal TPP binding domain
  misc_feature (1)..(113): Xaa is any amino acid
MTELTGAQILIECWKKEGVEVIFGYPGATTIDIHHHLAQSGLRFILTRHEQAAVHAAEGYARVTGRPGVVLVTSGPGATNTVTGLAGANLDSIPVLVFSGQVPRMMIGNDAFR

SEQ ID NO: 87003 - protein, 102 aa, Unknown
  Obtained from environmental sample
  misc_feature (1)..(102): Xaa is any amino acid
FAQDRLNDKAEMLHMSVERAVRLLARDKRTFDIIFMDPPYAGDGTLKTLRLLEKYPLLAERGVLVSEQPAGGSTANSCLFTVSKEITYGITRFVFYEIDSGA

SEQ ID NO: 87004 - protein, 124 aa, Unknown
  Obtained from environmental sample
  misc_feature (1)..(124): Xaa is any amino acid
NGYSKDNVEVTSSMYYIEAPLLISFKPIPEFRINVGHYVSYGLFGTTETKIASTTDKQKSFDFLDEFDFGLSFGVGVEVMKYYVGLNYEFGLIDIREDKDELEKNEGYKETKNQTWALTFGYYF

SEQ ID NO: 87005 - protein, 119 aa, Unknown
  Obtained from environmental sample
  DOMAIN (1)...(98): Ribosomal Proteins L2, C-terminal domain
  misc_feature (1)..(119): Xaa is any amino acid
ARAAGTFAQLIAKDGDYAQLRMPSGEIRKIHLECSATIGQVGNLQHENVSLGKAGRKIWLGVRPTVRGVAMNPIDHPHGGGEGRTSGGRHPVTPWGQPTRGYKTRRNKRTSKFIIKRIN

SEQ ID NO: 87006 - protein, 97 aa, Unknown
  Obtained from environmental sample
  DOMAIN (22)...(95): OB-fold nucleic acid binding domain
  misc_feature (1)..(97): Xaa is any amino acid
MEAMKRTFDCGSLRKNDTGREVILNGWVHRIRNHGGIFFINLRDRYGITQVTVDTQLSPDLVSICEELRNEYCIATQGTVHERPSDMVNHNMQTRRN

SEQ ID NO: 87007 - protein, 80 aa, Unknown
  Obtained from environmental sample
  misc_feature (1)..(80): Xaa is any amino acid
GERGESTWYPDRDWVPLKSNPDGKTWGEILDKYGIDGIPFKDGEPDFSEVSKGEVKIEPFSTERSDNFDKADTELAKQRG

SEQ ID NO: 87008 - protein, 175 aa, Unknown
  Obtained from environmental sample
  misc_feature (1)..(175): Xaa is any amino acid
IFESRKGIVLAWNKWDILPKDHKTFDNLVADVRHEYQELRNVPMISLSALTGQRVSSLMDVVFGVKERMSKSVGGADFENKIFDWVRAHPHPVTPGKEVRFLGARQIGAAFPLFRFFVTHHDLVSVSYERFLANKIYDTYDFAGCPVVLEFRPIARGGGGQKGEGQGDGGGEKDV

SEQ ID NO: 87009 - protein, 87 aa, Unknown
  Obtained from environmental sample
  misc_feature (1)..(87): Xaa is any amino acid
DLDLGESEALSLYWETNADFLLIDEKRGRIIAIRNGIKTIGTIGILLFAKQRGLISLVKPFLDILMNNGFRISDILYHQILERTGEL

SEQ ID NO: 87010 - protein, 99 aa, Unknown
  Obtained from environmental sample
  DOMAIN (1)...(98): Dihydrodipicolinate reductase, C-terminus
  misc_feature (1)..(99): Xaa is any amino acid
EPSGTAISLAEDLIANYPAKTSWMCDAPLCETSETLTIKAFREGKIFGTHKILYTSADDTIEIKHNAQSRQGFAKGAVLAAEWLVGKTGVFTMTDLLKV

SEQ ID NO: 87011 - protein, 268 aa, Unknown
  Obtained from environmental sample
  misc_feature (1)..(268): Xaa is any amino acid
TVCSAFGIEAQYIPDFIEDEDRLIKLTKPDLYSQGRLSILIGAVDNNKSRRLCHRVFTKASDLIYIDSGNGEYTGQVVCGIRCNGRTYYKPVGEAYPDVLLDTDTFPTDLSCAQAAVSAPQSIAANIMAAAAVVSYLYNILVLGSIETRSVTFSTKTVNLKPVVILQKRRKEERSMSIKTQRENMQTISRLVSQELGYIGGERESGPNGAKKQFHTKSAAFLRALGNDLGFKDFKVTRNYAGIAVSGEITLMGMWSEGNGLYLQISQP

SEQ ID NO: 87012 - protein, 250 aa, Unknown
  Obtained from environmental sample
  DOMAIN (23)...(92): Cna protein B-type domain
  misc_feature (1)..(250): Xaa is any amino acid
SHSQQRLTALEIIKIDESGGAPLAGAKFAVERQNGERIGEYTTDGAGLISIPMLTPDWYVVRELRAPDGYLLDETPKIIEVKTSAPTVITFTNKPLTSLQIKKEDAATGAPLGGARFVIEKINGGRVGEWTTDNTGFINITSLLPDWYVIRETQAPPGYLLDETPKTVEVKTNAPTVVTFVNKKLTALQIIKIDETTREPLPGAKFTVEKQNGERVGEFTTDAAGTINIPTLSPDWYVAREIMAPQGYLL

SEQ ID NO: 87013 - protein, 248 aa, Unknown
  Obtained from environmental sample
  misc_feature (1)..(248): Xaa is any amino acid
GVPYTGTFLVGWWGDGTSISDANGYFATPPTLIITLYPVPFSSYEIKGFMGEEYPVDWDLLLTHNGQVFTEEVRGNTDAAFAGTLSIGELKDVSQIELRVLRWSHRGAFVKITAFLANFDSKYEDDDIVSLSVLEETDGALGTLPIGNISSNELMVTLQNLDDKYFFGNTASVLSNSARTNRRLEPFFGFGSKMMPKGVYWSSDWSIADHGTTASTTALDRLGLLQDVQYNGLGNINDPDADAEMTYW

SEQ ID NO: 87014 - protein, 124 aa, Unknown
  Obtained from environmental sample
  misc_feature (1)..(124): Xaa is any amino acid
TRGDGDKGDEITGNALLMAGVKQEVSGDFSGGVRGEVVMKTGVWKQKYPTKANCRNAANGIMRRKDGAGCEDLNFISYDASATGNDNYFKTEMEKVAWLKKQGFDVTETREFGDPEKIITYRAE

SEQ ID NO: 87015 - protein, 235 aa, Unknown
  Obtained from environmental sample
  DOMAIN (1)...(235): FemAB family
  misc_feature (1)..(235): Xaa is any amino acid
TSAKRLKEELPKDTVFIRFDPPWFLDENNEESAMPPSFIRAEADIQPPDTVILDLTPPMKSIIEQMKPKWRYNYRLALKKGVKVRQAEKKEINVFYDLLKETSKRDRIAIHGFDYYKELFENEIPEIRLYLAEHEGDVLAGIVTLFRRSNAVYLYGASSDIKRNLMPAYALQLKAIEDAKNFGCENYDFFGIPPRKDESHSMSGLYQFKTGFGGKIIHRPGSWDYPYRHIVYRIF

SEQ ID NO: 87016 - protein, 71 aa, Unknown
  Obtained from environmental sample
  DOMAIN (19)...(57): Topoisomerase DNA binding C4 zinc finger
  misc_feature (1)..(71): Xaa is any amino acid
YGCTNYPDCDFISHFKPINQDCPKCGQFMVEKYDKKNGSYKSCINPHCDYLHSGDEESKAGSASGGEEDGE

SEQ ID NO: 87017 - protein, 174 aa, Unknown
  Obtained from environmental sample
  misc_feature (1)..(174): Xaa is any amino acid
VKIENSITADRLESVSDSEADFLKADTVSDVEELEDAEPAEDLHEDSSAPAETAEMQSLEDADNLDEIEDLNSLDEIEDVNNLDEIEEAEEIDEEIDEVEELEEEIEEFEEVEEELDEFEEAEEEKTYTEIHLSKGLLKAANETLSKIKKKELLKSADKLVNTEEPAAESEYKN

SEQ ID NO: 87018 - protein, 62 aa, Unknown
  Obtained from environmental sample
  misc_feature (1)..(62): Xaa is any amino acid
DDGKVVLNMLMTDLHLFEKADTERETALNEYAKFFIRGRLGLRDTKSITDFIADAAVTGGGK

SEQ ID NO: 87019 - protein, 139 aa, Unknown
  Obtained from environmental sample
  misc_feature (1)..(139): Xaa is any amino acid
GAAGDNPPAAAPPAVAQTAQAARGTEALDEARVDEGLVRVESLAARRTGNRTLRVTFVLYNTEQEPLVAGNATFDLVLPDGRILPMESQLDTSYRIRIMKTMAGNPVLPKDVAEDEKASVRLNILADGKLIYRTVTPLQ

SEQ ID NO: 87020 - protein, 59 aa, Unknown
  Obtained from environmental sample
  misc_feature (1)..(59): Xaa is any amino acid
FGASMAIVDVYDALVSKRPYKEAFAVEEAVNIITASAGKHFDPKIVEVFLEVRDQLITV

SEQ ID NO: 87021 - protein, 75 aa, Unknown
  Obtained from environmental sample
  misc_feature (1)..(75): Xaa is any amino acid
KASPIETIHPEDGGFISMLVLDMDTYGEKYGNKAVRKNLTIPAWLNTFAESRHINFSKILQDSLTALYKQETAGS

SEQ ID NO: 87022 - protein, 262 aa, Unknown
  Obtained from environmental sample
  misc_feature (1)..(262): Xaa is any amino acid
EERTAKLVKAEEVAATLEKKKEEEKKKEDIKSDQKKLKPTNSQGVSSNKGGGDPRARVTQMGVLGIVSGQIKGKSVASADIFGKGGFATDIDAILSGVGGLKSGGDGGVGRKGVAGIGYGSGYGSGFGGGGGGVDDLLGGLMGGGGGGLELKKKGELKVSSPDFLKGGALTGGRSRASIQRVVMQNMAALRYAYNKRLRDKPGLTGKITVKFAIDEFGRVIFAQIVESTMSDSELETTVVSRVKSWNFEKIDKPGDVTEVTY

SEQ ID NO: 87023 - protein, 265 aa, Unknown
  Obtained from environmental sample
  misc_feature (1)..(265): Xaa is any amino acid
YFYWRSTYNGTITLGGSGTRTLQGSIVTLGGSIIGSGLSLTITGNAVLNGGSGIEDLSVSETSIINVDITTTGDQTYNGAVTLGGTINLDGQVITLGTITGNTNSLTITGNAVLNGGSDINNLSVTGTSAINADINTTGIQNYGNGNVTLGGTGTITLTGSTITLGAITGNSHSLTITGSGVLNGGSDINVLTLNGTATLNADITTTGNQTYTGAVTLGGTGTRTLQGTTVILGGGIIGSGLSLTITGNAVLNGGSGIDKLSVSG

SEQ ID NO: 87024 - protein, 238 aa, Unknown
  Obtained from environmental sample
  DOMAIN (1)...(164): AICARFT/IMPCHase bienzyme
  misc_feature (1)..(238): Xaa is any amino acid
NLLDAYNKVFACDPVSIFGGIVACNVKVNAGTALRLGRLFLEIIVAPDYDENALDILKKKKNLRIIKLKNAPKEKHEYIAVDGGVVVQQSDRILLEKWEVVTKAVPNESDIKDMIFGMRAVSFVKSNAILIVKDQAATGIGCGQVNRIWSAKQSLERSAAILKAESEETADTGGTPWKDSLPARVLASDAYFPFADVVEAAAQAGIKAIIQPGGSINDKLSIEACDKHGIAMVFTGIR

SEQ ID NO: 87025 - protein, 122 aa, Unknown
  Obtained from environmental sample
  misc_feature (1)..(122): Xaa is any amino acid
GISCGISLRAAGDMKTDDENRLALFSKIGLNPVNVYGLKQIHSRTVLAVDSINPPSDQADGMVTQDRNITLSVTVADCLPVFLFDSKSGAFGLVHSGWKGTGIAVDSLVLMRERYGTEPCDV

SEQ ID NO: 87026 - protein, 82 aa, Unknown
  Obtained from environmental sample
  misc_feature (1)..(82): Xaa is any amino acid
KQAEKALKDFNDNLAENGKKILQDVEREGKFAVVIAGRYYQYDEHINHNLSRYFTSLGIPVLTLDSLPGIEKTSLRKSRIEI

SEQ ID NO: 87027 - protein, 71 aa, Unknown
  Obtained from environmental sample
  misc_feature (1)..(71): Xaa is any amino acid
AGQYAKPDFNLLTFSLLSGLLLSSVGIALTIFLSIAVERASYGLLGGIIPLSMGIGLLAFYAIKRNEKPNG

SEQ ID NO: 87028 - protein, 264 aa, Unknown
  Obtained from environmental sample
  DOMAIN (159)...(215): Iron hydrogenase small subunit
  misc_feature (1)..(264): Xaa is any amino acid
MPCTAKKFEARRDEFKTGGNPDIDIVITVDEMALMMKEYGIDFDMMELGSFDMPYGFATGGAVIFGSSGGVSEAVLRFASDTIEKGSAHEFKQLRGDDGIKVTEVALGGETLKLAAVSGLANARKLIDRIRSGEAHYDLVEVMACAGGCVNGGGQPITPHNKAAVKKRAEGLYDGDKMMQFHVSSENPYLQQIYAESLTPEKAHAILHTKYENRRRITQEDFTLGESSGEKALSLEICFGTSCFLRGAQGLYRDLMGYIRENGL

SEQ ID NO: 87029 - protein, 66 aa, Unknown
  Obtained from environmental sample
  misc_feature (1)..(66): Xaa is any amino acid
TIILITHELDVIKYTTKNMAVLENGVISESGRTKDIFANPNSVTGKMFLKVYFELQEREMEGGEGI

SEQ ID NO: 87030 - protein, 239 aa, Unknown
  Obtained from environmental sample
  misc_feature (1)..(239): Xaa is any amino acid
MRENIKKIIDIENLRNRGFNTAINSITSILDTSKMGYQYIENLKNSREVLIREYEDTDIANLPDERYQIKLRYFDNAQLNEDRKAYDVQIKSFETEIQHLWDVLEVIYQDSKNSMKVNDFEDLAKKEKPRVQKLIKSKTGEPMYEDIAKVWDEISFVRGGETEVEKSNRTFIYEKDRIRQRIILMRNRMKTMYTYQYPIERRVMEDRLAFLEREYYRFEYMINPYHLLPGLLLDVDITS

SEQ ID NO: 87031 - protein, 231 aa, Unknown
  Obtained from environmental sample
  DOMAIN (5)...(229): Domain of unknown function (DUF1083)
  misc_feature (1)..(231): Xaa is any amino acid
SRIQDYDINNIVPGDSAGWSGGTYGKARVMWDDTGLYVFARVADPTIRNATGDNANSSHTFSSVEVFVNERVDADGEVFRGDGSKNGDNASATASSYAGRGGQYRLAAGSTTGYRSGNPTAAYNAFNNNSLGRSYWTITANDEWAVDGKPGYIMIFKVPFRFASASTGADSGVTPAAPWPPANNKKIGLDLQINACDSNSRLGVMVWSNTTSTNYQNCYDWGVATLVGRPP

SEQ ID NO: 87032 - protein, 258 aa, Unknown
  Obtained from environmental sample
  DOMAIN (45)...(230): MAC/Perforin domain
  misc_feature (1)..(258): Xaa is any amino acid
KDINEYMRSITAKVSKSVNADLMKVVSFSAEVGANFGTERTTKAEYAFTTSTSRIVTAAYNIGNKNGLDSFFTQDFANDLGTMSADQLIKKYGTHVMLGAMLGARADYHLSVVKKEQNNITNLGAYAKSKAEATYKGVTAGPGSSVEVDTKYAQYFDTQTTVTNTKVVGGKVQYGQFINDMQNYDKWIESIDGNAVWVDYYPESLVPLSDLVTDKSRSNALSQAILNYCKGKEVKVNPIEVGPTSYSANVGSGNNFRI

SEQ ID NO: 87033 - protein, 49 aa, Unknown
  Obtained from environmental sample
  misc_feature (1)..(49): Xaa is any amino acid
NIVAITAGAKHTVGLKADGTVVAVGRNEDDQCNTKNWQGIGPVPEEQVL

SEQ ID NO: 87034 - protein, 252 aa, Unknown
  Obtained from environmental sample
  DOMAIN (1)...(252): BPG-independent PGAM N-terminus (iPGM_N)
  misc_feature (1)..(252): Xaa is any amino acid
LERLFAKYPNASLRAHGTAVGMPSDEDMGNSEVGHNAIGAGQVYNQGAALVADSISKGEIWKRDAWKEVIKGAANGTLHFMGLFSDGNVHSHIDHLKAMVAEAKKEGIKRVRVHILLDGRDVPETSALEYVEPFEKFCSELSDSAFDVCIASGGGRMKITMDRYEANWKMVEKGWQIHVLGEGDKFESASVAIKALREKFPKTIDQDLPPFVIAKNNEPVGIIKDGDSVVFFNFRGDRAIEITQAFENANFD

SEQ ID NO: 87035 - protein, 73 aa, Unknown
  Obtained from environmental sample
  misc_feature (1)..(73): Xaa is any amino acid
RPCFDTAAIKSVSSTPVAIGFGIHTPQQAAQMAKIADGVIVGSALVKLAAQYGTEAAPHIYSYVKEMKEAVVK

SEQ ID NO: 87036 - protein, 78 aa, Unknown
  Obtained from environmental sample
  misc_feature (1)..(78): Xaa is any amino acid
MHSSSKTGHIHQYSANSIEEVTIIAGKEKPIRIDVHMSSDVGFFQVEEVLMHKIAGSTAKSHIELYANVIGDTEKRYL

SEQ ID NO: 87037 - protein, 78 aa, Unknown
  Obtained from environmental sample
  misc_feature (1)..(78): Xaa is any amino acid
MTIDRIGSLDPIQPGTKAGGANQIKTTSITDSISISSEAVEKAELYRVRELVAAAPESNAVRIEKLKAKINDPSYLNS

SEQ ID NO: 87038 - protein, 119 aa, Unknown
  Obtained from environmental sample
  misc_feature (1)..(119): Xaa is any amino acid
DIDGAMNALKSFLASIPYDIIKESENYYETTVHLIFTMLGLNCRSEVRIASGRIDTLVETKNNVYCFEFKLNGTAEEALAQIDTKEYLLPWKKSGKQLYKIGVEFDYEKRNIGHWLVGN

SEQ ID NO: 87039 - protein, 71 aa, Unknown
  Obtained from environmental sample
  misc_feature (1)..(71): Xaa is any amino acid
IRCKAEERAELLQICNHFKAHTVDMTEVSMIVQLTGSSEKIDSMVSLCKKFEIVEFVRTGKIIMMRGENKT

SEQ ID NO: 87040 - protein, 257 aa, Unknown
  Obtained from environmental sample
  misc_feature (1)..(257): Xaa is any amino acid
FGAAHKRFADIQNAPDDDAEKYDESSDLDMPDAVSAEAQGLICLPRGKKSGIAVHTLLEKLDFARAQDRLQALIETVISDYSLAPRPAWLKRLGIAKSPASAGGGDEAASHIRAYLQNLVHGLLAAPIPQIDQSFQLSGLHSFDCLKEVKFDERNPIANHEPLEDMMTGVIDLVFWHNEKMYIADWKTNWLPNYGYAAMKGEMKAKSYHLQAAIYANAVSRFIRQRGLPDSCLGGVLYVFVRAFTTGDYRESDAPAE

SEQ ID NO: 87041 - protein, 274 aa, Unknown
  Obtained from environmental sample
  DOMAIN (32)...(171): FAD binding domain
  misc_feature (1)..(274): Xaa is any amino acid
GHCGEGNVVIEGEKLEAYSHDETDAHEYGHLPEAVVFPATTEETAAVVKLANRERVPITPRGAGSGLSGGAIPEYGGIVVSLERMNRLIEIDRDNMAAVVEAGMVTNDFAKAVEAQGLFFAGYPMSLQTCVIGGNIAENAGGGKAVKYGVTGRYVLGLTLVTPLGEIVELGGKLAKDVSGYDLKSLVVGSEGTLGIVTRAIIRLIGYPSSKSDLLALFRTPKDAIDLVPEILCRGVTPTSIEFMDSLSVQTSCQYLNETLPYENCGAMLLIELD

SEQ ID NO: 87042 - protein, 198 aa, Unknown
  Obtained from environmental sample
  DOMAIN (6)...(136): Enolase, N-terminal domain
  misc_feature (1)..(198): Xaa is any amino acid
MGETITITGLRGREIINGRGIPAVEADLFVSSGFRYTASAPSGVSVSSHEAVELRDGGKRLMGKGVLTAVQNINEKIRPALLGKTVTDQAKLDALLVELDGTKQKTALGGNAVTAVSLAVAKAGAAARKLEPYAYLGGPDAARVPLLCPNMLSGSKTAGNSLDFEDYLLVPHGFSSLSEAVTAGVETFHILHNNLQRR

SEQ ID NO: 87043 - protein, 51 aa, Unknown
  Obtained from environmental sample
  misc_feature (1)..(51): Xaa is any amino acid
VKLPGRMGREKVTVLSQRVVKMDTEKQLILVKGAVPGINKGLVFVRAAVKR

SEQ ID NO: 87044 - protein, 277 aa, Unknown
  Obtained from environmental sample
  misc_feature (1)..(277): Xaa is any amino acid
LAYDAPWFDDAKKDYYISDKNIQYYLNYIEVTVNRYKGKVDAWEIWNEPNWLFWTGTDKEFFKLSKLAALKIREIDPDAYIIGGSFQRLPRNFINNMKIAGAMENLDALAIHPYDINPKGSMRLLDDFFKITSKIGFNGDIIITEIGFPSSGWYPSRVSLKNMPSYVIKTIAPAAARGTRIINWYCFNDSYKFGEYPNTFNSELYFGLVYADFTRKSGAWAFELCARYLPGSQYNPELPLKEGIKSNIVTLCFTGNESDTNTLIIWNDVNTKQKIKV

SEQ ID NO: 87045 - protein, 192 aa, Unknown
  Obtained from environmental sample
  misc_feature (1)..(192): Xaa is any amino acid
MRNTGWYLVYFLVTLGALQGLTLYFPMLLQRLPEVAEAQYSSHNVVPLIWQGVAVLMFIISIFCVYFLSEHAGAAYAEKYRYNVRESLYNKFSHMTSAQIDEVGSARMIPMIINDSTWLRNYNRRVVTMVIYFPVTILGAFAMLFGLNIWYALIALASVPIAVVFFWLNVRRMGKVLVESIPAYDEYYFSIQ

SEQ ID NO: 87046 - protein, 61 aa, Unknown
  Obtained from environmental sample
  misc_feature (1)..(61): Xaa is any amino acid
DGTPSLTHLKNKNAYLIAQDEESSVVFGMPRAAAATGLLDKVVTLMRVPDAIVERINLGRK

SEQ ID NO: 87047 - protein, 274 aa, Unknown
  Obtained from environmental sample
  misc_feature (1)..(274): Xaa is any amino acid
VGEEITLTSSVTPPWVTDKTVTWEVTLEDGNPATGIATITPSGDTITATLKAPDTVIAADTKVLVYAVSTNGNVRSPAYEILVKKFTVDITLLNKTKLVVGHTTKLAAAVNTVYDSTYNWSIESGGSGSATLTDGILKGIAAGTVQVKADNGTFSETFDIEVVDSAGQIVEINLSDPIYKLIVPATITTATGTVGELEFKVSGTNNPTYASSTLNFGRYAGEYTYYFNPGGTGSTTSRSASFDVNGQCEIRVIIDMGTNVRNIVLTPATGSTIT

SEQ ID NO: 87048 - protein, 77 aa, Unknown
  Obtained from environmental sample
  misc_feature (1)..(77): Xaa is any amino acid
MPVPYTEKPWEFLNDYRGKAFSGQWPTLPEMFKITVSRFPQRACFTIYEPDRISLNYTESLKLIEAIARWLHGKGIR

SEQ ID NO: 87049 - protein, 109 aa, Unknown
  Obtained from environmental sample
  misc_feature (1)..(109): Xaa is any amino acid
DAERLKDLLRAYDWGGRAGTRPEIEAIRSVSVKPSDLAVGKAVIRGAEMDVTADENAAPEESLFLLGTVLARSLSCMASINTFLKLTMTLPVSGKSWAWYCRSGERWAV

SEQ ID NO: 87050 - protein, 266 aa, Unknown
  Obtained from environmental sample
  DOMAIN (97)...(149): Clp amino terminal domain
  misc_feature (1)..(266): Xaa is any amino acid
SRRAQTILTIDAQNEARRNNADELLPEHVIIALLKEGGGTACKALLFLGVDLREFRQNLEEELPRVRGGSPVPGGAATLLPVDIPPSKRTRQMLENAAEEARVQGKDYIGTEHFLFAAMREHDMPVRRFLAFRAVDAEMLRVAVETTLNPVRTSQEVAAKAKPAVYPVLTPVINEFSRDLTALAKEGKLDPVIGREREIQRAVRVLARRTKNNPILVGESGVGKTAIVEGLARYFAGIPSSLPSSRVAGSAAGEQHTAGTTVRKQP

SEQ ID NO: 87051 - protein, 285 aa, Unknown
  Obtained from environmental sample
  misc_feature (1)..(285): Xaa is any amino acid
MGDAERAANLARRVVQLSPRHFEAWMLIAKIAHGHLGQAEKAIHALQTAVELRPDELEPKLALAGLLLDEDDVTGAFVAASGALEIERNGDTLRTMAEVYLARDDNAKAIALLKEASGHLPGDPLIRGLLAEGYLHASEPQKAFSILHDLLRQHPGDPDLLIMMDSRDSAQLASARGGSRRAQARLDNAEQWLQQDNIEEAARCLRDAKKISESDRAIWVGLQISAAKDIHLTIPRLMAFSTSGCHPRLCFSALRLAIDHFMATGNKQAVLRALEGYINVYPKST

SEQ ID NO: 87052 - protein, 162 aa, Unknown
  Obtained from environmental sample
  misc_feature (1)..(162): Xaa is any amino acid
MTPALDGLSPGMPEPCPTPPTPPLPAAPGTATLDGFAPFAATAAVPLLSGLGLGPTFGAGGFAGGGTLGGSNNGFGGVGADVGGAVFFGGSGAGFSGAVSSTRLCLPFVFPSSVGAEPPDAPAAAGSVTHLIFSSALLGAESGQNKIEATTAEWMPKLIANA

SEQ ID NO: 87053 - protein, 169 aa, Unknown
  Obtained from environmental sample
  DOMAIN (6)...(154): Polypeptide deformylase
  misc_feature (1)..(169): Xaa is any amino acid
SSNPPYPDPRLTQPAIALTGLTDEIRALVSDMAETMYAARGLGLAAPQVGQAIRLVVVDASGPDERQDLQVFINPRLTVLDPTPVEEEEGCLSVPLNYRAPVSRAARVAVDALDMDWQPVHVEAEGLMAACLQHELDHLDGKVFLDRLSRLKRMLFDTRIKKWLRRKNP

SEQ ID NO: 87054 - protein, 62 aa, Unknown
  Obtained from environmental sample
  misc_feature (1)..(62): Xaa is any amino acid
IFFSIGLPVYFADSPNNVGKYLPDIKPTVLTVVPRVLEKLYDKLTGATREKHGPVKWLMKYA

SEQ ID NO: 87055 - protein, 234 aa, Unknown
  Obtained from environmental sample
  misc_feature (1)..(234): Xaa is any amino acid
RDGAHVQHQGGGAISYPMTCSFNGEGHVQTANDFELALHEREVAELQHPVYGIKKVIPTGNIIRDNDLINNVNESHVTIIFTETITDDPVNLEAVTADELAESFDDLMEAAAVDFAESLTVENISEQLLIQSSLNMQTNILNDNLSALTPGEPDFLTTMGELKNSIKTMFNKAERLTQNYLNTARLALNAMKLPSKLTINILEKMRGYTMLISQIQTQFRNDPYGINNIKNAFA

SEQ ID NO: 87056 - protein, 115 aa, Unknown
  Obtained from environmental sample
  DOMAIN (1)...(69): Beta-ketoacyl synthase, C-terminal domain
  misc_feature (1)..(115): Xaa is any amino acid
YVNLHGTGTLLNDKAEALAMNDVFSRFTPPSSSTKPITGHTLGAAGSLETAICWMTLNMKKGLPVHCWDGEKDEELPFHPYIPNCEPPSICMNNNFAFGGCNVSLILGRSKQLAQ

SEQ ID NO: 87057 - protein, 134 aa, Unknown
  Obtained from environmental sample
  DOMAIN (1)...(120): Phage integrase family
  misc_feature (1)..(134): Xaa is any amino acid
KVRGKGNKERLVIFDREAGIRLEQYLQEARGKLAGKVNKSDALFISRNGKRLSRKGIWKNYAKWASLAGTSSHIHTLRHSFATSLLEGGSDLRTVQELLGHADLSTTQIYTHVDVSVLRENHRRFLPKLSRTEL

SEQ ID NO: 87058 - protein, 75 aa, Unknown
  Obtained from environmental sample
  misc_feature (1)..(75): Xaa is any amino acid
EREHLCAQALQRAMEGEAERAGLTSEEDIIALCREVREPFDYTKWQENLFEDMTVEEISKRAMEYRNKNEQGTSI

SEQ ID NO: 87059 - protein, 217 aa, Unknown
  Obtained from environmental sample
  DOMAIN (25)...(206): Amidohydrolase
  misc_feature (1)..(217): Xaa is any amino acid
MSFSTTSSCKDGVLYAEIENEIKMFLSHVSYSVETIKAFFWYIPDYINQSITVESAFNDIPYKGIKIHPLAHNWDFENTLHLKALYSLFSYASENNLPVLIHTGYSGVDSADRFECFIKEYGNVKCILTHCRPLDVTIKMLSKYNNVYCDTAFVSKEEIANIVSAGFKNKIILGSDFPITHYYRTKHPQPGENPDISLREKYAEDISDWKKLTVLEN

SEQ ID NO: 87060 - protein, 65 aa, Unknown
  Obtained from environmental sample
  DOMAIN (9)...(31): MORN repeat
  misc_feature (1)..(65): Xaa is any amino acid
TYFRNGDVYEGDWVDGKQTGKGKMTFHDGNVCEGDFVDGKPHGKMKICSPNGGYFVSNFVNGIPQ

SEQ ID NO: 87061 - protein, 116 aa, Unknown
  Obtained from environmental sample
  DOMAIN (17)...(108): OmpA family
  misc_feature (1)..(116): Xaa is any amino acid
FLRANYADFVGIPQERLDNNIRVLKRVAEILNKFRDYKITVEGHANPVLGTAKEETETLMPLSLARAQYVIDYLAGVGVGRSRLSPIGRGGTKNVARPQDQANNWKNRRVEFLLVK

SEQ ID NO: 87062 - protein, 136 aa, Unknown
  Obtained from environmental sample
  misc_feature (1)..(136): Xaa is any amino acid
METVSFSLLELFKLGGVFMWPLAAFSVATLAIGVERLFYLIYHDLRLNAINLKVSDYIKNSDYQGAMDYLMPLTKRAMGARILLALVKRAVPAHGKPFSERNLERAVETESMVCIDSLESGFNFLVALGSLSPLTG

SEQ ID NO: 87063 - protein, 214 aa, Unknown
  Obtained from environmental sample
  misc_feature (1)..(214): Xaa is any amino acid
LPLGFLANNGLSNYKHDANPFVSQNNLFRLATGLGGDLFTVRDAPNLPYMKLDRNGIERLSWDYIIPADGIFYAYCVFTNEKSFNISFQGAVFRTVENNRPYIFTLGGFSKGDIITFSINSGASKGSAKIQVGRIDNELFDRGYALLADEVLNLTEFSETKISGSITALKDGLLYTSIPYNKNWTAFVDGVMAPIIEVDGCMIALRLNAGTHSV

SEQ ID NO: 87064 - protein, 290 aa, Unknown
  Obtained from environmental sample
  misc_feature (1)..(290): Xaa is any amino acid
FDDILINWINKQTAKLDFSEDTLFNNDNKERDKFFNTTIQCNKLNDVKYSEFISTFKLIYTNFNFDNIKENNMFILIDKNVIKMNIENLKFIRNKYSFKIICHYIISNIDEYIKIIETQKDLLKTDELEYIISSNENVSEDNQIKLLNLTNSALTIISKSYSEKIKLYILSHNFSENDYEVLIKNYDNNSEEIKKAIVNLFIGRVEKTIESKYPISKNLFDDLANVKMLEEEKIKFILALTLPNMDESDCVKYLTKYGLKQFVDIYDKNKKPQFDNTVLNKFILDLFILL

SEQ ID NO: 87065 - protein, 79 aa, Unknown
  Obtained from environmental sample
  misc_feature (1)..(79): Xaa is any amino acid
NLLVGGRNDLTDWRYEGVIYLKTDDPFNKDGAMNLYAPDVTQGPDGKFYLYYVLDKMDVVSVAVCDKPAGKYEFLGYVR

SEQ ID NO: 87066 - protein, 265 aa, Unknown
  Obtained from environmental sample
  DOMAIN (5)...(265): NAD-dependent DNA ligase adenylation domain
  misc_feature (1)..(265): Xaa is any amino acid
GAIPSGIRERAAELRRRIEYHAWRYHVRDDPVIEDAEYDRLFRELCGIEASYPELRDASSPTLKVGGVVLDSLETREHRLRMYSLDNVFSWGEFHEFVDRMLRLLPVTPREAITFWVDPKMDGLAMELIYEKGLFTAALTRGDGEKGEIVTESMRTVKNVPLRLKGDALPGYIEVRGEVVIARKDFEVLNARRLADGARPFANPRNAAAGSVRQLDSRITAARPLRFIAYGVGLVDASPGGPWPRYDILVQNPDGHGLCHRPDAR

SEQ ID NO: 87067 - protein, 133 aa, Unknown
  Obtained from environmental sample
  misc_feature (1)..(133): Xaa is any amino acid
ANTHPATVELDFDKAITWLNNGAQPTETCKNILSHEGVLLKKHLLGGVKKNAFSEAEAENRFDKWKKEKQSKIETLKNEVTKRKNETSRKRRDEEVKVKEAIAKKVSEKLAAAKIAAAKAEAVSEEPAEQPAE

SEQ ID NO: 87068 - protein, 50 aa, Unknown
  Obtained from environmental sample
  misc_feature (1)..(50): Xaa is any amino acid
MQEYTITAFTENAVGLLNRITIIFTRRHVNIESLTVSASALKGVHKFTIV

SEQ ID NO: 87069 - protein, 279 aa, Unknown
  Obtained from environmental sample
  misc_feature (1)..(279): Xaa is any amino acid
TLTGSPISSIAAGGTGTFSVRPNASLIAGTYTATVTVSGGSVAAQTVSVTCTVSAAPAPSFSLSRSTTFTFPEVTAPYSQPGALTVNVTNTSTVATGNLAVALSAGAEDFFVLSTSSINSITSENGRANFTVTPRTGLAARTSSYTGTVTVSGANVASRSFGVSFRVNPGYGITITPPVFDSVKVGYAQPAAKTVTVSNPAGNAATGVLNIEFTSGESDFWLSGTTLESISAGGNRTFTIRPNGGLAVGNYSATVRLSNANITANNTFTVSFAVTDGTY

SEQ ID NO: 87070 - protein, 248 aa, Unknown
  Obtained from environmental sample
  misc_feature (1)..(248): Xaa is any amino acid
TAQKRRVFFYNTTIAAILDGDEKYLQKIRHVLGVFRNAPDVVLLWRPHPLNETTYQVMRPRLLDEYERIIGEYKSEGWGIFDDSPDLHRAIAWSDVYYGDASSVMAMFDAVGKPVVVQRVGVMGGLGDRAFFSNFFFVNDEIWFCDRHSRSFFKMNKETLEYEYVESFANSLHYDSYMTGTLHNELVYFVPYFANEIAEYDIQKKTTTYIPYNNTKCNKCFVAALNYGKYIFFTPYMYKAIMRLDTES

SEQ ID NO: 87071 - protein, 70 aa, Unknown
  Obtained from environmental sample
  misc_feature (1)..(70): Xaa is any amino acid
RHVSDGFSTFTADMGDCIVVIKNVPSRVCGQCGEASYSDEVARRLEQIVHSLMDSASAEIAVVSYSEKAA

SEQ ID NO: 87072 - protein, 182 aa, Unknown
  Obtained from environmental sample
  DOMAIN (102)...(156): Helix-turn-helix
  misc_feature (1)..(182): Xaa is any amino acid
MEEIIFPNKIRILRKMAGKSMQELADKLGVSLSAISKIEKGYRKINQEQMMVVADFLGSSMTDIFITEDDDDDDVLSQWKKEISRRVEQNRNNGLKSFGAGLRLLRSQKDMTLMDVAEAAKLTLSVYHRIEIGQREIFETELFAIARALGMDVKELLTKIYKMKEAGELDRLLADSEDPMDS

SEQ ID NO: 87073 - protein, 246 aa, Unknown
  Obtained from environmental sample
  misc_feature (1)..(246): Xaa is any amino acid
FRARNAALDARLDKLLENIQTIREDIRHDAEDDLTRLSKAAVDMANGRVFQQVDIQAKGELGIIVRTFNQTLLNLQQLDASVKDQTNKVPELAAQLDAITADTEVATQNVMNRLDTLLAKAEEAGRFFAELQRNSEEYKHEYEHLVDGISEFLERAKKGESSTKLAQEILDYWFESQVAPKPKPMDLSAGQALLQTVSDEAFEIMNILQFQDITRQKVEKVVQLLKHFRQSLDRLLEIFNIREEGA

SEQ ID NO: 87074 - protein, 94 aa, Unknown
  Obtained from environmental sample
  misc_feature (1)..(94): Xaa is any amino acid
KRGEFKPAHLGQLNFYLSALDEYVRQADEAPSIGIILCKEANRSIVEFAVRDYTKPMGVATYRTRNEMPKTWQKALPDFEDMKKLLDSAGDKKL

SEQ ID NO: 87075 - protein, 239 aa, Unknown
  Obtained from environmental sample
  misc_feature (1)..(239): Xaa is any amino acid
KRKTAQAVWISQPRFGIGSNQCKENINKILSQIKDSDYLVIDEANEQLHPSHLATYDTNDHPNVIKFRSIFKPLGLNGPRISFILHNKKYRETIASNMDSLQGGIDYFSVDLATKVLKNKDFLKELLEISHKQVINLKNKAEIITNLTNIELTPLENGYIGSLIVHFDKSLAHNESRRKLLEFCKKNNMPVILGSSMYFANEDFIEHIRLNYFIHESLFINGVRLISEFYNSANYTLAK

SEQ ID NO: 87076 - protein, 142 aa, Unknown
  Obtained from environmental sample
  misc_feature (1)..(142): Xaa is any amino acid
MVMCGFRISSCMSNLGTKSVMNIVTALIKGESRPEELIKLVYGNTANKKSGKLRASLTGNLQEHYRQQLEWEKEEYDLFEKHTEQCLVQMRRLCTEHYSEEIKLIKSIPGVSEVSAMIIIAETGGDMSVFENSGKITGWAGL

SEQ ID NO: 87077 - protein, 284 aa, Unknown
  Obtained from environmental sample
  misc_feature (1)..(284): Xaa is any amino acid
ADVVFSDPPYANQIPYAHLSDFFYGYLHLGLKDRLPQVFSILQTEKARELTENRAVTEGGIHDRNWYENGMYQAFSQMKRIIREDGIASFVFAHKETDRWEALVSALIQGGWYTTGSWPIATERRQRMRAQGYAALETSVHLVCRPRPKDASIGDWGKVLRELSLRVGDWMERLQSEGIRGADLIFACIGPALEVFSIYSKVETADGNEITLTTFLEKVWEVVGRTALEQILGTAEARARNGAAGALEEDARLTALFLWTLQVSGTNKADDTSSDKDANLSADS

SEQ ID NO: 87078 - protein, 289 aa, Unknown
  Obtained from environmental sample
  misc_feature (1)..(289): Xaa is any amino acid
DHAGAAAFLYDLFPDIQIFGSRETIAFLYGRYALPRTASAKIVQTGETFALGDWRLTPHAVTHSIPGTYAVSLAVPSAGNIFVSADFKAFADPAEAARFASPDVFVCESTNAGVPAPSFGGAEVKAFLGDCIARHKDARVLFSCFSTNLARLGVVLRAARELNLKIYAEGKAIQNALVIARELYAEPLWGPYPALPRNKLPASGLALASGCQGEEDSQIYTLIKKGFLSRKQDALILSASPIPGNESDWRNLLDAAARAPAQSYYLPLAAVHASGHACRDGLAMTFGLI

SEQ ID NO: 87079 - protein, 257 aa, Unknown
  Obtained from environmental sample
  misc_feature (1)..(257): Xaa is any amino acid
SLVAGTYTGTLKITADTSVTGDGRDSVVIALSFVVTTPGGGGGGGGSATSVFVSPSYVIVDTAGMTANGKKFTLTAAIIGTGGVNWAKDSGSANITVDTNGVVTVAQAAAPGDLARIKATSKVSSTVIGTATVKVSGGSTAVIGSVTFTNAAVPKVGYEIKATNTLTGGGTGAVSYQWTDTRTGEVIAGSGTGATYTPKWADLNATIKVRVTKGTGKDTIFVGPWPAVTADQLLAAYLIKDSVVVPYSPANTYTIDG

SEQ ID NO: 87080 - protein, 102 aa, Unknown
  Obtained from environmental sample
  misc_feature (1)..(102): Xaa is any amino acid
GWQVAKEKASYYWMEEGITGNYYQWFTKMKMKGDLKEAFIQDYIMWMTKESEGTQKLDKELRGAFWRYMPFTQPIKEKLKTRSFVYQELYQRDVNRSMSDGY

SEQ ID NO: 87081 - protein, 267 aa, Unknown
  Obtained from environmental sample
  DOMAIN (44)...(225): Peptidase family S41
  misc_feature (1)..(267): Xaa is any amino acid
LEDDDQFENTTVFEVLREGKTITLPAMQKGEIPEPTVYLDSLDGIPYIRVYSYKKSSNNPNGTYAEFRNALQEIKGAKAAIMDLRGNPGGNIGHCTAMAAELVPLDRELVYDVEHYRDNKKGKNVVETSHEYARDYLKQAGIGINTKWVIMMSRGSASCSERFTAAVKYNRPETVVIGQTSYGKGVGQIYTRTYMGGLAYITCLQTYYPNGETFHNIGIIPDIPIEIPIELQKGMPDPKNVDAYNAYIVAYDAYMATLKNEAIKAAR

SEQ ID NO: 87082 - protein, 139 aa, Unknown
  Obtained from environmental sample
  DOMAIN (1)...(105): 3'-5' exonuclease
  misc_feature (1)..(139): Xaa is any amino acid
RILSDSKREHIFHFARFDLMMLKKFLNVDVPNVFCTKIASRLARTYSDRHSLKTLAQELLGIELNKDEQCSDWAAKKLGKKQIEYAAADVLYLHDIREILAGMLGREGRTALAEACFGFLPAQAELDLAGWQDQDIFAH

SEQ ID NO: 87083 - protein, 111 aa, Unknown
  Obtained from environmental sample
  misc_feature (1)..(111): Xaa is any amino acid
MAISYAHRLGQIIGESLENALEPFLREFAVKHNLYFDKKEFRIARSGTKLTWIDINNNKHDLDFVFEKDGSQEKIGKPVAFIECAWRRYTKHSRNKAQEIQGAIIPLLKNI

SEQ ID NO: 87084 - protein, 253 aa, Unknown
  Obtained from environmental sample
  DOMAIN (26)...(210): Pyruvate ferredoxin/flavodoxin oxidoreductase
  misc_feature (1)..(253): Xaa is any amino acid
SSLDYTPITDAKPVAGLTECKFYGLGSDGTVGANKNSATIISDHTDMFAQAYFVYDSKKSGGTTTSHVRFSKKPIRMPYLVSNPTFVACHNQSFIGKFDMLSGIRTGGTFLLNTTYTPEELNNVLTPDIKKTLKDKKINFYTINAYKIAGELGLKGRINTIMQSCFFKLTEVIPFGEAVKFMKGAIDKSYGKKGAAVLEMNYAAVDAAEKHLTRFDTSALTVSVAKGCGSGCACCGGCGANKSGNKLEAYYNA

SEQ ID NO: 87085 - protein, 77 aa, Unknown
  Obtained from environmental sample
  DOMAIN (2)...(77): Response regulator receiver domain
  misc_feature (1)..(77): Xaa is any amino acid
MAKILICDDEPGLRAVIKRYAQFDGHEATEAGNGIEAIEACKKNQFDVIIIDIMMPELDGFSAVKEIRKTSDVPIIM

SEQ ID NO: 87086 - protein, 148 aa, Unknown
  Obtained from environmental sample
  misc_feature (1)..(148): Xaa is any amino acid
GRHGQRLLDIIQTDFPLAPSPYAVLGERLGIAEQEAFERVLALKKRHIIRRLGANFHSARLGFRSTLCAAKAPPDRLDAFIAEVNAQPGVTHNYLRKHEYNIWFTCIGPSRDAVRAVLDGITERTGVPILNLPATKMYKIKVDFSMNG

SEQ ID NO: 87087 - protein, 101 aa, Unknown
  Obtained from environmental sample
  misc_feature (1)..(101): Xaa is any amino acid
EGENAETAAARELKEETGYSANKIQKLGEFSPNPAIMSNRVHFFLATDLSSPVGQQLDEDEYVEVETHATEEVLRNMGKPPYIHALMGTAMALYLQQNSYH

SEQ ID NO: 87088 - protein, 79 aa, Unknown
  Obtained from environmental sample
  misc_feature (1)..(79): Xaa is any amino acid
NKRKSGNGTDDFGFAALPGGYGHSLGYFRRVGLDGYWWSTSEDVADDAYLRSIIYGYEGTRWDSYYKYNYLFSIRCVKD

SEQ ID NO: 87089 - protein, 133 aa, Unknown
  Obtained from environmental sample
  DOMAIN (2)...(95): ABC transporter
  misc_feature (1)..(133): Xaa is any amino acid
RAFVSLFGIDRFSREKVAALSNGMRQKVAFVLSVAHDPDIIIFDEPTNGLDIVAARTVVDFLLEMKRQGKSILLSTHIFSLVEKICDRVGIIIDGRLVFCDSIPRIIQKTTLEDCFFSLYDQPQVHSNLEITN

SEQ ID NO: 87090 - protein, 84 aa, Unknown
  Obtained from environmental sample
  DOMAIN (25)...(84): Alcohol dehydrogenase GroES-like domain
  misc_feature (1)..(84): Xaa is any amino acid
MMKGIILPGNSTVEFREYPIPEPGHGQVLVRTKSSTICGSDIRAIYREHVGKGPEGYQGVIAGHEPCGQIEKIGPGCKRFKAGD

SEQ ID NO: 87091 - protein, 201 aa, Unknown
  Obtained from environmental sample
  misc_feature (1)..(201): Xaa is any amino acid
KPGTGKYSGTGVPVILQAHTDMICVPVAADFGAGVAAYYSAENRLTGRSAATGEKTSLGADDGIGVAIAMAVLDDGEEIVHPPLVAIFTAEEECGLTGARDISADDILGIAPGLDFSRAAFINLDNGHFGQFSVGCAGSANVTVKVPVERTGVAPPPDAFCFELAVHGLAGGHSGLSIHEKRGNANILLCISISTLCHKDI

SEQ ID NO: 87092 - protein, 114 aa, Unknown
  Obtained from environmental sample
  DOMAIN (14)...(57): Bacterial regulatory helix-turn-helix proteins, AraC family
  misc_feature (1)..(114): Xaa is any amino acid
NGRTMLSGSIPWFEYIDSHLTEKLTLEKLTNVAHYSKFHFERIFKVFTSKSFYQYLKEKRVSYSEALLLDPKLAVIDVALKSGFGSASAFNSAFKEIRHCTPSEFRKKYQKTAY

SEQ ID NO: 87093 - protein, 265 aa, Unknown
  Obtained from environmental sample
  misc_feature (1)..(265): Xaa is any amino acid
DFARAESNRKNGIISEQEYETARTKLTTYVSSYEAAQKRIEQSKANLEQAKVDHAKTVILSPMDGIVTSRRIEAGETAVIGTMNQPGTVLLTISDMSKVETEMEVDEASIPNVKNGLDAQVRIDAYPNETFKGIVTEVGGSPLLQSGQQAAVKFKVKVQIIDPPATIKPGLSAQADIFTGTSDNALAIPFQALVVRDIVLKEGETFKPGDKKEEEGVFLVESGSVKFVPIKTGLAGDMSIEVLEGLKEGDVIASGPLRALRELKD

SEQ ID NO: 87094 - protein, 121 aa, Unknown
  Obtained from environmental sample
  misc_feature (1)..(121): Xaa is any amino acid
NEESNLVVNGARLQMSHLVSGEVTMRHIAKIAFGTNGKVPELTDSDITNQFVKPITSFSYPENGRVQFNWELLVTENNGMAILEFGLLTADGTLFARKSRENPIHKQKDISLEGQWTIILN

SEQ ID NO: 87095 - protein, 83 aa, Unknown
  Obtained from environmental sample
  misc_feature (1)..(83): Xaa is any amino acid
IIVTPISDVFTGLIVDAVTEVKNIDKKLLEPPPSVTSVGANAYITQVARTSTGVVFLLYLNQLLTDSENHQLTNFHGTKKADS

SEQ ID NO: 87096 - protein, 69 aa, Unknown
  Obtained from environmental sample
  misc_feature (1)..(69): Xaa is any amino acid
MADVNRSIANQLVTFQLGEELYGINIMDVKEIVRVQEIRSIPNAPPYVEGIFNLRSEIIPIINLHKRFH

SEQ ID NO: 87097 - protein, 57 aa, Unknown
  Obtained from environmental sample
  misc_feature (1)..(57): Xaa is any amino acid
IQPDYFCRRHEQSINDHGSWIHYMSHELVGLTQEEIDEYYCKQAPDLREAMKVIPNK

SEQ ID NO: 87098 - protein, 262 aa, Unknown
  Obtained from environmental sample
  misc_feature (1)..(262): Xaa is any amino acid
EAATQLWLDFSEPEPSSPITSHAQIIPFPVPPQKTDQALFPLDFSFAPYGAWVSFSKRLSSSERLRINNEAIALLSKPHDQLSPAELDTLRSYSGWGGLSASDERGVLYDYYTSPPIASLAWYLLNKLKPIQKNALILEPSCGTGVFFFTGPQNVFYNGVELDERTASIASVLHPDAFITPKSYEAFNLSGDNANRFDHVIGNAPFGERTLETAFMDMPEEKSLDRYFITRSLDNLKPSGTMALIVHSGILANKSNAEWRLS

SEQ ID NO: 87099 - protein, 157 aa, Unknown
  Obtained from environmental sample
  misc_feature (1)..(157): Xaa is any amino acid
EHQKNSPLFSPFTEPNMTRIIRGKEVAAEEEESKNDSRFTKGLYSPRGIGWESYTKERLESELHRCAASEEDLVFVVMKTRNGQFGEETFIKLAGEGVNFFTERDMVFEKGEQGLSFIIPSLNLDQGLVKSEQFRRRIQNSMKDASGAAPDLCIGLS

SEQ ID NO: 87100 - protein, 259 aa, Unknown
  Obtained from environmental sample
  misc_feature (1)..(259): Xaa is any amino acid
TTSPINGIYPVPPAQTITVANTGTSALTGLTVTGSSNFKITALTTTSLAAGATAKFTVQPRDSLAIGEYNPTITISGTVSGGTKTVSADVRLSFSVTAGSTYRIAVSPDVATFDSVQIPYTQPYAKTITITNIGTAPVELTEPSVTNASSNYIIGNLTPTSTVAAGKTATFTIRPKAGLAANDYNETINIVRVGTTAPMASVSASFRVKPAPGITIITQPQDKSVALGAITGSLNVEAYIAPSAPLTFKWYKPATAVTT

SEQ ID NO: 87101 - protein, 100 aa, Unknown
  Obtained from environmental sample
  misc_feature (1)..(100): Xaa is any amino acid
MQSMVTTYKTVDLCAGIGGIRRGFERTGFFSNVLSSEIDKYACKTYECLFGENPNNDLTKESFKKIIEQTTYDVLMAGFPCQPFSRAGLNEGFDDREKGS

SEQ ID NO: 87102 - protein, 259 aa, Unknown
  Obtained from environmental sample
  DOMAIN (15)...(93): Bacterial Ig-like domain (group 2)
  misc_feature (1)..(259): Xaa is any amino acid
VEGISAVCTVTVNAVVTGVTLDSSSIKMFVGDTRKLNATVSPNNAPNKQTTWSSNNNSIATVTNDGTVTAKAIGTAQITVTTVDGNKTKTCTLEVKEEKDAYVFVDLAEVIKNVTVPIDINDWSDFNSLFYGLPLVQAGWLDPDQDVTFKIISEGGVKKLQINAYALWGPGLDIRAGDSGIDFQAGDRIEVKGRIQKIRASNVVLNIIGDNTVKPNDNYWEPLQGWSSDGEFQKTFTLTQYDADTINENHSVRIRPDGV

SEQ ID NO: 87103 - protein, 242 aa, Unknown
  Obtained from environmental sample
  misc_feature (1)..(242): Xaa is any amino acid
GKTSICNIIADSLGLTKNAAVIDGSRYVPISVERGWSSKRDLIGYYNPLTRRYDKSNMGIYDALVTLNTERENSPLPFVILLDEANLSPIEYYWSNFMAATEIDKSHNKPVWIDIGTEEQIYIPETLKFIATINNDETTENLSPRLIDRAWVIKLPVTKKYENKATPVGGTAAADTILWRDLKTAFSSGNKQNESDSAKQQKETLTEIYEKFDAHRMEISPRIINVIDNYISAANGLMEKDR

SEQ ID NO: 87104 - protein, 80 aa, Unknown
  Obtained from environmental sample
  misc_feature (1)..(80): Xaa is any amino acid
MKIAYFTDTHAPELNGLANTLSRLEAYLDKRQIQHLVIAPHYEGENFNCNSEYRKVCRFKGVTSGLSPRSRLAFPSFWKI

SEQ ID NO: 87105 - protein, 218 aa, Unknown
  Obtained from environmental sample
  misc_feature (1)..(218): Xaa is any amino acid
NFYKNIKPNWHTDERGQAQLNKMIEQVKRAGRKRDYDCLIGLSGGVDSSYLAYVAADKWGLRPLILTVDVGWNLNVAIENVEKIVKGLGLDMVTEVVNWEEMKDLQRAYFMSQVPYQDIPQDHAIFAAVYNFAAKHNFKYVITGGNFSTECVREPNEWVHQNDIAQIKDIHKKFGKVPLKTFPLCGMFKYRLYYRYLKGMHIVKPLDWIPYVKADAIR

SEQ ID NO: 87106 - protein, 223 aa, Unknown
  Obtained from environmental sample
  misc_feature (1)..(223): Xaa is any amino acid
GNLEQTFGSVKAVSIKPKEGKSTGAVTIYYAGSTVLPTAQGDYAVTFDVAAATGWNAAIGLAAGTLKINEVIPGNKTPVAADYDVDNLEQTVGSVTAVIIRPKEGKSTGGVTIYYGMTTTEHGISTELPTAVGSYLVRFDVAAAEGWNAASELIAGVLRIKAEPSTDQTPVAADFNINNLTQTVGNIKAVSITPKEGKSTGAVTIYYAGSTTLPTAGGSYKVT

SEQ ID NO: 87107 - protein, 150 aa, Unknown
  Obtained from environmental sample
  misc_feature (1)..(150): Xaa is any amino acid
YESLHHDYELILINDGSKDRTLSILQEFAASDSHVKVLSFSRNFGHQCAVTAGINNCKGDFAVIIDADLQDPPEVIPDMLALMHAEKANNVYAVRKKRKGEPLLRLLAIKVFYRSLNLLSDVKIPVDTGDFRLIDRTVIDQFNKLEERNT

SEQ ID NO: 87108 - protein, 79 aa, Unknown
  Obtained from environmental sample
  misc_feature (1)..(79): Xaa is any amino acid
MDHVNILAINPGSTSTKIAVFVESKQVFLKNIKHSAEELAPFTSITDQYEFRKNIILEELKQAEIDINNIRIIVDAAVW

SEQ ID NO: 87109 - protein, 156 aa, Unknown
  Obtained from environmental sample
  misc_feature (1)..(156): Xaa is any amino acid
NQVVVSGSSNIRTLSDIKGKRFAPGAPGGTTVGETQLHLEMAGLKYPDDFSAQFVAATEAVDLIRNRQIDGTWIQAGLPTSGVSDISTAGGRLVSMDEELIKNITAKYPWYNRAVIPAGTYPGQTQDVITTSITITVVVDQSVPDDIVYQMTKVMY

SEQ ID NO: 87110 - protein, 68 aa, Unknown
  Obtained from environmental sample
  misc_feature (1)..(68): Xaa is any amino acid
MGQTIAEKILATKCGATRVSAGEIVDAFPDTVMSHTATWRSVAVMKRIGATRLYDPDRLAIVLDHISP

SEQ ID NO: 87111 - protein, 254 aa, Unknown
  Obtained from environmental sample
  DOMAIN (1)...(74): Cyclic nucleotide-binding domain
  misc_feature (1)..(254): Xaa is any amino acid
ADRFYIIQQGKVGISKEVVVAKEEGKVLGPGDFFGVISTMSGHSHIESAQALTDVMLVTVLKEQYGTLIQKSSQVAMKIIMQFSRQLRYLNETLAGITLKKTTELGSSHLFEVAHYYYRQKQYSKALYSYTHYLKYCPEGENAAAAQQRITELKAQVKEPIKEFGPGDVNRTYRKDSLFFIEGEPGDEMFIIQKGSVKITKVVGDNEVLLAVLKAGDIFGEMALLENKPRGATVVAYDECEVMMINRANFEQMI

SEQ ID NO: 87112 - protein, 75 aa, Unknown
  Obtained from environmental sample
  misc_feature (1)..(75): Xaa is any amino acid
MITANDYGLPDPRDLEAWAQAYFPELRETGAAYTPVVVPGTAANFDVHRIRADFPILNERLSSGKQLIWLDNGAT

SEQ ID NO: 87113 - protein, 243 aa, Unknown
  Obtained from environmental sample
  misc_feature (1)..(243): Xaa is any amino acid
MGADPKIGKVEDALRELLLEKEAVRRYGFTESELALAKLDIVSHMEKLVSEKDRTETRKFVRGFTSHFLYGEDMADVEWEAKAVNAMLPGIGLKDILQASRNYFAANDINVFLISPQAEAENLPTTEKIKAIFKETQAANINRRKDNSLSGDLMDKAPPAGEITSENVDSGTGAHIIVLANGAKIIFKETKNKNNEIVLYAIAKGGTTNATDKTIVSVNLLSEMIAVSGLGPYSRNELSSKLA

SEQ ID NO: 87114 - protein, 244 aa, Unknown
  Obtained from environmental sample
  misc_feature (1)..(244): Xaa is any amino acid
VQKTLDKVRPGGVVAFITSKFTLDKQNPEARKYIAQRAELLGAVRLPNNAFLKNAGTETTMDIIFLQKRDRPLDIEPDWVHLGMTDDGIPVNRYFLDNPEMILGTMGLDEHMNNKYGRNDYTACLPTEGADLGEQLKTALSYIQGEYTIDELDDLDGVDNHAIPADYSVKNFSYSLVDDTVYFRENSLMYPVDLPATTLDRIKGMIGLRDCVQELIALQLDDYGEDEIKAKQAELSDLYDGLSP

SEQ ID NO: 87115 - protein, 253 aa, Unknown
  Obtained from environmental sample
  misc_feature (1)..(253): Xaa is any amino acid
KRLIRKNGKNRRHNRRFSVASTLTTALVFVPVIFLPGPLGSLFGDIAIALVASIFAGWLYAQFCLPSLYRLFFRPMQTTRLVKQPAGLPNNTGFLQKCSACLSQGFLETKYRAILAVALRRPVKIFAAAAMASVLGALSLLLRPVVFISPDEAEEVRISAVFPPGTLLKTAGTAGAAISRLVSHLPSVKTVYGRAGAEEEDVSRRADIDYRKEELVLRCVLEKGAKPEKTMEEIRSTLERSFDPALPLSVYLP

SEQ ID NO: 87116 - protein, 275 aa, Unknown
  Obtained from environmental sample
  DOMAIN (100)...(275): MutS domain V
  misc_feature (1)..(275): Xaa is any amino acid
ERLIGYFFEVTKTHLSRVPSHFIRRQGIVGGERFSTERLAGLESDINGASEKITELERKLFLEIRGRAKECLLELAAAARRLAELDVAQSLAKAASVQGWVKPMLDESGTLEIYEARHPVVEAHLSRGEYIPNDVILNAGETGGISFALITGPNMAGKSTYLRSAALIALMAQMGSFVPAREARVGICDRIYCRVGASDNVSRGESTFLVEMNEAAYILNTSTVKSMVIMDEVGRGTGTNDGLSIAWAISEELLNLGCRTLFATHYHELSLLSHP

SEQ ID NO: 87117 - protein, 166 aa, Unknown
  Obtained from environmental sample
  DOMAIN (9)...(59): Methyltransferase domain
  misc_feature (1)..(166): Xaa is any amino acid
GHDHTNEQIDVYYDGVHFPFEDNNFDSVICNQVLEHVTIPQTTLSEIHRVLKPKGYTLLTVPFMGDEHEQPFDFYRYSSFGMTHLLETHNFEIVKSIKLNRNMALVSAHFWNTYWYKLLKTPYPMVSLLITPIVHAPITLLGYAGSLIFPRTQDFYTDLLILARKK

SEQ ID NO: 87118 - protein, 273 aa, Unknown
  Obtained from environmental sample
  misc_feature (1)..(273): Xaa is any amino acid
AQAASQPSGWDTQWNPQNRPVIWNSPRVSIPVNIPAIPGVTPPADGATPVTSITATSQYTGTVAWSPNHTTFAVNTPYTATITLTASPGFTFQGVPTNSFTVAGAASATNPANSGVVTAVFPPASPFGGGTGTSNDPYIIQNSSQFKNISLYRKSCFKLANDISLTDFNQYPYISVAPLPMFFGVLDGNGKTVSYYQEVGSVGYYGLFRENFGLIQNMNVAVRIQNSINPSNMVFVGGIAGRNVSVAGTSDIGKIVNCTVRGEISIQNDSPNP

SEQ ID NO: 87119 - protein, 66 aa, Unknown
  Obtained from environmental sample
  misc_feature (1)..(66): Xaa is any amino acid
MGLSMQEKKVLTREISKRYQKAGKKEKTEILNELVKTTGYNRKYVLHVLANWGKTVVASKHRRKNG

SEQ ID NO: 87120 - protein, 266 aa, Unknown
  Obtained from environmental sample
  misc_feature (1)..(266): Xaa is any amino acid
SRVFSGGRLCDSHRGRSWGGYEEGLCVAARSNGASVVAVVNKTDINGLTDEFRRKISASTPHIMACSCVDGSREAALAEFKKLLAEAGADGGAQKALVNDLVPAGGLAVLVVPIDSGAPKGRLILPQAQALRDLLDGGAVATVVRDTELKASLAMFSRKPDLVVCDSQAVKRVVEDTPPDVRCTTFSILFARQKGDLAEALRGAKAIANLTTEDRVLIAEACTHHAADSDIGRIKIPNMLRKHVGGDIQIDVFSGRDYPQDLERYA

SEQ ID NO: 87121 - protein, 222 aa, Unknown
  Obtained from environmental sample
  DOMAIN (28)...(189): Radical SAM superfamily
  misc_feature (1)..(222): Xaa is any amino acid
MHNGFSHFFYNQFKKNEAKIHELTYFFWECTQRCNLQCRHCGSDCAGYSEKPDMPFDDFFRAILPVKDVYEPDKITVVITGGEPLLHRDLFRCGKTLKEHGFHWGIVTNGYTYTPEIHARLLEAGMEALTISLDGFEDTHNWLRSNDKSFKNAVRALGLITAVNRLAYDVVTCVNRKNIRELPEFREFLISKNVKAWRLFTIAPIGRAANDSSMHLSGEELV

SEQ ID NO: 87122 - protein, 122 aa, Unknown
  Obtained from environmental sample
  misc_feature (1)..(122): Xaa is any amino acid
MLLTFSEVAKMIEAGESLHIAGSEALLRKLPKGNWAGGSTEYFMSRSGCKTADDVLSVLSFHDVEISIATYDEKNIHTVALDAFDNGFSIVIIPFDSAAHKIFAEKADEFEKLFLKNIVGGY

SEQ ID NO: 87123 - protein, 294 aa, Unknown
  Obtained from environmental sample
  misc_feature (1)..(294): Xaa is any amino acid
TLYSEFISDGFTLSPSFNPNNTNYTINFPEGTDSVKISRSLPSGVYSSYSIKLNSSDVDDDSVFFPVRSGRNTILIIVTADSGITNTYTLIVNVLMNAKEPDISVQPQDAEVSAGTRHSLSITATSIDGGILSYQWYSNTSDSNSDGTPIPGATEAIYSFTVDSEIWYYYVVVTNTNNEVTGIKTATVVSDVITLTVNAQTPNITVQPGTTTIGHHLEHILSVTVNVTDGGTLSYQWYSNTGNSTDGGTLIPGGIDSTYKLTIDEVGIYYYYVVLTNTNDKVNGAQTISITSDV

SEQ ID NO: 87124 - protein, 284 aa, Unknown
  Obtained from environmental sample
  misc_feature (1)..(284): Xaa is any amino acid
VSPPRGLTLSIRDSVRIHRSNDSGRVTHKLSFAEKTSGGYWISVPEVSPADSVYVIQTKEMRKRYPPVITHNTGGKGPGRDKAPFPQINARHGELFPEGLYVAVSRPEELYIVQSSRPVRVMLALSEKNAKRLSAEDKPPLPFKPAETILTLSPWFPQKTAEYETGLSAEAIGKLIEKGYTQYVLNNMGHFSLFKGYEKIKLIAGPWLYTFNSWSLSFVSSIGNGVDGVITPLENNRQNLERTLGVKGRNSENKNRKKRQSTGALHSKFFITVFAWPPLFNIKA

SEQ ID NO: 87125 - protein, 295 aa, Unknown
  Obtained from environmental sample
  misc_feature (1)..(295): Xaa is any amino acid
YLIDFNSTVKNCRTTNSGGGINIARGTAEISGTTIENVEASYGGGIYSSAKSLIINGCTIKNAKADEYGGGLYSSYTSEGTLISNTFMDLCVANKSSGAIYNSIPSNYTSNATITNSRFINCTANSSSLENHGKIITAGDFAIIKDCEFTHNAGLPNLAQNVDLATSLFGVYGGNFENCTFNNLKGNMPSGQNYLFNCWGNYPSFAPAGGSGAGTLYSNSCVLNLRNCTFNLNSGSAGLFALTNSHVANTSDRIDNLLMDGVTINNNGGQQPLIWLNGNIQSGTFRFKPNNTYNG

SEQ ID NO: 87126 - protein, 265 aa, Unknown
  Obtained from environmental sample
  misc_feature (1)..(265): Xaa is any amino acid
GFLTWNLERKKEITEVDCDIFDKDGNIEGNKKFISVNKGQVINDWLRNYYDKRDVIGYLRFVGPDFQANSGVYITSKPKESDVKESRIQTITQNNLKEMSIYISVRHCILTTWINHNDQFLYPNKKWEIDDEFQNDCLAYMLFYDKNNISSKHGINHWIPFIEWDVGAHDKFDSHFMTDFIAGKMDLIVAEPGLFYNAGAGTGGGTGRVPYKEKKALKFSKAAKNVFKAGLELWKYYHTQPKCNVNASLYDIREYFQGRNAQGKM

SEQ ID NO: 87127 - protein, 305 aa, Unknown
  Obtained from environmental sample
  misc_feature (1)..(305): Xaa is any amino acid
DQFDASAQEAFAKAFDGTRDVVAGSTPLALAFTQMDGTPLSPALTYGTDYTIDNFLYGDANVGTGKTIGGTIKLLETDATKNWTISGTNASLSLKNGSISIAAPSAALMTATYGSSKAFESGENVALDNGSAKTVSVNWKTGVTNAGTISVFYGESKTAPKAQGSYPVTVTTTGGTNVSATEAAIALGTLTIREGNPPVIDSLKPAADTSYYSGKSVRLSVFASNPEGVKGGTISYQWYSVVGSDTVKINNKTTKDLDVSEKTPGTYQYAVLVGYSNNEQSKVSVLSSNITVTVYPEPVSIKNAV

SEQ ID NO: 87128 - protein, 234 aa, Unknown
  Obtained from environmental sample
  misc_feature (1)..(234): Xaa is any amino acid
VRPPFPFRSVAKSSSSSVLSSSSSKQSSSSFTGTSGTFTDSRDDKSYKWVKIGTQTWMAQNLNYNATNSVCYNNLSSNCTTYGRLYNWATAMNLSVTCNSSTCATQVQSKHQGICPSGWHIPSDADWDALTTAVGGSSTAGGYLKATNGWSSCGNGSSYSYQCEDKFGFAALPGGDGSSYGFFDGVGYYGRWWSASEIDANFAYGRSIYYYDERVIWNSSNKFDFLFSVRCLKD

SEQ ID NO: 87129 - protein, 244 aa, Unknown
  Obtained from environmental sample
  misc_feature (1)..(244): Xaa is any amino acid
ITNGATASTPYTKDFAVEIFVPWTDWVGVPTTATAGVPLNLGGHYEPEDASKDDEMWYELVDAGTTGATLDGSLLNTTAAGTAKVRIFCPGALAPGVDFTKTFPITVTNTFVPVTNITGVPTQAPADGSYLSLDNLCTIEPGNASDKTISWSMVNAGGTGATITPYGSFMATASGTATVRATIANGTAIGTAYTQNFNIVVGSAKTVSAGSQVGTLNAGSAGAVTFPVTTVNISAGSYTATVAN

SEQ ID NO: 87130 - protein, 261 aa, Unknown
  Obtained from environmental sample
  DOMAIN (81)...(261): Acetokinase family
  misc_feature (1)..(261): Xaa is any amino acid
PNVLICPSLDTGNLLYHLYATQFPAAKKIASIFGVGFRGISVAQDWIAEDISLTVKANILRLIKQGGWQRTPTDTFFRRFRVLSINPGSTSTKIAVYEGDAELFTQEIQHTPEELAPFDGKPITAQFQFRKDTILRFLAAHNISVDNLDAVSGRGGLLHPMPHGTFHVNDRMIQDLKAGVNGEHASNLGGLIAKDLVGDSGKPAFIVDPVVVDEAEERVKITGLKEIRRKVISHALNQIATAHRYAEEQETYYEKLNLIVC

SEQ ID NO: 87131 - protein, 282 aa, Unknown
  Obtained from environmental sample
  misc_feature (1)..(282): Xaa is any amino acid
ISACRLGRLEFAGPPSDFQTTSQRRAAWGRLDANGQADISYQPNLNSERLPAKMAVEFVVSAQEDGGRWNAKRIKVDYFPRELILGYKPPDAPAVKKPFRFEVAAIDTEGLPAAPRRLNVSISQVLPQYYNSYRYGRHFRHKTEELKLKTETQASLARGRASLEFTPETAGEYQIEIAEPDSGQSISMRVQVHGLETAESSPPKGVVELTFDREAYRPGDTAAVKVRSPFPGRLWLTVETDSILHSTVLDMETAEAQVVIPVAESIKTNAVVTATVVRPLAE

SEQ ID NO: 87132 - protein, 238 aa, Unknown
  Obtained from environmental sample
  misc_feature (1)..(238): Xaa is any amino acid
YGKKKEDHHALLALGKLPEDASFDERNVYALVFTAMSNIVKPAFIYEAVTVTHKKGGLVFTASGRKILQQGWKEQRQEDEEEDKEPEETQDIPELANGDALVLSNPRVTSHERKPPKSFTEATILTAMKKHGLGTPATRDSIIESLVANEYCFRKGKNFLPAEKAFFFIDSIPGELELYRNVETTAAWESMLENQPENFFTGIKASTSDTLNNVKSRSFSVFQNTVGACPLCGGAIVK

SEQ ID NO: 87133 - protein, 173 aa, Unknown
  Obtained from environmental sample
  misc_feature (1)..(173): Xaa is any amino acid
GAILELHFTDARDGKIYRYAEIGTKTWMAENLNYAAEGSKCGVVGTGDTKGSLSDENTPICNTYGRLYDWATAINACPNGWHLPSDAEWEALMKVTDPSCSGRSCAGAGKKLKAISAISDWNDYEGKSGGGTNDFRFSALPGGSYSYSFSDVGEQARWWSASENDASYAYTWD

SEQ ID NO: 87134 - protein, 161 aa, Unknown
  Obtained from environmental sample
  DOMAIN (5)...(124): ABC transporter
  misc_feature (1)..(161): Xaa is any amino acid
FPRDSSFFSSGVSITEWLKAYSPDQDETYVRSFLGRMLFSGDEALKPVNVLSGGEKVRCMLSKMMLSGANVLILDEPTNHLDLEAITALNDGLVAFPGVILFNSHDHEFINSIATRIIEILPQGEAGGYIDRMMPFDDYLADEQVKQLRSEAYHHVQRLGI

SEQ ID NO: 87135 - protein, 279 aa, Unknown
  Obtained from environmental sample
  misc_feature (1)..(279): Xaa is any amino acid
MSKFSRDTAAPEIAYDAALVHYEAKQYRTSIDVLRKLLVDFPNHKHTLLIRRRLAQALLMDGQLDDAQKELEWLFVQYTDKKGLGVRDSNAVTTAKEIETAIAAVLYQKAEKAVKAGQFQAGAEAYIALVKRFPRLDFADKALFDAAVAYESANQNTKAAETWMRVPREYAKSPQAVQAVVRAARAYRKDDKRLESAKTYLYIVDNFPQDSAVINAIFAAAQTYDSIPGKDSLTNRRLAAQTYEIAFKRYPKHERTPGLLYNACLAYDAIKDVKEAIRA

SEQ ID NO: 87136 - protein, 287 aa, Unknown
  Obtained from environmental sample
  DOMAIN (92)...(244): SecA DEAD-like domain
  misc_feature (1)..(287): Xaa is any amino acid
ALGSTLLADARRLINDKSNPKNEEEGAKLLLRAHRGLPKNKALIKFLSEPGIKQLLHKTESFHMAEQNKLMHLIDDDLYFVIEEKLNSVDIKDKGIDLVSNNAEEAKFYVIPDIGAEIAELEKLNLTAEEKAEKKSEIYRNFAIASERIHTLNQLLKAYTMFEKDVEYVILDGKIKIVDEQTGRIMEGRRYSDGLHQALEAKENVKVEAATQTYATITLQNYFRMYRKLAGMTGTAETEAGELWNIYKLDVVTIPTNRPVIRDDREDLVYKTKREKYGAVVDEILNL

SEQ ID NO: 87137 - protein, 262 aa, Unknown
  Obtained from environmental sample
  DOMAIN (131)...(164): Tetratricopeptide repeat
  misc_feature (1)..(262): Xaa is any amino acid
VNRITKISDKNISGLLNEVFAELHKSQSEYSEYGETYYFLGVANCKLGDYYQVTNNVTMKAVEAYTDSIHYLDKAEHYLYNPMTNVYFDRGRSYTALGKIHSNSDSEKSNEYYLKAIIDFNHSLYDHPYPENVYFAVANIHRIMKDYQKAIACYTDALKTANDQYKPTKRDVFIERSNTNYEFGLVNFNSKNYKEAIQNYKDAIEDNFENGNAHYELGKTLCYLKMWKEAVHQFDLILEHSFRNIDLKIVNNSREFAVSMIE

SEQ ID NO: 87138 - protein, 74 aa, Unknown
  Obtained from environmental sample
  misc_feature (1)..(74): Xaa is any amino acid
TDDEYRTLGEIARSVNIPTVAISGINRSNLARLAGSGVAGIAVIACILDADDSELETRLLRDDVVEKILNNRGK

SEQ ID NO: 87139 - protein, 266 aa, Unknown
  Obtained from environmental sample
  DOMAIN (80)...(205): Integral membrane protein DUF6
  misc_feature (1)..(266): Xaa is any amino acid
RRATRLGWQVLGRCAGWRHDTARGGKAARKAAWIDTVGRVQAGVTENWRLANSEMETPKEQPTRRDALKAGTWAAVATYAMWGVFPIYWKQVAQINALHILCHRVLWSAVFLLIVLWLCGKVGHLVPIFRRHFWAVAACALLITANWGTYIWAVNSGQVTESSLGYYINPLLSILLGRVFFGEKMDRWTISAVALAAFGVAVAAVMMGRPLWVAVTLAVTFSVYGALKKKADLDALAGLCLETVLVAPFALAWLLLSQPQAQFSAR

SEQ ID NO: 87140 - protein, 264 aa, Unknown
  Obtained from environmental sample
  DOMAIN (118)...(264): Glycosyl hydrolase family 10
  misc_feature (1)..(264): Xaa is any amino acid
SFCGILAFTACQQEKDLQPVSVTGISLEDMDLTIFGFRQLKPVEPSNATDKRVTWSSSDPDVVSVSSDGIITALKFTDTETYTGQAVITGTTADGGFTDTCVVTVTMDAQEHINDIKPLKDSFGGFFMMGNIFDPGDVSAEEPYTINKSWLTYHYNILTPQNQMKPQYMSGRNSTTPGVYDEANIATAKSMIAAARANGIKVQGHCLLWHSQLPAWQNNLRTSADSQEQVLAYMREYVTYIVNEFKGTIYAWDVLNEVFPDGVV

SEQ ID NO: 87141 - protein, 131 aa, Unknown
  Obtained from environmental sample
  misc_feature (1)..(131): Xaa is any amino acid
KYGRLYDWQTAMKVCPYGWHLPSDVEWEVLVAEVGGEKTAGKYLKSADGWSSYKGKPGNGEDKFGFMALPGGLGRSDGYFLDIGIIGYWWSASEFNVNSAYGGGMYFDDDGVGGGSYKKGENLFSVRCLKD

SEQ ID NO: 87142 - protein, 285 aa, Unknown
  Obtained from environmental sample
  DOMAIN (23)...(86): FHA domain
  misc_feature (1)..(285): Xaa is any amino acid
KRYAIRIQDRNGFERRVSVGNSIVLGRHSQCDVVLPDEMVSRMHLKAELKGSQYWAEDLGSSHGTYKDGERIKRIQWEPGAVLVIADGAYRLMLVPEKILPSESNVHAILSTARHIASEFDLEHLLQRSLDHLLRLSCQDRGFILIEVGGKLEPAARRVLVQDPSGESYISTSAIEHVFETGEPIWVSDIENAEELRHQKSVRELRLKSIYCLPMSVKSKNIGVVYLDSRHLCPDPIDRNVFEAIVELCTVAIERARAQEERQSNRLLATVGSVAADIVHDFKNA

SEQ ID NO: 87143 - protein, 289 aa, Unknown
  Obtained from environmental sample
  misc_feature (1)..(289): Xaa is any amino acid
DPATTYRQALQSLKFVHSALWLSGHYHVGLGRFDQYMWPYAQADVEGGRLSWDEVADLTAEFFISLNKDSDLYPGIQQGDNGQSLMLGGVNRAGVTSVNRLTHIVLEVARVIRFIDPKINLRVTPDTPRDLLLKAVELTKIGLGFPQYSNDEMVIPGLTAMGYDLEDARDYSVAACWEFLIPGKGMDIVNIGAVSFPHAADCAIRKALAEGAGFRRVMELCREDISMQVGRLIESKKKIILPPAPLYSALMTDQLETRGDLSEGAKYNNLGIHGSGSSNAADALAAVRN

SEQ ID NO: 87144 - protein, 269 aa, Unknown
  Obtained from environmental sample
  misc_feature (1)..(269): Xaa is any amino acid
TITGATTVSNNANSGSVTAVFPQTAPTVSIAAITGLTAPAVGGTPVNAITENTQYSGSVSWSPAVSGTFVPGTQYTATITLTPKAGYTLQGVTANFFTVAGASSVSNNANSGIVTAVFPRTASTVSTAAITGVTAPLAGRTPVNTIDNTQYSGTVAWSPSGTFVQGTQYTATITLTPKAGYTLQGVAANFFTVAGTTTVSNTANSGVVTAVFPQTPATVSTAAIAGLTAPVAGAAPVNAINENTQYSGTVAWSPTVSGTFVQGTQYTAT

SEQ ID NO: 87145 - protein, 244 aa, Unknown
  Obtained from environmental sample
  misc_feature (1)..(244): Xaa is any amino acid
MCFTCFIFTLFFANGLFSVLRMPTFHTLVQSAGFMFTVAGILLLLKSVDNEKVNHLKLFFACLCLALVFGCRPSMGLASLLVPVVLWKYKTWKSFAFAAIPYVIVAIPLCLYNYARFGSISDFGASYNLTSLNLSALSQLNILGKIFKVFIICVRYIFSLNLYSLYFPFVKELVGGELPGMLTMESGVLYVVQDVIGLINFPIIFMLFYIFKSIFDKNKPKTFYLLSAFLIIAALIMVSVAFVA

SEQ ID NO: 87146 - protein, 274 aa, Unknown
  Obtained from environmental sample
  DOMAIN (5)...(274): tRNA synthetases class II (A)
  misc_feature (1)..(274): Xaa is any amino acid
MRTAEIRKRWLDFFESKNHHIAESVSLVSPDPSILFTIAGMVPFIPYFLGEEKAPYPRIASVQKCIRTGDIENVGRTTRHGTFFQMNGNFSFGDYFKEGAIDMAWELLTTPQDQGGYGFDGDKFWVTIWDEDKESYDTLTKKIGIDPRQVVRLPRKENFWDTGQPGPAGPCAEWHYDRGPKYGPDAVGGNVDPGGDRYLEIWNLVFDQFVRGEGVGKDYPLLGELDQTGVDTGAGLERIAFLLQGKENFYEIDEVFPVIQVVEQLTGKRYGANV

SEQ ID NO: 87147 - protein, 157 aa, Unknown
  Obtained from environmental sample
  DOMAIN (53)...(126): Oligopeptide/dipeptide transporter, C-terminal region
  misc_feature (1)..(157): Xaa is any amino acid
SSALDVSIQGQILNLLLDIRKKRNISFLFIAHDLKVACYFCDRIGVMYRGEIMEEAQAAQLYREALHPYTQLLFSSATGAQYKDESVKVKKTDNAQILESSRLRDFNLSGASCSFAARCPLVTERCLSEHPALTEIKTGHFIRCINHAAPNISPGNP

SEQ ID NO: 87148 - protein, 264 aa, Unknown
  Obtained from environmental sample
  misc_feature (1)..(264): Xaa is any amino acid
KKSAVTPRNSVWVSASAGTGKTTILVARLLRLFLSQVEPSKILCLTYTNAGAVEMKERIFARAKSWVGMESTELQAELLDLFEDDEMPAGDEIEKLEARARGLFSKLVDSPLPLKIYTIHAFCESILKRFPLEAGVSPHFNIVEGADAAAMVVDAWRKTLSDMREAKTEEARQSSEAFSMLTKRSSEKSFGQIRDFVLAERRKYSDLLERYRGIEAAADALRQRIFKGVAGVVPDLIQNPDVYLMQEISRIPEGPMRAYMSAIE

SEQ ID NO: 87149 - protein, 254 aa, Unknown
  Obtained from environmental sample
  misc_feature (1)..(254): Xaa is any amino acid
TIPAVLRARGFRLYTNDGRLIDLWQNGGSAVLGHTPPSLLREMKNTASRGLYAPFPHFTEGRFIKALSKLLPGYSFRLYAAPPPELASIFNSGAAYLWRPFINTEAPFAAEEPLLIPVLPCIHTWRDNLPTGLCAAAAKTENRLEQLPASDILSPVLLAMAARGVYDLLASPDRGKPALPRTSKALKNNKNWQRRGIYLSLKKEPSPETWSGLFRQFLEAGFLLPPIPLQPVILPGELSPGEDAKLAGLLNATA

SEQ ID NO: 87150 - protein, 116 aa, Unknown
  Obtained from environmental sample
  misc_feature (1)..(116): Xaa is any amino acid
GDLRLTLNILSILRLMQPNLLIPATTALGTIDATGRERGILAGANVVMPNLSPVEVRDKYLLYDNKICTGDEAAECVNCMRMRIRSIGYELAVSRGDFVERQCTMYNVQCTNKVNI

SEQ ID NO: 87151 - protein, 277 aa, Unknown
  Obtained from environmental sample
  DOMAIN (181)...(259): Helicase conserved C-terminal domain
  misc_feature (1)..(277): Xaa is any amino acid
DAIERLNKELGLSRDDCEHILKHKQYSPHKHVEALMKRFENITVTVNREDIFDVSFDRKVYDPFMRRYRLEGKGLQLGKELVKVGFTDNLTLGKAPALELMHRLQDICNGFEPIRDEELPDDWDTVSDDEYRARCKVYFEPLAENPKMDALTELLDEIDTSKNQTVIWCARRNAFASIAAKLDEIEVPYVTYSGAQSAKQKKYAEQCMLAGKAQVFLGNPAAGAFGLNALARCDYMVWYSLDAKVEQYVQAMHRILRGQSTRRKFAYTLCGKGTVEE

SEQ ID NO: 87152 - protein, 107 aa, Unknown
  Obtained from environmental sample
  misc_feature (1)..(107): Xaa is any amino acid
VRVINANDGISNANVRVINANDGISNANVRVINANDGISNANDGVLNANVRVINANDGVLNANDGILNANDGILNANDGVSNANVRIASLSVSVFYVNFREILMILR

SEQ ID NO: 87153 - protein, 248 aa, Unknown
  Obtained from environmental sample
  DOMAIN (4)...(198): Glutamine amidotransferases class-II
  misc_feature (1)..(248): Xaa is any amino acid
SLHRRQARPSILLNGLKRLEYRGYDSAGVSVISAAAGKIETVKSVGKIRALENKINGKGDVDDAKPSLDGTIGVSHTRWATHGEPTAANAHPHLSADGKIAVVHNGIIENYATVKKILESEGVKFVSDTDTEVIAHWISRYYEGNLCEAVLEALKSLEGAFGLAVICESEPDVLIGARRGSPLILGVGERESFLASDVSAVVEHTQKIVYLEDDDVVEITRDGFSVRNVSRRPVSREMQEVEADLEIA

SEQ ID NO: 87154 - protein, 208 aa, Unknown
  Obtained from environmental sample
  misc_feature (1)..(208): Xaa is any amino acid
YTLGGVIPATCKNPALVVRWLDWFMSEEGTVMLMYGEKEVGWTDPDPGATGADGSPARIKPIPITPGSADYGNVTWGPRFPCYRAFEIRNSVQVTDDIFAPDGSGRDRYGDVNIRQMYVPYAQKTENIIPPLYFLPEQSMDMAALRTNINIYVDESIAKFVVGDLDIDAGWTAFQNNLKNLGLQRYLDIIQTTYDKSPIGTRYGKKSL

SEQ ID NO: 87155 - protein, 234 aa, Unknown
  Obtained from environmental sample
  misc_feature (1)..(234): Xaa is any amino acid
MQFHPTSLYAPQLKKTFLISEAVRGFGGILKNHKGEEFMNGVHPLRSLAPRDIVARAILKEMQNTGKDYMYLDVTHRKAKDIKTHFPNIYAKCLECKIDITKDWIPVVPAAHYMCGGVLVDSFSRTTIKGLYACGEVAATGVHGANRLASNSLLESVVFAIRACEDICKRVESGEWRVESKEYYQLSTLNSQLRKNVSTQKLKKQVQTIMWEYCGIVRSMKGLKIGWKNGEIRC

SEQ ID NO: 87156 - protein, 282 aa, Unknown
  Obtained from environmental sample
  misc_feature (1)..(282): Xaa is any amino acid
THRGQTEAAATLYVIATSRINTAKSGSIAVTIPTVTSVTVTPASPQIKRGEGQTFTARIEGTGNPGQEVTWKVDGVGGTATTTITANGVLIISTMETLTQLLVTANSVDDPTKFGTTLVTIPAIPAAVIPTPAPDAPSSTPNAPTTTTPDGFQLTGTVLTKYVGSSLSVTIPNSVTKIGDGAFMDNANITSVNIPNSVTSIGDEAFYYCTSLISITIPNSVRSIGNYAFSSSGLTSVTIPNSVTSIGDEAFSGCGKLTRVTIANSVTTIAYNAFNIAAILRA

SEQ ID NO: 87157 - protein, 293 aa, Unknown
  Obtained from environmental sample
  DOMAIN (34)...(180): Histidine kinase-, DNA gyrase B-, and HSP90-like ATPase
  misc_feature (1)..(293): Xaa is any amino acid
ALDAYPRYVFTIASELGKQVKINIEGSENEIDKNLIESLSEVFLHMIRNSIDHGIETPEERRALGKSEAGLLTIRCVRESGNMKVTITDDGKGINIEGIRTKIVEKGLVSKEAAAALGEEELINFIFQSGFSTAETISDVSGRGVGMDAVKNNIERVKGSIAIQTKAGEGTTFTISVPLSMASLMGFPISSGNMKFIIPANFVDTVMLIDTKDIITIVNRPGIKYNGRIIKLFYLHHILKIDSEKKPDAGDSIFVAIVHAYEETVALAVTQISSIRQFILKNMPSFMEQMDVF

SEQ ID NO: 87158 - protein, 275 aa, Unknown
  Obtained from environmental sample
  DOMAIN (1)...(272): DNA topoisomerase
  misc_feature (1)..(275): Xaa is any amino acid
VDVNSKEKKIKPPKLLNITALQKEAFKRYGFKPEETLDIAQSLYETHKCLSYPRTPSRVMGDNNTELFLEKFNLLKLESSISCFSDPSLITASNKHIFNSEQLEDHHALIPLAKIPSTASEKERKIFTIVLESFFTVCMPDYVYNEKSLQFHVSKYLYISKIRETVQLGWKEAVQEQKTDSEEAEEEVPFFDHSSCSILGFKILKNFTKPNKEFAIDTLLAFMEHPKDPSDEGQKLAGLGTPATRAEIIRKLFTSQYLYEKKKNLSLHPIGVFFY

SEQ ID NO: 87159 - protein, 297 aa, Unknown
  Obtained from environmental sample
  DOMAIN (34)...(292): Protein of unknown function (DUF1625)
  misc_feature (1)..(297): Xaa is any amino acid
AHPAYGFADTSDTLADDTFGVNERAIALVRKVEFYQYEERSRTEKKDKMGGGEETITTYTYAANWVSSPISSSGFADPEYRGKNTVLDNLDTKVKSQTQYASNVTFGAYKLPSFIIRSIRGSVPVDVRTSSDELLAKLGLKIGNQVQIQGNVVYFGKASSNPQIGDVRVTLAKIMPADISIIAKVIGSTFEEYLAPGTGRTFTAVEMGTVGAESMFASAKKSNTFLTWLLRIIGIILIVTSLKMVFAILPTLFKVLPPLGKIVGAGVGLVCSIGGGAWSLAIIAIAWLFYRPLIGIP

SEQ ID NO: 87160 - protein, 282 aa, Unknown
  Obtained from environmental sample
  misc_feature (1)..(282): Xaa is any amino acid
AEASFNEYWSHYDLTSGFHPAAYYHREDKASWFSEYVRRELDSMMYGSMDYYRDGYTVHTTLNLRHQEAADKFMAEGLARANKEFSRSRGRSNVQAERTYIPIVDLLTLSFNLRGIHSTSAAQNEQRSLSRYTKTINPIVDMAALAFGLQDLKVITTEGFSNLKINTEQNVVEGALISIENQTGYITAIVGGSKYDESNQLIRATQGNIQPGSSFKPLYYSAAIDSRKLTAASLIYDIPIVFYNEDGTPYMPLNFRGEWKGSVLLYDALAQSMNVPSLKVLD

SEQ ID NO: 87161 - protein, 259 aa, Unknown
  Obtained from environmental sample
  DOMAIN (112)...(202): Histidine kinase
  misc_feature (1)..(259): Xaa is any amino acid
GIFVYIQETGNAILRDRPQLYHAREGEPGYVPANAEFPFKFRQEGRRYRIDRLPLGNGTFALYNQTDITNIAVDDKRILYTVLITVIMSLLAAAGLALTLMKEQYRQQKNTEIALLQTQINPHFLYNTLDSIQWMAKIQNNDTIAGIINRFTSLLRSIAVRTDSGDINSIKIPLAEELLIIEDYSELMSLRYMGSFEVINRIPESFLDCLIPKFTLQPLVENAIIHGITPSGKFGAITLNAAAENGFLNITVEDSGIGM

SEQ ID NO: 87162 - protein, 89 aa, Unknown
  Obtained from environmental sample
  misc_feature (1)..(89): Xaa is any amino acid
MPITKKRLEEIKAFKNTDFSDCPVLTEEQMKEFKPSHLRNMANYKPIKKTVNVRLDADVIEWLQSAGRGYQTRMNSILREAMLHSGALN

SEQ ID NO: 87163 - protein, 207 aa, Unknown
  Obtained from environmental sample
  DOMAIN (33)...(207): Cytidylyltransferase family
  misc_feature (1)..(207): Xaa is any amino acid
MDKVRSMVLQTSPNFTSPFAGIGKDLNELKTEIVRKSIHFLIALSPLMAAINRPATVLFLMAGTLGYTLMEYLRLNGVKVPVISSLTSMSSRSRDIGHFVMGPVTLGFGALLALLLYPSPVASIAIYALAFGDGFASLVGKFFGKWRPAVLCGKSVEGSLACFTAVFISAFAVSHNVNIAFIAAFTATIVEALPLKDFDNMAIPVTV

SEQ ID NO: 87164 - protein, 103 aa, Unknown
  Obtained from environmental sample
  misc_feature (1)..(103): Xaa is any amino acid
NRPWKPCASRIHTDEFSPAMKEVLWSTSVQHGPSGAAKIFIRAAEVADASPAKEKDLIRNVYASRAKQFKSSTEAVRVAVQQRLRQEQHLALAMTERGSRGRA

SEQ ID NO: 87165 - protein, 73 aa, Unknown
  Obtained from environmental sample
  misc_feature (1)..(73): Xaa is any amino acid
FGNKLCYRGCISTAGPLVTGTPTEVRENVRGTLKIMMQGGGYHFATSHQIQDNTPVENVVAMYQAAHDFGIYS

SEQ ID NO: 87166 - protein, 246 aa, Unknown
  Obtained from environmental sample
  DOMAIN (1)...(146): Protein of unknown function (DUF1625)
  misc_feature (1)..(246): Xaa is any amino acid
VHVNGNIVYLGKSPSSPQIGDIRITLAKIPPAEISIIATVVGNSFDKYLAPNGRTFEAVAMGTVSAENMFETAKKTNSMFTWLLRIIGILLVVAAFKLIFKIFPTLFKVLPPLATIVGAGVGLVCSVGGFVWSLVVISLAWLFYRPLVGIPLLAAAVVGIVFLVKKGKEKKASAPAGAGGTAASNAAASSDGWKCACGTVNKGKFCADCGKPKPAGVPQYKCDKCGWEPKDMSKLPKFCPDCGDPL

SEQ ID NO: 87167 - protein, 245 aa, Unknown
  Obtained from environmental sample
  misc_feature (1)..(245): Xaa is any amino acid
NCNWAPIEYRLGCSDLETTIKFRSKRAIVRCYWRHPGIDRCGDTAADVRRFEEWRSGTIQAIRDGKTTPCDGCENLKQGWRLVDPKLTSLQVSESDQYSFCNFDCCYCFTKARNRGLDPAKLPEMDEQLDVLRYVSENISGRDLDLQFSTGEIMVHPNRDKIIELLRGYRTLLFTNAAIYSEQLAALMEQGLLTIMTSIDCGTPETFRRIKSVDCFESVCANLARYAATGGCLVLKYIMLPGIND

SEQ ID NO: 87168 - protein, 185 aa, Unknown
  Obtained from environmental sample
  misc_feature (1)..(185): Xaa is any amino acid
GLKAACAAVIEAAGIIRRHPRAGLKNIPALIHSLWLIKTEPLLPDDCGATCLFAVTCGEKMILGRLGDGMILAVGKGQPVLLEDDKEFANLTDCLDDALYYDKWEIKEINARDYEAVIVCTDGIADFLRPDRKIDFAFGLVKEYKNTERKKRHNEITKCISEWNVPGNFDDRTIACLYREDFQNE

SEQ ID NO: 87169 - protein, 274 aa, Unknown
  Obtained from environmental sample
  misc_feature (1)..(274): Xaa is any amino acid
DQGVVWEDGVCVGIDTDEPMVMDEGKQYAVRIRRSDGTVILKDVVFSLGKRRERSITYRPGEPYEPLIGELRAVDEDNVYYEPGNILFFIEPFEEAEAPKAGDIYAFGVRGYEAIDLIITDIAPGQNLTAVLTCVEYSPEIFGVDQSDFVLPDFVNKITPVSGAVDSGVVNPDRWRSFATYNDSEDEPVRPSGDGQGSGWHHVQTFRSIWQSTKVAESVETGEWGLPVRIRAERGADDVTPIWLSLLPQNITLETDGNGNLLAGLLPLTVQARL

SEQ ID NO: 87170 - protein, 131 aa, Unknown
  Obtained from environmental sample
  misc_feature (1)..(131): Xaa is any amino acid
VHEFVGKTKAEAEMFNDDNDMRRRLTEICLLKRRFVLNPIIDWTDYDVWEFLNMRNVPVNPLYEKGYKRIGCIGCPMSANAKKQLEEYPKYKSAYKRAARLYWQHRKEIADYPLDGAMETPEKYFQWWLKG

SEQ ID NO: 87171 - protein, 52 aa, Unknown
  Obtained from environmental sample
  misc_feature (1)..(52): Xaa is any amino acid
MLERAKPFIKWVGGKSQLLEQFERYYPDELKKGTIKNYVEPFLGGGACIFHN

SEQ ID NO: 87172 - protein, 115 aa, Unknown
  Obtained from environmental sample
  misc_feature (1)..(115): Xaa is any amino acid
IICHFPSLFHVLQNGGMFLVDELEQSLHPDLTGRIINRFMDKDKNPNNAQLVFTTHNPWFLQDLTKTQIFITEKNVKAETEITRLDEIGGVRNDENYFMKYISGEYDGRPRIREA

SEQ ID NO: 87173 - protein, 142 aa, Unknown
  Obtained from environmental sample
  misc_feature (1)..(142): Xaa is any amino acid
AGNYISRALGAQNSDDAGKMAATGLFSAFAAGCLVMAAGLVFMDPLARLLGATDTILPFARSYLRFILIGAPFMISSLMLNNILRFQGSAMWAMVGMISGAVLNIGLDPLFIYVLGMGVAGASLATMISQAVSCTLLLVVSC

SEQ ID NO: 87174 - protein, 102 aa, Unknown
  Obtained from environmental sample
  misc_feature (1)..(102): Xaa is any amino acid
VLIQRNGGGRVTLEIPLLGGVNTRSIDADSIAQFAAGIDCVVNIIPWNPVAGLELDGKPLREPEKKETLDFLKKLENHGLKTTMRFHKGRGIMGACGQLGAL

SEQ ID NO: 87175 - protein, 65 aa, Unknown
  Obtained from environmental sample
  DOMAIN (18)...(58): RNA-metabolising metallo-beta-lactamase
  misc_feature (1)..(65): Xaa is any amino acid
NEGSVNELINNLIKCGAEVVYESLHGVHASGHAYEDEFKLMLTLVNPHYLVPVHGEYKMLKNCGT

SEQ ID NO: 87176 - protein, 280 aa, Unknown
  Obtained from environmental sample
  DOMAIN (128)...(213): MoeZ/MoeB domain
  misc_feature (1)..(280): Xaa is any amino acid
GALGSPLAMYLAAAGVGVLGLIDDDIVEESNLQRQIVHSVSALGRPKAESARDRILDINPYASVSAFTARLSSANALDLLSGFDVVADGSDNFPTRYLINDACVLLGKPLVFGAVYRFEGHAAVFDARQGGCLRCLFPHPPDPRFAASCGEGGVLGALPGIVGSIQANEVIKLIVGGGRPLIDRFVRLDSWDMRLHEFALKKNPSCPVCGEAPSITSLMDYEAFCGLQRREESCRAPAISARALKARMDRGERFAIIDIRLPHELAMGCLPGAASVPLAK

SEQ ID NO: 87177 - protein, 273 aa, Unknown
  Obtained from environmental sample
  DOMAIN (50)...(73): 4Fe-4S binding domain
  misc_feature (1)..(273): Xaa is any amino acid
VLPRNATGQRLTSYVSWISGATAAGGGEGRKEVHFVFLDNGRTDLAKDPLFSQVLRCVRCGACANVCPVYRLVGGHKMGYIYIGAIGIILSYFFFGHDKARVLAQNCVGCEACSDICAGGIELPRLIREIRARLNDEKGAPKEAGLIASVMKNRTLFHTLLKFAKFAQRPLTGGTPFIRHLPQMFAGAHNFKALPALADRSFREKWGEIRHNVSEPRRRVALFAGCAQDFVYPEQLEAAVTLLAAHNVDVDFPLDQTCCGLPLETWVSARWRR

SEQ ID NO: 87178 - protein, 231 aa, Unknown
  Obtained from environmental sample
  misc_feature (1)..(231): Xaa is any amino acid
RQGAYFEGVSKTAPSCARVVYEYYGGDAKLGRFAEMIHYVDKVDSGNLFADEIMDPKGWILLGFVMDPRTGLGRFRNFTISNYDLMTSLAKACSEKDIHEILEMPDVKERLELYFQQRDLFIEMVKSHATVIGNIIKVDLRDVETIYAGNRFIIYTLYPQQNISVWIVDGRNKSNVAITVGHSILNRTSTTDVGSMLLHYGGGGHKQVGTCQVTYDDADKIIAEITEKARQ

SEQ ID NO: 87179 - protein, 130 aa, Unknown
  Obtained from environmental sample
  misc_feature (1)..(130): Xaa is any amino acid
YLTIPGFFNAYKNTIFYTVVGTFISLSVLLLFAYPLSKPYLTGRKIIFGMIIFSMFFNGGLVPNFLLISTLRLKNTIWAILIPFAISQFNLIIMINFMRALPVEIEEAAMIDGMRYFGILTRIVVPLAKP

SEQ ID NO: 87180 - protein, 122 aa, Unknown
  Obtained from environmental sample
  misc_feature (1)..(122): Xaa is any amino acid
AGHPPPLHISTDSPDKPVQVSPQGLALGMRPAYAQRWQVHEGVMQPGDWLVMYSDGITEAMDNSGELFGTDRLAGQLTRFWGTGSPRAACEAIFGQVAAFETQNRDDRTLFILARSRDGQQQ

SEQ ID NO: 87181 - protein, 196 aa, Unknown
  Obtained from environmental sample
  DOMAIN (1)...(191): Binding-protein-dependent transport system inner membrane component
  misc_feature (1)..(196): Xaa is any amino acid
NGRWYAAALTGLTQVGIAIPIFWVGIIFVWIFALKLRILPSGGWPVEGWKNIGAVIRALVLPASTIVFMMSFTLSRYIRASVLNVLDSGYIRTSRSLGFSQVSSFILHGIKNAYVPVIAILGIELSSTLLGAVVVENIFSLPGLGSMLTKAIAQHDYPSIQGVLLTTTFLVLVIGFIADVIQRLIDPRLRRHKGGQ

SEQ ID NO: 87182 - protein, 124 aa, Unknown
  Obtained from environmental sample
  DOMAIN (15)...(124): Type III restriction enzyme, res subunit
  misc_feature (1)..(124): Xaa is any amino acid
METGNSDVDYKLISRYKPAGSQPAAIEALTDGILAGKKSQVLLGVTGSGKTFTMANVIKNVGRPALVIAHNKTLAAQLCNEFRQFFPENRVEYFVSYYDYYQPEAYLPATDTYMKKIWQSTTKS

SEQ ID NO: 87183 - protein, 221 aa, Unknown
  Obtained from environmental sample
  misc_feature (1)..(221): Xaa is any amino acid
MIRSAILLCANTVIRADMEREIAYANEFNRSIIDTSPVGFTVFDENANIIDCSDVTLRTLGTTREYYKEHFREFLPEYQSDGVKSIDKAADLVRRVLNGEKLVLEWNNCTTSGEIIPFEVTMVRVMYKGNRMILGYQYDLRKIRKMTESIREQGEQLKTKLEQQELISELSRGFISSGDSQTLVQEAVAKLGLYHKVSLVFVFAIDYDRKDTRLAYHWCAD

SEQ ID NO: 87184 - protein, 77 aa, Unknown
  Obtained from environmental sample
  misc_feature (1)..(77): Xaa is any amino acid
MEIPSFVNREPAAIMAEIKTQMEALLGREIQPAQFEQLVLQIIGYREVLLVERFNAGLAQLLFQFSNAPVLDYLAAL

SEQ ID NO: 87185 - protein, 278 aa, Unknown
  Obtained from environmental sample
  DOMAIN (55)...(102): Regulator of chromosome condensation (RCC1)
  misc_feature (1)..(278): Xaa is any amino acid
CRQADGSLWAWGSNDYGQLGDGSKTDRWKPIQIGKAKSWALVAAGGCHSMAIRANGSLWAWGRNNHGQLGDGSNDDRLKPVQVGAGKDWKSVAPGLFHTVAIKANGSLWAWGWNHDGQLGNGTNTDQNAPVQVGADKDWSAVAAGECHTLALKANGSLWAWGSNDSGQLGDGTTTNRWEPVQVGEEGEWMAISANGSCSIAIKADRSLWMWGADDWYLVEFDRRTCKDRNAPIQVDADTNWKSVSAGTDHTVALKADGSLWAWGSNEKGQLGDGTNAN

SEQ ID NO: 87186 - protein, 100 aa, Unknown
  Obtained from environmental sample
  misc_feature (1)..(100): Xaa is any amino acid
RVGYDEIRDQVSYFTADKALRIASAGPLLGNRLPENPAYECQVSCVDWYGNTRPIFYQGRIFPLIGRELAEGRIEAGRMDELVRLDLTAKPGVAAARPES

SEQ ID NO: 87187 - protein, 56 aa, Unknown
  Obtained from environmental sample
  misc_feature (1)..(56): Xaa is any amino acid
SRKIGKVNIDEHGVLAEQHGIVSIPTLILYNNGELAAQKTGAAPKHDIVSLFKNLL

SEQ ID NO: 87188 - protein, 69 aa, Unknown
  Obtained from environmental sample
  misc_feature (1)..(69): Xaa is any amino acid
TRKGKGYGFAEDDPGSYHGVQAFQIANGIEKPVLSRNFTQVFGNAVLETRAQDRRLVVVTAAMAERTGL

SEQ ID NO: 87189 - protein, 288 aa, Unknown
  Obtained from environmental sample
  DOMAIN (93)...(288): BadF/BadG/BcrA/BcrD ATPase family
  misc_feature (1)..(288): Xaa is any amino acid
NQTGESETLIAYGAALSINELFQDYDKNFSPEAALTSLSMYREIVTGNAEKLNQVFFASRGEREAFLERHKPLNIKHDPAALNLSDKTLRVYLGIDAGSTTTKFVLIDENENVIDSFYGPNKGEPLKIVKQALLDIHKKYSDSGINLEVIALGTTGYGELLFDKALGADFHTVETVAHTAAAQKYVPGVTFILDIGGQDMKAINISNDIVTNITVNEACSSGCGSFLETFAETLHIPVDKIAEAAFNANNPARLGSRCTVFMNSTIITEQKNGKQADDIMAGLCRSII

SEQ ID NO: 87190 - protein, 82 aa, Unknown
  Obtained from environmental sample
  misc_feature (1)..(82): Xaa is any amino acid
MNFIGRSIERSLLIYLNALKSKGDKKDKYGYISLQEASKLCDYGIEYLSFLARTGKLQAIKIRRNWMTTREAILEYTEKMKK

SEQ ID NO: 87191 - protein, 261 aa, Unknown
  Obtained from environmental sample
  misc_feature (1)..(261): Xaa is any amino acid
VYDDLELEESSTIRFFRIVQTEGSRQVERDTKHYSLQMTISVGYKVNNERAIQFRKWASQIVKDHTIQGWTMDVDRLKKGHMFTDEYFERQLQLIREIRLSERKFYQKVTDIYATAFDYDKDSKTTREFFKLVQNKLHYAAHRHTAAEIIFERANAEKEHMGLSTWEAAPDGKIIKADVSVAKNYLNSEEMNFLERIVSLYLDFAEFQAQRKIPMSMEDWAKRLDGFLDFNGNEILTDPGKISHEQAKLRAETEYEKYRVV

SEQ ID NO: 87192 - protein, 260 aa, Unknown
  Obtained from environmental sample
  DOMAIN (154)...(191): RHS Repeat
  misc_feature (1)..(260): Xaa is any amino acid
DDRRHLLIKETDGAGNAIKYAYREDGELIKKEQGPWYFEYGYEVGGRVSKVTRGKTGTNKKYTEDYGYRWQGWNEERTVTVSGAGTTAYRLDLWGRITAITNAVGDVFSRTLNGAGNALREQASSGGFYEYRYDSLGLPYQAGREGEQAVQVKYNLDGSIAEMTDRAGIVTRYAYDGRGLLVGEITALGEQRYYYDEAGRLIRQETVSRNSGPYRTDWNYNDSGRTVTVTAGGIYFETLYLNAWGEVIKQADGEGNERRT

SEQ ID NO: 87193 - protein, 215 aa, Unknown
  Obtained from environmental sample
  DOMAIN (1)...(194): D12 class N6 adenine-specific DNA methyltransferase
  misc_feature (1)..(215): Xaa is any amino acid
DEYDTTIQEKRNSLFLSVREHFNSQRFDINYNKFSENWIPRAAQFIFLNKTCFNGLFRLNLKGEFNVPYGKYKTATIFDENNILYASSVLQNAIIVQSQFTDCYKHIDQNTFVYFDPPYRPISQTSSFTSYIGSVFSDKQQIELANFYRKLDHEKGAKLMLSNSETQNDNPNDVFFERAYQGYNIYKVSASRAVNCKGNKRGKINELLIINYNTF

SEQ ID NO: 87194 - protein, 107 aa, Unknown
  Obtained from environmental sample
  misc_feature (1)..(107): Xaa is any amino acid
GGLKLFDENGRETEINIILGDDNYIIAVDVETKPVKQDIEDHIRRIEILREAKCYPANKRKILGAMAGAVFPAGAKRAAIKAGFYVLVQSGNTMKIDIPQDFVPREW

SEQ ID NO: 87195 - protein, 256 aa, Unknown
  Obtained from environmental sample
  DOMAIN (119)...(255): MatE
  misc_feature (1)..(256): Xaa is any amino acid
RPGPRTCVFFLPAFIPFALSKVLVLTLRSVERIRLAISATFISLSLNTILNYIFILGLGPIPGLGVRGAAIATTTARYTEMLILVIGCYVFRYPPAGKLKELFAFNSAYAARYLKVCLPVIFNEIVWSTGVSIQNVILGRSSTEAIAAYSLTNTVSQLTWMILIGLANGVAVLIGKKIGEGKEKEAREYAFRINRFIPLVSLGAVAILLPISRLLPHVINSEPEVMRVSTLMFIILSCAYPFKSVNLSMVLICRAG

SEQ ID NO: 87196 - protein, 77 aa, Unknown
  Obtained from environmental sample
  misc_feature (1)..(77): Xaa is any amino acid
KPVPVKSYAPNKWGLYDMHGNVRELTQDSYSGSESVLIRGGSWFSNDSELRAAARYIVKNDESSSTDGFRLARSALR

SEQ ID NO: 87197 - protein, 121 aa, Unknown
  Obtained from environmental sample
  misc_feature (1)..(121): Xaa is any amino acid
VKETKDLQEMKKLFPYIREYQKLASKYNINDIFQDNGGKILQMLLVTGLQALPGREGNDAIDESGQEYELKSVNTLLTQSFSTHHHMNPTIIAKYRLVPWIFAAYEGIELRKIYRLEPSDM

SEQ ID NO: 87198 - protein, 258 aa, Unknown
  Obtained from environmental sample
  misc_feature (1)..(258): Xaa is any amino acid
NNNCNKYGKLYDWNTAISVCPAGWHLPSQEEWDYLVKWAGGKHMSGKKLKAKNGWNSNGTDDYGFSALPGGRRDSRFYNAGNNGYWWTATEYTSDYADYRYMDNFHYGILNDDYYNKSRGYSVRCVADNTEYESTPWRQPQSTAAVNVYQSDSGASPSSSSYSSSAYSRSDSADSRSDKPGRERKPKPRRKSSWGIGGQYVSDFGGVITWGNSDGRLTMPCYGGGIYGFADWIYFEPIFGIVVGGADWENSDAVSHDG

SEQ ID NO: 87199 - protein, 217 aa, Unknown
  Obtained from environmental sample
  DOMAIN (19)...(136): Histidine kinase-, DNA gyrase B-, and HSP90-like ATPase
  misc_feature (1)..(217): Xaa is any amino acid
KPIVFRIVPDEKLPARLLGDTLRIKQIYNNLLSNAIKYTKVGTVEWRISTERDGDSIWLVSSFMDTGVGIKPEDIDKLFIDYNNSDAARVRSRNQEGVSGLGLALTKKIAALMDGTITVESTLGKGSTFTVRIRQKYLNDDIVSVERLESLKNFKYSEKKHIDRASLQRVQLPKIRVLVVDDIDLNLEIAQGMLKPYGMTIDCLASGQEAVNVIRRG

SEQ ID NO: 87200 - protein, 72 aa, Unknown
  Obtained from environmental sample
  misc_feature (1)..(72): Xaa is any amino acid
EGSRVYPKKYFSITDKIPFLKEAGFGRFIIDLSGQTLKKSDYRDLMRSISENAPLPQSNRFNWKDGFYASKI
